United States Patent Application Publication US 2004/0031072 A1 - sequence listing, part 12

SEQ ID NO: 52182 - DNA, 2350 bp, Glycine max
  Clone ID: PAT_MRT3847_18133C.1
tggatttgttttggagggtagacctttaagggcttgttttggaaccacaaaatattgtcatgcatggctccgaaatgtgccttgcagcaatccggattgtctatatttgcatgagattggctcccaagaagatagttttaccaaagatgaaataatttcagcatacactagggctcgagaatctctagtagtatcatataatgctgaaattgatgatgatgtgacatcttttgataatcaaagactcaaggatccagaagttgtttgtcgttcttattttccaaagtcaaccagattcctgcaagcatcaaaccattctagcccttgtcttctgcagcatggtgaaccttgtactgccataaatgcaggttctgtatctgctgatgatagagttcgagatgaatctatgttacatgcatccaatatattatgtaatggtcaccctgaaaaattggtcagcagcagctcctatggtctgcttcatgatgaaagaaatgggcatatcattcaaagattagttggtgaagcagttaattctggacatgatattgctagggataaaggtgaaagtagtataatttctaatatattgtccatggactttgatacctgggatgactcactaacatcacctcataatttagcgaagttgttgggtgacaatactgataaccagaatggtcctttaaaaaaatctagttcttggaaagttcacagtaacaatcaatctagattttcttttgcaagacaggaggaatccaaattccaagctaatgtacatccatcttctggtgccaaccagcaatttccaaagaatggctcactcatccaggattttgtggatttttacttttctttggacaagctgggttttgcaaatggcatcccctccaataacctcgaggaatctggaaatcttggtagtggccattttattgcttcaaacaataaactttcagctgtttcaagagcacaaatttcagcaccaccaggattttctgttccgaacagggcaccacctcctggtttttcttcccttgagagaatggggcaggcttttgactccctctctggagacattgaatttatggatcctgctattttggcagttgttaaagggagaattcaaggtgcacaaaacagcccagtgctggatatgcgatccaattaccctgaacagttaaattactttgaaaatgaggctagagttcaattattgatgcaaagatctctctcaccacatcaaaaccttcgattttctgaaattgggaattccttttctcagcttggtgattcttatggcatttcttcaaggttagatcaatcccaagtcagtaatctaggcccattccatcagctgtctctgcagcagtctacaaatgcagtcttgtcaaatgggcaatgggatgggtggaatgaggtgcagagtggaaatggtttgggtgtggctgagcttttgagaaatgaaagacttggattcaataaattttattcaggatatgatgattcaaaatttcggatgccaaattctggggatctttacaacagaacattcgggatgtgaccttttgctagttatgttgtcattgttgttgttggaaatggtaaaacctagcagaaatggacaaacaattttttgtgctgctgaggatgatggaactgattcttgctggcgtgtattgggctacctaatgatgaagctccaagaagtgtaatttatggctacagttggtaattagcaaactaactctgttttcatgatttaattggcttatatggcattgccctgcatacacatgaaagtgttttcacctgcctgtgccagaacaattttatataaaaaaaagttttttttggttcatttttgtctggatttcgtattttccatgtcaagaatgacattggtgttttgtttttttggtaacactcatttccctctcttttcttctagttctggattagcagaagtgagctgttttgggattataagatatcaaaaatgtcagtgctgacgtgatcaaactggcaggtagatcttagttgtgtttccctcatagtacggagcatggaaacttgttgattcaaaatcaacaagatcggtctcatttattgtttgtaacttaccttttagattaactacccttgtgggtagaattataggtttgatacgactagtaaaagggaaattgttttgaagtggatatacatgcttcagtttgatactcataatatatcgctttttaacttgaaaggtccatcatccttgtgatatgaatgaaataccgttgcgctgttatagcttctggccaatttttttttcactttaaatcaatgattttatagttatatt

SEQ ID NO: 52183 - DNA, 636 bp, Glycine max
  unsure (1)..(636): unsure at all n locations
  Clone ID: PAT_MRT3847_18134C.1
tttttgggtgcccctcagttgcattggacctttgggccccttcctgacttcagtgttagcctatgtaatttggggtccaaggctggtccttggggccttgacttcttccttaaaccggcccagggaaggccaattaattgttttttaggggccaagccttccaccttccgtgtttaattaaaggggttggaaattttttaattgagaggatggtttcttatttttaaatggcctgaccaatttttcttgattagaatttgtttttaaaaaaattcctcgtgaaaaggtattattttttaatttaattttcttcaccaatttttgcctcttcattttatttaccaagtaattattgtgaaaatctaattgaccttttgatgtgtttttggttaatgtttgtgaattatgaccatataatttgaactttttcaattactagtattaaaactcatgcaatgcactagcatactgatttactgtaaactatcacgaattgtaattattatatgaatcaatttaaataaaaaataattntacactatattgntgtatttgcagtcgagactactaaccttgcttcaaaatatgtttctttgatactattgtgttgcagctatatagaataacatttttttc

SEQ ID NO: 52184 - DNA, 484 bp, Glycine max
  unsure (1)..(484): unsure at all n locations
  Clone ID: PAT_MRT3847_18135C.1
ccaacccccactggtgtttcgaattccaactgggaccctgaaaaaggcaaagctacaaccttttctggaaaaactccacaggctttttgaaaatttttttttttaaatccccctccctttttttatttggcctgttttagaaaatggggccatttttccctcccaaaaatgccctttttaaaaacttccccctttttaacacggggggattcaattttcttttttttcccctcccctctttgcgggtttttattttccagacttcttttttttttccgccnacccccttttttttcccctctttttggggaaaacacctttttttaccccccacctttgtttattttttttgcccctcacattgggttcccctcccccttttttcttttctnttcctctttttttttcctccnacgcccctttgttttttcccccctcttttttttttcccttttcccctcttttcccctttcctttttttttt

SEQ ID NO: 52185 - DNA, 514 bp, Glycine max
  Clone ID: PAT_MRT3847_18136C.1
ctttttttttttttttttttttttttttttttttttttttttttttttttttttttttttttttttttttttttttttttttttttttttttgggaaaggaaaacctttttttattagcggaccaaaatccccttaacaaaaaaaaaaagccccgaggagggggccaaggctaaaaaaccccaacggggggaacccgaacccaaaacccaaatttccctttgggaattcaggcctaaagggggggggggaaggagtttttttaaaaaggggcaaaaaaaggttgggaaaaaaaaaaaaaaaaggcggccccccccccgggggaaaataaaaaaccctgaccaaagggatggaaaatggctcttgcccaaggaaacccccttaccccacccaaaggggggggggggggaccaaaaggaccaacaacagggggtttgggcccgggcaacacccccccaaaaaaacaaggctgggccagggccaacttttgaataagggaaggcaaactaacccttt

SEQ ID NO: 52186 - DNA, 1717 bp, Glycine max
  Clone ID: PAT_MRT3847_18137C.1
ttacggctgcgagaagacgacagaaggggaattgtataatgggtatccttgttcttctttctctattgtctatagtcatctccattgttctcttcattacccacacacacaaaagaaacaacactccaagaggaccaccaggtcctccacctcttcctctcatcggcaaccttcaccaactccacaactcatccccacatctctgcctatggcaactcgccaaactccacggtcctctcatgtcgtttcgcctcggcgccgtgcaaaccgtcgtggtttcatcggccagaatcgccgaacaaatcttgaaaacccacgacctcaacttcgcttccaggcctctcttcgtgggcccgagaaagctctcttacgacgggttggacatgggcttcgcaccgtacggcccgtactggagagaaatgaagaaactctgcatcgttcacctcttcagcgcgcaacgcgttcggtcctttcgaccaattcgagagaacgaggttgcaaaaatggttcggaaactgtcggaacacgaagcttcgggtactgtcgtgaacttgaccgaaactttgatgtctttcacgaactctttgatatgcagaatcgcgttggggaaaagttacggttgtgagtacgaggaagtagttgttgatgaggtactgggaaaccggaggagcaggttgcaggttctgctcaacgaggctcaagcgttgctttcggagtttttcttttcggattattttccgcctataggaaagtgggttgatagagtgacgggaattctatcgcggcttgataaaacgttcaaggagttggacgcgtgctacgaacgatcatctatgatcacatggattcggcaaagagtggtaaaaaagataatgacaacaaagaagtcaaagatattattgatattcttctccagctacttgatgatcgttccttcacctttgatctcactctcgaccacataaaagccgtgctcatgaacatctttatagcaggaacagacccgagttccgcgacaatagtttgggcaatgaatgcactgttgaagaatcccaatgtgatgagcaaggttcaaggagaagtgagaaatctattcggtgacaaagatttcataaacgaagatgatgtcgaaagccttccttatctcaaagcagtggtgaaggagacattaagattattcccaccttcaccactacttttgccaagggtaacaatggaaacatgcaacatagaagggtacgaaattcaagccaaaactatagtgcatgttaatgcatgggccatagcaagggaccctgagaattgggaagagcctgagaaatttttccccgaaaggttccttgagagttcgatggagttaaaggggaatgatgagtttaaggtgatcccgtttggttctggaaggagaatgtgtcctgcgaagcacatgggaattatgaatgttgagctttctcttgctaatctcattcacacgtttgattgggaagtggctaaagggttcgacaaggaagaaatgttggacacgcaaatgaaaccaggaataacgatgcacaagaaaagtgatctttacctagtggcaaagaaaccgacaacgtagcacacgttggtacattcactataacacacaagaaagttgataatgacttgtgtatgcaactatgctctatgcactatgcactatgtttattgaccattaattactggttctattaaaaaa

SEQ ID NO: 52187 - DNA, 291 bp, Glycine max
  Clone ID: PAT_MRT3847_18138C.1
gtttctaccatggcatagattgaggagtttcattcgcagtgcctgctgaagcatgctcgtgggtaacatgataagattgatctacggatgtacattgatacgaagggtctacaaggagcactacaagttttgacagacaggattgcacatgacgataagcatgtgatgcttaacacacaggaattcttagatgggactcttccaggggatccttggataccaaaatttgtgaataggctgtatactgcaaggcaattgactggataagctgtcgttgtgaatgggacatgt

SEQ ID NO: 52188 - DNA, 1250 bp, Glycine max
  Clone ID: PAT_MRT3847_18139C.1
aaaaatggtccggaaactgtcggaacacgaagcttcgggtactgtcgtgaacttgaccgaaactttgatgtctttcacgaactctttgatatgcagaatcgcgttggggaaaagttacggttgtgagtacgaggaagtagttgttgatgaggtactgggaaaccggaggagcaggttgcaggttctgctcaacgaggctcaagcgttgctttcggagtttttcttttcggattattttccgcctataggaaagtgggttgatagagtgacgggaattctatcgcggcttgataaaacgttcaaggagttggtggggtgctacgaacgattcatctatgatcacatggattcggcaaagagtggtaaaaaggataatgacaacaaagaagtcaaagatattattgatattcttctccagctacttgatgatcgttccttcacctttgatctcactctcgaccacataaaagccgtgctcatggtaaattactcattcaagcattcttctctgtttctttttacataaattgtttttatgtataactgtataatgttggagtattgtcatatatacaaatgatgaagggtagctcccatcttatttgttagtttttgggttaattaattaagttaaacccaaattaacctaatatatatatctaataatatatttagattagcggtagaaattaaatcatgataaaatcaacatacaaaagtaactatttgttgcttagacttatgatgaatacgtgtaactcatcatgttaacaaacatgctataagaagttatataacctatttgaatagttagtagttgttgataataggtctattgatttaccttacctgtatttttagtaattcggctcgagattttatgttctcattccataggataagaacgatgaatcagattttatattaattaatgtattttatttgttgaattaatttttggaattgagttaaataagaagtcatattcacatataaaacttggatacaattaattcaataagtagggccaggttatttaattatatttgtgcatatacgatacgtgtgcgtatacgtatacgcgcgtgcagaacatctttatagcaggaacagacccgagttccgcgacaatagtttgggcaatgaatgcactgttgaagaatcccaatgtgatgagcaaggttcaaggagaagtgagaaatctattcggtgacaaagatttcataaacgaagatgatgtcgaaagcctt

SEQ ID NO: 52189 - DNA, 819 bp, Glycine max
  Clone ID: PAT_MRT3847_1813C.1
ggacgcgtgggaccatcatcatggccacctctgctattcagcaatcagcattcgcaggtcaaactgctctgaagcagctcaatgagttggtccgcaagaccggtggcgccggcaaaggtcgcaccaacatgcgccgtaccgtcaagagtgctcctcagagcatttggtaactcaacattatgattattagtgttattattgttatggaatgtaactataagttggtatgcatgaacaaaacaacaggtatggccctgatcgtcccaagtacctgggtccattctcagagcagattccgtcatacctgaccggagaattccccggtgactacggatgggacactgctggactatcagctgacccggaaaccttcgccaggaaccgggagctggaggtgattcacagcagatgggccatgcttggtgcacttggctgcaccttcccagagatccttgagaagaatggtgtgaaattcggcgaggccgtgtggttcaaggctggttcacagatcttctcggagggaggacttgactacttgggcaacccaaacctgatccatgctcaaagcatccttgccatctgggctgttcaggttgtgctcatgggttttgttgaaggttacagagttgggtggaggaccccttggtgaatgacttgaccctatctacccctgtggtgcatttgaccctcttgggtctggctgatgaccctgatgcattcgctgagttgaaggtcaaagaactcaagagcgatcgcttaactatgttctccatggtttttttgctttttcgagccattagtactaacagggacgccgta

SEQ ID NO: 52190 - DNA, 798 bp, Glycine max
  unsure (1)..(798): unsure at all n locations
  Clone ID: PAT_MRT3847_18140C.1
catgcatgcatgggttgaatggcaggtgaagattcccatcccggagaagcaagcaaagtgtaatacacgcagttggtattgaaaaaaacaacaagagtgaaagagaagaaaaaacaggaatgaataaaattgtataacaaagagtttgtttcttcttatgtgaaaatgcgtagaggaggtgagggagagaacatggcagtgcctcaactaacttcaagttcgagcacgagaagattgagcctgagaacaacgagaccagaccctttcttgtcactgtgcaaatgcttcagcttcgttgtcgttctctctgccattctctgcatcgccgttaacgtcctctctgctattcgctccttcaaacaccaatccgatattttcgatggcatatttcggtgttacgcggtcttcctagcgtgtttcgtggttctggctgagacggaatggaacttcatcatcaagttctggaaggttctggagtattgggttggcaggggtatgctgcagatttttgtagcagtcatgaccagggcattccctgactatagtggggagcgaaaagaacttgtaattttccagggcatagcgtgctatatgcttcttgcttgtggtcaatttatgttgtgtcgggaatcctttgcgttggnttactgaaacgttctcgccagaagcaagagatctctagagagcaagcanaaaaaggatcttcangagttggaacggcgtanagaagaactttgaacaactgcttataacagaatagggtcgaaacttttgaaaagtagtgctgaaaatgnctca

SEQ ID NO: 52191 - DNA, 715 bp, Glycine max
  unsure (1)..(715): unsure at all n locations
  Clone ID: PAT_MRT3847_18141C.1
ggttggctcgagttgtaacctaaagaaatatcaggaagctgtagacaactctagcaaaagtgtccacagattagtatacacatgaagtccaattttgctgttttcgtagtcttctctcttctcctgattgccaacttgagctgtgcaaggaaagacctgggatggtattggaagaatgtgatgaaggagcaacctatgccacaagcaattaaagaccttgttgaggattcacaagcatcagctgcagggaagaaggatcgttttatcagggacttcgatgtaaagcctaatgtcatattatatcacacccatgttgtgcccatgaagcagaagcataagcataagcagaatccttttgtcaagaatcaagattgaagtaaagcacgatatgccatggttgaacaaactatatatatcaaaaagggttgtaaccagttgagaccatgatgcatattgtcttgtttgggctagcgattgacgtttgaggctttattatttagcaggaaattaattaagctgttaattagtgtttcaaaacttgtattttattaaaagcttgagccctttagttatagatagatatagctttaattgtggttatctagttatcgttccttttgctgcatctgcttttgattggtcttgatgaaatttataacaataatcatacctgtnnnnnnnnnnnnnnnnnnnnnnnnnnnnnnnnnnnnnnnnn

SEQ ID NO: 52192 - DNA, 326 bp, Glycine max
  Clone ID: PAT_MRT3847_18142C.1
aagacacacccatcgagtgcttacttttcattgattgagcgaaagctttggaacaactgcgaccattttacatggggtggaagaaagtatcagcctgtcgccgaaggagccagggtctgagtgagcgagccatcatgtgtggaggagcaattatcctccgactttataccagtggctgccgccggcagggcgcatcacgtgaccgccgacattctgtggccgaattagtggaagcggaactagaagctgctgctggactatgatttcgaggcatggttcatagaattcgaggatgactcggaagtctccgttgtgcattattagga

SEQ ID NO: 52193 - DNA, 786 bp, Glycine max
  Clone ID: PAT_MRT3847_18143C.1
tgcaggagttgctcaagtactccaacgaggagaagaagcgcaacttcttggagaccgtcgagctccagatcggcctcaagaactacgatccccagcgtgacaagcgtttctctggcaccgtcaagcttccccgtgtccctcgccccaacatggccatctgcattctcggtgaccagcacgatatcgaccgtgccaagcacggcggtgtcgacgccatgtccgccgacgacttgaagaagctcaacaagaacaagaagctcatcaagaagcttgctcgcaagtacgatgccttcgtcgcttccgacgccctcatcaagcagatcccccgtctcttgggtcctggtctctccaaggccggcaagttccctacccccgtctcccacaacgaggacctctccgccaagatcaccgaggtcaagtccaccatcaagttccagctcaagaaggttctctgcatgggtgtcgctgtcggcaacgtcgacatgaccgatgaggagcttgttggtaacgtcatgttgtccatcaactacctcgtctccctcctcaaaaagggctggcagaacgttggctccctcaccctcaagggttccatgagccctcccaagcgtctttactatacgtgtcgctggatattgagtgaggaagccctcgggcggatacccttgtttttttggaggctgggaatggcgtagccagggtttgcaatttctcgccttcgctggttgagaaatgattaaatgaagttacgctttttttctcctagagaaagacataaacaaatcaagc

SEQ ID NO: 52194 - DNA, 775 bp, Glycine max
  unsure (1)..(775): unsure at all n locations
  Clone ID: PAT_MRT3847_18144C.1
ccacgcgtccgctgaaacgccatttttttttttatcattcttgctttctgtcatttctctctcccaaattgctttctctcatttctctctcccgaattgttatctcccccttctctgttccttctttccatttttttcattcttcccgtttttctgtattttcttacatctaaagctgtgattttttacatcaaaattgtgatttttatctcagattccatgacaacgatatcatatttgcgttcctctccaagtttgtatttctatttgaccgtgactaactattgttcttcctttgcaacacaaaagcttcaatttttttgtgttttctgtttttttgtgttataatgacttttcgtaggacaagaggttaaattttttggtgtttctgagccttctccgacgtacccaaaggttggagcttttttgctgggtttgccagttctttgcttgatttggccgaaaaatgatttatgggttgttttctctcctatctttctacgttttcttttttcatttgatttatttgaccgtggctgactattgttcttcctttacaacacaaaaacttcaattttttttgcgtcttatgtctttgttttgtgttataatgacttttcgcaggacaaaaggttaaattttttggtgttcctgagccttctccaacgtacccaaaggctaaagcttttttgctgagtttgacagttctttgcttgatttggcctaaaatggtttatgggtttgntttctctcctatctttctacgttttctttt

SEQ ID NO: 52195 - DNA, 155 bp, Glycine max
  Clone ID: PAT_MRT3847_18145C.1
tcctatatctatatttacaacattttatactactactgttcctggtgcttctagaactatttcaacatccacgtatcaatcactcacttaccataataattattaataaccatgaccccacttactttcacacttccaattccctacaacaatat

SEQ ID NO: 52196 - DNA, 272 bp, Glycine max
  Clone ID: PAT_MRT3847_18146C.1
atatgccatcaactatttcgctataaggttataatgtggttatgcaaaaaaaacaaacggggacaaaaaaaaaaaaaaaagagaaaaacctaaaaaaaaaaacaaaaggccgaccgcttctaaggttccaacccttcaatacccttgctttacccgtcctaaatcttttgcagcacaacctacatttaggccactggccttaatgcttacaacgtcctgaccggtaaatccttgccaccactttacttactcgatttgcaacgcaacccccc

SEQ ID NO: 52197 - DNA, 370 bp, Glycine max
  Clone ID: PAT_MRT3847_18147C.1
acggctgcgagaagacgacagaagggctattagagtattgaacatacttctttaaagatatttatgtttttttaattatttaaatgctttaattttaaacacttatccatgattgttatcaaattctagagtcaacttataaactcttactaatttatacgaattcatcccgtcaaaaacaaatttgctaccaagtcaacttagaaataaattcttaaactagtatactctaaagtttgacaatcactcttgatttttttttttaagacgcacgcacaagtgattttcgaccttacttatatttatatttctatttttagaacataatataaaaataaaaaagttcaccgtggatattaaataatgggat

SEQ ID NO: 52198 - DNA, 296 bp, Glycine max
  unsure (1)..(296): unsure at all n locations
  Clone ID: PAT_MRT3847_18148C.1
aaaaatnnannnaacacnacttnantnanaatccnanananannannnangncanttttgncnnnnnagnnanaatannacaccatnctananatatcaanncncgncnanacacaaacnnnnanaacnatngnncacaccnntttnagaaacnnnancncccagcnaccnantacgnagaaacnacannaacanganagnntncaacaannnaacnnaacacacaannancaacnannaaananannacncactccnnacnccannnnnaanngagtaatcgnaaaacaattaan

SEQ ID NO: 52199 - DNA, 282 bp, Glycine max
  Clone ID: PAT_MRT3847_18149C.1
ggttattgattgcttgtgagaagctgaaaaagaatcccaagggggactggaaagatattaatttttttgaccaactaaaaattattagaaatgcaagaaaatttggacattaactttggattaaaaaattggttgaagttaacaattcttcaagtattggattaaattacaaacttttgggcattggtttagttcttggaccaccgttgggggtgaaggattgctttatttattgaatggggagcattttcaagttctggcacttcattgtacaagatacct

SEQ ID NO: 52200 - DNA, 477 bp, Glycine max
  Clone ID: PAT_MRT3847_1814C.1
gagggagttctggacaccctcactttataactagacactgatatatacaacacggtcatatagacgagctatgttaatagaacatttgaagggttagatgactgctgtgtgattgtacctcctcacagaagtatgtttgataaacccatcattagccttgtataatgttaaaaaactaaattttgaaacctcagctttgtgataggttggaatcctgtctgatttctaaatattgcattgtgataggttcaacttgtagtttcttgaagtaatcaatctcttcctacctttatcgaaagttttttagctttaatttcattagatttggaagactatgaacatctgcttgatctcacttcatgctttagctacaaaactttcgttctaaacaagtcttctgcattcatgctttagcatctccaacatttgttattccactactatattatattttatatgattgaacttatgacactc

SEQ ID NO: 52201 - DNA, 153 bp, Glycine max
  Clone ID: PAT_MRT3847_18150C.1
tgcaccaccacggtacagaccctctatgtcctccacatacttatgctaactctccttctcagcacttcatcatgcatatcctcaacaggggtggcagcagcctgaggaaagaagatcacggcatcgtggacctgccacagagtcaatttgagg

SEQ ID NO: 52202 - DNA, 1883 bp, Glycine max
  Clone ID: PAT_MRT3847_18151C.1
acgaggcaacaacctgctcttacatatcctggagcttatagaaacgtaactgtggagctaaagatacaccacctggctgtaaatgctcttctcaaatacaacctagttaatgaaatggaaggaggcactctattaagatttggtcatgaacttgattctggagcattttccacaaatgatcaaaatggttttgacgagtctacctcatgtgtacaagcctttcgagtccttaaacagttgatccagcggtgcctagcagatgcagttacatccggaaatgtttatgctgattcaattttgcaacatctgtatagatggctttgcagccctaaatcaaaacttcatgatccagctctccaccagttactccacaaggtcatgcaaaaggtcttcgcattgttgttggcagagttccgcaagttaggtgctatgattgtatttgcaaactttacaaagattgttatagacaccgggaaatatgatctgtctagagccaaagcttactgtgatagtttgttaagaactatacaatcaagagatctatttgaatgggttgagcttgaaccactgcagttctggtgctcgttgctattcatggatcagtataactatggtggaataccaacaaaatctgatgaagctctaaatgatgaatctcaagtggacattatatctagctggaatattgctgaatacttgccgaaaaaaatccaagaccattttgttttcatcgtttctcagttcatgtatattccctggaattatgcaaaaaaacaagcacaaatcagggcctcattgcagaatggtgactcctgtacaccatcaattaacattggagccgcagaggcttttgaatcagaaataacggaatttacgcaaagagcagatcggctcgtacttcacacacaaactgctaggaattgttcacgatattggtcttcatatgaagggtatgaacagattagaaaacaaccagagtacatcgggccttcctccacttacgggtgatgtccatagaggggatgcttccttggaatttatcaagcatgtttgtgctgtcctggcccttgaccaaagtgtgcagcatgaagttttggtcttgagaaaaaatttgctcaaatatgttgatgttaaggagtttgctcctgaagctaagtttcatggtccttgtcattccttcatcttatccaatgtcatatgcagctattgtaatgactgcagagacttggatttgtgccgtgattcggctttgttaactgaggagtggcgttgtgcggttccacagtgtgcccagccttatgaccgtgaggtgatggagaatgctcttcttcaaactgtaagacaaagagaacggctataccacctgcaagatctggtgtgtaccaggtgccatcaggtgaaagctgcacatttggctgagcaatgtgcatgtgcaggctcatttaggtgcaaggaagatgcaagtgaatttcgtgaaaaaatgcaaattttcttgaacatagcttctcgtcagaaaattccaacttctccaagaatgtacctcttggattttagaacttagatagtttaaatttaagtgagggcctaggatcagagcaatagtatctatgtatacagtgggtccctgcaagtgtagatatgaaagtgtccaaacctacttgtgaccaacagttgatatttatgcatccctgtgcggtgtgcttgtttgacactctgctctaagcaattcttttattctatttatcgtatgcatgatgtaaattgcatgtacatgaaatgtttatcgtgatcaatgaaatatttatcctgttggcatgcaatgcaagtcactaaaaaaaaaaaaaagaaaaaaaaaaaaaataacaaaaaagtgtgcgaacaag

SEQ ID NO: 52203 - DNA, 228 bp, Glycine max
  Clone ID: PAT_MRT3847_18152C.1
ttctgagaaagaacttgtgattgttattataattctagaatagggtatagtgtaaaataaggttaaacaagtgttattgtcaaattaaatcaagcatttttcttgctagtgttagtcggtgatatatatggtgatgttattaaacatgtatgccaatacttctatttttgtttgtagatggcaacgtgtatgcgtagttaatatgaatttcttgttcactgtttgtgt

SEQ ID NO: 52204 - DNA, 303 bp, Glycine max
  unsure (1)..(303): unsure at all n locations
  Clone ID: PAT_MRT3847_18153C.1
aanttagntnagngtacgnaagctcgaanttcggatcgancncgngnatggtcntgcnnancangatggctaatnggcggannnaactttgggttttnattnggagnnnnggnnagnaaaaaatgntngtgagcnttcagcagtnnctggtgtcgccgccnggnggatcnaggnnggnntncnantntgcatnnacgtngntcnccgnaganganngcaggtanaagntgtcnggaagtcagagncnagcgnctaacaanagnntcggtatgatttngcnntcanggtnngaanacangttnn

SEQ ID NO: 52205 - DNA, 130 bp, Glycine max
  Clone ID: PAT_MRT3847_18154C.1
aggcctcctttgaccacagaagggaacggcctgcggggggccttttaatggggtcgggggataaaaccacggcaacaaccgcgcctgtgcagtggcttccaccaaacattaggtttaggatttgagccta

SEQ ID NO: 52206 - DNA, 776 bp, Glycine max
  Clone ID: PAT_MRT3847_18155C.1
ttacggttacctattgggacaatataaggttgttgaggaagaagagatggaggaagcaaagggagtagtgaagcacgtgctcctagctaagttcaaggacgacgtcactccagagcggattgaagagctcatcaaggactatgccaatctggtcaatctcatcccacccatgaagtcattccattggggcaaggatgtaagtgctgaaaacctgcatcaaggcttcactcatgtctttgaatcaacctttgagagtccagaaggcgttgcagagtatgtagctcatcctgcccatgttgaatatgcaaatttgttcctttcctgcttggagaaagtcattgtgattgactataagcctaccgttgttaagctttgattggagaagtaaagcctcgttcactgctagtgttcttataaaaataaactttgttttctgtctaagcaatttctgtatacactacgatgctcctcccccgtcatatattgagggttattctctcttgtcttgattttgacaattctaaaaaccttattgatataggactatgtactattgaatcactccaatgtttaaaaatcaagaatcagttacctataattttacctactatataagttcaaaatgatcaatctggattgttggcttacaattaggaaatttggggtacatcactgtaagtttatagacaatatagaggcatgtaaggggtgattggggtttagaaaagtgaaatttgtatataaagagtatcagtatccaatcacaaatttatgta

SEQ ID NO: 52207 - DNA, 374 bp, Glycine max
  unsure (1)..(374): unsure at all n locations
  Clone ID: PAT_MRT3847_18156C.1
tatctctacatggtttatctgaccttgtataaaagatgtgtaaagaaattggtaagaaaaataatataaaaggaataactttcttaatttcttttcttttctaattataataataatattcatttattattttaattttgttgttaattatgtttttgttttctcaactttttgcgattttcacttttagttctttcttgtcctaaatatttttaattttacacttctctttacatcatatcacccatttagagactaatnntttttntactttgtctcgttctctttttcaattccattattttagcatttccacgttgtatgaactacatgaatagaaacatgtcctgtttttaaatattcaacaaccaata

SEQ ID NO: 52208 - DNA, 233 bp, Glycine max
  Clone ID: PAT_MRT3847_18157C.1
cacgttttgcgcacaatcctgcgtaaacgcagatggacccatgttacttcctcatgatttggcttcagatgcgtacaacatcaccatcacttgagactgctcaaaagaaagagttatctccagagcagagcgggctaatataccacccttcctgcaactgatcaaaatagcttgctaggagatttaataagaggatgctctaaaggatccaagcttacataatcctgcatgcc

SEQ ID NO: 52209 - DNA, 211 bp, Glycine max
  Clone ID: PAT_MRT3847_18158C.1
ggcagcgcttgatttgaggccaggcaagccccactcaaacaccacacctctcctcgttcacgctacgcctttctgctcttcttctacctttcaaggtgttaaaagtataaagatggcagagacgattcctatttacctcagagtcggtgaactagggacacccttgacgagctctgagacgaaatctccgatgctgtcgtcgacgcttgcc

SEQ ID NO: 52210 - DNA, 482 bp, Glycine max
  Clone ID: PAT_MRT3847_18159C.1
ttttggttggaacccctcttctttttttctcttgtcttttcttttgttctcatcatcgtctcaacaccaagtgaaaggggaaaggaaacctttagcaacaccaccacacgtaggaaaagctagccaagagagaggaatcatagttccttttttgggaacaacggttcctcctttatgctaccggcaccaccttttcgattccttcataccatacccccctaggtgtttttcttcaaatggaggtggtgtgtggcagacaaagctatgtgatcaccttgatggcctccatgttataatcagtcgtaggtgtatcattgtctagattgctatttttttttaacttaaggtatatatgtatacatgcttatgtgctagctgttgaacgatttatttgattattgggtaaagccacttttattaaattaagtggatttctcatcctagtttatatataaattaaccatacccctttcttttttatg

SEQ ID NO: 52211 - DNA, 1442 bp, Glycine max
  Clone ID: PAT_MRT3847_1815C.1
cccacgcgtccgtacggctgcgagaagacgacagaaggggacaacacagaacaaaaacaaagaaaaaaaaaaacccttagccaacacaaccatcatggccacctctgctattcagcaatcagcattcactggtcaaactgctctgaagcagctcaatgagttcgtccgcaagaccggtggcgccggcaaaggtcgcactaacatgcgccgcaccgtcaagagtgctcctcagagcatttggtatggccctgaccgtcccaagtacttgggtccattctcggagcagattccatcatacctgaccggagaattccctggtgactacggatgggacactgctggattatcagctgacccggaaaccttcgccaggaaccgggagctggaggtgattcacagcagatgggcaatgcttggtgcccttggctgcaccttcccagagatccttgagaagaatggtgtcaaattcggcgaggccgtgtggttcaaggccggtgcacagatcttctcagagggaggccttgactacttgggcaacccaaacctgatccatgctcagagcatccttgctatctgggctgttcaggttgtgctcatggggtttgttgaaggttacagagttggtggaggaccacttggtgaaggacttgaccctatctaccctggtggtgcttttgaccctcttggtctggctgatgaccctgatgcattcgctgagttgaaggtcaaggaactcaagaacggtcgcttggctatgttctccatgtttggtttctttgttcaggctattgtcactggcaagggccctattcagaacctttacgaccacgttgctgatcctgttgccaacaatgcttgggcttatgccactaactttgtccctggacaatgaggatgcctacatgcaatgcaatcttctgctcccttttgcagttcccttgtgtttaactccattttcactaatgtaactacacctgtgtagcagaaaaatctgtatgagaaccattatatttttatatattagaaatttgggtccccagaaaatatcaactcttacgtttggaattcaagttaactagttcaaacgttgaaaccatgttcaaggaatctatctattagtgatgtacgtgccttgtacaccatccaattcaaagccatgattaaaaccataaacgaatgaatccatcttccattaccaacaacatccaaagcccacaaggccacaacaagagaaagagcaggcgggcattcaatgtatccatctaaatgcgtcaataatgtagtaagtcataagaaaattaaaaaacaaagaagtgatgaaggggaaggtagtaatgcaaaagctatgatttgaaaacaaaaaaaacaagtactcttagcttaccactttctttttgctcatttggaaagaatacaaatagcatacgattttagattttttt

SEQ ID NO: 52212 - DNA, 238 bp, Glycine max
  unsure (1)..(238): unsure at all n locations
  Clone ID: PAT_MRT3847_18160C.1
accctaagtagcagnntaacgcatcatacaggcagctgcatcaacctgaactaagttnnnctaagtgcagcacagggacccacagccctataacgtaagggaacaccacctcctatcaccgannaaggatgacctattactgacctggctatgatgccataattgtagcacggaaaggcctctgccactaacacgttatgatctatatgccgtcagacaccacggcctgttatattaa

SEQ ID NO: 52213 - DNA, 377 bp, Glycine max
  Clone ID: PAT_MRT3847_18161C.1
acggcgaattatagatgttctaattttattgaaggtagctcaggatgttttttttatgcttatcataacaaactccatttactcactctatgaaccccaaccaaccaaccacatgtttctgatattgaaacggaaaggggaagggtttcgaaatgatatcctttacaccaccaatccctaaacgaccaccccggaaagaaaaggagaggaaaaaaaggctaaaactaccccgaaagaaataacccaggttcagggattaaagccccgggtcaacgtcatttaaaaaagttgaccgcaattggccattccaacccgcttggaggtcctggcggagccggatcccaacttatcgaagttcttgacaacgttcaatcctt

SEQ ID NO: 52214 - DNA, 934 bp, Glycine max
  Clone ID: PAT_MRT3847_18162C.1
ggatttcggtgcgccgctccattgggctaaatcctaaatcagatggtgaaagattgattgctgttattcagccgtaagcacacatgctattgacattcagttacatgcctgtctgagtgaatttggcctgatatagtagctatataagaacttgactttcaagctcgatattaatcaacttatttactgctccttcaccatggcaatgaccagattgaccaaagagcatattcaggctatgactaagttggttgctaaatcatgtgaagatgctagtcaaagtattagaagagcccagcaaaaggcaatggatgctataaagaagttgtattcaagtctccccaaagatgacataaaaagattggagaaagaagttgatgatttgacaaagaaatttatcaagagtgcggaagatatatgcaaggcaaaagagaaggaaattagtcaaggttgagatacggcatttttgttattttttggtggaggattaactgcttcgtttctcctcttaatttggtaggacctgacattttgtggtcttagcctagtgtcagtcaatcagtagtcatatatataaggattattatagtgttctggcaatcttttgaatacataaaacatgattcccccagttgagttgccacattggtgcaggctgccgtgcattgtggttgatcaacatcttgtgcttaatgtaactccgtttgttaggccaaatttgtgaatgttatgttctaatcatggagggtgtgtatagattcaagtgggggatatataaactagtcgaagctgacactcaatcaagagggctttgttggcatcaagttcattgtttcacatgtttttagacttgctattattattgcttgatgctgttcatactcagtagaatttgttaccatgagttcaaatgacatttgatgaaattttaatt

SEQ ID NO: 52215 - DNA, 444 bp, Glycine max
  Clone ID: PAT_MRT3847_18163C.1
tttcggattataccataattttctgcagactctgatggaagttgttaattttacaggcaatggatgcgataaagaagttgtattcaagtctccccaaagatgacataaaaagattggagaaagaagtatctaacacatgctaattgcagctgataagataactgtaatccatagcttagggtgtctgatttctgatattttcttcttacaggttgatgatttgacaaagaaatttatcaagagtgcggaagatatatgcaaggcaaaagagaaggaaattagtcaaggttgagatacggcatttttgttattttttggtggaggattaactgcttcgtttctcctcttaatttggtaggacctgacattttgtggtcttagcctagtgtcagtcaatcagtagtcatatatataaggattattatagtgttctggcaatctttt

SEQ ID NO: 52216 - DNA, 286 bp, Glycine max
  Clone ID: PAT_MRT3847_18164C.1
gacacagagcacatcaaaagttcccaaagagggcttgctctctcttcacctgctctgttctacagcacactaccagaagacagcagaaatgaaaagcatttactttgtggctggattatttgtaatgctggtacaaggcagctggcaacgttcccttcaagacacagaggagaaatccagatcattctcagcttcccaggcagacccactcagtgatcctgatcagatgaacgaggacaagcgccattcacagggcacattcaccagtgactacagcaagtatctg

SEQ ID NO: 52217 - DNA, 3145 bp, Glycine max
  Clone ID: PAT_MRT3847_18165C.1
ctcgagccgattcggctcgagatcagagataatcaattttacaagcaaactgctttcagaatcccaagttaaagtgcagagaaacaccctgaaaatgccagcattaattttggatgaaaaagagaagatgatttccaagtttgtatccagtaatgggttggttgaagatccattggctatcgagaaagaaaggactatgatcaatccttggaccccagaagagagagaagttttcttggagaaatttgctgcctttggaaaagattttcggaaaattgcttctttttttgaccacaagacaactgctgactgtgttgaattctactacaaaaatcataagtctgattgttttgagaaaattaagaagcaagatggtgataagcttgggaagtcatattctgccaaaactgacttgattgcatcaggtaataaaaaattgcgggcaggaagctcacttttgggtggatatggtaaagtgaagacgtataggggtgaggacttcatagagaaatcaagcagttttgacattcttggggatgaaagagagactgaggagttatggttattgggatgggaaccgaatacagactggtctctcgacattgcctgattctgccatcttgctagcaaagtatcctgctgccttcagtaattatcccacatcttctgccaaattggagcaaccatcattgcagacatattccaagaataatgaacggctcctgaatggtgcacccactttgacgacaactagagacatcaatggcagcaatgctgtgattgattatcagttgtttagaagggatggtccaaaagtgcagccatttatggtagatgtcaagcactgccaagatgtattctctgagatgcagagaagaaatggattcgaagcaatctcaagtttacagcagcagagcaggggagtgatgggaatgaatggtgttggaagaccggggattcttgtggtgcaatcgtgcggtagagtgacacagatgatgcatgtgttgttgagacaggctcggtggttgaaactgataagtctggcacttaaacagatgaggaccttcatttgtatggcacaaacacataccatgatgaatcccatcctgtggaagctaggaacctgtcagctgaattaaatgaatcaaaggaaattaattggacagaagtagatcttgaagatgcaaatgtcacttctggtgcttgtcaaatcaatattgattctaaacagggctgtgatggtagtgaagttttcttgtgtggttctaacaagtctggatctgttggtgaacgagcagatataattatgtcagatagcacagaagttgaaaatgataaagcaaataaattgggaggtgcagctacagaattgatttctgctccaaatacaagggaaccatgccagagtaattccattgctgaggatagaatggtggtttctgaggtatcttctggcggtcttggaaatgaattggagaggcatagagtgtcttctaccctatgtgttgatgatagagataataagcatgaagctgattcaggtgttatagttgatatgaaaagctctgtgcatgatttaagcactatgataaattcttcaatctcatctttgggcaattcttgttcaggattgagttttagttctgaaaataagcatgtgccccttggaaatcctcgtgtctctgcattgtctatggacaaccttcatgcacttttgcaaaatacagttgctgttgatgttcaatgtgagaaaactgctagccaagatcaaatgtcctctacttgtgatattcggggaggtagagatatgcactgtcagaattccattagcaatgctgaccatcagcatattactgggaatttatcagaccacgttgatgctgttagcattctccagggatatcccttgcaagttcctgtgaagaaagaaatggacagtgatatgaattgcaccagttcagcaactgaattgccttttctgccccataagattgaacaggatgatgatcatatcaaaacattccagtcgtcagattcagataaaacatccagaaatggtgatgtgaaactgtttgggaagatactaaccaatccttcaaccacacagaaacctaatgtgggtgctaaagggagtgaagaaaatggcacccatcatcctaagttaagcagcaagtcttctaatccgaaaattactggccatcatagtgctgatggaaatttgaaaattttgaagtttgaccataatgattatgttggccttgaaaatgttcccatgaggagttatggttattgggatgggaacagaatacagactggtctctcgacattgcctgattctgccatcttgctagcaaagtatcccgcagccttcagtaattatctcacgtcttctgccaaattggagcaaccgtcattgcagacatattccaagaataatgaacggctcctgaatggtgcacccactttgacgacaactagagacatcaatggcagcaatgctgtgattgattatcagttgtttagaagggatggtccaaaagtgcaaccatttatggtagatgtcaagcactgccaagatgtattctctgagatgcagagaagaaatggattcgaagcaatctcaagtttacagcagcagagcaggggagtgatgggaatgaatggtgttggaagaccggggattcttgtgggaggatcgtgcagtggggtctcagatcctgtggctgcaatcaaaatgcattattccaattctgacaagtatggcggtcagactgggagtattgcaagagaggatgaatcatggggagggaaaggggattgactgagacaggtagtagattgtgctgtgagcggcaaacacctctttttgctgcacccctgtattatagtttttgttatttgctcaatacagtgtagggcgatttaatggttctcaagcccgtctttttggtaaaatatttaggtgcttgtaatatggcagcagctttgtatttgttgtatttgatgaaaatacagaaataatctctgaaaaaattaggaggggcgattgccattgccaattctggatcctttgctgccttcactcacctgctcattcttacagttacaaccggttgtctggataattgacaagttttgacggttc

SEQ ID NO: 52218 - DNA, 236 bp, Glycine max
  unsure (1)..(236): unsure at all n locations
  Clone ID: PAT_MRT3847_18166C.1
agagaaattaacagctccnnncgagtcataaaatagggaccatcaaactatttagggctctttgatgggtgacttggagacgcgagtgtttcaatgtctgcattcctgctgtggccattcatatgcgaaacatacaacaacacaatgatcgtaatatggtgtatgtttagaaatggtaatccaaaggaaattacccactaactaggaatcttgtagctccaaagggacattatggc

SEQ ID NO: 52219 - DNA, 334 bp, Glycine max
  Clone ID: PAT_MRT3847_18167C.1
tttagagacagaaatgatatgactaacatgacgaacgttattaattcatacacaatcctctaaatcttgaggctcaatccaactcgaagaattacgctgaacaatgagtttggaagaaccctacactttcatccttaacacagcatgacttaagcccctagtctttggcacatttgagaagccaaaattttgaaaaacccaacacattgaaattgctctacactacaaataaacggatatcatgacaagagaaactctctaatatcagccttccgatacattctctctcatttaaggaacttcatgtgaccgcgaatccaccaaaagatgcgtg

SEQ ID NO: 52220 - DNA, 765 bp, Glycine max
  Clone ID: PAT_MRT3847_18168C.1
cggatttttgggtgagaatcgagacaattaacagaacaaaaacttaacattgactcttcactttttcccatgttgtttctgtgttttttccacccatttcatctgccttttctgtcgttgcaagaatcctccaacctccctgcaaaataatcttctcacgcaattttttgagcaaaggttgaggcttgtgcttccccacgttattgttcttgtgatggggttgtcaaattggtgcgttgaagggtgattctgggatctgtcagaggaagaagcgtgtggatctcttcaacttctttggttttttttcctctgggtgtagttttttgctatggggtggagatacaaggcagggttgttcctcatacttactgtggttgtcatatgggtcacctctgctgaagtcacccaggatatttttatagattacaagcagccatttgcagtgacgtatcttggagcttctcttatggtagtttacctcccagtagcattcattaaggactggttgtataagttatttaaacactgctcttctaaaagtggaagaagtgcaaaagttggggatgatttttctgtcacgtgtacctctcctctcaagggcaatggagtgcaaaaaaccactgaagtagaattagggagcatgactcgaaaagatagtgatgcaaacctttcagtacaagaacaagtaaagccattggtggctaaatataatgatgctactgctataaaggccgagaaagaacttactacaggggaaattgctac

SEQ ID NO: 52221 - DNA, 487 bp, Glycine max
  Clone ID: PAT_MRT3847_18169C.1
ttggctgcgagaagacgacagaaggggagttcataatcaaacccttcaggaaccttgataaccttcgaaggatcaccgtcctgcactattatcaaatgataaccctcgaagaagggcctccacatccccaagaagtccaggttacgtatcgtgggaatcactatgtccacctcctccttcagaatcggcgttgctgctgctgtgcttcccgatgacgaagacatcgttccttcctcttcctcggatcgtaggttttgctgagaaagacaacgttgttgttgttcttgctgctgctgctttcgagctccgaggagcacgaggatggtgctgtgtttgttactactttgtctgcattggagtggggggcttattgtagtagttcaaactcttgggatttggcacgtgccgaaagcgcggatgtgtgagattaattaaacattaatggattggtttttaaaagaatattattcgtaaacggtataactta

SEQ ID NO: 52222 - DNA, 260 bp, Glycine max
  Clone ID: PAT_MRT3847_1816C.1
cacacctccccttcccctgccaattgctgttagttgtgttcatcaagccacgtcactgaccgaagccagtcgtgatccatcacaacactttggcactggaattcaggcaaatggcatcggcagtgcttcgtatgaacatcatcacccactactgcaagtttgcttcttttttgtcttcgatgcctcgacattcctcaatctacaaccctgtctctatgtctgcttcttcatttcataacgaaagtggtcctggtggtggt

SEQ ID NO: 52223 - DNA, 549 bp, Glycine max
  Clone ID: PAT_MRT3847_18170C.1
gaactcttatctgcaaaactagagattgaaaatgcccatgccatatcaaattcttctggactttacgctcctattttccgggatgtttccaagttttcaaggagttatgaactgatggagcgcaagctcaaagtttttatctatagagaaggagcaaaaccaatattccatcaaccaaagatgagaggaatttatgcctcagaggggtggtttatgaaattgatggaaggaaataaaaggttcattgtgaaggatccccgaaaagctcatttgttttacctaccattcagttcacaaatgctaagggttactctttctaacccaaagcaaatggagcaacaccttgagaaatatgtggagctaattgcaggaagatatcgtttctggaacagaactgatggagcagatcattttcttgttgcttgtcatgattgggcctcccgaatcacaaggcaaccaatgaaaggttgtattaggtctctttgcaattctaatgttgctaaaggcttccaaatagggaaggacactactctacctgtcacatatata

SEQ ID NO: 52224 - DNA, 304 bp, Glycine max
  Clone ID: PAT_MRT3847_18171C.1
ggacgcccaaggcaaagaccagatgtggtatgaggctgccttcggcgtctacgccaccactagtcagttcgtgctacctagtcagtgtggatagcgcatggtagccagtgaggatggacgatccagccgactgtaggtagctcttagcaactgtcgctcgagttaccctctaggttactcgatgtgcgatcacctgttgcactcacagagtgttggcagtgactcagtggaacgccatctgagcggggcatgacctatgacgcactccacgtatttgactggatcatatcgagaagtggtgaca

SEQ ID NO: 52225 - DNA, 419 bp, Glycine max
  Clone ID: PAT_MRT3847_18172C.1
gctggtattcagaatgctgcactggacaatgctcagccagtacctgttgatttttcggtatctcagaaaactcgtgttatagttataactggccctaatactggcagtaaaaccatatgtttgaagaccgtaggattggcagctatgatggcaaaatcaggtctctatgttcttgcttctgaatctgcgcaaattccttggtttgattttgtttttgctgacattggtgatgagcagtccttatcacaatctttgtctacgttctctggccacttgaaacagataagtgtagggaataatgttttgattgtgtagaatgtaaatgctgaaggcacctttcaatttcttttgtagcttttcttttatgcctagatgcatgatagggctgcgatgaaatttagtaacttacaaacatttca

SEQ ID NO: 52226 - DNA, 277 bp, Glycine max
  Clone ID: PAT_MRT3847_18173C.1
aaaaaaaaaaaaaaaaaataaaataaattaaaaaaaaaaaaaaaaattaaataataaaaagaaaaaaaaaaaaaataaaaaaaaaaaaattaaaaataaaatgggaggatcgttctaagtgttccagtgttagttacccttgaatggggcttctttttttttggatacaggtatttaaattcattgctattggcggttgttttttatattggggcctggaaaatccatggcgttgccgaactttttagctttgctagcacttgcaaatttttgtagt

SEQ ID NO: 52227 - DNA, 161 bp, Glycine max
  Clone ID: PAT_MRT3847_18174C.1
tgtactgacagggggccgccaactataactttactacatagaggcccacagaactattccatggccatatgcgaaaaatcggtccacatctaatgctagccataatagatcaatactccgctatagaaattaagcagcaaccaaagagatctccagtcttt

SEQ ID NO: 52228 - DNA, 175 bp, Glycine max
  Clone ID: PAT_MRT3847_18175C.1
ctggaacccttaaaaccgttcgcccgtttttttaattcttttatcaacccattcaattctcgtcccggaatccgacggccatcccctgggtaccatccataaaaacaaaataccatcctggattaggaaaacaaggggggggtagggataatccacaacctatcctagggccaaa

SEQ ID NO: 52229 - DNA, 240 bp, Glycine max
  Clone ID: PAT_MRT3847_18176C.1
atatctttctttctcaaaaagttttctcgacatttattattactctgcccgacaaacggggcacacaatggggggtcccttttcgcagacgatatcacgcgcaaccctacagaaaccaaagttccccaggctgcccacacaagattaaagactcaatgccggaaacaaaaaccccacccaataacagaatacttttcagcgctaccggggaactacacaaactgtcgggaacttggtaaa

SEQ ID NO: 52230 - DNA, 663 bp, Glycine max
  Clone ID: PAT_MRT3847_18177C.1
cgctctagggcgggcgtttcgggaaaaatccctaaccttggatttttgcaaaatccctaactcgtaagcttcttcctctcgctttaacccaaagcgaagcaagctcctcatcctatttgtaaatttgtggtcatggtcgcaacaacctccttgtcacattttccatgtcgtcgtataccttcgatccccaaactcgcatgatgtgtttgtgtagtgtagaggctccattggtgacatcatggactgaggataatccagtgagacatttttatggttacaggtagaaaaagggtgttcattttttgagtggcacgattcacttgtcaatagtcgtgagaagagaatcattgaagcattgatgaagaaggttgatgaattgaaggtcagggaaaaaggtttgcaaaacaagatcagtgatatgaagatgaagggaaaatttttagggattggattggttttgtcttaggtcagtgtttgcttgttggtgtttttattatgtagtaagggaatgtgatgtaatggtggcaatttgcttgttggcgtttttattatgtaatggtttaggacgaaagtaatagtggtaagttgcttgttggtgtttttagtttgcaaattgtaattattgaatggttagttaatgatagaagagtttattgctgttcg

SEQ ID NO: 52231 - DNA, 235 bp, Glycine max
  Clone ID: PAT_MRT3847_18178C.1
gaccaccacgttcatgaagaactggattaatataggtctcgtatacgcgggacacggacgtttcggaaagctccgaatgcatccttttagtcataggtacgccggaggcttgcatgacctccgttttcttttctacaagtaccatcctggtttgtttatgaaagcagtgcttcgctactttctcaaactcctttgcagattttactgttcgatgatcaatagggtcaagctgtgg

SEQ ID NO: 52232 - DNA, 458 bp, Glycine max
  Clone ID: PAT_MRT3847_18179C.1
acgaggctttcatgttcttcgtcaattataattgcaataataaataatacattcattgtctgaggactttataaagtatttgaatcacaaactttcacaaatatttaatttttaggtatcaacaatccatatacaataaagtctttcataaatgataatcgccataaatgacctacattaaaaagtcttaaaatattttttttttacataaaaaaagtcttaaagtataatttatatgtttgttgaactctagcttgcatataagtcttgtactctttttttttttaatattgtcatctggttacttggaaaattttgaactcctaaaggtggaaattaagtaaaggaaagatctttgaaactgtaagcagttgtttggagatcatttgtcgtgtctctcattgtgttcattattctacttaccgggaaagtaaagcttctgctttgtgctcattgta

SEQ ID NO: 52233 - DNA, 310 bp, Glycine max
  unsure (1)..(310): unsure at all n locations
  Clone ID: PAT_MRT3847_1817C.1
gctatngaagggggtgcgtttagaaagagtggggcacatcccaaaccgcatcgttcggaaccacatgtactagttacatcaatagcaattggaagtaacgtgagcaggatcagatcacatgcgctatcgtggatcaacgcaatgttcaaacactagaaagaggacgtgagtagatcacacattaaaaaaaaagagcttttattctatatctatgcaccttatacagctgctaggggctctagaaattaaattggccgtacacttcgatgacaatggttctgcgtgttcatattttacctgactgggagca

SEQ ID NO: 52234 - DNA, 452 bp, Glycine max
  Clone ID: PAT_MRT3847_18180C.1
agcctccattggaaaaaaaagggttccggtgttggggagcctagggttagggtttctgctagatatgggatgttccatgcattcgcgagccttatggcacgcggttggaagctgtttgcgcacggtgatgactcaggtaatgtttgcgtccccaccgtctgagattgctaggaggacctcctatggtttctcgacatcggacagttggctgccatgcacttcttcatggacgttgtgcaatccaactaggtccttgaggcccaaagctagatcgagtccggcggctacagcacactcatcggcgtctacgacggccacggcgggcccgaatgattccgctatgtctgagataacttgttccacaatctccaagaactgctgtaccagatggtgtgtgaacctgatgacactgatttgaacatgctcatacctgctgtcgtgcttgcacttga

SEQ ID NO: 52235 - DNA, 1109 bp, Glycine max
  Clone ID: PAT_MRT3847_18181C.1
cttggcacttaaaagttttttggtgcttcgaaccaccttttatttatgaaagggttaaaagtaaattgtgttcagctgagtaggctctattttcgaattctcttgattgataagttataccgtcgagcaaatattaaattagttaagtaaaatgttcataaggtgcctttgtggataggaaattggagtaaccgatatgttacaggattttatgtcatatatactcatccttattttagtagtttccgattgtgatgattgatccaacatttgtttgaatgtggttcaggctcggaaatttattgttttcacgcttcacttaaaagttttgtcgattaatgaaagggttaagagtagattgtgttcagctgagtaggctctattttcgaattctcttgattgattagttataccgtcgagcaaatattaaattagttaagtaaaatgttcataaggtgcctttgtggataggaaattggagtaaccgatatgttacaggattttatgtcatatatactcatccttattttagtagtttccgattgtgatgattgatctaacatttgtttgaatgtggttcaggctcggaagatgcaggagagtggttggaaaccacggtggtttgcaaaggataaagctagcgggtcataccgctatctaggagggtattgggaggccagacagcgaggaaactgggactcctgccctgacatctttggccaaattccttcggttcacatttctgacgaaggtcaaattacattttagttcttctaaaattttttcctcccaattttttttactgatgggtgtttctaatgactgcgatctcgctgttatgatacacccatgaaattcatgtacccaatcagatgaaaatatgagcgagtaataatgtaattctttttcttttcatactgtcggtaatatagagagctaagtgcttggatagcatcagtgttttaagatgtaccacatgccttccttggatttatatgggcgtcttggaaccctccttcgtaggagtcgtagccccatcattcttagtcagacatgaatttgggcttggatcttgcgaaatcgtattggaaagaaaaaaattttataat

SEQ ID NO: 52236 - DNA, 2267 bp, Glycine max
  Clone ID: PAT_MRT3847_18182C.1
ctaaaggacaaaagagaacaaacaaaaacattggatggcaacgacaactagaacaactttcctcaaacgacgcagcatctccgcttccgccgaatctccctccagctacaggatccgcttctctccgataatggactccaacgagtccttcccttccagcttctccaagtttaactccgccctcaccgcgggcctcttaaacccaatgtccccccctcccgacaagacccgatccagcccaaccctcttcgaaatgatggctagcgagcccgacgtccaccaccgccccaccacccacatcccaaaccccaccactaccaacgctaaccacaagccccagattcttgatcgccaggccctcatgatgcagcgtatttccgagctccttggttctcgcagccccgggaaccagttcaacgaccccctttccagcgacatcaagctcactctcagctccaaagacggtatcagtgtttccatgaacgttcatcgccaaatcctcgttgctcacagtaggttcttctctgtcaagctctccgatcgctggaccaacctgcagcagcagcgctccccggttccctacgaagttgaaatcgccgattgcgacgatgttgaggtttacattgagactttgaggttgatgtattgtaaggatcttaggaagaagctcatgagggaggatgtctccagagttctcggtatcttaaaggtttcagctgcgattgggtttgatgctggggttttgtcttgtttggagtacttggaagccgcgccgtgggcggaggatgaggaggagaaggtggcgtcgctgctgtctgagcttcgtcttgaagcagttggagctggggaggttttgaagagggtttcgactgatgttgtcagtggaaacgaagaggggagtgataactaggagggtcttcttaagcttattcgtgtggttcttgaagggaaggatgagaaagccaggcgcgagatgaaagggttagtgtcgaagatgctgcgtgagaatgcttcgcagaatgatcttcggaaggagtcgttgtacttggcgtgtgacgattgtctgcagttacttcgtcaccattttttgcaggctgcggctttggacatgcaggatgtgagtcaaattgcaagacaagcagataatttgcattggattttggatattttagttgacagacagattgccgaggatttcctcaagacatgggcatctcagtcagatttagctgaagttcattctaaagtgccggcagttcacaggtttgaggttagcagagttacggcaaggttgtttgttgggattgggaaaggacaattgttggcttctaaagatgtcaggtgtttgcttctaaaaacttggctggtgcccttttatgatgactttggttggatgaggagggcatccaaggggcttgataggcacctaattgaggatggtcttagtaacacgattctaactcttccactctcctggcaacaggatattttgcttgcttggtttaatcgtttcttgaattctggtgaagattgcccaaatattcaaagagggtttgaagtttggtggagaagggctttctggaagaggaatggagagcaagaacggacaagacagttacgaattacaactacatcagtcgagaacccttgaggatagattgttccactgtggaggaattggcagcaaattactggtttcattgacgaaatataaaagtttctgaccgttcaatgcaaactcctgggcaagactaaaaggtagtttgaatgctgtgaaagtatggttggccttcaattttccaagttcctaagatgagccaaaattttcaagttcagcaactcgtggtaggttaagttcttccattgagttcatggaaggttcaacataaggctaatttcttttatgtagagcatcgaatagctttggatgcaaggcagatgatgaagacgaggatgaatatacttaaatatctttcttgcaaattagtttatgttgattattgagtattgaatatattcaatcggttgtgttatatgggaataacttcgatggaggtttaactgtgggaatataatttgtttctttactgaggattgtgaattctttttctatttcttgcttttcaaccaaactttgatagattcgaaacctccaccattcttgggtttagtatcttgcttagataaggaaccggacttgtgggacatttggtatgtggatatttactgtgttagcttatttatgaaaccatggtcaaatggctgtt

SEQ ID NO: 52237 - DNA, 467 bp, Glycine max
  Clone ID: PAT_MRT3847_18183C.1
ctgcaggtccactccgcacaacacattaattttgattgactatgctcatcatgttgtagtgactgtttggaatgaacaagtatttatatttttaaataaataatattttttgtaagtatttgttattattgttgaaatgatttaaattttgattttcaagaacgtcttgagttgaagttatcctcccattgaaggaaggttgagaaatttggcaggtctactccagagattgaaggcttagtggctaccacaagattaagttctttgatcgcatgttccttggacactggtgatcagggacttatatcagcttttgcaaagaggtggcatatggaaacaagttgttttcatcttcttgtaagagagataactatcaccctcgatgatgtggcattatttgtttatctacccatcacaggtatccttcataacttctaggctcttcattatggatgaagtcatgccgc

SEQ ID NO: 52238 - DNA, 272 bp, Glycine max
  Clone ID: PAT_MRT3847_18184C.1
cgacgcacgcgtgcgaaccggcccaatttagcataagcccagcatgttcaccttaacagcagcagccacctcctccgtcatggggacacgcctactggaggcccactccaaaacggaacggatgcaagcccggttcgggtttggcaagaagaaagccgccgccccgaagaaagtttccagggggtcgggctctagcttctataggcccctgtggtattcgggcgccaaggtgcccgaataccagtatgtgtgccttgtctgtgactacggat

SEQ ID NO: 52239 - DNA, 572 bp, Glycine max
  Clone ID: PAT_MRT3847_18185C.1
caccagaagaaattggtggtgaaggagcaagtggatatgctatgcctacaggaaactaagaaggaaatggtggacaaaactgtgtgtcaggctttgtgcgtatgaagtaaatcatcttgtgttagagaagaaggttattggtagcggatttatttcactagaaggaacttggaaaggtgatggtgaaaaaatcactattgtaaatatatactccccttgcgatgtaaatttgaaaagaaacttgtggggtcagattaaccagctaagaagtgcaagttagaacaaattgtggtgcatagtcgatgatttcaactgtgtaaggagacaatcagaacgagtgggggctagccaaagagagcaaggaggggggatcatgacagaatttaatgactggatagtggacctagaagttgaggatatgccgagtgttggtcacaaatacacttggtataggctaaaatctggttggatagggttcttgtgtctgttgaatggttttctaaatggagtggaagtattcaattcatattggataggaactactcagaccactattcaattcatgttggata

SEQ ID NO: 52240 - DNA, 293 bp, Glycine max
  Clone ID: PAT_MRT3847_18186C.1
gccgtccttttttggatctaaaccaaatcacaaattcgggtcgcgtgggagacaccaccctatcgcaagacattaacttgacagccccagcactaccttttctcctacaagtggacgcatgctaattttctttactattagctcggggcagtataaactatttaactctatgattgacaaggcttcgggctgactaaccacaagtccacaatattgcaactcaatccaacatgcttccccctttcaccaatggaacgctatcgggtcggcctcattcatgaaaagtttcaaac

SEQ ID NO: 52241 - DNA, 412 bp, Glycine max
  Clone ID: PAT_MRT3847_18187C.1
tttttttttttttttttttttttttttttttttttttttttttttttttttgttttttttttttttttttttgggggaaaaaaaacccccccaaatttttatgggaattataaatgaagggggcaccaagatttaacccctttaaataccgggggaaaacccttagggttaaacccccaatttttatacttaaaaacaaaagggggccccattaaaaaaggcgccaacactggattgacccttaaaattcccccctggggggaaggggaaaattgtcaaacagccttttaattttttggaccaaaaattcctttggcgggttaaaaaaccctttcgaaggggcctggagaataaaatttgggaaattttcccttggggaaaaaaaaattaaacccgggaagaatatacctcc

SEQ ID NO: 52242 - DNA, 813 bp, Glycine max
  Clone ID: PAT_MRT3847_18188C.1
cgggagaaagggtgtttctttcacttcagatttggttaattagggttccgttggcgcgagctaagaacgaaggaagtagaagcagcaaaacccaatcaaagaccctcactctcaccccacacttcacgtaagtgaaaacggcaccatggacagcatagttgattctctgaataatgcctatcaagattttgttgttgcagcagcaaatgtgttggaagccaaagaaaatgctggttccattaaaacaacagcaaccgatactgctctagaaaactttaagcagaagtgggaattgtttagagtagcatgtgatcaagccgaggagtttgtggagtctgtgaagcaaaggataggatccgagtgtctggtggatgaggcaacaaggcctgtagcaggaaaacctggacaagctaccatgactggtcttcctcccatcagtgcagttcggttggaacagatgagtaaagcagttcgatggcttgtgattgaattgcagcatggctctggagctggttctgctaattcagctcttacccacccctcagctcagtttgatgccaggttttctgaagatgctgctcagtagcattaacgtgactgtgatgattaatgttatatatcttttctctaagttgatcgtgcttaggctatattgcgttagacattttgtacaagactaagtattagctttatgctaagctgttaaagaatgtaacttacgtgtattgtgcatgacacaacaatccttaattttctgttggtgataattaatgtattttatcctgcaaaaatgaaaacgtatgagttatgcct

SEQ ID NO: 52243 - DNA, 756 bp, Glycine max
  unsure (1)..(756): unsure at all n locations
  Clone ID: PAT_MRT3847_18189C.1
ccgggagagaaagggggggtttctttcacttcagatttggttaattagggttccgttggcgcgagctaagaacgaaggaagtagaagcagcaaaacccaatcaaagaccctcactctcaccccacacttcacgtaagtgaaacagcaaatgtgttggaagccaaagaaaatgctggttccattaaaacaacagcaaccgatactgctctagaaaactttaagcagaagtgggaattgtttagagtagcatgtgatcaagccgaggagtttgtggagtctgtgaagcaaaggataggatccgagtgtctggtggatgaggcaacaaggcctgtagcaggaaaacctggacaagctaccatgactggtcttcctcccatcagtgcagttcggttggaacagatgagtaaagcagttcgatggcttgtgattgaattgcagcatggctctggagctggttctgctaattcagctcttacccacccctcagctcagtttgatgccaggttttctgaagatgctgctcagtagcattaacgtgactgtgatgattaatgttatatatcttttctctaagttgatcgtgcttaggctatattgcgttagacattttgtacaagactaagtattagctttatgctaagctgttaaagaatgtaacttacgtgtattgtgcatgacacaacaatccttaatttttctgttggtgataattaatgtattttatcctgcaaaatgaanacgtatgagttatgcctc

SEQ ID NO: 52244 - DNA, 1264 bp, Glycine max
  Clone ID: PAT_MRT3847_1818C.1
ggactttgaaaagagagtcaaagagtgcttgtttgataagactgttgtgtgatgtgtctttaggcagatatgaatttgtgtgacgggtattgcatggagttttaccagcatgtatggtacaatttaaaattggagaattaattgtttatttttcaatagttctctcagcaagctgacaaaaaataagtgattatttctccataataaactgaaccagtcacgtaacctttatgtcatggcagtttctaattctatagtgtgtaatttttgttgtgtttaagagagaggctgtgttaaggcttaggcctgtgtattatgcttgctgttctacaattctggtttaatccagaatttctttcaataaaaatattcagcttttttgtgcaaactcatgtccaacattgactatatatctctttacatgatctttacttagctgcaaatttggttttcattgcagctgttgcaggtgtgcatatgtctcacaaaactgctgggttactttcaaccatatttgacattgggggagtcctaggtggaatcacagctggtttcatttctgacctaatagaagcacgggctattacttcaattctgttcttgtttctatcaattccagctcttgctttgtatcgcatttttgggagcctctccatgttgatcaacatcattttaatgtttctgtcgggatttttggtgaatggtccatactcacttatcacaactgctgtggctgctgatcttggtacacaaagcatgaatgatcggaattctcgggcgctggctactgttactgcaatcatagatggcactggttctgttggagctgcccttggtccccttttggcaggatatatttcaactaggggatggaacagtgtcttttttatgctcattctgtctattttctttgccggtttattcttgattcgtatagcaagaactgagataagagagaagctttcaggaaagtgattttaaatattatagaaacacacacgtttgaatatttagttaggccctctatcgacggtaccttttaccacacaggaattagctattgttgcagaaattgtttaaaggcttcagttaatgtttgtcatatgctcattctttattcactgattgtaaaaaataaaaaaaaataaaaagaacaaatgtataagattacgaatgttgagggttttggtaaaaaaaaaaaaaaaaaaaaaaaaaaaaaaaaaaaaaaaaaaaaaagaaaaaaaaaaaaaaaaaaaaaaaaaaa

SEQ ID NO: 52245 - DNA, 480 bp, Glycine max
  Clone ID: PAT_MRT3847_18190C.1
ggctgcgagaagacgacagaaggggggggtttgtttcacttcagatttggttaattagggttccgttggcgcgagctaagaacgaaggaagtcgaagcagtaaaacccaatcaaagaccctcactctcagcccactcttcacgtaagtgaaacagatctgtaattacaagaagcttagatttgacacaagcaggcacaatggacagcatagttgattctctgaataatgcctatcaagattttgttgctgcagcagctaatgtgttagaagccaaagaaaatgctggttccattaaaacaatggcaacagatactgctctagaaaactttaagcagaagtgggaattgtttagagtagcatgtgatcaagctgaggagtttgtggagtctgtgaagcaaaggataggatctgagtgtctggtggatgaggcaacaaggcctgtggcaggaaaacctggacaagctaccatgaccggtctt

SEQ ID NO: 52246 - DNA, 954 bp, Glycine max
  Clone ID: PAT_MRT3847_18191C.1
acaaaatcctagaggttgtgatattatggctcctacacttcaacgtgcactttctcatctgctcactcttgtagcttcactttcaatactcctaggggtaccctcctcttgtttcaaccctaaaaagattgtgaatgcttcctatgcttcatactccttatatggttcagattggtctcctgctgtagccacttggtatggaccagcccaaggggacggtagtgaaggtggtgcttgtggttatggaagtgctgttggggaaccctcgagccgaatctgctcgagggcgggaagccctcttttgtttgaatcaggcgaaggctgtggttcttgttacgagatgaagtgcactgggaattatgcatgctcaggcaattctgtaagggtagtcatcactgatagctgtcctgggtgtggttcagatgctcaatatcattttgatttgagtggcactgcttttggtgcgatggcaatttcaggccaagacgagaagctacgcaatgctggcaaaatagacattcaatttagaagagttgaatgcaactatcccggtgtatcaatatcttttcgcgtggatcctggttccaacaaggaatattttgcaatcttgattgaatatgagagtggtgatggtgacctagacaaagttgaactcaaggaagcacatgcttccgcccaatggtactccatgcagcgatcatggggtgcagtttggaaacttgacaaagggtcagcacttgtggcaccattctccatcaagctaaccactctcaaatctggcaagaccattgtggctaacaatgtgatccctgctgggtggattattgatcagacttatagatcaattgtcaatttttaatttcaataatcgaagttgtccatttgtttggatctatcatcagcttgtggttctcctacttaatataatatatgaataagaagataattaatctt

SEQ ID NO: 52247 - DNA, 1547 bp, Glycine max
  unsure (1)..(1547): unsure at all n locations
  Clone ID: PAT_MRT3847_18192C.1
gaaaacccccaaccccaacctcaaccttaacctctcctcactttcttttcaaccagaactatgattaagctttttaaagtaaaggaaaaacagagagaactggcagaaaatgcgagtggtggaccacccgttaagaagcaaagtgccggcgagttgcgtcttcacaaagatataagcgagctgaatctaccaaaatcatgtaccatgcaattccccaatggcaaagatgacctgatgaactttgaagtttcaattcgacctgatgatggatattacttgtaagttgtaaggaagtttctatgttattatctgcatacaattttcaactttgtgatccaactttaattgactcttgttgaaggcactcaagctgctatgtatttttttttcatcttatgtttgtttttatttttcaaattctaaataaaattttcaatctggtaagatctgtacccaagcctaaaaaaacttcgtaccccattgcccggaggctcttcgctatgcgaaggtatgggggagggatgttgtaagcagccttacccttacatatgcaaagaggctgtttccagattcgaacccatgaccaacaagtcaccaaggcacaactttaccgcaagatgaaaanaaaattatgaaaaagctcactagtctccactatgtatttttgttgttacagaggtggcacatttttgttttcctttcaagtgtctcccatctatccacatgaagcaccaaaggttaaatgcaagacaaaggtctatcatccaaatattgacttggaaggaaatgtttgtctcaacatcttacgagaagattggaaacctgtccttaatataaacactgtcatctatggcttgtatcatctcttcacggaaccaaattacgaggatccactgaatcatgatgctgctgctgtgttgagagagaaccctaagatgtttgaatctaatgtgaggagggcaatggctggagggtatgtggggcaaacctttttcccacgctgtatttagaccttttgcacgataccttcaagttcctgttcaaatatgttatcaatgcgtgaaggcccttggtttgtaaaatttatcaaaaaattggattttactttcgtcagttatgttatttttcttggtggagcgacaggccaagttcctaagaccaccaagcgcgtctaaaagccaaacaagtggaatgttcttgtaacctgtgctttaattgaatgttaacgtttaattctaaagtggaccaagcagaaaaatgagttcagctgtcaatgttggtgttttgattcccttgcattatttttgggtgggtccaatgcttccatgcactttatgatcatttccggctcctctccctctcactccaacctctgagaagcctagaaacaaaaacaaattagctaggtccgttattgggaacttgtttctagagacacaggcgtataaaagccacttcagctgtcaatgctagcgtattatgtttacagtctacgcacgaataaagttgaaagtgtttaatattcttcaaattttggattttaaaaa

SEQ ID NO: 52248 - DNA, 895 bp, Glycine max
  Clone ID: PAT_MRT3847_18193C.1
gcgggtgaaagtgctgcagagtattttgagttgctattcaagatggtagattcagaggaggctcttttatttttgactgttcaggggtgtctacggaccatttgtactctaattacccaagaagtgagcaatgttgagtcgttggagcggagtctacacattgatataacccaggggtttatccttcacaagctcatagagcttcttggtaaatttttggaggttccaaatatcagatcgagattcatgcgagatgacttactttctgaaattcttgaggcccttatcgtaattcgtggcttgatagttcaaaagaccaagttgattagtgattgcaatcggctccttaaagatcttttagatagtttgctgctagaaagcagtgaaaacaagcgacaattcataagagcatgcatcaatggtctggaaatacacagagaggagagaaaggggcgtgcttgtttgtttatcttagagcaactctgcaatgtgatctgcccctcaaaaccagagcctgtatatttgttggtcctgaacaaagcacatacgcaggaagagtttatcaggggatcaatgactaagaatccatattcgagcgttgaaattggcccattaatgcgtgatgttaagaacaagatctgccatcagttggatttgttaggtcttcttgaggatgactatggaatggaattgttagttgctggcaatattatctctcttgatttgagcattgcacaagtttatgaacaagtctgggaaaaataaatcaatcatcaaatgtgactaattcccaccttgttgccttcaaatgctgtcaactcatccagagattgcccaccaatgaccgtgactttatcggctcagggatgggatggtgaagcaactgaacctatga

SEQ ID NO: 52249 - DNA, 316 bp, Glycine max
  Clone ID: PAT_MRT3847_18194C.1
gggctggagctgaatgttttgttatttgtggatttttaattacttctcttttctttgaacattgcattcccgagaaaacggttttaccgggaaagaagcgaagagaagggcacaattggggtttggaaaacgctgcgaagagcgactgattttcgcaggccagtgcgtctgagggttactgatgcatagcggtgggcattgcgctgagcagccattgatttctctgtgtatattgtaggcaaagggaacacaatggccccatatctcttgccaaagacttacagcatgatagatttggaaggccttaatattactg

SEQ ID NO: 52250 - DNA, 492 bp, Glycine max
  Clone ID: PAT_MRT3847_18195C.1
aattcggcaccagaggacttcttcaatcaagtcgagtcattaggttttctagagagcaataggaaagtgctttactaaaaacaatcttattttaaattgcagctttatgggggatatttccatatattttcctgtttcttctttgccgatatatcttgacctcattatatctagtgataatatgtaacttgtatttcttattgtggtgtaggatttccattccattgatattgtcactcccagaaagagtttattcattgaccaagaaaggccaccttaagaaattgggatagttgatggggtaatcccattgccttatcacgacatttgtctggcaaaaggaaagtaggaaatagttggtgaagggtgatctagtagccatttggttgtagtcgattttgagtctcagccatcctttggtaatgcagaaatcacagttctggacagtgatgttggaagtggtgaaacccagaaaaaaagttgaggttttct

SEQ ID NO: 52251 - DNA, 335 bp, Glycine max
  Clone ID: PAT_MRT3847_18196C.1
ggggggccagtactcatggtattaaaggggttccaaacccggacaaataaaatgtctaaacaggctcccaataaaacctaagtgaaaacacctccctataagcaagcttgccccaccaaaaaaaagggatagaaactaaaacctaaagtgttttacaatgaactacaatttcgcacgggcataccaaatcaacgaacaattccaaaaccacaaatgaatgggcacccccatatccaggggcgcaagcaacccctcgaaaacgaccaaaacccggttgtgcccgaagagggctttcaccttgaagtgggggcccctgtaacccaagttccggctta

SEQ ID NO: 52252 - DNA, 523 bp, Glycine max
  Clone ID: PAT_MRT3847_18197C.1
cgagttttttttttttttttttatccaatcaaccttatatatcgaaacagatttagattaaaacaatcaactatttagtaatagaaattatttctatacttcggataagagaaatttttgtaactcttaaaggaatttacttagtttgtgtttgttttaatgtatttacttagttaaaagaaatatttttccttttatttttcagcattaagtaatactcaaacatgggattacaatattacacgtgaaatatttcataggaatttatatataagcaaaaataattatttttactttgatttaaaaaattaattaaaactatttaattttattaatctccaataaaaaatataattatttttaaaatattattcattagaatttcatatcatgaataaaataattttttttaaaatatataatattaaataatattttaattataacttgaaatttttgtacagcattttatataattttttccgattaattcccttatttcttcagtttttgttttcttttt

SEQ ID NO: 52253 - DNA, 551 bp, Glycine max
  Clone ID: PAT_MRT3847_18198C.1
gtctttttcgagacattcaaaaccaactttgataggccgcaattaaggcagggtagaggtgaccacaattaagacgatttcccaacacacccctttatgcccagggcaatgatcttggagtgtgacaattaagactctgatactatcttagaatatgggttttgggcctaactcaaccctacaaaattggtagccttttcgagatgacccacgactcttcattcaacctttctgatcaacctctttgttgatagcccttttcgagacgttgatgacctactttgataaactgcaattaaggagggctaggggtgacaacaattacggtgactttccaacaccaaatatgtaaaaaaacaaactgttccacatgctgtttttataaaacatggcgttgaaggtgattgtggaaaggttgaagaggtagagaacgaaaaaaagagtgaagactctactaaggcaacatgaagaggttggaataggctaaggtgagcaaggcttttcttagaaagcctatcttatttaaaaattcaaggcttaagcctagtctg

SEQ ID NO: 52254 - DNA, 630 bp, Glycine max
  unsure (1)..(630): unsure at all n locations
  Clone ID: PAT_MRT3847_18199C.1
caaaaatgtgttgtgtatcttctcaaaagccaaagcacacaaagacagtgctgaatggcgtgaccggtatggtggggccaagggaggtgatggcaatgttaggtccctccgggagcggcaagaccaccttactcaccgcccttgctggccgtcttgccggaaaactctccggcgccatcacatacaatggccaccctttctccagctccatgaagaggaacatagggtttgtatcccaagatgacgtgttatatcctcacctcactgtgcttgagactctaacctatgctgccatgttgaaacttcccaaaagtttgactagggaagataaaatggagcaagctgaaatgatcattgtggaactagggctgtcccggtgccggaacagtcctattggcggtggatctgccttgttccgaggaatttcaggcggngagcgaaagcgggtcagtatcgggcaagaaatgttggtgaacccgagtttgttgttgctcgatgagccaacatccgggttggactccaccacggcccagcgcatcgtggcgatgcttcaaagcttcgcccgagctggccggacccgtggtgaccaccattcaccagccctcaagccggttgtattggatgtttgat

SEQ ID NO: 52255 - DNA, 910 bp, Glycine max
  Clone ID: PAT_MRT3847_1819C.1
gatgaattcccttaattttgtttcagcggcgatcgtgtctgttcattattccgagcccagtcccaaactcgtttccatctccagagccagagacaaaccttatactctcgtgatccgttcctctggccacctttctaataagctaaaagtttcagccctcaaaagcaacgaaacaaagccaaagcagttctcactgtgtcaaaacggatggctccccgctttcccccacgttcttgttgcttcaatgtctaattttatatttgggtatcacattggagtcatgaatggtcctattgtttccattgctcgggagcttggttttgagggaaactcattcattgagggactcgtggtcagtatatttatcgctggtgcatttattgggagcataagctccgcttcattgctagatagacttggttctcgcctcacatttcagattaatagcatacccttaatccttggggcaataataagtgcacaagctcactccttgaatgagataattgggggaagatttcttgttggccttggtataggtgtaaatactgttcttgttccaatatatatatccgaggtacatgttgatatcgactttagttttgtatataatcattttctcgttctccaactgtactaagttgacttatctgatctctacagtctacactgtagtctctacaccacaatagtatatgtatctttttgccttctgtaactcagtagcaacgttagcttctattaggtagttgtaaactgactacagtcagtaactagagtgtgacagctgtaatcaactaactctggttagttgactgttaggatcaactaaataaattgcattgtaatcctttctctgtgggttgaaattcctcacaacagattcaataatatcttcctcttatctttc

SEQ ID NO: 52256 - DNA, 132 bp, Glycine max
  unsure (1)..(132): unsure at all n locations
  Clone ID: PAT_MRT3847_181C.1
agnngggaagttggagnagcagaagttgtttcctgtcggtgttcggctcaccctgtcctgccccaagaaaaattgggtntaacggtttccagggtttntccaaccaagttaacccaagggtcgggtncgggg

SEQ ID NO: 52257 - DNA, 591 bp, Glycine max
  Clone ID: PAT_MRT3847_18200C.1
ttccgctccattacggctgcgagaagacgacagaagggggtaggaaagagagtatgagtgagagtgtaggaaagagagtatgagtgagagtgtggctaacatttgtcttcatgttatgagggtatcctatattcctattttttatgatactggacacctagtatctatatacacctatagagagaaatgtaaatgtcacaggtctggtccatttggagatgaagtttccagagtgtttggtggtggtcttgtaccaggctcattgactttaattggtggtaatcctggtgttgggaagagtactctgttgttgcagatagctgcaattattgcaaaaggtgacagtgatggtgaagcatgtccagttgtatatgtctctggtgaagagagtgttgagcaaattggtaacagagcagatcgccttaggattgaatcagatatttatttatattcaagtaatgatgttgaggacatactgaagaaagtacagtatctctcccctggggctcttattgttgattcgatacaaactgtttatttaaaaggaataatgggaagtcctggagggattatgcaggtgaaagaatgtac

SEQ ID NO: 52258 - DNA, 320 bp, Glycine max
  Clone ID: PAT_MRT3847_18201C.1
gaaacataaaacatttattgattgccaccatattaccatccctgcaatagatacaataagaaccgctgggtgggactaggattcggataggatcgctaaactaatctataccttactttttacgatacttctaaggctcaattcctgcacccttctctcttgtttctccttcttgtcctaaccctaattgttattcctcgcccttaccctttatgcaaaggaaggaacaaagactaactatattattatgttgatcgtaatctatctgtggatgctaatcacaagctatgactattgcaggcattattgccttaaatata

SEQ ID NO: 52259 - DNA, 2105 bp, Glycine max
  Clone ID: PAT_MRT3847_18202C.1
ctgaaatacagcgcatgagaattgatatttattgtcgaaaagttgcaaaacgtgagacgatgataaaatttgtactaaattacatttttaaacttgcaaattgtactatatttatttagatatacccccttccccccaaaaaaactgagagaaaaaggtcttcttcactattttattaattaatacgagagggaaaaatgcttccatatatgtagcttttagtaatgtacagcagcaatttcctctcacttccaactgcagtctttcaagtcttaagataggttggtataggtacaccagactgttctgtcaactttttataagcagcttgcaaccttctagtgactggtcctacttctccattgccaattatgcgaccatcaaccttcactacggggcttagttctcccattgttccagtcgtccatacctcatctgcagtatgcacttctgacaagctgattcggcgctcctctaagattaattgttctttcaccacaagatccattacagttgcacgagtaatgccaggaagacagtaatcagcatgaggggtcaaaacacggccctttttaacaacaaaaatgttagttgcattggtttctgataaataaccatcttggtcgagcatgattgcatcatctgcttttgcattattgccttcaatctttgcaagtatgttattgagaaggttattgtgatgaatcttcgaatccaaattatttggtgaattacggcgtgttgtagcagttacaagaactataccacgtgtattatcatatactgggggcttccattcagcaagcacaattaatgtacacccataaagattgaaagctggactcatcccagaagaaacctttttccctcgtgttagagaaagccggatgtgtgaattgtcaaacatgccattcctaattagagttctgaaaattgcttccttaatctcatctcgagtaggaacattttcaaaagctaaagcttttgctgaatcaaacaacctgtctagatgctcctcaagcttaaatatctttccattatacactcgaagtccttcccaaactgagtcacctccttggacaacagaatcaaacacagaaacctttgcactatcacgtgtcacaatctcatcaccaacccaagcaagcaatttctcgtttgcaggaacaggaagatcaggattaggtaaaggagggctcagaagagatgactttttcttcacatggcgtcgtagcatattatacaggggtagactttgccccaataacatattaggagaaaaaagaaataggaagggatgagtccaaggtatttggtaaatagtagatttatgtacagactactagaactaaggggcctttaagacatcaaattgctttcatccatcttgccttcagaacattgcagcttgaaaaggaatctccaaatcattacagagactgcgtagagtaaactcaggatcttgttgaagttctgcggcatcaataacaggtggtgcctttccaatttcacgaagctcgttgtatatacaaaccagctctgccaaacccaactcatagaaagatggagggacaaccttatcaaaggatggcaatatatcaagaggatttcttatcagaatgaagtgctttcctttcttcatcagatcatctgtcaaaccttgtaaccgttgctttgatatatgcttacagaatctatatttcttctttcctggagcaaaaattatgtcattagtgaccttatctccatcagcttccattttggagagtagctcctccctgtagggtctatcaagaccagttactctaaggaaatttgcatagaggggctcatcaagcacttctatgtcatccctctgagaaaaagaatacatgagactagtactgagggatcttggagcagaccaagaatgaatcacctccacttcactctccgccatctctcactcactcactgagttcaccacgctaagctctgattcagtttgatttctagaatatggaatcgattgggattgccacttttcaaagtgagaatcccaataaaacagaatataaaaagaagggtcaaaatctcttaacaacaaccaaaacaaccctagagcc

SEQ ID NO: 52260 - DNA, 283 bp, Glycine max
  Clone ID: PAT_MRT3847_18203C.1
gcggtgtcgtcagacggggatgaaaagtgaagtggctcaagctcatgctgtggtgcttaagctaaagggcacaattccacaagggaaacatagttctgatgctatgagaatcgagcctgcgtgtttggacaacaatggtcaggtgttttggaagttgaaaagttataatagtgaatgtgctgttctgttgcaagatatcaaaattaaggatgaaactgctactgcacctgctgaaaaatggtttgtttatggtcctgaaaagaaggatgaggttgataagtac

SEQ ID NO: 52261 - DNA, 943 bp, Glycine max
  Clone ID: PAT_MRT3847_18204C.1
ggctcgagggattatgcggctgataagttgagggaattgttctccaagtttggtgcagtggaagatgttgtcatcaaagggagtaagaagaagggttctgctcttgttgttatggccactaaagaaggagctgtttctgctactgggagtgtgattggccatcttgctaatccgttgctggttttacctcttaaaccagcaactgtggcggattcttcgagtgttccaaaatctgctgaaaccaccaggatgagtaatctggttggtgccgggtatcaagcttttgaggattctgttctgaagaaactgcaaaaggctgcggaaaagcaaagatgaggctgtcagcatgataatcataagattcaattgtttggcatggtcatccccaattctatttattaggtactgaaattaccattgtcattaatgattcatcattagtgatccgtcaaccggagtctttgtatcccgatatactaattgaggggtagtatactagagaatgtatgtttactgtggattttttaagtcatcttttagttgttcttgccccccttgctcaatgaaataatattttaaggtgcgaattgaactgggatgtcggaataagcccaaattctaagaacacatttggcaaagctcactcttaacgtgctggacgaagcgttatatactacaattacgatattaattattagacttggaagtggacatagaggaatacttggtatgatgcttcccttagctcatgtttgcaatttgcaagaacaataaatagttgtatgaactatgaagactatatagctttagaacgtgtgtcaagtatcaaagctgtagcatttgatgctatatcgtcactactccattcatgttcgatcaaaactgtgttgactgcgaagctttctcatagtgccatttatactggtaattgccatgactgtgt

SEQ ID NO: 52262 - DNA, 475 bp, Glycine max
  Clone ID: PAT_MRT3847_18205C.1
attcaatttcaccctcctttttcatttttcattaatttagaatacaatgatgaagtatggcttacgtgcgtcattacgtttttcaattaaagtaaatttgatctcccctgagttgcctttctattaatttaacattccattagggcgtatagcccccacaaagtggaattctggattagaaaccaggataatgagatttgatggcactactttgcaatttcaaccttcatctattgcagtagtcaacgatcatatcaaacataaaaaaatccttaaataaaagtcaaattcaccccacaattgaatagcaatttggccatgaatattatttgatttaatcatgttattgtatgatatttagccatatagtatatattaaaatttttttgcatctacatgttaatatttgtttctaagaagctgaatttccttgtgcagttttgaccgggatttgaggtggagaacaggaattaaa

SEQ ID NO: 52263 - DNA, 252 bp, Glycine max
  Clone ID: PAT_MRT3847_18206C.1
gtgaaggcattgcataccagtggaattacatggttgaaaatcagtatggggatggaggaaggaaagcaggaagttgtccacacagagcagaatcttctcctcttgatgacaagagcaagtccttagtgttggtaaactatttccgctctacgccatttaagcctattgcatgtgaagataactctggaggactcattgacatgctacaaacctgtcatggtgctgctgccaacaggtgggctaattatctgg

SEQ ID NO: 52264 - DNA, 150 bp, Glycine max
  unsure (1)..(150): unsure at all n locations
  Clone ID: PAT_MRT3847_18207C.1
ganatcgaccaaattgttnccatgtatgaacttgatantattagtggatttattccccttgttgagttgaattattccggctcctcaagccttttatctatccttaaaagaaattgnatnctttaaaatttttttaaataatattangcc

SEQ ID NO: 52265 - DNA, 258 bp, Glycine max
  Clone ID: PAT_MRT3847_18208C.1
gaaaattataatagttagttataatggattaatcaattttttttctacctgttcctgtagaaaaaagagatgcatctgtgtcttggataggcttacttcaaaaggacttttgcttccccagtgaatgtcttggtagaagatatgatttttttgaattgaggtttattcgggtttaaataagcacgtaactcaccaagaaatttccttacctgtccaatttctattgaataaagataacccttcgtcccaggataaagg

SEQ ID NO: 52266 - DNA, 703 bp, Glycine max
  unsure (1)..(703): unsure at all n locations
  Clone ID: PAT_MRT3847_1820C.1
ccacgcgtccgcgaccaagcagaagttctatngctcctaaaatgacacattattatgtatgaaatagcacagagaaaggggtgatatagtaaaaaagatggtgggtgataacatcaattcaaggcaatataatattgatataaattctaccaaaatctttgttggagggttggcttgggagactcagagggacacaatgaggaggtattttgagcagtttggagagatcttagaggctgttgtgatcacagacaagaacactctgaaatccaagggtntatggttttgtcacattcaaggatccagaggcagcaatgaaagcatgtcagaacccctctccaataattgatggaaggagggcaaactgtaatattgcatctattggtgcaaacaagaatcggacacgggctccacaacantcaacatggacggtctagagcacacctggtgttgttgtcctcacctgcttatcatggcacttcctctacatttgtccatcaaaacagtgggcaatacacatttcccaattcaagttttggatacactggatattcacaaggcacaatataccccctgagctgtatggngtatttngggaaggccaacanatctcaacttactacccgtccaatggggcatctggccaagtggggaattggttcataacatttacccctttcagtgcccaatattcatacaatag

SEQ ID NO: 52267 - DNA, 279 bp, Glycine max
  Clone ID: PAT_MRT3847_18210C.1
tcggaattcttatcgagctctgttgttgatgagatggctacttttaaagtagagtgggaagctgttctggatgaccttgaaactgaaagtgcccacttactggtttgagttcatttttgattgtcaatagatattgtggtttgtaatatgtgcatttctctgtgtgctgttatcaatgttaatcactatcaatacttagcaatttggtcttatttgtagtctgacttcttatgaaattgatttgggtctttctatttgtttcttgtgggccaggatact

SEQ ID NO: 52268 - DNA, 477 bp, Glycine max
  unsure (1)..(477): unsure at all n locations
  Clone ID: PAT_MRT3847_18211C.1
ccgggttttgtaaatgtgagatcccttacaaccctgatgacctaatggtgcaatgcgagggctgcactgactggtgagtttcacatgtaaggtgatgtggatcttcaatttattccacgtctgctcttgtcgtttggtttaatgttcctgatctggtccattttctggactcttgtatgttctggtctgtaaatattctgcaccatccctattgaaatttcaggttttttaatcatggtttatcctctttcatctggttcaatcgaagaaaacaagtattttaagtttgtacctacctttcccgccttaattttccctgtgtatgattcttcacttaacttggactgttcttttttcccatgacagaacaaccctgtgtgtttgactattttatgtatnngntatttgttgttctgggtttttcatccttgccagtgcatattttgcttctgtctagactgttgttatttaacttct

SEQ ID NO: 52269 - DNA, 618 bp, Glycine max
  Clone ID: PAT_MRT3847_18212C.1
ccgagcttattctgttctctcggggtggtcttgttgaaagaatggctgctagagctgggtttaatgctccgaggttgaatacagaaagcattagatctactgacctttcacttaattccgacattcagtctccttacttgaccatcccacctggtctcagtcctactacacttttagattctccagtgttccttgcaaattcactggcacagccatctccaacaaccggaaaggtcctgttcatggttaatggcaacatgcggcactcagaattatcatctgatgctccagaaaaatgtaaacacaatggctttgatgatatctacacatcatcctttgctttcaagcctgcaacagattcaagctcctctttttatcatggtgctggaagaaaaataaattcaactacacttcctcaacaatccctttctggtgttgaggttttcggctcagcctgaaaattcttttcaatggccaagtgtagatgctgccaaagctcaaactgagaacaaaagtggccttcatcttcaggaagactttgttgaatcggctcctcataaagataatggaacttaaattgttcttcaaccaattcattgggctttttcatagctgtta

SEQ ID NO: 52270 - DNA, 246 bp, Glycine max
  Clone ID: PAT_MRT3847_18213C.1
caaggtgcttataggtgcctgtgcttctttctgcaggggttgatcaatctgctgaatggagtcattattactacaacctgtgagtgctgcgctatctcctggcgctgagcctactgtggaggcctcttctttatatggagtgacccaattgtcatccgcaacatcagcttttgctagaccatatactgctctgtgctatactaccaagccttcaggaaacaagactccaaggatcaattctttgct

SEQ ID NO: 52271 - DNA, 697 bp, Glycine max
  Clone ID: PAT_MRT3847_18214C.1
acgagggcaaaggaagttgattctgccaaagaaagttctggggctgaaaaaccatctgtgttttctaggaagagaaatttccagactgccatgttacagcataaaaaaccagcctctagtgttaatgctgaaattattggtggacccatgctaatttctagtgcatcatcgaaaggcgctactcttagaaagggtgatcgtgctcgagccgaatcgggccgagcttcggctgtctcatcactaccaaattatatttcaaggggaccaagttatggctcccggtgcaaagttctcctagcttttgaagataacgggtcttcaaaaattggggttaggtttgataaatcaattccagatggaaatgatcttggtggcctttgcgaagatgaccatgggttcttctgttctgcaaatcatttactacaagtagacggctctggaggggatgatcttgacaaagttgcaattaatgaaatctttgaggttgcctctaatcagagtaaaagtggtgcactcgtgttgttcattaaagatatagggaaggcaatgattggcaactacgaaattttaaaaagtaaatttgaaagcttgccaccaaatgttgtggtagttggttctcacacccagttggataatcaaaaggagaaggctcaacctggcagtcttctgtttaccaagtttggaagcaatcagacag

SEQ ID NO: 52272 - DNA, 424 bp, Glycine max
  Clone ID: PAT_MRT3847_18215C.1
taaagaatgtgaaacagaagttggtgatactccagataatgaagttgaacaaaaagactgaagtcgattttctgtctgttttttaggtgcctcaactgcatcttttacaacagtttcctcatcaggaggctgagcagacaccttactctcagcttttccacccttacgtgcggtagagcttccctgcatatgagtggcaaggtcatgcagaagcgaggagcggagaactagggtttccgagttgggtggcgctccatcagaaggagtggaagtgcgtgactcggtggagagggacgagtcagtgatttgttgttgattctgctgcgtctcttcatcctctttcatgacagtgcacaacaacctttttttctcttcagtctatgatgattccaccacgaattttcattttctcgctggctctatc

SEQ ID NO: 52273 - DNA, 1841 bp, Glycine max
  unsure (1)..(1841): unsure at all n locations
  Clone ID: PAT_MRT3847_18216C.1
caaaaagccagcgagaaaatgaaaattcgtggtggaataatcatagactgaagagaaaagttgtcgttgtgcagtgcactgtcatggaagaggatgaagagacgcagcaacgagtcactgactcgtccctctccaccgagtcacgcacttccactccttctgatggagcgccacccaactcggaaaccctagttcaccgctcctcgcttccgcatgaccttgccactcatatgcagggcagctctaccgcacataaaggtggaaaagctgagagtaaggtgtcagctcagcctcctgatgaggaaactattgaaaaagatgcagttgaggcacctcaaaaacagacagaaaatcaacttcagtctgtttgttcaacttcattatctgaactatcaccaacttctgtttcacattctttatcatctgcccttagtcccactgtatcacaacagagaccatctcctcccaaggctaatagtgtacaagtgtcgaaaggagacaaaggaacaccttctgatggtacaaccttatcttctgtttctgctgtaagggcatctgcatctgatggatacaactggcggaagtacggccagaagcaagtgaagaatcctatgggttctcgaagctattacaagtgtacccattcaaatngttgtgctaagaagaattaaatttgtgaccattcaggacatgtgatagagattgtttataaaagtcaacataatcatgatcctccgcataaaattgataccaccaaggaaagtaagctcctgccttccagtgaacctaaagaagaaagcagtgttccaaagcagtctaccaaagttctgaataattctgatccatcatcttctccgaaagaacctttgcaagaagcaccctgcaatggtgataagaatctagaaaactcatctaatgttgagaatggtaaaattattttgaaggaaaagcatgtcaatgaccgagagccaaaaagaagattgaacaatggtgatttggattcagcagtaaaacatggcaagaaacaaaagtttcttgaaaatgagataaatcaatagaggaatcatttttaagggaatgatccaaacatcgaaatggaaaaggcaagggcatacacaggcattattatggactataaatagcaacaaacattagataggaataaattcatgagcaataatattcctagcctctgccaccgaaacgagccttaagtttcttgacttgtgcaacatcaaggaaggtagtttgtgcaaccaagtcagaaggcaaggtgttgccaaataacagaaggtcaagtagttgtgctccagggtttgcactactgaatgccagaaaagcagtggcttttccgtttccagaattaacctgaaaatgcaactgtccttgtggaaaaaccataatatctccaggtttcagtgtcttggtataaagtgcagttggggtcataaaaccagcagtgatttgaccttccaccattattagaagttcagtggcagcagggtgtgtgtgcattgggattgatccacctttggctatgtctaaccgtgccgcagatacaccaagaccattcacacctggaaaatcagtaacaaatgcggaggttaatgcagcattgaaagtgtttgtggtgtttccagctacaaagccagagaacacaaagtcatccactgtgactgtgttaggtggcttgcactgatagcctgaagggctatctggaccttttaggtctgctacacagaaatcattgacagaagcatgggaagtgaacgagacaagagcaaagaggaaaagaaagtgaatcatcttcatcttggaacttggatgaatggatttgggtt

SEQ ID NO: 52274 - DNA, 235 bp, Glycine max
  Clone ID: PAT_MRT3847_18217C.1
atcagggaacacgaggcagcaacattctgttcaaggagagaagagttgtatattccctgaagaccccggtcagctggtggatgaaaactgcttgaagaggaaaacagctggagagccggatactcaagaaaaaccaaataaagggcttaggagtaaaaggttttggttggtgccaatgtcatgcacactgcaagttggaagtgacaatggatcaaatatttgggctccagcccta

SEQ ID NO: 52275 - DNA, 377 bp, Glycine max
  Clone ID: PAT_MRT3847_18218C.1
ttttcaaaccgtacgactacgcgaacggggaggggtaagtactgaggttttgtcttaatacaccatgcctaatagacgagaagcgacatacgatggaagctgatttcttattgacatagaccaccactgggaatgacaccataagctcgatcaaaaaaagatcggaggggtgatcatactgctattgattatagaatggtcatgcttgccttgaccaaagaagtcatatttaacagaacatacaagcactcatccttactataaactatgacagactcaatctaccgtgtccggatgcactgttgatatcattgagcacactgactcatgaacaggcatccaatagtcattgttctttggtgcctgatgatgacaaa

SEQ ID NO: 52276 - DNA, 1349 bp, Glycine max
  Clone ID: PAT_MRT3847_18219C.1
cccacgcgtccgcccacgcgtccgcccacgcgtccgcccacgcgtccgcaaagacatggtagaggttcttctacgagcatcacctcctccacttcactcttcttatctgagacaatgcaggacagtgtcaggaaggacattggtgaagtgctcgttggaagtcccaagtaaggttctgacaaagcatgtcttatctgggcttgctgcttccttgatatttatttctccagcaaatcagactattgcagcagatctatctcgtgcaccaaataatatatgccaacttgccagtgccagtgagaacgcagttacttcaccatttgagaatgaaaaaggttcaaatctaatgatgatgagaggaatgacagccaaggactttgaccctgtaagatattcaggaagatggttcgaagttgcttcacttaaacgtggatttgcaggacaaggccaagaagactgtcattgcactcagggtgtatatacatttgatagggaagcaccatctatccaagttgataccttttgtgttcatggaggccctaatggatttataactggaattagaggaagggttcaatgtctttcagaagaagatttggggaaaactgagacacagctagagaagcaggaaatgatcaaagaaaaatgctatctccgctttcctacactgccattcattcccaaggaaccttatgatgtgattgctacagattatgacaatttttctcttgtttcaggagctaaggatcaaagttttattcagatatactcaaggacacctaaccctggacctgaatttatagagaagtacaagtcttaccttgcaaactatggatatgatcctagcaaaattaaagatacgcctcaggattgtgaagtaatgtccaatagtcagttggcagctatgatgtctatgtctggaatgcagcaggcacttacaaaccaatttcctgatctaggactcaacgcccctattgagcttaatcctttcacaagtgtatttgacactttgaagaagcttcttgagctttattttaagcagtaactgttatacatgtactcttgtaacgaatagctagctattcttgatagcagcctgtgtctgtgtgtaatatgtaagtataaactacctgtatctggtgaaatcctgtgtatatggtgttttatttttacatgaatgtttgctctggttagtatgcaaatcactacggtgtggcaggatgtgacagactcgatacaagttattagcatgaaatatgttaaacatcccatgatcccacaagtttaacatgaaagaattctgcaatttaatgataaaaattgaaagcggaaagatgctatattatgat

SEQ ID NO: 52277 - DNA, 355 bp, Glycine max
  Clone ID: PAT_MRT3847_1821C.1
gtggaaatgaacatctaacaatgtgttagcagaagatagtttgaagcggaatgcccacccgtggcagacctgccagagatcgttgtcatgctagaggcccttctgttatgatagcaattatctatcactattgcctcataagatccgctgcgcatcgccattcattcgtggtgggaggaaacaacataatgtacccctaactcgtagctgatggtacaccaccagtgggaacagctttttttggaagaagcgattccatataactcggaaaatggccggaaagattgaacatcctacgtttcttttcttgaagataatcaggagaacattgcggagattcacgccttacaaatca

SEQ ID NO: 52278 - DNA, 544 bp, Glycine max
  Clone ID: PAT_MRT3847_18220C.1
ggggaaaaaagggcccctccttggcaaacccggggggtttggggggggttttttccccccccctttttgttttcccccaaaaaaacctttccccggggaaaagcccaccccacccccccaaataatgggccccccaaattggggggggggggcccaaaaaaaaacccccctacgggcccactttttttttgcccaagggggaaacaggtgccaaaaacaattacccagcccccccccttaggatatttttggggggcccaaacaggggtcccgcccgcgggtttttaatccccccccaaacctaaaaggaacaaagtttttggggccgcggggggggccccgggaatttcgggccgggcccggagggggaaccaattttccttatgggggggggtattaaaggggggggaaaacaggggccaggggggtccccgggggaaaatgtgtttccccctaaaattcccccccaacaatcaggggcgggagaataaaagggttagacgcccggggggggcccccgggggggggggcccccccccccact

SEQ ID NO: 52279 - DNA, 702 bp, Glycine max
  Clone ID: PAT_MRT3847_18221C.1
cttttgtgttcatggaggccctaatggatttataactggaattaggggaagggttcaatgtctttcagaagaagatttggagaaaactgagacacagctagagaagcaggaaatgataaaagaaaaatgctatctccgctttcctacattgccattcattcccaaggaaccttatgatgtgattgctactgattatgacaatttttctcttgtttccggagctaaggatcaaagttttattcagatatactcaaggacacctaaccctggacctgaatttatacagaagtacaagtcttaccttgcaaactatggatatgatccaagcaaaattaaagatacacctcaggattgtgaagtaatgtccaatagtcagttggcagctatgatgtctatgtctggaatgcagcaggcacttactaaccaatttcctgatctaggactcaacgcccctattgagcttaatcctttcacaagtgtgtttgacactttgaagaagcttcttgagctttattttaagcagtaactatgttttgttttaatacgtgtacttttgtaacgaatagctagctattcttgatagcagcctgagtgtatcatgtaaagtataaaccacctgtctctggtgtcctgtgtatattgatatggtgttttatttttcctttcattgcaaaataaatgccgtcctaggttattttatac

SEQ ID NO: 52280 - DNA, 757 bp, Glycine max
  Clone ID: PAT_MRT3847_18222C.1
gcgtgtccttactgttaccgtggctcgaggtaccctagggtttatgagggttgttgcttgcggtgccagaattgtgatagatcctttcacggcgtaacggttccgtcgctgccgccgcttgttcccggtcaggatgcttattattgctgctgggggttcttccccatggggtttgttgttggcagcttcggttctcctccgcagccggaggaagaagctgctccttcggcggcggaggcgccaccgtcaccgcctcctccgccacagcaaccggcttcttcgctgcctaattggatgccggtggcggcggagaatggcgtggggagtgtgacaccggtggcggcggccaccaggttgacgaggtcgggggcggcggtgccgaacggggtaggatcggggaatgggacggggaagaagaaacgggggcggccgaggaagtatccattgccgtcgtgagaaggagggggtgttttggattgttgttgtaggtactgttgtgttgtttaattgttgtttttgtagatatgattacctggttattttgtatgatctgtctattgaatgtgggtatctttttggctctggtttttttgctatgggtttttgattttatgccttgttgatgagtaggggaagagaaacaatgtggccggttatctatagttgaaattattagattcacagggccttaatgcccttaactttattttatgtggttttcacaaaaataaaaaataaaaactctggcttttcctac

SEQ ID NO: 52281 - DNA, 462 bp, Glycine max
  Clone ID: PAT_MRT3847_18223C.1
agggaccgttcttttttttgtggaagcgaccaaagaaacaggggcgacatatgggagtccgcctgggcaaatgaatgctcagaaaaatgatgattcatgaacatgccccagcgcactaaaacagatcaggggccaaaaaagaaaaatcgctccccaagccgtgtcagacaggagaagataatattcatggataaatagcacctcacgattggcatacgcgaggcactcctaccccatgtgggggactgataactacctcatcgtattgaagacacaaagaagccgcacatgcagggaggaactagaccgagatctcacaaggcgcatgaaatgtgcactctcagacaattggctccaggcctccaccaggatacgaccagagtggaggcacttcagcacctgcacgatataagagcactgaatgtgtgaagaaggcacctgcagcaactacccacacagaat

SEQ ID NO: 52282 - DNA, 503 bp, Glycine max
  Clone ID: PAT_MRT3847_18224C.1
ggctcgagatcatatagtggcttgatgatcacttttaccatccctcccctcttaaacttgttctagtgcttgatagatagaacattgaccatgatgtcagtgaaaaattttcctgaagaatgctgggaattggtgttcagattcattggccatggtcgtcatttggaatctctatctttggtttgcaagcagttcctttccatcacaaaccggcttcaattttctctcacaatacatgatccaaccattccactccttcctcggttactcctgaggtttccaaggctcagaatcttagacctcagtcacttgaatggccaccatgaagccttgcttcatcaaatttcacaatcccggttggaccttgatttgcttaatctatccaaccagaaaacactttctgttgatggcttgcgagaacttggctcaaacatgaaaaatttgagggtgctgatctgctctaacattggctctcttcgcgatagccatctggtagtcatagc

SEQ ID NO: 52283 - DNA, 407 bp, Glycine max
  Clone ID: PAT_MRT3847_18225C.1
gaaaaagcatatggtctaccgtcacagatccaagaagtgacgacaaccgtgaatccaaaactttccacatactaaagcccactttaagggtcactcgcgccaaccccgccatatacgaaaacgtcttccacctcttactacgacgcaactcgcatttgccaagactcctcaagcggctttatcgactgtgccaccggacaccgactttactaatgcgagctacgacaccgcgaccaaaccctaacatcgaatctcgacacaattctcaaactcaccaaaggcgacaagcgctcgatatatcaccaaatattctacaaggtgcaagcctctaattggcgctaaattctataggagtggtcgtattctccaagaaccctctatccacgcgctccgagctcacgcgcttc

SEQ ID NO: 52284 - DNA, 601 bp, Glycine max
  Clone ID: PAT_MRT3847_18226C.1
aagacagttatggtggactgaccactctcatcaggatgaacacaacacaaatgccttgttctccttcttacaattacgcccttccttggagcatcctcttgtgaccacgcatcctgaaagttattcggctggagggtccaattcatgcttaatgaaagggactaaatgcacagaactggaacatcctaaactgataaagtttatgggattttcaagtcgaaaagatgaaatctcattggctaaatgtttaattcatctaatcaagggaaagcctccaaagataaagacttcagatgggaattgcttggatgcagtgtttgtgcagtgattttagatttcttcaacgttttcaaaagctagtccaattcaacaatctgtttttattttagatttcttcaacgttttcaatttatttatttttatttttcaactgttttgtaggttttaattaaatttgactagttttaagcattcttgttttgaaccccacaaagaaagtctagtaagccttaaatacggttccttactccctattatggaaaagaagtcaacgattacaagatcaatattcaatagtacactcatcgaaatattttctgtt

SEQ ID NO: 52285 - DNA, 204 bp, Glycine max
  unsure (1)..(204): unsure at all n locations
  Clone ID: PAT_MRT3847_18227C.1
gtcgcanacncgcgtacgtnagctcggaattcggctcgagntntntntntntctntctntgcttcanttgcttgaagcantgggcnaaagccttggnatnagtgctgcngtttntccncgtagctgtgagtaatgtgtntgcngtagagcttgaacttnanactctnccaccctcttaccctcannctcaccntgttcantccc

SEQ ID NO: 52286 - DNA, 292 bp, Glycine max
  Clone ID: PAT_MRT3847_18228C.1
ggaaaaaagacctgtggggggtggggattataaacaatataaaagacgcccattacggaccaggtggattcggatgcccacttatatggaggcccttattttaccccaatcaaatacagatggaaaaaacacacgggtgagaacgctgttgacagcgtgaaactggcaaaagaacaaatgaactaccaagtaggattacaattttataacggaaattacagcctgagcatgtgcattcaagaacacaataacttttgggattataaaaaatttaacatcattcttttgtgac

SEQ ID NO: 52287 - DNA, 237 bp, Glycine max
  Clone ID: PAT_MRT3847_18229C.1
tgacagtgttagtttgcgctttgtgttcaggttggttgtgctgtacattttgtttgtgggttgcgttgtggtgtcgacgtccgccctcccctccgtcatcgtcaaactaatgggtgtgattgtttcgtttttgggcgtcttgtgtttgattttgggagtcatagctgagaacaaaaagcgtggtggtggaatgcccgtgcccgtgaaggatggtgtgacatgcaagttgtcagccga

SEQ ID NO: 52288 - DNA, 463 bp, Glycine max
  Clone ID: PAT_MRT3847_1822C.1
ttgttttgttttttgcacccctacaatgcggcttatgaacttccatgcgttgtttacttggtgctaccagatcaaccattggtgctaatgccctaaccatgggtttccctccacggtttaacatgccccacatcctcagatcctggctggcaaaccggagttatatgctcaaggacctatggacaacgcctgacataacacctatattttatcgccctcttttcaacggtttatagggaatatacggacacctgattgactatatttgggaaatttttggtggacaaaagaaccatccattacaagccctgctgggctcttttcttttggacagtctccctctaacatgaacaacacacgttttataaaacaaacggtttgcactttcctcacccactgaccaagggaccaatgccctgttagcatacgtcaagtccaacttaaaaatcttgcgcgcaaaaac

SEQ ID NO: 52289 - DNA, 365 bp, Glycine max
  Clone ID: PAT_MRT3847_18230C.1
cgcactcatagcttcgctagttcagttttctttcctcgattcctctttcgcggaacacacacctcgttttttctttccatgttccgtgttggattggatttcttttatatatattttgaagttatttcttttttcctgattgttactaaacagttttccccaaccctaatgtatgcttttctggttaatcatcgaaaaccaattctatttgcatctactattctaaacaaagggttaaggttgtccttgtttaattctgtttgcttttgtcattgtcttttgcgcgagtctagatgaagtgaaagcagctaagcaagtttagggtttggggggccaaaaagtaagtagtactcttcttccctttc

SEQ ID NO: 52290 - DNA, 266 bp, Glycine max
  Clone ID: PAT_MRT3847_18231C.1
acgagaaaccctatcacgctattttcattcattctaacaggctcctagaatgaactttggcccaaaattgaatgtggctagaatatgcccaagaaggatagtcattcatttgcttcttggtcatcatttatttagctaacaaccattaatttgtccgacatgaactaacctattatgaattcacaattaaaaatggggggccatacatttgtcaccttgaacgacactttgtacaaaaaagtataaccaaatatctaaggggtaaa

SEQ ID NO: 52291 - DNA, 257 bp, Glycine max
  unsure (1)..(257): unsure at all n locations
  Clone ID: PAT_MRT3847_18232C.1
agngcagccgcactagtacaagagagcaactttaagggaaataagcgagcaatgaatgggatagcaaagagaggggggggtgaagatgcatgtaaggcaactgaaggatggacaaaaggcaccgccaccgaaaacaaaaagggaaaataaaaaccaggacaagaagcttcagaaaaaaatgaggaggaataaaaggaagcattctcgggagtggctttggaaaattagacaaggcttggaagggaaacgaaacaaca

SEQ ID NO: 52292 - DNA, 280 bp, Glycine max
  unsure (1)..(280): unsure at all n locations
  Clone ID: PAT_MRT3847_18233C.1
ccaaaacaccacattggtagcacaacaaccttagcttgtgccctcatctctttagccttgttgctggaactgccattgttgttggtggctttattttgtataggagatcttgcaagggtgatcganttggcgtttggcgctcggtgttcttctatcctctcatttttactgagcatgatctgcttatggggatgaatgagaagagctcaaggggaaatggtggggcttttggtaaagtttatgttgtgaattnncctagtggtgaactagtagctgtgaa

SEQ ID NO: 52293 - DNA, 178 bp, Glycine max
  unsure (1)..(178): unsure at all n locations
  Clone ID: PAT_MRT3847_18234C.1
cccacgcgtccgattcaatgggaagaggggtantgtgcctgatccttcaaggtggccagaaggggaaggcccgatgacgggggggtggttcgaaggatggatgcctggttaaagcccatacgtggtcactcagatgggtgttgatccccgctagaaactgtaataaaaccttgagcta

SEQ ID NO: 52294 - DNA, 552 bp, Glycine max
  Clone ID: PAT_MRT3847_18235C.1
tgaagcagggggtatttttgattcagtgtgcggtgaagtggtatctaagcaccgggcggcggccagtgccgttggtggtggcggtgttggttttcgtggcagagttgaatggggttggggtggggatggaagaattagctaaggaggttcatgctaaggtttccacatgtagggctaggtataaagagttgcttgagacacttgtgaaggttgcacaggtgttgccttgggggaaggatgttaccgtgaagaacattgttaagaatgcaccgattgtgattcagtatatggagaggaaggctatgttgaagcctgggaagaagagggagggtcttgatcgggctgcggtggatttggaggatgtggttgctgaatgcttgagaaatgatggtgaatttgaatatggggttgatggcatgactaaaaggaaggattcacagtatttttcgttggagagtaatgctggtagagtgggtggtggggattctgatgggctgcagatttcgcctgaatgcttgtcattgcgtataagaagtttttggatgaaaatgt

SEQ ID NO: 52295 - DNA, 342 bp, Glycine max
  Clone ID: PAT_MRT3847_18236C.1
cagattcggtccttccaatcatcccgagttctggtcaacttttctccattcggcggatttgatcattctgctcctgattctgctcagacaccgcacagagaacaaatccaccattcattatgctttttcgcaacagcgcactggctctaagatccttgccgatactgaagcacctactctagcggtggatcccggaccgatccatgacgtacatgcaccgaccgtgctatgggacactgcggtcggtgacactgatccgggtcgacaggatcgggccgatggtgactggcgcggagtaaccggtcatggaggccatgcacacgcccgtctacgtcaagaaga

SEQ ID NO: 52296 - DNA, 460 bp, Glycine max
  Clone ID: PAT_MRT3847_18237C.1
ggcggcttctacacatcgaccctcgtctatatgcttttaggtgttactgtcctgataggcctcatgctgtcaaatgtacctacaggtgtttaagtgttgtaatcctatgcatgttgatgattgggtttaagttacattgcaaaagaaaacacagttcctcaggtggtcaattccaaacaagaaatactttttctattccctcctcaccaaatgcagaagtcgaaatttgcagtgtgtactttggaaatgcagaattctcctacaaggagcttgcagaagcaacaaaccgttttgaccttaataaacaaattggagatggaggctttgggactgtctacaatgggaaactcaaagatggaaggggaagttgcagtgaaacacttgtataatcataactacaggcgagtagaacagttcatgaatgaaattcagatcctcacacgtttgcgccacagaaaat

SEQ ID NO: 52297 - DNA, 458 bp, Glycine max
  Clone ID: PAT_MRT3847_18238C.1
cggaatgttgtttcaggtgatgaagtttgaggatctaaaggaacttggtagtgagtcagctgtgaaggtatgaatttattcttttgatgcaacgtattgctgttgcttcctaaaatgttgtcacagtgaccagcatcagattgataactgggtgataaaacggagaaaaatagcccatatttttctagaatttgctggaaaagtgaggaaagatcctcactcacctgggtaagtcgagatagaaattcaggtctaataccttaggttaatttggctaaaatattgagattgaggaaatatgctcaatctctgttttctgtatctagatctaggctcactttgctagaagattttatttgtatgtttaaacttgtttagcacttgcttttatgttattatattggtaggtggttccttttttgagggaggcaagtatttaatgtagcggaacttaaatt

SEQ ID NO: 52298 - DNA, 479 bp, Glycine max
  Clone ID: PAT_MRT3847_18239C.1
cgagtttttttttttttttctttgttgatcttgatatcgtgcattttagatccggtttcagatctcgagcttgatctcattctcaatctgatttgacgcttgagaggatgacaaatggtcttctccttgatcatgaggccgctctatggcattgctcaccgtgtgcgtgtggtgaatgccttgatctggttttaagattcaaaacccattgcgacgctcatcatgcccaaatttggttttaagattcatagccctcggtggtgctcaccatgctagatcaatttttaattcgaaacgccagaactatctgtttctttgtctcaatctgattcttttcttgtttggatgaatttttttatgctcctggttcatggatatgactctatgattgtcgggtcaaaaaaagcaaacaaaatgccaaaaaaaacctctaacaatcaaaacccataccggcgctcatcatgccccaattttcattt

SEQ ID NO: 52299 - DNA, 1532 bp, Glycine max
  Clone ID: PAT_MRT3847_1823C.1
ctgccattcagttctatgaccttcaagatcgcttgggttatgaccaacctagtaaagctgtggaatggcttatcaaatctgcttctgattccatttctgaacttccttctttgaacaatttccctgacacccccaaaagtgatgatcatgagaagagagcaaacactgatgttgctgctggggcagtagatggtgagaattatgaaaatgagaatggcaataacaataaccagagtcagaacatgtctttgtctaaatctggttgtagtagcacttctgagacaagcaaaggttctggcttgtccctctcaaggtctgatattcgtgtgaaggctagagagagggcaagggagagaacaacaaaggaaaaggagaaagagaaaaatgagtctcatcatcatcacagcaatgttgttgttcctcatcatcgtcatcatcatcatcataaccccgtttcacaaacagcttctttcactgagcttctcactggtgggattcccaaagggtgtgatgatgaggagcctaataacatgatgatgttcaacaaagaagctgcagcagcatcatctggtagacagcaatggtgttcatcatcatcagcagcagcagcagcacctatggactactttctggggccttcctcttctagaacaacaacaacaccaccacacaatcaccatcaccatcatcatcaatattcttcttctggtgggttctcattggcacaaatccaactaggacattctcttcctgaggcaatgaatcacaatgtttcagcattcaacaataatgtgagtggtgagaaccaaaaccactcatcatcagatcctcatctgcaacagcagcaacacttctcattcataccggatcatcttatgtcagctgtggttacttcttcttctcatcatcaacctagcgggagcgactacaatctgaacttcaccatgtcttcgggcctcgctggttacaatagggggacccttcagtccaattctccgtctcttttgcctcacttgcagaggttttcgcctctagacggatccactgtacctttcttcattggagctgctccttctgctgcagttgctgctcctgccatggagaacaacaccaccaccaccaacaaccatcaccaccatcagttctcatctggtttcgatggcagccgcttgcaactctactatgggcattctgaccagaaggggaaagccaaaaactgatgtttggattgctacatttcctcctggacttgaaaattaaagtactagcagcaagttgtgtcctaaagcttgcttttgccaaaagggatgagccggcgttgtcaagtgttggtatttcttgttggatcatttgaagtcattcaattacatttagtatttgaatatatatatatatattgatctatgcgtgtgaaatcattgtgtttttggataaatgtaaaagctacttgattcaagatattcttttactttctgcaattattttgatattgttgtctatactataaatggagaaaagagttgttcatcagc

SEQ ID NO: 52300 - DNA, 227 bp, Glycine max
  unsure (1)..(227): unsure at all n locations
  Clone ID: PAT_MRT3847_18240C.1
cagctgctttanttcttggtgggtgctgatatnactgganctcatttgcatactatttaacctnatnggtcaacngacacnctngcntttgctangatggatcatgncattgctgnaatgtccgatanagtctaagtnaggaagntggtgnagtnagcgacaagnnnngctanggatggttanctgcggaaggagntcagccgcggnttgcagtgcannagcattgg

SEQ ID NO: 52301 - DNA, 251 bp, Glycine max
  unsure (1)..(251): unsure at all n locations
  Clone ID: PAT_MRT3847_18241C.1
gnggaaataggtaaaatgccaactgttggaagagttgaagaaagcgaagtgccaactgaccatgtagatggacatgttggtgataaatttgctagtgaaaaaacaaatattgctcctgaaagcaatgctgaagaagttccacaagaaatgacaaaacagcacaatattgatggaacaatagagccagtttgtgcacaagatactgggaaagaganaatttctgaagatgaaagtgaaaagcanagtaatcc

SEQ ID NO: 52302 - DNA, 265 bp, Glycine max
  unsure (1)..(265): unsure at all n locations
  Clone ID: PAT_MRT3847_18242C.1
gaaccagaggaacgcagagcaggacccagaaaagaggcggaacccaggagggagagacgncgacccacggggccgggacgcaganccagagaagaaagccacccggcaagaggcggagaacaagcatttttttttcgccatggagggcttcttgggctttgcagtctaagctgccgccactggcaagggcccgctcaacaactgggccacccacttgagtgacccactccacacaaccatcattgacaccttctcatcctcctct

SEQ ID NO: 52303 - DNA, 265 bp, Glycine max
  Clone ID: PAT_MRT3847_18243C.1
gtttccctgatgaaatgagcaagaagatgagtgtgaaggaagctcacgagtacgtgcgaggagctgtttcaagattcataagagccagcaaggaggccatcaaactaggggctgatgagtctgctattgtggatatgagatcctctctcactactagatcttcagttcataattaatacaaaacaaaactcataaacagacaagagcaaagaaagttgtgtgcctatctctgtatctaactattatagtttttaggttatctgat

SEQ ID NO: 52304 - DNA, 3413 bp, Glycine max
  Clone ID: PAT_MRT3847_18244C.1
ggtccggaattccttgcattttagcattagtattttactcactaaaaaagagagaaacatagagagggaagaaaccacgtacggttattatggcgatgaaactcaaatatctgtcttccattgccgaggatgtcatcaagagatgttcacagaaactggacacttcggtagagaaattggtggtggattttgaaggggggtggcaccctgaaatgggaaactattgcagaaaattagttgaattttgcagtgggaaggctgtgagtgaattgtgccacaacatagagggaaacatcaacgatggctcatttagcaggttgacatatgacatgatgcttgcttgggagagacctagctactacgatgaagaagataccacggagaatgtagcaaaggagaaagaagaaaggaagataactttgaataccactcaagaactggatgatatccctcttttttattcagacatcatgcccctccttgttaataatgagcccaatgttggagaagatgcatttgtatggttgggatcattagtacctttagttgcagatgtatcaaatggaaggtttacttttgaatctctgacagcaccaacaggcaaccgactacattttccagcatacgacatgttcttaaaagaaatggacaagtgcatacgacatttgcagaaacatgcaacaccaaatggggttgaactggctgaggatgaatatatattacatgtagatggaacagccagcacacagagagtagttcggcacattggaacaacaagttggcctggtaggcttacactgaccaattactctctttactttgaggcttccggagtaataaggtatgaagatgctctcaaaatagacctctccaagaatgttgagcagagtgttaaacctgctgccacaggtccatggggagctcaactttatgacaaagccataatctatgattcaactgatttatcggagacagttgtactggagtttccagagcttacgagttccacgagacgtgatcattggccgatttagtatttcaatataatgtttctccaccaatttttatcgaagagaccaaataaattgtctaataaaacccttacggctgcattcaaggacaatcttgggaatcgtaaggctgcatgcagcaatagaaatgctaagaatataacctcctgtcccaacaaaattcttaatattttccttatacaacgagataccaaagggagattatgtgctagcagagctcgcggatagcctcaaaaagggcaataatggacagtcatgtagtgcaagttctatccttaggagtatgaacatttccaaaagtgtagattctgatataataatagatgaggcaagtcaagcagatggaagtgttaatgttgtagacgatagtccctcattggaggctgctatcaaacaatctagggaggaagaaaaggaaattctcattgctaaagctaccactgatgaattaaaggaggaaggagtcactgacagtgttttggttataacggaactactgaagccacttaaaaatgcagtcccttggtttcaagaaatcttcacatgggaaaggccaataattactcttgctgttcttgctgcatccttgatgatcacctatatggaatgggttggcaagacatttgcagttttcttgatttgggcaataataaagatgcttgatgcaagacagaaaaagattcatgataaaagtaacgagatagtaatcagtagatccagtatggcttctgatcaatctacgatggagagcattgtctcagcccagcatggattgtatactgttcatgacatgatgcagatagcaaacatagcaatgctaaagatatggtcaatacttatttcaaaggctgataagcatgcaaatttagtgatggtggcaatgagtggattggcaatcttattggcagtaattccattcaaattcttccttatggctctcattctccaaagcttcactatgacattaggaaagtcctctggaagtggaacagggaatagacggttaagggaatggtgggattcaataccaattgttcctatccgtgtagtagatgatcctaacactgttgatgctaaataactttttattcacccttattagattttctagtatataggtttaatgtatgtagcctttgccccataactgactttggtataatgggaactggttagtgtacaaagcaatatatagagaagacactgaaaatacatgtataaatagttgtgccttgtttgattgcaaaaggcaataatggacagtcatgtagtgcaagttctatccttagaagtatgaacatttctaagactgtagattcgtgtataataacagatgaggcaagccaagcagatggaagtgttaatgttgtagacgatagtcccttattggaggctgctatcaaacaatctagggaggaagaaaaggaaattctcattgctaaagctaccactgaagaattaaaggatgaaggagtcattgacagtgttttggttataacggaactactgaagccacttaaacatgtagtcccttggtttcaagaaatattcacatgggagagaccaataattactcttgctgttcttgctgcatccctgatgatcatctatatggaatgggttggcaagacatttgcagctttcttgatttgggcaataataaagatgcttgatgcaagaaaaaagaagattcgtgagaaatgctacgagatagttatcagtagatccagtatggcttctgatcaatctacgatggagagcattgtctcggcccagcatggattgtacacaattcatgacatgatgcagatagcaaacatagcaatgctaaagatatggtcaatacttatttcaaaggctgataagcatgcaaatctagtgatggtggcaatgagtggattggctatcttattggcagtaattccattcaaattcttccttatggctctcattctccaaagcttcactatgacattaggaaagtcttctggaagtggaacagggaatagacgattgagggaatggtgggattcaataccaattgttcctattcgtgtagtagacgatgttcctaacactgttgatgctaaataactattattcacccttgcttattagattgtctagtatgtgagtttaatatatgtaggctttgccccataacagacgtgggtataatgcgaactgaaaagtgaaaatacatgtataaatagtgtacatagcaatatgaaaatgaaaaagtattaccatgttagtttcataatagatttgaactagttttgctgagtcaattagttagctagccactcaaatattgttaattttgtaatggatttcctcatccaatcaatttagccttttctctttgctgctggggggctt

SEQ ID NO: 52305 - DNA, 456 bp, Glycine max
  Clone ID: PAT_MRT3847_18245C.1
cttgggaattgtaaggctgcaagcagcaagagaaatgctaagaatatcacctcctgtcccaacaaaattcttaatattttccttatatgacgagataccaaagggagattatgtgctagaagagcttgctgatagcctcaaaaagggcaataatggacagtcatgtagtgcaagttctatccttagaagtatgaacatttctaagactgcagattcgtgtataataacagatgaggcaagccaagcagatggaagtgttaatgttgtagacgatagtcccttattggaggctgctatcaaacaatctacggaggaagaaaaggaaattctcattgctaaagctaccactgaaaaattaaaggatgaaggagtcattgacagcgttttggctataacggaactactgaagccacttaaacatgtaggcccttggtttcaagaaatattcacatggga

SEQ ID NO: 52306 - DNA, 896 bp, Glycine max
  Clone ID: PAT_MRT3847_18246C.1
tttaaacaaaagatatatcaataattaaaataactgtagaactcttttttgcattcggtgcaatcatataataatttcatgccgcaatctgcatcatagcagccgcgaccgcaattcagaactatggattgcactatgcaaatacagaaagagaaattcagtcatggaccttatacaacatcgtgagtctaatgactctgacattagagaatattggccttatacgatacgactcttgaattgaaaggtgatatacagtgcaaaatacaataaaacacttcacaacaaagcaaaaaagttccccagatcaggcatgcaaaggacactttacatatcagacacaaaagatccaaaaacaattttaaaattaaacttaacgcaagttaacacctcctcccgatcatccttcaatgtcatcttcagagagtagggtcccggtggagtaattgcaggcaatgtttgggtgtgagaaatcagaaaattgccattagcaacaggacaggttacttcttcacaaagatcaattctttcagtatggactggcaccccaacgtatgaaactccaattaccacctctccaccataaatagctttaccagaagttgctgagatcttaaaggtagccgcctggccactcaccacagggtttggtgatatttcaactccagacaccttcacagcatagtctgccttcttatcgcagtaagtcactttaattttagcttgagcgtgaaagggtgcaaggaacagaatggataaggaaacaagaaggtagaatctgggaagaaactgaaattccatcggttgcttcaaaagggtcttggaagggaagaagagagtttggaaagagaagagacacacaacacaaccccttctgtcgtcttctcgcagccgta

SEQ ID NO: 52307 - DNA, 411 bp, Glycine max
  Clone ID: PAT_MRT3847_18247C.1
ccagtggtttcatttttcggaccatctagcaactgcgggtgagatttttgttgtgcttgggcaggtatcaacagattacatggagtggttctttcggatatctcatcccttcatcacacccacacaggcaggtgataagcctagacattcacctgccccacagcatgaggaatacatcgagctaggtatcccggaggttcaagtgggagaaggacgtggaccgtcaaaggcatctgatccccctagacacgttgtggtaagattagttgctttaatgttttataaaatgttatttattttaaaagttgtaataaatgtatatttatgaatgtcataagatgcttatgaaggttgtgaagcgatcggagaaatattggagcgggtgctcaacctaatgatggtcactgaaag

SEQ ID NO: 52308 - DNA, 154 bp, Glycine max
  Clone ID: PAT_MRT3847_18248C.1
ttttaaaacacacttctaatttagggggggaatatccatgacacgcaaacaacctgaaaaactcaaagattcaaactattgtttaaaaaaaccataccttgttcataacaaaaaatgcacgtttattttttggcctttacacattaaagaggat

SEQ ID NO: 52309 - DNA, 363 bp, Glycine max
  Clone ID: PAT_MRT3847_18249C.1
caaaaaacagcaattaattcattcaaaataaacggagacgctacattttgatgaatgcacccatttcgaccaagtattgtcattgccagttttttattccgatattttaccccaaacgaaccgatcttaatcttgactcaaacttacaactacgaagacccgacaaaagaaaaaatttcaaaatacaggcttcgacatacgatgctcacatgattgaatcaaccaatcaaacagctgatacgactacagcactccggcgaccacgagggaccacggagatcattccgacggcggcggcgacgattgctgtggcagcaacagtctgtacggcgacaaccgcggtggatgcaatgggaatgaata

SEQ ID NO: 52310 - DNA, 305 bp, Glycine max
  unsure (1)..(305): unsure at all n locations
  Clone ID: PAT_MRT3847_1824C.1
tcgaagagtcaaagaacagaaccccaanacaaggaggttgaggctcagatggaaacaaccccgccccaaaggacacaagacgacgacgaaacacccaaaggacccaagccgganccnaaaacaccccaaccaaaaaacgcacaccccaaaaacacagcnggaggaaccaccccgcagagagaaccaccggcaaaccccacgacagagggcaacaccagagcaagcgcagacacgcagcgcacccaacgcacgaaaggaaagaacaaaaaggcgcccacacgaggcacacccgagaaaacaggcaa

SEQ ID NO: 52311 - DNA, 266 bp, Glycine max
  Clone ID: PAT_MRT3847_18250C.1
cttgatgcttcataagtcgtcatcatcatcatcatcatcaccgttgattgaagaagatgacgatcagaaacatcgccatctgaacgcatgaagacgataatcaccacgatacgttgaaggagacgttggatgtcttcatctccacattgatcttcgagttcgatggttcatgttacggcatcgcatacaacaagctcaacgataacggcgccgccactctcgtcggcctcatctccgcttacatctcccatgatttcggactcttc

SEQ ID NO: 52312 - DNA, 237 bp, Glycine max
  Clone ID: PAT_MRT3847_18251C.1
catagatacataatcttcaagatcgatgagaagtcaaagcttgtcaccgtcggtgacgaggctgatccctgcgagagctattgagatctcaccgtcttcttgcccgacgatgattgcagatatgccgcattcgactttgatttcaccaccgtcgattactgccgcatgagcacgaacttcttcattgcatggtctgcaacagcattcaggataagagcaaagattctctacgcaaca

SEQ ID NO: 52313 - DNA, 669 bp, Glycine max
  Clone ID: PAT_MRT3847_18252C.1
gggttaaaattgactttgtaaagggggcaaacaaagtgcaaatgatattggtatatagctgaaactggtttatcctgtgaattgagttgtatttttgaaattgaattccccgccccggttcaaacagaacagttggaaatatcaataccaaaaaccactctttttattgttaaactttggggactttcagttacccctccctttactggcttgagtttgctcatgttgtttttctcatcaggattgaaggggaaccaaagtgctatagttcacaattttcaataccaagaaaacgatgataaaatggatctcgggtagatgttgcttttgattcctttccttacattggaagctgttcatcccaacaaggagaaagttaatgcgccatctcccgttttgtttgtaataaatttgtgtttatattttatactcctacgctgctagatacttgatgagttcattgccccatcgggtgggtttatgcatctatgtatttattggttgtagccacccttatacgggccgatggaataggcgaatctcatacagctttacatgaatggttatctgttagaagaaagtaagttttgttcgcttgattgataaatgattcggaacactgggattagaatgctttgtaacaagtcaatgataccgtttttcatactg

SEQ ID NO: 52314 - DNA, 838 bp, Glycine max
  Clone ID: PAT_MRT3847_18253C.1
ccacgcgtccggaagaagttcggtagggttttgggtttggggatggattcggtttgtttgggggtttagggtacttagcgtttggggaagaaactaaggatattattaccaccaatttggggcctggggtgattagtgtattggttcagttggggctttgtgttaatctcttcttcacttttccgattatgatgaacccggtgaatgaggtgaagtagagacggttctgcggatcgaggtactgcttgtggctgaggtgggtgatggtgttggccataagcttggtggcgcttttggtgcccaattttgcggtttttttgtccttggtggggagcagtgtgtatgttgttctgagttttgtgctgcctgcgatgtttcattgtatggtttttagggaggagttggggtggaggtgtgttctctgggacgggcccaccccggtttttgggtttgtgattgctgtcactgggactttcacttctgtgatggagagattttttggcctacccctacgtcatgattcagcacaaaacaacttgtttggggataacaattttggatgctgaaagatactactcttttgtatcttttattctgaacgtacttttgaatagagtgtaatggtaaaaatccaaacatgttacaatgggagaaactgaggtttttttatgcggcaaccgtgctttacatgttttaagtgtaagcttggtttgtccttgattgatcaatctatctattctttgttgttgtatgctgttcattttttatgtaaaaattgtagcatatggacctataataaagtttgagaattgttccaatggttaaaaaaaaaaactcg

SEQ ID NO: 52315 - DNA, 479 bp, Glycine max
  Clone ID: PAT_MRT3847_18254C.1
tcccgggatgacccacgcggccctttcatgcggtttgtttaggtggcaagattgacagaggtcttgggaccagggcaagtggtgaggacattcgatgttacagctggattcaccataccacaatgatggtgtggtggtggccataggagcaaggactgcagaagctgtgatttctgacaagagtggaggaatatccaaagcaggatgttcgggcgacgtcgcaacatgctgaggttgttacaatggggggggataagggggtgcagacagctcaccattgggtatagctgctatcgagcacagcaggagtgtcttttactattgacatcgttgccgccgaagttgcgacgcctacctctggagatcgagggacacattgacgaatttctccaagtggtgactactctgcagtaagacctggaatgtactgttttagaaaggaaaacattgagattggtggatagacagccttcaccttt

SEQ ID NO: 52316 - DNA, 362 bp, Glycine max
  Clone ID: PAT_MRT3847_18255C.1
gagggaaaatccccattttcattaaattggtgaccagcctgttgttttttcaacaaaaaacgaaatttttgtcgaaggccttccccccaaatgttttttgggtttcccgctgccctaaatgaatacccaaatgccgtttacgggtgtttttttatgacatccctttcctttaaatttccatttatggggcccactggatctcccccttcaaaaaaatccccatttttgccggccgccctttttatgaaagcttggaggaggaaaaacaaaccctgacagttttaacgggggcccctttataaatttttgttaaaaccacgacctttcacgctattttttgttgccctgaactgttttttttt

SEQ ID NO: 52317 - DNA, 703 bp, Glycine max
  Clone ID: PAT_MRT3847_18256C.1
cacaggaactaatttattgtgccaaagttatccaattccaagacactaaagcaatgacatgagtttcagaaactacaaaactagggataaaaggaaaatactaatgtcttgcattgattaaagcatcatatagacagagagttatacatctaagcagaaagttattaatgaatactatagttcttctacttggactgaaaatccacattgacatcgctttgtcaatagagaagttccctcatcaaagctttcgtactctttcaaaaacacatgctcatgatcttttactgaagtgcttaatgaaacatcaacattagtatcacatttgtccacctgttggtctctttggttcggactcttgtcattattatcgcatactgtcgcacttgactcatcattatttatacataggacaccagttagtttgtctgaagacaaactgttattaatataacgattatttaacctttgacgagttacgatagaagaaagaagctggtaccaccgacttaagggcctgtgtttcaatcccgtttcttttcttcagcttgtcgcctttcttcttcctctgcatatgcctctagcagtacatcctttgaactcagcacacaccacaataccatcaaagacaggatatgaacggccatttttaaattcaaaaccacctagcaggtgcataatcattttcaagtctcttggcaac

SEQ ID NO: 52318 - DNA, 279 bp, Glycine max
  unsure (1)..(279): unsure at all n locations
  Clone ID: PAT_MRT3847_18257C.1
cctagattcagccncagtttcggagnnagaagaaaatagtcgttngagancgcccgtacgaagcaaactgctcntaagttccacaggaggaaaggctnctaggaagcagcttgnaacnaaggctgcacgtaagtactgcaccnactactggtggtgtgaagnnncccacatcgttaccgtcctggtaccgttgctcttcgtgagattaggaaataccagaagagtaccgagcttttgatcaggaagcaccccttccagaggctggttcgtgaattgctc

SEQ ID NO: 52319 - DNA, 359 bp, Glycine max
  Clone ID: PAT_MRT3847_18258C.1
acgataattcaagaaagaatgaaagggccctggtagagttcacttttgctagtaaccagtgatatccgatttgttacatctatctacaaaattctctattaacggagtgtatatgcatgttattggttatctaggcggcagctacttgcttttgcccataattacgaacgacggttctgagttgactgcatctttctatttatttgaatgggatagagaacgtataaggggtatctggcactggctgacaggaaactaatgctaattgggggacacaatttggaccaagaacgcatggttgtcgggagaatacataattcatattcacaaatcaatttgggatcaactgctgggtccat

SEQ ID NO: 52320 - DNA, 375 bp, Glycine max
  Clone ID: PAT_MRT3847_18259C.1
ttgttgttcctttttcatctattatagtttccagtactctttcctttattgctccagtcttccttactcttaacagtagtactttcctagtctaatatcatgcaccaggcaatatagatatcttttgcattttcctggtctgggttgccacatttatagtcgtgtctgatctctaagttctgtcttctgattgcagttggaaaggatgaaaaacgagaatatgcttccttcagtagacggtcaaagccacgagtcaagttttccaggtctacaaagagaactgatgcaattacacgaggccaatcaagagttaggaaacatattccctgttttcgataaattctctatcagcggtaatgcattagaaagggtgct

SEQ ID NO: 52321 - DNA, 256 bp, Glycine max
  Clone ID: PAT_MRT3847_1825C.1
ggaacaaacagataactggatttattttttctcaaaggcaaggcaagccttttgatacattataccccaaaacaccaacaacagtgctcaggggggcagttattacatcggactttcacatgaacgcgtcataaagggggataaaagcaaattccttcaacacagggcctttagggtcaagcccagcacaattctttgggacttaaacggggacccaattcagcaattatttttaaagcactacgggtttgctgaa

SEQ ID NO: 52322 - DNA, 357 bp, Glycine max
  Clone ID: PAT_MRT3847_18260C.1
gccacgcgtccgacttgaccagctatacttgatgcttaagtaggttagaagagcttcgcggcgaacaatggcagctgctcatgaagatgtgaagctcttgggcatcgtgggaagcccatttgtgagcagggatcagatcgcccttaagtagacgggagttgaatacatatttactggagaaaatctgtgcagcaagagtgatctgcttctcaaatacaaccctgatcacaagatggttacagtgcatgatcacaatgagcaagccatagcagagtctcttgagattgatgaatacattgctgagacatggaagaacaaccccatcttgacctatgatccttaccaaatagccttggc

SEQ ID NO: 52323 - DNA, 701 bp, Glycine max
  Clone ID: PAT_MRT3847_18261C.1
atcggctgccagaagacgacagaagagggagaggaagagagttttgtgggggtaaggagaaggaagatggagaaggagaagcattggatatcgaaatcgaattcaaaggtgtgtaaaagatgcaagcaaaactatgagccggcttctaacacttgaacctcttgccgtttccacacttccttcttcgtttgtcgccgtcacgacgatcaaaagaggtactatgaattgggcccggatgatccaccttatgctgccaagttctatgactgttgtggggctgaagaccctgaagcttctggctgcacaaccaattttcatgtctcttatgacgaagactgatgatataatatctcatcttactacttagtattggacaatttaccatcatcatacttgtctcatttttaccaatatatatgttttcagattcttcatctataccttgttttgttgtgcacaaactgagtttgatgatcatgttttcttaatttctaatttttcatctgcacgtattccttgtaaatgattttcatattatttctaaacatcactagtggccatctctcgtgggatgcgattgcaattgggacttggaacactgccatgccttaccttttaggatttatgtttttccggtgctctacatcatatttttgagggtattgcggtcgtgtaataatatatgaatattattttattcc

SEQ ID NO: 52324 - DNA, 697 bp, Glycine max
  unsure (1)..(697): unsure at all n locations
  Clone ID: PAT_MRT3847_18262C.1
ccacgcgtccgcaagtagtcgcaactgatagtatatattttcatcaacttatttaattcggagcgaagcaatatccacgaacgtttacgtatgtcgggacaaatagaaaaactcaactggtagcaaacaattgatttatagggaagttattgctgattgggatcgaggaaggaatcttcgacttataggtagctttgcatactaggtagtgtgttctatattagattggaaactttcttggatattccatatatatctaataaaattaaaggtgaatatttattttggttattgaatttgaagtaagttgataaatttatgttccaaaattcaaattttaatttttaaaagtaaaaaaatgtgataaatttatgcatttattaatttctataattatcataaataaaaaaataaagaatttatgtgacacattcagagataaatttatcatcattttacaaaaacaaaaatgactctttattttaaaattaacctaattttttttcatctatcttatttattaaaaaaaaataaaatattgatgtataanttataatttcggtatctaaacattataattatanaattgtttaaaatagaatgattcttagcaacctaatatactaaatatactaaacattataanttntttttcatcatatgtttataggtgatgcaagtatactaaatattatta

SEQ ID NO: 52325 - DNA, 102 bp, Glycine max
  Clone ID: PAT_MRT3847_18263C.1
ttttatcagcagtcctgcctttgaaggctgaggtagcgggtgctgacctgccctggggagaaccttgctagacggagacacggggcaaaagagcctggtatt

SEQ ID NO: 52326 - DNA, 622 bp, Glycine max
  Clone ID: PAT_MRT3847_18264C.1
tcccagaacttcgccctgcttaagacgggttgcgctgtcctacgagaggaaacatgagaaacataacccactttgtttagtgagtgttgatcgagaattttccattttttcagccacaatagttgcaaccatcttctcagcaatatatgccgacatttgggcaaaatagtctcaaccatctttgctattcatgtttgagtatggtgggtcatttctccttcggccaaggtttcaaagtaaacccaacatttggattccaccagaagaagtttgaattatctctcttttctttgacataataagaatcctcgatttcgaatggtgttgtaatcgctagagtcctctcatgatgctctgctatagagatgcacccatcattggtttggtcaccttcaaccacctctaaatgccttttccttgttccagaaaaacaattgtagatgaaactgcactcatttcatgtattcactaatggcctaaaagcatattgaaattagcttacgatgaaacgaccatgaaaatagtcaatcgtcgacaactttcgattgtaacatccaatgcaactatgccataagtatttgacaacttttggctaaaatcagataccataatgttgtgtgac

SEQ ID NO: 52327 - DNA, 635 bp, Glycine max
  unsure (1)..(635): unsure at all n locations
  Clone ID: PAT_MRT3847_18265C.1
cccgcgtccgctcgttgaaattttgaatttaaagacgtttcttaagccccgtcgttaacattgaggatataatgttgttcgcgctaattcgaacactcgagctcccgcttccctgtttctctgaaaccacgtgtctaccgtgacctcgccgtgacctgtggcgtttgcccgcacccccgtgacctcgtccggcgtctcgtcttgtggcggcaccgcgcaagccagaattgaagctcggggtttcatttttggttctcccatataggagcaaagtttgtaccattgaggaaaccgaaaaaatgcctggcaaagttatttctcaagagcatattctggaatatggaagagactgtcttgagatgcatgttggtttggagctgttgaacctgctgagcatgctttagttgttgatgatttgattgcaactggtggaacactctgtgcagctatggacttactaggatttgatgcttggtgtagctgatcttcatacactanaggcagtggctgctgctgaatctgcaatttccacttttctgcaatctgctgctgctgaatctgttgaatcttgactgctgaattctgctgctgaatgctgagattgttcanggaattttctctctagctccctgaaa

SEQ ID NO: 52328 - DNA, 641 bp, Glycine max
  unsure (1)..(641): unsure at all n locations
  Clone ID: PAT_MRT3847_18266C.1
accccgaccaagccaaccagccaatttgggaattaaaacccaagggcaaacttaggggcctaaccagataacctaaccccaaaaggacgggggtttgnnntaaaaacctacccctggccatgggaattggtcttttaacataccaaaaagctttaaaagccaccaactcacactactattggaaggttctcttgggtttaggccacccaagccttacaccaaagggaccgtggtggttcaataccacaccctgccttttaataatccattgggaaaccacccttggaactcaaacccctaaattccaagttcaaggtgggcattaagcttggaacccacccaaccaggattaaccggggcactcccaaaccttaccctaaacttgggggaaatcatgggtgaagcccttaaagaaagggaaccaaagggggccctacccccaagttcttttttcnnctttttctcaaaatggccggcannnccatttgaaaaaccattccatggngaccggagggtatttttagaaccatttaaccacctgacccgggtttggggaantatattgaaaggcaagctnttattanncaacaagcnntccctnntgagatccgannnnnaaccannngtttttaatataagaa

SEQ ID NO: 52329 - DNA, 1251 bp, Glycine max
  Clone ID: PAT_MRT3847_18267C.1
tgcagctctaccacttcttccaaaacccctccattatgaagaacgctaacagcaacacaaaactaatccttctccacccttatatccaaaaacaaggaagctccaatcgcctatggcttttagccttcatatccttctttacattagccttccttgccacccttatttacacaagagacacaacctcatcttcctctaccactacctcttccaccccattatctagtttcgctaacacccctttaccatccactgtaatcaacaccctcctccactatgcctccaaatccaacgacaccttccacatgccccactcagacctaaaaaccatctctgacgtgctccgaaagtgtccctcaccatgcaacttcctcatcttcggcctcacccatgagaccctcctttggaaagccctcaaccacaacggaagaaccgtcttcatcgatgaaaaccggtactacgccgcgtacttcgaagaaaaacaccctgaaatcgatgcctatgacgtgcaatacacgaccaaaaggagcgagttgaaggagctgatagcttcgacgaaagaacaggtgggaaacgagtgcaggccagtgcagaatcttctgttttctgagtgcaagttagggctcaatgaccttccaaaccatgtttatgaagtggattgggatgtgatattggtggatggaccgaggggggattggccggaagctcccggaagaatgtctccgatcttcaccgctggcgttcttgcccggagcaagaagggtgggaaccccaagacgcatgtgtttgtgcatgacttctcagggaaagtggagaaggtttctgggaatgagtttttgtgcaaggaaaatttggtcgaggctactcatagtttgggacactatgtgctggaaaaaatggacgatagtagcgttcagtattgtaagaatcattcatcaggattcgcttcttcttcgtcttagttggtgtcttcaatgttactatatatatatatcgtccatctgggtatttaatatagtttccctgtttacttattggttggagcatgttaatgttgctcccttctttcttcgaccatctgggtatttatatagttgcactgtttacttctggagcttgtaaaagataatcctttcttcctttcctctttttctcgtttttcggtttctggcactgaagattgtaatttcttcaagaaggtcatgctttcaaatttcatttaggatgtttattataatgtccgtttaaggt

SEQ ID NO: 52330 - DNA, 490 bp, Glycine max
  unsure (1)..(490): unsure at all n locations
  Clone ID: PAT_MRT3847_18268C.1
tcccttttgattaaggctaagttgaacggaatgtcaataatcttgaaatatctatggtggcttagatgcattcctgatctgatttttgcttcagaagtttaccgtcaggaaataacagactgcaccaggccagagtgaactccccctggactgcatgtattaaggttattttttgtatgttataccttaaataaatttaaaatgctatttttacattgtataagaaaaaggtgagtagccaatggttgggggaaatcagtacttttggcatttccccccacctgattcctatagtatgaataaagatcgcatgaattcttggtgcagcaatgcatgcacaaatgaaattcttagaatttgaacttacgatctaactgaactccacaaaatcggcttacataatggacaaaaattctacaccctntaatttccatatagcttattattagaatatatcatttcatagttgctacacttattgtttggaact

SEQ ID NO: 52331 - DNA, 283 bp, Glycine max
  Clone ID: PAT_MRT3847_18269C.1
aaaaaaaaaggcccaaatttgctaaaagcaatttacgggccccggggcttttttttttgggtttattgggcccccctaactaaacaaacaaagcctaagggggcttcgcccttttgagaaggcttttagttttttaagtcattttgggacttgcaggggttgaagcaaaagtcgtgggggtaaaaaaaacaacactgtcctggttgggagcgggggccatacggtttttacaatttgggggggatgatttcggcctaatattttcacagctcgtttggggagg

SEQ ID NO: 52332 - DNA, 288 bp, Glycine max
  unsure (1)..(288): unsure at all n locations
  Clone ID: PAT_MRT3847_1826C.1
ttgcatttcatttggcgttttgtttctttctggaagcntcacttcggcatccatggcgtcgttcgaagaagtcctcccggaaactcnaataacggngagaagatcttcaagacnaagtgtgctcagttgntanancgtngaacagangtgccggtcntaaagnaagganccaatcngaanggtttggtttggaaggtcaatctgngaannanncctgggatgttncctantgcnactgntnaataatgaaanatggctggtgnttttgggngggaaagacccnntgtg

SEQ ID NO: 52333 - DNA, 269 bp, Glycine max
  Clone ID: PAT_MRT3847_18270C.1
tcgcgagcggcccctttttttttttttttgaagaaaacacagtaatcattttacaaaattgtgtgaactgtacctgaaaacgatggaaagattaaaagggaaaaagaaagaaagaaaaggtgttaagggtggattaaaacccattgtaaaaatctcatccacgggaggggaactcaaatgggaactcggtttcctaaattgaacaaaatccttaacgaattcccccattctcatagagtgaattcgtttcccggtcgctgaaaattttc

SEQ ID NO: 52334 - DNA, 1590 bp, Glycine max
  unsure (1)..(1590): unsure at all n locations
  Clone ID: PAT_MRT3847_18271C.1
atcggtgaatatttcaaagtttgaaacatctgagataaagtttttgaagactgactatcaagagtatctccagctaaaagctgccaaggaatctcaaacatcatctgctataagtggtcataactccactgcctgcatttctcaatctggaatgtggtacgggttggacgattggcgtaggaattgaatctcatggtctttactacctcaagcctaatctttcttgggtttgtagtgctgtcacatctccaaagctccttcatgaacgtttgggacacccacatttatctaaattaaaaataatggttccgagtcttgaaaaaataaaggacctattttgtgagtcatgtcaactaggaaaacatgtccgttcttcttttaggcatgttgaaagtcgtgttgattccccttttttggttattcactttgatatatggggtcctaatcgtgtttcgtctatgagttatagatattttgttactttcattgatgaattttctcaatgtactagggttttcttaatgaaagaacgatctgaaattttatccattctcacttcttttgttaatgaaattaaaactcagtttggtaagacaattaagatccctatgagtgataatgcgaaagaatacttttcttctactatttcttcttttttgtcagtgcatgacattctccatcagtcctcttgtcctcatactcctcaacagaatggcattgccgaaaggaataataggcatctttttgagattgctcggacattattacttcatgccaatgtacctggctggcattggggtgatgcagttttgacagcctgttttttgataaatcggatgccttcttcctctattaaaaataaaataccacattccattttgtttcctaaagaaccgttgtttcatgttgatccacatatttttggatgcacctgttttgttcataacttgtctccaggtcttgataagcttgctgcttgagccatcaaatgtgttttccttggatattctagattacaaaaaggttatcgatgttactctcctgttcacaattgttattatatctctgcaaatgtaacattttttgaagaaaaactatacttggctccctccatgattgagttcaatactcttcaagaagtttttcctattccctatattggtccattgccttctttgcaagaatcaaagtcaactgtagattctaccatagatattcctgacaatcctccacttgagcagactcaaagatcacccatcgtatatcgacatcgtcctctaattcctgacgcagaacttaaaggtaatgaaagaccagctgaatcatgtcctactccagcagacaactcgaccatggacctacccgaagagaatcttgacttgcccattgcttttaggaaagatactcgatctacacataatccttatcctatttataacttcttaagttatcattgtctctcttcttcgtaccattcttttgtttcctctttatcttctgtttctcttcttaaaaatctttgtgaagcacttgatcatncaggatgacaacangccctgatngataaaatgcaagctttggagcataatg

SEQ ID NO: 52335 - DNA, 366 bp, Glycine max
  Clone ID: PAT_MRT3847_18272C.1
ccacgcgtcagaacagctgagagaggacatctgatggggactctatgactattcatgatgccatacgtgtatcggttacatactggatccatgctaaaggagtgttatggcaaaacttcgatcgatacgacgcgtaataaaacaacttgcgactagatagacttgaatagaatatctgtggattctgacatactgcatttgttctactttatagagcatgaacatgactcttgactcgacatgcgcatggactcgagcactagaacttattagtctgtggaccggaaaccagcctatgatgtaggaggatgatgtaaactatgacactgatgcagatagagatgatcatttgtcaggggcaattat

SEQ ID NO: 52336 - DNA, 305 bp, Glycine max
  Clone ID: PAT_MRT3847_18273C.1
taaattacgcgtacttacatgatcaagcacgctttttataaggtttacggcgctcccaaaccaccaccacacggcgagtacagcctgtcatacatatacgaccgactaagtgatactattaaccgaactggagtcttccaccaccaccactcccaatcgaacttctccgctagtacgctcataataacgcatctcctcacagaacctcccagccacacgcgccgaccctccccatacacctcgaaaccaacaaaccttaccagccctcggaatcacccacccggacactctacaactctccacct

SEQ ID NO: 52337 - DNA, 188 bp, Glycine max
  Clone ID: PAT_MRT3847_18274C.1
gcacagagactcgcaggccccgagaactgtcgcccttccacgatgtggctccgcaccgttatcctggccactctctctgcttccgcggcttgggggcattacgtctcgccacctgtggtggacaccgtgcatggcaaagtgctggggaagttcgtcagcttagaaggatttgcacatcctgtggccat

SEQ ID NO: 52338 - DNA, 645 bp, Glycine max
  Clone ID: PAT_MRT3847_18275C.1
aaaacccctttcagttaggttgggtcgaccaagtttgcaggctgacccatattcgtctacattcttaaaataaactaataaagtcatgactataaggtccacgcttattggaatcttttgggcttcattccactccatttcttgttggggttccatctctccaatttaacagggaggggaaagggatcagtgttgttctgcaaagaggtggcgaaggcgagaagcgaagaggccggtggaatcttgagaagcttctcgaaggaggtcgttcttgatgttgttgatgcggtcggtgagagaaccgtggtcgaccctgagggcgtggatgtcttcttggaggccatggattttgtacttctgactcaaagatcgcatgctcaatagaaggatacccgtcatggcgaagaattggatgaagctgtccttccgttgcttcgcgtgcgccataaaccctaatatcttcctcgaatgttccgcggcggcgctcggtcgaggagaagctgaagaagaagccatgccgatctatccacaacacgaccgatactattactcacccacctacaacagaacctccctgctttctttcctcgctgatcacaaattgcaatgaatgtcgacggattcacctgtgtaatcccctcgtgc

SEQ ID NO: 52339 - DNA, 234 bp, Glycine max
  Clone ID: PAT_MRT3847_18276C.1
ggacggtaaagaggtgtgacctttgtctaattccgacgatgttccctttttatctattttccccttggacagaaacatttcacaacaatatgattcgcaggtcagtgttgaagaataaaggttccatttttatctattttattcctttttgttgtctaattttttgtggtgatttttgggacaagctaacggcggtgctgaaggtgacgatgttttgccatgcaagggccttct

SEQ ID NO: 52340 - DNA, 1869 bp, Glycine max
  Clone ID: PAT_MRT3847_18277C.1
cgacccacgcgtccgcttatacatagaaagggtttatttatatacttataataacaatggtttctattcgctaaaactcagcgtcacattcacccgcacaacaaagtacaacacagtgcaggggctcaattatggagaaagcaattcaaagacagagagttctgcttgaacatcttcaacccatttcttcaagttcaaatttttcctctcaaacccatcaatctacggatctctcagtcttttcccacttcttgttaggcttcattatgttttgctgggaattcttcgcatggtcaaacaggtggatcagatgatgacgtggtgattgtagctgcatatcgtactgccatctgcaaagcaaagcgtgggggctttaaggatacccttccagatgacctgcttgccacagttctgaaggctgtaatagagaaaacaaatgtgaacccagcagaagttggagacattgtcgtgggcactgtactggcacctggatcagatagaggaattgagtgcagaatggctgccttttatgcaggtttcccagagactgtgcctcttcgaactgtcaatcggcagtgttcatctggacttcaggcggtttctgacgtagctgcctatataaaagccgggttctatgacattggtattggggctggactggagtctatgacagtagatcgtgtgaataggcttcccaacattaacccaaaggtagagacctttgcagaagcccgggattgtcttcttccaatgggaatcacttctgagaatgtagcacaacgttatggtgtgacaaggctagagcaagatcaggctgctgttgagtctcacaagcgagctgcagctgcaacagcagctggcaagttcaaagaagaaatcattccagtttctacaaagtttgtggaccctaaaactggagtggagaagaaaattattgtttctgtcgatgatggtatccggccaaacacaaatttagcagatttggcaaagctgaagcctgcattccagaaagatggaaccacgacagcagggaatgctagccaaattagtgatggtgcagcagctgtgctcctcatgaagagaagagtggctgtgcaaaaggggcttcctattcttggaatcttcaggagttttgctgctgttggagtagatcctgcagtcatgggtgttggccctgctgttgctatcccagctgcagtgaaatctgctggtcttgaacttggcaacattgacttatttgaaatcaatgaggcatttgcatcgcagtatgtttattgcctcaagaaattgggacttgatcccagaaaggtcaatgtcaatggtggtgccattgctcttggacatcctttgggcgttacaggtgcacgttgtgttgcaactttgttgaatgagatgaaacgcggtggcaaggattgtcgctttggtgtaatctcaatgtgcatagggtcaggtatgggagctgctgctgtatttgaaaggggggacttttaaagatttgtgcaagtttagaatagttcataaaaataacgatcttttgtcaccggatgcttgatattagacataatttgaagtgtttctattttgaattcagttttggttgaaatgttacaaaaaattggaagtgtaaacaagatttattttaaccatgaattatgactcaactatagcattgagtttgctaactcaattttgcccttgttgtaagataatctctttcaaacaaaaagataagaaaatgaaacaaggaagatacaaaaatgttaatgaacccaaaatacaattctcgctacttaagagtggatactttgaccatgacttaaatattaccttggccacatagcctaagtaatttgtgggtaaagtaagtat

SEQ ID NO: 52341 - DNA, 292 bp, Glycine max
  Clone ID: PAT_MRT3847_18278C.1
ggctcgagctaacacgtacctttttgcgagtagctgggagagcaatgcgtgaggaatcgcatatgtggcgccgggtggatcgggggacatttgtgggaggcgagcgcaccgggtggactgggaactttcgctgcaggtgcgggtaagcagcctctgagactaccctatgcacataacaatgccacctacagtggctaccaccacacctttaattctctgggatctgaccgatcctcttactgtgttgaaggctatgaatctggtagctgacaaatttttctcgctttgcttg

SEQ ID NO: 52342 - DNA, 329 bp, Glycine max
  Clone ID: PAT_MRT3847_18279C.1
gcacgagcatctttacttcctgtcaagtttcagtccaagtagctggcttcatttttttcaggtaataacatatatttcctttctctatacaatacttcttcacatacatcttttcataattattaatttgtagtattattttagtttgtgaccagagaaaagtgctgagaagatgcatgaagttaagatcaatggatctaaattaaaacataacaaaatgggcgacataatatatacatttcctttcatttgttggttaattatcccctcatcgtttttcttgcttgtttctttcaataagaggcaagagagggagggtggtggtggtg

SEQ ID NO: 52343 - DNA, 429 bp, Glycine max
  Clone ID: PAT_MRT3847_1827C.1
aattgattcaatagttcttagagttcatgtgtgctttaagaacgaacgtctgtgcaagcgaaatacgaacatatatctcattttaaatgtaaaataattggtgggatatcagaaaagaatgcttgcttcactgcaccctttacgaattgtgagtgctaaattggaaaagtagatcaaatgtgaaccaacggccagtactataaactcgcgagtttctaaaaatcaaacaaaacaagaaactcacaagttctgccatggtagacagagatagatgtttggaaaattgtgattccactgggtttagagcactggctattttgtcaggcagagtctacatgcttgtcatgtttttattcctcctctttagtttacaacgatccttcaccttgatcttgtgatacagtccactcatacccaagatgtgcaagt

SEQ ID NO: 52344 - DNA, 287 bp, Glycine max
  Clone ID: PAT_MRT3847_18280C.1
acggctgcgggaagaccaccgaagggggagaaaaacgagcccattcatcattttctctcttctgtgcttcttcttgtccaaatctttaggagctcgaggagaatcaacccgagagaaattatgtcctggtatccgctcgcggacgcctttgctggggatctttttgtctggggggggaaccatccccccggcttcgtcgcccagccccagactctacctgatggcccccgatacttgacggtctggccttgcactattacctggccagaccgggactgattgggagg

SEQ ID NO: 52345 - DNA, 349 bp, Glycine max
  unsure (1)..(349): unsure at all n locations
  Clone ID: PAT_MRT3847_18281C.1
agntggtanaagtngcatgaactnggangtnagncggcgaggttgaggtggnganntgggaaggcgngagtanaagnnnangaagtgtnaanggggngcaagtatgngtaggtgtagggtgnaganaagngnttggntgtnntgtngggttgnaangactggggagngngtngnggngtnanggntcgagngggannncncgannagnggggtgnnatnngagggtganngggatgangggggtggnnggngngnattgggtgtaggcncannaagnggnanngnganntanggggntgngggggannnaaaaaaanagnatggagtnntatggagggtgnggngnann

SEQ ID NO: 52346 - DNA, 465 bp, Glycine max
  Clone ID: PAT_MRT3847_18282C.1
atgaggtctgcttggtaactagttttgaagtgatggaccacttaatattccctcaaactcctgaatcttgttttggtagacaaactcctcagtctatgaattactgtttgggtaatacttcatgagagtgaaaatggaaaaaaaaaaggcggaaaattgaatggtgaaaatgagatgttatacttaaacttagtgcatgtttcgtttgaattaaatgacatgattattaacgtcaaatcatatgaagcagctattcatagttttcatgttttttgagacaattacgcgaaaatacaagtatacatgcgtcccttaagccaatccaaacacgctgttacatgatgatgaccaaccttgtcaaattcacatatatggctatggtgatggctgttttgggagatgttgtctcttttataagactgacatgcagcagttgaaaaagggtggaaggcaaggttttataaa

SEQ ID NO: 52347 - DNA, 1492 bp, Glycine max
  Clone ID: PAT_MRT3847_18283C.1
ctcgatccgcgatctgccgcccttttttttttaagccgaaaactattttttgggtctttttggtagaacgaatgtcgcgtttagagttggaaaaatcaagataaaaatggaaaatagaaaatagaaaaagtattttggtccaccttccgtcttctatcgccgttgtcttcctccatcgtgttagggtttccactttgcagagtttcaatttactctcattatcacatcgcaattcctccgtgtttctgttttgataactcgcaaatattctacttaatagcccgacatctcgttccctgaatactgattttgagctttcccctgatttttttagggaaacaaattattgccccttccttttttccaatcatctccagtgaaaaaaaaaaaaaaaaactatatctgaagtttattggggatcgggtattgggaaatgcctcgagacttgtcacgatcccgatcgcctccctataggcggaggcattcaccatctcctgtgggacacaggtatagcaggaggagcagaagagacagaagcagatctccttattcgtcctactcttacagcaggcgaaaaagtcgttctatttcaccaagaggtcacagaagtccttctacaactccaagacgtggtagaagccgatctccatctgctaaacgatacagaagacatagaagtaggagttcctcattgtctcctactcgtaaatcttccagtccaagtcttgggtcagtagagcacaaaagtgccactgaaaaactaaagaaagaagaagagaagaaaaggcgtcaactagaagcagagttgaaattaatagaagaagagactgcaaagagagttgaagaagcaatccgtaagagagttgaagaaagcttgaaatctgaggaggttcaggtggagattgaaaggcggttggaagagggacggaagagacttaatgatgaagttgcagctcaacttgaaaaagaaaaggaagctgctattattgaggctaaacagaaggaggagcaagcccgtaaagagaaagaagatcttgaaaggatgcttgaggagaaccggaggaaggttgaagaagctcagagaagggaagctttagagcagcaaagaagggaggaagaaagatataaagagctagaagagatgcaaagacagaaggaagaagccatgcgaaggaagaaacacgaggaggagcaagaacgtctaaaccaaataaagttgttgggtaaaaacaaatcccgaccaaaattgtcatttgctcttggatccaaatgaccatgggcttcggcaacatgtgtctatttatttagtctaaagtgtgtatgggcttaatttaattccctatttgtgtctgtaatttgaggaaattatacagccctcctcagctatagtgtgacagcgttgttactgtttccagtttgcattagatttcattgtttgtcattgccacaaaattctccaaaaaaaaaaaaaaaaaaaaacaaaaaaaaaaaa

SEQ ID NO: 52348 - DNA, 263 bp, Glycine max
  Clone ID: PAT_MRT3847_18284C.1
catactgtatgagtcctccttctttggggggggggggggggactaaaagtgcaaggccgtaagggccagtaaaacaacaaaatacacgaaataaaggcaaacctaaccaaattttcaaactatgcgttgtgcgttggatgttagaatagtgttttgtaaaggtatagtaaatctaatataaacgagcccagtaaacaactaaaaaatagactaataaggccccacgttagtactacggctacagcagcgagaacaacacgccg

SEQ ID NO: 52349 - DNA, 691 bp, Glycine max
  unsure (1)..(691): unsure at all n locations
  Clone ID: PAT_MRT3847_18285C.1
caccaccgaagtacacgactgggccgttctagttcagttgttaacactcatatcctgttacaaatcacttgtgctcttatcgtcgtttgttcctcacttttttctttcattcagtttcagtgtcacaatccatcacaaaaacgtgttcaactatactgatattggaggtacaaggatcatgcttgggaacggggttgttgggatcttggcagaatctgtgaataaatgggaaagaagggcacctttgaccccatcacactgtgctcgattactccatggtgggacaggtgtttctaggatcattgtgcagccttccactaagcgaattcaccatgatgctctctatgaagaagttggtgctgaaatatcacaagacttgtcacaatgtggtctcatccttggcattaagcaaccaaagctggagatgatattaccagatagagcttatgccttcttctcacatacacataaagcacagaaagaaaacatgcctttgctggataagattctagctgagagggcatcgntatatgactatgaattaattgttggggacaatgggaaaagattacttgcatttggaaaatttgctggtagagctgggatgattgaccttttgcgcggattaggacacgggttttaagtcttggatattcacaaccttcttgtcacttggaacatttacatgtat

SEQ ID NO: 52350 - DNA, 496 bp, Glycine max
  Clone ID: PAT_MRT3847_18286C.1
ttgggggtgggggggggggggggggggggggggggggggggggggggggggggggggggggcgggggggggggggggggggggggggggggggggggggttttaaaaaaaacccccgaagggccttcccctaaaaaaggtttaccctttgggtaaccaaaaacccccccgggggaattttaccccgaggttttccctaaaaagggggtttaaaaaaaataccccattaaaaaccctaagggtttaaaaaacaccgcccccttctgaaattttggggcctaaaactgggctttaacccccccaaccttaatttccaaacccccggtggtaggccaaaacccctcccccctttttggaaaaaccccctccaaattttaaacccctaaaatttttttaaaaattttgcccaaaaaaaacccccccaattaccaaggtttggaaaaaaaatcccctgggagctttttccccctgggcaacaaaaaaaagttttccccggg

SEQ ID NO: 52351 - DNA, 138 bp, Glycine max
  Clone ID: PAT_MRT3847_18287C.1
ctgattctcaatgctctctctatgttacagcatgatttacatctattgagcacattgggggtgcatgatggcttaggatgagagtcttttttaagtgtggactgtggacaacttgatgagcaacatcagttgctgaag

SEQ ID NO: 52352 - DNA, 422 bp, Glycine max
  Clone ID: PAT_MRT3847_18288C.1
ggctgctctgtgtctgacgcgccggctttggttgatgagaagacatagttcgacgtggtgatctatgaggtgcctagcaactcttgaatcgctgtgattaatgcagcaagctcattcacgaacctagcgctgaaagacgccaacgagtatatctaatggttgccgaagaagttcaagtaacggatttcaaaggacgaatctgtagatgcgaaaaagcatctctaagaaactggagccaatgtcaccattgcttaaacactgtatatctgcaacatatatctgctgcttctgcttttgttcgttgtagctgagttcaccactacactgatatctcattatcattatgtctggattccaatcctctatttgtcatgaagaaatatgacttcttatatgaatattatcattcttaatgcgtatga

SEQ ID NO: 52353 - DNA, 1256 bp, Glycine max
  Clone ID: PAT_MRT3847_18289C.1
cctgtatgggggttgggggcttgatttggcaggtggaagagattcactttgttgggttcttgagcaagcttcttgaaacaaaaataatgcaggttctccgtttcaagcatgggcagatatactctgtaggtgtttcagtatttcttggtggtaataaaccctcaagaataggtgactttcgtggagacattagcataaatttctcatgtgatccagagatatcttccaagctggtagatattgctttggatgaaatgttacgtcttcaagacgaagggccttcagaacaggatgtttcaaccatacttgaaattgagcaacgagctcatgaaaatggactgcaggaaaattattactggttggataggattttgcacagctatcaatcaagagtctattctggtgatgttggcacttcttttgagattcaagatgaagggcgatcaaaagttagatcatcccttacaccatcgactgcacagtttgcactaaaaagaatattgccttttccttccaaaaataagtatactgttgtgattctaatgcccaaggcttctcctttacaattgctgaaatctgtaatccaatctgctcgaacaaactatggcagagaagcaaagattttggcaggagttactggcctagcagttttggcattcagtttgtggagacgtgcccaaaataatagcagacatttgcttagcagagccgcgaattagaagttttccaacacttgcaattctttatttcactcaagacaccaaacgtacataacattgtgagagtaggttttgtaatatattggttagtgatgacttaggaggcaaattaggtctgtttacgtggccccgatgaaggcttgaaatgaaacaaatgtacattgatttgtgctgcagaggattgtatcgtgcagctactcttgcttttttacaaaaggaacgggaaaccggatggtggcgcgacattgcttccataaccctggttatttttctaatctttcagaaagcagtagttctggttgacatagttcctgaacaagtctgcagaataagagggttggtgattcaaggcacgttggcgctgcatctgtatgccctttattattattattttttctctttcttttttaccttttcacaagtgtgggaaaagagcagaaacttatttgttaacttttaggagctgtataccttttttacctttattggttttgattttgacagaattaactatatagaaaaatggatgttttaaaa

SEQ ID NO: 52354 - DNA, 805 bp, Glycine max
  unsure (1)..(805): unsure at all n locations
  Clone ID: PAT_MRT3847_1828C.1
ggccgtgcctcccacatacgccgatcttggcaagtccgccagggatgtcttcaccaagggctacggctttggcttaataaaacttgatttgaaaacgaagtcagagaatggattggaatttaccagctcaggctctgccaacacggaaaccaccaaagtgaacggcagcctggaaaccaagtacagatggactgagtatgggctgacgtttacagagaagtggaacacagacaacaccctgggcactgagatcactgtggaagaccagcttgctcgtggactgaagctcacctttgattcgtcattctcgccgaacactgggaaaaaaaatgctaaaatcaagacagggtacaagagggagcacatcaacctcggctgtgacgtggactttgacatcgctgggccctcgatccggggcgctctggtgcttggctatgagggttggctggctggctaccagatgaattttgagacctcgaagtcccgagtgacccagagcaacttcgcagttggctataagacggatgaattccagcttcatactaatgtgaatgacgggacagagtttggtggctccatttaccagaaggtgaacaagaagttggagactgctgtcaatctcgcctggactgcaggaaacagtaacactcgcttcggaatagcagccaagtatcaggtcgaccctgatgcctgcttttncgccaaagtgaacaactctagcctgattggcttanggtacactcagaccctaaaccaggtatcaaactgacgttgtcagccctgctcgatgcaaggacgtcaatgc

SEQ ID NO: 52355 - DNA, 512 bp, Glycine max
  unsure (1)..(512): unsure at all n locations
  Clone ID: PAT_MRT3847_18290C.1
ccacgcgtccgggaattggaagcatgaacaagcagcagcaggcgtacgggtacggaaatgggcagcaggccgacgtcccaggctactgctgtttccatccccgggaggtcggcgtcggcgtctgcgctcactgcctcaaggatcgcctcctcctcctcctcgccgttgccaacaacaataagatcgacgacgacgcccgccgcaaaagcaggagcaggagcaggagcatctccctccccaaggtcttcgcgctcggctcctccttcctccagcgcctcgactcccgccaccaccggggacgagggcgggacaacaactgctactccgacgacgacgacgccaccgnctncgtcgcaagcctcgatgattccttcatctccatcaaattcgaggacaacggcaaggcgacgtgggacagccagagccagcacaaggcggcagctcccgcgaggtcgtcgtcgacgacgaccatggtagcggtggagcacgtcaagcgtgtcggcgtcacccgg

SEQ ID NO: 52356 - DNA, 324 bp, Glycine max
  unsure (1)..(324): unsure at all n locations
  Clone ID: PAT_MRT3847_18291C.1
ccactcatccactcaccaatctcactttacgacaatcatactttntctatctaccctctaacgacgtctagtaacatttaacaggaccaggacaccaacacacgagattagctactcaaatactacatctgtaacaagttattatataatggtattccatccaaagttcaaggtttacagtttggccaaccacctctccatccccacattcacccaaaaccttcttcaaaacaactagtataatatgagacattcttaagaccaacatctaatgaagattacatttttcacacattcaaactaccttatcatacccaattctat

SEQ ID NO: 52357 - DNA, 369 bp, Glycine max
  Clone ID: PAT_MRT3847_18292C.1
gactcatataatgagtttttgaaaatcaaatgggttttgcacaggtctaaactcacaacttattggaaggatgttacagaatcctggtttttctattcacacgccaatttttcctgagaattgccatcttgcacaattggccaatctcactgttcctttacaaatggaggttgttttggtccggaggggaaaattgcttcaggacctaaaatggcattcctaacactaattaaaaaaatggttttattatccaggcctaacatgctgatcacagctagctttataacccaatcaagtcatctgtgttggttacggcatatgttgacttcttgatgaagtaggttgctatttatttcatgagtttatatc

SEQ ID NO: 52358 - DNA, 586 bp, Glycine max
  Clone ID: PAT_MRT3847_18293C.1
ttaaggagctagtcacattgttccataattaagtatcagtttcgatcaggttccccagcacttacccatatcctcaaaataaatataatttatctcatcaatgataatatgatgtacttacacttcaaaaattttcgtccaagaattgcattgctaacttttgaatcatcatccataaaactataaaagaggtattgaaaaaagttgatatagaagattcccaccataatgaataataaaaatacttaaaactatttataagttttagttgtatttcttgcaaaatatgactctgccttgttacaatgattatatttgcacatggtggtgctgcctcttatcattctgtatcactgttgtggagaaactaacatgtaaattatctattaatttaatattaagagttcttatattttgtttattggatctagctctattattgaatgacgacacattccttcctatgcatgacttttgagtaataattaattcggttaacaattatatatttgtcattggtactaaagttgtttgcttagtttgctgcgaaagtcaccgaaatggacttgttttgagcttttgttgc

SEQ ID NO: 52359 - DNA, 169 bp, Glycine max
  Clone ID: PAT_MRT3847_18294C.1
caacgaagagctaggtacttgcccagtgaggcagattggtggatgctctgtcttctacatgaggatcagtaatgtctacctagtcattgtagtcagcgacaacgccaatgacgcttgcgcaatcgacgttgaagttgaggctgttgcattgctccgatcagacctgggt

SEQ ID NO: 52360 - DNA, 358 bp, Glycine max
  unsure (1)..(358): unsure at all n locations
  Clone ID: PAT_MRT3847_18295C.1
gggtgttctttttttttttttttttccttgggggntttgagcacaacaatgcccatttttttttttccaacagaatgggggcattcaacatgcttaaaccattttattatttgcttgacacattttattctgtacaaccaccactttaacacgtttcctgaatcctgatagcattgggcatgaacaaacatttccaagcatttttgattagatgtttgcaatttcaaaacattttttaagaaaataaaggttttcattcagttttctcaaaacataacaaacatttttttttatttgaagaaaattgggcaatacaataatttttctgggtcccccctttccgggaaaacgaagaaaa

SEQ ID NO: 52361 - DNA, 422 bp, Glycine max
  Clone ID: PAT_MRT3847_18296C.1
gagaaagagagagagagagtgagaaactgttttaaattcgcaaaccctaagttcggaaaggggggctatggctgtctccaaggatcgcgagaacttcgactacatcgccaagctcgtcgaacaggccgagcgatactaagtgatagtggaatcaatgccgaacgcagcgctactagacgccgcaccaactgtaaagcagcgaaagaccctaacaagccaaagaggcctcctagtgctttcttcgatttcatggatgacttcaagaatgtattcaacatataacatcctgaaaacaaatcatcgtctgctgtgggcaaagctactggagcaaaatgcaagaccatgtctgatgctgaaaaagcaccttatgtggcaaagtctgataaaaggacagtggagcacgagaagatcatgccagccta

SEQ ID NO: 52362 - DNA, 382 bp, Glycine max
  Clone ID: PAT_MRT3847_18297C.1
gaagctgatggatgagggatatttgagatttagatggtatcttgaattgaacgcccgtagctgcatagcagcatttagtctgagatttaggaaaaaagaaaatgcttagttcataccagcatgcattaggatcaaaaaagagcaatgctagagaatcaggccaacttgttccatggaagttctgataatggacaatgctttatcacactcataaaagaatgggaaggcattgcgtcaagctttggggtcttgatcccacttatggcaattaagaaaatgctccagaatatctgtttctagaggatcggatagggaaagatcttctgaaaagagaagtgcttatggtatagatatataatgtgatacacctatcataaaacag

SEQ ID NO: 52363 - DNA, 278 bp, Glycine max
  Clone ID: PAT_MRT3847_18298C.1
cggtctcgtgggtggtagtggacgtggtggctcacccaccactgctcggattagtccagcagtctaacaatcgctcctcagatatcaacaaaaggattttctcagctctctggaaaggataagaataatgtatttattactaaagttgttccttttccagtggatctactggacgatctttatgtcgttaataatgaaattatgagttctaatgccactaaacctatgctgacgcgacaacttgagaactgtaagagtctcatatatcttgttaatga

SEQ ID NO: 52364 - DNA, 281 bp, Glycine max
  Clone ID: PAT_MRT3847_18299C.1
aggccaagggtgtcccgggacctaaattaagcaaaaaaaccaggtcttcacaaaacaaaaaccctcttgtaattgcactttcatgctcacagaacccaacaatgcaacacggtatataaatataatctgacgattcttctaaccgaatgcaattcataagccgtgcttgaggatcttcctcctcgcaaggaacctgtctatgggaggagtgagggcaactgtgatgggaacgcacacggagaacagttctttggtgcagatgatctccagcgtgaatgcgc

SEQ ID NO: 52365 - DNA, 143 bp, Glycine max
  Clone ID: PAT_MRT3847_1829C.1
cgagccgtgttctgatgcatggcgtttggagtttctggagcgtaccggatttcgttgtgatgtcgtttgtgtcactggatggtgtgccaccccactgcaggatgctcaggttagacttgattcgtttgtttcctctcaggggt

SEQ ID NO: 52366 - DNA, 491 bp, Glycine max
  Clone ID: PAT_MRT3847_182C.1
actaccctggctgggacattacgtacgctcgataatgaaatgcttcccggtatcaaatggcgaaccaactctcgaatattggtacaaaggccaggttatgaatcctgttctggcctgtaattatcccataccaaccctgcactcatcctttgctttatgcccctttttctataactaggtaccgtgggcaaaataaaccattaacgatgtgtatccatacatagtcctccatgtacctctttttcttttcaccataacaaaataggccccaaacactggtcttccttactgcatctaacttttcttgaacatttgcttctctgctggagttaactgtaacctgtcctttatcacagatcaactccatcgtggggcagggtgagatatcaagagtgattcagctcgggttctttcccacccaattagagactcctgcataaccacctctataccttttatcttgttagcacccgcggtctttctcacagggt

SEQ ID NO: 52367 - DNA, 2097 bp, Glycine max
  Clone ID: PAT_MRT3847_18300C.1
cccacgcgtccgaagggatttataggcgagttcaacatgccaaagaatgaaaatccttcctcagtggaatttcaattccagtggctgtatacaaatggattactcgcaatcattttctgttttggactactcgtcactgcccttaaaagcagaagagctagaacgtggcgatatggaacagggtggctacgaggatttatagcagattatggggttccaatgatggtagtgttatggactgcactgtcttatactgtaccaggcaaagttccagatggtgttcctagaaggctcatttctccccttccctgggatgctgcatctctctatcactggacagtagtgaaggacatggggaaggtaccagtggtttatatatttggggcaattattccagctctgatgatagcaggcttatactttttcgatcacagcgtagcttcgcagatggcgcaacagaaagaatttaaccttcaaaagccatctgcctaccactatgatgttttgctgcttggaataatgactttgatttgcgggatccttggccttcctccttcaaatggagtccttccacagtcccccatgcatacaaagagtttagcagttcttaggaggcggatgatccgaaagaaggtggtgaagagcgccaaggaatgtattaagcaacgaaggaccaactctgaattatatggaaagatgcaagaggtgattgtagatatggatacagaccctacggttaaagaattggagaatttgaaggaggctgtaatgcaatctgatagcaaggatggagcaaaggaaaaatttgatcctgagaaacacatagatgaatatctaccagtgcgggttaatgagcaaagaatgaccaacttattgcagtctctcctggttgctgtatcaatcttagccatgtcagttatcaaaaggataccaacctcagttctatggggatattttgcttacatggcaattgatagtctcccagggaatcagttctgggaaaggatattgcttctcttcgtcacctcaagccggcgttacaaaattttggaaggttctcatgcctcttttgtggagacagtaccattcaagaccatagctgcatttacagccttacagttagtatattttgcgttatgtttcggggtgacttggatacctataggtggaatattgttccccgtaccattcttccttctcataattataagagaacacttgcttccaaagatgttcaagcctaaccatcttcaagaactagatgcttctggttatgaggaaattattggtgctccacatggttcactgagggataaggagccagatactgatactgatggaagctcggaagacttttacgatgcagagatattggatgagatgacaaccaacaggggagagttgaaacttagaactgtaagcagcttcaatgatagaaaccacagcttcagtgaagacggacacacacaggtttatcctggaaatgctgtctgaatatggtgaaatctcactgcaccaaccattttttaggatgcagaaaggatttgggataatagtatgttcctctgtaaaggagtgctcataattttttgtgtggtccgttaaggttgaagatgatcttctgtggaacaagaaaggattcaatcggtgaaagagatgaaatgcaaaaagaatcagaagtggacaaaaaatgcatttgaactttgaaatgggctttcaatattggtaggaaaacacactgaaatgttgagatcaagggttaattccttccttagatggctacaaagttctcaaaataatgagtcaggttcgggtggagggaaaagactcgtgttatgagggggaaaaggaaaagggagggtaaagcaaggaaatgagaatactatacaattattttttgaagttaaaatatagatagatgtcagtagagtattctttattttttttttgttaacactcattgttttcattggatacagtagagagtttgcaaggaaactttatcaattcaattggcctgagtaccatgcttaattattttgtttgtaacaatcaacaaaggcgaagggtattccatcagagcattcaacgacacta

SEQ ID NO: 52368 - DNA, 304 bp, Glycine max
  Clone ID: PAT_MRT3847_18301C.1
gcggacgaagcacgaattcggctcggggcaagacacgttttttacctactaaacatacataatccctgccactatatcccattgcgagcgcgcacaacctaaaacaacaccttcacatactaaatcaaccatgtcgactgaacacaagtacgaaggctgtggcgcgtttgacaagaactcgatcaaggtcgagctcaagtggttcgagtacgaacccaagccattcgttgatgatgatgtcaagctcgaaatccaatactcgtggatctgctgctcgcacctgcacaccatttcctatggctgt

SEQ ID NO: 52369 - DNA, 165 bp, Glycine max
  unsure (1)..(165): unsure at all n locations
  Clone ID: PAT_MRT3847_18302C.1
ttnggttttggttctttctcgcttanaaaacaccctctaccgnctctaagtgcttcnggaacccgtgccgctgcccaggcgctggccaaatctcactcttctttactcttcttgctgcaagagaagaaaacaaccctcacattcaccacancagcacacacagac

SEQ ID NO: 52370 - DNA, 458 bp, Glycine max
  Clone ID: PAT_MRT3847_18303C.1
tcccagggaaggggagaaatgagccttctaggaacaccatctggaactttgcctggtacagtataagacagtgcagtccataacactaccatcattggaaccccataatctgctataaatcctcgtagccaccctgcattgcaagccagagtaagaatatataaagtggtatttgagattatttacttaacacaaaaacattgtgtacataaaagctctatcttgtaagatatttttggggttatttacctgttccatatcgccacgttctagctcttctgcttttaagggcagtgacgagtagtccaaaacagaaaatgattgcgagtaatccatttgtatacagccactggaattgaaattccactgaggaaggattttcattctttggcatgttgaactcgcctatcaatccctgcgattcaaggtttaaataagtgtcatgctgagttctgcag

SEQ ID NO: 52371 - DNA, 387 bp, Glycine max
  Clone ID: PAT_MRT3847_18304C.1
gccgactatcgaggtcgttctccatgctgttaattccagccctgtcctttaaggcgtaccacttttacatatcgtgagtacaattactaccattgggttcaatgttgagactgtggtactgagtaacattggcttcactgtacggtatgacgcaggacacgacacgattgcatcctgggggaggcactacgtgcctaacgctcgagctctcattcatgatgtgcactgcgctgactggcccctattcagtgaggacacctgtcaggcccattgcatgttgaatgaggatgaactgcgagatgccgcattgcttgtgtttgccaccaaacaggatcttccttttgccatggatgctgctgagattactgacacgttgggcctccactc

SEQ ID NO: 52372 - DNA, 581 bp, Glycine max
  Clone ID: PAT_MRT3847_18305C.1
aatttgcaaaacaaaaaggtattaggcatgtactcgtgtgagcgtgtgtacctggtaatgcatcatatttgcttatgcgccttgtacaatggtgaagtttagatagttgacagacttagattaaatttgggggcatgctacattcactaaaattggattgttataagttgcacatagtttgtgaatggagaaggtcacttcattatgaattcaaagttgagattgtctcagttcagagtgagattctttttgttatggagatgcgtgctatacaggggtgagtttattttttgctggatctacttattcttgattataagtaacagtattttctatatttacttatttacttaataaaattgatttttcctttcattttgatattgtgttgattatgtagctctttgtactataaagaacttacttatatgcttaatcattaatatttcgtgaatttctatttccttttattttctgggctaacataagtgacttgaaccttgtgtttctggtatttgtaaccaaaggtaagcaccaatactttacagatacttgataatcctagtttcggtttacagttt

SEQ ID NO: 52373 - DNA, 473 bp, Glycine max
  Clone ID: PAT_MRT3847_18306C.1
ccgctcagtcttttcctgcccttacttctatgacgacgtcatgatcggagtccgaagaaacctgagccacttctgcttcaactatgctaccgtcacactccacatcgtcttccttagcctcctctgacaccctgtctccatgatcgtcttcctcctcgtcctcatcacctggtactacttctacttcattaagaaccataatggacatcaagaggtataaatttaattagagtcatttcattttttgttatgtctattatgtgaaactcatctaatagtattataaattgtatgtgcagattatggttggatattctgattctggtaaagatgttggtcgctttactgctacttgggaactttaaaaagctcaggaggatgttgtagctgcttgcaatgtgttagaataagccaatattttattgtacaagtaactctgcatttgttacttgtataaatagggaattattccc

SEQ ID NO: 52374 - DNA, 365 bp, Glycine max
  Clone ID: PAT_MRT3847_18307C.1
ctataaaaatatattatttttaaagataaaagatgaaaacaaagtgtgattaaaagataaaacaaaaacatatttgaacctaatttttataataactactgtcaacattatatttcaaatgatttctaaacgaatgacgactgtaaaaatgtttagtctggagaatcatgaaattaaactcatttatttttcattaaaaaaactcatttatttttttagatcgatttttaattcaagaccacgtcacaatatcttagttgcggtcctgcggatttttgttaaatggcgcagggagtattttctggtcaacatatatagtaatagggataattgttagcaagttagcattttaaaattttaacgat

SEQ ID NO: 52375 - DNA, 371 bp, Glycine max
  Clone ID: PAT_MRT3847_18308C.1
cccacgcgttcggccacgccttcgtaccggttggaaaaaccacctaaggggacccccttttggtttgggtggggctgggttaattaaacccgtggttggttctaaaaccctcttctttaaaggcggccccaaacctttgcatttcaaatccccgttggttttgcaaaaacccttggccaataactcgacttcgcaaataaagttctcctttcgtcgatcgcgtggaaatgtgatcaaagattctgatccaagcgttcatccgcgtttattgtcctctggtgttgtgggtgctttacattctcatgaaatatggcttaccatatccaaagacctcctctaaaaaaaacccgttaagaaaaatgaaaagaaac

SEQ ID NO: 52376 - DNA, 885 bp, Glycine max
  Clone ID: PAT_MRT3847_18309C.1
tttgcattcatctactgttgtgggggattaatgagaagcaaaggtgatggaaagaaaaaagaaggttcatgtgttggaaccaaaggattccgtgctccggaggttttgttaaggtctcagcatcagggacataagattgatatttggtcagctggagtcactctactctacatggtgatcgggaagactcctttcactggcgacccaggccggaatataaaagaaattgttaaattgcggggcagtgaagagttttgggaagtggccaagctacatgaccgtgaattatcttttccagtggagttacttgatgaccgatacttacagtcatgggacttagaaggctggtgcaagattcacacaaagagaccagagtttcttgagcagatcccgaaatcgctgtttgatttgatagacaagtgtctaacagttaacccaagaaataggctcagtgctgaagatgttctaaggcatgaattctttgactcactgcatgagtccctgaggaagcaaaggatgcttcatcgacatcgagctctcaggtcggatgcagcagcttccagagcaatctgacatcagtttcatcaagtgcatgtacttttggtagcaactgaccacataagtagttgttactgtatattttttgaggtgaaggtggttaacacataagagggtttccttacctgttagtgatggctttttactgtatatataactatatcagagaaacctagcagtgtaacttgtaagttgtgttaaatttagaactttaacatatttttgtatttattattttattgctgtaaagtgtttttctcatttatttttttaggttccaactaattatgtttgttcaaactttttataatctttcatcttattaaa

SEQ ID NO: 52377 - DNA, 145 bp, Glycine max
  Clone ID: PAT_MRT3847_1830C.1
gacccaagcgtcagactaagtctcagcagtggggacagtttgtaaattgcgacttccaatggcgagttgcgaatcaagcgatgatggaaaaagtgcggcaaatgatgtgtgtgcttgctccggtgtctgcgctgtgacgtacgtg

SEQ ID NO: 52378 - DNA, 193 bp, Glycine max
  Clone ID: PAT_MRT3847_18310C.1
aaaaaacaaaccatcgcatcgcttatgtgcgaaagggaacattacaaatgatacgaactagaactgtttatcactaacacgcacggactaggcacaaacaatcaaaattcatgaaattgcaacatctaatgctacaggtaacactcatacaaggggttacctttaccaagatttgactcaaaaacacaagacc

SEQ ID NO: 52379 - DNA, 206 bp, Glycine max
  unsure (1)..(206): unsure at all n locations
  Clone ID: PAT_MRT3847_18311C.1
ccccagatccaccagcttttgatatcattgtttgacataacgnnaccacccactgcaataaacgcgagaactgcaaaggctccaaatgtgctggaaacaatcatgtttctacccggtgctgcagtagctcgaaatagcgcannngccatctggccaatnnncagtacaatgagatactggttgaacaacctcccaacatttggatc

SEQ ID NO: 52380 - DNA, 231 bp, Glycine max
  Clone ID: PAT_MRT3847_18312C.1
gagagagtagacagagaagagtgtgtgtgcgtgcgtgtgttttttttttttttatcacctgagaacccaaagggaacggttaactcggccatttaaacccccccaaaatttccaattgaactccttttaaggaggataaggaaagtttgatcttccaggaaaaaggacgaaggggaaaaaaatgggattttttttgggggtttcccaatggtaaacctggaaatccaaaga

SEQ ID NO: 52381 - DNA, 638 bp, Glycine max
  Clone ID: PAT_MRT3847_18313C.1
aaagggacaagcaatattatatatgatctaattaaattgaaactcatatagcaaattagcaataaaggattgtaattaattgttacattattttagtttacaacaataacatgtggtatatcctagctcacaattcaactcaaaaccccactgtctcactcacacccaataaaaaaatagataaaataatagtagcatatatctataattaaaaaataatataaaataaatctccactctttaaaacaagaaaagtagtatccctagtaagacaatgtgaagttgtgcatacattgagattgaaatagaactagatgatttctgtttgtcactatcactagctttgtcatcatcactttcttctttggggtgactgaaattagaaggaacaatagtgtctggtgctgattcatcatctgcagcaacaggactagcaggagatggtgcatcttctggggatttaagactctttggcaacccttgtccataagtcacatttattttgaagtgttgtccactcttgcattggccaccatcataatcacctgagaaaaaatatgtcatcccttcctttaccaaaagaactgacactgtcacaggatgtgtttgggtgttggatggatcagctgctgaccatt

SEQ ID NO: 52382 - DNA, 357 bp, Glycine max
  Clone ID: PAT_MRT3847_18314C.1
aacaagacttcattatgtgattggagattactcacctaaataaaacatgtatactatacaagctcctcgtttaaagaatcaaaaaatgatcctctgttgccggaatactaatgaatatatcactttgactgatgattcaaatgtacactggcccataaaaaacgtatttaagggatcatgaaacacctagaaggtgaggagtacttgaaaacatatgtattagaaatttttgctcagaaacagtatggttacccttaaaggcacctgaaatggacccaaagggaacaaaattgtccatcctggtgaaaatatcacttacttccttgataatatgcctaggagtcttcatgtcacaaa

SEQ ID NO: 52383 - DNA, 1013 bp, Glycine max
  Clone ID: PAT_MRT3847_18315C.1
aaagacatgggtctgctcaaatacttcctagggattgatgttgcccaatcctcctatggcattgtcatttcccaatggaagtatgctttggatatcttgaccgagaccggtatgcttgattgtcttcctagtaatactcctatggatcctaatgtgaagcttctctcaggtcagggggaggcattggaagacctgggaagataatgttgtttggtggacagacttaattacctcactgtcactagactagacataacttttgcagttggtgtgcttagtcaatttctgaaagacccgactgatagtcaatggaatgcaacaatccgcatacttcgatatatcaagaatgcaccgggtcatggattgctatatgaagacaaaggcaatggcaaagttgtttgttactttgatgctgattggccaggatcaccatcagacaagagctccacctctggatatagtgtctttatgggagaaaacttgatctcatggagaagcaagaagcagaaaatcgttgctagatttagtgctgaagctgagtgtcgtgtcatggcagcagctgcatccgagatcacatggctcaggcaacttctccaacagataaaatttggagacgtttagcataccaaactattatgtgacaatgaggctgctctccacattgcttcaaacccggtcttccatgagtggactaaacacagattgattgtcactttgtgtgagagaaggtactcttaggagaaatcgccactaagtttgtcagctctaaagatcaacgagcagacatgctcagaaaatttctcaagggctcttgtgttaacgacatttgtaacaagcttggttcatatgacatatgctccagcttgagggggagtgtgaaatatacatttaggatatgattaattgtataactgaaattagggatttcccgtcattataaggtttccttaacaatgtataaattctgaatataaataaaggcattgtgtatggtaaagaacacacaacacagt

SEQ ID NO: 52384 - DNA, 259 bp, Glycine max
  Clone ID: PAT_MRT3847_18316C.1
gcccacgatgctcaggtttggtaacccgggagtgttcccaggtggccttagaaagcaaagcttgtaactggcaagggatgatgtcagattcagcccaaggttcctcctctcctaccaagcaggaggccaggaacttctttggacttggaaggtgtgcggggactggccgaggcccctgcaccctgcgcatcaggactgcttcatcgtcttggctgagaaagggaaaagacacacaagtcgcgtgggttggagaagccat

SEQ ID NO: 52385 - DNA, 331 bp, Glycine max
  unsure (1)..(331): unsure at all n locations
  Clone ID: PAT_MRT3847_18317C.1
gactacctcaaggtcaagaagggacgcactaacatgctgcgcagggtggagccatatgtagaataggaatacnccaacctgnaanagcgttagggagttgatctgaaagagaggttacgnggagctgaacaagcagaggattccacttagcaacaacagggtcatcgaggagggcctcgggaagacaatatcatctgcattgaggaccttgtccacgagatcatgacggtgggcccgcacgtgaaggaggccaacaacttcctctggccgttcaagctgaaggcacccctcggcggcctcaagaagaagaggaaccatacgtagaggcggt

SEQ ID NO: 52386 - DNA, 317 bp, Glycine max
  unsure (1)..(317): unsure at all n locations
  Clone ID: PAT_MRT3847_18318C.1
cggtccctgatncgcggttcgaccgacgcgggcggtccggggacgctcacgtgtctcatcctctcactcgtccggctgagtggacagactaagggggggggggcgcacaccgagggcgtgtgggctgtcacataggtcccctcacccgtcaaccgggcaccgcccctcgctaaccggtttctttgacgtgaccggagagtctctcgctgcgacgacctcgttgtggagctcaacaacaccgggcactgcatcagaggcgccttcctcgaggcccacgaagagagtttcatcgtcgcccccacccccatcggcaggtt

SEQ ID NO: 52387 - DNA, 109 bp, Glycine max
  Clone ID: PAT_MRT3847_18319C.1
atggtttattcataatcaggccaccgacctaatacctgacctatatattaataacaggttcagcccagacacggatctatggcgaacaatactgatcgtaaccgtattg

SEQ ID NO: 52388 - DNA, 450 bp, Glycine max
  Clone ID: PAT_MRT3847_1831C.1
ctactcttggggcctcactttcgtggactctaaacggcaaagttcactggctggacataatttcaccattactggtggtgttgacacaactagagcgactgtgcaatttataatgttagcggatggtgattttccacaagagaaactttacgcgaaggtctaatgtattagcagtggctcctgaggacatggcaggttgatgggcacaactacattctgtctggtgtattaatgtggaaaggcaggaagcttatcttgagaatctcggagaggtgttacgagaattgtatttgcacagtccataggaggctcgccaattgagatggaaagcgctatgtcgaattgaatggctgcagaaagctgatgtgcctaccatagcacagattgaagagttccattcgatgcagaagatgatgaatgctcctgagtcaaatgataatatagatctac

SEQ ID NO: 52389 - DNA, 311 bp, Glycine max
  Clone ID: PAT_MRT3847_18320C.1
cacgcgtgcccttgctcggaagcccgctcgagatctccatgcgcttctcctttggggaacgtctgccatgtaatcatcaactatcacgaacttggacgaatcggtctgcggatcggggtcctagtaaagcctcgttagggcctggacttgctctgttctctgaaggaaacatgatgaaggctgtggcatacttggaacttgctactagtgctggagaaaaaggtgctgatcatgtcaagaacacaggtcttcatcgggtgttatcagtttcacgtgatcacgctatgcatctagctaacagttggggcgca

SEQ ID NO: 52390 - DNA, 376 bp, Glycine max
  unsure (1)..(376): unsure at all n locations
  Clone ID: PAT_MRT3847_18321C.1
tnnaaaattaaaaattttttgggggattttttttttttttttggggtttccttgggcccccccattaatttggcaaaaagtttcttcttaacctgaaacattaaaacttaaaaaacttttttttgtccaacaaaaattttttcaaataacttttgtaaccccccccccttcacaaaattcaagaatatttttgccgggaaaaacttccccctcacattctttttctttcataaggccctggattttattttacaaattttgaagaagagacccttatctttttaaaagagcgctttccccacttaaaatgccacaaggtgtggggggggaatgttttcttttttcaaatgaaaaaagttcccaaccttctggggac

SEQ ID NO: 52391 - DNA, 432 bp, Glycine max
  Clone ID: PAT_MRT3847_18322C.1
ccacacgcgtccggtaatgtaaagggttgaaattttaattgttgtaggaattccaattttcggccaacgccatttaaaacaacatttaacggaacctttttctttttctttacgcctcctaaatttggcaaggatggaaggaggggagatcagggggcaggtagtagggggggattggggggcaaagaaaaaggttttggtggttggggccattggtggcactggcaaaagaatcgttgggcagttactggcaaagggtttggttgttaaggttggggttggggccatcgccagggccaagacacccttttcttttgccaaccaattttttaaaatggggaaggctgatgtaacagagggttttgttaagttagttgaggccatgggggacgattaaaaagcagtagtttgggccacaggttttcgcccggg

SEQ ID NO: 52392 - DNA, 335 bp, Glycine max
  unsure (1)..(335): unsure at all n locations
  Clone ID: PAT_MRT3847_18323C.1
acaagccggcgggagctaatattaancaacataacttatattttttttattattacatccactaaacatagcccgttttttataacctacctaggcatcatatcacatccaaatacatatgtaaattttaacatcaatcttctcacacacacacatctcctacacacataatcacttattcttatttcttcatctataactcaactctcttttttagctcttatcaatccaataaaaaatttccattgtaccattcatccaaacagacactcttattcaaactacataatgttaaatcttcctacctttatcaaaaaatacaaacaacccatatt

SEQ ID NO: 52393 - DNA, 294 bp, Glycine max
  Clone ID: PAT_MRT3847_18324C.1
ctatgacaaaaactgagtttatgactgtttatgggatactgacagacaaaacagggggaggctcagaagacgttgtccatctaaaccaagggctggaggggaaccggatcatatagcaaccgaaccatcgctgtcttggtcaaagagcataacgactagtaggtgggatatgagtacatcggtctatggtaagaaaactggtgctacagctgccacaggtcagattactagcccaaattcgacgatttgtggaatgaatccaaatataatatcgttggcttcatgccagatgca

SEQ ID NO: 52394 - DNA, 704 bp, Glycine max
  unsure (1)..(704): unsure at all n locations
  Clone ID: PAT_MRT3847_18325C.1
ctccgtctcccggttcatgccatccccatacggccactaactcctacattccacagatgcgtttccgtagcaattccttgcctggtgggaaactcagggcagatttgaagactgccggcaaagatccagcgaggaggtggcgtatccatcccaaaatcgcaacatctggactaagggaaggagctgaataagcacgtatcaccctcgtcgtcctcgccgccaatgcctccacggccgaggcggcactcgtcgtcgcgcacaagaatgcttcgctctacttccagatccgatccgcgcgcgtgagtatcgctggtcccccatagctgagatgtggtttgttacttatgtagtctgctgatttggttcttcttttttttggagatttgaacgcaccttcaattcagttgatagttttgctgagatagtggacgaaagaaaaatgccagtccacgaaccctatccatccgccgtcctcgacgagcaggtccaccagatgcttcacaactcgcgtgccgagctcgacgccccatcagcagcttcctctctccagggtgtaggcaagtccccgaacactatccctccgcccgtcacactgttccccatttctagcctaatttatgtatgtgcatgaataattagtttataggttatgcgccatagctnttatgtctaaaagaaattgtgacattgtgcttggttttacc

SEQ ID NO: 52395 - DNA, 385 bp, Glycine max
  Clone ID: PAT_MRT3847_18326C.1
gtcatgtagttacaatgaccaccactaaacagtttgaggttgccttcctttttatgcccaccgaaacctataagaaccccgaggtttacctcatgagggggtggcgcccccaaccatgtggtttctaatagcacattctgatattacttgtctttcctgaaaaaagttaaacgaaccaccggttaaattttttatgttcaccaaatatttgaaaagaatcccaaccatgtcaagaattttggtatctgacttagatattattccctaaatggtacccacaatatgttcaaataatacacctattttaaccctcaactgttctatttatcacatgtatgcttatattacttttcattaccgatctagccgacccaacattattttt

SEQ ID NO: 52396 - DNA, 1541 bp, Glycine max
  Clone ID: PAT_MRT3847_18327C.1
gggtcactctctttgtgactcaccattgtgttgagacacactctctttctttcttgttattctctttctctttcatcatttggcttaaaacacacacacaaaaggtggccaaaatgagcagtgtctgtgccaagcagcacaagttttacccctctcaccaactcctttctccaaagaaaaccctcagagaaattgacatccctccaaggaagctcctcactcgccgtgccgccgcatgcgtcggcggcaccgacgtgtactcctccgaggagaccatgctgcaaaagttcctcccttccaacgattctgacgaggacgacccttactcctcagaccacttccggatgttcgagttcaaggtccgccggtgcacccgaagccggagccacgactggaccgactgccccttcgcccatccgggtgaaaaggcacgccgccgtgacccacggcggtatcactactcaggaacagtctgtcctgagtatccccgcggagggtgcagccgtggcgatgcatgcgaatacgcccatggcgtgttcgaatgctggctgcacccttccaggtacagaacggaggcctgtaaggatggcaggaactgcaagagaaaggtgtgttttttcgcacacacccctcgccagctgagaattttcccgtcagcaacatcttcaccctcttcaaatgacatgccatgcaagaagaaccttaacaaactcttaaaccatgcttcaaaatcaaacaacaacaacaacaacaactgttgtttgttttgccattgtggtgcttcctcttcagtttctccaacctccacactcttcggcatgtcgcatttctcgccaccagtatcaccatcctcgtcctcttcaccacctccttctccattgaaaccccgaagcgtggtttctcctatttctccaatttcccgttacagtgctgtgaatatgaaccctcatcacggggtggtgagttacaaagacatgttcgctgagttggtgaattctttggagggtttgagtttcaacgagggttctcctgtttctggtgctaaagcaccgaactttccttggcttgatgtttctcttgaggaacagcaacaacaacaaaatcctttcattgtttcttcttttggctgcgaagataaacagaaccagtttattttttcaccaccgtccattcagacaccgacaaatgggaagttctgtcgcaacagattcatgggcaacgacaacaaggttgtcggtggtgctgacgttaatggcccagatctcgcgtgggtgaacgagttgctgatgtaataggtgaaagatggtgacgacgaaaattaatggtagtgatcgatgactcatatcagtgaatgaaagtgtaaatacagcagagaaacattaaaaaaaaaaaaaaacgtctctggcgtatctattgtcattgttaattactattgcttaattaaggtttcattgctttctgaatttgttgttaagtttgagacaatttatgtaatttggatttcatcttgtttttaatgtataagggaatattttgactct

SEQ ID NO: 52397 - DNA, 967 bp, Glycine max
  Clone ID: PAT_MRT3847_18328C.1
ccccccgccaggctcaacgtcctaatcctgccgtccctctcccactgctgcaatcccatccacgcaacctcgcttgagagaaaagaagaaaatcctttcaaataaataaagtttcattactttatgttgataggtacacccagacccaatttcatccaccatgcatcttttttatctcctcgatctctagccatatgtatctaagttctcacctaaacctagctatttccacccttattacgttaataatttgttcttgatcgatgttctctgaatccggttcttcttcgttttgcttcatgggagtttcttcgaattccaaagtctttctctctgacaaagatctgaaaggagtgatcaacaacatggatccattggtacacaaggaagggtgccaaactttgatccaagaagatcaccagcttattagactcaaacaactatcggtgcaacaagaaaaagaagaggaagaagaaaagcaacaacgcaacagcaacatcatccttacaacaaaaccggtgggtcctataaacttgaaactagagattccgtcttcttcttacgtgggatcagagaacgatgacgacgggttgaagactccaacatcttcggaccacaaaatcccggtgatcctagagtgcccatgtgcaccaaagaagacaaaatcaaagccagccggcacgaaaagaaaatcgtgtcgaccaagaattgttcttgatctgtacaacgatttggaatctttgttccccgtgccgtatggtgttgatcttgggggtggcgttatgaataagagagtcaaacagtgactgaaggggtgagctagctagccttaaattctctagagtcctcctgatcaatattattcattaccttagcttgctaattttaagtgttggtgctgtgatgcacttgtaactctagacaaatattataacatatctctcatagtgcattgatttagtacgcc

SEQ ID NO: 52398 - DNA, 2198 bp, Glycine max
  Clone ID: PAT_MRT3847_18329C.1
ccacgcgtccgaaaccctaaaaacgaaaccaactatggcagcatagcaggcagaaagcgataaacgaaacaaagtagaagaagcaaaacaaaggaacacagaagcaggaacgaggaggagcactgtgtagaagaaatggggaagaagcagaacgagatccagaaaacggggctaggtcgagccctggtgaagcagcacaaccagatgatccaacagagcaaggacaagtctcgcttctacaggaagaagttccttgaatccttcaccgaagtctccgacatcgacgccgtcgtcgagcaatccctagaacccctccccgaacttgccgctgccgcttcaaccactctcatcagccttgaaccaggttccgtgcccgatgaaacgacgacgccggaagaagcgaggaagcagcagaagcaagaggaggcgctccacgccagcagcctccgcgttcctcgccgcccgccgtggactcccgacatgtccgccgacgagctgaacgccagcgaaacccaagctttcttgacctggcgccgcagcttggcgaggcttgaggagaataagaagcttgttcttactccgtttgagaagaatcttgacatctggagacagctctggcgggttgttgagcgcagtgatctgcttgttatggtcgttgattcgcgagatccgctgttctatcgttgtccagatcttgaggcttatgcacgggaggttgatgagcataaacgcacattgcttttggttaataaggcagatcttttacctgtttctatcagagagaaatgggcagaatattttcgtgctcatgatattctcttcatcttctggtcggctaaagctgctactgctgccttggaaggcaaaaaacttggttcatcatgggaggatgataacatggggagaactaatagcccagacacaaagatatatggaagggatgaacttttggccacgtgcgagacggcgacagaagagatagttgacaggagaagaaattcaggctcctctgatgcaggaccatctaatattaaatcccctgctgaaaatactgctggtagttcatcatcgagtaatgtaattgtgggatttgttggatatcctaacgtggggaaaagttcaactattaatgctctggttggtcaaaaacgcactggtgttacctctaccccagggaaaacaaagcactttcagacattaattatctcggatgagctgatcctctgtgattgtcctggattagtttttccatccttctcaagctcaagatatgagatgattgcttgtggggtgttacctattgataggatgactgaacacagggaatctgtccaagttgttgctgatagagtcccgagacatgtcattgaggagatttataagataaggcttcctaaacctaagtcatatgagtcccaatcgcgcccccctctagcatctgaacttttgagagcatactgtacttctcgtgggtatgttgcctctagtggactccctgatgaaaccagggctgcccgtcagatgttgaaagattacattgatgggaagctgcctcactatcaaatgcctcccggagcgtcagatgaggaacaagctttggaagaacctgctggacatgactcggttgacttggatgcatcagattcatctgctattgaagattcttcagatgttgagagcgaacttgcaccaaatcttgaacatgtattggttgacctcaattcatttgacatggctaatggacttgctccaaaaaatactactactgttaagaagcttaaggcatctcataagcaccaccataaaaagccacagaggaaaaaagatcgttcttggagagcaggaaaagcaggaaacgaggatgctgatgggatgccagttgcaagattctttcagaaaccagcaaatacaggtcctctgaaggttgggtaaggccatactttctggtttttgcacaacagcttgtgttaaaaacccatatgtatgttgttaatacgaggctaacgataaataatgtttgtttgtgaggcattgcggaaatagatgaggtgagaggaagctcgtcctgtgacagcgaaaaaaaaatgtttgggaaaatattgtgttcacaacgatgattttttgttcttatcaatggattgaaaatgttgtcaaaaaaaaaaaaccaagggcggccgatatagaggatcccagcttac

SEQ ID NO: 52399 - DNA, 1794 bp, Glycine max
  Clone ID: PAT_MRT3847_1832C.1
cccggaattcccgggtcgacccacgcgtattcggcctgcgcagagtttgaactttgaacgttgaaggaacatagaggcagaggtttttcttctctcaccgtagaatcgaatcgagttaatttttgatcgtgtgagtgtccgatcttgaaatccacaacaacaatggtgagaggattgctcaacaagctcgtctctcgctccctctcggtcgccggaaaatggcagcacaatcaactccgccgcctcaacatccacgagtaccagggtgctgaattgatgagcaaacacggagtcaacgttccgagaggcgtggctgtttcctctgttgaagaggccagaaaggtcatcaaggaccttttccctaatgaaaatgagttggtggttaagagtcaaattttagccggcggacgaggtttgggaactttcaaaagcggccttaagggaggagtgcacattgttaagactgaccaggttgaagacatagctgggaagatgcttggacagatactagttaccaaacagactggtcctcagggaaaaatagttagcaaggtttacttgtgtgaaaagctgtcacttgtaaatgagatgtactttgctataacactggatcgtacgagtgctggtccaattataattgcttgtagtaagggaggaaccagcattgaagaccttgcagagaaatttccggacatgattataaaggtacctgttgatgtttttgaaggtattactgatgaaggtgctgcaaaggttgttgatggtttggctctcaaagtggctgatagaaataagtcgattgaacaagtgaagaatttgtataaactttttgttgattgtgactgcactcttttggaaatcaatcccatagcggagacagctgataaccaattggtggctgctgatgctaagttgaattttgatgataatgctgcatatcgccagaaagagatattttctctccgtgatacaacacaagaggaccctcgagaggtgactgctgcaaaggcagatttaaattatattgggttagatggagaaattggctgcatggtgaatggagcagggttagcaatggccacaatggatataattaaattgcatgggggtactcctgccaattttctggatgtaggtggcaatgcctctgaaaaccaggttgttgaggcatttaaaatattgactgctgatgacaaagtgaaggcaattttggttaacatttttggtggtataatgaagtgtgatgttatagcaagtggaatagtgaatgctgcaaaagaggttgcactgaaagtaccagttgtagttcgtctggaaggcaccaatgttgatcaaggaaaaagaatattgaaggaaagtggtatggcattaataacggctgaagatttagatgatgcagctcagaaagcagtgaaagctgcttacaaatgaaggtttacttctgctcaaatttaaaattcggtttagttacattatttttggtgttcaaacatattcacgaggaagggattgatgcgagaagaagtcttattgaagctgcagtgcgtttcaaataagtatgtgatttccaagttgtagtacatttgagttgattcacatggttgctatttggcttctctctcacaattcaatatactggtcccttcctttctgatttttcctctttaatctttttgcaaataacatggaaatacttgtttttctgttagacacggtggttcattaagtggccaaaacctgttttctaattgaggctatttcaaatttgaatgtttaatgacaaatatttttcgt

SEQ ID NO: 52400 - DNA, 529 bp, Glycine max
  Clone ID: PAT_MRT3847_18330C.1
ataaaaagccacagaggaaaaaagatcgttcttggagagcaggaaaagcaggaaacgaggatgctgatgggatgccagttgcaagattctttcagaaaccagcaaatacaggtcctctgaaggttgggtaaggccatactttctggtttttgcacaacagcttgtgttaaaaacccatatgtatgttgttaatacgaggctaacgataaataatgtttgtttgtgaggcattgcggaaatagatgaggtgagaggaagctcgtcctgtgacagcgaaaaaaaatgtttgggaaaatattgtgttcccaacgatgattttttgttcttatcaatggattgaaaatgttgtcatgggactggaaaattaggaactaggattttcggtcaagagttaagagcatttgttggtttctttatgttgtgtgtgagacaaggctagtttgaattaagtcccataaataaaaaagaagcaaaacgattggcagaaaaaaaaaaaaaaaaaaaaaaaaaaaaaaaaaaaaaagggcgc

SEQ ID NO: 52401 - DNA, 458 bp, Glycine max
  Clone ID: PAT_MRT3847_18331C.1
tgcgagtgcgatggtgaaatcaaacgagaacggggctgtttacgcttatgtgcctactgacctgaaaacatgttacgagctggttggagagcgcgccactgattctatcataccctggagcgatggcggcgacatggttactcttctacgacattactcacttatacgacacgctccttcctacctattgcagacacaactctttctccagtttcgtcagacagctcagtatctatgggagcaggagaattgagtcggattgctactaattggccagagagaacatagttagatgccaaaagcatatgatgaagacaatacgtagaaagacacattctcacaatacagatcagcaaaaagcattgccactttaagacgattgtgtggaaccatcacaagaagcaccggaccatggtctttggaaagaagtggtgtatctaacacttgataagaatttg

SEQ ID NO: 52402 - DNA, 218 bp, Glycine max
  Clone ID: PAT_MRT3847_18332C.1
gtggggttgttgtgatttggatgggtgctttagttcgtgagataatatattttttggatttgatattgaggaatgaaaaaagaatcctattaaaaaaagataaagtagcgcaaggagaggagccctccatgttaaaggcccataagaggaggcctttccgggggtgggttacccatcagggcagaaacattgagagagggcgaaaccaaaagtgagcg

SEQ ID NO: 52403 - DNA, 1223 bp, Glycine max
  Clone ID: PAT_MRT3847_18333C.1
gcacgagggaatctggaggcggtgcagacgttgagtcaagtggggagtgcatagtggaggagaacttagctccggatgaaggtgctgttgtgttggggaatgagggtcctgctcaagaaaggaggttggttgcattgcagctctccgctgaccacagcaccagcattgaagaggaagttgttaggattaagaatgagcaccctgatgataaccgatgtattgtaaatgatagagtaaaaggccgtcttaaggtcactagagcttttggagctggatttttgaaacagccgaagtggaatgatgtggtactagaaatgtttcgaaatgaatatattggcactgctccatatatatcctgctgcccttcattacgtcaccatagattatgcccaagagatcagttcttgatcctctcatctgatgggttgtatcaatatcttagcaatcaggaagtggtttctgaagttgagagtttcgtggaaaagtttccggatggagatcctgcccagcatttaatagaggagctgctccttcgtgcagctaaaaaagctggaatggatttccatgagttgctggatatccctcaaggagatcggaggaagtaccatgatgatgttaccgttatggtggtatcactcgaaggaagaatctggaaatcatcagggaagtatccgtgagatcttattcaactccctgttgtctgtatacatatttgaggtgccttgaagccagtgccaaactttccaacttgacccatttttcatgggtctttttagatgttcattcttgtctaacaaaataagttgtgaatagaagaatctcaatattaaatggcaagaggccaccggcagagctctatccagaatttaaacgagcttgggaatgggcgttgcggacaggtcttgggaagtctctttaggagaaagaacaatgtaaagcctttttaaactgttctttttttgttccagtcgtagtctatctctttccccaactattgtccaggtttatagagatgaaaaatgagaaattttgagtagctgaggctcttttcttttctttttctttttgctctttttctttctcttgctaaggccaagagaatttgggtgtatattggtggggatacaaatgtactgactgaacttagagcagtcactagtcagataaaaatatgtaattgaaggtggatttctaccattgcggatgaacatgattctgaaaaa

SEQ ID NO: 52404 - DNA, 446 bp, Glycine max
  Clone ID: PAT_MRT3847_18334C.1
acggctgcgagaagacgacagaaggggagtgtggttttgtttgaattaatgttctattttcccactcatctaaaatgttttgtgcaattttcaattgcatgtgcagaagaacatggctacctccagaggtcgaccacctaagagaaaatccccagatgataatgaggctactgataatatccaaatcaatttttctatcatagatcaggtgtatgcattactttttctacaataatcctttattttctaactattgctttggaaaaactcttgattctaagattcaaagttctaacaagtaaactacctttccctatatcttattgaagaatcaatagaaaaattacttgccttttttttggatgggcaaaatgttatggaggtggttaatgttaattttttgctagcgggaaaattgaattcaccacttttttcttcccttcttc

SEQ ID NO: 52405 - DNA, 406 bp, Glycine max
  Clone ID: PAT_MRT3847_18335C.1
ctcaccaatttttaatctctcattcattgatagtaatgcgcagattatcaaacaagcaaggctaactggatcagtcactgaaaagcattaaggttacattccgaaagaaagaatccagatcaaagaaggacaatttgaacttgcattcttattgtcatttatcaccatacgaggtctacgaaaacaaactcactatagggaattatgagactgatatatatttatgtacatgaactatgaaaaccatctgaatgaaagggaacaagccgaaaaatgcctagaagacaactaagacacgggagatacttagcaaacacaagaatgctccttcaccttaaaaggaaatgcatgaacaaccatccacctctttcttcagttgactgacaacagaactaactgttcttac

SEQ ID NO: 52406 - DNA, 304 bp, Glycine max
  Clone ID: PAT_MRT3847_18336C.1
acgcgtcctaacactctttcgactatcattaatcccactctacttataacccatacttttatataatttctcactctcaaatcttataacacactatccgcaatctattaaataacccactataccctaataccaatcttatctatcactcacacaactactcacatctctcataattacaaactaactactatttatcatcatatacctcgatcactatcataccaccactatcccactcaaccatacactttctcctatctcctacacaaattctaccatctcattcaatttacaaactata

SEQ ID NO: 52407 - DNA, 184 bp, Glycine max
  Clone ID: PAT_MRT3847_18337C.1
caagtccaattccgcaaaaacctaccccaccaaggaggcaaccgattatcgttgtaacacgtaaaaggacaacctcataagagccagtctgctcgccaagctagacccctacgccgttcacgtggtaactaaattcttatatctaactccgtccgtgttccgccgacagatcctgggtctaaag

SEQ ID NO: 52408 - DNA, 258 bp, Glycine max
  Clone ID: PAT_MRT3847_18338C.1
aaatgcttggacatgaaaaatggcactgcatttgctggcatagcatccatcaatgcccatcctcagtgcagcaattgcttggacatgaaaaatggcactgctcagaaggaaccccgggcttctttcatctcagagctagtcattgaccactcagcgacaggtggtgtgaaacgggaacaagaatgtgtgatgtgcctttcagaggagatgtctgttctgttcatgccatgtgctcatcaggttgtttgcaaaacatgt

SEQ ID NO: 52409 - DNA, 478 bp, Glycine max
  Clone ID: PAT_MRT3847_18339C.1
cttgggtttttttttttttttttttttttttttgatggggggttcttttcaaaacccaacaatctatcactcaccaaaagtgaaagcttgttggctaaccaaaactggcccccctctgacacaaaaacataagacaaaacaagggggtttgcaacttatgtgttgcaggattccatctgaaacacaaaacctttaacaatttgaaaatgcgtcatcactaaatcaagctccaacaaggtccgtgggttcctatgcccctatgccatcagaaggtttgccttccctagccccaacatactgggagtaatctccatgaacctccttcagtatcccaagatcaaccttaggagctttcacgatcttggcttttcggaccaacacattctgctttcggcctctactaaatgtccccttctcgagctcttttccatttctctcaggaataaacttgcgcaccgactccttcaaatcacatgct

SEQ ID NO: 52410 - DNA, 391 bp, Glycine max
  Clone ID: PAT_MRT3847_1833C.1
tcgcgtccggttggaagcggggtggtaatgaatgaaaccgcttgtttttcacgaggttacagtatttggcgggagatatactgccgcgtgatatactaccacatggctcatgtgcatatgaaaacagtggaagctgggagaacacaactgaggtggtgtggccagttggaggttggaccaggatgcaaacacaataaatatgaggctgactgtgactgcagcatgggggcgtgtacatacttaggatacgtaataggtgaccagtatagagacagcatgcaaaacagtgcatctacatgatacttattatgactaatgcgttgaagtcagaaactatgatgcttatgatgtgaacacacacacaaactctgttggtcatatgatactttac

SEQ ID NO: 52411 - DNA, 256 bp, Glycine max
  Clone ID: PAT_MRT3847_18340C.1
cactttcaggcttcattgctcccaggaaagaagccttgcaccgccttctgtaacttctgttgggcaagatgaaagcattggaagaatagaaatcagaaacgaccacgttttgaggaacaactctccggtgcttcaacaaaatggcctacctcctctagttagtgcattgaaagcttcggctgagcaaaatgttgccagttttcactttcctggacataacagagggcgtgctgcgcccgcttcgttgactcggctc

SEQ ID NO: 52412 - DNA, 518 bp, Glycine max
  Clone ID: PAT_MRT3847_18341C.1
agctcggaattcggctcgaggttgtgtgtataccactgctataattttacacatatatactatttattaatccccctatttagcaacatttgattttcactgccataaatgactatgcaatgagcattcctatgccagtctcactggaatatgtgcaaaagtttctccaaaatatacacctagaggtggaattgttgggtcatgtaaaatgcatatcttaatatttcctagatgctgacaaattgcttcctctccaaagcagttttactgatgtgtacccttgccatcagtgtagtatttccatttctcgtcatctttatcactacctgatgcagtcagatattttaatgtttgacaattcaatgagcataaaatgatgcattgttattttactttttatttccctgatgaatccatttgtatctgagtaactcatccttttcctgcttatcttttatgccatctttgtcatcttctgagtgtctacatatgcccaaatgttagtccaggcttttctg

SEQ ID NO: 52413 - DNA, 410 bp, Glycine max
  unsure (1)..(410): unsure at all n locations
  Clone ID: PAT_MRT3847_18342C.1
ctgattaccatgaaaaactaaaaatagcaatctaactttcaagtaaaatactttatcctttaaaaaaagtaagcacttgcacatatgaaacttgctagctggcaaaaacaggatgattctttaccatcagctatacttttccatttaatctagattttgattgttaaatagttgtcaaagccaaactcttaatgatgtcacagactcacaatgcatgattgagtgatacacgctgntatggtacggtttttttgggataatagtacccttgatgagttgtcactaagtattttattgattgttgcttctcttctcacaagtcacaattaatctttgaaatccataaagttctagaatttcttagtaacactcagtcttcttgtacagtatcattaaatgtgttctttgtt

SEQ ID NO: 52414 - DNA, 405 bp, Glycine max
  Clone ID: PAT_MRT3847_18343C.1
gccactcttcgttttttcccaaagatgtaaacacagctgttgaccccatcaagaccaataggaccattcagaaagtggattgacgccccacaggtttcaagtgtgggattaactaccaggcaccttcccaggttcctgtagacgaccttgccacggtgcagagggcacttttcatgatatcaaactccaccagagtggctgaagtgttttgccgcatatatcacaaaagtgatctcatgtatgcgacacgcgcttttgtccactgaaacgtgggtgagggtacggaagaacacgaattttatgccgcccgcaaagaccttacagcccttgagaacgattatgaaaaattgggcgcctagtctggtgagggccactaagacgttgaagactactagaatctacttc

SEQ ID NO: 52415 - DNA, 608 bp, Glycine max
  unsure (1)..(608): unsure at all n locations
  Clone ID: PAT_MRT3847_18344C.1
gcacgcgtcgcgcgcgcacggcgtcgcgggaggggaagagaagcagttccaatacaactacccgcaggagagtcacctgtgggggatgcacgcgtacagtgccattccgagcaacttcgcttattgggggtgtatgagactcaattggggatatatgaggcgtctaagatggggcgcgttcnggagtgggggccccaagatgtgctgtgtgcccccatatcatatgcggcttattcctgcgacagtgcagttaatatatgctacattttgtgaggcgcaacattggggtgtttgaggcggatagcgttgaggcgcanatgtgntattgcgccatcaatatgcttgtgaccggcgggtttaagggggaggcaaggtgtgtgtcctcttgtgggggcgtggcatcctctagaacccaaccaggttgcgggtnggttgacggatggatctggcaaagtgaganaaccgaacgaggcanaggggaagtggggagcctgcccaccaacggacaatgggatattgagatgggnaacaggatcatcatctacaacaagcgaccacactgcgtgagtcaggctcaaagataaacgagcaacaaattgtgttatact

SEQ ID NO: 52416 - DNA, 151 bp, Glycine max
  Clone ID: PAT_MRT3847_18345C.1
aatcgagcaagtgcactgctctgggcgggagaagacggttgtgtgagtgacctactgcaagcgcggcccacgcctcattaagatcatccgctgcccgatcgagtttgtggagcccgatattctccgtttcaaggcctccttaccaattctt

SEQ ID NO: 52417 - DNA, 153 bp, Glycine max
  Clone ID: PAT_MRT3847_18346C.1
aaaaaaaattgtgaagtgttacaacagcagcgtactaactcgaatcggctcgagcatgacaaaataacctccatatacaaactgaacagttatcctagggaaaacttttggagattgtcattaattggagcaaaaatattaatcttacccaaa

SEQ ID NO: 52418 - DNA, 406 bp, Glycine max
  Clone ID: PAT_MRT3847_18347C.1
tttctcattggttggtatcgaatgccccaaggatgagaaacatatctccttttgcctttttcacgcagaaatggtgaaaaaggcaaaaggagattcgtttctggggatggtgaagagatgacatagattccaggaactagcgttgaagaggctcacaacaagctaatagttgatctggagaaaagtgtccctacattggctggtatcgaacgtcccacggatgagaaacttcctcgtcgcataattgtcgacaaacctaagacgcgctgcttcactattctccctatggagtttaatcttgtgggtcgccagaagaagataagatctgagaggtgcattatgaagaaacgggacatgcttagttgccgagttggaagcaagccatactccatggaatggactggtt

SEQ ID NO: 52419 - DNA, 265 bp, Glycine max
  Clone ID: PAT_MRT3847_18348C.1
ccgcgcgggtgctagctagtcctttctcgtcgctgctcggctcgcggcccgtggggtcggccccgccaccgttgccgccatgcccatgaagggccgcttccccatccgccgcaccctgcaatatctgagccaggggaacgtggtgttcaaggactccgtgaaggtcatgacatcgaattacaacacgcatggggagctgggcgagggcgccaggaagtttgtgtttttcaagatacctcagattcaatacaaaaacccttgggtg

SEQ ID NO: 52420 - DNA, 686 bp, Glycine max
  unsure (1)..(686): unsure at all n locations
  Clone ID: PAT_MRT3847_18349C.1
cacgcgtccggcgttttccctctttggtgaatgccaaacacctttctgttctgtctctaaccccaaaaacgctgcaacaaatcaccacctttcccttcctttttcccccccttattagtgcctgcttctcttcttttttatattcatgcatatcatacgccttcacttcctcaacttcaagcaatgatctaatctttcactttttgcattccttcccttctcttgttgactttctgttgttagcttttcatcactcaatggctcctaccttgacatgcaactctttcaatcactcaatggcagttttctcaaaaacccatttctcaattcccatgttgaaagagctttcactggatacttcaccttgtgtcagtcatggaagcagaacaacaaagcaaaggaacacactgatgccaatcaaagcatcagtggcagaggttccccctgctgttaggaaaactgtggatgaaaatgaaggaggaaggggatggtgcctctcagaagaagaagctcagggtacttgtggctggtggagggattggtggtttgggtgtttgctttggctgcaaagagaaagggtttgaagntggtggtgtttgagaaggatatgagtgctataagagggaggggcagtttagggggttcaattcagatacaaagcaatgctttggctgctttggagctat

SEQ ID NO: 52421 - DNA, 118 bp, Glycine max
  unsure (1)..(118): unsure at all n locations
  Clone ID: PAT_MRT3847_1834C.1
ggacaacgatcacgcggtgctcgcaatgtcctccattgatcagggatcttcttcttccgcttccgtgtttccagatcaaaantctaatctctctgcagtaaatacgtgtgtgaatggg

SEQ ID NO: 52422 - DNA, 236 bp, Glycine max
  Clone ID: PAT_MRT3847_18350C.1
cgttcatatcatagaccctctccttcaccaaaaagtcgctactggtatgctagaccgaaatggtgcgtgctctatacacactcgtcctatcgtatctactagtcgcataatcattacaacctactgtccactctctctcagacaacagacgccatttttactcaaacgattatatacaccacacctcggtagatactatagtcccagacaggatacaagtacctttaatagtaaac

SEQ ID NO: 52423 - DNA, 277 bp, Glycine max
  unsure (1)..(277): unsure at all n locations
  Clone ID: PAT_MRT3847_18351C.1
ccgggacattcctccctgatngaggtangctccttcaaacaagacccacccatacacgcatcantgttgtaccgtnggagctaatgcaccacctgccctgccaactgtcatgttttacagggtttcaccgccggtggtttcatttacattgctgtcgcgggagtcctaccacagatgaacgaccagaaaacaaccctcaagagctcagtagctcagctgattcccctggcaatggggatgctggtcgctctaggcatttctctggtagaataatctg

SEQ ID NO: 52424 - DNA, 373 bp, Glycine max
  Clone ID: PAT_MRT3847_18352C.1
atctgctcatgttgtctcttgatgatgctgaaactctaaaggttctatgtcgatcttagaatttctaatctaaattgccttacaagaacacaggggaggaccattctgcggagtgatctattggcaattctttgacatagggcaagtctagagcaagtgttgatttgcagcgcactcatcggattaaaggaatgattaaaatggtggccccagttggtattactgagaatacaggtatagcattggcctgtgctatgaataagacttttagggggcgcgccagttctgatatttacaccatctggctctcacgactgtgaattatggaatcctgcttgcgcagaacactgactatgtcatttaatccaaaccc

SEQ ID NO: 52425 - DNA, 472 bp, Glycine max
  Clone ID: PAT_MRT3847_18353C.1
gctcagggaagcttcaaaaattgaacaacctttgaaaaacaaaattggggtcccctaagcaaaacaaagaaatttaattaactaactaaattcttgacaaaaatttgaaaaaggggtccccatttagggcctacaatacttcaaaaattttttcaccgaaggaaaaaacccttggaaaaaaaaaaaaaaaaaaaaaaacgtgacaaaaagcattttcctttgcttaaattaaggggcgtccttttaggccttatttcaattccttgaaaaaaaaggccacctttccaatcaccatttttgattttataaacccccatttccaattccttggccttttggccatcgggaaaaaactttcccaattccacctccaaccattattttgtttttttttttgggggctggaaatcaaaatttttgtatttttttacagggggtgcctcaacagggggcaaggaaaaacgtgcccggt

SEQ ID NO: 52426 - DNA, 1605 bp, Glycine max
  Clone ID: PAT_MRT3847_18354C.1
agagcaagtcaaagaaatttattttcaagatcatcaaaatagaacagtctatcttttgaatgttaaccacaatccaaataagatcaccaacactggtaggcagttctgatgatgcagcagccaaatgatattgccattcaagcgaacacttgagctcactgctaaccataattttgtttatatttcctatatgaatcaagtgaaaaatatatagtatcaaagaaattattaatttaggaaaatacatctaggaaacactaatgcaaatacataaggtggaaaaaaaatctatataacaaaactgtaaaaagcagagaacatctctccatgctaggggttttcaatgaggaagcctgctcagcaaacccgatcacaagcattgcagtaagttttcatatagcaagagccgagcaattattttatagctgtaattcttccctaattcagggaaaccatttgagtcatcagcattaaaccacatctaagaagaacctacagatgcaatttatacctcccctttgctaatcacgactgatttctttgctcatttttccaagaattcttcgcagcctcagccgacaaatcatcggaatccccacccggctttggtttggagaagaaaggatcccattcgtgaggcccaacctcacgttgtccctcatccaacaatgcatacttccaactgttctcctcaatgaagttctcgtctgtgcgaccttccataatgtccttcctcaagttggtaaccttgtcaatcacagcctgcaccgaaacatcaaaagcatcctcaagagtctcaagtttggatcgaggatctgcgtacaccaacctagggatcaaaccaatgacctcctccctcatgatcctaacttcctcctcaggaatctgactaagcctctcttctatactaacattcctcttcctaacagcctccacctgaacggaaaccccacccggcgttggtttggagaagaaaggatcccattcatgaggtccagacctcgcgctgtccctcatccaacaacgcgtactagcaactgttctcctcaatgaagttctcgtccgtgcgaccttccataatgtccttcctcaagttggtaaccttgtcaatcacagcctgcaccgaaacatcaaatgcatcctactcactctcaagtttggatccgaggatctgcgtacaccaatcttgggatcaagctcatgacctccgccccttttcgatttccttccatctgaggaatctgcctaggcctctgtaatctaccacttcctctctaggcctcctcatcctctcctgccgaggtgaacacatcatcatccttggcaggatgaaaataagtcggatacggaatcccgaaatcattggcattccgagaacttgactcgaaaacaaggtttgacatgttcgttttagcgggcagatacaaaagcttgttcccccaatccgattctccctcagtgagtgtttgaaaatcccatgtgatcctaccggcgacaagaaaatggtctctcccattcatgatcttccactccggtctattcgagagccaattcacgaggtcaagcgatggagcatcgcgccccacgcgtccgcccacgcgtccg

SEQ ID NO: 52427 - DNA, 324 bp, Glycine max
  Clone ID: PAT_MRT3847_18355C.1
tgcttgtgtaatgcaactactgttttgatgctgacttgctccaacaccaaaactctgttttaccaaccatgacgtatctttctttataaaagggtgggtgggacgacctttaacttgtgagctaatcaactcggtactgaaatccgtaccgtggcttatatgctgtatatgttctagctataaggaacatgccttaatttttataattgtatttagtactatttttccttgattattaggattttttagagtgtaaaccttagaacccaactgtgcgcttgtaaaattcgtactttaaacaatcatcattttcaacgtttaata

SEQ ID NO: 52428 - DNA, 333 bp, Glycine max
  Clone ID: PAT_MRT3847_18356C.1
gctgaatatcattacataacacccatgtttttaatggcccttccttccctcttaggcaaacaccctctaactttattttcagctttgcttaatcaatcactacacccttttaccccaacagtttttcattactgtgccaaatcgtttactcccctatcttttaccactgaaaaaatacctttttcataattaacaggcaccctgacgacactctcaaccactatggcaacactcttatgaaacaccaacttgttaccattaccaaccacattaccatactgtgacgtgcaaatcactgtgtgccttacaagaaaatttcctaattgtacaaac

SEQ ID NO: 52429 - DNA, 377 bp, Glycine max
  Clone ID: PAT_MRT3847_18357C.1
ggaccaaacaggaaaagtcaaaatgagacaccgcggcgacgcagagccaccgtcgcaaccccaatcttcaccgtcaaattcccttcctcatcggaagaagaaccgcaagcgcagagccaccacttccgtttcctccgaaaccagctaccccaatggccctgaccagctcaacactcacattcatcacgctactgttgtgtgccaggacaaacctaaaccggaagagagtaaatccgctgtcgtcggcgaaggtttccgtttcggtgagctaaggcagagaagcgtgaacggtcgcgatagtttcggagaatcggcggttacagcccgtggtgacggctacgtgacggaaggtaagtcggttgcaacggcaacgtcag

SEQ ID NO: 52430 - DNA, 202 bp, Glycine max
  unsure (1)..(202): unsure at all n locations
  Clone ID: PAT_MRT3847_18358C.1
tcaattctccattncnantntctctcncacttntcaagaatcgtaagctatgggaaagacttanccaactntgagtgcngantancagaaggncgtngngnaggcgaagaagatgctcanaggcttcatcgctgagaagagatgcgctcctctaannctccgnttagcatggcacnctgntggaaccnttgacaagggnacg

SEQ ID NO: 52431 - DNA, 247 bp, Glycine max
  Clone ID: PAT_MRT3847_18359C.1
gcgggccggcccttttttttttttttttaccagttaacaaaccttccttataaattaaaggcaaatttaaaacttccttcctaagcagcaaaggaaagggactaaacccctatggctgctggggaatttgaaaatctaaaacttttaccatcaaaacaaaaaacatttttcatcaaaaacaaacagcaacgaaaatgttaccgccgatcaagaacccagttttgaaggctacggccggacgcgtggg

SEQ ID NO: 52432 - DNA, 395 bp, Glycine max
  Clone ID: PAT_MRT3847_1835C.1
aaaggttaaaaattcaactttaaaagccaccccccggggaagggcccggaaccaaggccctttttttaccattcccccgggtatgaaaaaaaccagaggggaaaaaatcccgggttttctcaaaaaattcaatctataaagcggggggggaaaagggagtcccctattaaataaggaccaaaaagggcatttccagttttcccccccccccttttggggggcctggcttttgccgctttcccccaagaataaaaggccaattacttcgacagggtttggaaaaccaaaccccccctaaaggcccccttgggtgggcctaaaagggtttacccccagtttaaaaaaggagcgacccccctttggaggttttttataaaaaataatgggccaggggg

SEQ ID NO: 52433 - DNA, 392 bp, Glycine max
  Clone ID: PAT_MRT3847_18360C.1
cctggtggggggggcttctattttcgcggcaccacgactatggatgcagatgcctatagatttaatcgaaagaattatgaggcttacaaaaaataaaataaagtccagaaaaaatgcccgactaataaataacagctgcaccacgaaaacaaaataaattactcatagaggaagctgcggcaactctgaaaaatgattcaaaagaacagcggcgttataagatcaaaacagaaaaacccccctcctccgttctcaattaaaacattgatctaaaccttccggaagttgcaaatcaaaacatggttgtaactgatcatcaatgggcccaccatcaacaagaaccttcttcttcttaaccatgtcaaggccctggacaacccttatcttgataa

SEQ ID NO: 52434 - DNA, 425 bp, Glycine max
  Clone ID: PAT_MRT3847_18361C.1
caaagaatggtattactaataccagaatgtacttttataattatttatatacaaagagaacagttgtggattccacgtcccataataaggggcttttcttagcatccaataaggtgaggcataaggaagacaggcctagccttaaaaccttttcctcaatcagaaacatatatttttctcttcttctgatgaatgaaatcaattctacaaaaatcagcaatatacaaacatatttcctatttgacaattcagctaataaatgaatgaactggctttttggatcttatcttcctaaaataagctcaatctaacgtcattgccacatggatgatgctggaatgtgactaatggcggggtaagtgaatgaaaagtgtagcccctctgtgaaagtttgatcttccaaatgaattgaattgaattgaatt

SEQ ID NO: 52435 - DNA, 179 bp, Glycine max
  unsure (1)..(179): unsure at all n locations
  Clone ID: PAT_MRT3847_18362C.1
agagagagagaactagtatgagagctctgaggttgaggtccaggatcgtggtgtntttgactttcntcggaagaaaaagggatgaagaaaaaagcctcatccctcgcgaggaggtcattcgccaccgagttctcaaaagtcactgcctcacacccaggagagaacaaccacagcctctt

SEQ ID NO: 52436 - DNA, 313 bp, Glycine max
  Clone ID: PAT_MRT3847_18363C.1
gagacgcctacaaccaggcgtacgaataagactgtcttagactacttcagaactacaattggggaaggaggagcttgatatgacatacgaaatgaataaaattgcgactgagcactgagatccagggccactaatccaaaagtaaagtgctcagggcagaatctggcatttcaagcacacaacatcaacagctaataaacgatctcatgtgagcgactatatatatgcttatttatgcttagttgatcaagggtaaaagatcatttgttatacaaaatcgaactatttggggtcattttcttaggcgtggaaa

SEQ ID NO: 52437 - DNA, 983 bp, Glycine max
  Clone ID: PAT_MRT3847_18364C.1
gcgacttgctttttatataaatatatcggttattctccctctcttctcaatcgtcttctccgcgttcaactcgcgtgcattgcagccagaccaagcgagaaagggaagagaattcgagagagaaacttcagagagaaagagagagagagagaaactagagagagaaagcaaagcccaaacaccccttttaaccattgcaattctcgttcggtttcagagaaccccttttgaatttttttgaattttctgggaaacagggcgttttgtgaacatcatctgggttctctcgatctccatcttttttttctgggtttccgttttttctcctcagatcctcttctgtttttgttttctccgtttttgaatcggattttcgaagttgtctcgcaattctgcctcgtgggtgtgtgtttttccaaggaaaagattcagtttttcatagcgtgaaagtgggaaaaggattgattcctatctgggttttttttatgcaattgttggtttaaattttgagggcaatgatgttgacctttaaagtttcgttatgaagtaatatgaaagtggtccttatacggttacaacagcatcaacaacatcattagcaacaaaagcaaaaacaccaccaccaccaactagaacaaaaagaagaacatgtcgttttacattggtcgcgaggctttcaagctgtggaagagattttatgcagagacaacaaccgagctcaacctccttgcggagaattggaagtaccttctcgctggtattgcttttcagtacatacatggtttggctgcacgaggagttcattatttacataggcctggccctacactacaggatcttggattcatccttcttccggagcttgggcaagagaaggcttacattagtgaaacactgtttacctttatctttttatcctttgtcctttggacatttcatccctttatattcaagagcaaaaagatctacacagctctaatatg

SEQ ID NO: 52438 - DNA, 274 bp, Glycine max
  unsure (1)..(274): unsure at all n locations
  Clone ID: PAT_MRT3847_18365C.1
attnaacgagatatanggnaaatgattacaaggataaaattaaaaganatacttgtggacaaaaaaaaaagacttatacctgatncataaaaatagattagttcatttaatnannancaactatttcatngttaganaattaaatatggctttttttaagccagtaaatcgtttnacanaacattcatttntcaatttnngngaanaatattttnnntcatacaaaatacctngttatgncnttatacttntaaaaaccttttcnnnttacgaa

SEQ ID NO: 52439 - DNA, 1715 bp, Glycine max
  Clone ID: PAT_MRT3847_18366C.1
ggaattccctttcacttacgcgcccgagtcacgtagctaagcggctcgagaaagctacaagagaagaaaaaaaaaaagagagaaaagaaaaaatttgttttataactttttaacttattgttcacttcttcttcttcttcttcttcaatatcttggttctttgatattattctattgagcaaaaaatgggagttccagagagagaccctcttgcacaattgagtttgcctcctgggtttaggttttaccccacagatgaggagcttttggttcagtacctttgccgcaaggttgctggccatcatttctctcttccaatcattgctgaagttgatttgtacaagtttgatccatgggttcttccaggtaaggcagtgtttggagagaaggagtggtacttttttagcccaagagacaggaagtacccgaatggttcacgaccaaacagagtcgcgggttctgggtattggaaagcaactggaacagacaagatcatcaccactgaaggtagaaaagttggcataaaaaaagcacttgttttctacattggcaaagcacccaaaggctccaaaaccaattggatcatgcacgagtatcgccttctcgattcttcccgcaaacacaacctcggaaccgcaaagcttgatgattgggttctatgtcgtatctataagaagaactcaagttcacaaaaggttgaggctaattttttggctatggaatgcagcaatgggtcatcaccttcttcatcgtcccacgtggatgacatgctgggatcgttgccggagataaatgaccggtgcttcaccctgccacgagtgaactcactcagaacaatgcaccagcaggatgagaaattcgggtctccgaacatgggatccgggtttttctcggattgggttaactcgaccgatctcgattcgatttccgaattcgagtcgggttgccaaacccaaagaatggtgaattatgattgcaatgacttttttgttccttctctgccgcccttgggccatgtggactacatggtggatgcacctttggaggaggaggttcaaagtggtgtgagaacccgacgggtcgacgggccggggcattttcaaccgaatccagatacccgattgttaccgggctcaggtgacccattcgggtttgggtttattatgggtcagcaagttgggttcggggttagggagtgaagtgaaggatcagaaagtgtaattgtgtaaataattggggattttagtttaatttgaattctatgaccattgttatggtttgtgttattgattcccgcttggaaaggaaaaattgcaattttggtcatacttttcggctagaacaagatgaaggacggttgacacattatgaaactgagaaaggacgcaatggtgattgcaccacaaccacaacaatgcatgctgaaaagtaattgctttgtaagacattattgcctaaacatgaatcacgttgtacttcaaagcattaatacatagcaactattttccaaagtttagtttagaactttagatattggtatttttatttggctagtgtcccatgcatccttgtagacaacctgattaacatgtaatgaagatatgtccaccatttgctataaagttgtcttgcctcgctgattgtgaaaaaagtgagatcaacgtgtgaaatgaaccctccattttatgtatgaaacaaatggatttggattgatt

SEQ ID NO: 52440 - DNA, 165 bp, Glycine max
  Clone ID: PAT_MRT3847_18367C.1
atcctgtatagcgggcgccccggggtgcgtgcgtccactcgttcgtttcataacgccgccgatctaccccctctttgagcccctagaagacaacaaagccggcagtttcagaaataataatattaaaaagctcttgctgactggggtcgctgcctccttttttgt

SEQ ID NO: 52441 - DNA, 1640 bp, Glycine max
  Clone ID: PAT_MRT3847_18368C.1
caactagagaattaaatttagagaaaaaaaaaaaacttggttttatcttctttgttattattatattcacttcttcaatatcttggttctttgatattattattcgattgagcaaaaaatgggagttccagagagagaccctcttgcacaattgagcttgcctcctggatttagattttatcccactgatgaggagcttttggttcagtacctttgccgcaaggttgctggccatcatttctctcttccaatcattgctgaagttgatttgtacaagtttgatccatgggttcttccaggtaaggcagcgtttggagagaaggagtggtacttcttcagtccaagagacaggaagtacccgaatggttcacgaccaaacagagttgcgggttctgggtattggaaagccactggaactgacaaaatcatcaccactgaaggtagaaaagttggcataaaaaaagcacttgttttctacgttggcaaagcacccaaaggctccaaaaccaattggatcatgcacgagtatcgccttctcgactcttcccgcaaacacaacctcggaaccgcaaagcttgatgattgggttctgtgtcgtatctataagaagaactcaagtgcgcaaaaggttgaggcaaatcttttggctatggaatgtagcaatgggtcatcaccttcttcatcgtcccacgtggacgacatgctggaatcgttgccggagatcgatgatcggtgcttcaccctgccgcgagtgaactcagtcagaacaatgcagcagcaggacgagaaattcggatttcagaacatgggatccgggtttttcaccgattgggtcaacccgacggatcttgattcagtttccgaatttgggtcgggttgccaaacccaagggatggtgaattatgattgtaatgacttatttgtcccttctgtgccgcccttcggccacagccatgtaaactacatggtgggggcaccaccgtccgaggaggaggttcaaagcggtgtgaggactcaacaggccgatggggccgcatgttttcagcagaacccaaatgcccgattgttaccgggctcgggcgacccatttgggtttgggttcatcatgggtcagcaagttgagttcgggtttagggactgaaggatctgatagtgttgttctgtaaataattggggattttaatttaaattctatgctcattgttatggaaaattgcaattttggtcattcttttcggctagacacatacaatgaatcggtatgaaactgagcaaggatgacccaatggtgctttcaccacagcaccgcatgctgaaaaattaattgctttgcaagacattattgggctaaatatgaatcacgttgtacttcaaagcattacatagcaactattttccaaatttaagtttagtttagagcattagatattgatatttttatgtggttggtgtcccatgcatccttgtagacaacctgatcaacaagcaatgaaccagctgtaaaattgtctagccttgctgattgtgaaaaaagtgagatccacgtgtgaagtgaacccccgtttaatgtgttaaataaatgggtttggattgattagttgaaaaaagttttcaactataaaatcatctcgtttcactgc

SEQ ID NO: 52442 - DNA, 225 bp, Glycine max
  Clone ID: PAT_MRT3847_18369C.1
gtttatgtttgtgatacaaaatcacacaaatcttgtgtggaaaaacggggtggggcgaacactgtgtcagcgatggaaggaaaccctgcggtaaagggatgcttataagacggagacaaatgggctcaaggggtatcttcatagatcagcctaaaggtgaacatgtttactgagctgatattacggaggacaatggaacaaaccaggtatccagatgagatctca

SEQ ID NO: 52443 - DNA, 346 bp, Glycine max
  Clone ID: PAT_MRT3847_1836C.1
gttagtaaggagttcgttgagaaaaccgtagtgctacaccgtcaggatattaaaggatgctgcgacatgagagtacgactctgcatcaccgataccttgtatcggttgggacatgggcattatacaagtgactactaacagtacacatcatagtagtaatagaagacgtgaagttgactgccaagagaagaaagcattagctagcatagatatgccatgctgcctgatgttgatccagggacgtcacccattgctagaactgtggcccagttacgttttcataagcctatggagttgacccaacactagtctgacacactggagtcacctagttctaccaaatgtg

SEQ ID NO: 52444 - DNA, 245 bp, Glycine max
  Clone ID: PAT_MRT3847_18370C.1
cgctaacagaacccgactctcattcatcgttggggaagaagatggatcgaatctgactgccaccgcagctgtcgtcggagattcccgtcgaggaaggtgaagttttcgaagatgacctgcaatgaacttaggagaaccgcgcctatgtcttcttgcttttctgcttggacacccgatcactcaccaagcatgttacgcaggttgctgatgccatagacgatgctttgtggaaactttttgagaaa

SEQ ID NO: 52445 - DNA, 174 bp, Glycine max
  Clone ID: PAT_MRT3847_18371C.1
tttgtttatgtattctctatcaaattatctattttttattactccttccccactaaattctttttgcttctattccatagctggcttggctctcatattactcaacattcttaaaccacattaactcactaccatcatcatcaagcttcccctccagattactactattatcca

SEQ ID NO: 52446 - DNA, 222 bp, Glycine max
  Clone ID: PAT_MRT3847_18372C.1
cggacgcgtgggttttctcttggggactgaacaatctgtgtactctaccctcggggtctctctcaaaagggatgagaaggatgttaccctcgacggcaatatgaactggcatcacagcaccttctaggctacggggtaaattttaaccaagctcccctctgactggcggcttcaaagaccggattgtttccataggtcatagaaactctgccagcccaaaac

SEQ ID NO: 52447 - DNA, 715 bp, Glycine max
  Clone ID: PAT_MRT3847_18373C.1
aaggtgacagggtgggtgacgccctgggcgcgaaggtaaatgcggattgggtgcaggaaggagtgggtgagcaggtcggggagggagaacagcaggtaggtgtgggccattagggtgatgttggggtcctggtgcaagagatcaacgaggatgttggacatgttgagccagaggagagatattgggatggagcagagtaacaggaacatgacgcagcggtggagggtcaacgacaacacattcacgcgttttgcgccgaatgcttgggagcatagcggttccatcccgagtgctagacccgacagcaccgaatagcctgtgatgttcgcgaacgccattcctagggaccctgctgccagttctagctctcctaggtgtcccaggaacagcatcgataccatggaacgcgcgtagaatatcagcgccgttaaggctatcggaaacgccagctcccccaccgctttcacttctctccttatgctccaacagtgctgcccctctttttctactgctccctccatcaacgtgtaatctactacttcctctgtttttgatcccatcttaatggatcctctcaaactcaaacttgcactctcactctcactctcctaaacaccaccccctctcttctctcttgtcttcttctcagtaaagactgattgagtctgtgggattagctagctagctagatacatacacgaaaccggacgcgtgg

SEQ ID NO: 52448 - DNA, 1316 bp, Glycine max
  Clone ID: PAT_MRT3847_18374C.1
acggctgcgagaagacaacagaaggggacctcgtgttttcttctctctctcacactttctctcagcgttgaaacttgaaattcttcttctccgaaacctctttgaaccgggtcaagaaataaacctcgctgggaaccgttgattgggtttgtacgaataatttgaaatgaagattcagtgcaacgtgtgcgaggccgcggaggccaaggttctgtgctgcgcggacgaggcagcactgtgctgggaatgcgacgagaaggttcacgcagcaaacaagctcgccagcaagcaccagagggtccctctctctctctccgcctctcacatgcccaagtgtgacatatgccaggaaatggttggttatttcttctgtttagaggatcgagctttgctatgtaggaattgtgatgtatctatacatacagcaaatgcctgtgtctctgatcatcaaaggtttttgcttactggtgtgagagtaggccttgaagctactgagcgcggtgcttcctcgtcttctgtgaagtcacagtctggggagaaaatgtctgatgctaaatcttcatccatctccagaaatgtttcctcactgccccagccatcaaatgccaatgaagtgttacccctccaaatgcaaggagttgaggagtttccaccaagcaatttctcaggttatacttctggaaacgtctcacaatggcccattgaagaatttctcggattaaatgaactcagtcagtattataattacatggatggatcatctaaggctgacagtggtaaacttggggattctgattcttctgttttgaggtctggtgaagaggatatggatgatgacggcttcttgggacgtgttccagattcatcctggacagttcctcagatcccttcccctcctacagcttcgggtttatattggccgaaagtccctcaatatacatctgacagtgccatgtctgttcctgacatatgcttttctcatgtgcgacagccccaccatgcccagcataattctaatgtttccaaaaggcgtaggcaactataatttgttctctgatcactagctcaatatgttaaaaagattgttttttatctgttagagatggagcgaacttttgaagttctacccttctttagatcatttgaagttcagtttgctacatgtttcttctattcacggcagtcttcatttctttttgggagcaaatcccttaactctccatttgttattgggaatttgacaaagaaaatagctggaacaacaatgtaataggcttctcatttcaatttgatcttgtgcattttaacttaaaaaa

SEQ ID NO: 52449 - DNA, 197 bp, Glycine max
  unsure (1)..(197): unsure at all n locations
  Clone ID: PAT_MRT3847_18375C.1
gtctctttcttcatagcatttggaaatttggctgatgacaccatcaattttgaggctttttcctgaatctctccaaactgcaccagcttgtggngaaaagcctnaaaattgatggngtgatcagccaaatttacaagtgctttgttgaaagtgaccacgttcatgatttggcgacttcgtactcgtgccttcgacgt

SEQ ID NO: 52450 - DNA, 260 bp, Glycine max
  unsure (1)..(260): unsure at all n locations
  Clone ID: PAT_MRT3847_18376C.1
atccgggnggagggcatacacgatcaccctttccttacatttttttttccagcagcanaaaaaaccgggcccgctctttttataaatcccagtcttacaacaccctaaaaagcagatctatattaccaatagaatacatacatccatctacttctgcaagaccatgccaatgccaaacaatatatactaaacactacaccttacattatataagaagtcactcgagaactcctactcaataacctttcaatccatgattt

SEQ ID NO: 52451 - DNA, 456 bp, Glycine max
  Clone ID: PAT_MRT3847_18377C.1
aatctaaaattgcacttcccaaaaacacaggtggtggaaccattctgcgtagcgaactataggcaaatattttgacagagggcaattctagagcatgtgttgatttgcagggcactcatcgtattaaaggaatgattaaaatggtggccacagatggtattgctgagaatacaggtatagcattggactgtgctatgaatagtttttatagggggcgtgccagttcatgtatgtacactatgtgatcttagactgtgaatatggaattctgttagctcaaaagcgatgactatgtgatttaatccaaacccgtgtgctgatgcatggcgcttggaatttgttgaagcgtacccggattttattgtgatatcatttgcgcaactggatggactgccacccattgcaggatgtttatgttacatagatgggttaatttcttttaggaatgtgtaccca

SEQ ID NO: 52452 - DNA, 1867 bp, Glycine max
  Clone ID: PAT_MRT3847_18378C.1
gttaaatcaggaatcaaacgttgatatctgatgagcccgctttcaattttgctgaagagttgttcagtcctgttttgctcctcttccttgtcttctccaaacattcacacattaacgtttgaatcctctgatctgagacttcgtccattttcctaaacctctaattaagccaccaattagaagaggcaattttctcacgtcagagagagatcatctttgtatcagtgctgcatccactctcagatgggtatagtgaggggggtgttattggatgaatcagtactcttggctgaaagtggtgatgataaaactgtttctttactccggccaggagctgagtctctcatccgaacactcttcctgtccagaacgcatagtggaatttcttatggtgttggccttccagatgacaaggcaagtgttcttcaaaaaattgctagtttgtactcacttgattgcttcatcttaaatgattctgtaagtgaggttatgcctggatggagtaatactgatgatggcagcattattatttatctgatttctgataagaaggagttcttacctaaattaagcagctataattggctggttgttgttctaaatgttggaggtgaaagcttatgtcacaatccaaatatacttcagattgaaaacttagaggagtttccattgaccatatgccacttaaataaaagatcaattggaaccaatgctgtgactgtgagttatacaatgaagccttctcgtgtcgaagattttgcaaagaggggtgcatttcctttgtgtcctactcaaaatgggttgatgtttgtgcctctcgcatccaagctgcctttatcatctcaattaaagggtgttgacatagttctccacaaagccactgatgaaatattatcaattgaagataataatattacttttacacagaacatccaagcattgcaaagatacttggatcagcaccaggatttctgtgttattgatccactgagtaatgtttatcctttattggataggctagaaattcaacaagttctacttggctcagtagaactgaacactgaaggcaaatatttgatcagaggggcccaattttcttaaggctgataacttttgatgaatttgattttgcaactggactagctgaagctagattgtctcttccatgtatagtgaaacctaaggttgcttgtggtgtcagtgatgcacataagatgacaattgttttcaaagttgatgattttaagaatttaagtgttcctcttccagctgttattcaggaatatgtggatcattcatccactttgtacaaattttatgtcttgggtgaaaagattttctatgctgtcaagaagtcaataccaaatgctgatattttgaggaaatcatctaatggtgatgagctcaaacctctactgtttgatagcttaaaatctatgccgaccgctgacagtatcacaagtaatgagcctattgaccttaagctggttacagatgctgcaaattggcttaggagaaggcttcagcttaccatctttggttttgatgttgtaattcaggaaggtactcatgaccatgtaattgtggatgtaaactatctcccatcatttaaggaggtgcctgatgacatctctattcctgccttttgggatgccattagaaataagtttgactctagggtatctaaataagcatttgtttgaactttgtgactatttgacatgtaataatgccgatggttacatagatcaggcactagatgatatcaagctaaatatgagtttgaataactcattattgcatacttgaggtttgaaatgcttaacacttgttattaatgcaatttagtgttatttttcttctgcta

SEQ ID NO: 52453 - DNA, 296 bp, Glycine max
  Clone ID: PAT_MRT3847_18379C.1
aaaaaaaaataaaaaaaataaattaaaaaatttaaaaaaaaaaaaaaaaaaaaaggaaaaaaagagaaaaataggggggccactttctaggctcccagagtatataatcgggcgtgcgacctcttgtatcttatttatcgtgccctatattcaaaattcatgtcctctcgctttccaatcgtctaaattgtgaaaactctggcgcttttcaaattattctgcttgtgaaacatctgccttttgccagatgtcgcgttatgcaaaagacccccgttgctctcgctttctaaaatttt

SEQ ID NO: 52454 - DNA, 900 bp, Glycine max
  unsure (1)..(900): unsure at all n locations
  Clone ID: PAT_MRT3847_1837C.1
ggctcgagaagcaataaatttgaatgaatttatttttaccagcttcagatacctgaaaagagaagagcgagatggcgtcggtggtaaagaacgtactcaaatccgtcagagaaaagggtttcggcgctttcctcagagagctcaaggatgaaggctacctgagatgccttccggatggaaatctcttgcaaaccaagatccacaatattggggcaacgcttgttggtgttgataaatttggtaacaagtattatgagaagcttggagacacacagtatggaaggcacaggtggattgaatatgcagagaagactagatataatgcctcccaggttccagctgaatggcatggttggctccacttcataaccgatcacacaggagatgagcttcttttactgaaaccgaaaaggtatggtgttgaacacaaagaaaatttgtctggggaaggtgaacagtatatctatcattccaaaggacatgcacttaatccagggcagagaaactggaccaggtaccaaccatcccacgcgtccggaagaagaagctaatatgaagtatgagagtagaacccagcaaagaatgtgattgatattcatcctttaaactgaagaacaaaaatagagaggatttcatatggatacaaccaatgcaattcactcaatattagatgtatacatgaattatatttgttaggttatcccatgtattgatgtcctttttctttaacgaatattatcttttaaaagatagtatctggaaaggaaaattgtcaagcaaatagttagttgatttgttacaaaaaaaaaaaaaaaaaaaaaaaaaaaaaaggaaaaaaaagtgggggtaaagttactnantataaataatatatttattatattttattatttttttttt

SEQ ID NO: 52455 - DNA, 868 bp, Glycine max
  Clone ID: PAT_MRT3847_18380C.1
cgtccggtgagtggccgtttgaagtttgaagtttgaagtttaaacatagagaaacgaaattgaatgcaacccaacaaaacacattaactcccatttccattcattcatcctcaaactttttttataaaaaaaccaatcttgctcacctcggagagagagagaaatagaatgaccggagtggtcatggtgaccaagggcggtggatgcggcggcggcgggaagcggacgaggtcggcgcgaaccgccgaggaggaagaagagcagcagaaccagctgtcgctggtggcgcttctcttggcggccatcagaaaatcgatggtgtcgtgcagggtggacccacccgaggacgtaatctccaccgtccatcacatggagatcggatggccaaccaacgtccagcacatcactcatgtcaccttcgaccgcttcaacggcttcctcggtcttccctatgagttccaagtcgagatccctgccagggtccccagtgctagtgtaagtgtgtttggtgtctcagcagaatctatgcagtgttcttatgatccaaaaggaaacagtgtccccactattcttttgctaatgcaggaccgtctatactcgcagggaggcttgaaggctgagggtatatttcgtataaaccccgaaaatagtcaagaggagcatgtgagggaccagttgaataggggcattgtgccggatgatattgatgtccactgtttagcggggctgatcaaagcctggttccgagagctaccttcgggagtgctagatggactttcccctgagcaagttcttcagtgcaacacagaagaagaatctgttgagcttgtgaagcagctaaagccacccgagtctggtttactcagct

SEQ ID NO: 52456 - DNA, 311 bp, Glycine max
  unsure (1)..(311): unsure at all n locations
  Clone ID: PAT_MRT3847_18381C.1
tagccacaatgcggtattaaatgatgagtggcctatgctttcttttattaggtccctaaagggcatggcccaggtcttcaaacagcctgntattgatgtaacctttgcacctctgattnnttnctccatcttgttcaaaaagattgcatcatatggtttggtgcttgctgtgtgttaaagccattccagatgaggattaggaatttacaaaactcctcattggttaccaggatatgattggtcttctaaatgtacacatatttgctcggttttatacacagggtcctgtgattctggaggccacaacattg

SEQ ID NO: 52457 - DNA, 380 bp, Glycine max
  unsure (1)..(380): unsure at all n locations
  Clone ID: PAT_MRT3847_18382C.1
ctagctggctctgancnancaacaatcttctctctatttatgttttccatcacactaaccatttcctttcccgggataataaaaaatggcagtgggtgaaaatattcaacctcttatttgtgacaatgcaacatgaatggctaaggctcgatttgctataaattatgccccacgtgctgtattttccaacattgtatgtcatcctcatcacactcttgtgatcgttgacatgcaccaaaaaaatgcatatgtttgtgattacgcacaatctaacaagggtatttttactttcaagtaccccatttaacatttaattgtgatcaatcgatatgatatgaaaaatatttggccttataccttctataatgagcttcattttt

SEQ ID NO: 52458 - DNA, 1068 bp, Glycine max
  Clone ID: PAT_MRT3847_18383C.1
ccacgcgtccggttagcaaggggaaagaaagggaggaaagagtgcttctgcttcagaaaagatgactctgaggtcctatctgataataatgttgagcaatatgatcttgtcccattagattcccatgtgaactttgatttggatgagcttctcaaggcttcagcttttgtgctgggtaagagtggaatagggattatgtacaaagtggtgcttgaagatggacttgctttggctgtgagaagattgggagagggaggttctcaaaggtttaaagagttccaaacagaggtagaagcaatagggaagttaaggcatccaaatattgcaactctgagagcctattactggtctgttgatgagaagcttctcatatatgattatgttcccaatggaagccttgctacagcaatacatgggaaagctggacttgccacatttacaccactatcttggtctgttagagtgaaaatcatgaagggaactgcgaaaggattggtctacctgcatgaatttagtccaaaaaaatatgtccatggagacctgaagcctggtaacatactgttaggacatagccaggagccctgcatttccgatttcggtcttggacgccttgctaacattgctggagggtctccaaccttgcaatccaacagagttgctgcggagaaatcgcaagaaagacagaggagtttatccacagaagttacaactagtattttgggaaatggttatcaagctccagaaacactgaaagtggtgaagccatcacagaagtgggatgtttactcatatggggtgatcctgctagaattgattacaggaagattgcctattgtccaagttggtaactcagaaatggaccttgttcaatggattcagtgctgcattgatgagaagaagccactctcagatgtattagatctttatttagctgaagatgcagataaggaagaggagatcattgcagttttgaagattggcattgcttgtgtccatagcagccccagaaagagacccataatgaggcatgtgccttgatgctttggatagattatccataccctctga

SEQ ID NO: 52459 - DNA, 379 bp, Glycine max
  Clone ID: PAT_MRT3847_18384C.1
atccttcagaaaaaggacatctaaatttacgccttagggcccagggaaaaaaaagtgactcccaaggtacatggcgattaggccgacacacgcatgcaagtggcggttgaaggcaccaagactgggcttgcacaaaaaaatgcgggggtaggataggggacaataccaaaaacactggcacattgcactacccaagtggaaggacggctattacctgtcaaactacttcgcaacaaagacaatgcccatcaactcgaggacactaaattgcaatcttaacaaaacccaatattctggggaaaaactaaaccttctcaagactgggggggtccctacaattgattttaggaaaaccacttacctaaactatatgcccggc

SEQ ID NO: 52460 - DNA, 371 bp, Glycine max
  Clone ID: PAT_MRT3847_18385C.1
gggcgccgggggggctgccctatattcaaagccatatctcatctccggatgggggcagccgcgattatagcccatctgacctcgaatatactctgataaaagctccgccatactatgaacaccttgaccctgcggattatacgtcaggggatgacgaacagcgagtctcacatcctccgcaaactccttaggcgatctgagccagccttgctcagccttgtcgtcacagcccccaagcccatgggatgactgatgatagaaaaataatcgtgcttgccgagagtctcaacatctgcaggagaatgaatcacccagacatgctcgggtctcatcagtctctcgagcacagaacacgcgcaaagccggaaccc

SEQ ID NO: 52461 - DNA, 362 bp, Glycine max
  Clone ID: PAT_MRT3847_18386C.1
ttggggaactgcgaggtgacttcctctacagtagcagctccaggaactagtcccccctcaacgcacgaagggtttgggtttggatcatatggggtacggccacctggccaatatcctgcctgccccatagagtcactcagatcacttggttaaggattctaaaccagtggatgcttgtgataaccgtgattcttccgattcattttttggaggagatgtattctgagctagctcatttcaacccaagcaagctctttctacacaaggatagtcttctggcactccagcgcttcctccacccatgggggctgtatctcgaggaaacccccattctgctaggactagggcccccgattctttgc

SEQ ID NO: 52462 - DNA, 377 bp, Glycine max
  unsure (1)..(377): unsure at all n locations
  Clone ID: PAT_MRT3847_18387C.1
nngcacgcgtacgtaagctcggaattcggctcgatnngngagaagacgacagaagggcgntccatnacctnagcatnannctantgagcanagtnntcagtngnagttngnaccncgnanccctnaaatccacangtgtcanttcanatatggnccatcatggncaagttttacganttttgcancantcatcagtgtagncnnggtangtggntnggtgntcattngnctcgggcggcnnaagctaggncnaggggntgtctttgggtnngcgnntaacntgnncgatangggacannacaattaactggnntncaaggcacgtgnnngntnncnccnttantggnagtgntanccttnnnatncangnncaattn

SEQ ID NO: 52463 - DNA, 157 bp, Glycine max
  Clone ID: PAT_MRT3847_18388C.1
cggttcaagtcatcctgaatttcagggataacttcatctctgtccacgatcctgcatcagcatagatgagagtgcgctggcagcacccataaatggtgcccggggagaagcgagaaggaagcagctaatcggagagtgctacaatagccgacagctg

SEQ ID NO: 52464 - DNA, 457 bp, Glycine max
  Clone ID: PAT_MRT3847_18389C.1
tatatttagtcttttaaattttatgctcgcgcgagatgccgagtccttggcgctcgacatgaaggtagtgtttggatccaacgcaagtgaggtgtggaaagtgatacttgcatggaaataagcagaaagtcacactttcttttggtactggcgaaagacgtttagaaagttgtcaacaaatcgcgggtcccacatgaaagcatttctctccaaaactgacgagaaaagccgaaaaggggtgaaattgtagatgaaaattccatttaagaaattgcccctaacctcgtgggatgcatgggagaaaagggttttcaacgttctatgacaccggtttccatacacagcatctcttgctttcgagggtgaaaatgacaagaaggggccaagtaggtaatactagtcaacctatttggtggacaaataagatggactctaaactactaaatgcgatgtgcga

SEQ ID NO: 52465 - DNA, 432 bp, Glycine max
  Clone ID: PAT_MRT3847_1838C.1
gggtaaaactgactaagcattttaagctactgttaaacctctacttgcttatcatatctatacatcacagaatacttggtttgattattaatcaaaccgactctatgacattgcctgtatttataggtgactcactcttgaccccactttatcaagccttaatgctgagacataggagttcatggcccatactcatatatctagcagtgaacaaacttacatagtccaagctttcgtatcctctgaaggacagcaatgaaagccttaatcctgcaacaaaagtgatcgctgctcacgcctatcatagggggcgcatgcttattggaaacctccactggctgagtgtgacaactgtgcaacacgcgctggggaagcttgtcagtctccacgcactgtacaatacagtgcgatagacaccttctataaacctta

SEQ ID NO: 52466 - DNA, 293 bp, Glycine max
  Clone ID: PAT_MRT3847_18390C.1
gtttaggtggattggagttatagggatgcaatatttgacctggccacgattaaacctaatcagccaaatgaccttccttggccgatccttgcataactccattgccaatggagaataacaacccctcaatgctttggtcaatggactacattgcatcatctaacgaggaactggatttggagataaatctgccaatcattactactagttcgaccaatattaacctgcccctttacgtcaagcgcataccgccgccacaatctgtgaattctgagccctgagatattccggat

SEQ ID NO: 52467 - DNA, 383 bp, Glycine max
  Clone ID: PAT_MRT3847_18391C.1
aaaaaccaaacccctgggaaattttttcaatcaaaaatcaaccaacccagatgtaggcaacacagcacgcccccccaaaggggggcaagagtcccaattttggctaaaagttttacctaatttaggcaatcttccaaccccaagttccccaaaagaaaatccttttagcaagcttttggcttttacaacattccctaaaaaagataagcttttttttccaaaaaccgccaaactcgcatgaaatccccagacaggaccaaaatttttcaaagggccaaggctttgggggcaaggttgtaaaaaagccagtccaaaccctaatagagcccctttccaaaagttgcccaagggctttggaaatcccaggggcgttgccgggggga

SEQ ID NO: 52468 - DNA, 2241 bp, Glycine max
  Clone ID: PAT_MRT3847_18392C.1
ccggcgtcgacccacgcgtccgataaaagcaagttattaatttcccttcgtactgatatttttaaaggactggcttctttattttttgataatacaaagagaggaaagaatgtatttttagactggaggacctcaaagaataatgataaggacctcaatgaaattataccctggcttgagtggatgctatcccatacacttttgcgttctgctgagaatccccaacagggtcttgatagtttctgggttgaacaaggtggagcgcttttgcttagtctaatgcagagttctcaagaggatgttcaagagagggcagccacaggtcttgcaacttttgttgtaattgatgacgaaaatgctagcatagattgtggaagggctgaagcagttatgcgagatggaggcatacgccttctacttggccttgcaatcttggagagaagggcttcaatctgaggcagccaaggccattgcaaatttgtctgtcaatgccaatgtggccaaagctgttgcagaagagggtgggattcagattcttgctggtttggctaggtcaatgaacaagctggtggcggaagaggctgctggaggattatggaatctctctgttggagaagagcacaagggtgccattgctgaagctggtggaatacaagctttagtggatcttatattcaagtggtcctctagtggagatggagttttagaacgtgcggctggtgcattggctaatttggcagctgatgacaagtgtagtacagaggttgcactagcaggaggtgtacatgctctagtgatgcttgctcgtaactgcaaatttgagggagtgcaagagcaggctgctcgtgcattggctaacttagctgcccatggagatagtaacagtaacaatgctgctgttggacaagaagcaggtgctcttgaggctctcgttcaacttacttgctctccccatgagggtgtcaggcaagaggctgctggtgcactttggaatttgtcatttgacgatagaaatcgagaggccattgctgcagctggaggagttcaggccttggttgctcttgcccaagcttgtgctaatgcctcccctggacttcaagagagggctgctggtgctctgtggggattatcagtctcggaaactaacagtgttgccattggacgagaaggaggtgttgcacctctgattgcacttgcacggtctgaagcagaggatgttcatgaaactgccgcaggagcactatggaatcttgctttcaatgctagtaatgctctaagaatagtagaggaaggtggagtatctgcacttgttgatctctgttcttcatcagtatcaaaaatggcacgattcatgtctgcgttggcattggcatacatgtttgacgggagaatggatgaatatgctttagtagtcacttcatctgaaagtatttctaagagtgtgagcttggatggagctagaaggatggctttgaaacacattgaagcttttgtccttatgttctctgatctacaagcatttgcggctgctgctgcatcatctgctcctgcagcattagcacaggttactgaaggtgcgcgcattcaagaagcaggacatttgagatgcagtggtgctgaaattggaagattcatcactatgctacgaaatccatcatctatactcaaggcttgtgcagcatttgctcttctccagtttaccattcctggtggacgacatgccatgcaccatgctagcctcatgcaaagcctgggagcatcaagagttctgcgtggtgcagctgctgcagcaactgctccacttgaagcaaaaatctttgccagaattgttctgcgcaatcttgagtatcaccagatagagcaagcactagcgtagatgagttcatttgttgtttacagtcccctttctcaaaccattttggacttctaatatttcacatgtagacaaactgtccaatgtgtcataagaacactagtcggtgaccgtgatgcatgtgatgtgaagcaagctataaattgacatgtttctattttccatctttggaactgcttagaaattaagatgtatttctttcctcccctgtaccaatctcttcatatcaaggctgcaacaaataggcaccttgacataaattttattgccttgatgttttttttttctttgtattattctacagtattatgtacaatcatgattttaggtaaatttatttagggctggaaatgcttattgtccttttt

SEQ ID NO: 52469 - DNA, 337 bp, Glycine max
  Clone ID: PAT_MRT3847_18393C.1
ttgtaaattatgattgatggttttgcaagttccaactgcaacatagttggtgcagtgccttggtttcatgcttatcttacctactaccgtaaatgcagttggcagtatttttgaggcgcctatcagagctggaaggcccatccgggtggttacatatccgaataccattgctcagattgaaccagacatgaatccatggattcagcttttgagtaccactaccaatggggattttgtgtagggaaaagatctagcactggctaaagttaatgtagcatgtgctgctgttggcttgacattaacttacactctaactccattgctggaatttggggtg

SEQ ID NO: 52470 - DNA, 406 bp, Glycine max
  Clone ID: PAT_MRT3847_18394C.1
gtgctattgactaacagcaacagtacttaccattatgatgcgtgtcagttaacaggatcgtaaccacattcctgagaatcgatcttcccaatataagtatgctgtcctaataatggatctgaaatgcggatatctgagtggtcaaaataaacttcatggcatctagagtttccttattgacaatcccaaacagtatacagattacgacattctcttgcgaatttctcacgatttctaaattgctgacaatactcttatgccagctatttctgtttcacatgctactgccagatcttctgaaaatgctacaatcctctgtatgatctgcacttagtgacatctttcatttgtccgtttgtataattcaatcaccgaaattaggcatgaccctactgctgaatattct

SEQ ID NO: 52471 - DNA, 331 bp, Glycine max
  Clone ID: PAT_MRT3847_18395C.1
gaacgaagaccaagatcaagacataccactctaacagcctccttcttatcgtgcacaacgaccaatccgtggaaagcgtgattatgacaacgacaacgacaacaaaaaacatcgacatggaacttatcaccctccacaacaacgaagcagaccagaacgaccagacccatgcggtacaagatgtacgcctacaacctgggctgaagaaaaagtacgcgccatgagacgaaccgaaatcgtctctcaccgttgacgtgctcacttatacagcacatgaacaggacgattaagatcacgatgcagaacaacactaacatcccttcgcatattc

SEQ ID NO: 52472 - DNA, 1525 bp, Glycine max
  Clone ID: PAT_MRT3847_18396C.1
ctggaggataagctgaaactgaaacatggtatctctgtgttccttcacttcttttgcatgtgacaacctttctctttctctttctcagtctctcaaaccgtcatcattgcctctcattcactctttcacacttccaagaaacactatcaggaagaagaacggtgctagtgtgaggcctctgttctgtgccctcaacaacaataacaacaacactgccttgcagtacagaaccctcggcgactccgacctcaacatcagcgaaatcactcttggtactatgacctttggggagcaaaacactgagaaagaagctcacgacattcttaattatgcattcgaccgtggaattaacgctctcgacactgctgaggcctacccaattccaatgaagaaagagacacaaggaagcactgatctctatattgggagctggctcaagtctcaacctcgtgacaagattattttggctaccaaagtatgtggttattctgagaggtcaagttacttgcgtgagaatgcaaatgttttgcgggttgatgctgcaaatatcaaagaaagtgtagagaaaagccttaagcgcctcgacactgattatattgatttgctgcaaattcactggccagatcgatatgttgcattgtttggcgagttttcctatgattattcaaaatggagatccagtgtgccatttgttgagcaattgcaagctttccaagaacttatcaatgagggaaaggtacgctacataggtgtttcaaatgagacttcatatggagtgatggagtttgttcatgcatcgaaagttgaaggccttccaaagattgtcagtatccaaaacagctacagcttgcttgttagatgtcgttttgaagttgatcttgtggaagtttgccatccaaagaattgcaatattggcttactagcctattccccacttggaggtggatcactcacaggaaaatatatagatataaattctgaagctgcaaaaagtggaaggcttaacctcttccctggttacatggaaagatataacaaatcagtggcacgggaagctactattaagtatcttgagttggccaagaagcatgggctaactcctgttcaacttgcacttggatttgcaagagatcgtccattcatgacaagttcaataattggtgcaacctctgtggaccagctaaaagaagatattgatgctttcacaacaactgagagacctttaccagcagaagtcatggcagatattgaagctatcttcaagagatacaaagatcctgccattctttaatgattataccttttaagtttacttaccattgattgccaaaacactgctattgattcatcctgttccccattcctctattctttttgtcatgattaaaattagaggatgaataaaatgcatattgaatcattacatgtaaactaggatttacaaaaactgtctgcattcattccctcaatgctattaggacttgccattttgttatttaagtctctagtgtactggctactgatt

SEQ ID NO: 52473 - DNA, 330 bp, Glycine max
  unsure (1)..(330): unsure at all n locations
  Clone ID: PAT_MRT3847_18397C.1
aacaggaggaggaggctctggtgatgcagtnncagcancancggttgttggtggtggtgctgctgcatcagngaggagcacncgaangcggtgccaacggcggcggcggattcaaattcaggggatgataganttgaggaaggtgacaanaccanttgtggggaacaggtggccaagacaagagactttggcttgttgaagatacggtcggatatggacgtggctttagagacgcagtntaaagggtccttgtnggaagaggttctaggaactggcagacttggctaccacagnaattccagaagtcaaagagagttnagaacgttacaa

SEQ ID NO: 52474 - DNA, 283 bp, Glycine max
  unsure (1)..(283): unsure at all n locations
  Clone ID: PAT_MRT3847_18398C.1
gcgacacagctacaagagagaacttgcttacaacgccaaccgacaacaagctgtggcaacgtgntctaaagcactacaacagatgcaaggtcggagcggtcgacgagtgttggccctgttacaaaggccaacctggcccaatatatgcgacccccgatcacgccactatttgtgacttattgtggacaccaaaagggttgggtggagaccatgaggacgcctatatgccacatgacattactggtgatggtcccgagaaaaacaccgcttgacataatttttg

SEQ ID NO: 52475 - DNA, 245 bp, Glycine max
  unsure (1)..(245): unsure at all n locations
  Clone ID: PAT_MRT3847_18399C.1
ctcttattttaagttcacattacaaaatcaaacaaaagcaaactataaacgagggtgattgggcggtggaggaaacattagtagcatcaagcaagcagcggaagaaaagaaaagaaaagacaacgcaaaaggttgttgtgagcgatttcacaccaaaaacaaaagaanaaacaatgcttggaagaatgacggttgaagaacaaagagacaaagaaagaggcattgttcttcttccatcgaaaaac

SEQ ID NO: 52476 - DNA, 163 bp, Glycine max
  Clone ID: PAT_MRT3847_1839C.1
aaatctaacctaacagtgtgtgacacgcccaaaatagttatacctggggacgagaaccatagactgaacgatcctgaggtgaaaggcactcgcccacactatgtgcgaattacaaaaatctgctgttgaaaggggaacggggggatttaaagcgggtgcctat

SEQ ID NO: 52477 - DNA, 178 bp, Glycine max
  Clone ID: PAT_MRT3847_183C.1
ttgtccgcccgcgagaagacgacagaggggggcgcacatgggcaaacgtagccccggacaccacccgacagaggacacgagacgggaaccctcaggccgaacgaaggcaggcgcgcaaaacggacccccaacagcccggggaggcccgcgcagacgacccacgagcctcacggggacc

SEQ ID NO: 52478 - DNA, 410 bp, Glycine max
  Clone ID: PAT_MRT3847_18400C.1
aagagagcgaagatgaatgttatgatgtataatgtttttaatataaattttatttccctcctccaaagtttatgtagaataatttgatcctcgaaccggggggccccctggatgatccccaatcaactccccccttcttctctggcccatacccttcttatggtgcccccctacgcacccttcctctgccccgcttcatctacccctccactgccccgggcccacccctgccggtccccccccgtcatcccccccccctgcccattccccccttttccccctctgttctggcctcccccataatgtcctccccccccacggcctccccttttcccacacgccatgctcccccagcccttgacattcgcctcactcccggcactccccccccctctcgtcctgactcatct

SEQ ID NO: 52479 - DNA, 215 bp, Glycine max
  Clone ID: PAT_MRT3847_18401C.1
ttttataaaaccgaaaagacttttattcctgttcgcaacatattaacacttatagacttattaccttatcacaggactactactactcaaaaccttataacaataccaccaatggggaggtcatcccctctattaactttaccccctatggggaactaaacccctaattttaacttataagaaaaatggggaggactgaggattggaaaatccta

SEQ ID NO: 52480 - DNA, 409 bp, Glycine max
  Clone ID: PAT_MRT3847_18402C.1
accccttgactattcggtcgacaccccttacctttatgactactataaattttgccagaacaatgcacctgatatagggggagagaacagtaaacttctagcttttgaggttcaaacatgggatgggaatactaccttcatatgcaattttacagatcttaccagctcgtaccacacaataatagacacaaattctggttggaattatccaagaggggctgcaggagaaacctgatccaacataatgtataaaatggggggacactaccacaacaataacgctaactatcagatgccttggctcctacggcagggacttccatccacccgtcgcgttacaggccgtatcttgaggtgagcgcagcttagattcactggaatgttgagcaccagtatcccaccatttcgt

SEQ ID NO: 52481 - DNA, 438 bp, Glycine max
  unsure (1)..(438): unsure at all n locations
  Clone ID: PAT_MRT3847_18403C.1
ggctcgaggaaaagggctataacttcgagcaaatcgaaactctctctctggaggtaacatagacccttatcatcccttgacacctctcttctaaaaaatacgctcttgcccagtgacaggcagacagcagagctaggtgctaaaaggtcgaagatgtatatgaacccaacccaaatgaaataaacgccgtttttgtgttcaggcaattggaatttgtcaccccatttggcaagttgaattttttccacaaagaaatgacaaattccgctggttccaaggttctgaatgacaatgcaacaggcacatttttaattcctacttctgaataatggactgcacagtgtcgtttccttgtgtgcattttattccggtgggaagaactttgtgcaactacagcagagtcactttagtagcacattcaanaaggagaaaaccatc

SEQ ID NO: 52482 - DNA, 371 bp, Glycine max
  Clone ID: PAT_MRT3847_18404C.1
gatacactcgcttgattagtatttcttgatgtgtgggaccttcatgagcttgatccactgcacattgtcccttgtgaaccgtgatgatggagttggcattggggtgcaagctgatgatcatgttagcatgacccaaagcatctgagattctaggaagagatgtgacatgtctgtgggaaaatgggattatgatgacgctgaccctatctatgactctgagggtggatatctcacctatgccgatacttgccaaaagaatggcagacctgattctgactatgagaagtggaaagggatgccatgctggctgaccatgccaagatttaatgctctatggtttctaggaagaatgagaagaaagagaatactgc

SEQ ID NO: 52483 - DNA, 560 bp, Glycine max
  Clone ID: PAT_MRT3847_18405C.1
cgggggaatgggggacccggaaatagtcggggccccaactcttgccggagaaccagttttccaaaaagggggcgaaaaaaaggcttgaggtaaaaagggggaaaaaaggttggggtgaaaaaaggccacccgccaaaaaacccccaaaaaaaagggggggggaccgaaaaccccaaagggggggggaacaaaaaagagggggaaagcacaaaaagggcggtggccagaaggaaaaattgcccggccaaaaacctaaaagaacagcccaattaaagaaaagaggaacccgcggggaggggcgccagggggaccgacccccaaaaaggggggacgggcaaccggggagaggcccaaaaagaaaggccccgaaacagccggacaaagaaaaaaacccagaaaggggcaaaagggggaaaaccccaaaagaggaaagataagggtggttttcaaaaagggcgggataaaaaagggggggttcccagaaccggggtaccccaaaaaagagaaaacccggccaacgggggggcgggcacgggagaaagcgcccattgggcgggggg

SEQ ID NO: 52484 - DNA, 256 bp, Glycine max
  Clone ID: PAT_MRT3847_18406C.1
actcgtccaaacacctcagattataccacataatgctctatcattttaaaagggcctttcatatatacaaggctgtctcttattccttatactacaattgaaaatacccaccttctaatctttcaaaacaaactcaaactctctttcacaaacattaactacttctattcattaactccttattataaatctacctaatatcaaattattactttaatttaaaaaattttttttataaaaaaaaataaaaactttt

SEQ ID NO: 52485 - DNA, 608 bp, Glycine max
  Clone ID: PAT_MRT3847_18407C.1
gcacgcgcgcgtacgcaagctagtcgaattcggtgagagagcaagtacagaaagaaggagagaggggagagagagtagtactcattgaggagaggctggagccgaactggagggtaaacgaatgctttttgtaagggaggcaatgattcggacatgccgaagacatctcacccccttcctccaaaacgccaatcttctcctctccactacttaaatatctccctctttctatattccaccaaccacttctcattttcccactaataactccttgctttcgcttccaattcccaattcctctttaattcattctggatttctaatttctcgccatacacataattgtctcatagacataacaaagagagagatgcgaagcatggcaagctcggcttcctcgcgaggcattgcagccatcgtcggtgtgggccccaaccttggcctctccatcgctcgcaagttcgctcacgaaggctacacagttgccatcctcgcgcgtgacttggggaggttgtcaagatttgctgacgaaatagcgagggaagagaaggcgcaggtttttgctataagaatagactgttccgattcaagaagcgtgagagaggcat

SEQ ID NO: 52486 - DNA, 504 bp, Glycine max
  Clone ID: PAT_MRT3847_18408C.1
ggactttgggcttcacgctcttttctgtagtagcccgctgactgaacgcaaatcaattgcatgatccgtaccttgatggcttgtaatggaatcgcctttcttgacgtcgaccccctggatccaaaccagttctccacactttgattggaagagacgcacccacagtctacataagtaccatttcacggttatgatggacctatgtcctgatgacactaaccacaactcagctcccaacacactttcccgctgattatgattctgtaccgattcaacttctgcgctggagcataatattgatatttatatccttacagaatgctgaccctgtgcacacttgcttgacttgtacatatgaataatcggttgtttctttgcaggatactatccttctattattggccttattgagctttgtatagattcttgtgactactgatacgatgaggacatgatggagtgccggatactctgaatttacggtgatgagaaagttcaggcttt

SEQ ID NO: 52487 - DNA, 182 bp, Glycine max
  Clone ID: PAT_MRT3847_18409C.1
ggtcgagggcgagcgctcccactcttctccaagagtttttgtacatggcgaatcttccctaggaagcgtgttctctacgaggagagggcgcacttcatcgagaacgcccccacctccacctatagcaatgagctaaccggggccgatcctatccttctttacttcacctacaataacgtgat

SEQ ID NO: 52488 - DNA, 392 bp, Glycine max
  Clone ID: PAT_MRT3847_1840C.1
tttttggaaccttccaacttgaacaaacccccatctttctttttcactttcagccgaagacgcctgcaaatttcttccaacttggagatgatgattgaggctggcttgtcggatgtaaaccgctcttctttctttcgatcggtctcctcgaacaaaccagacaagtcaaaacccgaggaataggagatgatgtcaaaagcatttaaattattacaaggctttgagttttttgccggttcaataggatctccattctcacaagctccaaatactccatcagcatcgagaggagccagttcttcatcttcattctgagtaatggtaggcttctctaacccctttttgaaccaagaactttccataattttggccattgatatccttgtctttgg

SEQ ID NO: 52489 - DNA, 810 bp, Glycine max
  Clone ID: PAT_MRT3847_18410C.1
ggtcgacccacgcgtccgcaaaaaacaaaacaaaacatggacgaatggcgcgccaccatcaaaatgaatcacagaccccaaagaacttagaaaccctaaccgagtcctccatcagtcatattcccgacgttggttcagaatgattgatggtagcgatcatgcaacagcagcagcagcaacaacagcaacagcagaacccctctgcactggtgccatttcagctcaagaatccccaatcctccaccacaaccaccgccgccgccactccccttaggtcaccctccgcccagtcgcagctctcctcgccgctatccgtcgtcccgcccctccggcaatccccactctcctcgcatccggtgccggttacgtctgtggagcccgctctgacggcggtgccgacgtgcccgctggtcagagtccggctctcggacattgccccctatgaaggggcaccggcggggccctatctcagagcaatggaggcactgtgtgggtctctgttgcggcacaatgctgcgttgatcgaattggggaacgaagacactgctctgatgcgatgcggcttggaaggtgcgaggttgtttttcagaagtagggcccaccttggttctggcaagggtagccgtggggttacatgtacagagcaggaagggctttggaggattgggattcttctcccccctgcatggctgatatttttaagtgcatgggaaaggcgtctcgatctgccttgagtgccatggcgaggcatttgcgtcttagaagcgatgtttttaaccatttgcttggtgatgcctccttggcctgcta

SEQ ID NO: 52490 - DNA, 169 bp, Glycine max
  Clone ID: PAT_MRT3847_18411C.1
ggggctacaaaatcttggcaaggccttatttattgaagggaaactttttttttagaaaaaaaccctgggaaaggaaataaaaatggggccattaattgcctatggtacacgtgaaccaagcttggagggagcataaactcctaatgccaccacaaaaactggtgtcccc

SEQ ID NO: 52491 - DNA, 378 bp, Glycine max
  Clone ID: PAT_MRT3847_18412C.1
tcgttctgaactgttcatttcatattcattttatctgctcaagtgtttatcaaaacaattgtgctataaagcactcctgttgatatatggagattttcttttttagaaagtaataatgactgacattcagacaatgaggcagagcattgacttgctatttaactttttaaaatgagttatctttccatttcttatatttctataaccacaatacttgagaatgctatttataatataaatgattttcagatctagctatgtagagtattatataagattagttatcaattatcatactatggcatttgctgtctaactgactcaagatttctatgtcatttgacaattgagttcatggcatgactttgtcctttataa

SEQ ID NO: 52492 - DNA, 224 bp, Glycine max
  Clone ID: PAT_MRT3847_18413C.1
aatgaattataagtaactggcaccggtaaagccatgcgaaggtttctctttctctacaacgaagcacgaaaattccgcaaacctcatattccccttgcatttccatcgcccttagcttatagtactagcttgaatcatactcataatatcggagacagtaaattcaatttggtggatgtttctgcccaaggtggaaccaaagctgagtttgcgtaatttgaagc

SEQ ID NO: 52493 - DNA, 362 bp, Glycine max
  Clone ID: PAT_MRT3847_18414C.1
gggttatcggagaggcgtgaggagtacattgatgaggatgagttgttgaacatgccgaatttggtcgatgaaatggccagaggaatgcaggttagtccccttaggatcacttcctattcttcagatgattcgcctgggaattctgatggagataacctttggagttataccctttgatcactgatttgttgtttgttcagtgagtgagtatggtaatttgttttgtgtttgtttgaaagttcgagtcttgattatgtatgttcaaccttgttaaatatttgaaaggagggctttataacgggattgtgggaatacttgtggtctcgtacaaaagaaaaatgctttgaagtgtgttggggttg

SEQ ID NO: 52494 - DNA, 182 bp, Glycine max
  Clone ID: PAT_MRT3847_18415C.1
aagacgcgtttgtctgaatcatatctctctctctctgagagcatggagttttggggtgttgaggtgaaaagtggtcaatctctcaaggttgatccggtagattacaagagtatccaccttacaaatgcatgcctgggggatgtcactaacgataaagaaggtctaccagaatgccctgtatg

SEQ ID NO: 52495 - DNA, 283 bp, Glycine max
  Clone ID: PAT_MRT3847_18416C.1
ggctgccgctgagatagctaagaagacccatgatagcatcaacgacggggtcgctcttgtcatgaagagtgccaccttcaccctcgggtacgagaccgttctcgaatctcctacgaactcccgaggaagattgattatcattgctaacaactgcccccctttgagaaagccagagagtgaatactatgctctgatcgcaaacgatggagctcatcattacgacgggaacaatggggagtagttcactgcatgtgcaaaatattacggacagcgctgccttaca

SEQ ID NO: 52496 - DNA, 257 bp, Glycine max
  unsure (1)..(257): unsure at all n locations
  Clone ID: PAT_MRT3847_18417C.1
ggncggcacgaaagaagtcttcttagaacagtcttcggtctctcgagggatatctctgtgtcatcccgctttccctacccaggtgttcctcatcctgttcttgaatgttccgtccccttaggggcgcggcgcaggaagcaacccctggacagtctattaaagggttgaggcctatatcatcctgtgcccgaggaatatttccttccccaccgcctgttccgcgtgagaattcccccggttcccccctgggggggggt

SEQ ID NO: 52497 - DNA, 343 bp, Glycine max
  Clone ID: PAT_MRT3847_18418C.1
cctttcgcgttttgctaccagttcgcgatctcagtgcaacatcccacgcttctaatctgagctaagacaaaccaaccgatgcgtctgatggcacgaatctccctagggctacggagcaacgattggaatccattacaactgcgcatgtggcaaccgccgaaggattttcatgttgccacttgttctgattctgctgcaaatggatgggcgcgtgcgcactcgtgtggataggctggagaccccactggcacacgtggctaaggctggcctgactgtgctgcagaaggaggaaggcaagggccagattgaagacgatagaggccatcaaaacaccggagagagg

SEQ ID NO: 52498 - DNA, 367 bp, Glycine max
  Clone ID: PAT_MRT3847_18419C.1
ctcacgcgtccggtaaagcaaactcctctgacttttccttccatctctggggaaacattcctggcgactccgagcagctcagtctgattttgcattcaatcctatcaatcccaaatttccttgccggagatagagaatcttaacagttccaccactttccggctagacatggccgttgccgtcttacgacccgcccgccataatcctatgtccgacgcgagccttcttacactctgtcccttccggagttcgctcatcgccaatcaatgctccttcaaaacggtgtcttccgtcgacaggtctctactccctccccgacgaaaactccgcctcgatccttgcaattacctctattctccatatgaac

SEQ ID NO: 52499 - DNA, 144 bp, Glycine max
  Clone ID: PAT_MRT3847_1841C.1
gaaaaccaaggggggggtcgcttatgattcaattaatactatacaattatcaacccctttatccattcacaatatcaccgttccaatggatccgacaccatcctctccagcttattctaccaatataccttaactctggaaaaa

SEQ ID NO: 52500 - DNA, 443 bp, Glycine max
  Clone ID: PAT_MRT3847_18420C.1
ggcgaaagcgtttgaaatcgagtaaatggaagcgacattctcttcaacgacggcaagatgatactggaatcagacacgtggttcgacagatgaagctcgcgatcggaaaccgagttcactgtccattagcgcgggctatcaagttcgtagcagctgtcacttgctcgaaccaggaagagttctgtctttaaggtgttatctgctgaaaaggaacaaattcacgttgtagagggaagtcgtgttgatgagtcatatgatgcatctggcacacgtattctgcctttggtctcagggtctcaaatcctaatcacaaacttttacttgggctggctgatcctcctggagctggaataagcactctagcacatgaagtagccagacgtatatacaaactctggccagagaaagcttcttcctttgactctcaggttcaacttccagat

SEQ ID NO: 52501 - DNA, 202 bp, Glycine max
  Clone ID: PAT_MRT3847_18421C.1
ggtgaaacaaagcggggagccccccctgacctgaggaggccccttctgttgtcttcttgcagccgcacccttctgttgtcttcttgcagccgcacccttctgttgtcttcttgcagccgcacccttctgttgtcttcttgcagccgcacccttctgttgtcttcttgcagccgcacccttctgttgtcttcttgcagccgta

SEQ ID NO: 52502 - DNA, 1403 bp, Glycine max
  unsure (1)..(1403): unsure at all n locations
  Clone ID: PAT_MRT3847_18422C.1
ccacgcgtccgccccgcgtccgtacggctgcgagaagagacagaggggatggttgaaggcgaaggcgtttgaaatcgagtaaatggaagcgacattctcttcaacgacggcaagaggatactggaatcagacacgtggttcgacagaacctttgttgctgagagtagatgaggctcgcgatcggaaaccgagttcactgtccattgcgcggcctagcaagttcgtgcagctgtcacttgctcgaaccaggaagagttctttctttaaggtgttatctgctgaaaaggaacaaattcacgttgtagagggaagtcgtgttgatgagttatatgatgcattggttacacgtattctgcctttggtctcagtgtcatcaaatcctaatcacaagcttttagttgggctggctggtcctcctggtgctggaaaaagcactctagcacatgaagtagccagacgtataaacaaactttggccagagaaagcttcttcctttgactctcaggttcaacttccagatgttgctattgtggttcccatggatggttttcatctttaccgatctgaactagacgaaatggagaatcccgaggaagcacatgccagaaggggagctccctggacattcaatccattgcgactacttcaatgtctcaagaatctgagaatgcatggatcagtttatgtaccatcatttgaccatggtgttggggacccagttgaagatgatatctttgtgaaccttcagcacaaggttgttattgtagaaggtaactatttgctcttggaagatggggtatggaaggagatatcgtctttgtttgacgagaaatggtttattgatattgacattgacaaagcaatgcagcgagttttaaagaggcatatttcaactggcaagcctccagacattgctaaacagcggatagagaacaacgacaggcttaatgcagaacttataatgaagtccaagaaaaatgctgatataataataaagtcaattgatttctgaggaatcggtttgtgccaagtcaagcccaaggagagtattataacctgaaaaggatgtccgtaataaatgaattgtccttgtgatttttcagagtacaacaaactgaaattattgttgttattatacaacagatttttagtgcattttttattttttattttcctctgccgtaaatttaattttttaacagctcaaatcctanaaaaaaaaaaaaaaaaaaaaaaaaaaaaaaaaaaaaaaaaaaaaaaaaaaaaaaaaaaaaaaaaaaaaaaaaaaaaaaaaaaaaaaaaaaaaaaaaaaaaaaaaaaaaaaaaaaaaaggggcggcccttttaaaggacccaattttactaccccgggcttgcaagtttaaattttttttaaagggcccc

SEQ ID NO: 52503 - DNA, 2921 bp, Glycine max
  Clone ID: PAT_MRT3847_18423C.1
ggaactgcctgagaagttggggtcgaaatagagatttgtttcattggagttcatggacctgtcctctttgccggatttgtgaggcttgcagaaggactggtgatccaagtaagttcatgttttgcaaaaggtgcgatggtgcttaccactgttattgtcttcaacctccacacaagagtgtttgtaatgggccttatttgtgcacaaaacacgcaagatgtcacagttgtggatccaatgtccctggaaatggactaagtgtgaggtggtttatgtcatataccaactgcgatgcatgtggaagattgtttacgaaagggaactactgtcctgtttgtttgaaggtttacagagattcagaatcaacacctatggtttgttgtgatagttgccagctctgggtacattgccagtgtgacaatatcagtgatgaaaaatatcaccagtttcaattggatgggaatttgcagtataaatgtcctacatgtcgtggggaatgttatcaggtcaagaatcctgaagatgctgcccgagagatttggaggagaaggaatattgctgagagagatttgattgctagcttgagggctgcagctggtttgccaactcaagaagagatattttctatttcaccattttcagatgatgaggatagtgggcctttaaaactaaagagtgaatctgctcgttcctttaagttctctctaaagaatttggccaatgactcaccaaagaagaaatcttctagcaaaaagactgctaagaaaaaagactcacagttatttatgactagtaaaattgacacacacaatagttgtgaaggacatagtgatattaaatctttgcatagcttagatgatgataagaatgatgatatacaatcccagagaaatgaaggtccagatgtatactcatcccctgctactggaagcttgagtcaaactgaagcatcttttcctattaatcagccagggattttgaaacaaaagtttgttgatgaggtgatggtcagtgatgaagagaggaaaccaagagtagttcgaattaaaagcaacaaggcacttattccagatagtgaagaggaaagtggaaaacacagtcttaagactcagaatgtgaaagggaagaagttggttataaatttgggagcacggaaaattaacgtggctagttctccacggtctgatacttcaagctgccaaaaagatcaagatccggtgactgttaatggaaatgatgattcattttgttggtcttgtcactatatatttgcttgagaagttgtaattgtgtgatttgtgtaaaagtggtatggggctgatttttcagacattacttctttctgcccatgaaatcagtgacacattttacacattatccaggagaaaacatttaattatcctgtcaaataattactattgtgcaacaaaatttatagtaattgtataatttgtaactgctttttgtgtgtatgtatatgttcttgaatggtttgattgctttatttggttttgcttctttcctcttttatttttgtgtgatttttccaattcaaattttctttcaggaaatgaagatataagccaatggaggaagggagacaagtttgcattagatagacaagatgacacagctaggcatattgacggtaaaggaatcaaagttgattctgggcaatcaaaatttttcagggtttcgggaagagaagggaatttgattaagctgggaaaagttaagccagatgtttctgaattcaacctgacctctggtagaggcaatatgtctgatgggcggataaaacatagtattgatggaatgattaatcaggttggaataaaagccccatcaagaggtgaaaggacatatttggggaggcagtcagaaggcagctctgatgcatatgagacagatgacaataataatcgtacaccttcacattctttgccaaaagattccaaacctttactaagatttaaattcaagaaacccagcattgaaagtcaaaattctcctcatcaggaggaagagaagatgacaatcaagggccagaggtcaaaaaggaagagaccttcaccttttaaggagaaagcatcttttaatgagtctgaaggtgtaagtcaatcacgtcaagacagtgcaatggatgggataatggatgcaaactggatattaatgaaattgggcaatgatgcaattggaaagagagttgaagttcatcagacatctgacaattcttggcacaagggagtggttactgatgtagtggaaggcacttcaaagttatatgttgcattagacgatgggaaagtgaagaacgtggaactcaggaaacaaggggtccgttttgttcctcaaaagcagaagagatctaagacatgaactaaacttgtccaccctttgtgatcatttaatgtggatacttttcttaattgactttgaagatttttcatctttgaggcctcttactgaatttatgttcgtagctgctcacattgccgctgatttttgggtgaagcattcttgattggagcaaatttcagtcgaaagaattaaccatttacctcagtcctttttctgggctgcaggttcttgatctcgagttagatttttgttccttttctacatgtatctgatttcaaagtagattctacctgtgatgtataggttcaccatttctgtagaatagattagtaaaggccaaggtgttagctgtatgattaatattgctagtatatttgtgaattccaggtttcatgatttgagatattatcttgaaagatgaaattatcgtcaactttttagagttgatggttgttcctgcccttgcccccccccccaagattcaacccataaaaataggtgcttgggtatcaaggcggaacaaagcccggacatgtgttaataatagtgggtctgggatt

SEQ ID NO: 52504 - DNA, 676 bp, Glycine max
  Clone ID: PAT_MRT3847_18424C.1
caccccaaaaaattgataatatatatgtagagaataaggaaatgcagaaaaagaaatgatagaactgagtgaaatatacaaactcaaatctatagttggtcatgtattatacataaggtcaaggataattcaccagaccatattgtaaagtatagcgattgccactagtgactagagcttggaaaattcagttaaatctctgcatcaaaaacctcaaagcaaatgatggaccgagctctttaactgaaaccccttaagcttgttgagggagctgtagctttatccaagtcaagcacaaacttctttggctccatttcctctgaagaggtcctcaattttctcttcatgaacaacaatataagctctaaaagctcctcaaaaaattcaaatgtctatagggacacagtcacggactggtggaagatgcaggaagcatccatgcaaagccgagattggagggatagatcaatgctggtgagtttatctttcagaaatacgaaaatccattccagccaaactcggcctatatgcctgcactccaatcagctaaaagaaatttggagctgcagcagcccatgatcttatcttataccactggctgattgggtgcaggcatggcccatgcccctcaccggggccgggccaatccaaaacttgcatcaggtgggggctgatg

SEQ ID NO: 52505 - DNA, 2356 bp, Glycine max
  Clone ID: PAT_MRT3847_18425C.1
tcttcccctctcttactcctaccaataccggccaacagttgtctcattttatgcattgcataatgttaacaaaaagacgaggatgtaaaatgaagcaaataaccgattactgtaaaaaaattgataatatatatgtagagaataaggaaatgcagaaaaagaagtgttagaactgagtgaaatatacaaactcaaatctatagttagtcatgtattatacatgaggtcaaggataattcaccagaccatattgtaaagtatagcgatagcgactagtgagtagagcttggaaaattcagttaaatctccagatcaaaagttgctgcaacctcatggcaaatgacggactgagctctttaaccgaaaccccttaagtttgttgagggagctgtcgcttcatccaagtcaagcacaaacttctttggctccatttcctctgaagaggtcctcaatttactcttcatgatcaacagtatatgtgctctaaaagctcctcaaaaaattcaaatgtctactagggacacagtcacggactggtggaagatgcaggaagcatccttgcaaagccgagattggagggatagatcaatgctggtgggctgatatttcaaatataagccaatccattccagccaaactcggcctatatgcctgcactccaatcagctaaaagaaatttggagctgcagcagcccatgatcttatcttataccactggctgattgggtgcaggcatggcccatgcccctcaccggggccgggccaatccaaaacttgcatctggtgggggctgatgagactgtgcaaagggttggtgaacatgttcatgatgtataaacggcattccagggcgctgacagggatactgagatgaatgcagatacatggctgatgaggagtgtgcaccaacttgattaggattaaatggtggcatcatggtctcgggatgtccatatccaattccagcaggtgttgattgtgcagcccagggcccaggtatatgctgtggaagaggtcgtggttggtgttcagcagaaaggtggggtctgtgagcagatccaagctgtggaaactcagtgttgtaatttaatactgctgtatacattggctgtattgcatacgatcctccattgaacccaaaaccaggatcaaatctttgcatatacctatcatagttcctgtcataatcaggatctttgcggtcaacctcacggtcccgaaatatagccaccctattgttttgcctgtacctaccaactggctccttctctgttctacttctagccctattggtattagtagaagactcaaccaggcccctaccagaagtgacatcagatacagaagctgatttatcttccacccgaggaaccaccaaggaaccatgcaatgagttatcctgctgccttgactcacattctggcttcccacctacagtaccatcattattacttgaattaaaaatcctagctcgagccctattatattcctcttttctctcctccacacttttagagctattattcttcattgagtttgaatttgcattgctgagaatctgtgtccacttctgcggcctctgtttgattgcaaccttcatgacagcactgttttctggtgataattttactgggatgtctgcaaggcggataactggaagcttacattcagaggttttgcgaacaataattcttgacccagaaccatctggtaaactattatccagtaaaaccattgactgcaatgagtaatgctgagccacccggtgtgcggccagccttaaataggatgttggaagctgcttaaattcaagctgctgttgagtaggatcacgaataaaattctcaacatcttgctccatcctcaagattgaaagccgttcgcgagggttctgaatggcttcgcgaaggaactgatcaacctgattgatggcgtcatcggaaacctcgtcgcaactggacgaaggaggcggcggcagcggagcatcatcgtcattataatcggcgagacgctggtgaggttgcttagaatcgttgttggaaaagaccatgaggttcaagcggttcatggactcgtccaaatcagcgacctcccatgactcgggggctccgagatcctctgcagagccctccatggagaaactgcaaagaaaagaaaggggatttgtggagggttagggaatcgaacctgattctgaaacggaggagtgttgcgtgggaggtttcatgagaagattcggatttagggttagggttagggaatggggctttggaattgggggcagagtgaatgagaatgcgagatataggatttggtttggtttgacgacgacgatggatgaatggatggatgcagc

SEQ ID NO: 52506 - DNA, 408 bp, Glycine max
  Clone ID: PAT_MRT3847_18426C.1
ctcgagccgattcggctcgagctggcagagcccgtagtgtacgggccagaattttgcctgctctaccgttcgcacggctgggtccgtctccaggtcgtacatgatgtccgatacgccgggtcccgagtaggacatgagcagcatcttgccgagggtccatccttgaatccatcctagcgccaccatggagaaggcaactgaaaatgagagggttcggtcaagccacacatacatctggatgctcagtaggggcaagattagcaggagtgacgagcacgataatgtcagaaaatgcgacgggttgctcagcaccgaaggcaggttagcgatcgcacttagcctcatgaccttgcctatgcgcgcatggttcttcaacaagattgctgagaccagtgtcgagacaacacc

SEQ ID NO: 52507 - DNA, 444 bp, Glycine max
  Clone ID: PAT_MRT3847_18427C.1
cctcgtgccgaattcggcacgaggagtccagcaagtagcgattcctctgcaagtccactgatgactctggtcctgccaccaagcaggcgttgaaggaatactacgagttgaagtagtagtattgggtcttatcagcttgaagacctctgcagacacgtgcaaagcagactcacagactctagcacaaggcaacagaacctacttgtttccagttcatgaggaaaaatcaaaaccgtgagcagcaaagaagttgaaacagttgaaggactgcccacgacccaaaaaaatcaaggtgaaagaactggcttcttctccaaaccgatccgttgaatcgtggcttcttttgccacagactgaactgtgcttgagcaacggaatgagctcagttgaatgtgcaagctcaaacgatgcgctctgggcgtataaacaataaaaacatcgatg

SEQ ID NO: 52508 - DNA, 273 bp, Glycine max
  Clone ID: PAT_MRT3847_18428C.1
cccacgcgtccgctaatatttactttggcttttcacgtggtcatactttatttcgggccagggccttctaagatgactttctcaatagcacttgctgaactggaacttagctctcattcctaacaaaaggtccttcacaacacaatcctcttgctcctaataatgaacccctttcactataatcacccaattcttctccatattgtccaaaccatttgtatatactattcctctttatatgacattgatgacctctgtacaaacttagattac

SEQ ID NO: 52509 - DNA, 199 bp, Glycine max
  Clone ID: PAT_MRT3847_18429C.1
agaaatcagggggggacaattgaataattgtttaccgaaatcgctacaaaggcaaaaaaacaacctctaagccgaactctatttagaatttaagctccaactaaaactcggacgatacaattccgaccgaaaccaaactgaaaatccataccgggaaatccgcaccggcatgtcgcacgaaatcatgaaagaacacaaa

SEQ ID NO: 52510 - DNA, 774 bp, Glycine max
  unsure (1)..(774): unsure at all n locations
  Clone ID: PAT_MRT3847_1842C.1
cctcgccggcgccacgccgacgtccggggggactcggatgaatcatgtttggttaggacaaaattgccctccatcactttccttgttagagttggtttctgcaacctaccatgcaattcctcacctgaatccgttttctattgccacgttgtggaagcgtaacgaagatgaatggcattgggaaactcaaatcgtcgagttctgaattggaccttcacattgaagattacctaccttctggatccagtgttcaacaagaacggcatggcaagctccgactgtgtgatttgctagacatttctcctagtctatctgaggcagcacgtgccattgtagatgatacattcacaaggtgcttcaagtcaaatcctccagaaccttggaactgtgcagaagcatcctggatgggttgaatgtttatttgtttcctttgtggtgctgtggagttgtggttcgatatttgattttgttccctattaggattctagtgttggcattaggatggattatatttctttcagccttcattccagtgcactccctcctgaaaggaaatgatgatttgaggaaaaagattgagaggtgtttggtggagatgatgtgcagtttctttgttgcatcatggactggggttgtcaagtaccatgggccaagacctagtatccgaccaaaacaggtttttgtggccaatcatacttncatgattgatttcattatcttagaacagatgactgcatttgctgttattatgcagaagcatcctgnatgggttgg

SEQ ID NO: 52511 - DNA, 1203 bp, Glycine max
  Clone ID: PAT_MRT3847_18430C.1
ggataatccagagagaggagagagaagtaaaaaggtggaggaagaagcgaaaagcgagtgagggcagtgttgcttaataaaagaaaacgaacggtggtgataggctttagtcaagatctcaatcgtctccaccttgctttcttctccagcgtccgattctctcaccgatctcgcgccaaatacaaattcgtgtcaacccaacccagggttccggcgagcatggccgacggtccggctagcccaggcggcggcagccacgagagcggcgaccacagccctcgctctaacgtgcgcgagcaggacaggtacctccctatcgctaacataagccgcatcatgaagaaggcacttcctgccaacggtaaaatcgcaaaggacgccaaagagaccgttcaggaatgcgtctccgagttcatcagcttcatcaccagcgaggcctctgataagtgtcagagagaaaagagaaagactattaacggcgatgatttgctctgggcgatggccactctcggtttcgaggattatatggatcctcttaaaatttacctcactagataccgagagatggagggtgatacgaagggctctgccaagggtggagactcatctgctaagagagatgttcagccaagtcctaatgctcagcttgctcatcaaggttctttctcacaaaatgttacttacccgaattctcagggtcgacatatgatggttccaatgcaaggcccggagtaggtatcaagtttattattgaccctcttgttgtaacgtatgttttctacgccagttaccaagtgctcacggcatattgaatgtctttttatgttatgtgaatactgacaggagatgttggttcttgtgtccgtttttttttttaaattaaggtttgtatattatctttggattcgaattattatttgaaagttattattatattgtaaatcctagagccctgttgtctgaatccatcaggcggcttggcaaagaccgagattttaggactgattgtaagcataaacccgaatattcttttcctaatttctttgtgcaataatgtatgaaaaaggctcgagcttctttttaaaaaaaaaaaaaaaaaacacgcaagggacaacggccggcaaagccgggctcctatgcccgccccgaaactttggcccccttctgaagaaaggaagggtcccttagcgtgttcgtaccggg

SEQ ID NO: 52512 - DNA, 315 bp, Glycine max
  unsure (1)..(315): unsure at all n locations
  Clone ID: PAT_MRT3847_18431C.1
actctcaccacgcnnactaaatctcnnannccngctctancnntctntcanatcanaatnnacaannctcctcntnnncnactctnccnccnnctnacncaaaaancnttntaccatccnnaattncctgcccattntncntcatacttntctaannncttaanctattccccaanccacacancantnnntaactactantttntannnntcntnttctcannnnttcnntttnttatttctccnnnntcnnctnntnntnncttntttttnnntnnatntnnnttntcntcntntttnttncattgtntgtnt

SEQ ID NO: 52513 - DNA, 2643 bp, Glycine max
  Clone ID: PAT_MRT3847_18432C.1
ctcgagccgattttccggatcgcgaaatatcattgctatagtcgtggcagtgttggtcgttgacgaactcctggttcttgtctacaattatttaggagcgagaagaccaagacacaaacctatccaaagtatgtaatcaccacaattgtctccagctagtagctacttgtcttacgaccacttcaatagacaacctagtccagccagatcgaggaacactacaatggccatgattcctttgatgatgatgatactgctgttgctgtttaaatttccttctgtcgtccttgccacactcaaatctgatgaagccaacctcgagctagtattcacataccataaatgtaacgaagagctcggaaactttaccactgagacctactccaacaaccggaatgtccttctgtccaatatgtattctgacaaagaaattgagaatggcttctacaattcctcatacggcgaaggccctgacaaagtttacggtatcggcttctgcagaggagatgttaagccagataaatgccgtagttgcctggaaaagtcctcgacacttctcaccgatcgatgtccagtacagaaagaggcgattggatggtatgacctatgcatgttacgctactccaaccgctcaatagttgagcaaccagttactgatactgacgacatcatcaaatgtagcaacactaacgccacaaacaaagatcggtttgataaagagcttgatgacttggtggtgagaatgagaagcaggtctgcagagggtgactcacgtctcaagtttgcagagggagaggctccggttcaatcaagcaatgaaaccatacatgctctccttcagtgcgtgccttatttgtctcaccaaaaactgtactcgatgcttggagtacgctatgtccaggatttcatattggtgtgatggaaaaacaggtggttggtatctaggacgaagctgttctttaagatatgagacctacctcttctttgagctcatattccacgatgcaccagcaccacagccttcccaacctgcagttacccctacaaaagattttccgaaaaagaccaacccatcgcgaaatatcattgttatagtcgtgccagtgttcgccgttgccattgtcgttgtgggactcatagttcttatctacaattattttggagcgagaagaccaagacacaaacctatccaaagtgaaggtgatggtgaaggtgatggtgaaggtgaaggtgagcttgataatgacattaaaacagatgagttagcgcaatttgaatttgctaccatcaaatttgcaacaaataacttctctgatgcaaataagcttggtcaaggtggattcggaattgtttataagggtacgctctctgatggacaagaaattgcaattaaaagattgtctatcaattctaaccaaggagaaacagaatttaagactgaaatttcgctaacaggaaagcttcagcaccgaaacttagttagactacttggcttctgttttgcaaaaagagaaagattattgatatatgagttcgttcccaataaaagccttgattttttcatatttgatccaaacaaacgtgggaatttgaattgggaaagacgctacaatatcataagaggcatcgctcgcggtcttctttaccttcatgaagattctagattacaagttgttcatcgtgatctcaaaataagtaacattttgttggatgaagagttgaaccccaaaatatcagattttggcatggcaagattatttgagatcaatcaaactgaagccaatacaaatacagttgtcgggacctttggatatatggctcctgagtatattaaacatgggaagttttcagtcaagtcagacgtttttagttttggtgtaatgatgttggaaattgtatgcggccaaagaaacagtaagattcgtggtaatgaggaaaatgcagaagatctattaagctttgcatggaaaaactggaggggagggacagtttcaaatattgtagataccacactgaaggattattcttgggatgaaataaagagatgcatccatattggattactatgcgttcaagaagatataaatggcagaccaactatgaattctgtttcaataatgcttaacagcagctctttctcccttgctgaaccttctgaacctgcatttttaatgcgtggtaaaagtcaattgcctatgattatgctgtctggtagtgagcaatattcagaggcaacaaagtcaagtgattcaggaagtcaatttgctcaaggatcatcaaataaggctccaatcaccgagccatatcctcgttagatattttttaagcgaattgggcaaaaaggaaatgattttgaaaacaagatatcaacttttgaaacttcatcctttggagttgacaagcccgtaccctccctggttattttgtaatataatgcttgttctagattccttgcactttgccacatccagtttctttttcattcttgtattttttgtggttttttcttttctttttggaaaccagtggtgtttgttttcagattccgcgcgtgcctccattgttgatcaactataaacatataagagacatgatatgtttggcaattaataaatttgagtaattaattattttccctaaaaa

SEQ ID NO: 52514 - DNA, 438 bp, Glycine max
  unsure (1)..(438): unsure at all n locations
  Clone ID: PAT_MRT3847_18433C.1
gacccacgcgnccgcaaaaacaacacagcacggagccaccaaccanggcnggccaagcgcngcgacgcaggcaaanccgccacagcaaccgagaacagccgcccagacgccgcgnnccncngcggcgccggcgagacgaaggaccacgccgccaacaagcgcgagaagcgccaccagcgcgnggcgcncngcgaggagagcgagcaggccccggcgcacgcaaccagcaaggcagaagccgccgcgcgcggccgggccagcgaccgagacagccacaccgccaacccccaaggcagccgccacgagcgcagccccggccgaccgaacaacgagagcggacacgccgagaaggccaccaagccgagcaacgggacgagaggaccaccgacggcagccccgacgcccaagcagacagcagcaccggaggaggccgaggcc

SEQ ID NO: 52515 - DNA, 243 bp, Glycine max
  unsure (1)..(243): unsure at all n locations
  Clone ID: PAT_MRT3847_18434C.1
atcaccattnctagcttngccattcctcaaggcatcagttnncgccaagctagncaaccttccctcntgtcncttggactttattcgagctttataaccgccattgatctatgcaatgatgggaagctcaagggatttggcagtgggaactgtggctgttggatcgcttcttatggcctccatgttgggtcgagtggtcaatttcaacgagaacccaaaccttttcctccacttggctttcac

SEQ ID NO: 52516 - DNA, 976 bp, Glycine max
  Clone ID: PAT_MRT3847_18435C.1
gcacgagagcaaacagagtagcaccaaaacaattttggttaaagagagtgaaaaacggggttagtaaattgcaataaaaaacacaaagtgtgctcactttattgttttctcaatgtcttcgtttacgggtgcacgttccaaagcaaatgctaactctgaaatgaccaaagctaacgacactaacctttgccccatcaacacaagtaccattacatcaacctcgccagatacaagtgccaagaatgataagaaaaagaagtctatccttccaaagattttcggatcaaagcgaaatgggagaggttcagacgaagagacactcaaatcatcaagtgcagaagaaggagacggagttactcttgatttggagaataaaattgagacgagaagaaaagcatttttggaagcggcccccatcatgagaaaaagtttctcagaaagggagactagtcctgggatcgaaggcctaaatttgtccaattttgaacggcctatgatgactatggaaactgaacttctcaggatctttgttgcagcgtggaatgtgggagtcaccaagttatgacctcaacctccaagatttcttgctagtggaaggctccgcagatatatatgttttggggtacgaacatccatgcaacaaagtgaagaagaaaaaaataacgaacgaaagaagaagaagaagaagtatccctccccttcaccttaaaatttagttttcccttctcacaagtttggcatgttcgatgattgtgtgaatttagggcggaaagtgaaatacgggaaaaatggttgcttatggtaaattttgtttggaattgagattttatacatggacgtctcgaatgctcacttatgttgtatattttgttagttggttgttttgtgtttgtatctcttgatggctacaacatctcaccctttgtgactcctcttttataaaaaaatcatcccaattttttctatgaatttgaat

SEQ ID NO: 52517 - DNA, 197 bp, Glycine max
  Clone ID: PAT_MRT3847_18436C.1
gataggacaagaaacgcactcacccaaagggaactggttgggataacctatccaaaagcaataggattgggcttaagaatggggtctgagggcaaattaaagcacagattgtaaggtggaaaacatgaaaaaaacccgggggtcctttaaaggcccaaaaccaacgcaaaaccgtcgtggccataaaaaatgaaaat

SEQ ID NO: 52518 - DNA, 561 bp, Glycine max
  Clone ID: PAT_MRT3847_18437C.1
gcttcaaccctttccaacctttttttcaaagggcattacagacccaatacacataacatgactccttaaaatgataggaaaaatccaacatcgaacatcacacaaaattcagttccagcttaccaccccccacgaagacgcaacaccaagtgcagagttgactccttcaggatgttgaacccatcaagggaccttccatcctctaactgtttgccagcacaaataagcctctgctggtccggagggattccttccttgtccgggatcttaaccttcacattgtgaacggagtgacagctctccacctgcagggcaatagacttacccgtacgggtcttgccgaatatctgaataccaccacaaagacgccacaccaagtggagaggcgcactccttctggatgttgtatccagaaagggtacgtccggccctgagctggttgccgacaaagatcagcctgtgctggcctggggggatacccatctcgacctggatcttagcctcgactttgtccatggtgtcggaactatcgaccactagggttatacgcttgccggcgag

SEQ ID NO: 52519 - DNA, 543 bp, Glycine max
  Clone ID: PAT_MRT3847_18438C.1
tccaaatcaaatctcatcctaccatgttgtccctcaagaaaaccttatctttactactcctttcatctcttttgacctccacaatcgctcatgacactttcacttgtgatcatgacaaaatcgtacagcaccctggattactcgatatcgaggaagacatgtcttccctccacaaaaaaggacccagagtgcttcaagatgccactacttcctctgatacttcttccacctactccaacatcagaatccaagctttctttgactaccttgaagaaacagctcccagttctttctcttcatacatggagaaccaggttcttccaccaattattgactatttccaatcagccctgagagtcaaatacccagttgtcggcaatctccagctcgatagtagcatcaactctatctgtgagcgtcccactccttctgtactcatctcaggagtaccagctgacttctttatctattatgactctgatgctgtcagcggaagtcagattgctaataccatgtactgctatttggcaagtggtaccaaaa

SEQ ID NO: 52520 - DNA, 152 bp, Glycine max
  Clone ID: PAT_MRT3847_18439C.1
ggcacaattgagtttgttgctcgagataactagaaccactgtgaggaaaatgacggtccttgttttcgtcgttgcggcaggtttggtatcatgggaatgcgatgcgtacgatatgtgctctctccgactgacggcaggtcatggggcccgta

SEQ ID NO: 52521 - DNA, 631 bp, Glycine max
  Clone ID: PAT_MRT3847_1843C.1
tgccactacctagctcggaattcggctcgagatgcgatctcatacattattgttcgctattcttcgagattcttcggttcttagttaaaaaggatcgttagggttttctattttcatctaattgcatggaaccaatttgatggaactagataatacaattgattaattaattgctgcatcgaatggagaaatctgtttaactccttaaatatttgtttcgaatcagttgatttttcactatgcgtatttcaggatcgaaaagtctagtttaaccacacgtttgtggttgtagtggaagcgtaacgaagatgaatggcattgggaaactcaaatcgtcgagttctgaattggaccttcacattgaagattacctaccttctggatccagtgttcaacaagaacggcatggcaagctccgactgtgtgatttgctagacatttctcctagtctatctgaggcagcacgtgccattgtagatgatacattcacaaggtgcttcaagtcaaatcctccagaaccttggaactggaatggttatttgtttcctttgtggtgctgtggagttgtggttcgatatttgattttgttccctattaggattctagtgttggcattaagatggattatatt

SEQ ID NO: 52522 - DNA, 445 bp, Glycine max
  Clone ID: PAT_MRT3847_18440C.1
ggggaaaaaaaatttgggaaaccaccctcatttttttatgccccggcaaacgggcttcaaaagggggaaaatcccccgggcccttttttaaaaagcaaaaaagcccattccccccctttgaaaaaacccggtttttaaggggaaaaaaccccccggaagcctaaaccccaatttctttagggccgcccccccccggatatcccatttcaggggcaaaaaaaggcccctcaggcccagccccaaaggccacaaaaaaggggggggggattttcaggccccctttctcaaaaacaacaaaaatcgggattatgggggaccccttcgggacaaccccgggaaaaaaccggggggcccagggcccaaaaaggggggggggagcaaaaagccgttccccctctaaacccaatggaatcatcggggggccccccctcaacttggggccccg

SEQ ID NO: 52523 - DNA, 154 bp, Glycine max
  Clone ID: PAT_MRT3847_18441C.1
aaaataacaaaattggttaagcagatcccgttaatactggtaaagtttctgtataaaaaagaacatataaacctcctaaggcggaaaaaaccttttacaaagtcccaccaagatggttggacatctacgataacaacctcaacaactcaattaa

SEQ ID NO: 52524 - DNA, 272 bp, Glycine max
  unsure (1)..(272): unsure at all n locations
  Clone ID: PAT_MRT3847_18442C.1
ggnggattgtgactagctcaagcagcgcgaggaggatgaatgggctgggttacagggtggctgcgatcccgggagccgggccacggcaagcgttccatacgaaccctgttcgacggaacactggatatggggccgcgtctccggaggtgaaatgcgcaaggcgccggctcgcagtgcattcacacagcacaggggggtttgggaccatacctcaagagtgcgttgaaagtacagaggaatgcatccatggcgagcaacatgggtcacactcc

SEQ ID NO: 52525 - DNA, 603 bp, Glycine max
  Clone ID: PAT_MRT3847_18443C.1
tacggctgcgagaagacgacagaagggggatcacacacaacataaaaacaaactcttaattaattgcttcacctccaaaaaatggccaccaccaccaccacctatgcttatggttcctcttctcaaagatcactgggcatggtgctggctctagtctcagcagtggtgttgtctcccttatatgccaattcaaagagtgataggaggtactatgagtcaaaatggagctctggtgggtttgttctgcctatggttcttgctggactcataattgccataagaacaacctcttcatcaccatcaccaagagcttgttcatttctaccatctcctgagccttcgtgggtgctcagaattggaagctcttcttggggtttggcggggattctcgttatgcttatgcttgttctttattggcaagcctcggttcaagaattcttttggagatagagcatgggatcatcactatgtcctctttattttttgtctctatgatgcatttatatttattaacgtaataatattagaaagcagtttttaagttaaaaaaaaaaaaaaaaaagggggggaaaaaaaaatatatattaaatattatacaattta

SEQ ID NO: 52526 - DNA, 207 bp, Glycine max
  Clone ID: PAT_MRT3847_18444C.1
ggcgtgctgaagagtgatgacttgactcttctcacagcgtcgacttggtctaaatccttccctctctcactttctttgatctttctcatttctacaacaacaaaacgctccatcattattccatcaacatctctctcaacttcaactctcaactctgaagcctgcaaagtgcaaacgctccctccaaggccttaatcttcactttct

SEQ ID NO: 52527 - DNA, 1114 bp, Glycine max
  Clone ID: PAT_MRT3847_18445C.1
tctgcagcttcggtttcccggaaataggactcgaaactcaagtaggctatactaaggtgaaaaaggagagatggcagctgcaacatctagtgctgtgttaaacgggtttggatctcacttcttgtgtggaggaaagaggagccatgcccttcttgctgctagcattggagggaaagttggtgcttctgttagtcctaaaagagttattgtggcagttgctgctgcaccaaagaagtcatggatccccgctgtaaaaggtggtgggagtttcatagacccagaatggcttgatggctcgctaccaggtgactatggttttgacccactaggactaggaaaggacccggcattcctgaaatggtatagagaagctgaactcattcatgggaggtgggcaatggctgcagttgtaggcatcttcattgggcaggcatggagtggagttccatggtttgaggctggagcagatcctaatgcaattgctcctttctcatttggctctctcttaggtacccagttgctcctaatggggtgggttgagagcaagagatgggtggacttcttcaacccagattctcagtcagtggagtgggccactccatggtcaaaaactgctgagaactttggcaactctactggtgaacaaggctaccctggaggaaaattctttgaccctttgggatttgctggagctatcaaggatggcgtttacattccggatgccgacaagctagagagactgaaattggctgagattaagcatgctaggattgctatgttggctatgctgattttctactttgaggctggccagggcaagacaccccttggtgctcttggcttgtaagcaaaataatgtacactagggagacaacttgaatcattgtcctgtacagccagatttctcccttgagaagtttcaaattttatgctctaatcttggatgcattcaccttgtatctgcattatacatttataatatcgacaactcgtataaatacttgcatctaaaaaaaaaaaaaaaaaaaaaaaaaaaaaaaaaaaaaaaaaaaaaaaaaaaaaaaaaaaaaaaaaattaaaaaaaaaaaaaaaaaggggcccctcaacccccact

SEQ ID NO: 52528 - DNA, 1214 bp, Glycine max
  Clone ID: PAT_MRT3847_18446C.1
gtaggctatactaaggtgaaaaaggagagatggcagctgcaacatctagtgctgtgttaaacgggtttggatctcacttcttgtgtggaggaaagaggagccatgcccttcttgctgctagcattggagggaaagttggtgcttctgttagtcctaaaagagttattgtggcagttgctgctgcaccaaagaagtcatggatccccgctgtaaaaggtggtgggagtttcatagacccagaatggcttgatggctcgtaagttcaaccatctatctattcaatttatctcttgtttctcctttctttcttatattctttgttggaaattcaagtatgagtaattagtctcactcacattagtcaggaaatggctcaatgatagtgtattttaaactgtaacttgtttcttatatataggaccagaagtagtatgtcttaaggttttggataaagaaatagagtttgattttcttgataatcatagtcattacattagccagttaagcctccaagagtgttaagagtttgatggattcattttttgttgaatgttgcaattgtaggctaccaggtgactatggttttgacccactaggactaggaaaggacccggcattcctgaaatggtatagagaagctgaactcattcatgggaggtgggcaatggctgcagttgtaggcatcttcattgggcaggcatggagtggagttccatggtttgaggctggagcagatcctaatgcaattgctcctttctcatttggctctctcttaggtacccagttgctcctaatggggtgggttgagagcaagagatgggtggacttcttcaacccagattctcagtcagtggagtgggccactccatggtcaaaaactgctgagaactttggcaactctactggtgaacaaggctaccctggaggaaaattctttgaccctttgggatttgctggagctatcaaggatggcgtttacattccggatgccgacaagctagagagactgaaattggctgagattaagcatgctaggattgctatgttggctatgctgattttctactttgaggctggccagggcaagacaccccttggtgctcttggcttgtaagcaaaataatgtacactagggagacaacttgaatcattgtcctgtacagccagatttctcccttgagaagtttcaaattttatgctctaatcttggatgc

SEQ ID NO: 52529 - DNA, 549 bp, Glycine max
  Clone ID: PAT_MRT3847_18447C.1
ttcaaaccatgattattctatgtcaaaccttagctagcgtcttcctaggctttctgtgttttcgtgagagcctgcaaaagtatgaccaagatttccataatcataacgttgttgatcgccgtgaccgcgtcctgttttgtctgcgtgttacttgatcgcaaaattgaaggattctatatggttgtggcgcttgtgactattattgcatcagcgatggtgttggctttccgagcaacaatggtgacatttatcacagtcttggtgctgcttacatttgcaggtttccgtcgcagggttttgattcaacaaagatggcgaattttccttgatgtggcgtggtatttggtcagcgttatattcagatcagagaaggggctcttgggtctggcttgtgccacctttatcagcttgtttgccacctatcgatgaatgaagtaattgtaattaaattggttagtgttcaaagcaattaagtagcatatgttcttggttattattggggatgaaaccttcttgttataataatttataaaataggctagtgttcag

SEQ ID NO: 52530 - DNA, 228 bp, Glycine max
  Clone ID: PAT_MRT3847_18448C.1
catatttagaggcagtggcgctgttatcaccaccagctctactattgcaggtgcacctgcgtctcctaaacgctcatcatatgctgctaagaactgtgtagtgaaagtgaacaaactgattgcagttacgtgcgggtagctgctattgaaatacacaaaatatttaaaagcatattgaggagtactcgtatgatcaaacgtcttcactcaagtgggagatatacataa

SEQ ID NO: 52531 - DNA, 179 bp, Glycine max
  Clone ID: PAT_MRT3847_18449C.1
atttagcgtaactaaacgcgtccgaccacgcgttcgagagagagagattgagggcgtggagaaagttaactctctgcagttgctgaatcattcttcttaaaccagggcgcccgttctagaggcccaacttcattcacttgcttgcctctgccaaattctccattagtgccacctaattc

SEQ ID NO: 52532 - DNA, 354 bp, Glycine max
  Clone ID: PAT_MRT3847_1844C.1
ttttattaggagataatcaatgcattcacttattaccggaaaaaccctgtgccaagccatggctcactccgcttttcttttgttggcgaatcttcaaggattttggccctattcgcttggtataatcacaggcgtgatcactacgagcaaagacctaagacacatcttcactgagaactattctctcatgcataaaacaaaactacccccacgcccgaaaccatggtctatggttggaaaccttcccaaaatgcttgcgaaacaaaactgcccataagtgggtgcgcaatctcatgaaagaaatgaacacccgatttgcgtggatccgcttaagaaactcctatgttatacctg

SEQ ID NO: 52533 - DNA, 575 bp, Glycine max
  Clone ID: PAT_MRT3847_18450C.1
gacaccccttttatttttgcttctgctttttttttctgttcagcccttttttatgatatttttctgttttacacccgtttttctgttttttatgcttttatccttttgttattttgaactcttgaatgagtttatttggtgctggtacttggttattatgtgaactcatgaaacttttttaatttatttgaatgcaatccattgtttttttttaattttttatttatatttattttttatctattgttttgttaatatttatatgtatatataattatatattttttttgtccaccatgacatccgccattttccgctacaccatccgccatattttaatatggcggattttttgctttctgccatgaaccgccatccaccattaacaacactgatcagatggaaaaaaaatgcaggcagtaaatttaattatgccaagtgtgacgagtgtataaataagccccattccaactatatattttatttagcattatcgatcaggattcagtagaattataattcttgaatgccacaataaaaatttacctagtaataggggggattaacatcacatc

SEQ ID NO: 52534 - DNA, 407 bp, Glycine max
  Clone ID: PAT_MRT3847_18451C.1
ttcctttcagtttctttctctccattttcatatctttcttgcatgcccttatggtaaggctttctcttcctttcatctttctctcaatttgcacacacacacaacaacaacaacaaaaaagctctttttacagtttgtttttgcagggtcagaattttcaactcactggtggcaatcttgttttgtaaaggccggtgaaaattatagggaagccaacttcataattttacttgggaaaaagacttgccatcattttcatcaacatctgaaagatgtacttcagtgaaatgacagtgatgagtgttgaaggcatgcactcactagatgctgaagttgctgatgcatatacatgtgaaagagaaatgaaataagagatgtgctggaacagttaacgagaagaagtgaga

SEQ ID NO: 52535 - DNA, 1277 bp, Glycine max
  Clone ID: PAT_MRT3847_18452C.1
ccacgcgtccgcttttgttttctattcctttcagtttctttctctcattttatatctttcttgcatgcccttatggtaaggctttctcttcctttcatctttctctcaatttgcacacacacacaacaacaacaacaaaaaagctctttttacagtttgtttttgcagggtcagaattttcaactcactggtggcaatcttgttttgtaaaggttgtattttcattaccttcgtttatattacgcgtgtgaatatgctaccttctcccaaatcccaagctagaactttagtgatgaatgaatcaatttgtttacatatgtgtgtgtggctaaaatagagaaaattgaaaagttttagttttcatcattaatttgaaggcacttctatgaagaattagtccatgcttgaaaatctattaatttttggatgtaataatattttttaaacaaacggttatcttttcaaaatgacttctagcttctttgtgtttccctatttttctctctcatacattcactcaagagagagagagaagcatgttcaccggcacaaagcaaatctgtctagttttctggtgtcgtattaatttaagattaagattttagggagataagatacctatgaaaatatattattaacaaataagttggctaatcacaggccctcagacctgcgggaatgtttatttcacgtggacaagaaagctgaatgaaagcatcaatagtgaaaacctatcatatgtgaaattcttttctttatctgcaactagctgctatgcctcttaggtctttctaacatccctcttctaaagtcctttcagctttgaataatgtttcagctttctgtcaattaacctgttttcaggccggtgaaaattttagggaagccaacttcataattttacttggggaaaaggcttgccatcattttcgtcaacatctgaatgaatgtacttcagtgaaatgacagtgatgagtgttgaaggcatgcactcactagctgctgaagttgctgatgcatatacatgtgaaagactaatgaatgaaagaagagaagagaagagatgtgcaagaacagttaacgagtagtgagaatcaggagaagctacagctagggattctatgtgtctgtgtctgtcactagctagagaaacggatactataacatgattatgatctatgaccacaccatgtcattgccagcttccattatcatgacgaactcagatgtgtgtatctagctgcatgcataactaagctgatgcaaactacacctgg

SEQ ID NO: 52536 - DNA, 389 bp, Glycine max
  Clone ID: PAT_MRT3847_18453C.1
caccttaaaaaaactgcttacttctccattaaaaattataacaagttaacaatgccaactgaaaggtaaaatacaactcatctatagcttaaccaccacaaatattaattaaattaattttaaaaaattcaaagacctgacaaaaattatggagactggaataaatacaaggaaacaaacaaggtcaaggtagatgagccgattacactcaaattgctttccaagattctcgtttttttactcttttcttctcacacttctttgtctctcttttatttgcccctctcccatggtgttcacatttccaagattcaggcaacagcaaaccctaagctgccatcctttcagatcactttaacttccactcaccttggaaattgaattacctg

SEQ ID NO: 52537 - DNA, 383 bp, Glycine max
  Clone ID: PAT_MRT3847_18454C.1
ggaaaaactttcccttttgggaacaaaaaaaataaaatttaaaatttcaaatttattttttttttttttttacaaggcattaaaaaacaatctattcccttcccttacaggaaaaaacaggatccaaagcaaggctacaaaaaaaggccccaaacccaataaaattataaaaaaataagggggcaatttattttcaaaaaggaaggcggccatattcaaatccagccgagggttttcaaaaaatcgggcaacaaagctggacgggtaaaagttaaacccttgggccaaagggaaaaagggtgaacagcaaccccaaggctaaaggggcaaacccaacattatcatcctaatggggggaaatcgaccagttaaatacaagcttt

SEQ ID NO: 52538 - DNA, 576 bp, Glycine max
  Clone ID: PAT_MRT3847_18455C.1
ggccaccaaaccttggtatgggattcaataaaattttcaatccggtctgtccctagaatttgtatatgatacaccagaatttctatcattaaaatggttggatcctgctctctgtacagagtcagtatccctaaaactactgcagttactcctacttgtagttgtatctaacttcctatgctctatatttgtgtcaggatgaaaatgaaaaacacctcccccactccttttaacatccactactctgttcctgtacaaaagaccgtctgaaggagatggctggaacccacttgaatgtggcaaaactactgaatcatgggctatatcagaagagggaaaatatctagagtggggagaggatgactttgcaggggagatgctggaatcaaaatttttcaatatgccggctgcgccacgttccgcattactgaaaatattatctgcaaagtcatttggtccggttgaaccacttgggctatctgtgctacaagaaccctcattaaaattgcttgctggtaaggggatgaattatcactttggggagggcttttttccaaaaattatttttttgggggg

SEQ ID NO: 52539 - DNA, 471 bp, Glycine max
  Clone ID: PAT_MRT3847_18456C.1
tccggaatttccgggtcgacccacgcgtccgcgctactgagctcctccttcgccatgcccgccgccgcccgtagggcctcctccccttcctccgcctcattgagcttcgccacgtcgcagctcgccggcctctccctctccgccggcgttgcaactccaaccgccgtcgccctcctccccaagaggcagcagctccagcccattgtcgcgcggcgtgtgtgcccgttcacggacaagaagacgaaccgggcgaacaaggtgtcgttttccaaccacaagacgaagaagcagcagttcgtgaacctgcagtacaagaagctgtggtgggaggccggcaagcgcttcgtcaagctgcgcctttccaccaaggccctcaagaccatcgagaagcacggcctcgacgccgtcgcgcgcaaggccggcatcgacctcacaagaagtgagcaagaagtgagcccatccgatgagcag

SEQ ID NO: 52540 - DNA, 1668 bp, Glycine max
  Clone ID: PAT_MRT3847_18457C.1
acttgcatcatcagcgtcttctctttttctcagtttctcctttttttttttaaaggtgctgcaagcatacgcgcgagtctccccaagcggccggaaaaagaaaaaaaaacaacgtggaatcgcaacgggataaggtgaaacaccaacgttgtgaggggtaattgaaactttttagtggggtttattggtctgaagcttgttggagttgggagtagttgaagatgagaaacgtgcttcgttctctgcgacatttgcgaccagcctttcagaggcaagattgtgtattgatcagtgttaatgttgcagaagaacctccatgtcacattggaaagagctgtcatatccatagttcagctttcagagttgttgatcatgctgagaccaactttaaaaaccatttgtttacaacaaccacgaaacctctctcaaatgatgctgcaaaactcacaaatagagaaacaagcaaagctgggcctcttgttgagtatgaacgaagaattgataatggtgaacttgttgaaggcgatgcttgccaggtagacactctgacagaacttcagagactgtatgatgagcttgttgactctgctgacacctgccaattggaccgcaactctgaaaaacctgtaaggagtgggtggctgtggtctcgtctcttgtcacatccttcttactcacctgtaaaaggtttatatctttatggaggctcgagccccggtaaaactatgctgatggacctgttgtttgatcaattgccttctaattggaggaaaaagaggattcattttcatgactttatgttgaatgtgcatagcatgttacaaaagcataaggggttgtcagatccacttgatgtggttgcaggggagatttctgatgatgcaattttattatgtcttgacgaatttatggtaacagatgtagcagatgcattggtactaaatcgcttgtttagacatttgttcaacaaaggcattattctagtggccacatcaaatcgtgcaccagataacctatatgagggtggattgcagagggatctctttctacccttcattgcagcattgaaggaaaggtgtgttgtacatgagattggttcatcagttgactaccgcaaaatggcatcgggtgagcaaggattctatttggttggcactgatttatctggctttcttaagcagaagtttcaacagttgattggagaaggaacagctaccccccaagaagtagaagtagtaatgggaaggacactgcatgttccattgggagctaacggatgtgcctattttccttttgaggaactttgtgagagacctgttggggctgcagactattttgggctattcaggaagtttcatacgctagccttggatggcattccaatttttgggcttcacaataaatcagctgcacataggtgatgtatgagaacaaagccagactattatgtactgctgaagggagccctcaagatctctttgaaaaaatattaccaatatttgaggctaaaaatatggcaccccgaactttttcaagatcgaggaaaaatgatgattctaacctttgcgtggacaatgaattggggtttgcaaaagaccgccccattagtagactgacagagattaacagcaaggaatacttacagcaccatgctgccatgttagcaga

SEQ ID NO: 52541 - DNA, 419 bp, Glycine max
  Clone ID: PAT_MRT3847_18458C.1
acgaggtccttcagttgctcaccattttttgttatccacatgaaattttattctgagtttatttcttttcattattcttagtgttgatctagagtgataagttagagcaatccatcaatcaaatgtacttgaaagtacagtaaatgtatgatctgctgtgattttccatgtattcaaatgattggggtatgaacatctcatgatattttttttattgatctttccttggagattgaaatgaggctacattcagatcattgggagattagaacatacattatgtcctctgtgcaaaaaataaaaataaaaattctatttagttaactacattgagaacaccgtataaatactcatgaactaaaatccttatttattgtcgatagcatgaggaattataattctgacattctaagtgatgt

SEQ ID NO: 52542 - DNA, 738 bp, Glycine max
  unsure (1)..(738): unsure at all n locations
  Clone ID: PAT_MRT3847_18459C.1
ccacgcgtccggtgcaagcaaacgtgtgagtttctggctcaagaaaaaaaaaaaaaacgtggaatccaaacgggctaaggtgaaacaccagcgctgttaagtgtgaacaaagtgggctctgttttgtgggagtgctcacctattcagggattcttgaaaaaaaaaatttggggtttattggtctgaagcttgttggagttgggagtagttgaagatgagaaacgtgcttcgttctttgcgacaattgcgaccagcctttcagaggcaagattgtgttttgatcattgttaatgttgcagaagaacctccatgtcacattggaaagagctgtcatattcattcttcagcttttagatttgttgatcatgctgagaccaactttaaaaaccatttgtttacaacaaccacgagacctctctcaactgatgccgcaaaacttacaaatagagaaacaagcaaagctgggcctcttgttgagtatgaacgaaggattactaatggtgaacttgtagaaggtgatgcttgccaggtagacactctgacagaacttcagagactgtatgatgagcttgttgagtctgctgacatctgccaattggatcggaactctgaaaaacctgntaggagtgggtggctgtggtctcgtctcttgtctcatccctcttactcacctgtaaaaggtttatatctttatggaggagtgggtaccgntaaaactatgctgatggacctgttttt

SEQ ID NO: 52543 - DNA, 175 bp, Glycine max
  unsure (1)..(175): unsure at all n locations
  Clone ID: PAT_MRT3847_1845C.1
gctgcttccttttctggtggtggtgttngatgctntgnatctgtgcctgccttgggtcctggcaaaacttgtcgaaaatttcggtcagctggtgaaaaattcttgcacctggacataaatatgacaaatcagagggtatcacttcttctgaagaagaggcttacaacccctaaat

SEQ ID NO: 52544 - DNA, 1386 bp, Glycine max
  Clone ID: PAT_MRT3847_18460C.1
acttgcatcatcagcgccttctaattggaggaaaaagaggattcattttcatgactttatgttgaatgtacatagcatgctacaaaagcataaggggttgtcagatccacttgatgtggttgcaggagagatttctgatgatgcaattttattatgtcttgacgaatttatggtaacagatgtagcagatgcattggtactaaatcgcttgtttagacatttgttcaacaaaggcattattctagtggccacatcaaatcgtgctccagataacctatatgagggtggattgcagagggatctctttctacccttcattgcagcattgaaggaaagatgtgtagtacatgagattggttcatcaattgactaccgcaaaatgacatcgggtgagcaaggattctatttggttggcactgatttatctggctttcttaagcagaagtttcaacagttgattggagaaggaacagctactcctactccccaagaagtagaagtagtaatgggaaggacactgcattgtccattgggagctaacagataagcctattttacttttgaggaattatgtgagagacctgttggggctgcagactattttgggttattcaagaagtttcatacgctagtcttggatggcattccaatttttgggcttcacaataaatcagctgcacataggtttgtcactttagttgatgtgatgtatgagaacaaggccagactattatgtactgccgaagggagccctaaagatctctttgaaaaaatagtaacagtatctgaggctaaaaatttggcacccagaacctcttcaagatcacggaaaaatgatgattctaacctttgtgtggacaatgaattggggtttgccaaagaccgcaccattagtagactgacagaaattaacagcaaggaatacttagagcatcatgctgccatgttagcagaaaagaaagaaagagtggatcagaatgccgttgaagcttgaagaaaggatccaaaacctcttatcacagtttggtggctattgttgtggcatagtgaaagtggagtaaaatgaatagttattgtgaacaaccaaaaatttcaaattagaaaacatccatcggcagagcattagatttggctcagtttgcttcctattattgtaccccatatatagagtgaaagtggggtaaaatgaataatgattgtgaacgaccaaaatttcaaataaaaaacatccatcttcggagcattagatttggcaccagctcagggagaggtgggttagatagcatcaaatagttattagcatttccaaaaatattgtgtaattgattgatttaatgcaaaaattcaaacaatttaaattgaatgtaggtcttttaactgcattta

SEQ ID NO: 52545 - DNA, 727 bp, Glycine max
  Clone ID: PAT_MRT3847_18461C.1
ttccattttttctcttaactgaaaatcagtttattaattgcaacaatcttgtaaacttgtctacccattgtggaaagagtagacattgtaatttgtaacattatcttattccatcatcagttgctcatggggcatatattatctacttgaagaactccataacccataaatcacagacaaagcatgtgtatctaatgccactgatgaatccaactccttttgctaatgccatgaattccccttcacttctctctttccctcctggctcctgggtttatcgtcatcatcagtacatcaaattgggaaatactctttactgcacctgttgttaagggttcaaatggaagaacttcctccacaatcacctttccatcgttaggaattgcaacatagcagttcttcaacaccttcaagcaccattcatcactccaatcatgaagcacacactacatagcttcgaccactatgtggctatcaaatacatccacacccatctcctcacaaataaattacgcctaggctggtgccctgccttgccgcgagcccacatcgcctccgggcctagtgagccagcaccatcatcaatggaagcaaagtatttggccacagcgttcatgccatagagcctctgcaaatgtataggaagagcatgctgatcagcaacaactgtgcagtcaatgatggagtgacatgctaggagccttaggatacgatatatccagcattg

SEQ ID NO: 52546 - DNA, 1076 bp, Glycine max
  Clone ID: PAT_MRT3847_18462C.1
ggaactcaactgaaagtgagtgtgtgaaggtagggttttagaaactgatcctacggcatgttcatgtttttggttagcagagtaactaaggattcaatttcacgcaaccgcaatgcctttgcttcttttgctttctctaggtgtgctcattcattatcatttgccacagtagaagcagaagagatatcaggttctaggcctgctgaagttttgaacctggtgcaaggtaaatgggtaggatcttcaaattggaacacaattgcagatcctttaaatggtgactcatttattaaagttgctgaagttgatgaaacaggcattcagccttttatagaaagcttgtccagctgtcccaaacatggtgtacacaatccttttaaggcaccagagagatatctatgtatggagatatatctactaaggcagctcatatgctatcacttcctaaggtttcggatttctttacaaagttaatacaaagagtttctccaaagagttaccagcaggcttttggggaagtttatgtgacacaaaagtttctagagaatttttgcggggatcaggttcgtttcctggcaaggtcttttggtgtccctggaaatcatcttggacaacaaagtcatggttttcgttggccatatggtcccgtattattactttttaatagctatcaaaatagtagtgctaaatgtaatccccagtacaaatatgccactctgtaatggattgatggaatctaaattgctcatgatgtattgactttctatgactggatagaggtcaaagaaagaaaaaaaatgatgggaacctcatccttcaatataaacctccatgccttatattgtccatataggagactgttgcccaaatgggatgttactgtggatgtaagcataggtggattatctagattaacccgaggtttctgcctttttttgtaaataatacagcagtttgctgtatagcaaatgacatgacaatttagtttttaattttcttttgaagcagaacatgatgcgattttcaaatgtttagtttgctaggtgtgaatggaatggtagtgcttattcttttcc

SEQ ID NO: 52547 - DNA, 551 bp, Glycine max
  Clone ID: PAT_MRT3847_18463C.1
ggctcgaggcaacttgcatcatcagcgtcttctctttttctcagtttctcctttttttttaaaggtgctgcaagcatacgtgtgattttctggcacaagaaggaaaaagaaaaaaaaaaacaacgtggaatcgcaacgagataaggtgaaacaccaacgttgtgaggtgtgaacaaagtgggctctgttatcaatatcatcgggtaattgaaactttttagtggggtttattggtctgaagcttgttggagttgggagtagttgaagatgagaaacgtgcttcgttctctgcgacatttgcgaccagcctttcagaggcaagattgtgtattgatcagtgttaatgttgcagaagaacctccatgtcacattggaaagagctgtcatatccatagttcagcttcagagttgttgatcatgctgagaccaactttaaaaaccatttgtttacaacaaccacgaaacctctctcaaatgatgctgcaaaactcacaaatagagaaacaaagcaaagctggcctctttgtgagtatgaacgaagaaatgatatg

SEQ ID NO: 52548 - DNA, 292 bp, Glycine max
  Clone ID: PAT_MRT3847_18464C.1
gctgggtgaggcacatgaggagactgtactgagggcgattcctgagatggtggtggagtactatcaaatgagagaggtgtggacatacatgagctccttggtggtgaaaggcattgcactcactgcggacgggaaccttgtggcctagacatgggaacatctgttatggagactgcatttgtgttaatacatcgaacctgcgttggttcggggaaaaaacatcacaacatttggagctagagggggaagtccccgtctaaaaaaacaatatacttgacctttctttttttgg

SEQ ID NO: 52549 - DNA, 694 bp, Glycine max
  Clone ID: PAT_MRT3847_18465C.1
tccggaattcccgcgtcgacccacgcgtccgcaaaccataaaacactatccatgaacaaaaattgaatttttttaacccctgctatgaatctcagatgagcaagaacttgcagctgatctgataactccggcgaagaacgaagtcgtgaaaaaggttgtgcattacgacgctgatgcgagggctctgagattgtgcatttcgagtcacgaaaatataataatttagatccatttttagatctacacgttacaacaaaaacaaatctgatttgccaatttaacagcaacaaagggccaccttcattttcaaatgcttgtaagacattactacaccaataaggtactgaagtatctctaaaacctaaatttggttttgatgactcataatagtcacccattgccccttttctttcctttatgttttgctttgctcatgtcatgggtggatctcctctggccgtgcttggtttatgtaattttggatgcccttgataataatttggttttcttttatccttgctcttccatgttgggaattgcgtttgggggtacagaatcctgtggcctttccaattacaattgggcctctgattctttttctgggttggggtatttggttggcgagtaaatgtgttggagagaattatgggttgggttcttttttggggttggggcctggaaattcatttctttt

SEQ ID NO: 52550 - DNA, 1280 bp, Glycine max
  Clone ID: PAT_MRT3847_18466C.1
aattcggctcgagctacggcatgttcatgtttttggttagcagagtaactaaggattcaatttcacgcaaccgcaatgcctttgcttgttttgctttctctagcagtttactggttttgggaggtcctattgaattgctactttggtctaattgcatttatccaaactgattgggttggatcatttttcagaactcaagtcaagagcagctggggcattgtgttgatttttatttttttagttaaataactcacaggaatgctagaaaaaccattttgtagtttcattcaattcccttttaaaaaaaacaagataaaagtattatataagctttaactggtgattcttttttattcggttatatttattgtatataattctaaaatattaacgctaaattcatgtttacaatatatcggcttctaaacagaaaatcgaacagcatgttcaagcttttggttagtagagcagctagggtttcaactccacacaaccacaatgcctttgcttctttcgctttctctaggtgtgctcattcattatcatttgccactgtagaagcagaagagatatcaggctttagggctgctgaagttttgaacctggtgcaaggtaaatgggtaggatcttcaaattggaatacagttgtagatcctttaaatggagactcatttattaaagttgctgaagttgatgaaacaggcattcagccctttgtagaaaagctcggaattcggctcgagaaggcagctcatatgctatcacttccttagtagatatatctccatacataagatatctctactaaggcagctcatatgctatcacttcctaaggtttcggatttctttacaaagttaatacaaagagtttctccaaagagttaccagcaggcttttggggaagtttatgtgacacaaaagtttctagagaatttttgcggggatcaggttcgtttcctggcaaggtcttttggtgtccctggaaatcatcttggacaacaaagtcatggttttcgttggccatatggtcccgtggccattattactccttttaattttcccttggagattcctgtccttcaattgatgggtgccctttacatgggcaacaagccagtccttaaagttgacagcaaggtgagcattgttatggaacaaatgttgcgcctgcttcatacctgtggcttacctgcagaagatgtagacttcataaattctgatgggaagacaatgaacaggctgttgctggaggcaaatccacgaatgaccctctttact

SEQ ID NO: 52551 - DNA, 536 bp, Glycine max
  Clone ID: PAT_MRT3847_18467C.1
cgggtcggcccacgcgtccgagctacgaagacaacagaagggggcggaagcaaccgtctcttttcccatgcgtcaagtttccaaagcagcaaacaacaaacccacaattcttcttcttcacttccctcagcattgccgttctcaaagatggcacatttgctggcaatggtggtggaaggtgttggaggcttcgtcaaaacgctttgggctcttcaagaacggcgttggtcctacaccttcgacgctgtggcctctgctgcggtgtccgtgaccatggcattggtgctctgcttgttgtctattcgtactagttatagacatagacgaggtgatatgttgtttgcctctttctgatgtaactactgtgtgtttctcttcttatccgttcagcaatttttatcaaaattctgaattatgatatcttggttgccacgcagaacatcaataaagaaggattagccgtgtttttattcatcattgtagtaagcacacttctgtattattagtttggctaattgagatatcttattatgggc

SEQ ID NO: 52552 - DNA, 143 bp, Glycine max
  unsure (1)..(143): unsure at all n locations
  Clone ID: PAT_MRT3847_18468C.1
ttnncttgtcggaaagcgttttccatttngcattgtgaantcaactccgattcagtaagtaaagtngggnatctnaantagcttncnttaaactanaangaatcaatccctctnacttattnctnagtattancgatgnccgt

SEQ ID NO: 52553 - DNA, 495 bp, Glycine max
  Clone ID: PAT_MRT3847_18469C.1
aaaaaccaaaatgactcatttattaaactggacgtgttttcattgaacaaatggtttaacaatcccataaggaatttggtcccccccttatccgggaaatagcacctgaaaacaatttagtccaatttttcaagaacaaattttttgttaaagcgttaaagtattctcaactgggggcaaatgaaactaaggggttggaatcaaagctcattatcaatttaccttgaacataaaaaatcatataatcaaacccctccttttgggctaattattaaaaaagaatttcactttagctaactagggcacacacccaacgtttgatacaagtttatttttttttaatgttcccaaatctcggaatcgaaggcttagagtaatcagagtttccattttttttttacctggagcttattaaggatttgttttccacaggaaatgcctaaatgagacctgtttatggatggtatgatggaacaggcatacctgacccatagg

SEQ ID NO: 52554 - DNA, 873 bp, Glycine max
  Clone ID: PAT_MRT3847_1846C.1
ccacgcgtccgcacgacatcaccgtctcaaattcgcttttcgtcattcctttttattttcagtgttggctgtgctgtcgcctccccatattcagattcaattcaacccttctttttttttttctttcttcttcttcctcctattcggattcgccacatacagatggagggctcaaaggaaaactgtgtgcctcggattccgctcataccctcttcaaatcttcaaggtccaagaatgaagcctctcctccatcaccggctgcctctcggcaacatcagtcagaatgttaatatgcctcattctcaagtcaacaaactagatctttcccgcaagtgtacggctcacacaattcagcaccacttccctcaagaaactaagaaacagaacctgttggccccgaacccgagttgcaagttagattgtgatatcgtagatattgatgatgacgatggggatggcagtgacgatgccgttccagtatttgtcaagcacactgaagccatgcttgatgaaattgacaagatagaggaagttgaaatggaagatgtggaggaggaacctgttttggacatcgatgcctgtgataggaaagatccacttgcagtggttgagtacatagatgatatatacagtttctacaaggacattgagaattcgagctgtgtctctccaaattacatgactagtcaacttgacattaatgagaggatgagggcaattcttattgactggcttattgaggttcactacaaatttgagcttttggaggagacgttgttccttactgtcaatctcatagacaggttcttggagcgtcaggcagtgatcagaaataaacttcagttaggtggtgtcacagctatgctaatagct

SEQ ID NO: 52555 - DNA, 2318 bp, Glycine max
  Clone ID: PAT_MRT3847_18470C.1
cgcttgcgaaatatccccaacgaaattttaatctcatcgcgattccgcaaaagaaaagaaaagagtgtgtggtgtcggggatgaacatacattgaggcaaaagtgtttcttttcttttcttttcttttctgcgcagttattattattttaggactgcaactgcatgagttggacaaaaccgagcaagattggtagcttgaagttctacaagcttcagcaactatggctattgctacggccaccctctctctccatttcgccaaaattcccattcgtcaaacgcattcatcttctccaatacgccatcgcatcccttctggtcgacggttgaatctctattaccctcgcacttcccacagatttgcgtgttttggttccaagtgttcactgacagacactgatgtgcatttggttcatgttaccacggatgaggatgaggctcagggaagaggggtggttgagcctcactgcccggtgccatttgttaaactcaatactgatattctcgagactgagtctttgaacttgctcgcagaagccacatttgtagatactctcttgactgcattgcctgttttgtccgaggaggagcagcacgccctatctgctactccggctcacccggctggtttacacgctttttatgctagttgcttaactgcaaatgtagtggagcagctttggaattttgcttggccttctgccattgccttgattcatccaagccttttgccagttgctgtaatgagtttcttcaccaaagtggctataattgttggcggtcccttggttggcaaacttatggaccattttccaagagtgtctgcatataattgcttaaccattgttcaggcagcagctcagttgctatctgcagcgatgattattcgtgcccattctgtccaacctacttcattttctacactgcttctgcgtccctggtttgtcatattggtttcagctggggctattgagaggctttgtggagtagctttgggggttgcaaatgagcgtgattgggttgtgctgctggcaggagtgaataggcctattgcattagcacaggcaaatgctgttctaaatcgaattgatctcctgtgtgagatagccgggggcgatgctgtttggattccttctttctaaatttcatcctgtaatctgcttaaaagttgcttctgggttaatgatggggcttctgcctgttacaattgttttcaattatttaaccaacaagctttccaccggtgttcttgaccgacctaaaccttcacaaacctgttgcagaacatttaatgaagattctgcattagatgccagcagtatagtgtttaaaggtctggaagccatcaagctcggctggaaggagtatctgggtcagcctgttctccctgctagtcttgcatgggtgctcctctgctttaacgttgtccgcacgccaggcgggttgctgtctgcatgttgcacgctgcgtggcttacatccgtcaatcattggaggattcagtggaatgtgtgctttaatgggtgttgctgcaacatttgtgtcttcaactctggtcaagcaatttggcattttaaaggctggggcagttgggttggtatttcaagcgttacttctcagcatggctgttgctgtatattggagtggaacaatttctcatcagagccctcttcttactttcctatttctgattattctgtcacggttaggacacatgtcatatgatgttgtaggggctcagattctccagacaggaatcccatcatccaaagcaaatctcattgggacgacagagattgctgttgctagtttggcggagtctataatgctgggtgttgcaataattgcaaacgatccttctcattttggatgtttagcactgttgtctcttctatcagtagttggtgctgcctggatgttctgtagatggctgttgaatccaacagatgaacaaaaaaaccttttttcttatgatcctcagttttgatatttatttgttcattaattgccttagtgcaaactgcaaaggcagttcgatgtaaacaagaatcaaaatatagcatggtgggtgattatccacttaatacaggagcttggggcgttttcttctcacctggccaatgatattcattgtgtggacaaaatagatggctttacctgtaattctgtaaatgtgtagcatgccatcatatttatattattagtgtacatgacaaataattagctagttgcctacgtccaacacgtacaaacgttttgtaaagcattttattcattgttaaaattctttcccgggatttaaaataaaaaaaaagaaa

SEQ ID NO: 52556 - DNA, 500 bp, Glycine max
  Clone ID: PAT_MRT3847_18471C.1
cggctcgagaatacccactagttccctatagactcatcacattctccatctcaaccctccttaattctcattcctcaccctcctcctcctcctcaactaattttataataattaaaaaaccaacaaacatgtacactttcttaatttaattaatttctactctctttttatcctacctttctagttacctcttcaattccctcttaaatattccctctgctttgcttccatactcatactcatatccctctcactctctttttgagataagtttggttagtttcattttctgtgattctcctctgacaacccccatttcctgcttcttggccctcctttccctcagacccttgctctctcatcactcactcactactactacaacaaccaccaccaccacacactctctttcttctctcatttttaattctcttcaattcctgaagctaattaagaggtagtagctcgcaacagcaaatatttctgacataaacatcatc

SEQ ID NO: 52557 - DNA, 139 bp, Glycine max
  Clone ID: PAT_MRT3847_18472C.1
tcgcgatctacacggacgcgtgggcgttcgcgtgggtcggctcgccaacgacgcacgaggggttgttgcggtgccggctgtatctatggcgtgcagctttaccagctgatggatgatgcgcttcggtgcatgctgtggc

SEQ ID NO: 52558 - DNA, 685 bp, Glycine max
  Clone ID: PAT_MRT3847_18473C.1
ttagcccactaggctcctcatggaattaaaacagtttaaaacttccaattaaccaaacaattctgttcttgaaaaagagaaggatcacaatcaatcttgcccaaaagccattagtctgattgccaaaataactttacatgagaattgttgagagaaaagaacttctttaagacttttacaatcaccaccataccaggcctattcttggtttgaagaagacccttgttggtcttggcaactgttaaggctgtagtagcacatctgaattcaaccatctcccttgaagacgtggaagaaaactctgttgctgaagacaactcctcattgaaaacctcccacaacaagtccattggagccgcttcatggcctactcttgttattttctttccatcttcgacacatgaaaagctcttcctgtggcccttagagatcaattttgcttcaaagcaatctttttcatctcctttgcttccttctctagggacttggttgggattagaagggtcttttggtgatatattccacagaggaggtaaatcaatgctatatgcacaagtgccaccaattttggggaagctgaagtcttctgtatccattggcttggctgcagcaaatcaacactgttttcggatattagagagatgagaatgatgtgtgactttgggttaggtttgtggggtggact

SEQ ID NO: 52559 - DNA, 192 bp, Glycine max
  unsure (1)..(192): unsure at all n locations
  Clone ID: PAT_MRT3847_18474C.1
attttggatagtccatttttatttcgaaatgtaaatttacattccaaaatgacgtttctagaatataataggggtgcagattcaataatagagatacaggatacaataacttaaaatataactaccnngcctatttcgtctgtttgtttttttcttcttcaatttttttatttataaaatctatataanttt

SEQ ID NO: 52560 - DNA, 330 bp, Glycine max
  unsure (1)..(330): unsure at all n locations
  Clone ID: PAT_MRT3847_18475C.1
ctactgctctctctctccctctccctctccctccaaattttccttcattctcacgcgnccgggtggtttccgccggcggctactccctatccaccgcgcatccatcccgtttccttttcttgcttttcttaacaaaccaaaaaaaattaaaaattcttccgaaaacggggaataatcgtaatggtcaactgagtaaggtttggctgtccttcctagggtttaatggtgtccaataccaggaggagggggaagagaaccaaaccaaaaaaaaaaaggattaaagggcaaaaattagggaattttttttgggaaaaaaaagagaaatttaag

SEQ ID NO: 52561 - DNA, 268 bp, Glycine max
  unsure (1)..(268): unsure at all n locations
  Clone ID: PAT_MRT3847_18476C.1
ttgaggccaggcaagcnccactcaaccaccacacctctcctcgttcacgctacccctttctgctcttcttctacctttcaagttttaaaagtataaagatggcagagacattcctatttacctcagagtcgggtgaaacgagggacaacctgacaaangtctgcgacaaaatntccgntgtggtcntcgaggtttgcttcgagnaggacccagncngcaaanttgcntgggaaanatgnncaaaaaccancttggtcatggtcttggg

SEQ ID NO: 52562 - DNA, 385 bp, Glycine max
  Clone ID: PAT_MRT3847_18477C.1
gcactcgtgcgaaaaaaaagaaacctaatcgccgatcgcgtcaaaagttcggtgttgctctgtgaaattgccgtttgggttttttgcggtcggggataatcctgtgaataataacaataattgggtatgttttctgttttaggtaacctagctgtagctccttttttttttataattgatttgccgttcgaagatagtcgttccaggtactgctactctttgtgttttctggcgttttaattctgcgcaattatttaattctacatgtcagattgttgattattggtcgtatgattcgttagaactctatgactcctgagctctggagttgaaatgttgacttactaggctaaaagccgtagcttttgtggtacgtatcctaaca

SEQ ID NO: 52563 - DNA, 1055 bp, Glycine max
  unsure (1)..(1055): unsure at all n locations
  Clone ID: PAT_MRT3847_18478C.1
ctaggaaactgtcaannngaaacatcagcattcaaaaactacaaccttatctaggaaaatgtcagcttcaatttctccaatttgcaatgttggaaagttgatacaaagcatgttcttcccattgttacacatgaatcatattgtctctctttaacaactaacatcctcaatgtggatacagattctttacttcctcaagtatatatcttggtcttggcaatgagttggaaaccaaaccacctggtaccatattgtctcatgtctccaacaacatcctcaatgtggatacatattctttacttccgaaagtatacatcttggtcttgacgttggaaaccaaaccatcattaataaatctcttccacgtatctcctgtccatagcgttttaacaaacatgatcctgaagttggcctcaccaaggtggatgatcatctgcagaagtttgaggagggattggcttccattcaggtttctcatcccagtacatatcgtaataaatgtggccaggagtgtgatccagcacgcagcaccatatacccgtgtaccgtttaacacgttttctgaatctatcttccctttccttgtcactgaaacctgaaaaagcatcttgcattgaagagaactgaatgacttttatatccttgaatgataaaaatactttcatgtacgtttcttcattgctatgccttggaaatttgagtactcccccaacagtggtattatttgatgcaaaacaatcttgggttccatccttacagagcttgaacatcaagccatgacatcttcacttctgaggggagggagggattatcaagtattgagtactccctaatatctactccagagccaaactcttcctttgggagttcttttcaacatgacatttacctcaaatacatgatccaaaggacagagaaaaggttgtctagttatagacccgtccaaaacaccaggatggggaaaccataacctatcaattctgcaccatagtggaggcatgaccaggtcctgttcaaaagggaagcaattgcaagtgctgtcctaagtcaatttt

SEQ ID NO: 52564 - DNA, 492 bp, Glycine max
  Clone ID: PAT_MRT3847_18479C.1
ttatacaaaaggcaacatctaatttcctgtttgcaataaaagagaggagtgttacattcgaatgtcttcggtatttatttatttatttttaattacaagcgcaattcaatatcaactgagacatcagcgttcaaaaactgcatccttatctaggaaaatgtcagcttcaatttctccaatttgcaatgttggaaacttgatacaaagcatgttcttcccattgttacacatgaaccatattgtctcatgtctccaacaacatcctcaatgtggatacatattctttacttacgaaagtatacatcttggtcttgacattagttggaaacccaaccatcattaataaatctcttccacgtatctcctgtcaatagcgttttaacaaacatgatcctgaagttggcctcaccaaggtggatgatcatctgcagaagtttgaggagggattggcttccattcaggtttctcatcccagtacatatcgtaataaat

SEQ ID NO: 52565 - DNA, 259 bp, Glycine max
  Clone ID: PAT_MRT3847_1847C.1
gatcttattccatgttatatacttagatacaacttgttattgaaaagttctatttaaattaagaatttcagcggaaaaatcatgaactttgatgcagtgatggtggactcacttgcgtattatattttcatagaaccctgatatttaaattttcaaagataagaaatgttatctctcatttgcgttatgctatggaataatatattctccaagatgctattttcatttattctggttatgaagatttgaattcttttat

SEQ ID NO: 52566 - DNA, 369 bp, Glycine max
  Clone ID: PAT_MRT3847_18480C.1
gatcacacacaacaattttctcacaaaacaaaactccatttgtaactctctctccatttccactcatatcccataagcaccaccatggctccacctaaagaaattgcaaccctcatttaccagaatggtcacattgtagacgattcagttcaaggatcgacgtacacatgtacgaccccaatatttttttacgccaatcgttctattacatttacacaattcatttgaaaaactaacaatcgtctccctactcgagcaactgaacaagttgctcaattggtatttcgtgtccctatttcatttcatctcggccagacatgtaatggattggtatttataaataaatggaatttaaaaaaaggattaacc

SEQ ID NO: 52567 - DNA, 774 bp, Glycine max
  unsure (1)..(774): unsure at all n locations
  Clone ID: PAT_MRT3847_18481C.1
tcgcccacgcgttcgcccacgcgtncggaatcttactagaaagtaaataaaatgaacgagtgccaaatccgagagccatgtccgtggttgatatgttgaattgagaagttagtagggttccttcattcgactcaaacacacaatgagtttgtctctcattcaaggttattcttccgccgaagacgaagaccaaccccaaccccacgattccgacctcgaagattccgacgatgaagccgccgccgccgcaaaccacccttctctgggcgacagatccatcttcgaccacgttccgaatcctccttctgcctcgggtcttccttctgcattcgacgctttctccgaaattgcagaaccgccacaatttctgaacaacagtgtggaagagtataacaacaacccttcttcgagagacgctgatgagcaacaagggaagcataccaataggaggcgccgcaaggacaagaaggatttacctacaggtgcgggcgtagaggcaaaacctcaactggttgggattcatgagcgagtaagaagtgacatcaatggtagccaagcaccaacatcagctgcctcaggcacatcagaaggaggcaagtgggcgccaactgcaacaaatcctaatgctgaagatgctgcagagcttctaagaatgtgcttgcagtgtgggattcccaacacatactctagtgcacgtggaatggtctgccctgtatgtggtgatcgcccctccaaggatgataccagcacagaatccaagaagaaggatcaact

SEQ ID NO: 52568 - DNA, 243 bp, Glycine max
  Clone ID: PAT_MRT3847_18482C.1
atgtgctgttggatgatgctcttaaggagcaatatgatctcattctgttacctggaggtctgggtggtgcagaagcatatgcaaaatctgataaactaatggatctgatcaagaagcaagctgaggctcatagattgtatggagctatatgtgcctccgctgcgattgctcttgaaccacatggcctactaaagggaaagaaagttacatcctatcctgctatgtggaacaaacttgcagacc

SEQ ID NO: 52569 - DNA, 664 bp, Glycine max
  Clone ID: PAT_MRT3847_18483C.1
gccaaatccgagagccatgtccgtggttgatatgttgaattgagaagttagtagggttccttcttcgactaaacacacaatgagtttgtctctcattcaaggttattcttccgccgaagacgaagaccaaccccaaccccacgattccgacctcgaagattccgacgatgaagccgccgccgccgcctcctggaccgccgccgcaaaccacccttctctgggcgacagatccatcttcgaccacgttccgaatcctccttctgccacgggtcttccttctgcattcgatgctttctccgaaattgcaggaccgccccaatttctgaacaatagtgtggaagagtaacacaaaccttcaagagacgctgatgagcaacaagggaagcatgccaataggaggcgcccgcaagaacaagaaggatttacccacaggtgcagtggtagaggcaaaacctcaactggttgggattcatgagcgagtaagaagtgacatcaatggtagccaaccaccaacatcagctgccttgggcacatcagaaggaggcaagcgggtgccgactgcaacaaatcctaatgctgaagatgctgcagactctttaagaatgtgtttgcagggtgggaattccaagacctaactcaatgcacgcggaaatggtctgcctgt

SEQ ID NO: 52570 - DNA, 276 bp, Glycine max
  Clone ID: PAT_MRT3847_18484C.1
aattaaattgtgtttctgtttttcgttgtaacctgtgcaaccaacattttttaaaatggaagtcatttcaaaaatttgggtgtttacgggggacaactaaagaaaaaaaaagcagagggggggcaaccaaaaacgaggtgggacgcaaaaaaaaaaaaaaaacccggtaacaaggggggggaggaggaccttgaagagaacacagggggggagccacaccaggaaggagggcgggcaacaaaaccgggggagggctgtccacagaaacaggtgctt

SEQ ID NO: 52571 - DNA, 377 bp, Glycine max
  Clone ID: PAT_MRT3847_18485C.1
cccacgcatacttttttgctaaaaaaaataaaaaataaaaaaaataaataaaaaaaaaaaaaaaaaaaataaataaaaaaaaaataaaaaaaaaaaaaaaaataaaaaaaaaaaaaaaaaaaaaaaatgggcgacccttttaaagaatcaaaatttacatacccgttattgcaaaaaaataattttttaattaagtaaactaaattaaattcaatggccggctttttacaacatatgaactggaaaaaccttgggtttaccaaattaattcgctttgaaaaaaatccccttttctcaaattgccgtaaaagcaaaaaggcccgaactaatcgcctttcaaaaaatttgcccatcttaaatggaaaatggaacccccc

SEQ ID NO: 52572 - DNA, 164 bp, Glycine max
  unsure (1)..(164): unsure at all n locations
  Clone ID: PAT_MRT3847_18486C.1
tcccgggtcactccacgcgtccggagtacgcatcgccgttcaaagtggccttattnggaaaacattagggcgttggggggtatgttaacctcgctaataaacactggagacaacaggctcactgagaaaacaactctaacttgcagagacttggacacctcggc

SEQ ID NO: 52573 - DNA, 233 bp, Glycine max
  Clone ID: PAT_MRT3847_18487C.1
cggggtgaagcatggcctcgtggccacccaaacctgcagagatattttgttcgtttgagtgtgagagagcaatcgatggcctcatcaccatgtgattgctggccccattcttctacttgcttctacttcttccattgaagatgtctggaacggcatcaaactagcctctctctccaattcctccgttggcttagagttgaacaacaacaaccatctgtctccgtttgtggtgt

SEQ ID NO: 52574 - DNA, 245 bp, Glycine max
  Clone ID: PAT_MRT3847_18488C.1
gctctgaatactgctcgcgcgctcgtgacgctaatcatcgtcatggaactaatggttgctaaagtgcatacaccaataatcatcgttgatctattcgaagtctatggtaacgactacgataggcaacaccatgggactactggtggctatgccggtgacactggtaggccacatgggaacatcggtggcccttactatggaaccaacaccgcagacaccggtactggtcccagaagtggaaccac

SEQ ID NO: 52575 - DNA, 281 bp, Glycine max
  unsure (1)..(281): unsure at all n locations
  Clone ID: PAT_MRT3847_18489C.1
gcttgagaaatggcacaaganacctttctattcacatctgaatctgtaaacgagggtcaccccgacaagctgtgcgaaccagatctctgatgcagtgctcgatgcgtgccttgaacaggaccctgacagcaaggttgcctgtgagacatgcaccaagaccaacatggtcatggtctttggagngatcacanccaagggccnnacgtagnctatgagaagattgtccgtgacacctgccgcgaaattggattcatctctgatgtgttcggtcnngatgcgcc

SEQ ID NO: 52576 - DNA, 688 bp, Glycine max
  Clone ID: PAT_MRT3847_1848C.1
cccacctatcatcaattcaattcaatttttctttcttcttcttcagattcgcatggagggctcaaaggaaaaccgtgtgcctccgcttccgctcataccctcttcgaatcttcaacaaggcggtggtccaagaatgaagcgcctactccatcaccatcaccggctgcctctcggcaacatcagtcagaatgttatgcctcattctcatgtcaacaaactagatcttgcccgcaagtttacgccacacacagttcagcaccacttccctcagccacatccacagcctcaagaaaataagaaacagaaccttttggccccgaccccgagttaccagttagattgtgatatcgtagatattgatgacgacgatggggatggcagtgatgatgccgttccggtatttgtcaagcacactgaagccatgcttgacgaaattgacaagatagaggaagttgaaatggaagatgtagaggaggaacctgttttggacatcgatgcctgtgataggaaagatacactggcagcggttgagtacatagatgatatatacagtttctacaaggatattgagaattcgagccgtgtctctccaaattacatgaatagtcaatttgacattaatgaaaggatgagggctattcttattgactggcttgttgagggttcactacaaatttgaagctttgga

SEQ ID NO: 52577 - DNA, 247 bp, Glycine max
  Clone ID: PAT_MRT3847_18490C.1
cttcttcagccttcttccctatctcacttaccactctccaccttctttccaaaacactccctttccctttctattcacttcctctactcttccgagatgatgtagatagagaataaaaagagaccagtgtgcagtgagcaagattccccactacttgtgtggcgctgtactgttctgtgtgttggaatttgttcatgggtgaagatggagcacacgcgtcaagagagaaggcacaatacatgggagt

SEQ ID NO: 52578 - DNA, 1841 bp, Glycine max
  Clone ID: PAT_MRT3847_18491C.1
ccacgcgtcgtgggagacgcaatgatgctgtcccccgtaacgagcactgacaggctttagtcttgtagccacagcgaagctgggagcagtgggcggtgagcatggctatcatcacagaagaacccgaaccagagcaaccaacacactcacgctcacagatctcacccaccaaacccaacaacaaccccttctccttctggttctacttcaccctctccgtctccctcttcactctcttcttcgtcttcacctcctccaccctctccccccaagactccaaaacctggttcctcacccttccctcccccctccgccaccactactccaacggccgcaccatcaaggtccaaacacaccccgacgaaacccccctccaagtcttcaccctccaagagggtcccacatcgtccgaaaacatactcattgtccacggccaaggtctcagctcttactcctaccgccacctcgccaaatccctcgccgccaatggcctccacgtcacctccctcgacctccccggacacggcttctccgacaactccgtcgaagtctccgtcgagggcgtcgccaaccggggtttttgggaggtcgtggtacgtctacagtgagattcaagagaggggtcttttctgggcgtttgatcagatgatcgaaacagatcaaattccctacggtaaatcgaaagctaaaataagaaagcctattgatttggggcctaatgatagctttgcgtgggaaaagtggtggggcgggccccaagatgggccaatggaggggttgtggtctgtagcctcagcgaaacagtggagccgggagcggcgcccgggtccaagtgcccagaaacacgccagttttagcacgcatcctggtctcctgcgggcccaagaggccgcagcccccccaataactgatgatacttcctcagtttctacggccacttcctaagtctcttcttgttattgttcggcagcgcctcccctctagctttggcttggaagagtggggtgaggggttgaaagggatgccaatgcaggtgatgtggtctgctgggtggtccgaagaatggagccaggagggtcaccgggttgcgaatgcccttccacaggccggttttcttacgcatactggaggccggtgggctcaggaggatgcagcagttgagatagctgaaaaaatttctcaatttgtcttgtcattaccaaagtctgttaggaaagttgagcaggagtccatcccagagcacgtacagaagatgcttgatgaagcaaaaagcagtggtcatgatcaccatcaccatcaaagtcatgatcatggtcacggacatgatcactatggtgatgcacacatccatggagctaattatatggatgcatatggacttggtcatggacatcatggttggtgaaagtgatcattggattttactggccaacattcacgcttgcagatagtatctctacttcatattgctcacacattgtattaatcaagaagctgaagctcgtaccatatgtagttcttgcaagctaaagcctacatgttgtatgttatttttttttgctgttttacattttcaaaattgctgaagggtgtgagatgatacactaaggagcaactatgcattagaagatacttgtaagggaaaaaaaaaaaacttgacattttttagctgattgctcttgtgtgctctagtttggagctactttttgtgtttggatgttggaattatttttgtaaggtgtttggtgagaagaatttttaacctatgtacttgagatattttagtaatttagatagatgattgtgcaatatttgttatattaattaaaattctccttgtt

SEQ ID NO: 52579 - DNA, 338 bp, Glycine max
  Clone ID: PAT_MRT3847_18492C.1
gctcaactccacctttatataactaaaaactccaaatacatggcggaatttactgcaagcctgttctatcttatacaaaaaacaaaacccctcatcccatctttactaaaatatcaaatccgaaccgcttggcatgaaagctatgattataataaaaacacagcagttttaactaaaatctgcatgtcacacaatgtaatgcaccaataccaactctacatgattaacattcctattcgtaaacatcataattacacactccaacagtaatccatgattaattatgcatatagcaatcatttccctccttaaactcaaaatccaaattttatttcttt

SEQ ID NO: 52580 - DNA, 2403 bp, Glycine max
  unsure (1)..(2403): unsure at all n locations
  Clone ID: PAT_MRT3847_18493C.1
tacatattctacattacgtgaaggcaatgtcactcatcatgagtacatacaagttggtaaaggaagggatgtgggtcttaaccagatatcaatgtttgaagcaaaaatcgctgctgggaatggtgagcagacaatgagtagagacatatacaggcttggacaccgttttgatttcttccgaatgctatcttgttattacactaccattggcttctatttcagtaccttgataactgtcctcacagtttatgtattcctttatggacgcctctatcttgcccttagtggactcgaagaaagtttgaaccaaaaaagagctattcgagacaacaaagctcttcaagtagctcttgcttctcagtcagttgtgcagattggatttttgttagccttgcctatgttgatggaaattggcttggagaggggatttcgtgaggctttaagtgaatttgtactaatgcaactacagttggctcctgtatttttcacattttctcttggaacaaaaacacactattatggaaggacattgcttcatggaggtgcagagtacaaaggcactggtcgtggttttgtggtgtttcatgccaaatttgctgataactataggctctattctcgcagccattttgttaaagggattgaattgatgattctgcttgtggtctaccatatatttggccatggatacagaggagtggttgcctatattttaattaccgtaaccatgtggttcatggtanggacatggctttttgctccattccttttcaatccatcaggcttttagtctagttcatgactacacatattggcaaaaatggaattgcaatcttggaggcattggtgtatctcctgaaaaaagttgggaatcctggtgggaaaaggaacatgagcatctccggcactccggaaagcgtggtatcgctactgagataatattatccctccgctttttcatttatcaatatggccttgtttatcacctttcaatcactgataagactcaaagtgttttggtttatggtctttcttggatgataatctttgtaatattgggtttaatgaagggtgtatctgttggcaggcgccgcctcagtgcagactaccaacttctatttcgattgatcgtgggttctattttcttaacattccttgccatcttcataatcctaatagcagttgccaagatgacaattaaggacataatagtctgcattcttgcagtcatgccaacgggctggggaattctgctgattgcacaagcttgcaagcctctcattaaaaaaacttggttttgggggtctgttcgagcacttgcacgcggatatgaagtaataatgggcttgcttctcttcacaccagttgctttcttggcatggttcccatttgtttcagagtttcaaactagaatgcttttcaaccaagcttttagcagaggtttgcagatttctcgtattcttggtggacaaagtaatgaacgctcctctaaccacaaagagtgacactgaaatttcattttcatcgattatcttttatcaaacgtttcgaccatgtgtcgttacattattttaagaggttcatatactctttaaataatgtgaccacatagattggatgataatgaaagataataagatgcttattcatatatacttgcgattttgtacatgctttagtatggattacagtttaaaagttgtatcagaacagctaggctctctattctgtaaattgtgctaggttttataattttatatagcgtttaaatgcctttttaataccataattttgagcattcttgcagtcatgccaacaggctggggaatgctgctgattgcacaagcttgcaagcctctcattgaaaaaactgggttttgggggtctgttcgagcacttgctcgcggatatgaagtaataatgggcttgcttctcttcacaccagttgctttcttggcatggttcccatttgtttcagagtttcaaaccagaatgcttttcaaccaagctttcagcagaggtttgcagatttctcgtattcttggtggacaaagaagtgaacgctcctccaaccacaaagagtgacactgaagtttcattttcatctgttatctttattatcaaacgtttcaaccacgtgtggttgcattattataagagtttcatatattctttaaatgatgtgcccacacaaattggatgataatgaaagataataagatgtttagtttattcatcatatatatatatatatatatatatatacacacttgcgattttgtacatgctttagtatggattacagtttaaaagttgtatcagaacaggtaggctctctattctgtaaattgtgctaggttttataatttataatatagagtttaaatgccttttaactatcca

SEQ ID NO: 52581 - DNA, 374 bp, Glycine max
  Clone ID: PAT_MRT3847_18494C.1
ccgttttgatttcttccgaatgctatcttgttattacactaccattggcttctatttcagtaccttggtatacccggaacctaccttattgtggcatatataaatatgatccatcgcaaatactgactttgattttaacagataactgtcctcacagtttatgtattcctttatggacgcctctatcttgcccttagtggactcgaagaaggtttgaaccaaaaaagagctattcgagacaacaaagctcttcaagtagctcttgcttctcagtcagttgtgcaaattggatttttgttagccttgcctatgttgatggaaattggcttggagaggggatttcgtgaggctttaagtgaatttgtactaatgca

SEQ ID NO: 52582 - DNA, 537 bp, Glycine max
  unsure (1)..(537): unsure at all n locations
  Clone ID: PAT_MRT3847_18495C.1
ggctcgtgaatgaagggtgtttctgttggcaggcgccgcctcagtgcagactaccagcttctatttcggttgattgagggttctattttcttaacattccttgccatcttcataatcctaatactactggccaatatgacaattaaggacataatagtctgcattcttgcagtcatgccaacaggctggggaatgctgctgattgcacaagcttgcaagcctctcattgaaaaaactgggttttgggggtctgttcgagcacttgctcgcggatatgaagtaataatgggcttgcttctcttcacaccagttgctttcttggcatggttcccatttgtttcagagtttcaaaccagaatgcttttcaaccaagctttcagcagaggtttgcagatttctcgtattcttggtggacatagatgtgaacgctccttcaaccacaaagagtgacactgaagtttcatttttcatctgtatctttattatcaaacgtttcaaccacgtgtgggtgcattantataagagtttcatatattc

SEQ ID NO: 52583 - DNA, 2195 bp, Glycine max
  Clone ID: PAT_MRT3847_18496C.1
ggctcgagcgggattgttcactgtaacaccctttccttttcatttattgccgcaggagcatgcgcaaacgaggcagagaaaggcaccgcaacacaaaagcaaccaattctctctctctctctgatttcctattcctttatatcagtttcctcaccttctcactttttgaacgagacacagtgaggaaactgaacccttttgtttgttttttcagctgaaaattcagaccaatatatattttgagtattttttttcctttgatttcgtggaaagttattatcacagaatctgagggttttgtagacagaacttcaggtttaacaatgaagaaggttcccaagaacagctgcaagtctgcatcacacaggctctttaaggacaaggcaaagaaccgtgtggatgacttgcagctgatgttcctggatctgcagtttgctaggaaggagagccgcacggttgatgccgtggtgcttgaggagcaagtccatcaaatgcttcgcgagtggaaggccgagctcaatgagccctcgcctgcttcttcgttgcagcaaggtggcagtcttgggtcattctccaccgatatctgtcggcttttgcagctttgtgaggaggaagatgatgcctctagtccattagctgctcctaagcctgaacctaatgatcagactctgcaggctgggggtaaggtcatgttccaagagggccaacagcaacattatttcccattggttgatgagtgcaaacactccacctcaagtgttcagaatgtggcagctaacaacccagatggacatgctttagaatatcatcagtttgatttacatcaggactatgatcatggcttgtatactggttttaatggtacaggttattgtgaggaggatgcgattcctcatatatctagctacctaccaagtatctgccctcctccttctgctttcttaggcccaaaatgtgcactttgggactgtccaaggcctgcgcaagggttggactggtgccaagactattgcagtagctttcatgctgccctagctttgaatgaagggccaccaggcatggccccagttctacgacctgggggcattggtttgaaggataatttactttttgctgctcttagtgcaaaggcacaaggaaaggatgttggcatcccagaatgtgagggagctgcaactgcaaagtctccatggaacgcacctgagctctttgatctgtctgttcttgagggcgagactattagggagtggctcttctttgataagcctcgaagagcatttgagagtggaaacagaaagcaaaggtcattgccagattatagtggacgtggttggcatgaatccagaaagcaagtgatgaatgaatttggagggctgaagaggtcctattatatggatccacagccactgaaccattttgagtggcacctttatgagtatgagattagcaagtgtgatgcatgtgccttgtaccgattggaactgaagctagttgatggtaagaagaactccaagacaaaggcagcaaatgattcagttgctgatctgcagaagcagatgggaaggctctctgctgagtttccacatgacaacaaaagggctgccaaaggcagagccaaaattaatgccaaagttggcataggtggtgtctatccagcttcacacagagtgactccactgaatggaacatacgagtatgggttagctgcaccatatgactatcttgtcgacaacatgggtgactactatgggacatgatctgcaagatgctctgcattcaacttggctatacactattttgtgctggttttctattttgcccgtctcaatgctcttttttttccctccttttttcaagttacaagaaatcaaggtcattttttgccttgtcaagatattttgtgaatagctcattctcactggagtgcagcattaagaagctgctggatgctgaattctaactgcaaaatttggtgtatagtatatgatgagcaatttggtgaatgctagaatctcattagcatcacctgaattgacctatcgtttaggctaaaaagttgctgtgattcagctgactctaatttccaaatcatgctaatgtaagttgattacagtattttatggtattagctgctggacaaaccttcgatggtacattatattggctcagtaataaaattgttttagtctccgttt

SEQ ID NO: 52584 - DNA, 168 bp, Glycine max
  Clone ID: PAT_MRT3847_18497C.1
ccatcccccatgctttaatacgaatacaaaattcataatgtgacaagaccctcaccccttctaactagagtaccttaagaaagcctgcctcaggcataataatgatatgttgctaacctacaaacgtgaccacagctaaccatctattcccactataatgttcgtctt

SEQ ID NO: 52585 - DNA, 338 bp, Glycine max
  Clone ID: PAT_MRT3847_18498C.1
cgggtggcaaaagaacaacgaaggggaatgtctgagagtcgggtctatacgtgtcgggctgtgcggatcttcacttacactctccaaatcacacaccaaaccacgcagcgagagaaacctaaatgccgttctaagtgacactcaaatcgatcgactatggatgcggtgtattacgtgaatatattgggcatcggctctgtcgactgccttcaaattgtcttccctccgtcgatagtcactcgctcttgcaaagcacacgaagcactttggctgtggagactaaatcgctggcaaacttactcagattgggaacagattcaggggagatgaccagcctg

SEQ ID NO: 52586 - DNA, 294 bp, Glycine max
  unsure (1)..(294): unsure at all n locations
  Clone ID: PAT_MRT3847_18499C.1
gattgcctggggggtgcatcagaggacagagagacaatcctcccaaacaccatgtatagccttacatgtacgttacatcaccacccatacaactatcatcagaccatngtcttctccagaaaaatcttacaggccaaatggtacaaacttcaaagcatgcacaagtggtatatttaccaatgcactaactcacgccaacataattactaacctttggtgatttactgaacacatgccacccaatgccaacactattggcttggacatacttaacgtcgccaaatatacgtgtgt

SEQ ID NO: 52587 - DNA, 151 bp, Glycine max
  Clone ID: PAT_MRT3847_1849C.1
gagactcaatctctatctctctctttctttgccctctctttctccatctataaatgtcagagttacgctgccagatgatgcagcagccaggacccggcatggcaccttccaccatgggccatcaaacgccgcaacagtaccaacatgctcc

SEQ ID NO: 52588 - DNA, 258 bp, Glycine max
  Clone ID: PAT_MRT3847_184C.1
gcaccagctgttttggattaagctatatttcatatgatagatatatttggtttctcctcctgtggatggataagtatgttattgccttcgacgaaatttcgtcatttattattattattattgtgcaagaaaggaaaaatgcatattctacaaaaaaaaaaaaaaaaaaaaaaaaaaaaaaaaaaaaaaaaaaaaaaaaaaaaaaaaaaaaaaaaaaaaaaaaaaaaaaaaaaaaaaaaaaaaaattcccggggcccc

SEQ ID NO: 52589 - DNA, 684 bp, Glycine max
  unsure (1)..(684): unsure at all n locations
  Clone ID: PAT_MRT3847_18500C.1
tacggctgcgagaagacgacagaagggggatgcatgttcattcttcactgtaacaccctttcctttcatttattgcctggggagtgtgagcaaacgaggcagaaatgaaagtcaccaacaacacaacacaaaagcaaccaattttctttttctctctctttccctcattttctatatcagtttcctcaccttctcaatttttgaacgagacacagtgaggaaactgaacccttttgtttattcagctaaaaaatcacaccatttttttttctttttatttcggggatagtgatttttatcacagaatctaagggttttgtaggcagaacttcaggtttagcaatgaagaaggttcccaagaatagctgcaagtctgcatcacacaggctctttaaggacaaggcgaagaaccgcgtggatgacttgcagctgatgttcctggatctgcagtttgctaggaaggagagccgcacggtcgatgctgcggtgcttgaggagcaagtccatcaaatgcttcgcgagtggaaggccgagctcaacgagccctcacctgcttcttcgctgcagcaaggtggcagtcttgggtcattctccaccgatatctgtcggtattgcagctntgtgaggaggaagacgatgcctctagtcagntagcttgctctaagcctgaacctatgatcagac

SEQ ID NO: 52590 - DNA, 314 bp, Glycine max
  Clone ID: PAT_MRT3847_18501C.1
atccagttgaaattagtattcgtgttcaaaggcgcagttcaaaaatccttctacaattcggtgatcatggctgaggtcaaggttctgcaacactgcttttgtcgcagtgggcagcctatgcctttagaggaactttatgtctgccgtgaatgctatacttttgttgctccttttgtgtaaatcaagagatcgaatcgtacttctgcacgaactgtctggaaaatgttcttcagtctgaggcagcactattattcaatatatttgccaaatgtttccagtgtcctttttgccctaataccttcccttccatcttc

SEQ ID NO: 52591 - DNA, 575 bp, Glycine max
  unsure (1)..(575): unsure at all n locations
  Clone ID: PAT_MRT3847_18502C.1
gactcacgacgcgctcgagctcatctactcattttcattttctaagtactttgctctttctcacattcaaatgcaaagcccgccaccctttttcttccttgatgtagcaaaattcaaatcccactttagattgttcccaattcccattgccttttctatttggaaactatggctttatcattggaagtttgagattccaacacccccatttcacttttcctttttttggttttaaaaatttagttttttttcttcttttcttctcactttgcttgtttcccttttgtttcctagatcattcaaaacatgaagaagctctcatcaacttcttctcatgcatccccatcttctttatccaccacaagtttggacccaactatgtgcacctccaaaagcaccacttcagggtgtctcactgctatcttgcgcaaaattctttgctctgatggccttccaagggaccaaattagagaacttgattcatcanatgctatgttgagtggcaaagatcaaaacttgaagggctagcagaatactgagatcgatactactactactactacttctgctactag

SEQ ID NO: 52592 - DNA, 544 bp, Glycine max
  Clone ID: PAT_MRT3847_18503C.1
tgttactgtaacccttcgttgtagtgcagcagaggagaaggaggcttcaacttccaccactagcatcatcttcaacacagttggcagagctcattacgccttcgatatttattccctcccaattcaacaaccacccacccctgaccgagaacttcgactcaccgatggccacttcgtaaatttcaacggccacttcctctccaacttccccccacacactcccctcctctccaactcgttcacgtcaccgagagaaatgacgtcgtttatacttccaccaccacaaggagaaaaagatcggttttggaatccgttaccgcaaacagaatccaaatccctctcctcagcgacactactagtactagtcaagtttccatcaaaggcaagcccaatgtcacccccgatggagaatatttaatatacgtatccacccggattgattcaccgagctgactcggttggtttcacagtagccctcagcttttactcgagagtgttaagagcctcgtccccggtctatcgctattccggttcgtcggtgagt

SEQ ID NO: 52593 - DNA, 357 bp, Glycine max
  Clone ID: PAT_MRT3847_18504C.1
gttgagccccgctaccacatgtgttagcagacgaacattagtaagggtgacccaaccctaaggtataccttctctatccctgctcgaaactaggcaaatgcaatcagacactcgactactgaacgaagacatcatgaaaaagaatcaatcatctcattgatcgctgaaacgctaccatgacagggtaggtgaagccgagcaagctcacggcgaacgagatcgcgtcgaacgtggactcggcgaccacaaaccgcggcggcgggaaggcccgtatcaaggaccgacccgggttggagaagggcggtctcaccaaatacgagagccctaactggaaggagactgagccggacgtcaaat

SEQ ID NO: 52594 - DNA, 457 bp, Glycine max
  unsure (1)..(457): unsure at all n locations
  Clone ID: PAT_MRT3847_18505C.1
ggtacgttcaagatctcatttggtcatctttgaggaagatcatgcagatgttaggatgggtgaagaaactctttctccaactaacgaaccccctgaagaatcattagctgctactaatgaaccccctgaagagccaatagctgctactaaccaaccccctgaagagccaatagctgctactgaccatccccatgaagagccaatagctgctactgaccanacctctgaagaggcaataactgctacttctcctgttactgatatgcaagttgaacacaatcgaaatgttgctgtcaccccccctgccaccgcccaagcaccacatgaagatgattatacgagccctaatagaagagattgcttcaatatgccttcatctcataacatatccattgcttctttgaatacaaatattgcatctgagagaatgcatacactagattatgcagtgtcacct

SEQ ID NO: 52595 - DNA, 448 bp, Glycine max
  Clone ID: PAT_MRT3847_18506C.1
cgaataccttgccgctgacgttttggagcttgtgcccaacactgttaggaacaacacgaagacgaggattgttgctatgcacattatacttgtggcgaggaaccatgtggagttgagcgccctgatggggtctgcgaccattgccattggtggcgctcttgctaacatttaccacaatttgatgcccaagaaggttgctgtccaggggaagccccatactggatctgccagtcaggaaatctaaattcttagggattcatctttgttgggattataggggaccaatggaagaaaatggctctaaggtctgcggagcagataggccgcacctttaagcttgctaatgccctgtactacattgaggagttgcttctcctctcaacaaaataaacatgctgcctatgctatctatattgtaataaagatgccgttcaaattaggggcacct

SEQ ID NO: 52596 - DNA, 316 bp, Glycine max
  unsure (1)..(316): unsure at all n locations
  Clone ID: PAT_MRT3847_18507C.1
agaggatatctactgtatctaatcgaanatanatgaaacaccagcccacagactacggccgccctttccttttttttttttcttcaaatatttttctctcactcccaaatttaactaaggggacgtttttttcacaaaacctttccccaccctccttatttcacaacataaacattacttccaacctctctaaccaccttatcctctaaaaaaccttccttcaactttacccaattttacctttaccaaaaatttaaaattcattaccaaacactttaccttctttgctaaaattcttcaaccaacccacctaaaa

SEQ ID NO: 52597 - DNA, 585 bp, Glycine max
  Clone ID: PAT_MRT3847_18508C.1
agaagacgacagaagggatcatatctaataattttcacatttatgtctaattgtcattgtactttattgtagtaaatttctaaggcatccattgcctaagaaatctcgggcagtaagtagacataaccgtaacgtgaataatcatcaataatggtgataaagtatctttcctttccgaaagaactaacatcagaatgtccacaaatatcagtatgcacaatttcaagaagctgagtgtttcttgtagctcctttctttgtatgttttacttgttttcccttaatacaacccacacaaatatttagatccgtaaaatctagatcaggaagaatttcattatttattaatttttccatcctttctctagaaatgtgacataaacgtttatgccacaagaaagcagatcgttcattcactaaactacatttagtgccaacattatgatgcagagttaaaacagtcagcatacaaactgtctattttcaatttatataaactatcacaagaatatcagtaccaatgagatgattatgcttaaataaattgaaacatccattatcaaaattaatagagtatccagtaaca

SEQ ID NO: 52598 - DNA, 375 bp, Glycine max
  Clone ID: PAT_MRT3847_18509C.1
ccgggaaaacaactattggaggttaaaaaatccttccggggaaatggaaaaacctcaaacctatggacccataaaaatgggggggcaatggggaccttcaaaccccacaaacggggcccaccccccaaaatactttttatacccccccccgggggccggggcccaacacaagggcgaaaaagctcgatacaaaagggctgaagggcaccgtctccgcgcggtaagcccaagagaaagccaatcactgcaggctcctaacttctatggcgcggggcatgggttatatgcgaccttgactagaacaaaagtggtgaaagaaaactgccgcataacataggcagtcacacagccattatatgcgcttgccgcataaaa

SEQ ID NO: 52599 - DNA, 704 bp, Glycine max
  Clone ID: PAT_MRT3847_1850C.1
gagacaatggcctacaattcacaaatcgaaaactcaatgaattcccaagtggcctcaatatcaagcatagggtgacatcggtaaagcaccctcaaaccaataggcgagccgaggcagctaacaaggtaattttgggcgatctgaagaagcttctagatggagccaatggaagatgggtcgaagatcttgtggagatcttatgggtgaattggtgccccccccccccccccaatctacaacacatgagacccctttttagttgatatacgggataagtgttatgttgccaatcgaggtgggagaggtctttctctaaagacattacttcgctgaggtttaaaataaagaagcactacaaatagacttagacttgatcaaacaagtacgagaagatacggtcatcatgacctaggcattcaagcaacgcatgacccgatgctttaactctaagctcccatcaacagtttgaggaaggggacctagtatggaaggaatacagagaagcctagaagttcttgttagatcgaaattcaccaccaactaggaagggcccttcaaaatccggcacaattcgaaaaacggagcatataagttagaagagctatctgggaaggttgtcctgaggatttggaactccatgcatttgaaagtttattatagttaggttcatctctgtaataagtggtgtactctttttttccaaa

SEQ ID NO: 52600 - DNA, 326 bp, Glycine max
  unsure (1)..(326): unsure at all n locations
  Clone ID: PAT_MRT3847_18510C.1
ttcnngcacccgtacgtaagctcggaattcggctcgagnggcngttncggcaaccntcgntcttaancccacggggcaacgtnngatcngtngaantncttctntnatntgcactctgngatttcgctacannctnactccgcttcgncaccctatggnggaanaacaacagcnacnacgatgcctncatgcgcaancagaacgccgccgttcaggcccgnancaangtgnanaaccgttcnaacgnccttcagctcanactgnttggncagngtcacncaancggtctannagcgaanctgttgangctcttcgagcctaggcnn

SEQ ID NO: 52601 - DNA, 436 bp, Glycine max
  unsure (1)..(436): unsure at all n locations
  Clone ID: PAT_MRT3847_18511C.1
atacataaatgcnaggcattaatagaaataatgcaaattaaaaaagaaatatggttgctttcactgagaagcaagatgctttggtgtttaccccattcgaagcattcaaggcaaacattcctcaatacagcgttgtgttctatactccgatactgccagacgcacctgcacgcaaggacttgccctctcttctcgcatacgcagcagacaaccctaccgataagcctccggaacacgcccgaaaagactacagaatagccccgaataccccccgctccccaccatactctaccaaccccgactcgccacgcccccaagccgcggctttttttttttccgccccccccccccccccaatccacaccccccccgccccccccccccccgcccaacaacacaaccccaacccccccctcacccttttatagcccccccc

SEQ ID NO: 52602 - DNA, 671 bp, Glycine max
  Clone ID: PAT_MRT3847_18512C.1
gatctcagggaggcaagaaacaaggcattatggagaaacttgatttagcgacagaatcatcatcatcgtatcctagtaatttgtgggactgtggcagcacgctatatgactcgttcgagctcaactccttcaaacgccaactcgactcagccatagctaattcccctataataagtagaaccctttccatgcctcatttaccggaacgttcacttcacgcgccgccggagcaacctcccacggtcatgtcccgaaagtccttcaaattttctcgctcctttcacaaactccttcgctccgttttcaagtccaacagtaaatccagcaccactaccaccagtttgagtttccaagtgccagagaaatactccaaagagcgtttctacgttgtttatgataaatctggaccggttctctccaccatccccgaagttccggaatttgagattgctgcactttcgccggagatctcttccttcgtcggaaggtcagcgtcggagcgcttcactcctaccgtaatcggtatttcctgcgcttagttagcagttagcacaaatcgctcgatctagtcttatttgtgaattttattttttttgttactcaccttgagtaggagatttaattcagttttattttcagaatttgaaatgttagtggttaagaatttaaga

SEQ ID NO: 52603 - DNA, 680 bp, Glycine max
  Clone ID: PAT_MRT3847_18513C.1
aacgaaaatgaaatcttattgaaaatacatggtattacgcccacggtaagctacacccaccgggaaatgtttgaccataccccaaatttatttaacagtgtggccaagacgtgcagatataagctaaggaaagataaacgcttttgagccctacaattttactattctagctgccatgcttgatttcattatcggtcacaggtgaagacatactagtatttgcaacctcctttaagcatcttcttactattaaatgaatataaaagaattttaatgtgaggttttctgatgataaaacaatgaatgtggaggtgcaactaatattactcggcaaccaagctagagaagcatgggcagctgcacacgtacaatattccatgattctccttatctcctccttcagttcccactcccttccctctccccaattatcttccctttggagtaccagtttaccctagaaaaatattgtaggagtgagccttctagtaacaaatcgtagatcaacttccattctgcctactaatatacgcttccaactttcctgttgcggccaatatgagacctaaaaacaagcagatggtctcgctggccgtgatttgaattctggatggaattgtgcacctacatagaatggatgacttggaagctctaagatctccattcgttttccactttca

SEQ ID NO: 52604 - DNA, 103 bp, Glycine max
  unsure (1)..(103): unsure at all n locations
  Clone ID: PAT_MRT3847_18514C.1
ctcggaattcggngctagggcagctactgatgccctgatggaaagatctccatcatcaacaagcatgtgagcgcaggtctgtgattagaagtagagggaagcc

SEQ ID NO: 52605 - DNA, 1414 bp, Glycine max
  Clone ID: PAT_MRT3847_18515C.1
attaaagaaagaaaagaaaaccttcattaattaaaaatacttaaaaaataaaattcgcatgcagtacaaattaatggacctaaaaataaaattattttagaccataatgacgtagagggtggttattcagcactggacaatactgatattagatgttgaaacagaaggaaatgcagtgtgtccagaagtaatatctacgtatagatgatactaggaaactactatataaaattgagcaatttccataacagactgtactgaaaacagtataatccagcatacacataaagcccaaaaaaataaatccaacatataaaccagattgtctagcaaactgatctactcactagtaatactgagtaatctagctaacgagaatatcccttccaattttccctcctattgttcctgaatgcacagcaccctatggagtatacaataatgagaagaacaaggaatacgatgttaacaacagccaccctcttccattcagtcttgaagttttgcagaaagccagccttgcatgattggcaattgaagcacagaactgtttgattgttattccaagcatcacagtcaggattgttgtaactggtcacatttccaggcttcgtccagctcgttgaattctcataggtaaataggcattcttctgcaggtttacagcatccagactgaagcgcggacaggtgctcggtgtaaaactgagtaacggtgtcgtttagaaacttggattgaaactcagtgcagactttcccagaatgcaagcaactactgatcctgttccacgtcttagtgttattaaccttcttctgcagccaattcgagtaatccccaagcctatactctttataccctctattagaaacaacttcaccagcgcccttgttggtaacgacgaaagcgaaaatggtgaaggcgaagagaagaacgatgaggacaaacatgacgaggaggtagagccagaggagccacgacacgcggcagcacgcgccgacgaggccggcgagtgagacgagcatgaggaagacgccgagcgcgatgacgggcttctccagccaccgctcgcactcggtggcgccttgcttgctcagccacactccggccaccaggatcgggatggacaagaggaaggtgaggaagttaaggagtccgataacattgttgctgaaccgaaccatgatgaatcaatgagggataagtatttgcagaagaagaagaatgattgttatatgtatgatatgaatgaaggtagagaaatagttagggagaatgattgtttgtttgtttctagtatatacatatgcgcgtgatgtttgttgtgacttgttagtcggtaactattgacaatattttcagatattaatgcacacgccacggtacacgcgatttcgtcgttggagcggacgcgtgg

SEQ ID NO: 52606 - DNA, 2734 bp, Glycine max
  Clone ID: PAT_MRT3847_18516C.1
gtccagaagtaatatttacgtatagatgatactaggaaactgctatataaaattgagcaatttagataacagactgtctactgaaaacagctcatacacataaagcccataaaaaaataaaaaataaaaatccaccatataaaccagattgtctagcaaactcatctacacactagtaataatactgagtaatcttagctaacgagaataacccttccaattttccctcctattgttcctgaatgcacagcaccctatggagtagacaataatgaggaagacaaggaatacgatgttaacaacagccaccctcttccaatcagtcttgaggttttgcagtaagccagccttgcatgattggcaattgaagcacagaactgttggatcgttattccaagcatcacaatctgggttgctctgattagtcacatttgtgggcttcgtccatgtcgttggattcacatagctaaactggcattcttctgcaggtttacagcatccagactgaagcgcggacaggttttcggagtaaaactcagtaacggtgtcgtttagaaacttggattgaaactcagtgcagactttcccagattgcaagcaactcctgatcctgttccacgtcttagtgttgttaaccctcttctgcaaccagttcgagtaatccccaagcctatactccttataccctctattagacacaacttcgccagcgcccttgttggtgacaacgaaggcgaagatggtgaaggcgaagagaagaacgatgaggacgaacatgacgaggaggtagagccagaggagccacgacacgcgacagcacgcgccgacgaggccggcgagtgagacgagcatgaggaagacgccgagtgcgatcaccggcttctccagccaccgctcgcactcggtggcgccctgcttgctcagccacactccggccaccaggatcgggatggagaggaggaaggtcaggaagttcaggagtccgatcacgttgttgctgaaccgaacccattaacgagctgaagaagcctgttgtggagaaagaagctccagggcatgccatatgagggcatgcacgtacggcctcggaggggaaccagaaaattatgttaacaaaataatctggaaccctaatgtatcagtgtcatcatcagtgtgtagtttaagctagctttgctatggttacgttctttgagatgagagtcttgatgaacagtaccattctgatgtattgctttccttgaaagttaatgcatgcttcttatcttctgtctagctaaaaaaaaaaaaaaaaaactcgagttttttttttttttttttgtaacgaaaatgaaatcttaatattaaaatacaaggtattacacccacggcaagctacacccaccgggaaatgtttggccatacctgcggccaagacgtgcagatataagcaacggaaagataaacgcttttgagctacaattttactattctagctgccatgcttgatttcattatcggtcacgggtgaagatatactagtatttgcaacctcctttaagcatcttcttaccattgaattaatataaaagaattttaatgtgaagttttctaatgataaaacaatgaatgtggaggtgcaaatgatattactcggcaaccaagatagagaagcatgggcagctgcacacgtacaatatttcaggattccccttatctccttcagttcccacacccttccctctccccaattattttcccgttggagtaccagtttaccatgggaaaatattgtaggggtgagtttctagtaacaaatcgtagatcaacttccattctgcctactactaatatacgcttccaacttccctgttgcggccaatatgagacctaaaaacaaagcagatggtctcgctggccgtgatttgaattctggatggaattgtgcacctacgtagaatggatgacttggaagctctaagatctccattcgttttccactttcatccttcccaacgaattttaagtccagctttcttctaaagtttcaataacatctgggtttacctcgtatctatgccgatgttcgtttcatccacatactctgaattgccgtacagcttggaagtgatacaatcagatgtctgtaagaggggttcttcgagatccaagcctcatggtacttcccatatgcgtccgtgaaccctctggcatgaaaatcacaacaggattcggtgtttgggcatcaaactctacactgtttgctctttcccaacccaaaaccgatctagcaaactcaattacagaaatttgcattcccaggcaaatccccaggtaaggaacactgttttctcttgcatatttggcagctagcatcatacctctcacaccacgatctccaaatcccccaggaaccaagacacaatctgcgctcttcaaagtcttccaggccgcagcatgtgcttctggtgtctgagtaaaaccacaaaaataaaattagccttacatgagtgacatccttcaaagtgacaagtaacctatttttttcagatgcagtttgaaagaaaacattactgattctgcactgtcatcttcaaggtcagaagctgcaatccagtcaattgatggcttgaaagagcgtgcaacacaagcatgcagaagagcctttacaacagataaatatgaatctgttagacccacatactttcccaccattgcaatcccggacgcgtgggtcgagccgggaattccggac

SEQ ID NO: 52607 - DNA, 326 bp, Glycine max
  Clone ID: PAT_MRT3847_18517C.1
attctttcgtttaaatgaagctagagctacataggggcacacttaattagcgtgggtcaacacctcaaaacttgggtacgacagatcaccaagagagagagagagagcgagagaaattgaaaaacctatggtcgccaacagtactccgactttggccttttgggcacgaggtactaatttcacactgtagagagctagagagaacgagatcgaacactcaatacagatcttacaatgacatcaaactaaggaactgaacaccctttccattgtgttgtagttgtttagtgccattcatttttatttttttattgccctatgttttt

SEQ ID NO: 52608 - DNA, 274 bp, Glycine max
  Clone ID: PAT_MRT3847_18518C.1
ctatagcggccgattttttttttatcttaattttttttttttcggggaatggacacactataatgtcttgaggttttaaagttgctgccgtaaagatcctgtgtcctgaacggggttacgatacacaggtggggtggaaaacacactcgcatttaccgtttcttaccaaaaagttgcaataccaatgcaacacacctggacccgcaccatatatttttcaacgaaaagaaacaagcacagccaggtgtaatctcggctccttttgcatgggggt

SEQ ID NO: 52609 - DNA, 391 bp, Glycine max
  Clone ID: PAT_MRT3847_18519C.1
ttcccggcggacgcacgcgtacgcccactctttctcctacgcgttcttgaatatttacctcatctgcaacgtatcaatgggagactgcttcatatagaactctgacccaaaaaactactgtcctgattctcgcacatgccgtacctgtctgaatacacatgtactgatcaagaaaaatgaccttatgtgctgctatcactgcttccttaacaataccaaggaaatactcttcatcaagtacatctaaaagagcacttgtcaactactgaccaatatccaattctgccactactatatttttaaaaccttatgtttgaagaaacttgagactgtattttttaatctaagtaactatcatactttatttgtgatactattacacactctatat

SEQ ID NO: 52610 - DNA, 468 bp, Glycine max
  Clone ID: PAT_MRT3847_1851C.1
tctttccttaagcttattgttttaatttaaaatgtcaaccattggtagtcttgtcgttctgtcactggaacacatctggttctggaagcgagcctcgtgaacgtactctttacgaaagagaagcggagaaggctctaaaactcagaaatgtggaagttggtcgtgctgtcatggcggaaaaaccaagtgcaggccacgaaggcgatttggaagttcataccaacgtttacgccatcagcatgggtccgctggatatctaccgttacgatgtgtccattgtcggcgaacgtggtggcgaacgatcgggagtcttgttcaccaagaaatataaggatgatgctatcgctgtcaatcgtcgtgactgttgtcgtgaagtcattcagtgctttatgaatgttcatcgtgaccttgtccaacatgccaaatgtctctacaatgtacctcagtcgataatgtacactttgaagc

SEQ ID NO: 52611 - DNA, 134 bp, Glycine max
  Clone ID: PAT_MRT3847_18520C.1
ctcactctgagtctcctaatcttgtcagcttctcatcatcaatcaccctgaaccacggctggaacagataaatagagaatgtagaacacacactcacatacttatacggtaaactgacatcctttattactaag

SEQ ID NO: 52612 - DNA, 382 bp, Glycine max
  Clone ID: PAT_MRT3847_18521C.1
gtcgaccccgcgtccgactttttctacttaccttttctcttaatccaaatacgatggcagccatgtcatccacaatcctctcttgaaaccctatattttcattcttcaacgtacagtcccgtatatatggctttccgtctctgcgtccaccggccagctactccttctccttctccttcctctccgctcggaccgattccactcgccttactcgcttgccctcccgcgtcgccttccgagcccgctcgccccctcgccgccgcgccctcgtctcttcgcgcctcacctcctccgggtcccccggcgccgggggctccctgtcgccgggcaccggcgggggtggcgtcgcctgcctgctgctccgcgacttctctccgcggcg

SEQ ID NO: 52613 - DNA, 812 bp, Glycine max
  Clone ID: PAT_MRT3847_18522C.1
gaaggtaagagggtcttattggttttatttataaattttctcaactcaactctcaccatgaggaccagttgcttcctaagccttcccccttttacttcaaaccaaccttccattcccccaaaacatcctcaactttcatcggtgaagaacgaagcatgttggaagaggcaatgcgttgtgatgggagtggcatccattattggactagaaatgtgcaattcagtggcaatggcccacgaagcaattgaaatcaagaccatgccatttagtaaccaagtagtatcaaatagcaattcttacggtggcgccaaatggagcgagaaaagaatgtgcccaccttggcaaggcaattcgctcgaaacgatcgtgccggagaatcttccccggccgtcggcacggcggagatacgaggctgttcgttcctcctccaagactgcgccgccgctctccgccccgatcatagtccaaagcaacaagggcagttgcttctccatgtgaaaaatactaaatcaaattaaatttacttgtacatgattattgttaatttaattgcttggcctttcacacaaacttttaatttcataatcatatccatgtgtcaagtttttatttcttggatgaaaacttcaaaaatatctaacgaataattgtatgtaatgaatagtactagtactggattggatttatgagttttagtgattgtagtccatgtggtccaattcttaatcgttacctatcaaaaaaaaaaaaaaaaaaaaaagagaagaaaacacacaaaaagaaacaaaaaaatagacagcaccctaacacgg

SEQ ID NO: 52614 - DNA, 167 bp, Glycine max
  unsure (1)..(167): unsure at all n locations
  Clone ID: PAT_MRT3847_18523C.1
gccatgacagtnataacaangnctccnttgttatcttantctcttctttccctcgcgttcttcttcactctcaagtacnttnnccaaagaagcagaaaagnacgananctgccacctggtccgantcctctncnnataatcggcaaccnccgctccataanctctct

SEQ ID NO: 52615 - DNA, 1404 bp, Glycine max
  Clone ID: PAT_MRT3847_18524C.1
ggaaaagtatgtttttaagattttgatagtttttctatcatcagttatttcattattctagaatctttgattcttatagaaatagctctaactttaagtacttttttctatgcctgcttgagcaatagccaattgccaatacttgttctgatggatgtttttactaaaattctgattttttaatgttgtaataataactagtactgtcagttcaccatgagaaaaaatgattttgactatctgagtatgttagttaattcttagtagttagtttattgattgctaagtggacttaatgtgaatcgagtgatcttttttatcgttcgtcgacatcaggtgaaacgaacattaggccaattcacaccagctcagtgggacaaagacgagtggcatccattgcttggtccttggcgtttcattcaagttcttagtctttgcattgtatttttgacagtagagctcaacacattctttttgaagttttgtctctggatacctcctcgaaattcagttgttatatataggttgattttgtggtggctacttgcgattccaacaattcgcgagtacaactcataccttcaagacagaaagccagtgaaaaaggttggggcatattgttggctctctcttgccatttgcattgtggaacttctgatttgcattaagtttggacacggcttgtatccaaaaccaatgcctatatggctggtaatattctggtcgggtgttggagtgaccattgttacatttttgcttttgtggtcttggcaactccatcgcagtttagggaacaaaaagaggcgataatttcacaattgctgcaagttacaatgctgcattattctttgattgattccttcctcatttttatgggtaacaaaccatagccatacacatggtgtaaatactatcatcaacctcataattaattgtaaatgaatattaatttctcctagcttagtttagtggatcagtttctttgggcggcaaattatagttccagctggtagagaggtgtacttattattattattatttatggggcttgcttctgaataggtttccaccattggtataaattggccaatttcttcgcctccatcggaatgaatcattctgaaacgtgtatccagtcatttcaaggaaattgagtgaagaatgcttttgcttcatcttagtatagtggaacagatcacagtttctttgggcggcaaatttatagttccagctggtagagaggtgtacttattattattatttatgaggcctgcttctgttctgaaaaagttttcaccattggtaaattgcccaatttcttcgcctccatcggaatgaatcattttgaaacgtgtatccagtcatttcaaggaaattttgagtgaagaatgcttttgcttcttt

SEQ ID NO: 52616 - DNA, 2375 bp, Glycine max
  Clone ID: PAT_MRT3847_18525C.1
atgcgtccacgctgtacgcccacgcgtccggccctacgagggtcaccaacggcacgtgcctttgggcccacgcgtccgaccacgcgtccgcagcagcctaatataataggaaaagtatgtttttaagattttgattgattttctatcatcagttatttcattattcttgaatctttgattcttattgaaattgctctaactttaagtacttttttctatgcctgcttgagcaatagccagttgccaatacttgttctgatggatgtttttactaaaattctgattttttaatgttgtaataataactagtactgtcagttcaccatgagaaaaaatgattttgactatctgagtatgttagttaattcttagtgttagtttattgattgctaagtggacttgatgtgaatcgagtgatcttttttatcgttcgtcgacatcaggacctagcagacaatagcagcacacacacttatcttcttcttcctctgattccattcatcattcattactctgatccgacggctgcgatcttctcgtttctccaatcgtacggccaggggtcctttgtctgcctcactcaccttcccaactttctctctctacttagagagtagcttctctggaacaccgagtatggagtccaacggtcatgttagagtaaagagaaatgatattattaaagaaaatggtcattcccatttgtcaaataatgatgatgaacatgatccatggactgcatgggcatacaagcctcgcaccatcacattgttcgtacttattggttgctttcttatttgggcaagtggagcacttgatccagaaagagatgcatctggggatcttgttacttctgttaaaaggggtgtatgggcaatgattgctgtttttcttgcttattgcctactgcaagctccttctacggttcttattaggccacatcctgcaatttggcgcttggttcatggaatggctgttgtttaccttgttgccctcacatttttgctttttcagaagcgtgatgatgctcgacagtttatgaagtttcttcatcctgatcttggcgttgaacttccagaaagatcttatggcgctgactgtcgtatatatctgcctgaaaaccctgcaagcaggtttaagaatgtttatgagacactttttgatgaatttgttctagctcatgttattggatggtgggggaaggcaatattgattcgtaatcaaccccttctttgggtgttatccattggttttgagttggtggagtacacttttcgtcacatgttgccaaatttcaacgagtgctggtgggacagtattattcttgacatcttgatctgcaattggtttggaatatgggcaggaatgcatactgttagatattttgacgggaaaacatacaaatgggttggtctaagccagcagcctaacataataggaaaagtgaaacgaacattaggccaattcacaccagcacagtgggacaaagacgagtggcatccattgcttggtccttggcgtttcattcaagttcttagtctttgcattgtatttttgacagtagagctcaacacattctttttgaagttttgtctctggatacctcctcgaaattcggttgttatatataggttgattttgtggtggctacttgcgattccaacaattcgtgagtacaactcataccttcaagacagaaagccagtgaaaaaggtcggagcatattgttggctctctcttgccatttgcattgtggaacttctgatttgcattaagtttggacacggcttgtatccaaaatcaatgcctatatggctggtaatattctggtcaggtgttggagtgaccatttttacatttttgcttttgtggtcttggcaactccatcgcactttagggaacaaaaagagacgataatttcacaattgcagcagttgcaatgctgcattattctttgattgattccttcctcatttttatgggtaccaatccatagccatacacatggtgtaaatacatcaacctcataattaattgtaaatgaatattaatttctcctagcttagtatagtggaacagatcacagtttctttgggcggcaaatttatagttccagctggtagagaggtgtacttattattattatttatgaggcctgcttctgttctgaataggttttcaccattggtaaattgcccaatttcttcgcctccatcggaatgaatcattttgaaacgtgtatccagccatttcaaggaaattttgagtgaagaatgcttttgcttcataaaaaaaaaaaaaaaaaaaaaaaaaaaaaaaaaaaaaaaaaaaaaaaaaaaaaaaaaaaaaaaaaaaaaaaaaaaaaaaaaaaaaaa

SEQ ID NO: 52617 - DNA, 490 bp, Glycine max
  Clone ID: PAT_MRT3847_18526C.1
cacattctactttccccacccagcccaacttaggtgctaaaacagtctttctgtccatattataatctgattattatatacacccacaccctccattttgttgcttcatatcttttatttacactctattaattctagtcaacttacatatatttggattccttttttttttaatttaattgtttggtacgaatttaggagggatataaaattcattgattccaaatttccaatcaccttctgaataaaaaaacttgttttctttctttttattgtatgcatgtgaaagtgtaatagaattgcctggctatttagttgacttaacattttattttttacctaaacgtatgtggcagggaagttggtggaagtcgcctgtagcatgtttggatcttttggacaagtctgccaatgaaatcgctttctcaactaattacaaaaataataaagagtgcatgtatgtaaactcgatgaatgttgtagagtaatg

SEQ ID NO: 52618 - DNA, 1079 bp, Glycine max
  Clone ID: PAT_MRT3847_18527C.1
cgattcaccacctgtcttaggctcccctatcttaatctgaaaaaagacaaggaaacaattgaggcagagatgaagaaacttgattattgagtgaatgaactgcaagatagacaagaaactgcagctgaataagaggagaaaaagagatctcatattgatttacttgctactaaaggttatggattcgaagaattaatgcatatacttgatgaggaagtatcgctcatggaagagatggcaaataagattgtggattttgaaatggttgttcaacaagcgagtcaagagattgagaaccttgaatcttctcgtggtaaggttatgaaaaagctttccataactgttagcaagtttgatgagcttcaccacctgtctgcaagtctcctttctgaagttgaaaagctccaatcccagttgctagaaagagatactgaaatttctttcttgaggcaagaggttactagatgcactaatgatgctcttcttgcatcacaaatgagcaaccagagttctgatgagatctttgagttcttgatgtgggttgacacaattgtgtctcatgatggggtgcatgatatacatcctgatatgaagagcaacagtaaggttcatgaatgcaaagaaatacttcataagaagcttacgtctttattgtcagaattggagaatctaagggaagttgcagaaagcaaggatgcaatgttgcaaatagaaaggagcaaggtagaagaactgagccacaaaacagtaactcttgagacatccttacatgagaaagaattgcaattgaatttgcttgaaggtgtggaagacactggaaagggagctggcacaagctcagaaattgtggaggtaaaaccagcgatgaatgattggtcgccatctggtgcttttgtaacacctcaagttcgcagtttgcgcaaaggcaatagtgatcatgttgccattgctgtagatgtagaccctggtagtactagtaggatagaagatgaagaggacgacaaagtccatggtttcaaatccctcacaacatccacaattgtcccaagattactagacctttgactgacttgaatgat

SEQ ID NO: 52619 - DNA, 2231 bp, Glycine max
  Clone ID: PAT_MRT3847_18528C.1
cacattctactttccccacccagcccaacttaggtgctaaaacagtcttgtctgtccatattataatgtgagtattatatacacccacaccctccattttgttgcttcatatcttttatttacactctattaattctagtcaacttacatatatttggattccttttttttttaatttaattgtttggtacgaatttaggagggatataaaattcattgattccaaatttccaatcaccttctgaataaaaaaacttgttttctttctttttattgtatgcatgtgaaagtgtaatagaattgcctggctatttagttgacttaacattttattttttaataaaaaaaaaataacccaggtcgcgtccggtgagtgaatagcacagagactcagcaaccacgctaccttcttctcttctcttctcttctcttctcttctcttcttcactgccatttcatttccccaccaaaaaaaaaaaaaacactctatccttccctccatgagcaccatggattcctcttccatctatggtgtctcacacagacacttcctcaccctcttccttcttttccttctgccactccattctcactctgcattctctcataactcttcttcctcgtctcaaattaactctaattccatccttgtcgcgcttctcgattcccattacaccgaactcgctgagcttgttgagaaagcgcttcttctccagaagctagaagaagccgtcggcaaccacaacatcaccatcttcgcgccgcgaaaccaagccctggaacgcgacctagaccctgaatttaagcgattccttctcgagcctcgcaatcttaggtcgcttcagacgctcttgatgtctcacattctcccgacgcgaatcgcctctcaccactggccctccgacgacctccgccaccgcactctctccgatcaccgcctgcatttggcctccaagccctccggccatagaaccgtcgactccgccgagatcctccgcgccgacgacgtcctccgccccgacggcgtcatccacggcatcgagcgtctcatcgtcccccgatccgtacaggaggacttcaaccgccgccgcaacctcgccgccatctccgccgtccttcccgagggagcgccggaggtcgatccccgtactcaccgcctcaagaagcccgctcccgttcccgccggcgcgcctccggtcctcccaatctacgacgccatggcaccaggcccatccctcgcgccggcgccggcgccgggaccgggaggcccgaagcaccacttcaacggcgagcgccaggtcaaggacttcatccacacactcttacattacggaggttacaacgaaatggctgatattctcgtaaacctaacgtctctggccaccgaaatgggaaggctagtttcagaaggttacgttctcaccgttttggctccaaacgacgaagccatggcgaagttaacgacggatcagttgagcgaacctggcgcaccggaacagataatgtattatcacattattcctgagtatcaaaccgaagagagtatgtacaatacggttagaaggttcggtaaggttagctacgatacactgcggttaccgcacaaggttctggctcaagagtctgacggctccgttaaattcggtcacggcgattcctccgcctacctgtttgatcctgatatttacactgatggtaggatctccgttcagggaattgacggcgttcttatccctcctgaagaagaagaagaacgcactcgccgcaccactccacttgttaaggttgctgctcctaaaccaagaagagggaagttgatggaaatcgcttgtagcatgtttggatcttttggacaagtctgccaatgaaatcgcattctcaactaatcacaaaaataataaagagtgaatgtatgtaaactcgaagaatgttgtagagtagtcatttcaatacaaaggatggatgcatggtgaatctataaacggagagcgagcgattacacggaagataacaaaaacaaattttctgtcattttgcttcatactgtaattacataccatttttttattaaattttattttatgttgattctccgtctttgtgcgtaaataaccgacaccccttcttggttgcctttttttttttttctcttctttctctcatgcttatatgtaagtgaatcaagtcatacataatctactttgttattattattattatgccttccaaaa

SEQ ID NO: 52620 - DNA, 364 bp, Glycine max
  Clone ID: PAT_MRT3847_18529C.1
gactctatatttcattaaatgggactatgtgtgatacgatcatagtctacataaacagttttatttacatacttaagatgcggaggtcaattgttatagcaattccactaccactactaagcatggaaaattgcctattatttacacagactatatttagctactttaaaacccagggaaagcttcttttgactcatatgaaatcggcacacaccactgaaacctaaggctaatgtgaagctgttactacggtgtctgacatgtgcgatcatgatctacttaagaactgccaaggtcctgaacccgcaccaatccttaatatgctaaaacatggcctaacatccatttacacggaaaaggccac

SEQ ID NO: 52621 - DNA, 393 bp, Glycine max
  Clone ID: PAT_MRT3847_1852C.1
ccgggttggaccaagccgtccgatcatgatttggcgtatttcgaatttagtatttattgaacaacactggctctttataatataaccgatccttaaattatggatctgaattattgtacaggttcttgatacggcgacgctcttgagtgaatcaagtaatccatatgtaatcgctctgaggagatcgtaggtaaactaccgatcaatcatcacaagcagatggatgtcggaaaaagactaacatcaatcgcactggttgacgcttgtatggcttcaaattagaagatgcccgctatctctccgtacaccccatagggctgaatctgcccaatctgagactagggtggagcgacataactgaagtctgcaagatgccatctgtaggctaaaagc

SEQ ID NO: 52622 - DNA, 451 bp, Glycine max
  Clone ID: PAT_MRT3847_18530C.1
cgagttaagtgataaacttgaaaaaaatgagaaaagtcttgaagaaactgagcggtcattatttgatcttgaggagaaacacacacaagcaaatgcaactattatggaaaaggaatttctaatatcgaatctactgaaatctgaaaaagcacttgtggagcatgcaattgagctacgagctgatctagagaatgctgcatctgatgtgtcaaacctgttttctaaaattgagcggaaggataaaattgaagaaggaaatagaatacttgtccagaaattccagtctcagttagctcaacagctagaagatttgcacaagacggttgcagcatctgtaattcaacaagagcaacaactaaaggaaatggaaagtgatatgcactcgtttgtatcaacaaaggcagaggctattgaaaatctaagaatgcgggtaggaaaatttaaaaacatg

SEQ ID NO: 52623 - DNA, 160 bp, Glycine max
  Clone ID: PAT_MRT3847_18531C.1
gcactgatttatcaatcgacacagacaaaacagctcgaagttagtgtgatgttttaaagcgatgctttcaacaataaccccagcatacatttttgaacactacaaactgctaagagatgctggtaatgggggggttattgattcatttttttcttttttc

SEQ ID NO: 52624 - DNA, 222 bp, Glycine max
  Clone ID: PAT_MRT3847_18532C.1
accggatcaaattgataaatttttaggtgcagcatatggcgaaaaaccttacaccgtggccagatgattagttaaatgaaatctcttaactccacggccaaccaagaatctcatgttattggatctactccattctttaggtttttctcttttattttttgctttgttattttatttcttcttttgaactatttaaattaataacaaataataatgatgatg

SEQ ID NO: 52625 - DNA, 1326 bp, Glycine max
  Clone ID: PAT_MRT3847_18533C.1
cggctcgagctaaccttcatcacactgtggactgtttgttctgttgcatttgcatgtggtgccaatttccatttccagaacctttttttttcctgaattgttttccttttctatcatctttctctttctctcgatcatcactctctctgaaaaatcatgaatataattgcgggagctttcaagcccccatgcaagatctcaatctgtcttgctgatggaagtactcccaagcaggttcgcataaagaaggaaaatggccaaatggtcatggttcctctctttcaaagtcaggagaatatagttggggaggttattattgaaccttcaaatgggaagaaggttgaacataatggtgaaaaaattgagcttcttgctcaaatagagctatattttgatagaggcaacttctatgactttagatctcttgtacgcgaacttgatgttcctggcaacttgtatgaaaggaaaagatacccgtttgaattctctactgttgaaatgccgtatgaatcatacaatggaatcaatgttaggcttaggtacattttgaaagtgacaattagtcgaaattatgtcaacaacattgtggaatacatggattttgttgtacgcaattatgctccagctccacctattaataacagcattaagatggaagtaggaattgaagaatgcttacacatagagtttgaatacggcaagagcaagtatcatctgaaggatgtcattgttggcaaaatatattttcttctggtgagaatcaaaataaaaaccatggaactcgaagtcaggcgccgagagtcaactggatctgggaccaatacatatgttgagacagagaccctttcaaagtttgagttgatggatggtgttccagtccgaggagaatcaattcctgtgagattgttcctcagtccatatgagttgacccctacaataccacaacatcaataacaagttcagtgtgaagtattttctaaatcttgttcttgtggatgaagaggacagacggtacttcaagcagcaagaaatcacagtatatcggctaagtgaaaactcctgattcttatgccaccggattattaggatttcttctgtttttgtcaccacttgttctgagtggaaagttttctaataattttactgtagttactagaaagtgggtaataggggtattattctattctatttaaaaaacttccttcacgggtatggaacaaactatttcctaatttttaacattttaacatccaacttgacttattttacactacaaatgaattccataatacataccgtaaaagagcacacccccccccgggggag

SEQ ID NO: 52626 - DNA, 470 bp, Glycine max
  Clone ID: PAT_MRT3847_18534C.1
gagtttatcgaagcagagttcatcacctgtgcttctttgttgtagcgcatgagtcgagtttcatgtctgtagagcaatgcttcaatctctgcgatggacggagttcgctttttgctttcgataacagaaaccaccgacgcgtaatctgacggcaatccttcaagtagcgcttcaacgtattccttgtgatgaacaggtacaccaacactagcaagttcattcacaaaccctttgatttttcacaattactcctcaattgttttaccgtcaagagtaactgctctcatggcagtgtggagctgtggtgctcgagttttcgtgtgtaggctaaaatgctcatgaattttatcccaaacctgataggaatgatctgaagcaagaacacgcgacaacactgatttagaaagagttgactgcagtcatattaggagcgtttgatcttggacctcccaggcttcataatcagggtt

SEQ ID NO: 52627 - DNA, 834 bp, Glycine max
  Clone ID: PAT_MRT3847_18535C.1
acggctgcgagaagacgacagaagggggttgcaaaaaccctaattgcggtgtaaaaccctagaaggaggaagaagaagaggaaggatgagacccttagacgagaaggagacgagcgcggtgttcgagaagctgttcaaattcgtcggaaacaacctgaagaacatcgtggagaacccctcgcacgaaggtcccgattcgaaccctggccgctactgcttccggctccacaagaacaagatcttctacgccagcgagtccctcgtgaagcgcgccaccaacgtcgcccgccccaacctggtctccctcggcacctgcatcgggaaatacacccacggcggcagcttccacctcaccgtccaggccctcaacttgctcgccgccaacgccaagcacaaggtctggctcaagccccagtccgagatgtccttcttgtacggtaaccatgtcttgaagggcgctctcgggaaactctccgaaaacatcgctgccggtgacggggttgtcgtcttctccatggccgacgtgccgttgggtttcggtgtcgccgccaagtccacgctggattgtaggaagctggatcccaacgggattgttgttctgcaccaggccgatgtgggagagtacttgaggatggaagatgagctttgatgcattttcctagtcttgtaattggttttgatccatcttatcaaattacattatcttctatattatattatctgagacttcgttctccttacatatgtattacttcagccaatggatctgctttgttgatttcccaaaaaaaaaaaaaaaaaaaaaaaaaaaaagcggccgctctagaggatcca

SEQ ID NO: 52628 - DNA, 634 bp, Glycine max
  Clone ID: PAT_MRT3847_18536C.1
taagggagcatgtggaactgtttataaggccatgatgaaatctggtaagaccattgcagttaagaagttagcatctaatagggaagggaacaacattgagaatagtttcagggctgaaataactactctgggaaggataaggcatcgtaatatagtgaaattgtatggcttttgctatcaacagggttccaatctcctgctttatgagtacatggaaagaggtagcttaggtgaactattacatggtaatgcaagtaatctggagtggccaattcggttcatgattgctcttggagctgctgagggtcttgcctacttgcatcatgactgcaaacccaagattattcaccgcgatataaaatctaacaacattctgctggatgaaaattttgaggcccatgttggtgattttggtttggcaaaagtgattgacatgccccagtcaaagtctatgtctgcggtcgctggatcttatggctatattgctcctggttagcccctttcctgctcgggctcggagaagtgccactcttatctttgtggtgttgctctagagaatgctacctggaaaacaacccctctaccccctataacagggggtgaaccctttacatgggggaggaaccctatccgg

SEQ ID NO: 52629 - DNA, 451 bp, Glycine max
  Clone ID: PAT_MRT3847_18537C.1
gatgagcgcacggttcccataactggtgctgcaactagtactgctggctacagtttctgcctcattcgtcatcgcttactgagcaaaagataacccctatcacaacaagtgtgttcagagacgcaattacgagagagactacttcaggatccatgcatgccactctcgttgcaacctgtttaaggtggagaaagaagaatgctgagcaatggaagactccacgatcacgaccactacacagctccccgacgaggaacatcagcacactgctgagatggaggaagacgaagatgatcaggctcgtaccatcccatgtgcatgcacactacctcgtcaaagagaagagcctgagcattcagaggaacatgaatggtcttgcacgggggaaagacgcagagacaaggtaagtgatgatgatgatcaggatgaggctgaggtacgagatgaacgt

SEQ ID NO: 52630 - DNA, 442 bp, Glycine max
  unsure (1)..(442): unsure at all n locations
  Clone ID: PAT_MRT3847_18538C.1
tttctccaacctcctctccacctgcggtcgttttaaaaaaaaccttggccgcttaaataaataaaatcaaactctacttatccttcttactttataattttataaatttatttttttttcctagtccttaaagacaatattccattttatataatctctacctctctaataatcatcacatccctacataaacctccacataacctcaatttcttttattacttacaaataaaacatacttttctcttatctatattctttatactatatacctttataatactctcattcttcctttaattattactagacaccatatcctatatatttcacttttttatcccactctaacttttaaattatcaaaactcttactcactccttcnatacttccttatttattactaaaaaacattcataccattttatattttaacttcct

SEQ ID NO: 52631 - DNA, 325 bp, Glycine max
  unsure (1)..(325): unsure at all n locations
  Clone ID: PAT_MRT3847_18539C.1
tcgcgtacgtnagctcggtattcggctcnngttcggctgcgagaatgacggaagangggcancacttnattaacccaantnangttttntcctctactacctgtntntgtatccgncctcannttactgcnacatntccgttttctgggcanccttcnngcccactgcnaangtctcncggttgcaatacttacnacggaaaccctgactnttncnttnttacannatcntanttaaaccnacaantggaactgatcaactgtttnctgagagtntnaanggtntgaaaatcactgtcttattcccacncatgtgcctcttcann

SEQ ID NO: 52632 - DNA, 149 bp, Glycine max
  Clone ID: PAT_MRT3847_1853C.1
caactattaagcactaaaaagttgacagacatatgaagtttccagcaggtagctggccatactccagtcctagtataacaaaagaaactacatatgtctgtcaactttttaccgcttaatactagaaattttttgttatgcaactgagg

SEQ ID NO: 52633 - DNA, 307 bp, Glycine max
  unsure (1)..(307): unsure at all n locations
  Clone ID: PAT_MRT3847_18540C.1
ccactcctcccatttttgttgtggattttctaactagtcagaantattttttttggcggaaatcttgactggggtggtggttatatttttttcctnactgcatancattgttactcttttttttttctttaaatgttttaaacatgttttatgggcttctttttatccctttatttgtcataaaaatttctgctctgctgggtcgtatcatacatctaactattggttacttgatgctcttctaaccaaacctttataattcccaattgtcaaaagaaataaaataccttcttagcaaccgatctat

SEQ ID NO: 52634 - DNA, 690 bp, Glycine max
  Clone ID: PAT_MRT3847_18541C.1
cgttggcaaggctgtagttggtggaatctctggtgtcttggctcaggttatagccagcccagctgatcttgtcaaggtgaggatgcaagctgatggccaaagggtgagccaaggtcttcaaccccggtattcggggccatttgatgctctaaacaaaattgttcgtgctgaaggatttcaaggattgtggaagggtgtttttcctaatatccaaagagccttcttagtgaacatgggagaattagcctgttatgatcatgctaaacaatttgttattagaagtaggatagctgatgacaatgtttttgcccacacttttgcttccatcatgtcaggtttagcggcaacgtctttgagctgcccggctgatgttgtgaagactagaatgatgaatcaggcagctaaaaaggaagggaaagtcttatataatagctcttatgattgcttggtgaagacaattaaagttgaaggaataagagcattgtggaaaggattcttccccacatgggcaaggcttggcccatggcaatttgtgttctgggtttcctatgagaagttcaggaaatttgcagggctctcttctttctaatataacattttatttatttatttatactagcactcattcatccataataaattcacaagtcacagcctacagggtactaacacccagatttatatttttct

SEQ ID NO: 52635 - DNA, 1323 bp, Glycine max
  Clone ID: PAT_MRT3847_18542C.1
cgccacgcgtccggcggcattgattcaaggcacaggcatcgtgcattattggtgcttacgatgctgtgtctgagaacgccgttttgtctgagtttctctgccaccaaacacctccgtcaaatacaggcgcggccgtccagatcttgcatcaagatggcgtcaactaaaacggtggagcacattgtcctgttcaaggtgaaggaggaaacggagccgtcaaaggtgagtgacatggtgaacggactcggctctctggtgtcgctggacccggttctccacctcagcgtgggcccactcctccgcaaccgatcctccgccctaaccttcactcacatgctccacagccgctacaagtccaaggaggatctcgaagcgtactcagcacaccctagccacgtcagcgtcgtcaagggatacgtgctccccatcatcgacgacatcatgtccgtcgattgggtcgccgatgacctcgccaccgccagtctcgttccgccgccggggtccgcggttcgagtcagcttcttgaaattgaaggaggacgcggataaggacacggtgttgggcgtggtgagaggaattccagagagttttaagcagattagtgagttcagtcttggggagaatttttcgccggggagagccaagggtttctcgattgcttcgctcgcggttttcccggggccgagggagttagaggcagtggattcgaacgaggagttggtgaattaccagaaggataaggttagggatcaaatcgagagtgtggtcgtggttgattatgtggtgccagagcctcctcctgctcagagtgcgagcctttgatggggttattgctacgctatgctttcttcttcttcttttgataagcttaattgttattattagtttattttgttagcaggatggatgaaacccgttttcttcttcttaactacccaaccaatcttatatctccctggcctatgctttgtatatgtaaactgtttcgttatctatgcaagcacggacacctcagctccttgccgtatttcgtgcgtccgtgttagtgtccgacaccccctatacgacatctatactacgttctatattttggacattacaagtgtccacgtgtctctgtgtcgtgtccggtgttcgtgtcggtgtccatgcttcatagtttgttatgcgattttaccagaataatgtctcttgagtgttgctatgatggtaatgattcactcaatttgtgagattgttttagaacagtcttttgttgctctgcaaaaaaaaaaaaaaaaaaaaaaaaaaaaaaaaaaaaaaaaaaaaaaaaaaaaaaaaaaa

SEQ ID NO: 52636 - DNA, 169 bp, Glycine max
  Clone ID: PAT_MRT3847_18543C.1
gacggaaaaaatcctccggagcccaaagactatccaacggacacggttttttttaattgatttccagccacggattccccttgccggtccagtgaaacaaacttaccggaccgggattcatattatggaaaaaacctttaatgtatttaccaccgaggacgggttgttt

SEQ ID NO: 52637 - DNA, 364 bp, Glycine max
  Clone ID: PAT_MRT3847_18544C.1
gcctctgcggtgcccgccgggtcctcaccaccgagccttcagatgccggtggaagtgatcagcgactccgtcgggcttcaaactcccgttcggatgcggcaccctgaaagtgggagaaagcatttcatttaacttgaatgagcctccagttctcagaccagatcgggccgtcgatgcttaattacatcttatcttttaagtccaaacgtcgcctaaatgggtctggccggatgtccttaggcctttgtgcgaggtattgacttctgcatccacaatgtattcgcttattggaacataattgcagttctttctaataaggatggaatcgctaatcctactcgaaaaaatatttttttttttcgcg

SEQ ID NO: 52638 - DNA, 348 bp, Glycine max
  Clone ID: PAT_MRT3847_18545C.1
aagatatccccaccaatggggaaagtgcgcaacactgcgtgaggactattgtgcaaatatactaatagcattgtcattcccattggctgcaaaaggcactggctggaatatcactatattgaggattgtgcaccacacgacactagatgtcgggtattatgttgagggtgggacgatatggattagacgctgatgggagcatctgatgtcagtttgagtaatagaggtgataaaaaacgtgctctgggccagttaaggaggaagaaaccttatatcggctgctggcagtattaagaactagagagatgatgactgaaaaaggctctaaaacgattggatcatttgttt

SEQ ID NO: 52639 - DNA, 886 bp, Glycine max
  unsure (1)..(886): unsure at all n locations
  Clone ID: PAT_MRT3847_18546C.1
aaaattgatccgaatacaaaagaaagatgccaccaaagtgttggcaagtctttatagatatcacgcatagatgcctaaantatgaaccagccaagcgcccaacaatgggtgaagtagaggtggagcttgagcatgctctgtggttgcaggaaagcagatatcacaaacaccaatggtgattatcccttattttccccccccattattgacatgggagtggaactggaatctaacatggaagagattgatactagagatgcttgaagtatgaaccaaatgggcgaccaacaattggggaagtggaggtggagcttgagtatgctttgctgttgaggaacaagcagatatcataaaaacctaaggttataatacttgttatcaaatactaatagtaacttaagaagacatgtttcttaggtaatttggtgagtaagtcaaacaaaacaatcactatgtactttatgagtagcttagtttaattgagatatctctagcttttgtagggatccttgcttttagcattttgattgtatctagagctgtggtcgtaattaacttaaactagtataaatgagaaagcagtgaaagaattcttgcctgagcttgttgtacccaggaaattgaatgccaccaaaccagtaatgatatagaacccaatagtattgaagagcaatgttgtcagtttctctgctgtcaatcttattaagagaaacaaataacagcttcaatcaaaacagaatagtaggaagaggaagctttgctacactcttctcatatgatgcaatcaatgacaataccagatccaacacaagttagatgttacgccaattacttttcttttcctttttttattgaagtaagtgctactgtcattttctttttccct

SEQ ID NO: 52640 - DNA, 340 bp, Glycine max
  Clone ID: PAT_MRT3847_18547C.1
ccacgcgtccgcgtgcgcgtgggtgcctcttgctcactttccctcagtggtgcaaggttcgattgtatagtgtgcaactatgtctaaccggagggccttccttgacttcacacatggcaggtcaacctggcgcccgaatacatgatggatctatacggcggcaggactcccaacacaggaaagaacttggcgtcgctctgcaccaatgagcaaggtgcacaggcgtagcgggaagcccgttcactacaaatgctcgtgcttacaccgcatggtcccgagctctatgtgccacagcggtgacttcaccgccaaaaacaggaccaaccgtgaacccatatac

SEQ ID NO: 52641 - DNA, 1956 bp, Glycine max
  unsure (1)..(1956): unsure at all n locations
  Clone ID: PAT_MRT3847_18548C.1
aattcccgggtcgacccacgcgtccgcatggatgtattgactgaaccgatgtccgagacctttccaatgattttggcaatacttttatgctcgatgaagagatagagcttgagcaaaagatgctaaggaagactgaactttcttctagtggaaggaatgatgatgaagatgatgagatggctgtcgtccaacaggatgttcagagactagtaattgttacccagaatggtgatcctaaacaaagatctagagggggtggtaaagaatcaatatgtatttccaatgagcttgcttccgcaataaatgatggtctttacttctacgagcaggaactgaaacataggcggtctaatcgtagaaagaataactctgatagcagagatcgaaacataaaatctccaagccgtaattcaggtgcatcaaatataaaggtgtttgagagtattggtggaaactgtgtcgaagagtctggaagcaataattctcgaaggaaacataaagtttttcacaagcaaccatcgtcccttaagcagcggtttttctcaagtaattttaaaaatcacggaactggtcgaaactctaacggaatcatatctgaaagcccgcctagtaattcggttgggtttttctttgcttctacgcctcctgaaaatcatggtttcaagccttccaaattgagcagttcaccacatgggggcctttctggtagttcaccacatggggttttttctggtagtccacatggggttttttctggtagtccacatggggggttttctggtagtccacctgtgggttcaatgccaaagtcttttccaccgtttcagcatccaagtcaccaacttttagaagaaaatggtttcaaacaacagaagtacttgaagtatcacaaacggtgcttgaatgatagaaagaaacttggaattggttgcagtgaggaaatgaatacattatacagattctggtcctattttcttcgagacatgtttgtgccttctatgtataatgaatttaagaaattagctaaggaagatgctgcggctaattataattatggtatagagtgccttttcagattctacagttatggtttggagaaggaatttagagatgatttatacaaggattttgaacaaacaactctggatttctaccataagggcaatctgtatggcctggaaaaatattgggcatttcaccactatcgcaaggtccggggccaaaaagaaccattgaataaacaccctgaactggacaggttgcttcgagaagagtatcgtagtttagaggatttccgtgccaaagagaagaatgtggtaaaagagtacttcaattaagttgagtgatatggccaaatggtaaatacatatggcagagttttgatggcatccccaattttgatgagaactctaacaacataacaatacgagttgtggagtagcggcctactttttggtttgaatggaaaaaagaaagattgtttgtttgttctctatatttggttgaattgattatgcctcatcaagaggattgctgattgccaagtcttttcaggtttctttgatggatcattctatatggtatacaccactgcatcctttctttggtggatcttgcagattttgggagacacattttcctggttccaaatgttgtacataagatgatagactagaagttgtgacattacatcataagaaaaagaggttattgtttttatttttggtgggggtgaaaaggggggttgtacttaaatcttttgccaaatttgaacagtaagagtgagagtcttcttactttgtaacttggcgtgctcatttaatttatatctaacaattcttgtctccccaaattggtatggtttaaaaagcaaaaagtttttggttcccaaaaaaaaaaaaaaaaaaaaaaaaaaaaaaaaaaaaaaaaaagggcggccgctctagaggantcaag

SEQ ID NO: 52642 - DNA, 189 bp, Glycine max
  Clone ID: PAT_MRT3847_18549C.1
tttttgaattttaatttaacaagacacccccatatattattattccgcgttgcaatccacaaaactctgtgggggactgataatacccatacttccacggatgctgacccatatgttataaccggggataaattcattataaaccactgacactgccatacgtagctttccaaaagcgcatttgggaac

SEQ ID NO: 52643 - DNA, 394 bp, Glycine max
  Clone ID: PAT_MRT3847_1854C.1
ttgggggggggggggggggggggggactgacgaaaggcaatgtagagaggcaggataggatggttagctgaaagagaaagaggttagaaaccaattatatcgagagcgagcacgatgagccggcctatggcatataataaaattgaactaaacagtcatccaaagcatagaagataggataaacagagatgatgaggggggggctggaggggtaagacctcagaagaaaggaaatgtgaaaagccggcgaacagaaatcatatcaatagaaattataaggagggttgcatataaccgtcggcatgacccgaagttaaacaaatcacaacaaaggttagagctagctagcggtagagtaaccccgaccagcaccgagctgattattattaatatt

SEQ ID NO: 52644 - DNA, 453 bp, Glycine max
  Clone ID: PAT_MRT3847_18550C.1
ctcacagcccagtattcatttatttatggattttctgaatacgtctgcttcttttccatggaaacccttcagacttttccaaggtgtacatgatttacctcaggcctactatgttgctgcacagaatcttacactgatacagcgtgaaaaagttagcatttcacatgccatgactgaaaattcccattcacgaaatcctaatgggctcctttaaaagccagacgcttagatgacaactccatctctaacaaatggatatgcttatatgctaccacgtgatacgttcacagtttccttttgacagatcgaacattgctctgagaaacttaagtcacttgggcctgctctaaccatagactttgctggcccacaaaaatggacccattgctcattgaactcacttgcagtggtgccgtcatctgggatagacatgagcccctttttacctccaca

SEQ ID NO: 52645 - DNA, 264 bp, Glycine max
  Clone ID: PAT_MRT3847_18551C.1
aattccacccacgcgtcacgcactcttccactccttaccacactcactacttttaaatttcaacaccactcttactacattcagaactgtcaccaccttcttacattccatcaacttctatcctactcctttacctacactcaatttaacacttgctttcaatttcaatctttaaacaatccttttcttttatcaaacacacttatttacattaccaccaaccacttcttactactttaccacaacataactactttatcactc

SEQ ID NO: 52646 - DNA, 506 bp, Glycine max
  Clone ID: PAT_MRT3847_18552C.1
aatcactgggttttgactcattggatgccctgggaatgcttagaactagtactgtggcgtctggctagattggaaattgggccaatcgtagatatggaactaggtgtatactactacatgatattttcttctgtgaaagacaaactgtaaaagtctagccttccgctcccccccaaaagaacactgaccaacctatcagaagtcgctacatctaatctgtttgtcggggacacatggactcccttttgaactctaattctccgagggccttaaccaacatctactgtcttttatttaaaaatatgaagcattcatccccacggagtgggaacccagttatgatcccactccatggctattgaacacactcgactcccaaagctccttataaggttgacgatgtgtttggaccccaattgcctgctcacgcaccagcgttggagaacctaccattcctgactgattcacctatttcaccaaacctgtaggtcccaccacgaccacca

SEQ ID NO: 52647 - DNA, 341 bp, Glycine max
  Clone ID: PAT_MRT3847_18553C.1
gggaacgggggtatatcaacctttgacagacgtgttgaggtgagcgcaaactacttactgatgggaaattcaatgagggtaagactattcctgtatctaaaattagcgcacatgaacttcatggagatcaaatacccctaatggcacaagaggaaatgctggctaatcgtgcatgcgacttaagaactgcagtggtgagtaaaaattgcaggcctaaagctactgcaatgcatgcaggagctataaaaattatgattgctagtgactctcgatctgactgcaacatagctgatgcactgtttttagctgatgcttttcataccaatactgaaaatgcagtt

SEQ ID NO: 52648 - DNA, 293 bp, Glycine max
  unsure (1)..(293): unsure at all n locations
  Clone ID: PAT_MRT3847_18554C.1
caacattctcataatcnaataccatttcatncattcttncatattgcttaattttatctncattttgcaccaccttctgaatngctttttcnagnnttncattgttaatatgcacggtaattnggtantnngnnattgcctctgcgggcantttttaccaagattttnatatcacttggngcgatnggcgtncnnagatactcaacaatggcncncttctcaatctgtcncttgncaaagcctctgnctcgggtttccaatccaagcacgaatacctttttggnacaattggt

SEQ ID NO: 52649 - DNA, 508 bp, Glycine max
  Clone ID: PAT_MRT3847_18555C.1
acgcatagcctcggactccggattcggctcgagtacggctgcgagaagacgacagaaggggtacctcaaaaacacgtatatttatatgaaattaaacatgatgctctttaggggtgtggttcaagtataaaggaccttcttctcctggagttagtgtagctagctgatgtaattgtcccttagtttgtttttattctgctacctggtgtaatgtttgacagtttatttgggtcacattttgtgccttttgaatcatgtttgtgtttgtctttcaaaaaaataaaagaaaaaattcctaaaatttgatatcattaataattaggatatgtataacagttcttacaataatttatacaacattatttcaagatgttgtatgtaagcaaagcagggggtacacatttgtagtttggaattggcttcaacatgttcatttcacatgttctaatataccataaatttctggttcttaaatatgttacgaatctcaaatacttcatttaattta

SEQ ID NO: 52650 - DNA, 253 bp, Glycine max
  Clone ID: PAT_MRT3847_18556C.1
gccgtttcgaatctgcacaagaacaccaagaaatccttctccgagacgatcaagatcatgtactatcattttagtgagagatctgggctgaaggctcctctgatcgccgatgatgtttatgaaataattatgaagaatgctgctcgtctagacagtgagataatctatgacagagactttgactatgattattttggattcaaaacccttgagaggtcttacctcttgaaggttcaagggaaggttgtggaaa

SEQ ID NO: 52651 - DNA, 251 bp, Glycine max
  Clone ID: PAT_MRT3847_18557C.1
ccttctccatacccttctgcttagggtattcttttaatatgatcttgctatgagtcgctataactggtctggcctggtctggtcggacacacataaatgttattatggtgaaggtgagtattgtgaagaatgcacagctgagattgcctccggggctccgtttgcacccgactgatgaggatcgggttttgcagaacttgatgcgcaaggcattctgctgccctctgccagcctctatcattacctgaggt

SEQ ID NO: 52652 - DNA, 321 bp, Glycine max
  Clone ID: PAT_MRT3847_18558C.1
ggctctagaattgagtctgagtatctcggatactgtgatcgagtgtacgctctctctcttagatgaatcgaaaccattccttcagcctatcttgattccagcagtgatatcaatggcggaaggcctaaactctgtcatataaacacgtgaaggcggcctatggtgccaccatagagggcttccatttacaaaatgcctatggcagctggcaaccaatctgccacaccattccgccatggcagctatggtaccttcatttaactacggactcgggagaaaaattctaggacatatctgctggtaaaaattccctcttgaagt

SEQ ID NO: 52653 - DNA, 195 bp, Glycine max
  unsure (1)..(195): unsure at all n locations
  Clone ID: PAT_MRT3847_18559C.1
ggagctggtgcaaagnatgctattctcatgaatatggcanatgctgttctttcaatgtggagatattttgtggantctcgtcttgagtnctaagtgattctcnctaatanatgacagccttctcaangattgnnattgctntgcactcacntngntncccacantgtcnttgaggtcagaantgatgantncagg

SEQ ID NO: 52654 - DNA, 363 bp, Glycine max
  Clone ID: PAT_MRT3847_1855C.1
ggaacagaaaattcttctccacatttaattaccagtcgttggtaggtacaaactggtgggataatataatttaaaaatcaaattcccatagtgaatccccacatcaaggatcttttatatgtatagaacaaatgcagtctcctttctttctactgtcttctttaaatttttttttactaactagtccagagcagtatcccaaacgttacttgttctgggggaatatatcaatcactacgtattaaccaacaaggtgttatcctgtggttatttccgtttttttttaacatggtgttgactatccaattaattcaatgtgttgcatatgagagggtcccttcaaaaattcttgtttatcaaacc

SEQ ID NO: 52655 - DNA, 316 bp, Glycine max
  Clone ID: PAT_MRT3847_18560C.1
gggagaaaaatgaaaaaatttacatggattcaccagcgagatttgcaaatccctgtatttaacattttcaaaaaacccgagccccctccaaaagggtatcataatttttattcctcccttggataataaaattcgctttgacggataagggaatttaaaacccaaatattaaagggaagctcctttccaagattcattttggttccaggccccaaaactcataagattgggggaaacatccccagaactgagggttttgccgagaacttttttttttgtttacctaaacgcgtgcgggaacggggggaacagcggt

SEQ ID NO: 52656 - DNA, 1101 bp, Glycine max
  Clone ID: PAT_MRT3847_18561C.1
cccacgcgtccgtacggctgcgagaagacgacagaagggggagtgaaattggaaattgcatttgaataatgatgtccatattccggcaatacaccttggacgactcattctcgcaagtgttggtgtccccgaaattcctgaaggagtaccaaatagccctgaccttcgcaagcgactacgacgacgacggcgtccccaccaacggggttttccggccaacctgggacctaaccaaggtgaccccggaatcaatcacgcgattcaaggataagaaccccgacgtggacatcaaagtcttcatcagcatcggcaaccgcggcacccagcaccccttcaaacccctcaacaaccaaacctggatccagaacgccaccatgtccctcaccagcctcatcaacaacctccacgtcgtccacggcatcgacgtcctctacgaccacatcgatgcctcccccgctgactttaccgagtgcgttggccagctcattaggaacctcaaggaaaacggcgtcgtctcccaggcttccatttctccctcgtcttatcccaaccaagaatactatccgttactctacagctctgtgcccttcttcgttgactgggtcgattaccagttccaaagcgaggatcaacctgtcttggaacccaccaccttggtgaagcgctacaatgaattaaccaaggtttatcccaaaacaaaactctttgctggctacagtgctgagaatgaggactgggccacagtttccccgttcgtgttctttttgggtgccatggaccttctcaagaagagaagtgctcctggtgtttccattcattaccataattactatgcatcagaagctcccaataataaggactgaatatgccacgccatccacccatgcctctctgctactatcatattaccttattatttacagtcatgctaccttaattactagtgtaagacccatctagggttatcaaatcagttccatatatatatatacatatatatatatatatacctatatctcataaaatataatgaataagttcttagttgttatctcaaaaaaaataaaaaaaaaaaaaaaagcggcttgctaattggatcct

SEQ ID NO: 52657 - DNA, 544 bp, Glycine max
  Clone ID: PAT_MRT3847_18562C.1
tttttttttttttttttttttcctttttttttttttttttttttaaaaaacaaaaaaaaagggtttttttttctggggggttaacctttccaaaggtaaccacttccatgggtccatttggatttttaaatttcaaacaaccataaacaaaatttaaaacattgttttggaaaattcaaattaaatgtttgattttcacacattaaaaataaaattaaactacctaatcaaaaattcctttaaaaaaaacctcaaaacttctttctaggggaacgtgtaaaaaactggtttgttaacaaaaagcttaaggcatttaatggaacggaattagtcaaataatgatccccattttttttggggcttttgaggaatgtcaataaaattatccccaaaaaccaggttggcactttgtttatttttttcttttttgccttcaaacactttttgtttgacaaattgtcccctaatacggggccggtggtctgctaattttttcctgctgggataccaaaccttcttctaaaaacatttttttttttttttt

SEQ ID NO: 52658 - DNA, 206 bp, Glycine max
  Clone ID: PAT_MRT3847_18563C.1
ggctcgagctcactcacatacacaattatctttatctttcactaacactaacacatgtcccttttcaaaattaagaggacacattcccaaaaacccttctcctataaaaaaaaatatttactatttaatttaaaatttttaccctaactaccattaaaccatttaagctttacactatacttatcatttcaacctgaacaattaaa

SEQ ID NO: 52659 - DNA, 379 bp, Glycine max
  Clone ID: PAT_MRT3847_18564C.1
aaaaaagcaagagagaaaggaagattaagatcgtgtctattttgcgatcaaaatccctgcgagcgggggtcaagggggaggggtatttccttcacagagcaaaccccacattccacatgacaatgataacgatggcgatgtttttctctctctgttttcctctcacactcttcccatctattccctcatgggttcttctctcttccttcccaataaaaattacccacttctaatgagacaaaaaggagagtgggtataaggccatttggttctcaggttcccacatctttcaccagaagaaactaacaccttccgttactggcgttttctgtgtccttgccaaccctttgctgattgtcactgccacaatcacaaccaa

SEQ ID NO: 52660 - DNA, 265 bp, Glycine max
  Clone ID: PAT_MRT3847_18565C.1
ccgcccttttttttttttttttttgtaaacccaaaaaggctttcctttccatttttttgtcccacctggtaatggcaggtggaaacttctaaacagaaaatcttatactattttcaagccaatatgatttcccccttatttcaatgacgggccccttgccttatctggtcctcatcagccgagatgaaaggccctccttaccacttcccgaaagggcatgtttcctcacttcaactgtccggaagagggttattggccttttctt

SEQ ID NO: 52661 - DNA, 422 bp, Glycine max
  Clone ID: PAT_MRT3847_18566C.1
ggtacgccagtcagtatccggaacggtggttcccctgccggcaccggcgcgcattctttcacacaacaagcgcttccttttgttgaacgcgatggtatgggccacgaatacaatcgacgcggtgaacggcagaggctgctcccaaccctaaccagactacctgatcctgacgtgctcctgcgatactcggaggagctgaagcgtgttttaactcgttttgacgccaacggctacagaaagatctccgcatgggagatggacatcgtcctgcagatgatcggatccggtgtgccgtcggaggagctgcagcgtgtgatggaagacacttgacaccgatgacgacggtttcattaacctctcggaggtcgccgacttgtgccgctgccacaccgaggtcggcggtgacaccgaaatgcacgatg

SEQ ID NO: 52662 - DNA, 1989 bp, Glycine max
  Clone ID: PAT_MRT3847_18567C.1
cggggggataagaagacttgtcggagagtgagtaggttgtggtcggcgagggactagcaccaagaagcaaatggccgttagcattggcgttggcgccacaaaagcgatatcaatggcaatagcagcgaggcacctcggaacaaaaccttacgcagcagcagcaacaacaacggcacttgctcttctctcactccacaaacctcttttcctccctcattcctctcccttctcctctcgccgcgctttctgcgccgcgactcttcgcaccgccgataacagagtgcaacagttccgcaggaagcttagggtttccgaaatcaaagaaggcgacggcgccgacgtgttcggccgcaacctcgtcgtgcagggctgggtccgcacgctacgcattcagagtatcgtcaccttcctcgataataatggcggttcttgcctttctaatatgcaatgtgtgttgaattcgaacgcggaaggtgatgagcagtttgaatctgattccttcattcagggtgcttctgggtgggtgaaagctgttgttgttaagagtccaaaatcaaatgaggaaataagataggggttcaaccaaatagtactgattggcgcgagcgatccctccttcctcaacaaaaaagaacgagcctgcacagtatttctaacaataaaagctcgtcttcgtgcgaggacaaatacttttggtgttgttgctaggcgttaggaatgcattggcatatgctacacataagatattccatgaaaatgggtttgtatgggtctccagtcctatcatcacggcatcagattgcgagggtgctggtgaacagttctgcgttactaccttgataccaagttctcatgaaactactgattctcctgttgatgctattccaaaaacaaatgatggattaattgactggtcacaagacttctttggaaaaccagcattcttgactgtttcaggtcaactcaatggtgaaacttatgccactgctctctctgatgtgtatacatttggtcctacattccgagcagaaaattctaacacttctaggcacttggctgaattttggatgattgaaccggagcttgcatttgctgatctaaatgatgacatggcttgtgcaactgcttatctccagtttgtaataagacatgttctcgataactgcaaggaagacatggagtttttcgatgcatggattaataaaggaatcattgatcgcttgagtgatgtagcagataaagatgttgtgcaaataacctacactgaagcgatagatctgctgtcaggagcaaataagaaatttgaattcccggtgaaatggggtagtgatcttcagagtgaacatgagcgttatataactgaagaggtattcagtggatgccctgtgataattagagactatccaaaggatattaaagcattctatatgcgacagaatgatgatggaaggacagttgcagccatggacatgttggttccagggattggtgaacttattggtggaagccaaagagaagaaaggcttgagtatctagaagctcgtttagatgatttaaagctgaacaaggatgcatattggtggtatcttgatttgcgtcgatatggttcagtacctcatgcaggctttggtttggggtttgaaagacttgtccaatttgcaactggaatggacaatataagggatgttattccttttcctcgaactcctggctcggctgagttttagaccttgcagatataagggacttcacaattcatttgtacgattcaaactgtattttaggcgataaagtatcttgagtcttttttttctttttttattttgaaaaagaaaatttcttgcttctaaatgaagtatttatacattatgaactgagtagaatgcaattttgaggcaatataatggtgtcttccccattgagcttatacattatcaaattgtattggatattcatgaaaaaaagaaattggatcctttcctgcagctt

SEQ ID NO: 52663 - DNA, 288 bp, Glycine max
  unsure (1)..(288): unsure at all n locations
  Clone ID: PAT_MRT3847_18568C.1
atcgacgtccgtccttgaattcctgacgcaaaaccttgaaggtaatgaaagactagctaaatacatgtcctaccccagcggacaancccgaccatggacctactcaaagagaatcttgacttgcccattgatcttaggaaaggtactcggtctacacgtaatccttatcctatttataacttcttaagtnatcattgtctctcttcttcataccattcttttgtttcctctttatcttctatttctcttcctaaaaatctttgtgaagcacttgatcatctaggatgg

SEQ ID NO: 52664 - DNA, 246 bp, Glycine max
  Clone ID: PAT_MRT3847_18569C.1
taactgtggaatacattacaaggctatcttggaatagaaagggcttgctgataactgttggccaagcaaataatactgttataaaccaagagaggctgaaccatctgaagcagcttatgggaggaggctgatccagaggcactttattggaggcactacatggaaggtactccgtctagcctgacaagacaggcactataatatatataattttaatgaattaaagcaggatggttttattacaag

SEQ ID NO: 52665 - DNA, 321 bp, Glycine max
  unsure (1)..(321): unsure at all n locations
  Clone ID: PAT_MRT3847_1856C.1
ctcagattgtaaaactctgcttttgtgttgtcttttatattaatagtgtatcatgtatgctttaatgtatagttgaatttcagtaggcaatagttaattttctcgatactgctattgttgattctttatgttacaaaagtgatcattcctttgacaaaaaaaaaaaaaaaaaaaaaaaaaaaaaaaaaaaaaaaaaaaaaaaaaaaaaaaaaatataaaaagaaccaaaaanccnaacaccaaaatgaaacaaaaattaccctcctataatgtcccactaatttctttttcctgagccctcactttacatcaacttagatg

SEQ ID NO: 52666 - DNA, 139 bp, Glycine max
  Clone ID: PAT_MRT3847_18570C.1
gaaatcaagttatattcacttgctacaaaattatatccatctcaagatacacacttatactcacgatcaccctagtcatctcgaccatggggcttccgcatatacccactctcggacctgttatccttcaccttcactc

SEQ ID NO: 52667 - DNA, 952 bp, Glycine max
  unsure (1)..(952): unsure at all n locations
  Clone ID: PAT_MRT3847_18571C.1
cggaattcccgggtcgaccccgcgtccgcctcaacacagcagaagcagcaatgaagaagaagatgatggcaagcacggccatctccctcgtcttcgccgcgctcttcctcttctcctccgtccactctttctacctccctggtgtcgctcctcgcgatttccaaattggtgaccccctctttgtcaaagtgaacaagttatcatctaccaagactcaacttccatatgactactacttcttgaagtattgcaaacccaaaacgatattgaacaatgcagaaaatttgggagaggttcttagaggtgatcgtattgagaattcagtatatacatttcatatgaggaaggaacagtcatgtactgttgtttgtcatgaaacattggatgctgaatctgcaaagagttttaaagaaaaaattgatgatgaatatcgagtgaacatgattttggataaccttccagttgctgttcgtagacaaaggagggatggaggtcaatcaacaacatatgaacatggtgttcgtgttgggttcaaaggaaactatcaagggagcaaggagggagaaatattttattaataaccacttgagtttcagagtcatgtatcacaaggatcctgaaactggttctgctcgtattgttggatttgaggtcaccccaaacagtataaatcacgaatacaaggagtggaatgacaagaatccacaggtaacaacatgcaataaagataccaagaatttgatgcaaggtagtactgtcccacaagaagtagatacaaacaaggatatcgtattcacatatgatgtttccttcaaggaaagtgatatcaaatgggcatcacggtgggacacatatcttttaatgaatgatgatcagatccactggttctccatcattaactctntgatgattgttcttttcctgtctggaatggtggcaatgatcatgatga

SEQ ID NO: 52668 - DNA, 591 bp, Glycine max
  Clone ID: PAT_MRT3847_18572C.1
ttgctacgtcgttttgtaacactaggcctcgtcatgctccttcttcttgcgggcataatcatcactgttttcatcctttcaatgcctctgttgatgatcgtgacaagccctatatggattccaactggtacggttttgtttctcgttactgcagcgttgttatttgtgtgcggattcgttgttgttttggtggctatggtgttaagggcttttcgctcctttgggggacacaacctttgagttgagtcggtgaaggttacctcatcttcggggttattatgtggctctacttgtgttttttttctctcttgttaggttctatgtttcttgtttacttttgtttttactttaaataatgatagtgtttcttggacatctcaatgtttctggagaggatccggaatcaatcaatcaatctgcaatccaagattaaaagaaataaaaccataaaagatggagaagtgataaatgtaactgtttcactataggagaggaagaaagagatgtcaagaaataaggagtgtgaatatttgtatttttcgggtgtctaaaaatattactcgttttattgttctagaattgtatccaagt

SEQ ID NO: 52669 - DNA, 2950 bp, Glycine max
  Clone ID: PAT_MRT3847_18573C.1
ttacggctgcgagaagacgacagaaggggaaacaggagagcaaccaaagctatacgttggagtggaggtgaggggagtgtttgtgtccgagggaacaataaagggcaaacaaacaacaaaacaaaggaaagaaaagatgttacagttcccggcgtatatgacgcagtacccattgtccacgatgaccattccgacgtcgtttctgctacccgctcagtggccccagccccaaaacgaagaactcctttctttctttctgctacttttttttctctcacctcagaacagaagcagcaatgaagaagaagatgatggcaagcaccgccatctccgtcgtcttcgccgcgctcttcctcttctcctccgtactctctctatacccctcgtgccgcgcttctcgcgatccacatttttgaccccccctctctgtcaatgagcacgttatcatatcccccaagtctccactcccatataactattattctcgaagtattgcaaacccaaaacgatactgaacaaagcagaaaattagggagaggatctttggggagatagttttgatagtgaaaaccattaacgtaaatgataaagatgacttataagatgaggcagatgacgatgatgctgacaatgaagaaaattgtgagggcgaagaatttaagcaagaaactggttgaaattgatgctcattagcaagtaaatatgattttggttaacctcccagaggccgattctagacaatgaatggatggatgtcaatctattacatatgaacttggttttcgtgttgggttcaaaggaaactatcaagggagcaaggaggtcgaaatattttattaataaccacttgagtttcagagtcatgtatcacaaggatcctgaaactggttctgctcgtattgttggatttgaggtcaccccaaacagtataaatcatgaatacaaggagtggaatgacaagaatccacaggtaacaacatgcaataaagataccaagaatttgatgcaaggtagtactgtcccacaagaagttgatacaagcaaggatattgtattcacatatgatgtttccttcacggaaagtgatatcaaatgggcatcacggtgggacacatatcttttaatgaatgatgatcagatccactggttctccatcattaactctctgatgattgttcttttcctgtctggaatggtggcaatgatcatgatgagaactctttacagagacattgccaattataatcagctagaaacccaagatgaggcccaagaagaaacagggtggaaacttgttcatggagatgttttcaggccaccagtcaattcaaatttgctttgtgtttatgtcggtactggtgttcagatctttgcaatgacacttgtgacaatgatatttgctttgctagggtttttgtctccatctaatcgtggaggtctcatgactgctatggttctgttgtgggtttttatgggcttatttgctggctactcctcagcacgtttgtacaagatgttcaagggcacagaatggaaaaggaacaccttgaaaactgcatttatgttcccaggcattctttttgctgtcttctttgtgctgaatgctttaatctggggggagcagtcctccggggcagtcccttttggaacaatgtttgctctagtctgcttatggtttggtatatcagtacccttggtctttgttggcagttacttgggttttaaaaagccagcaattgaagacccagtgaagactaataaaattcctaggcaggtacctgagcaggcgtggtatatgaaacctgtcttctcaattcttattggaggcattcttccatttggggcagtgttcatcgagctcttctttatcctgacatcaatatggctgaaccagttctattacatctttggcttccttttcatagtgtttgtgatcctattaatcacctgtgccgagattaccattgtgctttgctacttccaattgtgcagtgaggattacaattggtggtggagatcttatctcactgctgggtcctctgcgttgtacctcttcctctactcaattttctacttctttaccaagttggagatttcaaagctggtatcgggcatcctttacttcgggtacatgataattgtttcatatgccttctttgtgttgacgggaactattggcttctatgcttgcttctggtttgttcgcaagatctactcgtcggtgaagattgactgatttcaggcacatatagtggatgattgcaacgggaagcaaatactgacgggaagttacctttcccccccccccacctttgaaaacccttttttgtttattgttagggtagtagatggattgttaatttgttacatgctttttcaaatattattgtggtagtttctgaagtaatgatatatgtctgcatgacacgaccaagtgatgatgacatattaaatgagcaattaattgtgagggaatgtttgacgtgagggtgttataacttgtaaatttcgtattttaaaaattataaaagaaaagcatatgatgccttaaaaatccaagccatggaagagtccgatttcgaagaaaagtgcaacgagatcaggaagatgaacagcaacctaattgtgataggaaaaaccactaacgaaaatgataaggaagactttgacaatgaggcagatgacgatgatgctgacaatgcagaggaaatctgagggcgaagaatttgagcaagaaactggttgagatagctgcacatcagcaagaacctgttagtatgtttttggactgctaggccaaatctatgtattgagtttttcttctattaatcttttggacctagtattgagtattgacttgtcattcatatcaaactttgtattatttctgctcttttattatgcttaattaaatatttataacctttaagtggcatagccaatactttag

SEQ ID NO: 52670 - DNA, 199 bp, Glycine max
  unsure (1)..(199): unsure at all n locations
  Clone ID: PAT_MRT3847_18574C.1
catccttaattaaanatttttttgtttttttttttcatccagtactcgaaagttattagatccgaaatgaaacaaagggaggcaaacccggcgagaacaagcaaaaagcgggaggagaaccacggaagccccgagggggcaggctcagcatcagggaagcaaaggactgaaccgaaaagcttgggggaagatctctccg

SEQ ID NO: 52671 - DNA, 247 bp, Glycine max
  unsure (1)..(247): unsure at all n locations
  Clone ID: PAT_MRT3847_18575C.1
cgcatgcacgcgtacgtaagctcggaattcggctcgagcacaactgcttgggagancagnngtgntgnncnatgaatcngncggtgtngtgnttactagcanntggttgactgactacagncagcactcatggccatcanaactgcttggngagcaaccanctncaagcnaanntgtanttnctagtgntatagtnncatatnggtttaacatgcnaactagctttcctgatagcaaagcctngcng

SEQ ID NO: 52672 - DNA, 288 bp, Glycine max
  Clone ID: PAT_MRT3847_18576C.1
ccaatgttctattgaagtagtcactttttagatgagctcgctaagagggagcggcccccccctcaaaaaggcttaaggcccaccttacaaaaaaacaaggggcgagaggggcacccggaaaaaagcacccggggggctcaagaaaaaaaggaccacccccccgaaaagggcacaccccccccacggggcgcagccgcaaagcggaggaccccgaaaggaacagggatgtttaactctgaaacacgccacctggacaaggcaaacagggacccccccacagggcagggg

SEQ ID NO: 52673 - DNA, 130 bp, Glycine max
  unsure (1)..(130): unsure at all n locations
  Clone ID: PAT_MRT3847_18577C.1
ggttttctggttctcatnacctcaacttttgaagaggaagggcgcgttnggctttngtantactgatgctttagtggataagctgtntnnttgtcaaaacgcanggtgtccacagagtgngcctctatgg

SEQ ID NO: 52674 - DNA, 125 bp, Glycine max
  Clone ID: PAT_MRT3847_18578C.1
ggctaggcttgatccttgaccttgatcaatattaattcttatacatcagagaagacaattcaaaatacatgaacttctcaaatcatgtgtctttgtccatgtcctacctcgtttttccttggtct

SEQ ID NO: 52675 - DNA, 216 bp, Glycine max
  Clone ID: PAT_MRT3847_18579C.1
gggacccaaaacaccatcggaccaaatttgggggcttaagaatcgaatttccaacgaaagtcgtcccccaattgggccaatattggttttcaccttgaaggtataatttccttggtttttcaaccaaccccccaattaaaaaaaatttcttaacctatttaaaaaaggtttaaaggcagaggtcccccccaccaacctaaggggggggggggaaaa

SEQ ID NO: 52676 - DNA, 842 bp, Glycine max
  Clone ID: PAT_MRT3847_1857C.1
gccttctgtttgtgccgccatctaaatgggtcaatgattgaaacaaattgttcttcgattattctaatattttcaaaatgaacccaagccaccttaccctccttacaaaatatacagatgaggtatcaatctacacttactagtcgaccctaatttaaatccaagggatcttcctatcccctagcacgatcaatgaacatgtcctacaatatgccatgacattgcaaatttgataactaaggacacttacattttgtacaaaatctcaaactacaactaccatgatgtttaatgatgcgatcttcaaaaaaaaaagttgattaagaggatcatacccgttgcaggggcttgtaagttcggccatgctagcagatgcaaaagactcggttgattccatagaagacagggatgaaacagtatcagagtctgagacaacttcgtcatgatgaacaatgatgtgatcttcatcggtgtcggatgcctcagaccctgatgccccaagcaagagcttcaacattgatgactttgcagagaattaaatgctgcaatccaagtggcgtcagaggagcggattaatcctctaatacaccccagaactcttgttcatcagacaaccacatgacaacagtctctgttaacctagctagcaacattttctgtattttctctttcccacggtatactgctcctcccgcagttgctgctgcctgccgcgtggcttttgaggcccggaatggtcccctaggccgccccccagctcccccgcatcggtcatccccgtgaccactctcgctgttatccgcgctcgcccctgtttctccctctcctctttccatgaaagt

SEQ ID NO: 52677 - DNA, 275 bp, Glycine max
  Clone ID: PAT_MRT3847_18580C.1
gacattgctcgctctctctcactctctctctctctcgctctctctcatcacgttcgatcattcgcatctgaatctccaacgatggtgctcgacgagactataatttgtgatgacaagtcagaatggattcgtaacggggattactcaccatcacgatttcaaacccaagcattacgccgtcaatcttaattgcggtgctaaaacccaatcgaatccagaagatactgtgagagttctcacgaaggccgagaatggcgttcgtgttatggtgatcc

SEQ ID NO: 52678 - DNA, 241 bp, Glycine max
  Clone ID: PAT_MRT3847_18581C.1
ccgcgtccagtctgctaggaatgcggcccgacgtgacccttccttgccaagatccaagtcgctaacaagagagacctagatctcacactggacggaccattcgccattgccagatagaactgcaattaccacccggcgtcacattccaccgcactgacgatgagcgggtgaatcactactggtgtagaaggtgtgctgctcaatccgttgctaggcccatgataatagaattcgatcccgt

SEQ ID NO: 52679 - DNA, 154 bp, Glycine max
  Clone ID: PAT_MRT3847_18582C.1
gagttgattacgagcttggcgaaaaccagggacatagcgcgccaccagtgggaaagatgtaacagcgctcacaaattggggacgggcagacgagcgcggaagcaaaaaagtggaaaggcggggggtgcactaaaagagagagctaacccaaaaa

SEQ ID NO: 52680 - DNA, 388 bp, Glycine max
  Clone ID: PAT_MRT3847_18583C.1
gttgatgacacatagcaaaaatatcgaacacttcccttctactataagagaaaggggaggggggcgcatgaagtgttcgttcaattatatgcaatggatcgcgttcttcataaacagaaagttattcaatcattgcaagacaacctaacccttggaactacctgagaaaatgcaaccccgactagccccctgtacccagagaataaaataacacaagccttattccacactaagagaaactggctacaaggatcgctggttgccatggcacaaagctgatccccagatataaaaaaaatcaatggtaaagagaaaagcccacagcatacaaggtactaaccatcatggcctgcgcactccaggtaaccaaaatgaaaattctatcccg

SEQ ID NO: 52681 - DNA, 452 bp, Glycine max
  Clone ID: PAT_MRT3847_18584C.1
ggggggggggggggtatgttcattcattcggtgtaaaattctcatctcttctattttctctcaaaaccaccaattaattgacttattctattcagaaaaaaatgttataagagtttattgttcattttcaataagagtttacaaagggaaaactacaggatagggaattattcataataaaagcatattctaagtaccaccatgaaaattctaatcggcagaaatgccattgaagatgcaggtattcctttctaaccccaaaaccctcaaaattcaataaacaggtcattgccacaagatttgttttccttcataccaaacccttgaaacaaatgtgtagaaactgatccaacctactaggatataccccatgctcatcagtttattccaaagcggtcacacaactgggcagggttaaaataaatgaggcacagtttctgacttaaatgtag

SEQ ID NO: 52682 - DNA, 192 bp, Glycine max
  Clone ID: PAT_MRT3847_18585C.1
acggctgcgagaagacgacagaagggtcatgtcctaacttacgtgacgaaacttgagggacattattaaaactacaagagttgaatcttccatcaatgctctgacccctttccagatctcattcctctctcgtttcctcatgtgcaccatgtgcacactcataggcccactacaatgatagggctctccctc

SEQ ID NO: 52683 - DNA, 240 bp, Glycine max
  unsure (1)..(240): unsure at all n locations
  Clone ID: PAT_MRT3847_18586C.1
canaataaatnactatttgtgccttaaagctangtagcaaacnggacnccttgttacgtaccctnttatangttgnactctccattctttctctccttgcntgttttacgaatgcacaantttctaccaacttttatgatagancttgtcctaaccttnaaaccattgtgaanaatgnnatggagcaagctatnnatggagnngncaggnttggngactctatacttcgattnttcntnc

SEQ ID NO: 52684 - DNA, 442 bp, Glycine max
  Clone ID: PAT_MRT3847_18587C.1
aaaggaaaacccccccccgccaaaattttttaaaccttaaaaaaggtgttccctaaagaacccattttcccacccccccattggggtccaagggttcccccccaaaaaaacccaaattccccgggaaaaaaaaccctaaaaaaatttttaaaagggagccctttttcctaaaacccggcaaaaaggcggaaggaaacccccccggggtttttcaaaaaaacccaattccttcccgccaaaaaaacccttaaaacctcccaaaaagagaagcccagaacccggccccaaatttccggggaaaacggaaataaaaaaaggggcgggtttttaaaaaaaaggggggaccccggacccggaaaaactaaaaacggggaagaacctccctcttttttttcccagggggaaaatttatttaaccttggaaaccaaacccccctataaa

SEQ ID NO: 52685 - DNA, 236 bp, Glycine max
  Clone ID: PAT_MRT3847_18588C.1
cgtacgaactcggaatcggtcgaatcgagcgattcggctcgagtacggctgcgaagacgacagaaggacggcgaaaagcaagcaattgagagaagcgaacaagagtccacttttgagttcaaagccaagcaaattttctttgggttttggattccataacgagtaccgttgttagagggccgaagaaatgagaagcaaggaagagagagaacaagaggaggaggttatggtgatag

SEQ ID NO: 52686 - DNA, 297 bp, Glycine max
  Clone ID: PAT_MRT3847_18589C.1
gggggaagacgagacccaaaagagggggtcatacaaatgcatcattaattggatttgatcgttcctactacaagctaaaattggaatttctattggaaagccccccctgaaagacccattatttcccaaatttacattttaatttttttttgcacactttataatcattatatttccacatttttaaccaacacgtacaagggctttccgttaaaacgtttacgaccctttaattttggtaattcaattacccatgcccccttcaccatttttggttccaaacgttttaacaagttc

SEQ ID NO: 52687 - DNA, 248 bp, Glycine max
  Clone ID: PAT_MRT3847_1858C.1
caccacttctgaatcaaataatccaacatcacatatccgtgtaacaacagtatttctattcaaacgtcgactcaggttcactccaaaacataaacttagcaccgtcgatgaatcagcacaattggctacatcgtaatcacaggacgatcatgcaccgtttttcaagtatctacttcatgatcagaaggacaacgacaatcaagatgacaattagtatgaattgaaagattcagtgcacaatactctaa

SEQ ID NO: 52688 - DNA, 556 bp, Glycine max
  Clone ID: PAT_MRT3847_18590C.1
ataataaagtttttataataatatcaattgaccaaattagcagaaataatccaccgcatacaggtggctaagggcatgcttagttaaccatttaaaaatacttttggtacacccaagacaccaagcctcttggaaacaagattctaggaccctttaaatccaagccatgtttagcgggtaatctgccacaaaattagtctccagcaaactcttgcaccaataccagagtaacaatgagagggaggacaacttacattgaggatactgcgagctttcaacaaataaactctacaaaatgcacagttccaaagtgaggactgatgtaattcctatgctgcgacaatgaatatggcttcatttatgggcatcgcatatatatttgcaactgttaattttgaacagaaaaattctaagccaattatatcctcatttcctcatggatgtgctaataaactattagatttcgttaattctttgaactccatgtaatgttgtttggatacgaattgttgaaaccaaattggcattgccaatctgagtttttttgttaaaacaa

SEQ ID NO: 52689 - DNA, 1894 bp, Glycine max
  Clone ID: PAT_MRT3847_18591C.1
ctcgaccacgagccgtgagataataatcgtgttggatcgagtcctccgtcttaccggtgtcaacgaggtggcggagaatggaaaacgccgacgttttcttgggcttacacgacttcctcgagcgcatgcggcaaccctccgccgctgaattcgtcaaagcaatcaaaagttttattgtttcgttttcaaacaatgctcctgatcccgatagggacagtgctgcggttcaagcgttcctcgcgaaaatggaagcggatttcagggctcatccactttgggctggttgctccgaagaggaacttgaaagtgccggtgaaggacttgagaagtatgttatgacaaagttatttgctcgtgtatttgcttcacttccagatgatgtaaaatttgatgaccaactttctgagaagatggctttgattcaacaatttattcgacctgaaaatttggatatcaagccagtatttcagaatgaatcatcatggttgcttgcacagaaagaattacagaagatcaacatgtacaaggcacccagggataaacttgtctgtattctgaattgttgcagggttattagcaacttgctacttaatgcttcggttgcttcgagagagaatcctccaggagctgatgaatttcttcctgtgcttatttatgtaaccataaaggcaaaccctccacaactgcactcaaatctactgtacatacagaggtttagacatcaatctcgattggttgcagaagcagcatattattttacaaacatgctctctgctgagtcattcatctcaaacatcgatgcaaaagccatttcaatggaggaagctgagtttgatggaaacatggaatttgctcgtgctatgctttcgggtatttcagctgatacactagatcctggttcaccttatcaaaatgatggacagcatccaagagcagaacccactaagcacaaagctttgaatgataataatgaccctgcactacgaactccatcatctgttgcaaaatcagaaagcaagaaagtgacttttgcaaatgaatcattgatcacaaaagttccatcgctctcggatttggagaataaaggggcaagtatgattttaaaggaggataagttgaatgaagttttcggggagtttccatatttgtttgctagtgtaggtgacctaatggttggtgatgttgaagacctgctaaataattacaaacaacttgttttcaagtatgtctctctttccaaagggttaggaatctctcctacatctcttccaccatcgaattcccaaaataattctgaagaccatgctgaaaccacaatagattcttcagacaatggacctctagatgacaacagtaaatcagaagaatctattgatacaacagatgatagttcagataaagttacacttgaggagcaaaaaattgaatccgatctgccgaaggatgaccttgttgctcctgagggtgatcccccctcttaactaatcggagctatcttcaaccattttctccccgttttgtaccccattttttccacccgtttttcctgtaaaattatttttatgttgtccgttgtctggtagctacactcgttccttatgtttatagggatggctgtaccatgaccactatgcctcggtaacattgttcttgaatagattttagacctgcaaaaaatagaattttacatttgcttttgcgatggaaaaagaatgtgaagatgcaaatcttgttttgttcgatttaccccgtgtacgttgaatattgatgaactgatatttaaccgggtcggatatgtattaatgtatttacctcgttatgcaagttttgttgtaatgttggatgtgaaaactaatataaatggtggttctgtctgcagtatcaaaaaaaacac

SEQ ID NO: 52690 - DNA, 607 bp, Glycine max
  unsure (1)..(607): unsure at all n locations
  Clone ID: PAT_MRT3847_18592C.1
cccacgcgtccgtacggctgcgagaacgacagaagggtacggctgcgagaagacgacagaagggtacggctgcgagaagacgacagaagggtcagtggttcaataaatatttaactctatattaaaattgaaaaatgatatttaatgcgataaaataattaaattttatgatatacatgcttatggttcatatttgcatttttcttcttcttcttttttgtatatacgaatgaacaaatatgattggaacatgacagtagaaaaaccatatatgagatagcgtgagagagttcaacctgcaaaatttttattattttatatattattttgcattacactttatttaacattatttccattttatcccaaaccactccaaaaaaacaaagccattgactactacaatttgttctgtcatatatggctatatatatgtacttttgcagaaccgcaattgcaaaggcaatatccaccaagacacaacacaggacaatgtgggcgatgagcacaagatggaacacaatctttgttggttttgcattgatcgcctcttgcactagcttgttgagttaaacccaaannnnnannnannnnnnnnnnnnnnaaa

SEQ ID NO: 52691 - DNA, 599 bp, Glycine max
  Clone ID: PAT_MRT3847_18593C.1
ggctcgagctgacagttattgtttacaatatcatggtaacatgatggacctaatcccagctatgcaaaggagaacatttcctccaaggagcagaacactaagtagagactttgaggagtccttactgatgaaatcttgcaacaaattagacatgtcttcttctcccactaggatagttatcttgaagcctggtcctgatagcattcgcaaccatgaagagaattggactatttcgtcgggaactatacaaggaagaaatagtatagaagattttcttgaagaggtgaaagagcgtttgaaatgtgaactgcaaggtaaaattgtcaaaaaaggttctgtggttcgagggagtggaattgagacaccttacaatgaaaagccatctgatcctaaactaatagcccgtcacatagtaaagcaagtcagagaaagtgtgactagagatactgacacaactttactccactcagaatcaacaggatcatacaaaagtgaaatgcagttcaatggaccaaagctcccagaatttttcagcagagataccaagaagttcttgtccaagaggcaaagaaatgttgtgagaagggaagcacatgctg

SEQ ID NO: 52692 - DNA, 1475 bp, Glycine max
  Clone ID: PAT_MRT3847_18594C.1
tttttatatcatcactcattagtaaatattttgtttgctttgttattgtgaatgcttcaggatatccatttagaaagtgtgctgccaatgaacaaaacacacttaagacaatcgccacaacagcgtgaatgaagtttattaaaataccactgataacagagccagattattataggtatctttcttttccttttttttttttttgttggtactatctaatagaccctgttcatccatgaagcacaatgggctaacaaggtctcaggaactagccgaccatcatttccttgtccaccctacatagttataacaagacgttgatgagggtcaattggtgaagtaagtacgaggtgagaagaggcgacgaggcgagaacattcccatgtagcgtggagaagcaaggccatcgatgggtctataatcaggcacgatgaaagcctcgcgttcctcgcgggccccagcagctctgctttgtccaattccattgaaggttccatacctgaccaacctccccacccaagacttagacttcttattattagtggtgggactttgatgtccggcgttcatcttctggcacaggtactccttcaccgcatgcaacccctgctccaccagctccggcggcggcgaactcagagggttcccttccacgctaatcttctgcagcttcttcaggcatccgatggagtccggcagggccctgatcttgttgtagctaacgtcgagttccacgagggacaagaggaatcccaccgagtaggggagggagtccaggtactggaagttctggctcacgtttagggtttccaggtttatcagattctccaggtcttctgggagagaccttaggcagttcaaacgcgcgtccagaatcctcagtgcagtcaggtgagaggtcgaccgaggaaggaacaccagcttgttggagttcactgatagcttcttcaggtttttcagctcgtaccctatcgtgtctggcagctggatcaacttgttgaagttcgcattcaactcttctaagcttctgcaattttcaattgttttgggaaggtattcgatgaggttgccagagacattcaaaaccttgagcttatagaggcagccaatggaatttgggagggacctaagctgattggagtgcacgtccaacaccaccatgttcagcagtctcgccgttaaggactccggtatattcagaagattgttattagagaggtccaacttgcaaatggtggctaaattaagagaagggttgggaagggagtccaaggacatgccactcaagtccactatttcaagcctctcatcagcttcctctatgccgcctgatgatcctttcttcttcctcctcgtatccattgtcatcggttgctgatgatgaaatcgttgctgctgctcgtacatcatctttccgaatttccttaattttctttttctttgatatgtgaaaagagagagaatgatagatagat

SEQ ID NO: 52693 - DNA, 558 bp, Glycine max
  unsure (1)..(558): unsure at all n locations
  Clone ID: PAT_MRT3847_18595C.1
acgaggacttctctggagatacaatcaaaagaagaagaagaagaagcagaacacagaacgcagagtaaaacgagaatgttgctcattcttatgaaagtggggaataaattaatcattaatcctaatacctatgcaactttcataggtcttatttgggcaagcatacacttcaggtggggagtagatatgccagatgttgttaatcagtcaatagaaatattggccagtggaggtctaggcatggcaactttcagcttaggtctatttatggcatcaagcaacagaatcatagtatgtgggccaaggatgacactggtggcaatgggcctaaaatttcttgccgggcctgccataatggctgtagcctccattgtgattggattaagagatagaatgctcaaagtggcaattattcaggcagctctaccacaaggaattgttccttttgtttttgctagagagtataatgtcaatccaggcattntaagcactggggtcttgctaggaatgctcatggccttgcctgtggcattgacctactatctcctcttatcactc

SEQ ID NO: 52694 - DNA, 1068 bp, Glycine max
  Clone ID: PAT_MRT3847_18596C.1
aattcgtctcgagcggagcctcaagaagtcgactgatcggggcaacaacaacaacaacggcaactacaacaacaaccacaaccaccacgcgaacggcgaggacaacgtgctgataacgccggtgccgcggttcccggacaagagcgacgacacggaggacatgaagatttgcctctcgaaggtgtacaaagcggagaaggtggaattgagcgaggacagaatgagcgcggggagcaccaagggttacagaatggttagggccacgcgcggggtggtggaaggcgcgtggtactttgagattagggttgtgaagttgggagagagtgggcacacgcgcctcgggtggtcgactgagaagggtgatttgcaggcgccggttgggtacgacgggaatagctttgggtatagggatattgatgggagagattcataagtccgcgctaagggagaagtatggagaggaagggtacaaggaaggggatgttattggtttctatatcaatttgcctgatggggaacagtatgcccccaaatcatctcaattggtttggtataagggccagagatatgtttatgcacaagattctaaggaagatccacccaaactagtgcctggaagtgagatatcattctttaaaaatggcatatgccaaggtgtagctttcaaggatctccaaggtggtcgttactatcctgctgcttcaatgtttactctccccaatgaaccaaactgcacggtgaagttcaactttggtcccgactttgagtgttttcctgaggatttcaatgaacggccaattcccaggccaatgagtgaagttccttatcttggttttgacaataaagttgaaaatgaagagtctaacgagaagaaatcccagaaagagtgatgtgggttgcatttattcaagtattaaaattgattgtcttctgtaatgttagttggtatttaagttgattcccaaatgattagattagtggtgtaaacttctgatagagaaatttggtcacgtgaaatacataaaattttcacgtgttcaattagatattttgtagtttcctcccccc

SEQ ID NO: 52695 - DNA, 497 bp, Glycine max
  Clone ID: PAT_MRT3847_18597C.1
gtcgtgcgtaagagcaaaatctgccttgccgacaatatgattttctgagtccaatcatcatctttcaaatttactttttttttaaaaaaaaattagtcataatgttttgtgatctcttttcgttggggttagtagttcatgtgtagggtacagttaatttcatgcaaaacaacatgaattgaagatggtagtggtgggattgctatatatagagtttttgaaagaatttataggaactttatttatttaaatttatgaaagaaatttatgggtttcataagttatttttaagttgtataaattatcaaaacaaacttgttttcagcatattgtaataagtttcatgactacatttatgatatgaaatcttgtaggataagaacttataaaatacttccttttctaaaataattgtaagaaaaagtaataaatagataaaagaaaataataattttaccaaattaatcttttatgatcattaatttatttatcaattg

SEQ ID NO: 52696 - DNA, 240 bp, Glycine max
  Clone ID: PAT_MRT3847_18598C.1
agaattgaaaagcctcatcctgtttatgtgccacgggatgaaacttttgaggagatcaaacaggacactttctctgctggaaggttgaaagctctgttccacactacatacgagttcccaacgtctactctgtcatgtccacacgagcctcatcacgtcgcccctgaccttgatgagccttatctctacactcgtactgaacgccgaggagacgtacgcgtctaacgacgtctcagctct

SEQ ID NO: 52697 - DNA, 440 bp, Glycine max
  Clone ID: PAT_MRT3847_18599C.1
gatcatgaaattgacatggtagctgctctcctagctgagattgagtctggccacatccatcaatccagcagggatttcctttggtggaagcctgaccctaatggtctattttcaacaaagtttgcctacaaagtgttgcaggaggctcataataatgctaatgaagacagggcctccaagattatgtggagactgaaaattcccccaagagcgagtgctttttcttggagactattcaagaacaggctccctactagggataatctcagaaggaggcaagtgacattgccttcatacagctgccctctatgtgagcatgaagaagaatctgtcaatcatcttatgttcaactgctccaagactaggagtctttggtgggagccaatgagatgggttaatagagtgggtcctctccccatagacccaaagaatcacttttt

SEQ ID NO: 52698 - DNA, 425 bp, Glycine max
  Clone ID: PAT_MRT3847_1859C.1
caattaagctaattgattgctcaaattttctcttatttacaatgttcattcaattacacaaaatatttgactacactagcagaatttccatacgaattgagcaaaatgaaaaacgagacactaataacaaaaacaaaagagcctttcaacagtttttcttaccaaacaaaaacccccccaaacgccaacaaagtgcagaaacttggatcacgaatctccgaatcgcttcttgatataattcctcattgcttccctgcgagacttaagacgctcctgttgaggagccacgttaacaaacgagaaataagctccgacgccgaagagcaaaccgccgacgacaaatacgccgccggtcaccgccatttgccttgccgtcggcggatacgaccacaaccggacgcgtgggtcgacggggattccggacc

SEQ ID NO: 52699 - DNA, 256 bp, Glycine max
  Clone ID: PAT_MRT3847_185C.1
ggacgcacacgtgacaaacgtaattgggaaataagcaatgccacgctatagtaactaatatgacataattttaaatgttatattgaaaaatgaagagtcaattttgtatatagtgtcaaattgatccgtaatagttttgaatctaattgaaaacatgatgaattctctcttatcattttctccctcctatggttgaaggatagcgttcgtgtgctaggtccacgtcgatcatcgctctcccagttgtgatggttgt

SEQ ID NO: 52700 - DNA, 397 bp, Glycine max
  Clone ID: PAT_MRT3847_18600C.1
ggtcaactgggcattggtcactcactcattcccaagtcctaaaccctctgccaatttgaacggcgaactccctcattcttcttccgcaatctccgttctactatctatctgattagaagatagcgtaaattctaagcaaaatattaccgtgttctttagcgtgacccaccttcataaataataaaaccctatgcaactgcaccatcctcgtgttctcttcaaacctctcatcctctctttctctttctgatcacaatgtcgaccttcggagccgccgcgaatacgaatcccaacaaatcctacgaagtagcccaaccaccccctgattcaatttccagtatttgtgtgaagtccaaaaccaatatactctggactacttcatgggacaaccaggttc

SEQ ID NO: 52701 - DNA, 115 bp, Glycine max
  unsure (1)..(115): unsure at all n locations
  Clone ID: PAT_MRT3847_18601C.1
agactagaaataacagtagncaacaagggcccttaaagaataaggaagaattgtgacaaaagattaggaagatttcaccgccaatcaacattcatcataatttttgggcaccatg

SEQ ID NO: 52702 - DNA, 184 bp, Glycine max
  unsure (1)..(184): unsure at all n locations
  Clone ID: PAT_MRT3847_18602C.1
gtctctacttttgnagataacaggacattttccgggggagctgattcccctctctttcctcacttttaaagtttacaatatctccgatgtccccccatactaatcgcacctgcactagctccatctcccactccgccaaagacaacgccatcgccaaaaataatgtcgaaaactaacatctctc

SEQ ID NO: 52703 - DNA, 398 bp, Glycine max
  Clone ID: PAT_MRT3847_18603C.1
caaagccccattaaccggggccccctggcctatatcactcaatactaaccggttccaattccaattggattattgtttttggaaaaaaaaatatttccctacttacctttttggggtccttccagttatagcccaaatttttattttatggggaaagggaaagggcctttgctaatttttttaatttgcaaccaaataaaggcatttggtgaaaaaaaaaagccccatgtataactcttttctaaggtaaacaaccaaaaaaaatcactaattgctttaaaaaacagggaaaatgctgccattctatattagcaactggccggtattgtttccatccctggaaaccatggggacctgagccaattcagtgaatagcagaaaatcgtggcgttcgcttg

SEQ ID NO: 52704 - DNA, 227 bp, Glycine max
  unsure (1)..(227): unsure at all n locations
  Clone ID: PAT_MRT3847_18604C.1
gaagtttgcagaactctacgagacccttgtgctggaaaatttaccggagagctttcagagttctttcccgtcattaccttttccatccttgtctgaacggggagactttgacttgaaggaatgantagagtcaccatatttcttcaactgatcaccatcttctgccttctcgtatgcttggactgtcttctagggcttattgataacatttcatgttatgtctgtga

SEQ ID NO: 52705 - DNA, 131 bp, Glycine max
  unsure (1)..(131): unsure at all n locations
  Clone ID: PAT_MRT3847_18605C.1
ccgctgatgaatgcacttgaactagcacagttgccttatttgaacatggtnttgaaggagaccttaaggttatatccggctggagcctggctagtgactcgagagtgcttatacgatgtaactattaacgg

SEQ ID NO: 52706 - DNA, 493 bp, Glycine max
  Clone ID: PAT_MRT3847_18606C.1
attcggctcctggttcttgcaggttctctccttggcttcttagggcagatggggtcctctgctagagcaagccactttcaggaaccgtcaccgtctctatctttccgaacagactgatggcagtgttcccaatactcttgttaaacccagggttgctgcagagtttaatgaagaagctcgctctccctttttcaagaagtacaaaactgtattacatcctggcgaggtgaatagaatcagggagtttcagcaaaacagtaagatagtagctactcacacggattgtcctgaggtacttatatgggatgttgaaactcaacctaatcgtcatgctgttctgggggctaccacttctcgtccagacttgatgtattaactggtcataaggataatgctgaatttgctctggctatgtgcccaactgaaccctttattctttctggagtgcacaggagttctgtagtgtaggtgatgattctcgccttatactctg

SEQ ID NO: 52707 - DNA, 1651 bp, Glycine max
  unsure (1)..(1651): unsure at all n locations
  Clone ID: PAT_MRT3847_18607C.1
gtaaaggagaaagagaaggtggaggagaggtacactcagtggaagtctctggttcccgttctctaccattggctcggcacccacaacctcgcctgctcttctctttcttgcagatggggtcctcagctagagcaagccacttacaagaaccgccaccgtctctatctttccgaacagactgatggcagtgttcccaatacccttgttattgccaactgcgaggttgttaaacccagggttgctgctgctgagcacatctctcagtttaacgaagaagcacgctctccctttgtcaaaaagcacaaaactatacttcatcctggcgaggtgaatagaatcagggaatttcagcaaaacaataagatagtggccactcatacggattgtcctgaggtacttatttgggatgttgaaactcaacctaatcgtcatgctgttttgggggctaccacttcccgtccagacttggtattaactggccataaggataatgctgaatttgctctggctatgtgcccaactgaaccctttgttctttctggagggaaggacaagtgtgtggttttatggagtgttcatgatcatatttcaactttagcagtagaaacagcatccaatgttaaacagggctctaaaactgggggcaataatacaaaagctacagaaagcccttgtattgaaccaaggggcatttaccagggtcatgaggacactgttgaagacgtgcaattttgcccatcaagtgcgctggagttctgtagtgtaggtgatgattctcgccttatactctgggatgcacgcgttggatctgctccagttgttaaggttgacaaggcacataatggagatcttcattgtgttgattggagtcctcatgatataaattttatcctgactggttctgctgataatacaattcacatgtttgatcgtcgaaatcttacaagtagcggagttggatcacctgtctataaatttgaaggtcatgatgcagcagtcctctgtgtacagtggagtcctgacaagtcatctgtatttggaagtactgctgaagatggtattttaaacatctgggaccatgacaaggttggtaaaacaacagactctgctgattcaaaagcatcaaatgctccccctggtttattctttcgacatgctgggcatagggacaaggttgttgacttcccctggaatgcatctgatccatggacaattgttagtgtttctgatgattgtgaaagtagtggtggagggggcaccctacagatatggcggatgatagagatataatatatcgaccagaggaagaggtgctcactgagctggataaattcagatcacatatttttggatgcaactcatgacatcttgtagaaactataactttcaactcatgccaggattgagtagaatgttactcgatctaggttacaagaaaatattagaatgtaaaaaacgacatgatacatccttcatctgagggaaactctttaaacatttcgatgttctattcttgttttaacgtcagctctcacccaagcaaaataggaaacacgttttgcatcttttgtttggaatagaaggtatatgattttaaggggaaaaaaatagttccccccttcntnttggggacncnnaaaaaaaannnnnn

SEQ ID NO: 52708 - DNA, 335 bp, Glycine max
  Clone ID: PAT_MRT3847_18608C.1
ctagtgattgacttattctgaatatcattgaattttagttgtttaatcattgttgatatttatgaacttggtctctaatattctcataaatagaaccgcagaagatggctattttgcatttctatgggctcagctcagtgcttaagccatgaagactcgatctttgatgaagttcgagaaaactgagactatgttggtagataattcttggttttgtttggtaattaatctgtttttccccacaaagcactcacttatcaggcaacagtgacctaaaggcagaggcttgttgacagaaagacagattatttcccaggctaaaccatgaattgttt

SEQ ID NO: 52709 - DNA, 274 bp, Glycine max
  Clone ID: PAT_MRT3847_18609C.1
ggggggaaagccacggaataaacgatagaaattttttacaattgtcctaaaccggtaacttactttccaattactatttttttattacatcatcaaaaacaaacatttaatgaactttaaaatttatgtccaccctaatcaaaacttacatacagggaagatggaaccaaatttttactctaaaaatagcgttcaaaaacatttaaaaaaaatttaaggacttacttcttttctactgtccttcaaaactttaaggccattgtcccttttttta

SEQ ID NO: 52710 - DNA, 808 bp, Glycine max
  Clone ID: PAT_MRT3847_1860C.1
aaattcccgggtgggccgacacgtccatacggctgcgagaagacgacagaaggggggatccaatcgcgttagggtttttgagagttgcagtttgcactttgtaggatcatctcctagcattgatcgattgagatggcagacgaagctaacagaactgctttccttgaaattcaaagtcgcatgatcgatactactggaaaaataaaacaggtgcaaacccagatgcgttccaaagaagcagaaaaaaagcgtgcttttctgaccatggaggagctgaagcaagttcctgatgatacgaatgtttacaaatccattgggagaatgtttgtattggagaccaaggcaacattaatgaatgaacaggagaccaagtttaaggatggtgaagcttcaattactgcattacagagctcaaaagaatacttggaaaaacagatggcagaggtggaaaccaatttgagagaactgctacaacaagatcctggtcttgctaggcaaatcatgtctatgaatgtagtgtaaactttccgttagtgaaattaacttaaagtggcagggttttctggtgcatttgagcaaatagaaaattcaggacttggtgagatgtgaggaaggatgtgtactgcctgcttcatggatgattttctatacttctcaaaatgttgaatttggagggatttttgtaagttattttaattcttagattgctatgtttattacatgaatgataatccttattagttgtgtgcagtatgttatgttattcatgcaacaacttctagttagtgtgcatctgctatttcctaaa

SEQ ID NO: 52711 - DNA, 113 bp, Glycine max
  Clone ID: PAT_MRT3847_18610C.1
ggctcgagcaaaaacatacttctctggcttatgcctccaaccggatgcatgtcagccagactagtgaccgatattgtagatattcaggctgacagtgcaggacgggcgtcaca

SEQ ID NO: 52712 - DNA, 254 bp, Glycine max
  Clone ID: PAT_MRT3847_18611C.1
ctatggcacatgctgatggtgcatagagtgatcaaccatgacatggaaggtgagctgcataaatgttgaaatgcccaacccagctgaaatttcactattccagattggggcgcactaacttggatgaacaggtgaatgtgggagacaacaaatccttcaaattgaaggtgggttgcatcttttgcatcatcaaaaaggtttgaagtggatccaatttatacagcataggctcctatatgtatgcaccattcatg

SEQ ID NO: 52713 - DNA, 450 bp, Glycine max
  Clone ID: PAT_MRT3847_18612C.1
acacaagaatatataacttcattatagaggttctcctctgtatacatacaaaccccactccttaattacacagctcaaacaactcaaacaatacaatggtaataaataatggtacgaataaagtataaggtaaatgatcaataatataataagaaacttatggtagcaaccataaacatggtacatgtgaatttaaattttaaatgtcacggtttcttctgcattcaggtggaagctgagggtagcggcttctgtcagtgcagtagttgtagatggtgtatttcctgcgcacccacctgagccaacgccattgagaagcatcaaggtcacgatactgtgcttgatcccaccacctcttgccctgtgtggcacagaacttggcattcactgaggcttcacacccatcaatgtggaaccctttgtattctgcgatgaatggtgctttggacc

SEQ ID NO: 52714 - DNA, 496 bp, Glycine max
  Clone ID: PAT_MRT3847_18613C.1
tccttccaggaaggtttcccgtcatcactgtatgacgtcctccttctttggggggggggggggggggaactataaaagatggtcagaatgggagaggaggggatagctagctagactagacagacttgctgtgtaaaggacgtactaccaataaacagacacacagttaatcagtgggaaagggtatagggcttagaaagagagaatacaaaacaccgagcccagagcacggaacggggcagtgtaggtaatgatacgagtttaaattaggatgtggaacatgggcaatggtatggcgatgtgaccagtagcggcggtgtaccagtgaagttaatatacgtttggaccagcggggttactagagtgcgtgcgtgggcatacacgtaggaattatccgtcgatgtccgccaattacaccccttggccgtacgaatgcaccagccgtctaatcccgccaagcacgccaatgggtttgcaggggactgggaaatgtcag

SEQ ID NO: 52715 - DNA, 581 bp, Glycine max
  unsure (1)..(581): unsure at all n locations
  Clone ID: PAT_MRT3847_18614C.1
attcggctcgaggttgattttttttatgaatgcagagaaggtggaagaagacactaaagctgcgatttttatctcaaactccatgaatacatgttcgttttcttgctttgtctatcaaagcttaaatttgtgttttgagccttctccgacgtgcttcccctgccattttcaatttttatctccaaactccatgaatacaggttcgttttcccttcccgtcttcttctatgttttctttttttacctctatttgcatttgtatgcgttttttattttttcactgcatgttcattgtttcttctaaagctgcgatttttatctcataaagcttcgatttttatctccaaattccatgtacagaggttcgttttcttgctttctctatcaaagcttaattttttttgtgttcccgagctttctttgtcgtggttcccccgccattttcattttttatctaaaaaaacttcaatttttgcctagatttattatattatacttcaattggtattattaatttattcatcatctttaactttctatattctgacagnacttttgcttttgctattttatttttcttt

SEQ ID NO: 52716 - DNA, 379 bp, Glycine max
  Clone ID: PAT_MRT3847_18615C.1
gcctcccgtacctaactgtacagctttacataccacaatatcacactctttcttgaggatggtgtccattatgcagctgtataataaaaactactccatttctacatatggaaaagagctccagtcccaggtttctgagaaagatacttacaggtgcacagtgtactgacaagtaactccgacagagcttgctgtacctcttgttatcgatgatcctgaaatcaacagtaatgcttccattctactcaatgggctctgttggacataaaaaagaagcaggtatgactcaaaatagctacatacagctcctggtaatttgaacaatttccactatataaccacagaccacctccctcacaatgtggctaaatgtgatata

SEQ ID NO: 52717 - DNA, 375 bp, Glycine max
  Clone ID: PAT_MRT3847_18616C.1
ggggcacagatgggtctggagttcgtaaatactagagtcactgtcataatggtgacaggccttgatttcatcgtagctattttataggaaacatagcatagcctatgcgtacgatttgttccctcttatttagaacaatgatgaatgtgcacgtacacctttagttttatgatttttttaggagcttactatatgttctttagtgaatcttttagctttcataacttatccttatgtgcgtttagtagtgtccaaagatggtatcaatgggtatccatgaatttcacatacacctgtctataacatttgtctgatcataatactgcagagcatgtcatcaatttaatcgacacatttgtgttcagtatagatggc

SEQ ID NO: 52718 - DNA, 501 bp, Glycine max
  Clone ID: PAT_MRT3847_18617C.1
ctagggggggtgtgataggccctttctttgacattgtaaaacctattatacttcagctttgattttttctttctctctgaaagtaggaacgtcggagcacatatgaaatgttgatcaaacatgctccattgtttttttttagggatgaacaaaatactttataaacgcttaagatgtttgaagctttgagcagctggaatcgagctgcgttcacatctatgaacatatccaacacaaggggctatataaggctaggcccaatatcctcttgcgctggatatgtatggtaacccaagcgcaactcgtcccacaccctctttattctgacacactcgagcgttaaaaacgtacgctgattatacattttatcatgcacaaatgcaagcttatataacatatctaatgggacttgacgttccgaccttcctttctgaagactccttcatctactgttaaaggatgagtcttcgagtacaaaaatgtggccccttgaaaactgtt

SEQ ID NO: 52719 - DNA, 684 bp, Glycine max
  Clone ID: PAT_MRT3847_18618C.1
ccacgcgtccgtacggctgcgagaagacgacagaaggggatccacatcaaaacacaagcaaatcctagaaattaagctcattgagaaacataaactatcttgacaaaatgaaacaagttttcgtagcattcttagctctgcaagttgtgttagtccttacaattatggctgcagatccagcagggaagggctacgattgtgaaaaggcaaaaaggtcactaaagtcttgcatggaatacctcactggtaatgttgatagcccttcagctgcatgttgcaatggtgtcaaggaattgaaagcatcagcaccaacaaaagatgaaaaaattgctgaatgtcagtgcattgaagaagcactaactcccattcctaacttcaagcaagacagagccattgcacttcctaaggaatgtggtgttgatgtgggctttcccatccccaagaacttcacttgtagcagcatatcttgaggagaaggcagaggaggaaatagtccgattaacagaatggatgcttgcaagttgctttcatgtaaaaaaataaaatagtttgttgaatttatgaggaacaagcatttaatgattaatgattatttccatattttgttgtggttaattaagatgaattaagttgtatttaattcctgatattaaaggactcaccagccttaaataaatttagttt

SEQ ID NO: 52720 - DNA, 229 bp, Glycine max
  Clone ID: PAT_MRT3847_18619C.1
gtgtttttttttttttgtggggttttgtgtgttgttcagtacaactagtttttggtttagctagctgttcttcatttgattttgctcgcattcgcagggacagtgctttttgggggaaatcactggttccttatagaggcctctaaaaaatagttccttggacatgccccccccccccctcaaaaaaagaacacgccctaagaaaatcacgggggaaataaagatgggg

SEQ ID NO: 52721 - DNA, 250 bp, Glycine max
  unsure (1)..(250): unsure at all n locations
  Clone ID: PAT_MRT3847_1861C.1
cggaaacccgggncgacccacgcggccggccacgcgaacgaccacgcgaccgagaaaaaggcggtgcctctacacacgaagaagaacgcgaagaagagggggaagaagggcaagaggcggcagagcgacaggaaaacggcggacaagacaaaccggcgcaaaccaaagggaagagaaacccgccggaggagaaagagcaagggaggcaccgagaagccaaacaggggatacgggacaaacaagaagaccc

SEQ ID NO: 52722 - DNA, 108 bp, Glycine max
  Clone ID: PAT_MRT3847_18620C.1
ctatcatgatggagatcacgtcatagaagcttctaatacgactactacctacattaaaggacacagctctcatgtgatcccaccaggaagacgctccctttggcccag

SEQ ID NO: 52723 - DNA, 318 bp, Glycine max
  Clone ID: PAT_MRT3847_18621C.1
attgctgaatattaaacattagggctaggggaaattcgcatggcgaaagtcccttattaaacaaaagaatgaggatccgtgacctggtggtacccaccctttaatatcaaacacaatcccaagtaaccggtaacgcttgacgaaggctcttcccccccggtatacacttcttcgactatggctgggccgtacataaatgatacgaccaacgccttgtcctgcaggcaagcacatgcacgctcgcctaatgctactttccgagacacccgataacttgctgtgactggaactgattcttttgtacttcaaatccaacca

SEQ ID NO: 52724 - DNA, 481 bp, Glycine max
  Clone ID: PAT_MRT3847_18622C.1
gctgtgtaatcactgagacgcggaggggcttgcggcttctaaaatgccggattacctaggtgcagaccagcggaaaaccaaagaggatgagaaggacgacaagcccatccgagctctggatgaaggggatatcgccttgttgaaaacttatggccagagtacttattcgaggcagatcaagcaggttgaagatgacattcagcaacttcttaaaaaaattaatgagctcactggtatcaaagagtccgacactgggctggcccctccagccctctgggatttggctgcagacaaacagacacttcagagtgaacagccgctacaggttgcaagatgtaccaagataatcaacgccgattcagaggacccgaaatacatcatcaacgtgaagcagtttgccaagttcgtggtggatctcagtgatcaggtggcacctactgacattgaggaagggatgagagtcggcgtggacagaaataaa

SEQ ID NO: 52725 - DNA, 388 bp, Glycine max
  Clone ID: PAT_MRT3847_18623C.1
cccactcgtccatcaatgcatgtactttgctctcattggacatctctaataatatcgggagtgtacatatttcggggtgaatccatcacttgtctggatgttctatatattcattgaaacaattatatctagacatgaatcacatcatatgacacactaccctacctctcaatattctcatctttaacataattatatctttatgcgaacaagctaaatggaaagatttcaatagatattaaattaccacctcaactggacgtactatatatgcaatcaaattccttatatggactgctcactgattatcatactgctaatatgtctaagttacacatcatacacttatctgacaactctatatcgccctttgcatttagccaaaatt

SEQ ID NO: 52726 - DNA, 323 bp, Glycine max
  Clone ID: PAT_MRT3847_18624C.1
ggagggatcaccctctcaatttcgctctgcacgccttcatgccaggtcagacattaagttgctttgctaccaccataccatcagggggacatcatagcacccaattttgctgccatcgctaactacctccacatatgggtctcgaaatcccatacgaatttcggccaattatgcgcatcctaacagttcatgttcctaaggttacaaccttcagccaatgctcggagctggtagaggcctcaccaagtgaagagatgctgctgcaagagtgccacacgcccacgtcaacatcaacagtggctcaaacgttgttggtttgtcca

SEQ ID NO: 52727 - DNA, 247 bp, Glycine max
  Clone ID: PAT_MRT3847_18625C.1
gtttttgttcttttctaatttactatatcaaaacctttctctgtatagaaagacccaacaagtcagggtgattatgacttgaagaatggatgctataaaatagcaagctacctaattgacggagcaagttgacaaacaatagcaggctatacttagacagttggaccaaaatagcaaatgaacaggtcaagactgatgaatctgaaattgaatgtcttcagcaaaatccaaagttatacacttatac

SEQ ID NO: 52728 - DNA, 115 bp, Glycine max
  Clone ID: PAT_MRT3847_18626C.1
cactggaaggaatgcgggcacggatgcccgaacagcggcggaaacaccaggcgtgcgccacgcgctaggccagtttgttcgaattattatgaccaagcctaagaaacgcatccag

SEQ ID NO: 52729 - DNA, 449 bp, Glycine max
  Clone ID: PAT_MRT3847_18627C.1
aatatcatatgttattttttttatttataccattatgaacattgctttttgagcttagtattttttattcccaaacttagagcaactatagtccaccaaaaagcataacatttccgatagaattgaagcctccttcgtttgacatgcatactgagtggtgcttatatatgtcctacataaaggggggaggctcccctttttcttaccaggggaaaaacaacattaataatgggtgaaataaaaaagcaaaaacctcttttttgccaccacaataacatatatcaatgggctgaaactttagtcttctcgacagaaacttggcctgttttgggtacctctacagaaaaaatggccagggctcctccagaaaatcttcctccactggtgcagaaacagatgggaggctgctctttcaataattcttcttaatgtgttttttcagccttacc

SEQ ID NO: 52730 - DNA, 571 bp, Glycine max
  Clone ID: PAT_MRT3847_18628C.1
ggtttttttttctgggtggattcatatcgtctctattgatacgagtgttcacaatgcagtataatataccatatgaaagtttatttgtgcctaaaaataaaggaagaactaaaaacacttccatttatatgcttaccatcttcatcttattgcaattttccgaagctcatgcaatcgatgagctatgtcttgaataaattgttttccatcattgccattttgaagagaatttgttaggtgctccagaagatcatgatcaaattcaagtgcttccaaccgttcattaaggtctgatatttcattttctagagcaaccaactcaacttctcttctaggcgtgcagatttgtagttcaggagatttggaatgattgttttctgcactaagagaacaagcatcaacatcttcagcagctgatccatctttatcaatatgatttccattcaatgtattaatgcttttctctgtggacaatccagtatcttcatgaccatctaattgatgcccttcaccattagaagctccttgttgattcaattcactgacttcaagtttctcagatctatcatta

SEQ ID NO: 52731 - DNA, 277 bp, Glycine max
  Clone ID: PAT_MRT3847_18629C.1
gataatgaaaataattccagatattttccacgtacgtttacaagttcaatgggcacatccccctgccgaatttaaacacaaaaaggggtgatccatttttcccgcgtctaaagccttttttaaaaaaacaaaaaggccgccttcctactcatttgtgacatctcttggaagctttaccccgaggggacccccccctttccaccccaaggggcccctttggggggttttccaaacctttctttagatatgggcccgggtggggaaaacactttttttg

SEQ ID NO: 52732 - DNA, 586 bp, Glycine max
  unsure (1)..(586): unsure at all n locations
  Clone ID: PAT_MRT3847_1862C.1
tcaaactggatcggggaagacttacaccatgagtggtccttcaggnnggagggacatcaaaggatatgggaatcaattatctggcacttaatgatctgtttcaaatgtctaatgaaaggaaggacatcataagctatacatttatgcgcgtccggttgagatttacaatgaacaagttagagacctacttgcagaggacaaaacagacaacaaattagaaattcggagctgcaatgatgacgggttgagccttcctgacgccatattgcattcagtgaagtctccaactgatgttatgaccctcatcaaacttggtgaggttaatcgtgccgtcagttcgactgcaatgaacaataggagtagtcgttcccacagtgtgcttactgtgcatgttaatggcaaagatacatctgggagctccattcgcagctgcttgcacttagtagaccttgctggaagtgaacggctagacaagtccgacgttacagggcaaagactaaaagaagcacaggttatttaacagtctctttccttggtcggagatgtgatcacaggcctggctcgaaagaattcttacatcccttat

SEQ ID NO: 52733 - DNA, 223 bp, Glycine max
  Clone ID: PAT_MRT3847_18630C.1
ctcacgcctccgaccacgcgtcctactagacacatccattctttacttctcattgggtgggcctaatctttacggtggtgctgctataattttccattgcctgcaataaattctcaacctttattcgcaagatcaaacatctaaccttaagttaagtgatcatgtctggtactcctatcatctacgacttcataccgtcttatacccccatctttacgctact

SEQ ID NO: 52734 - DNA, 640 bp, Glycine max
  Clone ID: PAT_MRT3847_18631C.1
ccacgcgtccgggtgacgcaaaactagggtttctgtttctctttccgaactgagtagcagctctgaccatggcggaggaccttactcatatcgctcagttgctcgaccaaaccctcagccccgacgctaccgccgtccgcactgccaccgccgcactcgatctcatctccctcactccgcacttccctttctacctcctttccatttccaccggtggaggaaatcaaggtcagaaaatcgctgctgctacctatctcaagaacctcactcgtcgcactgtcgatagtaccggcgtcaagccttccaatgtgagcaaggagttcaaggagcagctgatgcaagcgttgcttcaagtcgagttgtccgttctcaaaattttagtcgaagtggtccgtgccattgctgctgctgattttgttaagcagaatttgtggccggagcttgtgcctaatttgcagtctgctattcagaatagccatcttaccagtggttcgaataccaaatggagtactgtaaatgcacttcttggtctccatgctcttctcagacctttccagaattttttgaatcctaaaggtgctaaggagccggtgccaccacaattggggcttatatccaaagaagatcttgagcctttggt

SEQ ID NO: 52735 - DNA, 429 bp, Glycine max
  Clone ID: PAT_MRT3847_18632C.1
acacgctattatactacattcattcatgttgctagaaaacaaagtctgcgcctctctaaagcattgatgacgctgatgcaattgattactctagccctttcataaaccctcgtactagtaacataatacattcagatccgctaccccctctatataattcattcggacccatgcttcagttgcactcgaaaatcatgtaaatctatggggccaacccaacacaaacgctcattatgctttcgagcattgcaccctgcttcgacaatgcatccacgattgaacaacccggggggaccaaatgagccttgcctaggccactctggatggaatcaactctgtggaacgagtgtaatattgcctcattctcggtattaagctccactctcgagctgagctcagcgggatcgacccgctccaatataattggaa

SEQ ID NO: 52736 - DNA, 285 bp, Glycine max
  unsure (1)..(285): unsure at all n locations
  Clone ID: PAT_MRT3847_18633C.1
ttcgacacgagcggagccctgccccgcaccccccacacctcncaacaanattatgtcaaaacanggggangtctncgncgacactctctctnctcacccgncgctctcaacaccacaatgacancncggggggngttcccgtctgnggccccgcgagaggtntatncttctcccatcnacaanactaaanntctgnnggcgtctctntctcacntctccgttcacacacaatctctctnctcatgcgtctcacacatctcncnctgtgcgcacatntnctcacca

SEQ ID NO: 52737 - DNA, 285 bp, Glycine max
  unsure (1)..(285): unsure at all n locations
  Clone ID: PAT_MRT3847_18634C.1
ggtacacctgaatttgtttattgacaatactagaatcaatgttgagaaaaataagggcctttgtttcctccttgtggtacaattttggtaccagtgcaatgccatgcgtacgatatatgccctctccgaatgaacactggctatggtgcccgtactccggaggtgaaatgcgcaagttggangcttgctgtgaaagcacacaacatctttggctttgagaccattcctgaaaagtgcgttgaggcaggaatggaatacatccatggcgaacaatatagataagac

SEQ ID NO: 52738 - DNA, 355 bp, Glycine max
  Clone ID: PAT_MRT3847_18635C.1
ttattttttggggttcaaaacaataaaaaatggtgtgttccactttaaaccacacgctgggctttgactcaatatttattgtacacaaaagagtcgccttcttaaacacttaaagcctgagcctgacgcccaggctgagacaaactttcaatatgcttgagatgcacacctttgatcccgggcaatgaattctaaccaacttttctaggaacgtctggacttctgcggagttcttactcaaaccaattcacccgggtgctctaactaaactgtcgatctcagccaatgaagcctcatacattttaacaacttttgtgtgcaagtgaatcttcttttcttcaaaggcttggttgta

SEQ ID NO: 52739 - DNA, 203 bp, Glycine max
  unsure (1)..(203): unsure at all n locations
  Clone ID: PAT_MRT3847_18636C.1
gggaaaaaagggcgcatgaataaattatagttgggattagcacgaaaaatgaaaggaggggggaaaaagggggaaggcgctcactcacagncagagtcagttcgtgatggggctattgaacgtcaagagcagagggagcaagagtagaggcaacaccgccttccgaaaacccggagcgaaaataacatccgctcaccactaaa

SEQ ID NO: 52740 - DNA, 317 bp, Glycine max
  Clone ID: PAT_MRT3847_18637C.1
gattgggtggtgctgagtcaagaaagtggctgaaattgggttatggttttggggtgaatccaacagatccacgtttgagccacacacactttgtctttctggctttgttttcattgtcccaatcctagcccaaactttcttgtggctctgacaatcaattacccgttttgttttttactctttagactctccgccacctgaacattacgcatccaactcatagcattcaccccatcattagcaccgtcacttgttcgtttcaacgttcttctagtgatacgttaatgccttctgaatccgttcaaattttttcaact

SEQ ID NO: 52741 - DNA, 172 bp, Glycine max
  unsure (1)..(172): unsure at all n locations
  Clone ID: PAT_MRT3847_18638C.1
ccgnttgagagaccatctaacttatttattaagatggggaaagtggttttttcgaataagcaaatctacaaaacatccttcccaaatctaacccaaagtacttagtcaggggaaaaaaaaaaaaaacccttattgtggattgtcctcctgtgcttattttaccaagcccttt

SEQ ID NO: 52742 - DNA, 379 bp, Glycine max
  Clone ID: PAT_MRT3847_18639C.1
tattgtttgggatggtgctcctcctgcagccgccgcgccattattgccgggaccaaccactcctcccattttttctcttggctgaaagtgatgaaagtatcttggactgctttcctttggaggtggatacctaagaagtggttgcttacattgatgaatggctgctatggtggattttggacgggctcccaattctaacggaggggaaactacataggtgcttgagctgaggctacgtgaccactaatactatagagacttggctcctgccgttaatactgtggtaggcgctgaaacaggtcgcgtcaaaccaacccttgttggggttcaaaatgatgcctctgaccagattgccctttatgatgaagaactttttgag

SEQ ID NO: 52743 - DNA, 492 bp, Glycine max
  unsure (1)..(492): unsure at all n locations
  Clone ID: PAT_MRT3847_1863C.1
tctttattctttgtttgatcaattccttctttcttttttctctttgcacctaagacattgagaatgctaagaatgttacacgcaagttccatcacanctgccaaaaaaaagaacaaggcggcatttcttctcaaaaaaaaaatgggggggggcgccccaagccccgcctttttttgggactttccccccgggaacccccccaaaagaattctcgtttgcccccccaagagctgaaaaattcaattactagcccccccccccttctctaggggcggtaaaaagatggggggggagtttgttnccgtggggccagagcttcttctgaggaaaaaagggttgtttttttgttgggggggcgtccccaaaattttctttcttcttcccaacacggggtccccccctccaaaaggggggcccccccccccagggggggaaagttttgtcctcttttcaccccccaaaagggtggtttttttttgttttgcccccccc

SEQ ID NO: 52744 - DNA, 152 bp, Glycine max
  Clone ID: PAT_MRT3847_18640C.1
ttctttgttgttgtgaagcctaagagcgagtaccctaccatttctccttgtcaaaacctaccttagaagaataaggaatgtctatacagatgttcaaagttcagagttcacaagcagattatgggaatgcagcaggatgatgattttcaggg

SEQ ID NO: 52745 - DNA, 830 bp, Glycine max
  Clone ID: PAT_MRT3847_18641C.1
gaaagtgctcttcggaactgtccgttgagcttcgcgaactttgccgttcgatgtgttgttgttgttttgggttgttattccaaagtttgtttgcttttctgtgtctttgcaccatttcctaattacattgaacacttttaagggttcttgcaaaacctttctcacccttttccaattcagtcaatgccgcaaaatgttgtagcatctgttcacaatcagtctctcactcacatagtgttagcgtgaatgagacaaaaatgcttttgaagctttgcgattttggctctgcttgtcacgtgggcgacgcggagccggccccctatttggtgtcccgtttctaccgcgcccctgaaataatgctcgggttgccctacgattttggaatcgacctttggtctgtggctgtgactttgtatgaagtttatacgggaaaaataatgttcccgggcaagtcaaataaccaaatgctcaagttcatgatggatttgcgcgggaagttcccgaacaaggtgattcgaaaggcggtcttcaaggaccaacacttcgactacaactgcaattttttgtaccatgagacggacaaagtcaccggcaaagacaaagttacagtgctcaccaacatcaaattgttgcgcaatcttccggctgaactctccggtgatcaggaacttgacagagatgggtttgccaaggttgaccatttccggtctttgctcgaacagatgacagctttggacccctccaaacgaatttcgtgttcggatgctttgaaacaccctttcattgtagaaaagtgatgtgaactttaagcgcagaacatatttgaactt

SEQ ID NO: 52746 - DNA, 294 bp, Glycine max
  Clone ID: PAT_MRT3847_18642C.1
tctatttctctttcatcaccaactttatccttttcattaagttctccatccaaggtgacttttatttttaaacaaacccttcctctacaatacttaattctaaccaatactaataataatatatccatcaccatccttcttctaacctatcattaacctacttattcacctcactctacccatcacattataataaatccatccaaccatttcttaaattctattcctatctcaattcaatttatttcttaaccaatctattaaactcttcattacaaaaaaaccacccttaaa

SEQ ID NO: 52747 - DNA, 285 bp, Glycine max
  Clone ID: PAT_MRT3847_18643C.1
attaaaattatttaagatgaaaatcttatttaaagaaaggtggtttgtttggttggggtaagagataccctcaatcaacctccaacatcattattaacaatcaattccaaccaaccctattttttttttttaaatttacaaccctcattgaacccttttccaatccttttttttgtggcacccttaataacctttgcttccgtggcccgcaacaaattttaccggttccctcccaaaatttaaaggtttttaaaaaaccctgttaatgccaatcaaaacaataag

SEQ ID NO: 52748 - DNA, 284 bp, Glycine max
  Clone ID: PAT_MRT3847_18644C.1
cccaccctgcatacgactacaaaaagacgcctgaaagggacttcggaatgattgccatgcatggcttaaataagcttcttgcttatggtgctcttccaatgtcatcctcacttgctagaagatccttggttcatgacgatggatgcgacttcatgaactttggattgcggatagacctcagacctcatcggataaacaacaaacactttcagatacccacgctcagtccaaatattctccatgaagctaaaccatatagctaaatgtgtgataccccatctact

SEQ ID NO: 52749 - DNA, 1045 bp, Glycine max
  Clone ID: PAT_MRT3847_18645C.1
cccacgcgtccggtcaccgaaagtgccaatcagaagagtaaattgcacagaagaccaaaaaggatattggagagggatcacataggaaataatatgtttgaaaagttggatgcttttgttgtttctttctttggataaggaccaactatcaaataccaatgcaccaaaatcatgaacgaccatggatgtgtcttcagtgttgattttttctctttctaacttgcattctgaatactcgagtcttttttgattgccatggacctgatgatgacacatgtgtaagcttttaggattgtagatagctgcagagtgacatgtcatcatctatagtactcttggatgcaatttttcttataatgcttgtaggtcaaacaatattagaaatcagggacaaggtgaatggagtattatcatgtttcaatatttgattctaaataaggattttcaattatgatatctttatcattgtcaatccttttccagatattgtgagggagcttttgaatacttggcctgaggtctgcaagttatgcgactcctcaaacaccagtcctctatattctgctgcagttcaagaccacttggatgtggtggatgctatcttggatgtcgatgtcagttgcatgttcatagttaggaaaaacggcaaaacttcactgcacaatgctgctaggtactggtgtccttcgtattgtaaaaacacttattgctcgggatccaggaatagtatgcatcaaagataaaaaaggtcaaactgcactgcatatggcggttaaaggacagtgtacttcagttgtggaggagatattactagctgatccttctattttgaatgagcgagataagaagggtaatacagctcttcacatggctacaaggaaatgccgttcacagatagtgggccttttgctaagctattctgctgtggatgttaatgccatcaacaagcagcaggaaacagccttggatttggcagataaactgccatatggagattcagctttggaaataaaggaagcccttgcagaatatggtgctaagcatg

SEQ ID NO: 52750 - DNA, 160 bp, Glycine max
  Clone ID: PAT_MRT3847_18646C.1
agcaggagcccaaatattctcagaaggtggtcttgactatttggggaacccaaaccttgtccatgcacaaagcatactggcagtgctgcgcttgcaagatatcctaatgggccttgctgaagggtaccgaatcaatgggcttgatggtgtgggagagggc

SEQ ID NO: 52751 - DNA, 282 bp, Glycine max
  Clone ID: PAT_MRT3847_18647C.1
tcacgcgttcgcggacgcgtgggcggacgcgtgaagcttgcgagtgaaggcctagactacactacacacttggcagtggaaggtgttgcacaaacccctgacatagtcggcgagcgacagtacggactagacgctggcacctaaaacgtggtggaatgccaagccgttgtcaacatcgtcaaaagctatgtaggacgcgatgcccttcacatgatgctcgtacacgacattggagactggactatgaacaacgactgtgacacgattctgaagatgcgtgaa

SEQ ID NO: 52752 - DNA, 472 bp, Glycine max
  Clone ID: PAT_MRT3847_18648C.1
gggaaagtcgaacatgatctaatataagatgaaatttttctcttgtacaacaagcaaagtcaccattgacatctatttctcgatactttatctacccccaccattcatcacaaccacatattcgcaagacaaactattttctcaacaaagtgaaatccaaattcaatcaaaatctcaacgggttgcttaactccattaaaatcttcacgagtaaaaacttggtctcaactgaaactgactttgcaggcaacaagtatcataactcagggagttaactaactagaacccaacatcttcaatgctttaggtcttctataccacaatattgcaaacaatagagtcctcaacagaaccccatttgcaaaatgaggaattattatacgtacccagtaagggtaatatggtccaggcaatttgatcaatgtgaagaaaattgcaatggcaattaaatgccatggaacttctgaatccc

SEQ ID NO: 52753 - DNA, 222 bp, Glycine max
  Clone ID: PAT_MRT3847_18649C.1
ttcggttttttttttttttttttgaacaacggactgggatttgtttatggtgcatagagccaaaatggagtagtattaaatataggaaaaccaacacaagatcccgtggctgagttaaaggggaaacaacccacaattcttcacattctaggaggcggaagcaaaaagagaaaggccgggacgggcggacgagcaagaaaattaaaatcaagaccgggcggg

SEQ ID NO: 52754 - DNA, 367 bp, Glycine max
  Clone ID: PAT_MRT3847_1864C.1
gaaatctattttttttttttttttatttgattttttcttgtttattcttggggagaaaaaaacttttctcaaaaaaaggggacggttgaaaaaaaaaaggggggaaaaaaagcataaaaccttggagggatagatttttctgaaggcgtgaaaaaaaaaaggggccttggggggaaaatttccagagggacttttttaaaattcaaaaattaaacccccccctagggcataaatttaaaaaaaaaagaacacccgtcacgaaaaagggaaaaaaaaacttgggaactcacaccctcggggctttgggagaaaacacactctacacctgggggggacttgaaaacattctctcaaaaattgtttgggg

SEQ ID NO: 52755 - DNA, 208 bp, Glycine max
  unsure (1)..(208): unsure at all n locations
  Clone ID: PAT_MRT3847_18650C.1
aactgtgataatggcatctggaattaaacctagcgnagncctatttatggcactggccccagctggtggacatcttgtcacctctacagattgttacaggcagactagaatattcattcatacttcccttccaaccacggggatcgcgaccactgcacttgatccagcagaagatgaagcctcggaattttttttggcagcacacaaa

SEQ ID NO: 52756 - DNA, 111 bp, Glycine max
  Clone ID: PAT_MRT3847_18651C.1
cgcctcccgtacggctgtctgaagacctcagagtggcccctttctgtctacaggagaaataactcactcctcgctgagcgcactaagagatgcggccaggctcaccacact

SEQ ID NO: 52757 - DNA, 547 bp, Glycine max
  Clone ID: PAT_MRT3847_18652C.1
ctctttggaaagttataacttatggttgttgggtttgcttgggaatggagagctgttggaggctcgattggttcttgatgaaatggcggctaaagacattgagccgaatgcttacacatataacattatggtggatgggctgtgcaggaaccatatgttgtcggatgcatgagggttgatggatctgatgatgaagaatggggtttaccctgatacggttacttatagtaccctcctgcatggatactgcagcagagggaaggtttttgaagctaaaagtgttcttcgtgaaatgataaggaatgattgtcagcctaatacttacacttgcaacacattgctggatagcttgtggaaagaggggaggaccctagaggcagaggaaatgctgcaaaagatgaatgaaaaatgctatcaaccggatacagtgatctgcaatattgtagtcaatggtctctgtagaaatggagaactaaacaaagcaaggtttttaatttgcctgatggaatcacatagacaacttcaattaatggactttgcaaagttg

SEQ ID NO: 52758 - DNA, 323 bp, Glycine max
  Clone ID: PAT_MRT3847_18653C.1
ttaaaaaaaaaaataaaattaaatttttttttttaacttccaaccccgtttaatgcccatttaagggggggggtttttgggggggcggaaaaggaaagaaaacctcatgccggaacccttcaaaaaaaatcccaccatgggcgggaaccaaaggacccgggaatttctggttaaagtaccgagcctggtaccggccgaggagaccagtggccttggtctggggagcagggccgcgggaaaaaccggcgtaaaagctaacaacgcgctcaatgcgagcagaatcctgagcagttccaatggcattaggagaagcgatcttgggg

SEQ ID NO: 52759 - DNA, 633 bp, Glycine max
  Clone ID: PAT_MRT3847_18654C.1
caatcctcaaatacataattaccaaatattgaagctatggaagtcataggataacaagagtttgacacgcatgtctgtctgcatgacttggtacatttatatctgtgaagaaatcattaagcagagagtctgagaccaaagcgctaagatgatactaataaaatcaacattgcaggcattaattaacacaaacacagatgacagaacaaatcagatttctttttcttcaacagctatatcctaaagaaacattatggaatgacacaaattatcaacaaagaatcaattgattcaattcaagtacaactcctcgatcatctagaccacttgagtggcaccactagacacaactccatggtgagtggtatcatctttgtagatgctaagtttctctccatcaccccacagagcataagcctcttccccatgaaccgcatcatctccaatgagaagctcttcctcggtcattctaagtggaactatgaaactaataaccacacaaataattgaagtgaccacaaggttccacccaatgatgaacaaagcctccacgatttgtttaaggatttggactccaccagggcctccatagactcctcctttggagttggtgacaggtagaaagagtgcaca

SEQ ID NO: 52760 - DNA, 548 bp, Glycine max
  unsure (1)..(548): unsure at all n locations
  Clone ID: PAT_MRT3847_18655C.1
gcacgagggaaatttaaacaatgatccttcattttccacattatataatcttactatagaataaaaattggttttttaacaagggttgattgaaaagtgttaacttggaacaggaatcatctactttcaaggaaacgcctgtggttattatgtcatctgaaaacgttttgccacgcatagacaggtatccttatgtttcttattctatatgtctattattttttgagttttcttttctgagtcttgaattgattcaacattagaaaaaaaaaataatgaataagatttggaattttggaaaattttgcanatgtttggaggagggtgcanangatttcatagtgaagccagtgaagttatctgatgtgaancgtttgaaggattacatgacnacnaaggaagttaggggtgaattaacccnnaaaaaaggaagggatccactanaagaactattggacacctctgatgtntcccacatcaccaccgtccatttcntcatcacccttccatcttccctcaactcagtgattgacncnccnctccaaacg

SEQ ID NO: 52761 - DNA, 261 bp, Glycine max
  Clone ID: PAT_MRT3847_18656C.1
tgcggacgggacacggggcagcgggcaacactcagtctgttcccaagaggcgcacgcatagcccggacgctcggtacattttccagtcatgtgattcggctcgtgctttgctggagatttgcgtgaatcgcctgcatcccggcggggcgttgaagtatctaccatggaggtatatcctgtggttcacctacgcctcggtcttgctactcaaggcgttgtattcgggggcaatgctgcgagcgtgatcaccgagcacgctca

SEQ ID NO: 52762 - DNA, 645 bp, Glycine max
  unsure (1)..(645): unsure at all n locations
  Clone ID: PAT_MRT3847_18657C.1
tcctctagagcggccgctaaannnnntttttttttttttttttttcctaaatcaatttaatttaatttactatatatataccgaggttctttttaaaacttttattacctttaaatctaaaccagattncacatttnngcaatgtctactctatttatataccaaaaacttttaacaaatcacactactattttaccactaaccattcctatataaaaacctaaaaatttaactttatattttgtcctcattaactaaacacactcctttaaaaaacataccaccttattatctacctccaaaacaaaaataaatatacaatctctaaaaaaacacaccattacattatctatcaaacttcaaacatttaaacttttgtaaatatatttttttctataattcctactattataacatattattactaactaaaatgttttaaaaaattttacctttattttattatactcaactttttaccaatttataattccccactatctataattttaaaacactcaaaattatttttctcacttctttatttaaataaataatttacaaatttcatttaaattaagtaccttactaaataattttttttacattttattatatctatatttnttataccctctcttctat

SEQ ID NO: 52763 - DNA, 459 bp, Glycine max
  Clone ID: PAT_MRT3847_18658C.1
ttccactttccgggttttttattcgatatttcttgttccaatgatcgagcacttttttgggttccttgaccgtctcgcgcgccctgtccccgatgatccccttgctcacactgctcatttgccttccgaaccatctccacctccggcctccatggattccgacgcctcctacagctccttcacctcaccatccaatgattgctactactacgtcctcgactaagacgatccgctgatccatatagcatactgcctcatctgccactattaggatatcatttccaactttcataccccctgctcctttaactacattcttaactatgcttacaaaaagtgtgtccagcattgctgtcatgataaatgagacatatcttgtcatatatttcatcatccatatcaaccttcatatactgccctcccacctcattctaatcccttataaactaccattgatat

SEQ ID NO: 52764 - DNA, 380 bp, Glycine max
  Clone ID: PAT_MRT3847_18659C.1
gacgacagaagacgacacaacggggcttgagagcagcacagagcaaaggggatacacgtgacattactaagggctttgggcatcagactagtagggatggctagcctcaaagttgcatgtgcggtcagtatgaaccgcatggttgagggggccatgaatgctccacccatggcacaagccataatcacgtgcagacaagtctgcccagacatgtttcactgcttcagttatcctcgaagcggcagaaaaccatcgcaagcctgctgcaacggagtgaaacacctcagcagcgcggcgaataccaccgtggaccgacaaggggcatgcaactgcctgaaaaacccgtgcaataatatgggacaaaacttgaatgccagcaa

SEQ ID NO: 52765 - DNA, 358 bp, Glycine max
  Clone ID: PAT_MRT3847_1865C.1
gaatttaattagaatcgtttaatgtcaaaaaaaaaaaaaaaaaaaaaaaaaaaaaaaaaaaaaaaaaaaaaaaaaaaaaaaaaaaaaccaaaaaaaaacaaaaaaaaaaaaaaaaaaaaaaaaaaaaaccggccgcccaaaaggatcaaacctaacgtacccttccatgcaacttcaaaccccttcaaaagtgtcaccaaaatccaattcacgggccgtcctttaacaacctcctaacgggaaaaaccctgccgtaaccaaatttaaccaccttgaaaaaaacccccctttcccaaacacggcataaaaccaaaaaggccacaaccaatcccccttcccaaacaattcccaacccaaa

SEQ ID NO: 52766 - DNA, 278 bp, Glycine max
  Clone ID: PAT_MRT3847_18660C.1
tttccgcttacgcgtacgaagatttgaaattttgataaaccgcgagcacaggttgccgcaccttaaaaccggaaacaaaagcaatcgttacttgattccaggaacttatcaagttcttcctacttatttgtgtacgatttcttatgggaacgaaaatcactctgtgtgctggtcacagacttcgggaatcatttgctttgccactcttagattatctgatgaacactctactattcgatatgagactttgcgttagatgcaaacgttgatgagtgctt

SEQ ID NO: 52767 - DNA, 491 bp, Glycine max
  Clone ID: PAT_MRT3847_18661C.1
tttttcttttttttttttttttttttttttttttttttttttttttttttttttttggggggaaaatgtttggtgttaaaattaataaagcccgagtacatctgcgggtttattaaaaatccaaaaaactccatcccccacacaaaagaggcaacaaaaaggagggaaaagctctttcctggttaacaacactggggccggaaaccgatttattaaaacggcgaaatttttgcccccccaaaacactaaaacgcagctggaccaccacaaaatggtagaaccaccttaataaaaaaaacttcttggcaacgattacaagcaggccaatgacccgggaactgtatccccactcgtgggcaccccaagagacaagctccacaaaattcttattcaaggcaatcccagccttggcagcaaaaacacttggtcgggtatcaccaacaaaggggggggagaccacaacatcttgagggcaaccaaaaaaccccttc

SEQ ID NO: 52768 - DNA, 270 bp, Glycine max
  Clone ID: PAT_MRT3847_18662C.1
acacacgaaatacatttgttttgtttcaaaagtccaatttttaggaaatccaataaatttttatagaagtttcactggttgaagaataattcaccaaaaataaaattatttttttttctggaaaaaatcttttctatttaagaacaaccggcccctaaatttggtcatggtgaacaaaaataaacaaatatgtgcccaagtgggcttcaactgaaaatacttttactaagaacacttggttttttttcctaaacattatagggaatttgc

SEQ ID NO: 52769 - DNA, 597 bp, Glycine max
  Clone ID: PAT_MRT3847_18663C.1
ggcgtataattttaggtattcttattaatttcagatctcatcatctccatccactcgggagtgggaaaaactatttttatcctctgtacacatacatccacacataacctatttacaagatcagaacattccaagtttttctctccaaccgagtcatccgatctgactcggtcaggtcaactcagatccgaacccgacccgggtcactttctccggccaccacttcaatctccaccgttcataacgccacgtgtggttcagccctgaccccagcagctcaagtacatcactttcctcagagagtcgtcggcttgcctcaccctattctccacgtcggagctccccgccaccgagccggccacgtcagatcccacgacgccggaaagaggccggagatctgacagggctccgccggagaagaggcggctccggttgtggtggatggaggtgagcgccgtcttgcacttgtggccgggatcggtgtggccctgcgccaccgccaccgtcgccgccatccaaacacggttcaagtaactcatatttttctcctctttgtttgcaacacaacacagcacaattcaaagaaacggagccgtt

SEQ ID NO: 52770 - DNA, 468 bp, Glycine max
  Clone ID: PAT_MRT3847_18664C.1
ataaaattctgccaattacacccgaaaagcttgagaaaagggaagcacctggaaattgcaaaaaaaaaaaaaattttttttgtcccccccaaatatagaaagggaagaaaaccggcaaaaatttttggttcgcggggaaaaggcccccccccaaagaagaaagtgcggccgcccttggtaaaaaaaaaaaaagggggggcaccccggggggggggaaaaaacacacttgataaaaaattgggggtttttgaaaaaaggagcgcacggccgatggaaaaaaaaaagccggggtgcttcttatttgccggcgggggggcagaagcgcaaaggtaccaacaggggggccctgggtcttctttagaaagaggggggggggccatcccggggcccccttggattgggggggggggggagaaaaaagaataaaaaagaccgccctttgtgggacacggcgcggaggctaagttg

SEQ ID NO: 52771 - DNA, 1433 bp, Glycine max
  unsure (1)..(1433): unsure at all n locations
  Clone ID: PAT_MRT3847_18665C.1
tgcagctccagcacaagtttcttctctctctctctatctctctttttccacaagctagcttctaataattaaccttcatcatatcatatccctctctccactttcctactagccttttttctctctattatctcccccaaaagtagtgttcgtgactttgtgtctcctttgcgagcaacagggagaggctcttgtgagtggttcattcacaaataatggcactagaggctgtggttttcccgcaagatccatttgcgtatggttgcaacaaggattatttgtactccttagttggagcaacacccaactatggtaatttccaagcagcggaagaagagaaagtcctcctaggaatcatcaacaacaacatagaacacaacctttatgcaaattgggattcatcttctacctcaatgttgcaaaatgtcaaggaacaacaatgggattctcactcctcccctgaagcatgcaccgttgatcaatccatgacaaccgctcctttccctcctcctcctccttcttcctccgtggaagccaccgtgactgccacgagtcgccgtaaacgacgccgcaccaagagcgccaagaacacggaggaaatcgagaaccagaggaggacccacattgctgttgaacgcaaccgccgaaaacagatgaatgagtacttggcccgtgctccgatccttgatgccttcttcttatgttcaaaggggtgaccaagcgtctattattggaggggccataaactttgtgaaggagttggagcagcttttgcagtcgatggagggtcaaaagagaacgaaccaagcgcaagagaatgttgttgggttaaatgggtcgacaacaacaccctttgctgagttcttcacgtttcctcaatacacgacacgtggcaggacgatggcacaggagcagaaacagtgggctgtagcagacattgaagtgaccatggtggatagccatgcgaatctaaaggtactctcaaagaaacaacctgggcagcttatgaagatcgttgttgggcttcaaagtctcatgctcagtattctccaccttaatgtttccactcttgacgacatggtcctttactcaattagcgtcaaggtagaggacgggtgtcggctgaacacggtggatgaaattgcggctgcagtgaatcagctattacgcacaatccaagaagttactttcagctgatcaattcaacttgaaattaatttaaaagagttttctatccctctcttcgtttatgctgtgattgtgcatgtccattgcaatattggagggggttaaggttaagaatgttgctctttattttgttctatagtccaccctcgtctaatgtcctttttatccatcctagttgaaatgtgtaaggttgtatgtacatccnnncatgcctaacaaatctcagtgaaaatacaagtccattc

SEQ ID NO: 52772 - DNA, 197 bp, Glycine max
  Clone ID: PAT_MRT3847_18666C.1
gtcgcgttgtgttgcgtcatgtcgtgcgctgttcctctgtctgtcgtttttgcggtcagaccaaaccctagctccgcatcgcaaccatgtcgaccaagcaaggtggaaaagctaagcctttgaagaaacccaagtctgataagaaggattacgacaaggtcgacatggctaacatccagaagaataaggaagaggag

SEQ ID NO: 52773 - DNA, 1417 bp, Glycine max
  Clone ID: PAT_MRT3847_18667C.1
tggataactggcgatgcagcactatatccagaatattctgtatttgctctcaagtcatccaaatcaatatcaggaagtccactgatcaacaattccagctctttgtcattgaatatcgatatcaactccctgggaatcaattcaatgaacccttctaagaaataatttatttgaggtcgaatagcagttgtcaaccgatgctcggcaaccaaatcaacatattgatgcttgttctcctcagtaactttgatattccgtcccccgggaatcaactcataatcagtcacctctgttcgttcatataagatcaatttttcctcatctgcgtcaatgctaaaagtaagatccagaacatcactgatatcattctcaagcatccatttcaaatttttgaaataatcaggatcaatggcttcaatatcatgatatgtaactttgactcttggatgttcattttactcggtcattctacaagcacattcttggagtcaaagttacatatcatgatattgaagccattgatcctgattatttcaaaaatttgaaatggatgcttgagaatgatatcagtgatgttctggatcttacttttagcattgacgcagatgaggaaaaattgatcttatatgaacgaacagaggtgactgattatgagttgattcccgggggacggaatatcaaagttactgaggagaacaagcatcaatatgttgatttggttgccgagcatcggtgacaactgccattcgacctcaaataaattatttcttggaagggttcattgaaatgattccagggagttgatatcgatattcaatgacaaagagctggaattgttgatcagtggacttcctgatattgacttggatgacttgagagcaaatacagaatattctggatatagtgctgcatcgccagttatccaatggttttgggaggttgttcaaggtttcagcaaagaagacaaagctagactgctgcagtttgtgactggcacatccaaggttcctttggagggttttagtgctcttcaaggaatttcaggtgcccagaggtttcagatacataaggcatatgggagttctgatcacttgccttctgctcatacctgtttcaatcaattagatttgccagagtatccatctaaacaacatttggaagaaaggttactgcttgccattcatgaagcaaatgaaggattcggatttggttgacaagtttttttttcttttttttttgggggggttggggaggaaacaaactgtattacatttttaggttagaagctatttgaaagcttttactggggttgacaagatttaacagtatatcatgttaatatgttgtacagatatattttcaatgggaaatgccttcggcggtttttcagttgaaagataagtcctttgtaccattc

SEQ ID NO: 52774 - DNA, 264 bp, Glycine max
  Clone ID: PAT_MRT3847_18668C.1
atggagttttcccattcaaaacagtggaaggagttcgaagtgagtgtgactgaaggtgtagaagaaacgaatcacacaggaggtactaaagaaagtggtgatatgacaatggatgatagagggggtgacccatcagtggattgccacttcattcgtgacgagtatctcactggcaatattgcacctacttatgctcttgatcccactcatttcaactctttgtcgtgcaagttggggatatctaatttacatgctccaacttga

SEQ ID NO: 52775 - DNA, 220 bp, Glycine max
  unsure (1)..(220): unsure at all n locations
  Clone ID: PAT_MRT3847_18669C.1
ccgctacaacaaacgctggtggcagnagtacaattatgtactatcagcagcacgggatgcacgcatcagantcgatgnggtgttttaatattctttgccctgcnnaatgntgnccntaatctcaaatggtngngaagtgaattnnaccattgcccattggccanttagcncaactgcacgcaggcatgagnttnagggctgnccagtantcngatagaca

SEQ ID NO: 52776 - DNA, 218 bp, Glycine max
  Clone ID: PAT_MRT3847_1866C.1
atatgccttggcgagtgaattactgacagcatcgtatcacatgttgccacacattagaattgtgaagcggtgattaccatgtacagatgatatatatcgcacacatatagccatacacaggctgatttgcatggatccacagctcactgtgattcagaataatataggcagaaggtgttggcgctcatgcaggagatggagctgatgagagactatag

SEQ ID NO: 52777 - DNA, 340 bp, Glycine max
  Clone ID: PAT_MRT3847_18670C.1
ggaatatgccagatggcatgtttgatgtgactcatcacttattccttggtgcatgaatgcacgcatggtttgctgcagttgctgatactcgctatgctgtggttgttcctctgattggtgttcagggattaagatgggccttatacaacgataaatggcaggctcgagttaatcagttaaagcctctttttgagggtactattcattcaagcatgctaacagtggacaactgaacatatattctgaacatacttgggtacatggatacagtggctcgtgatgatttgggtaaagatgttatggacaaataagtggtggataatgtgtgggacagaatatc

SEQ ID NO: 52778 - DNA, 320 bp, Glycine max
  Clone ID: PAT_MRT3847_18671C.1
cattcttttatttggttttacttttatctcgactcagcaatgattaaatgaatacaatttggttaacacgatctttcaacaaaatggtatacaatgcctaaagatgaaatttgctctatgtcgtatacttgtgaataacattatcaacggctgatggaaagagttagctccttgtatatggtggtgattgtatccaggctggctcactacaggaattttcaacctgcttccatcattttcatgaactacttcccttacatcacctattctccccctttgtagcctgaatattaccctatatattacactccaacttggtt

SEQ ID NO: 52779 - DNA, 510 bp, Glycine max
  Clone ID: PAT_MRT3847_18672C.1
ggcccccaaaactcttatctttcctggtaaaaaaataaacaataactttgaccctacccattactttaatttggcaaattcgaccaacatgctagcatatagcccggccaaaacaaaccccggagaataaaattttggggaaataaaacctcaaactttacaggaaggcccccccatagtctaaaattcaaaaacctggggaaaattttcaaggttttcacttttgggacaacttaaaaaaggctttgcctaattctcccctttgaaaaaaaggcttttttggtcataccccattggtcctccccacttttttacgcgggtttttgtttttacagcctaacccttaatggtgagcatgtccttggcctcagtttggtcctccacgagcccctcacttggggacctaattaaaagaaccttttttttttttttcagcacccttctttcaatttcctttttatccgggagggggggggggccccaaaaatccctcctttcccttttctcctt

SEQ ID NO: 52780 - DNA, 446 bp, Glycine max
  Clone ID: PAT_MRT3847_18673C.1
gttacactggctctctgaatccttttaaataataacatctttttcacctcccctcttcaggtcatggtattgtggttatgtttggcattcactcggtcaatttttcatttaaatagttcatagttgagccataaccttcatattgttacttgttttcttgtgcttactaagttctttgcctttgactgttcacttttgacttactatgattttgggtttatgcgatgcttgatgccaaatcaactggcaagatacacccagtttttgtttagaaatgatatttaggtgctcccttttccacatacattacttacttcttaatggggccaaatattgttcaaggggtcaattattaaaggtgattgcttgaaaaaaatgggggttctctcttctccctcctatttttaaaccggttggcattaatgattcactttttcagttttttc

SEQ ID NO: 52781 - DNA, 266 bp, Glycine max
  Clone ID: PAT_MRT3847_18674C.1
cactaaaccaaagtaagaggtatagtgttctaagagtgagccacttgtgagacatggcttccaaggctgcacttctcttgtgtctcaatggtctctttttcactgtggttattccacatatgttgcatttaattcaacccccaaaaattcccaaaaaccaacttgtcccaaagctacaatccccaaagttagcaagctgccccaaagacactattaagttcggtgtgtgtgctgatgtgttaggtttgattaatgtgcaacttggg

SEQ ID NO: 52782 - DNA, 1099 bp, Glycine max
  Clone ID: PAT_MRT3847_18675C.1
cccaaaggaaacttcctagccttcattccattttaagccagtagctcaaatcggccccaagtttcattacaattacaattcaagggttcaatcactgacaattcctatttatcctctttttaaacattctaattccactttcccattactaaacattcatatttaaaggtcattaaaatcctctagaagttcctactttattccgtaagaatgaaagatagtaatataatacaacactcaagcacattgttttcccaatagctagatccccttgatactccgtattctacttataagataataattggaatttattgtataaaaattaaaaacttaatatttatagaaattaaaaataaaatgaaaatcaaaccaaatttgtcgcatcgggctcacggtgactcaggtgcgagtcaccgtctccggttttggtggtggtgacggcgatggtagcacgacaaatcgggcaattggagtggttgctgagccacaagtcaatgcaagaagcgtggaacgagtgtttgcacgcgctcagctgccggacttcttcgccgttggcgaacaccgacaaacacaccgggcactcgccgccgatttccttcgcgtgcgcctccttccggtacttcacttcggtgtcggcgacggcggcgatttcgaattcctggtggtgggacacctccgacgctacggagggctcgccgtaggagggttcccggcggcggcggcgcgacgggcagccgaaggcgaagatgaaagtgtaaattagggccgggatggtgacgacggcgaggagcgcgaggaggaattcgagaggggagagatcgacggagctgggaggtccggcgaacggcggcggcggcgggaagggtaggaaggtgctcgggaagacggagtttggagctccgtcgaaggacggtgggatggggatgacgtttatttgagtggcggggcgcggcggcggaacagcgaggacggtgggtgagttttgcattgtgacagagaaagagggtgaagggattataattattaataatattaatattaataatgtcatgtgtgtgtggttttgtttgggaacttttttcaattttctcgagcc

SEQ ID NO: 52783 - DNA, 813 bp, Glycine max
  Clone ID: PAT_MRT3847_18676C.1
tgattcatcttcaactcatcaattaatattctccatacacatcaaactagacatacactacctagcttgttcttaaattccacacaaacacaacaaaaactattagcatcatctactttctagcttattgttcaagagttgtgatcaagaatgagttcaacaagccgtgcttggacttggaccgtggcggcaagtgttggagtggtggaggccttgaaggaccaaggtatatgcaggtggaacagtgtgatgagatcagcacaacaacatgctaaacataatatgaagtctttgtctcagaccaagaagctttcttctcaatcatctgttatggcttcagccaaattgaaagatgagaaagctaagaagtcagaggagtccttgagaaccgttatgtacttgagttgctggggtcccaactaaatacagatgcatggattttatgcaattctggattttttttttcttggaatatgaattgcaggaagatgagaaatggaagactcagaagatacaccaatcagagaagagtttcaactctcaaccaacaccatgttacttgcatgctatgcttgaacacctgttgatcaaaccgatcgaatcaaaggctgaactaagaatatatagtctgaagcatgtcttctgcctttatttgatcgataatcatctttggaatgatgaaatttgagacagaaattgctatatatgtataggatcttttacatgatgactgggggttatgtgttatgctgaataattgtaaagtggaatttattagccaacaagtattaagaaatgactttttctctgcgg

SEQ ID NO: 52784 - DNA, 388 bp, Glycine max
  Clone ID: PAT_MRT3847_18677C.1
cggacgcgtgggcggacgcgtgggcacggacacccgaaaagcctttacgctgcgatcgaaatcgcagctggggactgtttttattatagagattgtgattggaaattgcaattgatgtgtccacaattgtagtcgaaattgcggccacaactgcgatcgcaatgcgatcgaaatcccagttgtggattgttttttgaaaccaaggtaatgagtaggttttatttttggttgatttaaaccgtatattggtggttgttatcttctaaactaaggatttggtgagtgagggtattgtgtggctaatgtctaacaactttgactcttaactttactaaaaagtgggatggcctacagaatctttttggaaaatggttggggattttgttgc

SEQ ID NO: 52785 - DNA, 893 bp, Glycine max
  Clone ID: PAT_MRT3847_18678C.1
gcgagaagacgacagaaggggattcatcttcatctcatcaatcttttcaattctctatgcacacatcaaactcgacactaccttgttcttaaactcacaacaaaaactatttgcatcaccaactactttctagcttattatatattcaaaagttgtgaagaatatgagttcaacaagccgtgcttgggcttggaccgtggcagctggtgttggagtggtggaggccatgaaggatcagggtatctgcaggtggaacagtgtgatgagatcagcacaacaacatgctaaacataatatgaggtctttgtctcaaaccaagaagctttattctcaatcatctgttatggcttcagccaaattgaaagatgagaaagctaagcagtcagaagagtctctgagaaccgtcatgtacttgagttgctggggtcccaactaaacacagatgcatggattttatgcaattctggatttctttttttcttctcttcttggaatatgaattgcaggaagatgagaaatggaagactcaaaagatgcaccaatcagagaagattctcaagtaacatgttacatggatgctaatatgctatgcttgaacacctgttgatcagaccgaatcagaagctgaactgagaatatatagtctgaagcatgtcttctgctgctggggagagacgtatggattggatttggaagagtgcgccagtaccaattcatggcaatcgccttaatttgatcgataatcatctttggaatgatgaaatttgagacagcaattgctacatatgtatacgattttttacatgatgaacgggactatgtgttatgctgaataattgtaaagtgtaacttatatgcccaacaaatataaagaaatgacatgtttctccgcg

SEQ ID NO: 52786 - DNA, 686 bp, Glycine max
  Clone ID: PAT_MRT3847_18679C.1
ttccggatcttcccctcgcgtccgattctccatacacacaacaaattagacactaccttgttcttacattctacacacacaaaataactattagcaatttggcatcatcaagaatgagttcaacaagccgtgcttggacttggaccgtggcagcaagtgttggagtggtggaggccttgaaggatcagggtatctgcaggtggaacagcgtgatgagatcagcacaacaacatgctaaacataatatgaggtctttgtctcagaccaagaagctttcttctcaaccatctgctatggcttcagccaaattgaaagatgagaaagctaagaagtcagaagagtctttgagaaccgttatgtatttgagttgctggggtcccaactaaacaaagatgcatagatatgcaattctcgatttctttttcttcttcttggaatatgaattgaaggaagatgaggagtggaagagccagaaggtgcacccacgaatcacagaagtgtcttaactgtcaaatgacatgttacaggcatgctgttgatttgatccgatcgaatcagaagcttaattaatcgagaaatgagtctgaagcatgcatttggaagagcgatcaacattgaatcatccttggaatcctgaaatttgagacagaaattgccattatggataggattttttattttgatga

SEQ ID NO: 52787 - DNA, 463 bp, Glycine max
  Clone ID: PAT_MRT3847_1867C.1
aaaaaaaaaaaaaaaaagaaaaacaaaaaataaaaacaaaaaaaaaaaaaaaaaccaaaaaagaaaaaaactgataaaaacataaaaaaaagtaacaaaaaaaaagacaaggcgggcgcccccatgtttaaagtgttcacatccgtggatgtaccataacgccgtcccattatgcagcccccgatttccttttgaatggcaagcaccacttctgccagctttttaaggaaaaagggagctataatcatattactaagtctgcaccaaatccccaaacaaatctagccccagctataaaagggaaaaccccgggggccccaaaggggggcctaccccatacttaaagggggggcccttttccccctttttaaagggaaaaaccggggggccccccttttaaaaaaaattgccccccccccggggagggggggtcttttatttttccccccgggggttttttttt

SEQ ID NO: 52788 - DNA, 143 bp, Glycine max
  Clone ID: PAT_MRT3847_18680C.1
agctcgagccgtgaagaccgacgtgtgcgccatcatcgacgatctgctcgacacctttgacggcccactcgacgaagagatcgaggattagccagccagatatcgcgaaacgatgaagcaagatgcgttggcacgattgaagc

SEQ ID NO: 52789 - DNA, 992 bp, Glycine max
  Clone ID: PAT_MRT3847_18681C.1
gacgagaagacgacagcaggggattcatcaccatctgatcaattcttttcaattctccatacacatcaaactagacatacactacctagcttgttcttaaactacaaacacaacaaaaactatttgcatcacctactttctagcttattatatattcaagacgcgtgggcggctgggtgcagcccacaggagcggattcatcttcaacttatattctccataaacacatcaaactattagcaatttagcaccttctactactttgtaatcgttcaagagttgtgaactgtgaagaatgagttcaacaagccgtgcttggacttggagcgtggcagcaagtgttggagtggtggaggccttgaaggaccagggtatatgcaggtggaacagtgtgatgagatcagcacaacaacatgctaaacataatatgaggtctttgtctcaaaccaagaagttttcttttcaatcatctgcgatggcttctgccaaattgaaagatgagaaagctaagcagtcagaggagtctttgagaacagttatgtacttgagttgctggggtcccaactaaacaaagatgctaagacttcatgcaattttggatttccctttttttttcgctcggaatatgatgaggaatgaaagagccagaaggtgcaccaatcacagaagtgtctcaactcccaactaacatgttatgttacatgcatgctgttgatttgatccgatcgaatcagaagcttaattaattgagaaatgagtctgaagcatgcattttgctgccttggagagacatgaaatggatttggaagaggggtcatcattggaatgatgaaatttcagacagaaattgctattatgtataggattttttatatgatgacaccaaggttatgtattatgctgaataactgtaagatgtaatttataaagctaaacaagtcttgagaaatgacttttctctatgaaggggggggggggggggggggcgggga

SEQ ID NO: 52790 - DNA, 360 bp, Glycine max
  Clone ID: PAT_MRT3847_18682C.1
ggtgaatgaagagatggagagagtgatgaggcattttagtgtgccacgttcaatattaagtaggtccccttcgttgaggatagaagcagcatcaatggacaagaatcaaagtatgaactggtgttcagcaagaagctatcggtccctatattcacgggaagcagaatagtggacatagatgggaattccatccacgtgattctggttgacaaaagtggcggtgaagtagtagcggttcccactagtctgggccacccgataaagctagagatagtggtgcttgatggggattttccagctcccaacaacaacaaggaagaatattcatggacgagtgaggagttcaacaaccacatagtg

SEQ ID NO: 52791 - DNA, 309 bp, Glycine max
  Clone ID: PAT_MRT3847_18683C.1
ttacccaaataattgatgcctttaaagtttacctctcaattccaatttactcgattagttggaccaaaaaaaaaaaaaaaaaaaaaaaaaaaaaaaaaaaaaaaaaaaaaaaaaaaaaaaaaaaaaaaaaaataaaaaaaaaaaaaaaaataaaaaaaaaaaaaaaaaaaaaataaaaaaaaaaactgactcactttttaaaggaacaaactttacttacgcttacatgaaacttaatagttcttttataacatcactaaaataaaattaattgcactgagtttaaaaaatatacaatttgaaaaacct

SEQ ID NO: 52792 - DNA, 261 bp, Glycine max
  Clone ID: PAT_MRT3847_18684C.1
attgggctcggtaaccacacccaagttgttgtttgttctatatctacttcaagaagatcagtgctgtgaagttaatttttatgttccaatgtgttttgttgttgttgaggcggggtttactttattctatgctttacttatactcacttaacatgctgttgttcagtgtcctctaatggttatgatgattaatagtatgtgtatcactaaaagttttaataaataagcgctactgttctcaaaaaaaaaaaaaaaaaaaaa

SEQ ID NO: 52793 - DNA, 391 bp, Glycine max
  Clone ID: PAT_MRT3847_18685C.1
tttcgtcttttcgtacgagaagaatccgatgaatcatgatgcccggctcgattacatagggggggaagaatgtgtgggggataaggacagagatagggaggtgtataagagggcaatagccaatgttactgcggctgaggaaaagcgctatagccagtgctatatctatgggtgaataatgatgcactctatgaagagctttgggctggatacatggagctatcaaaggatgtattcaaggagagtatcaaccagatacctgaacacaagtgaatgtttgcaaagatatggctagtagcagcccattttgtaatacccttgctgaatctcaaggctgaccggccaatattaggaaatgccataggctaggcccctaaagatcagattttta

SEQ ID NO: 52794 - DNA, 209 bp, Glycine max
  Clone ID: PAT_MRT3847_18686C.1
tgccttttagctttcttctagagagagaaaagcgggtgtcgacaaggaaacaactttttggccatgtctactttttcacactaaaaattcaatcttgtcagtgtttagctcaatctggtttaaaaggtaaaaaagttaagcgtattaaggggaatcaaaaaactgaaaaaaagtttccttcgcaaaaagtgagaatgacaatttccggt

SEQ ID NO: 52795 - DNA, 176 bp, Glycine max
  Clone ID: PAT_MRT3847_18687C.1
gtagggttcaggagaagtgccagattgctgccaccttgatgggtgagtggcatcccttgatacggcctcaaagtggcacctgcatgccccgggggcaagaacctagttttggataggatattgtcgtcgaaacaacgattgttgtgtctaacatcttcaccgcctgctcagaggtc

SEQ ID NO: 52796 - DNA, 163 bp, Glycine max
  Clone ID: PAT_MRT3847_18688C.1
gttcacacaagcttttcacatggaaatcggctccccagcattcattaccctcgaaaaggatatagggacattagagcatggcgcttatcccatacccacttcccattagatcgcacttcctacatactatcacccgttcaacctatatggcttggctttgtta

SEQ ID NO: 52797 - DNA, 338 bp, Glycine max
  unsure (1)..(338): unsure at all n locations
  Clone ID: PAT_MRT3847_18689C.1
gtgtgttggtgttnttttatttntttttttntagacaagagcctttgttttattcacaagtaaaagattaccactaaatataccagggagagagataggataaaaaaaagacatttttacaacctaaaagaaataccttaaaggaaaggggttgttttcaatccccgggttttaacacatagctgagctgggggttctctgttgaaaacctttttgccctgggggggtgctcgatttgtgttcaaaaacatgaaggaatatttcaaatgcctctatattttttgaataacttggagctccttcccttttgagaaaataaggaaaaaaaccttggccca

SEQ ID NO: 52798 - DNA, 363 bp, Glycine max
  Clone ID: PAT_MRT3847_1868C.1
ggaagactatatcccccttcggtggaggctcaagccagacagcgtgcgatctctgcgacggacgcccaaaaggatttacgcatatctgaacgtacctgcgacgtcgacgcgcggcaaaaatgacagtcagattcacttcagcggccgtcgtgtcacaacgtcataaaggggatcatcctgatctttggcgccataaactccttgcaacgtatcgcacttgcgtgagcaggagttggaggaaagtggccagcatcaatgtgatttctcagcatatgcgtctcctgaagggctacatgggaggctcgctgtgtctgagcattgatcgctgacgttacgctgtgtactcggatcgtgaccgctttc

SEQ ID NO: 52799 - DNA, 542 bp, Glycine max
  unsure (1)..(542): unsure at all n locations
  Clone ID: PAT_MRT3847_18690C.1
ttgccgtgctacactgttgtagtaccgccttcttggggggggggggggggggcacggtagcaaagaaataagagatacggaggtgcgaagaaaaccattacgttgggtaaaggaggatacgcttatacatggtgtatggcggttgatagtgctaatgttgacaactgagccgagttattattaagtggacagatggcctggtaacggtaacgcacagctgagtggggcgttaacacaatcagtacttgcacattacgagcagagttacagctgctccagggtagcccgcatatcgcccgtacataaactagtaatttagtcctccataaagtgggtggcttgcgtacacccttaccagtccgagtgtgttttaccggctggcaacggcggtgttggtgtaagtagctatggggtatctggtttattgacccgatcgccaccaatccccatttgngttctcgcatccataccagtagattggcaacccaacgaaggcattgtggtagttagcgctagcaaaggtagcaaattagtagccgcag

SEQ ID NO: 52800 - DNA, 381 bp, Glycine max
  Clone ID: PAT_MRT3847_18691C.1
gttgggggacacaaatcaacctataattttaaatgcaggggaagagcctggtttttaaacccaaaaccaaaaaggggagaagagcagggggagaacccttcagtccccaaaaaaaaaaaaagggggggggggagctacagttggacccctcacccccccaagaaaaagggacggggaccccgagataggggggggcccccccccatggcaggaaaaaaaaaaatgaccgcgattacaagaaaggggcaaaacccatggggggggccaccaaaaaaaaggaacgcccccgacgcaaaggaaaatcacacctcgggccgaacggggcattggaagccaaaatgcggttaggagaaagaggaggtccccccaacccgaagggga

SEQ ID NO: 52801 - DNA, 318 bp, Glycine max
  Clone ID: PAT_MRT3847_18692C.1
tactcgagccgaatcggctcgagacggctgcgagaagacgacagaatggggcgctaactatggtcatgattatgaaactgatgatcacttgtttttgcactgtccatttgggcaccaaatttggaattggatctcctctatgttctattgttgttttgatctttcccccatccagaacgtccttgctacaattaccttttcgttcttctttatttagaagctgagaaatcttgtaaaattttaaaatctgtcataagttataattcagccagtgttcagctttttggttctatctcttttggttttatgactaattca

SEQ ID NO: 52802 - DNA, 422 bp, Glycine max
  Clone ID: PAT_MRT3847_18693C.1
gcttctgtcttacaggagcactgtcagagagggaaggccacgatgatcatcatgtctacccaccgccgtagtggccccgtagacatccaagatcctcctgtcaaaggaaggatcaatagggctccattttccaaatgatcaaacttccttaatgtgggataccatactccaaaagatggtcctttcgccggaatatggaagcccgtttcttcctgttcgatgagcaacaggacggaccctttatattcagataccactgttaagaaaaaacctccgactggtgaaatgggaggagagactagcgaactgctctaagagaggctcgagacataacttggaaaagactattccacgtataagaggatttgaccccagcttcccttatcaggaacaaatatgggaggccttatgatgttcacttg

SEQ ID NO: 52803 - DNA, 926 bp, Glycine max
  Clone ID: PAT_MRT3847_18694C.1
cccgcgtccggcttcgtcccttcatctcctcactttctcatttgtggaattacttttgtctcttcctctctgatcttccccaggctcctgtcatcccttttgctttctcaatccatttcgcgaaaaaaaaaaagttcacttttttcctttggctcccttttgtggttcctgaaacgcgttaaggattctgtttgtgttgggtcaatggggtcctgtttttctaaaattacggcctcaatttttgcagtctgggggtgattgatttggggtgaaggaatgtagctggaggaggtggttttgtgttcttaataagaatttcatcctcattcttcaaaaggggtgttgtaaatttcttaaatttgattccttttttgtttaccctttgtcctggatgcgccaaattggtgcttaatttgatgaattgggtgtgaattctcattggattttgaggggtgtttgaagaaagttaggatttttttgactcaggtgaatctgtgggtgtggggtgtttttttttccctctgtttgggattctgcacaatcactttgaattgggcacaaatctgagcataaaagaagatcattgcagctggtgattgaaggttatttcattatggagcatgtgattggtggcaagtttaaactgggaaggaaaattgggagtgggtcttttggggagctctatttaggtgttaatgtacaaactggagaggaggtagctgttaagctggtatgttaaattctcttcaagcttttgtttctttttctgtctggattggccacaaattttttaattatggaaatctttcatgaatttatagagatcgcttgatttatttattttctttttctggtggttctgattgtatttctactatataccatattatcttaaatatatataatgatgttgatcaccttgtttt

SEQ ID NO: 52804 - DNA, 644 bp, Glycine max
  unsure (1)..(644): unsure at all n locations
  Clone ID: PAT_MRT3847_18695C.1
ccacgcgtccgcacgattcaaatggcgaaaaccccataaaccctaaaatctggcggtaccgagtgatcatcatcatcatgttttcttgcggaacgaagaagagcaatgttcgctctcgcagagagcaaggtcgcgattccacggtggtagattctccggtcactcctgctcgaacctctttccacgataacgccgttcccaatcgcccgaccaccggcactcccgttccttgggctccccgcttatccgttcttgccagggttcctcaggtcaacagaactggaaaaggcgacgacacagatcctaccaaacctgttttcgtcggcgagtttccgcaagtggttcgtgatgagcagagcattttgctacacaatcgaattcctgctgaagatcgcgtgtgtggtggaattgacaagagcacatcccttgcttggattatttgtgggaacagggtctacctatggtgttatttgtcgcccgcatcctccgtgaaatgtgctgtcctcgagattcctttgaatgatgctgatgttggcagaaatcatgctggtagttggttgctttgtgttgttaatgtgatgccacgtctgtgggaacgaataaagtgcaaaacagtgcaactctgctgctgtggttttgngcaa

SEQ ID NO: 52805 - DNA, 415 bp, Glycine max
  Clone ID: PAT_MRT3847_18696C.1
gaatcttgtttggagtgacaccctactccatgaagtgattaagtgaatattggtgacaagattgacaagattgttgtgaggagggggggagagcatatgcttgcaagttacatacagtatgtatatcacttggtatattgctaaatcttaatgtcttctacctttcactcctgactaatttttagtgtatgtgtagggatactgttaaaatttgtttatatgcgataatggactagatattacatcacctgtttctagttatgtcttaagtatcacttgattaggtaaaaaagatgttttttgataccaaatcttctcaatttcatcctttatttctttgtccactaatgttatacttgactgccctcattttttttgtataaaattttatttgcctcatattgattaatggatg

SEQ ID NO: 52806 - DNA, 204 bp, Glycine max
  Clone ID: PAT_MRT3847_18697C.1
aaaaaaacaaaacgggaaaactggcttttttttaaggggattgaaagggccaccccccctcaaatataaacaaaggctcggtgggaggggccatgggccattcttttttttttcatacaaaaattattttttgggtattatttcaaaagagggccccatcccacccccatcaggcttggaatttatgcgactttaacacggggg

SEQ ID NO: 52807 - DNA, 573 bp, Glycine max
  Clone ID: PAT_MRT3847_18698C.1
gttctgggcgaagctgttgctcttgccaagaaagctgattacgcactcgtctttacaggccacaccacatcttgggagaccgaaggtcaagatcagttgagcttcaacctacccaaggatggtagccaggatcgattgatcgcaggcgtagcagctgcaaacacgcaaactgtcgtcatcaactcaaccggtgtggcgatcgccatgccatggctggaagaaatctctggccttctgcaaacttggttccctgggcaagaagcgggtaactcgatcgtggacgtcctcacgggcaaagtcaatgcagagggtgctctcacatgcagctttcccaaggagctgacttccgctccagcgtacggaaacttcccaggcgaatacaccggtcgtcaactcactgtcaaatacgctgagggcgtcttcattggctacaggcattacgatactctgccagctgagcagctcaacttcccattcgggcatggtctctcatacactcgattcgacttctccgaattccatgtcggtgcaaagtctgagagcgagtggacagtgtccgtcaatgtcaagaat

SEQ ID NO: 52808 - DNA, 438 bp, Glycine max
  Clone ID: PAT_MRT3847_18699C.1
accacgcgtccgggttgttcatctctcaaggaattttcagtgacatcagaggaagatgacggatttggacttatctcagactgctatacgtgcattattgacgtcaatgttatttctcctgaagcttacatattcggatttaagtggctgcagagagattgaaagccttagtgttcatataaaatctctacgggtactgacactcatcggtggcccatatctcaaggaattatccgtgacatcagagaaatcgacagtattggagttacctgacactgctatatttgcattgccaacatcaattgggcacttattatctttaaaagagaaattggtgtctctgcatgagcttccaccattcctgagcgagctttatttaaatgattgttgtaaactcgtgtctatgccggagcttccaccatcgggtaaagaggagac

SEQ ID NO: 52809 - DNA, 290 bp, Glycine max
  unsure (1)..(290): unsure at all n locations
  Clone ID: PAT_MRT3847_1869C.1
gcantncacgcgtacgtaagctcggaattcggctcgagtattacctgacactgttaatatttaatgccccccacctctgcnctggtcgccccacggcagacactatccccgtagtggaggccacaggaagatcgtngagaagccctggtggctggggaaatgacagagctgtncgctaaccatggtggnagtgccaaggggacggagaatcccttcgagtatgactntgaaacggtccgnaaggaggcccgannttcnggggctttnccttcggcgtgggactcannttc

SEQ ID NO: 52810 - DNA, 576 bp, Glycine max
  Clone ID: PAT_MRT3847_186C.1
gcctgtgatagaaccattcacgcatgaacataacagtttacacctacgtccctatctcaatgacaggggaattgacagggtctctaaataaacgcaagggtttaatatgtcgcacatgcattaccacaacaacaaaaaccggaccctttttggtaatacaaaagctatgacgttacatgtatacattcttttgccctacatacagggttttcacatggaggacagcgaatcaatcctccacaaagattttgtgtccctttccaagcaggaaaaaacgatacacaacacttttacacacattatgtgctccatgtgatatataaataggacattatacaggagttaatccaaaaccttgggataccacacaaggggggaattcaagatcagcccctgccaaaactaccatggctttgactttcaaattgattgaagagagcctgagccttttttttggccctaggggggcccgactgtgatatagctactaatggtcggacagctccttgttgaagcacactgattgaaaattgcggactatgtgagcgaagatgtacactagctgcggctgcattc

SEQ ID NO: 52811 - DNA, 1901 bp, Glycine max
  unsure (1)..(1901): unsure at all n locations
  Clone ID: PAT_MRT3847_18700C.1
ggttgttgaagcagaagtaatgcctcagatcatggctttgcttccgaaacttcctcatcaaccccaattacttcaaacagtgtgtttaactattggagcttattcaaaatggctagattctgcatcttgtggactgtctgtactgccctcagttttagatatcctaatgaatggcatgggtacatcggaagaatgtgcagctgctgctgctttggcatttagacacatctgtgatgactgccggaaaaagctttgtggatgcttagaaggtctattccacatctacaacaagaccgttaatggagaaggtagtttcaaattggctcgagaagactctttgcatctggttgaagctttgagtatggttgttactgaacttcctccagatgatgctaagagagctcttgaggcattatgcataccagtcataactcctttacaggaagctatcaatcaaggtccagaaagcttgagtaaaagaccttctcggcagttaacggttcatattgatcgatttgcctacatctttagatttgtaaatcatcctcaagttgtggcagatgctattcaacggctatggccaatttttaaggctatttttgatattcgtgcttgggacatgagaacaatggaatctctctgccgagcatgtaaatatgctgtgagaacttctggaaggttcatggggctcacaattggtgccatgctggaagagattcagagtctttataggcagcaccaccaaccatgctttctttatctctccagtgaagttataaagatatttggttctgatccatcttgtgctgactacctgaaaaatttgattgaggcactcttccagcacacaacacgccttcatttgttgctgcaggaattcacagcccggcctgatatagcagatgattgttttttgttggcctcaaggtgtattcgctactgtcctcaactgtttattccctcgtctgtttttccttcattagtggattgctctatgattgggatcacagtacagcatagggaggcttcgaattccatattgcatttcttggctgacatttttgatcttgcgaattcctctgtgggggagcaatttataccaataagagatagtgtaataattcctcgaggtgccagcatcaccagaattttggttgcttcattaacgggagcacttcctaaatctcgagtggatgtggtatcttatacactcctggcattaactcgatcatatgggatgcaagcgctggaatgggcaaaaaagagtgttttgttaattccatcaacagctgttacagatgtagagcgatcaagattcttaaaagcactttctgatgcagcatccggaggggatactaatggacttactgttcctgttgaagagctgtcagatgtttgccgacgtaacagggccgttcaggaaatagttcaggaagctttgagaccgcttgagttgaatatggtgaatgtatcatagaggattggtaaatgccattgatagagagggccattttgtttagggtcctgtctgttagttaggctagttggttgtgtattatctatctgttatattcatttttttttatccattatcattctccaattttttagaagaatttgcccctgcatgctctgatgtgttggccggaagaaattcgatgggggtattgtatctttttattcttgagatgtgggattggtgagtgatgtttgtcccggttgtcatttttggggggcggaggttacatggtatacagttgtaatttaatggaaacagaaaaggtgggggaaaatagagtacattgataagttgctgcaaattttcaagttgggaatgaatatcgattttggaatctgtgactgaattgtgttcagttcgtgngaccaatctgttaaaanna

SEQ ID NO: 52812 - DNA, 317 bp, Glycine max
  Clone ID: PAT_MRT3847_18701C.1
gtgcggcgctcgaggcggccgggtccggcactctgccattctataatattactgtgaacctgtgttgtatacgccttataatgtgtcttcactttagctgctttgattgtaactaggtttgttcccaagccagggaattcctttgcctttggggcttaagactgtatctagtctagttacatttgatacattgaccgtatgttatagtagtagtcttgttgtgctgcggttatttgtatatgattgtgattgtgattagattatgtttttttgagctttctaagcatactttgaacaaaggtgaaactattgttgac

SEQ ID NO: 52813 - DNA, 250 bp, Glycine max
  Clone ID: PAT_MRT3847_18702C.1
aactggcaaaagtttttccccgaaaaagggaattccttacatagcaagtgattatagtaaagataggaggtggctgaggcggaccagacccaacaaacttgattaccaagctgttatacctgttgatgattcccataggatgtcacaaaatggctgcggtgatgctgctattgaagctttggttacagcatgtcgggctgccccaccattggaaacgggttctttgccctgcggctcgctccccaaccac

SEQ ID NO: 52814 - DNA, 280 bp, Glycine max
  Clone ID: PAT_MRT3847_18703C.1
gccccttttctttgggcttgacacctgtccggctcgagagtgattagagctgcataatgtccctctcttggctattgaccatgtggttcacgtacaaaactctgtataagttgaaggaaaatgttcatgttcatatgtacttgtttgctatgactacattttgaggttttgtaaaactgttattttttttttttctcccaatgtgaacctgaaggccaataaatttttagagattttcccttcaaaaaaaaaaaaaagagagatagaaaggaaaaggggg

SEQ ID NO: 52815 - DNA, 241 bp, Glycine max
  Clone ID: PAT_MRT3847_18704C.1
gcagactttcgtcaagactctgacaggagagaccatcatcttggaggtggaaagttctgatgcaattgataatgtgagagccatgatgcatgatgctgatggtattcccccagaccagcagatgcttatctttgccggtatgcatcttgaatatagatgacccctgggatgttattacattcaacaagaatcgtctttgcacttagtgttgccacttccaggtgggatgcacatcttcttg

SEQ ID NO: 52816 - DNA, 381 bp, Glycine max
  unsure (1)..(381): unsure at all n locations
  Clone ID: PAT_MRT3847_18705C.1
gaccgcagagcngggnccacaaacggcgggccaccgtaggaccggcgagccaagacaacccaacaaagaggacanggggaggcncnacnccgcnggaagagaccccgccnncnagccncaccaggccaacgnggancgnaggnggaacanagggaaaacaacaccaagcggaaaaagaagggaccncaaaaaccgngaaaggccggaaacccccnnnnaccaccacgaagagaacaagacccaggaccgggggaaggggaaagacagccnngacancgaaaagaagggnnacgancaccaagaagncgccaccccaaggcncgagaaaaagccnaaacccaaaagaacnagaaaggccaagaagggggcgnncgcacaaca

SEQ ID NO: 52817 - DNA, 763 bp, Glycine max
  Clone ID: PAT_MRT3847_18706C.1
ccacgcgtccgcgaaagagtctgtgatgggatcgaatgaagaaatgggtctggatcagctcccttccgctctggttgcgaccatcatgtccaaactggacattgcatccatctgttcattggcttccacctcatccaccttccgctcctgcgcccgacacatcctctcctttctccccactttccacctcctcgacattgcgccttcgggggagttgctgagacccttgctaccgcccaatccctacctcaccaatctcaagctcgattgcgctggcctcgacgattccgcaattgggttcttgctcaaaccctccttgcacgacctttctctccacaattgcgccgatttcagtggcagactcttgtccgagatcggcaaccgatgcaaccatctcaggtctctctatttgggctccgtggctgagaaaagagggagggcaattcatatttctgatctccaggagttactcaccggttgctcccacttggaagcactgattctgatgtttgacgtctctctctttctacgtcacaactttgctcgagtatgggcttctgcctcagagaaactcacttctcttgagattggctacatttcttcagtgacagtgactgaactgcttagcccaaatttgggatcccagctgccctcaaatcctgctcaaccatccatacttccaagcattcagaaactgtgtcttaatgtagactatataactgatgctatggttggtacaatatccaaaggtctcatgcttttg

SEQ ID NO: 52818 - DNA, 250 bp, Glycine max
  Clone ID: PAT_MRT3847_18707C.1
cggctgcgagaagacgacagaaggaggaagttcaaagtgtaggacgaggaaagtagaccgcgggcgtgtccactactggggcctgttttggcttcacttccaacacaaaggctattaggcaaagtggcattggttcctgggggaccgtttggaattggaaaaagctttggccgccttttccttatccatggggttaaaatttgtttagttgttgggcaaaacacccttggaaagcaggttgtgaatcttt

SEQ ID NO: 52819 - DNA, 530 bp, Glycine max
  unsure (1)..(530): unsure at all n locations
  Clone ID: PAT_MRT3847_18708C.1
agagaaaaataataataatttctatttttatgttctaaagcaaacacattttaggaattgctacacaatcttaaaagtgtccaaccatcaaaaaaacgaaaagagcctctaaaccatccaggcgtcaacatgaagtttagtgagtttaaaatacatagtaatattaattaatatctaataaaaataaattggttagccttttggggtatctggagatggaagcttggcatcccttagtcggataagatcatgaatcagggccgttaaattattgtgagatgaacctcctactcgaacagcttgtttggccttttcctgaaagtgttttgcacggcgtctgatttctagagcttgatcagcaccgtccatcaagcgcctcacagccttctggatgctatctctggtcagcatctggtatctctctccgaagccagtggtggtccactccgctgcgccaacctncaccccgatcccccttacctcagttatcagcttctcattgtagaactgttctccatgcaccggccacg

SEQ ID NO: 52820 - DNA, 129 bp, Glycine max
  unsure (1)..(129): unsure at all n locations
  Clone ID: PAT_MRT3847_18709C.1
aatcctantcattctccatacctcaacgangangttaaagagacgggaacactttgcngtccgncttgaccgagcagagcttcgtcntggccntngatttgncncnanagnactctcagtcacaacagc

SEQ ID NO: 52821 - DNA, 496 bp, Glycine max
  Clone ID: PAT_MRT3847_1870C.1
cttggggggggggggggggggtggggcagagaggggcggcgggggaggagggggaggatgggagcaggcggtttgggtatgaagcgatgactgacacggttacgcaagcctatcggacacaaagtagctatagatgtagcagcttccaaaagtcgaagcagtaacgtacacagagcgaatagcggacttatagaagcctatagagtatggggaggtgttgttgtgattagagtgtcctaagcaacggactaggaaggcgagaggacgccctgccagtagtagcggtaccaattgcagtagcaatacaaaagcggcagttgtgatttatacccacagaccattatctagggctgctacgattaatgccaggcctacgaggaatgcagttttaaagatagcgtgcttgttgaccttggtgggcgtgggtatcttcgcttagtgactggttgccggttgtgcacatagtgtttgaggtagccgtgtagaatacgcaaca

SEQ ID NO: 52822 - DNA, 369 bp, Glycine max
  Clone ID: PAT_MRT3847_18710C.1
cattcatcaggatagtgagtattcttacattacttgcattcctagtaatcttctacaagataggagcatcaatgaacattgtagaacaagtgaatgtactaattatagcagctaaaggataatgtataggcagtagatgaggatgatacatagtgattttttgtaacaatgtgccaccaaatgctagtaaaaaaaaaaaaaaaaaaaaaaaaaaaaaaaaaaaaaaaaaaaaaaaaaaaaaaaaaagaaaaaaaaaaaaaaaagaataaaagctttaaaaaaacaaaaataaggcgccgtcgcttttaaatagagaaccttattttcgtttccctggccggcattttactgcgtggagactgggaaaac

SEQ ID NO: 52823 - DNA, 469 bp, Glycine max
  Clone ID: PAT_MRT3847_18711C.1
tacggctgcgagaagacaacagaagggggtggctggctgtactacttgctttgctgcccgagagtaaagagcaagcctttttctctactctctaatctatttagggaactaggcttttggatgcccagacatcgcacacaggattctgtgtgggagtggcatgtatttccccttacctacttcgtcatctcccattcgacctgtcttcttcttcttaaaagcgcaatgggtatttgcccgaactactcgctgagaggcataggctgatacactttctccaagttcttgcacaatctaacaaactcctaacccaagaagtcagacgcatgtacaaaggtggctgcagtggatggatccagctttaatcatgaccctagagcaaacactcctcctgcataatttaggcctatgggtctcgagggatcgtgcaccggagggctgcaggacaaacctaatccccaaaggatga

SEQ ID NO: 52824 - DNA, 207 bp, Glycine max
  Clone ID: PAT_MRT3847_18712C.1
ttttgataaaatggcataacaaaatttatataaaaaataatcgcgctgggtaaacaatggcataaactaagaggtccacttgctagagaaaacccatttttccatccctgataaagggggaacggtaggttatgcttttatcctataaaatgcattcaaagttaatattctttttttttgaacgaaaaggcaagccttcccttgcct

SEQ ID NO: 52825 - DNA, 353 bp, Glycine max
  Clone ID: PAT_MRT3847_18713C.1
aaaaaaaaacggaatgcccaaacaataaaccctaaatttttggggggtgggggaacaggataccctttttaaacatgacattgccacccaaagctttagaggggggccccaattaaaaccctcccccgaatcaatttttaaccggcattttatcaatatttgccttcccattaaaatggcttaaatttaacaaaattttcttttaacaataaaattttaaccccccctgggccatccaaacgagtttttattttttcaaccaaaaggggggggctcaaactcccggattattagctggtggggtgaaacacccaaaatgaaaatttttgatcgcaagaatttgggttctaagt

SEQ ID NO: 52826 - DNA, 351 bp, Glycine max
  unsure (1)..(351): unsure at all n locations
  Clone ID: PAT_MRT3847_18714C.1
gcgtncgtangcttggattctctggagcggccgccctttttttccttttttgtcntttgctcnttggcntgggtgtntngcnncctnttttacccgtntnttttgcgtttggagtngcttatgcccctnnntgggtgcctacccgcnncccttgggagcctnnntcttttctccatgtctgcntancctatggcccgtgggtgcgatctgggaagtgtatctttgctagtcctctagcgttttccttcgttgccgctccncggtccgcgtcccggctctgggattgcgtgagnttcagtcctttttcttgccctctctggttgcttttcacttacttataaggtgatcatg

SEQ ID NO: 52827 - DNA, 1030 bp, Glycine max
  Clone ID: PAT_MRT3847_18715C.1
acggctgcgagaagacgacagaagggacaggcatgcagcactgtcagtgtgtaaaagtttaccagttagaaatcttttttattagttattataacaatctcagacttatcatatgataatttatagttagatgataatgttaaaggtcggcgccgcacggatttcttgtccgtgtacgttggcacacgacggtaccgtgccccggcattgctccgtatttcctctgtggttgcctctgcatgtgaggtttgctctgtcgcgggctttcttggtgcgtgtatgtccagcgatcccttgtttcctggcaaagactatgttcaccaactaaggcttataacggagttattaggttcacctgatgatgcaagccttgaatttctccgaagtgataatgccagaagatatattagacagcttccacagtaccggaagcaaaaattctcggccagattccctaacatgttgcctgaggcattggacctgttagaaaagatgctgatctttgatccaaacaaacgcattactgttgatgaggcactatgtcacccatatctttcatcactccacaacatcaatgatgagccagtctgtcccaggccattcagttttgattttgatcagccaacgtgtgctgaagagcacgtgaaggagctcatttggaaggaatcagtgaagttcaatccagatccaccatgccagtaattctttcttatttgtataaatgtaacgagataaacctctttccccttaaatatattgcctgtgcatccgccagatgatttgctagagacaaattgaagttctcttccttgtaatcttgttctagaccaacaaggatatggaaacaaatttctcctggaaaatgggtaaacgttagaaatccagttggacaggcctttataagagtaataaaaaagctgtgttgtattgtgctcgctcaagtttgctttgggaggaatagggtgtcacagagcctctctcttatttcatgacaattatcttttaatgtcactttccagctttagtgttt

SEQ ID NO: 52828 - DNA, 531 bp, Glycine max
  Clone ID: PAT_MRT3847_18716C.1
gaaaatcacatgcactcgcccatcctctcattatccacacaaaaattcttgcatcaaacatatgtttctatctttcccacttttccctaatgaaaaacacccttccttaaaacactctccactatgatcactaaaaaaaaacaagaacaacttcttttgttcatcatcatctttgttttggggaaaataacatttttcattccaacaacgaatgcccaagtgaaccaccacgagtgccgccaaacatgcggttcctccaaacccgtcccttacccattcggattctcctccggctgcgcaatacgcctgaaatgcaccgccggcgtggcctccgtcggagaattcccggtcaaagtcaacacagacagcatgatcgtgagcattgaagctcaatgcaatcgcccattcgatagcctccaccatctgttcagccacaaatacgcacccacttcgcgaaacgtgatcctcttagagaactgcaccggaacgcctttaccttgcttcataccggagactctggtccggacccac

SEQ ID NO: 52829 - DNA, 557 bp, Glycine max
  Clone ID: PAT_MRT3847_18717C.1
ggctcgagatcgataagcttcttgcaaggtgttatcagtagattagttgatcacacctttacaggatgccgtattatatacagagactttataggctgtgcaaggcttccttttcaccaaatggacctgtctcagaagaagccgttgcaaaagtttgtgagaagttagaaaaaatcaagccgtcagatgtaggtcttgaacaggaggcacaagtggttcgtaattggtctggtcaaatgcctgaatgcaacgggaaccatcaacagccaccaccgatcaaatacctgcatttgtatgaagatgacagcttctctataggaattttttgtatgcccccttcatctattattcctctccataatcatcctggaatgacagtcttaagcaagctcttatatggttcagtgtatgttaaatcttatgattggattgatttccctggcccaactgatccatctgaagctagagctgcaaaacttgtcaaagataccgagatgacagcaccaactgcaacaacagttctttatcctacccttggagggaacatacatactttt

SEQ ID NO: 52830 - DNA, 476 bp, Glycine max
  unsure (1)..(476): unsure at all n locations
  Clone ID: PAT_MRT3847_18718C.1
ggattgcaaacgaagacacgatcatgtcgttttaagcggcatggagcgcactcatgatgtcgtttttctttggtcgtactcaaccctccttactccgaacgatactcgaaaataaacgaaactcttcccaaaccataaaaaatgcagtgtttatctgaaagcaacggtctaagattagaagcctcaatctcaaatcatttcgttcttcacgaggccgaaaaataatagtaaaaaaagggggggaaaaaagaagaaaagaaaaagctcagtgtcacgtacacccatcatcatcgaacccattttgctttttccttcaaattttattttttttttcctgggtctttgctggttgcagcaatcagagctgaaataaaagctttagaataaaaaatacggagaaagaaattcanaagggtatccgaaaaatgccttttcgtccgcattccttttgagctcgtcaacaatggcagatgatc

SEQ ID NO: 52831 - DNA, 248 bp, Glycine max
  Clone ID: PAT_MRT3847_18719C.1
gaaagaaagcgtgttttggctaggagaaagagtagcagaccctttgttcagggcccatgctcaattcccttctgagatgattgaatttagaaaagggccagttctttgtgatgcaagaaaatcaccaattatctcccctcctacttggaaagtctgagtgcagcacagctcaccggcacatgatagccttgtcaaaggcgcaaatcaaggaaaccaatcaaaagtgtctgcaactgccgttgatcatt

SEQ ID NO: 52832 - DNA, 463 bp, Glycine max
  Clone ID: PAT_MRT3847_1871C.1
ggctcgagagcagttctgttcattggagcgcccctgcgtcgcgaacgaatgaacgaagaacacagaacgacgcatatccaagactgaaagtttctagattcgtcacctgcgagtaagtttcttcaatccatacttcttagttcttattctcaaatttcttcctcaatcaaactccttaccgtttgaaaatcccctgttttattttcttttaaaaatagggtttaacagtgtctcataactttcattccttaatttgaacctgtttgagctcaaatacctctgattttgctaacgccagattcaatatgccccacaaattcatggcattcttgtatatcgtattttaatccatttcagataatttgcgtgcctctgggttctttcgggacttatgaggtggagacatattttgtgataaccctatacccaatttggagcaatggtctgaaaaggtttgggattg

SEQ ID NO: 52833 - DNA, 667 bp, Glycine max
  Clone ID: PAT_MRT3847_18720C.1
tttttaagacggataagttttattttatttattttcttttttttgtaaagtggcctttaacactgaaatatcccagcataagctttaaataaaatacattaatcgatcaaatttaggcaatgacgatatggcttctatggcagtgcctaaaggccatgcagcttccacaagagcatcctgatattctatttcatttgccactgtaatctcttgccatggatcaaggccaaatccatcggtgtacaatgcatactggtatgcaatatccaagcatacatatggaagtctatcctcagcaaggtttggataggtggacttggcatcctccaattttgtttcacaagctcgtttagcttcaatctcaagatcaacaggatgaattttggagttgggtttatttagatcaatgataccaatctctgtaggcagataatagaaagatgaagtgccgaaaagaattttctgtccacttccccttccaccatcccatataccaccaaatgtgcaattttgatgggggcatgactcattcaatttgagagcttgaagaacaacctctctacattcatcgttaactggagccagaaatgggagcgaaggccttatagtctgctcctgactatgtgtagtcccatcgaagccagcttaaatacagagggtagcggag

SEQ ID NO: 52834 - DNA, 705 bp, Glycine max
  Clone ID: PAT_MRT3847_18721C.1
cccgcgtccggattaacttcggatgaatgacattttctggcgacctttttccttctattaacttcggatgaatgtcacatggatggcttaatagtcgatttatatatgattgtataattttctgtgtttggcattcgcacaggctgtagcaagagggctaaaagatccttcttttcgtgtgattcaaaaccactttgcaatttcaggaaatctaggagaggtagcagcaaaggaagaagtttgggaagtggttgctcaactggttggcctttctttaggcatattgattctggatacacctggccttgtaaaatcatatggtgtaatttcgttaacttggttgagtatgcgactactgcatctttggctatgttatgaatcactttcagttctccagtttaacacaataaatataaagcgtgctcgcatactggtaaaatcacatgtgttacactccactgttccaggatgcaccgatagcaacagagaagtaaatatattagcctggtctcaattcatgaagccaaaaataatttttggcttgcccttggagaaaatggatggtgtggagagatcttattttatggtggaggcacttataaaattatatgcaagtgagaaatatattcttatggtgaatcaacagacagaagatttgagattttatgtttctttcaaggttggagctacaatgtatcggtattg

SEQ ID NO: 52835 - DNA, 281 bp, Glycine max
  Clone ID: PAT_MRT3847_18722C.1
ctgcatcttcctagatgatgactattctgtcaagattgcaggatttggtctgatcaactccaatttttactatggttctcacttacacaagaactatgaagcatttgacatctgcaaaaatgatgtttacgatatgggtgtgttgcttcttgagattatctcaggctcaaatcagttggattcaccaactttggctttacagcatgtaagggctggaaaatttgaagaaattttggacccatttctttgctatgatgaacaaccacattaccgccaagagc

SEQ ID NO: 52836 - DNA, 408 bp, Glycine max
  Clone ID: PAT_MRT3847_18723C.1
cccacgcgtccggttcactcactcaaccgttcctttatcttttggattcccttctgattcactttcactttcactccttagcctggttataggagctagggtttatcgagggtttcgttccttcctctctgcaacaacaatggcgaaacctgggcgaggtcgtcgctctccctccggttccgtttccggctcctcctctcgctcctcttccccctccgactctcgttcctcctctcgctcgcgctccctttctcggtcccgttctccctcgcgctccagatcctcttccccctcctcctgctcttcctcccgaagctcccgcagccgcagccctcccccgcagaggcgccgaagtcctgctgacgcaactaggcgaggtcggtctcctccacctcagtctaagagagc

SEQ ID NO: 52837 - DNA, 535 bp, Glycine max
  Clone ID: PAT_MRT3847_18724C.1
gatcgttgcttaacactgttcactcactcaaccgttcctttatcttttggattcccttctcattcactttcactttcactccttagcctggttataggagctagggtttatcgagggtttcgttccttcctctctgcaacaacaatggcgaaacctgggcgaggtcgtcgctctccctccggttccgtttccggctcctcctcgctttccccctccgactctcgttcctcctctcgctcgcgctccctttctcggtcccgtcctccctcgcgctccatatcgtcttccccctcctcctcctcttcctcccgaagctcccgcagccgcagccctcccccgcagaggcgccgaagagtatagagattgcgccgaagatatcgctattttagagattgcgccgaagctcccgcagctgcagccctcccccgcagagatctcattttatggtggaagaacttctaaaattatatgcaagtgagaaatatattctcatggtgaatcagcagctggaagatttgagaatttattgtccttt

SEQ ID NO: 52838 - DNA, 2665 bp, Glycine max
  Clone ID: PAT_MRT3847_18725C.1
aaaatatattagcctgtctcaattcatgaagccaaaaataatttttggcttgcccttggagaaaatggatggtgtgatcccctgcaaggccgcctcctcgccggggtctggttcgaggcgcgagctagggtttatcgagggtttcgtgtctccccgccaccgcctgcgtgcggggagctagggtttatcgagggtttcgttccttcctctctgcaacaacaatggcgaaacctgggcgaggtcgtcgctctccctccggttccgtttccggctcctcctctcgctcctcttccccctccgactcccgttcctcctctcgctcgcgctccctttctcggtcccgttctccctcgcgctccagatcctcttccccctcctcctcctcttcctcccgaagctcccgcagccgcagccctcccccgcagaggcgccgaagtcctgctgacgcaactaggcgaggtcggtctcctccacctcagtctaagagagcttcacctcccccaaggaaaccttctcctgtacgcgagtcacttgttcttcatgtagaaaagctcagcagaaatgtcaatgaagggcatttgaaagaaattttcagtaactttggtgaggttataagtgtcgagttggcaatggatcgaactgtcaatcttccaaaagggtatggatatgtgcagttcaagacaagaggggatgctgaaaaggcattattgtacatggatggtgcccaaatagatggcaatgtcatcaaggcaagatttactctacctccaaggcagaaagtttcaccacccccaaaggcttctgctgttgctccaaagagagacacccccagggctgataatgctagtgcagatgttgacaaggatggaccaaagcggcaaagagaatcttctcctcgtagaaaacctcctccctcaccacggaggagatctcctgtacctagaagagctggatctccaagacgaccagattctccacgtcgccgtgcagattctcctcgtgttcgtcgccgattagactctccttatcgtcgtggaggagacacacctcctaggaggcggcctgtgtctcctggaagaggtcgttctccatctccacctagacgccttagatcccctgcaaggctgtcacctagaaggatacgtggaagtccaggtcgaagacgttcacctccacctcctcccaggcgccgatcaccacctagacgaccacgtagtcctcctagaaggtctccaattggtcgtagacgtactcgctctccaatacgtaggtctgcacgctcacgctcaaggtcattctcacctcgcagaggtagaccaccggttagacggggaaggtcatcatcctactctgattcaccaagtccacgcaaggtatcccgtagatcaaagagtcggagcccaagaaggcctttgagaggaagaggcagtagcaacagcagcagcagcagttcaccaccaccaccaccaccaccaccaactcgcaagccatagataattcttgtaaatctattgtctatttctgttgatgtatttattgagattctgtaccggctgagttctagcttgatgtgcttggggatatatgttgcttttcattgtggtctattaacacattttttcttattagcacttaaaagttgtttggaaactaggcattccgtttttgtttggatcctactttagttgttactttgctcaaaaatgcaaaacatgaaagacgatagtgctctgctttattgtatttctagaaattcagtggaattccatgtaactggtagtttctttagaaatttgattatgcgaagaaaaaaaaaaaaaaaaaaaaaaaaaaaaaaaaaaaaaaaaatgaaaaaaaattgctgtatgttgcccgaagatatcgctattttgtcgacccgagctgcacccccccgcgagatctcattttatggtggaggcacttataaaattatatgcaagtgagaaatatattcttatggtgaatcaacagacagaagatttgagattttatgtttctttcaaggttggagctacaaatgtatcggtattgcgaagtgtgtggcagagtttctggctaagtgagaactgggatagcgatgataatgttcgtgatcaaattgctactagcctaatggaattggaagaaaagtttgaggatttcattcaaaagttgaaagatgcagaatgggatacccagcaattaaatttgaaggttcccaaagaaatcttcattgatgacaataccaattctctctaaattctaaaatggtgaagctgagaatgttgggtagtgcaaaatgatatgacctcataaaatgtgatctaccaaattgtaaattctgtaagcagttttgcaagcattcagagcaagatatctattttcacatgtagatattcaacaaagggagacacaaaatttatggtggccaattggcttatagtcctaactcattaaataccaaatactggctttgatactgctttctactttctgaggatcctattgtaaaaaaattgttctcaattttgtttaaagtctttcttgtatgtaattttgtggggggaaattttttcatgcttggtattcaggacttttgtgggtgtacaatttgttgatcataaaaatgttcatttctttaaaaaagagaaaataaaattataat

SEQ ID NO: 52839 - DNA, 384 bp, Glycine max
  unsure (1)..(384): unsure at all n locations
  Clone ID: PAT_MRT3847_18726C.1
ccggccgaatcccgttttcccaccgccgcctgtgnccgccaccgccgggattacagataagattcatggtaaatgggcaggaacttttgggcaggtctggagtgctgggacagaaaaggaaggaaatggccccataaaatgtcgtgggataaagaaatatcgagaggcccatggagaaattgggactgcacagctggaaacacataaggtagcaatcgtggtgcaaatacggaactggttgctatcgaatcaatctgatcggttgagaaactgaccaagctatcgatttctcggaaaaacagtatcgtattcccattgatcttgccggagatgctgcaactttgaatgtgacattatcatgactacacagaccatctgaccgaa

SEQ ID NO: 52840 - DNA, 289 bp, Glycine max
  Clone ID: PAT_MRT3847_18727C.1
gcttaattttccaaacaacaatataaacattgggggaagagtcaggtctgttcttgatgttgactgtggggttgctagcttttgaagataccctcttttcttcaatgggataacaatggtattggcaccaaaatgatgttcatcaaaatcaaatccagtttgcctaagaaagggaattcccacattatttgggtgtttggggaccccaaaaactccttaatccaagtaatcaatttgaccttgctaattgtcccgcctgaaaaattaatggcttcaaaaaagatggtta

SEQ ID NO: 52841 - DNA, 2043 bp, Glycine max
  unsure (1)..(2043): unsure at all n locations
  Clone ID: PAT_MRT3847_18728C.1
aatattttgaatggcttccacaagagacaaagatgaggctgaacatcagagaggctattggagatggagcaaacaagatttcttgcctgaggagtccttccaaagctggagcaactacgtttccgccctttctcaaacacggctaaggttcaaggaccgtctcttagcaagatcagatgatgccactgagacagaggaactcaagaaacaaagtgagcatgacatgaaacgttgcctcaactggtgggacctcatatggttcggttttggcgcagtgataggagcaggaatctttgtgctcactggacaagaggctcatgaccatgctggaccagccattgtcttatcctatgttgcctcaggcttctcagcaatgctttctgttttctgctacacagagtttgctgtggaagttccttctgcaggaggctcatttgcttatatgagagttgaattaggagactttgttgctttcataactgccggcaacattcttcttgaaagtgttattggaagtgcagcagtggcaagatcatggacttcatactttacaagccttttgaaccgtcccaaggattcgctgcgcattaaaacaagtctcaaagagggttacaacttgctggaccctatagcttctgtggttctggtgattgcttcagtaatcacaatcatcagcacaagaaaaacttcagttctcaattggctagcatccgccatcaacactgctgttattatatttgtgattgttgcagggtttcttcatgctgacacatcaaatttgacaccctttttaccttatggggctaaaggggtgtttcaagctgcagcaattatttattttgcatatggagggtttgatcatattgcaaccatggctgaagaaaccaagaatccttcaagggacataccaataggattggtggggtcaatgtccatgatcacagtgatttactgcttgatggcactctcactgagcatgatgcagaagtacacagagatagacactggtgctgctttctcagttgcatttcagaatgtgggaatgaggtgggcaaaatatgtggtagcttttggtgcactaaaagggatgaccacagtgcttcttgtgggtagattggcacaggcacgttatattactcacattgcacgttgtcacatgatcccaccatggtttgctcttgtgcactctaagacaggaacccctataaatgctacactcttgattaccattgcaagtgccaccatagcttttttcacaggcttgaaagtgttgtcaagcctgatatcagtgagcacactctttgtgttcatgatgatatcagttgcccttctggtgaggaggtactatgtgagaggggtcacaccaagagagaacttgttgaagctagttatcttcttggttctcattattgcttcctcaattggaatttcagcttattgggggctgaggcctaatggttggtttggatacagtgtgactgttcctatttggttcatggcaacactagggatgtcactgtttttgactcagcaaagggtgccaagagtttggggtgttccacttgtgccatggttgccatctttgtcaattgcaacaaatgtattcctcatggggtctttggaatatgaagccttcataagatttggagtgtgcactgtggtaatgctgatctactaccttctttttgggcttcatgcaacttatgatatggctcaccaacaagagaagctgccatccaaagtagaacacacacagacagttaagaatgaagtgtcttagataagtgtactctcatttgtttgtattttgaatcagatttccgttcttcaaacaagttccacaaagttacatgaaaaattctacaccatactaatccttgaatagatgaatcccacaacgagagtcatatctatttatctataatatttatagtatataaattttgagctacgaaataatacattgaagggtatgtttggaaacccgttcaaatcacctaaaaaagaaaaatcacaaaattcaatgcaaaattccaaaantca

SEQ ID NO: 52842 - DNA, 1375 bp, Glycine max
  Clone ID: PAT_MRT3847_18729C.1
gctccttctagagtgtcacctttgccacgggttcggatgtcagtttttgcgtgcactgtcgcatatcaatcaaatcgtgcgagcgaactcggttctgcgatctccttttccatcatcgtcatcatcttcatctctctggctatgccatgctcgccctttcaagaggcctcgtttctcgtctgcaacgtgtcgccgttgattcgtcaccgttgccgctccgatctctgagctccgatgcggcggcgattcggtctcggataattgaaccgaagcccagtgtgatgaccccaaattccaagcgaaccgggctcattgcggtgaagtgcggaatgagtgcgctttgggataaatggggtgctagaattccaattactgtgctttgggtggatgataacattgtgtctcaggttaagaccccagagaaagaaggtttctgtgctctccagattggttgtggacacaagaaggataaacatttgaccaagcctgaagtgggtcattttagggctcaaggagttccaatgaagaggaagcttaaggagtttccagtgacggaagatgcactacttcctgtgggaacatcacttaatgttcgccattttgttccaggccagtatgttgatatcacaggaataacaaaaggaaaaggttttcagggtgtgatgaagcggcatggatttagtggagggccagcatcccatggtaattcattggcccatcgaacacttggttctgtaggtcatttaactagtcatggaaaggtttttaaaaataaaaagatgcctgggcgaatgggtggagaccaaagaacagttaaaaatgtatgggtctacaaaatcgatccagcaaggaatttgatgtgggtgaaaggccaggtcccaggagctacagggaactttgtttttataaaagatgctgtctacgaaaaacctgatatatctctacttcctttcccaacttactttgtcccagaagatgaagatattgataatttgaaaccattggttgctgagctcggggatgtggatccatttatggttactgattaaagagttggttttcatgctaggttcacttttgcagtcatgttttctcggaatatagaatggtaaaatgagatttttgaggaaccaacccaggatgaatttttacctgtctttttaggcagctttagggttgtttacaacattgatcaaatctaaattaagattgggtaaagcgtggttttcttggaatcctacaaataagtgtggagatttggaattaatgaatcatgatgttttattctaattgaatcgtttgcttttctagtcaatttaattgccgttgtacattcagcaaacaaaacatttaaccaattttacttttttttgtt

SEQ ID NO: 52843 - DNA, 381 bp, Glycine max
  Clone ID: PAT_MRT3847_1872C.1
catatgttcctcgcgatattctcaacatttcaattctatatgccctcactggcacggctggcgataatcaaccggggcaacaaaactgactacactacaaaaaaagactatcgcaaataatagagatatgtacaatgtgcaactccacaaagaactctatattgctttgacatacattaaacaaccaacctagcgaatgactataacagttaccgcgtgacactatagattgcttaacatgctcacacacgtgccatcattgtacgactcacggagcttaatactttgataagacatgaaacatcacaggtcatatttaaagatcttgacattgatacaatccaacaacattataatgtttaagagtttaataatacatgc

SEQ ID NO: 52844 - DNA, 290 bp, Glycine max
  Clone ID: PAT_MRT3847_18730C.1
ttttttttttttttttttttttttgtattatttttttttgtttatattttatattttttgccggggagtgggactgggccccaaaaattaaagggaaaccaagggcaatttgaaaccagggggaaggaaaaaaaaaaatttttttaggccgtgggtttggggaaaaaacctcccaaaataaatcaacacttttttggaaaattttttggatataaacacacaagtgggaaaattttaaaccaaattgaaaaagctcaccgccgggttgtttttttggagccccacccttg

SEQ ID NO: 52845 - DNA, 651 bp, Glycine max
  unsure (1)..(651): unsure at all n locations
  Clone ID: PAT_MRT3847_18731C.1
attttctacgggtatgccatgctcgccctttcgagaggcctcgtttctcgtctgcaacgtgtcgccgtcgattcgcagttgtcgctccgatttctgagctccgatgcggcggcgattcggtctcggataattgaaccgaagcccagtgcgatgacccctaattccaagcgaactgggcttattgcggtgaagtgtggaatgagcgcgctatgggataaatggggtgctagaattccaattactgtgctttgggtggatgataacattgtgtctcagattaagaccccagagaaagaaggtttctgtgctctccagacacaaagaaccagaagaaatgaagaatagttgagagaactggtctactgtaggagatgaatttagaggcaaagcagccttgcaaagatgatttggttagattggttgtggacacaagaaggataaacatttgaccaagcctgaagtgggtcattttagggctcaaggagttccaatgaagaggaagcttanggagtttccagtgacagaggatgcactacttcctgtgggaacatcacttaatgttcgccattttgttccaggccagtttgttgatatatcaggaataacaaaaggaaaaggttttcagggtgtgatgaagcggcatggattttc

SEQ ID NO: 52846 - DNA, 461 bp, Glycine max
  Clone ID: PAT_MRT3847_18732C.1
gtgtagacccatacatttttaactgttctttggtctccacccattcgcccaggcatttttttatttttaaaaaacctttccatgactagttaaatgacctacagggaactttggtttttttttttttataaaagatgctgtctacgaaaaacctgatatatctctacttcctttcccaacttactttgtcccagaagatgaagatattgataatttgaaaccattggttgctgagctcggggatgtggatccatttatggttactgattaaagagttggttttcatgctaggttcacttttgcagtcatgttttctcggaatatagaatggtaaaatgagatttttgaggaaccaacccaggatgaatttttacctgtctttttaggcagctttagggttgtttacaacattgatcaaatctaaattaagattgggtaaagcgtggttttcttggaatcct

SEQ ID NO: 52847 - DNA, 241 bp, Glycine max
  Clone ID: PAT_MRT3847_18733C.1
ggctcgagcttgatagttttcaccaatgatttcactcgtccattctgttcggggaaaagcgctcggtctaaggatctaagatgtcatttgtcatcgtcacatgatctcttaaactttgaattacgggtatcagattaatgccatgccgtaactgcgtttgccacatctgatctccttagatccgagattgttgatgatgatgctgatcccagagcgcaaacattattcttgtgaggcaagc

SEQ ID NO: 52848 - DNA, 654 bp, Glycine max
  Clone ID: PAT_MRT3847_18734C.1
cgacccagaacacgttttgaatctgtattttcttaaaggaaactgtgtgatcgatgttgtaaatcttacaatataaagaaaatcaagagattcagttcttcgaagtgacaacgttgttggaaaacatggtgtgcttttgttttcttgtggatcagacaaagaaagtgaagcggagcaagccggtggcagggtcgtgctcgcggtgcggcggcggcgccagcgtggcagacatgattactcaaactagattttgctttgttcctttctattggaaatcttggaaggctattatgtgcactttctgtggagccatgctcaagtcttacagatgacaaattacttgcaaacaaggttttaaattgcattcgcgattaattaggtttctttgtatttcttgatatcgtaagaaattacagataaatataacctacgcggccataattgcaattgtgttctaaaaaatcttcacgtcacagtcaagctcgtgaccagaaattggtttttaaataatgagatcaacacgtatgcaccaaattctgttataaatagctacattataggatattttaaatgtatacttacatatctatatgtgaggtctagttggggataagctatattgtattctgaagacttcactattttttttttatt

SEQ ID NO: 52849 - DNA, 305 bp, Glycine max
  Clone ID: PAT_MRT3847_18735C.1
ggaattcggcacgagggttagatgaagctaaatgtgttcacagagatcatgtttctgcagtgatggatgttgactactcaccaaccggacgggagtttgtcactggatcttatgatagaacagtgagaattttccagtataatggtggtcacagcaaggagatttatcatactaagagaatgcaaagggtatttgctgtcaagttcagtggtgatggaagttatgtgatttcaggaagtgatgacactaaccttaggctttggaaggcaaaagcatcggagcaactcggagtaattgtcccaagg

SEQ ID NO: 52850 - DNA, 591 bp, Glycine max
  Clone ID: PAT_MRT3847_18736C.1
cttcattactctggtaatgctggccttgagtctgctgtaaattggatagtagagcacgagaatgatcctgacatagatcagatgcccttggtacccgccaacaccaaaattgaggctcctaaacctttgcttaccccagaagaaatgaaggccaaacagcaggaactaagggagagagctcgtaagaagaaagaagaggaagagaagagaatggagagagaaagagaaaagggttcctaacaaagttctggataagttggtgagcttacagtgcaggtttctgtggggaggagggatggagcagaaaaagattatgtgggtcaagtgggatacagtgtgcctaccaaaggagaaagggggcctaggaattagggacatcaagaatttcaatcttactcttcttggaaaatggagatggaatctattccatcaccaatgggaactgtgggctcaggtgttggattcaaaatatggcggttggaggaatttggatgaggataggagaggcaacaatgaatcattctggtggcaggaccttagttcaatgtttcagcctttgcaggagggtaactggtttcaaaatgggatatc

SEQ ID NO: 52851 - DNA, 271 bp, Glycine max
  Clone ID: PAT_MRT3847_18737C.1
ggaattcggcacgaggagaagagaaagccgtcgctatcctagcagattcttcccctctacccatttcagtttcaggatgcaatctcaggtgaagcacgcccttgttgtcaaagttatgggtcgtactgggtctagggggcaggtgactcaggttagagtgaagtttttggatgatcgaaaccgacacatcacgaggaacgtgcaggggcccgtgagagaaggacacattctcaccctacttgagtctgaaacagaagcaagaagggggcgc

SEQ ID NO: 52852 - DNA, 178 bp, Glycine max
  Clone ID: PAT_MRT3847_18738C.1
gagatctcgcgttcctgctcgagagttttgaatcgcagcggagaccgaagaagatggcgaattccatagcggcacgtgccatgagcgacatgctcatagggcctgattgcgccatgaccatgtagatctggtgacaccctgactcatgactcttgctgattatgcatagccgcgcctc

SEQ ID NO: 52853 - DNA, 316 bp, Glycine max
  Clone ID: PAT_MRT3847_18739C.1
gttgggaattcggctcgtgctaacatacaatgaaaacgcaaactggatcaagaagggaaagatgtgcgctttgttcatcaacgaacctgacgcatgagctggtcgtctgggcagaaccacgcaatacactgcatagatggctatggagaatgccacacctaatgaacacatgttgctacctccgctcccaagtggaggatgagtggaatgcatgcaggggagagcaatccccgtgagcacataattggagactgtaacgataccttccacactttgtggacgtataattcgcgatgggcgtatggagaatttttac

SEQ ID NO: 52854 - DNA, 702 bp, Glycine max
  Clone ID: PAT_MRT3847_1873C.1
atgggaaccgcatgtttcccaactaataacgttgttctcaaacctcaaaacttatctgggaatttctctaccctctgtgataacgcaacccaattgaaggtttcgcaagatgcactctcatccacggaacaatcactgtcttcatctcctcgggtaataggagaacatgacttgctcattgtgggtcccggggttcttggtcgtttggttgctcagaaatggcgtcaggaaattccgggtagtcaagtttatggtcagacagtgagcactgatcatcacaatgagttgattcaaatgggtattaacccgtctaagaaatggacagaggctactcacacatttcccaatgtcatttattgtgctccaccttctcgtaccccagactatgctggcaatgtcaggctagctgcattaagctggaatggtgaaggttctttcttatttacatcaagcagtgctccatatgattgtaatgataatggaccatgtgatgaggattctccggttgtgcctatcgggaggagccccggagttgatgtccttctaaaagccgaaaatgtggtactggacaaccttgaccaattttacaaagcagatagaggtgcacacaattactacttggaaaagcgtattgttgatagtcgtcctgatcacgtcctgaatcttatacattatgaggtcagaatgccatttcatctctag

SEQ ID NO: 52855 - DNA, 1026 bp, Glycine max
  Clone ID: PAT_MRT3847_18740C.1
acgcgtgggcttttgtaagggggttttattgatatgtcttccttttctggcgggagatttgaatgtttttccttgtctcttcatctgatgagatatcacttaaagtagcctgagaatctctatcattttaatttcttcaatcaatcagggctttgccaaatatgttgaatggagtgcaaatatgatggaagaagaggcaaagcggaagctgaagacttcagagcttcaggcaaagaaaaacaggttaaagatttggacaaactatgtaccaccagcaacaaattcaaaggcaatacatgaccagaattttacaggaaaggtggttgaggttgttagtggagattgcatcattgttgctgatgattcgattcccgtccgcagtccactagcagagcggcgagtcaacctttcaagtattaggtgtccaaagtgggcaatcctcgtagagatgaaaaaccagctcctatgctcgcgaagcaaaggagttcttgagaacacgcctcattggtcgtcaagtaaatgttcaaatggagtattctagaaaggttggtccagcagatggatctgcggttccatcaggagcttctgaagctagagcaatggattttggatcagtattcctacccagcaccgttaaggctgatggtgatgatgctccttcatctgttccacctgctggaagtcagcaaaatggggtgaatgttggggagttgatagttagccgtggctttggaactgtcgttagacaccgtgactttgaagagagatcaaactactatgatgctctccttactgctgaatcacgtgctatttctggagaaaagggatccattctgccaaggattctccagccatgcatataactgacttgaccacagcatcagcaaagaaagccaaggatttcttgcctttccttccccggagtagaaaaatccctgcagttgtggaatatggcctttagtggcccatcggttttaaattggttatttccaaaagaaaacttggcagcattggccttttcatttt

SEQ ID NO: 52856 - DNA, 783 bp, Glycine max
  unsure (1)..(783): unsure at all n locations
  Clone ID: PAT_MRT3847_18741C.1
taaaataaatgattcatttgtcactaacgacatcaaaatcatgaatatgataaaggcagggcataggtactccgaagacgtatatgtcatgatgcaagaaaatcaacacattgctacctcacattatgttcgcatgtatgttcgagaaacaaaggagnnngaggttcaagaaattgcaaatacgcgacttggtcgacgaggaatggcatgcactgtcaaattgaatgaatggttgtgtgattatggacaatttcaagcacttcgactaccttgctcacatgcaattgcagcgtgtgctttttgcaatttaaattatgatgactttgttgaccctgtatacaagttggaaaatattttcaaagtttatcaacatcattttcattcccttggaagtgaagacacgtggcctcaatatttaggtccgcattttatgtctgatccttcgaaacgacgacagatatcaggcaggccagccactactcggatacataatgagatggatgaatcaattccaaataggcttaagaaatgctcattatgtaaaactgaaggacataatcagagtaactgtccatacaaacaagtacataactaaaataacttgtaatttttatgtttttctttcatttgtattgtgcgttttatattaatgtattaattatgttgtttttaatttttattgataaattatttaaactttaaataaaaaacatttaaagtaaactataataaaaatatatataacatgttttaaataattaaacattaaaataaaataataac

SEQ ID NO: 52857 - DNA, 196 bp, Glycine max
  Clone ID: PAT_MRT3847_18742C.1
tttacacgtggtttttactttccgagcgcaaaagcatcacggaagtgtatgcaatgtattgtaatgtacatctgtaaggatagagaaagaaaggtgtaataatgcatggtggggtctgtcacacaggatgcagatcacttcccttgttttatccatatgttgtcattttcatttcaaaaaataaaaaaacatcggt

SEQ ID NO: 52858 - DNA, 581 bp, Glycine max
  unsure (1)..(581): unsure at all n locations
  Clone ID: PAT_MRT3847_18743C.1
gtagggtatcaagagagatattcacagcctagatgtcaacctaaaccaatattaaaaatcctcaaacatgcagcaaagacaaaagtgaaaacatttcaagaatttatacccaagactacctatgctatgcacaacacaatattgtgttagacctcttataaagaatgtttataagagaagggggggaaaataattgttatgtgttgtcaattcaatagcagttagttttaataggacagcagttactattattaggagcaatttattaggaatagttagcagttagttttaataggacagcagttactattattaggagcagtttattaggaacagttattttaattaggcagttatgggtatgtgtagaataagaagggaaaacaaaatcatattctggttatcctgaagatgtgtggtttagaccttgggagggagagaaccaagctctcgaaatcttggcttgtttgagtgaatattttgattctatgttctaattctatctctgntttggaaagaataattcctgcagagtgtttctataaaattcagtcattattatccaatttctatcacaatac

SEQ ID NO: 52859 - DNA, 760 bp, Glycine max
  Clone ID: PAT_MRT3847_18744C.1
ctttttatttttaatgaagcttctgtcttctttttctgtaccttgttgcagctgctgctttctagcttaaaatgcgccccggtttcccgggtcgacccacgcgtccgggcctctttgtgttgtacatgctcttcccaatgaaacccacttccagattgtgttagtaacaactagttgagaatctgaagcataagcacccccaccaacttcaatttctgctttcaccaaatgctacttcttgtgctgtttcatctctctgaatttgtgaagtctgagactaacacatgcttctgaacctctcccatgcttcctttcagcaggaaaatatgaaggccggaaaagtttactccaaatttaattgtcgatatcttattcctttcagtaaacaactctccatgaagttctgttctacttcagtggcttcttttctttttgtcatagttatttttttccctctagctattgctgatctaagttcagataagcaagcccttcttaattttgctaatgctgtcccccaccgtcgaaaccttatgtggaatccatccacctcagtctgttcatcttgggtaggcatcacttgcaatgaaaatagaactcgtgttgttaaagtccggctccctggagttggactagttggcaccatcccatccaatacacttggcaagcttgatgctgtgaaaattattagccttcgctccaacctactcagtggaaatcttcctgctgacattggttctcttccttctcttcagtatct

SEQ ID NO: 52860 - DNA, 296 bp, Glycine max
  Clone ID: PAT_MRT3847_18745C.1
gttctctttcctttcaatctcatcatggattcttcttctgatcattctcccccatcatcacttcattctcctgacacttcctgcgggttatttagaaattggagagtcggctatggaaggtgctatcagggaaacacgggaggaagccaatgctgacgtggaagtgatttctccctttgctcaattggatattcctttaattggccaaacttatataatcttcttagcaaggttgaagaaacctcacttttcacctggtccagaatcatcagaatgcctgcttttctcactcaatg

SEQ ID NO: 52861 - DNA, 586 bp, Glycine max
  Clone ID: PAT_MRT3847_18746C.1
cttcagctcttgacaacttaggttgttaatccgcgtttgttgttcaacattggtaacctcgtacaaatcaagtgctgttctctttcctttcaatctcatcatggattcttcttctgatcattctcccccatcatcacttcattctcctggagatgttcaaaacgttaaattctgtcagtggtgtggtggtccaacgaagcatgaaattcctgatggtgttgaaaggttgagagctatttgtacaagttgtgggaagataacctatcagaatccaaaaatggtagtcggttgcctcattgaacatgataacaaggtcctcctttgcaagcggaagattgaaccatcttatggcctatggacacttcctgcgggttatttagaaattggagagtcggctatggaaggtgctatcagggaaacacgggaggaagccaatgctgacgtggaagtgatttctccctttgctcaattggatattcctttaattggccaaacttatataatcttcttagcaaggttgaagaaacctcacttttcacctggtccagaatcatcagaatgcctgcttttctcactcaatgaaatc

SEQ ID NO: 52862 - DNA, 578 bp, Glycine max
  Clone ID: PAT_MRT3847_18747C.1
tctagaatttgcaaactcagtatcatgggagactgttgaggcagaagcatttctgttattatcctgtctatcaacaccttcaaggatctgttggcgacagattatgtttcagaggcgcattttctctaatgtttcatttggttcttgtcctatgggttggctaggccgccttcttttcttctatccaacacaaagcttgaagcaccccacacctctgcccttttactgctgcgttttcccatcctataatccaataattgttcctaaaaagacaagtattcctgattgtcctgttgaatgtaaccagcttgctatcagcagagtcagtcaacacacccaactttcaactgttaaaactgaggtttctggagatgtagttagtcccagtaaatcaccagatggtaaaagaaagtcaatattgtcaaaggcacaaaggcatagagaagtggtcttgtttacacagcaacgacttctcattgatctagagactttggctcctcatgagcacgagtccatgagagaggcagcaaagaacacttttgaattattaaatgttataggggttgattataaacaat

SEQ ID NO: 52863 - DNA, 1089 bp, Glycine max
  Clone ID: PAT_MRT3847_18748C.1
tttttcaagatattgagaaagatgaatttggcaaagttacgagttttaagttgcataatcttgttcatgatcttgcacgatctgttacagaagatgtttgttgtgtcacagaaggcaatgatggatctacttggactgaaagaattcaccatctctcagatcataggctgaggcccgattcaatccagttgcatcaagtgaaatctttgaggacctatttattgccacatcagcgtggtggtgcactttctcctgatgtattgaaatgttattctttgcggatgcttcacttaggagaaatggaagaattgccatcttcaattggtgatttaaaacatctaaggtacttgaatctttctgggggcgagtttgaaactcttccagaatcattatgtaaattatggaatttgcagatactgaaattagaccactgtcgtagtctccaaatgttgccaaacagtttgataatcttaaaatatctacaacaactgtctttgaaggattgctacaaactatcaagcttgcctcctctgtttgcctggttatcttccccaaggggtttaaccaagtactttgttggcaaggaaagagggttccttttggtagaactaggagcattgaagcttaaaggagatcttgagatcaaacatttggggaaagtcaaaagtgtaaaggatgccagtgatgccaatatgtcaagtaagcgactgaataagttgacattgtcatgggacagatatgatgaagagtgggaattacaagaaaatgttaaggagattcttgaagggctttgccctgacacccaacaacttcagagtttgtgggtgggaggatataaaggtgattattttccacaatggatatttagtccttctctcatgtatttaaggattgaaggatgcagagatgtaaaagctttggatgaggctttacaacatatgactgtcctgcactcgttatccttatactatcttagaaacctagaatccttgcctgattgtcttggagaccttcccttgcttcgcgaattggctattgctttctgttccaagttgaggagacttccaaccagcgtacgccttcaaactc

SEQ ID NO: 52864 - DNA, 261 bp, Glycine max
  unsure (1)..(261): unsure at all n locations
  Clone ID: PAT_MRT3847_18749C.1
tctaaatgcaggttgcagnacttaattcaaggttgatttatggccaaatccactcacttatttcaacaacgtaagttaaacttttcactttttgtatcttctctttcatgaatagctgttctactttcagattgcacgtatttatcccatttattttttccattgtgtttctaatgctaattgactctggaacaggagcttgatgaagagatgttgaagctgatgatgaggtaattgaagttccatttttcttacaaaaag

SEQ ID NO: 52865 - DNA, 1568 bp, Glycine max
  unsure (1)..(1568): unsure at all n locations
  Clone ID: PAT_MRT3847_1874C.1
tttcaatccataaagtcccaaaaacactgacagcgagaccaactcaaccacctcttccagttgcagacttgagttccttatgatgggaaccgcatgtttcccaactactaatgttgttctcaaacctcaaaacttatctgggaatttctctaccctctgtgataactttcggtgtctgaggttcctcactccgaaaccgccccacctgcgatcctctcactctaagttgggaaatagagtaaagctgacatctttttcgatgtccaaggcaacccatttgaaggtttcacaagctgcactctcatccacggaagaatcactgtcttcatctcctcgggtaataggagaacatgacttgctcattgtgggtcccggggttcttggtcgtttggttgctcagaaatggcgtcaggaaattccgggtagtcaagtttatggtcagacagtgagcactgatcatcacaatgagttgattcaaatgggtattaacccgtctaagaaatggacagaggctactcacacatttcccaatgtcatttattgtgctccaccttctcgtaccccagactatgctggcaatgtcagtagttgtcttatgaactcatgtattgatgtggattgccaactaatcaggctagctgcattaagctggaatggtgaaggttctttcttatttacatcaagcagtgctccatatgattgtaatgataatggaccatgtgatgaggattctccggttgtgcctatcgggaggagccccggagttgatgtccttctaaaagccgaaaatgtgggagcttttggcttgtttacggtcccttttctaagcaaaaacaagcatgggattaaagcgttatctaaaattggtgcttatgatggggataaaattggtgctaattttggcatgcttccacaccaggatgcagcttccctctcagttgcaatcttgaagaaaaaattccgtgggcagattttcttgggttgtgataatcatcctttgtctaggcaagaaatgatggatctggttaataaaagtgggaaattcagtaaaaaatttgacgagtttactggaactgatggccctctaggaaagagattaaacaacacaaaaacctgccaggtagttgggtggaagcccaagtaccctagctttattcattttctagagagcagcatgtaacaatctcctgagtttgtctttttgttgttccctctaattaaatagtgaaaatgcataggaaacttagggaattcttactgtagatggagtgttcatcataagagcctgaactcaaaagtcgctaccttttcctatttagtcttttcttttattaagaataaggatgatcagttattgaatagtcggtcccactcccccccctcnaacgntntgaatttttgcacagaccttgagtgaaaggtttcggagaggttgcgcaaaaaaagcacaagatggcggagttaaagaaagaggttgaagtgagcctgagcgaggaagaaggaaagtgaggttgtaagaagcacatcaccgcccaggccatcaccatgctcggtctccggacgcgtgg

SEQ ID NO: 52866 - DNA, 410 bp, Glycine max
  Clone ID: PAT_MRT3847_18750C.1
agccccctctaaattataacaccgttttttggttctaaattggagaaaaaacccttacaacttttcccacagacccttttaattttttgtacagaacagcctccaggttaccttaacaggactttggacttattttcctgcatttctatgacaaccctttttataaaaaaccccccttagcctaaggggcggtaaatttctttcccgtgcccccttgcccccttgcaagtttttgcaacctacaagctgttagaaaaacctggaatcctttccccttttgggccccattttttaccatttggagttagggggacctgaaaagaaaattttttgggtttttggaaaatttttaaaaactttgttcctgataaacccttgggaaccccttaagcaaaaaaaaaaaccctttt

SEQ ID NO: 52867 - DNA, 957 bp, Glycine max
  unsure (1)..(957): unsure at all n locations
  Clone ID: PAT_MRT3847_18751C.1
tcgagcccggcccgggacgaggtgagagctagaaacccaggatttagaaatagttagagatgcctgagttttgcgtaacagggggtactgggttcatcggatcttacctggtgaaggccttacttgagaagggtcacacagtgaggaccactgttagaaacccagaggatgtggagaaggttggttttctgaccgaactaagtggagccaaagagcgattgagaattttgaaagcagaactattggtggaaggaagctttgacgagatagtgaaaggagttgatggtgtctttcatacggcatcccctgtgcttgttccttatgatgagaacgttcagctgtggtatgcatatgcaaagacaatagcagagagagaggcttggaggattgcgaaagaaaatggcatggatctagtggtggttaatccctctttcgtcgttggtcccatgcttgcaccacagccaaccagcacactgctcttgatactaagcattgtcaaaggcatgaaaggagaatatccaaatacagcagtggggtttgtacacataaacgatgtgatagctactcacttgttggctatggaggatcccaagacatctggcaggcttatttgttcaagcacagtagctcactggtcgcanatcatcgaaatgcttcgtgccaaatacccttcttatccatatgaaaataggtgcagcagccaggaaggtgataataacccgcacaacatggacatcaccaaaatatctcaattggggtttcctccattcagaacccttgaacaaatgtttgatgactgcatcaaaagttttcaagagaaaggcttcctatgacataataatagttgttgttacattttatgttcgtgtgaggtgtcaatgtcacatgacccataataaagaccataaaaccaaacaaaaattactatatcttttatgtatgctttatttctttctt

SEQ ID NO: 52868 - DNA, 1019 bp, Glycine max
  Clone ID: PAT_MRT3847_18752C.1
ttttcattttgcaaaactatttaattataataaatatgatagagataattgaaaaagcataattacaaaaaagaaaaaatctcgtttacactaccaccacaactgatcacatcctatatatcccacacccgaaccttcccacacactttccttcatttcacccgatgcttcctctctctttctctttctttttctcaattgctgcgaaagaaaaaagaaacggaatcgcattaccaaagacgaaaacgaaagaaagaaacgatgatgcagctgcagcaacaccatcaagaggtggaagaagcagaagaagaggcttcgaattcttcttctcatcatcacaacaaggcatcgccttctcccagtttcagcagctactcatcggagacactcgccgagatcgccgccagggtaatcgaggagctccgccgcgaccctagttcactctccgtcgacgacgacgacgacgcacttttcccgccatgggaaaaccaaaacgacagcttcgtcccccaaaacgacaagccggcagaacaaaacgacgaaaacgacgacgacgacgatgatttcgaattcgcgttcgtttcgcgagacttcacttctccagtctccgcggacgacatttttcacaacggccggatcaaggcgatgtacccaatcttcggcgttgtcgttccctcaaacgacgccgtttcgagcgttgttccgaataatatataataataatattgcgaacagtactccgcggcgtcgtcttcctttaaggaagctaatgtacgaggagggagaaacggcgtcgtgctcgtcgtctacggaagagagcgttgacataacaatattgcgcccagtccacggcgcggtcttcctgtacacaccgaattgttcgaggagggcacaaaagcagagcgccccacctgggtcgacgtcagcgttgtccaagcggcggtctcgagatgcgcgttcgacgagtcacagtggaactccgttgggagtgagcggaaaaagaccaactcgacgacaga

SEQ ID NO: 52869 - DNA, 308 bp, Glycine max
  Clone ID: PAT_MRT3847_18753C.1
acaccaccaaggcatgcgacattggcatttgtgcagtcataccagagtaacgtaccagcaggcagccagggcttaaaccatccggaatccgaattgggaagattagtcttcaccattaggaacaaccgcttccaagagactgtatcttctagtaggagtgatagtaccctacaaccgagcaacaccataagggaaacggccccaccaacaaaataaagcgcagcggtagaccccatcccaacctaaaattcgtagtatccctcaacaaaggaggattacaattgcattatagggtatattctggttgg

SEQ ID NO: 52870 - DNA, 363 bp, Glycine max
  Clone ID: PAT_MRT3847_18754C.1
gggattccccaaaagggccatattattaaaaaagggacaactcccgcttacccaaccctttgttttttcccaaaacttcatatgaacttataccaaagcctacataattaagcctggtacacaagccgccccatgacctcggttcccccctttttaatttttttttttaccccccgacttttttcaagagcccttgtccaagagccttaaaaaagcaatttttagcccttccctttttggggcacgggggcttttattttaaccctggtaaaaaaaacattatgccccaacctcccttgcccctggggcaatttgggtgggggcttatctgggagggaatgttaacccccccgtttttgggaa

SEQ ID NO: 52871 - DNA, 458 bp, Glycine max
  Clone ID: PAT_MRT3847_18755C.1
ttttcattttgcaaaactatttaattataataaatatgatagagataattgaaaaagcataattacaaaaaagaaaaaatctcgtttacactaccaccacaactgatcacatcctatatatcccacacccgaacctccccacacactttccttcatttcacccgataccttttttcttctttctctttcttttttctcaattggtgcgaaagaaaaaaggaaccgaatcgcattacaatagtggaaaacgaaagaaagaaacgatgatgcaccagcaacaagaggtggaagaagaagaagcttctcctcacaacaaggcatccccttctcccagtttcagcagctactcgtcggagacactcgccgagatcgccgccagggtaatcgaggagctccgccacgaacctagttcacttttcgacgacgacgatgacgcgcttttcccgccatgggaaaac

SEQ ID NO: 52872 - DNA, 214 bp, Glycine max
  Clone ID: PAT_MRT3847_18756C.1
ggctcgagttcacaacttcatttctcccctgtaattgttacctcccctgcatcaccccactctgtttttgcaccttcttcctctgtttctttggccttcccctgtttcccactaatgattacatcaaagagggtccacagattcttcaagttccgtgccttagtgctttctcttatctattccaaccattctttgtgccttgtgaatgcccaaa

SEQ ID NO: 52873 - DNA, 317 bp, Glycine max
  Clone ID: PAT_MRT3847_18757C.1
ctgaacttttgggacagaactttctgcttccttggctaataatttctctgtcttggtttctttctcttaaaatcctactcctcctccttatctttctcgggctatgttaactcagaaagttcgactttaacttccttctttttgatcctttccttctctacatcttcaacacttttttcctttgccttattttcctcccattgctccttaactgatagctttctagtaacatttgttattgcaggtcttgactcacgttcctcttcacccttttggggtccttcaaatgttttgactttggacagccttgccggggc

SEQ ID NO: 52874 - DNA, 424 bp, Glycine max
  Clone ID: PAT_MRT3847_18758C.1
agcgggctcagagagtgtccgctgcacactggtgcctttataactggtcatgatcatcaccttaatgaccgccgactgaggaaaatcccaaccagagaccttgccatcaactggcctacccaggctactcacccgaccacatggaatgcggggctggctgttgtcatctccaccttaatattactatccgacaagtaatgttccggcctattctacaacacgctcaccgacatcggcgcccacactacatacggcctaatgtgcgatggcatggcccatgctttcaacctcttatgaagcatgcttcacttgccccaacatgtgctgtaggcacgttaaccgcttcatatcattacgctcatttttgcactgatacatacccttacttcgcagtatctgatactgatatcccagctcctaagct

SEQ ID NO: 52875 - DNA, 172 bp, Glycine max
  Clone ID: PAT_MRT3847_18759C.1
gaactgatgtgtcctttgcgctttccaccgcggccgtggggcccggaattcgccgtcctgatgcgtccacttcctataggagcgatttagctggcgtatatggcatagctgttctggtgaattgtatccctacaattcacacaacatacaccggagcataagtgtaagctgg

SEQ ID NO: 52876 - DNA, 1211 bp, Glycine max
  Clone ID: PAT_MRT3847_1875C.1
ccacgcgtccggaagtggagtcaggaacttccgggtagtcaagtttatggtcagacagtgaccactgatcatcacaacgagttgattcaaatgggtattaacccatctttgaaatggacagaagctactcacaaatttcccaatgtcatttattgtgctccaccctctcgtaccccagactatgctggtaatattaggctagctgcattaagctggaacggtgaaggttctttcttatttacatcaagcagtgctccatatgattgtaatgataatggaccatgtgatgaggattctccggttgtgcctattgggaggagccccagagttgatgtccttctaaaagctgaaaatgtggtactggagtttggtggctgtgttgtgagattggcgggactatataaagcagatagaggtgcacacaattatttcttggaaaagggtgttgttgatagtcgtcctgatcacatcctgaatcttatacattatgaggatgcagcttccctctcagttgcaatcttgaagaaaaacttccgtggacagatcatcttgggttgtgataatcatcctttgtctagggcaagaaatgatggatctggtttataaaagtgggaaattcagtaaaaatctgacaagtttactggaactgatggccctcttgaatctagagcaaataacaccagttgacaccaggtaggcttttgggagccatcagggaatactatgcaagctctggtttccttcttttccttgagctttcgtacaacagccaaggcaagttgaatgttggcatcaatgaactcatctgaagatcccttataagaagaaatgttgctgggcaaaggcgggaaatcgatttcgaggcgaagttttccgtcttgaagagcataagagagggaattggcggcatcgctaacgagaacttcgtaggatttaggtttgtaaagtgagacgccggccttgggatcggaagctggaccttctcttccaactccaacgctctgaatttttgcacagaacttgagtgaaaggtttcggagaggttgagcaaaaaaagaacaagatggcggagttaaagaaagaggttgaagtgagcctgagcgaggaagaaggaaagtgaggttgtaagaaggagatgaaatggccatggccatcaccatgctcggttctcttctgttctctctgttgtgtggcagtgccaacaccgagcc

SEQ ID NO: 52877 - DNA, 541 bp, Glycine max
  unsure (1)..(541): unsure at all n locations
  Clone ID: PAT_MRT3847_18760C.1
cccacgcgtccgcccacgcgtccggtggaaaattaatgaaggtcaagcacaagtacaggattgcaacaaatttaacaatatctgagaaaagaagatgctcttccttggtactcctggaagggaggcccaaagattctccaaaagcagagaagactggtgtccacatcctttcaaaatccgaaattgatgcagagctatcaaaaatgaagggtgtgacacctcaagaggcggcagcggcagctgcgaaagcagttgcagaggcagaagctgccattgccgaggctgaggcagcagctagggaggcagatgctgcagaagctgaggcagaggctgcacgagtgtttgcgaaagcagcaatgaaggcactaaaatgcaagacacttcgtgtttgatggtgttagcttctgcattgcttacatgaggagtatatttggcttgagatcataattctgctgctagacttcctgcatgtattcaattactgtacataatttaggcttgtaaatttggaatatgcaggatttatccatgaaacananna

SEQ ID NO: 52878 - DNA, 2059 bp, Glycine max
  Clone ID: PAT_MRT3847_18761C.1
gaaaaacagcattaacacaaataaactagaaaacatttttttttctcgttattctccggttcctcgcaggcaccaattccacatatctgcgtgtaaatactccaacttgtcccaattcacacctttgcctcgcgattctccgatgcgttacacctttgtccaccgattcctctttaattttcttccctttttcccccaattcaactaaattttctgctatctatattcccaggtaagtaaagtcagatttttcttggtggacggacatgcagaagaaggctgcactcaacttccaagctttcctctagaacaaaagcaaagattatactgtcataaaaaggttttgtacttattttaatgggtgctcctaagcagaaatggaccgcagaggaagaagcagcattgaaagctggagtagtcaaacacggggctggaaaatggcgcaccatacttacagacccagagttcagttccattttgcgcatgcgttcaaatgtagatctcaaggacaaatggaggaacataaatgtgacagcaatatggggatcgaggcagaaagcaaagctagctcttaaaaagaacctactaccatccaccaaaattgacaataaccacttggccttgagtactgtagttcaacgtgacaaagaagttgcaaatcccaagcctttggcagtttctagtgggacatctcctaattcaaaggaaaaaatatcgaagctacagaacttccagttggataatcttatattagagtccattatcaagttgaaggagccaaggggttctgaccaggcagcaattgctgcatatatagaggatcaatactgttctacgccgaccctcagaaagttactgtcaacaaaactgaagcacatggtggctagtggaaaattaatgaaggtaattttactgttagttaatcccttaacaaggcacattgttcttggcttattggaacttagtttcccaataatcaacatttttatctgcaaacctttgtaatgaagcatagtcagtctggataaattttagatcatgtatgacagatactttactgacaacattttttatgttatttattgaaggttattgacaaaatatgatttgcgacaagaaagtaattggttatatgtgtgcacagatgtgaatagaaatatgttctcttgtggcagttgaactatgcatatctgggcacgctctttagcaggagtgaaaaaactattttgaattgataaaattttcccatttaataaactaatattactgttaaataaatattgggtatgcaattaaactctatttggtcaatagatcctgagtgtgacatatctaacgagtaatgacaggtaaagcataagtacaggattgcaacaaatttaacaatatctgagaaaagaagatgctcttccctgttactcctggaagggaggcccaaagattctccaaaagcagagaagactggtgtcaacatcctttcaaaatccgaaattgatgcagagctatcgaaaatgaagggtgtgacacctcaagaggctgcggcggcagctgcaaaagcagttgcagaggcagaagctgccattgccgaggctgaggcagcagctagggaggcagatgctgcagaagccgaggcagaggctgcacgagtgtttgcaaaagcagcaatgaaagcactaaaatgcaagacacttcgtatttgatggtgtcagcttctgcgttgctgacatgaggagtatttgagatcataattctgctgctagacttcctgcatgtattcaattactgtacataatttaggcttgtaaatttggaatatgcgggattgatctatgaaacgttttgtcaggagtcattatgagcgtattatttatttatttattttgaccttatttttaagaaagacaatgaggcgagagtacaaagtattagtggaagagtggaatcagtgatctagtgttatgatggaatgtgtgatagacatcctctattagtaaatggaagaatacaatttttattagagttccaatgacaatgctgagtgccactttctcgtgattca

SEQ ID NO: 52879 - DNA, 250 bp, Glycine max
  Clone ID: PAT_MRT3847_18762C.1
atcgtattgtaattgttttgtatctcatcatttcacttcaagaatatggcttccgaagcagcaccacacttcgtcttgtttccactgatggctcaaggccacatgatccccatgatggacatagcaaaatattggtgcaccgcaacgttattgtgactgtagtcacaactccacataacgcagcacgtttcacatcaatcattgatcgttatattgagtcagggtttcctataagattggttcaacttca

SEQ ID NO: 52880 - DNA, 777 bp, Glycine max
  unsure (1)..(777): unsure at all n locations
  Clone ID: PAT_MRT3847_18763C.1
aaaagataatatatcatttcaaacttaatcatataaataggagcagaactactattattaattaattaaggatgaaattgaatattgttgtactcttttgacttaggcattaactaatttatttccaagtgcatgcataagcctatggcatctatatgttttggtatttaatttccaggtgatagatctgagaactcaactaagttatttcaagaaagtcagctaggtattgaggcaggaactaggagatgcagaaaccacaactcttctggccaaagctgtttacttgattaacattggaaccaatgatatttagtctctcttacagaaaattcgagtgtctttactgctgagaaatatgtcgacatggttgttggtaaccttacaactgtgatcaaggtatatattagaggctacttaaaggtttgtttggataaacctatccaaaaacacttctaaaaaaatgaaaaanataatgagttttttcataaactaaaattagtttatgtataaactaatttgtagaaattttctagtataacttctaaaagatgagagaatttttataaattaacctatgtataattaagtaaatttaaatttacgagaaaaataattntatttttttcttcttattttcttttcttaaagtatttctgnataagattaccgnaacataccctaaacttctacattcaagtatcagaggttcaacttgatacanattaattataccattntaaatattgatttatataaatcggaacattaattaca

SEQ ID NO: 52881 - DNA, 859 bp, Glycine max
  Clone ID: PAT_MRT3847_18764C.1
caaaaagggccagaaacttctcggtcgcatcatcgcgttcagcttcagccatggcggcctagcctaattaattcaaaagtcaaaaccctaaatcccaacccatcaattttcctctctcttcactttaccaatccaaatggcctctagactcgccctccgcttcagatcccatctcctccgcaccgcctccctccttcaaaccttgccgccgccgcccctctccctccaccgcctcctctccacttcccgccgcgcgcctccgcgctccaaaaaatcagtcgacatcggcgcgcgcgcgcgtcagctccagacgcggcgcctctggacctacgcgctcaccttcggcggcctcgcgggcttcgtcgtgatcgtcctcaacaacttccaagaccagctcgtcttctacgtcaccccaaccgaagccctcgaaaaatacgccaccaaccccacaaaagcgcggttccggttgggaggccttgttctcgaaggcagcgtggtttacccggcgtcgtcgcctgaggtggagttcgtcgtcaccgatctcatctccgacatggtggtacggtacgagggatcgttgccggatttgttcagggaagggcactctgtggttgtggaagggctcgtgaaaccgtttacggaggagatcaggaaggaggtgtcggtgaagaacgtttccgagaaggcgaggaagatagagtgctatttttcggctaccgaggttctcgccaagcatgatgagaagtacatgcctaaagaagttgctgctgctattgagaagaataagaagattattgaggatgctgccactgccaccgtggccgccgccgccaccgcggagggaccgaagacaccatag

SEQ ID NO: 52882 - DNA, 449 bp, Glycine max
  Clone ID: PAT_MRT3847_18765C.1
tatttttaggtggcgtgccagttctgatatttacactatctgctctcaagactgtgaattatggaatcccgcttgcacaaaagcgatgactatgtcatttaaatccaaacccgtgtgctgatgcatggagctcggaattactgaaacgtaccggaattcattgggatatcatttgagtaactggatggacagccaccccaaatcaagaatgttcaagttacaaaatgattggaaaatattacttttcaggaatgtatcaccagagacctattgggttctgaatccacaaaatcctattgtgttaaaaaaggaggatgggaaaactgtctttcctccaggcacttcccgaagggtgaaaagaaatgcctttatctataaggggaggtgctggagcaaaaaatgcttatttctagaaattgccaaatgcctttctttcatgtagagatatt

SEQ ID NO: 52883 - DNA, 480 bp, Glycine max
  Clone ID: PAT_MRT3847_18766C.1
cgcagacagacaaagtgagaagagtatggtctaatgtcttgagctggaagcttcggtttctctccattttctcttagggttttcactttcacccatttctcttctctttcgatctgcgcccaaagttagacattgctagggttttggagtagtggattagctcttttaggattaaggagtgtttctatcttcatggataaagacaaatctctaggtttgccacctccgtctggacgttattccggttactcgcccaccagaagtgttttcaatgtgaaatctgagccgtcgccgtcgtcatcgtcgacgacgtcgtatccgccactggctctgggaaccaccagttccgagtctagtcattttggacatggaatgtccacggattctagtgggtttagtcatgatattagcagaatgcctgataatcccccgagaaacagaggtcataggcgtgctcattcggagattctcactctaccg

SEQ ID NO: 52884 - DNA, 1100 bp, Glycine max
  Clone ID: PAT_MRT3847_18767C.1
ctaaaccccaaccaccaattttcttttctcttctccactttcccgagaaaattcaaatggcctcgggactcgccttgcgattcagatcccatctcctccacaccgcctccctcctcccatcctcccttctccaccaccctcccatccaaccctcgccgccgcacctctccctccaccgcctcctctccacggcgcgccgcaccccgccgcgctcgaagaaatccgtcgacatcagcgcacgcgcgcgccagctccagacgcggcgcctctggacctacgcgctcaccttcggtggcctcgccggctttgtcgtgatcgttctcaacaacttccaagaccagctcgtcttctacgtcaccccaaccgaagccctcgaaaaatacgccaacaatccaacaaaagcgcggtttcggctgggcggtcttgtcctggaaggcagcgtggtgtacccggcgtcgtcgccggaggtggagttcgtcgtcaccgatctcatctccgacatcgtggtacggtacgagggatcgttgccggatttgttcagggaagggcactccgtcgttgtggaagggctcgtgaaaccgttcacggacgagatcaggaaggaggtgtcggcgaagaacgtttccgagaaggcgaggaagatagagtgctatttttcggccacggaggttctcgccaagcatgatgagaagtatatgcctaaggaagttgctgctgctattgagaagaataagaagattattgaggatgctgccactgccaccgccaccgccaccgtggccatggagggaccaaagacaccatagatcgatggtcgtggacgtggtataagcttagctgttcatgctcaaatataccacttctgaattttaggcaacaatttatgtggctgtaagaacatcgagttatgatgagacttagcatctggtacctggtatggagtagatgtaacagttgaggaaaggacagttatgatgctctcaacaagttttggtggatgatcaagacacactaggaaaagttgaaaaagtttgcatacccaatttcaatatagtttgaattttgaagtataagaccaaatgaatttgtcttccactgta

SEQ ID NO: 52885 - DNA, 505 bp, Glycine max
  Clone ID: PAT_MRT3847_18768C.1
attttacttctattattctagaattgctgcactttgtgccaaaggggaactgcagaaagcaaatcaatcagtaaaagaatttctttctgacctgacagagtctatgaactgaacatgtgggataaaaatgaagaattctttttattttaggaactaatctctcagtagtgccagcaaatagagcacatggatgactgatgacacctgcaggactgaatcatggctctgaagtcaatgctatatcagaagactgatgagattgggaactatgatatcattagtggagaattcaagttattggtcaaaggtacagaaacagaactaggaacagaattatctcaaatgctggatcctgtatgaaaaggcagctatataatatggttgataagcagctggtttgcctttttgcttcaatacataacttgctaaagtatgctctcctgtctgcactttcacctataaagtatcaaggaacctgctggactcaatactgagccattatatg

SEQ ID NO: 52886 - DNA, 864 bp, Glycine max
  Clone ID: PAT_MRT3847_18769C.1
aattcggctcgagctttgtttgttggtgtgttagccaccacggaggcatatcatccttatcatcatcttcataaaattatatcttttgcgcgcattctcattcaccaatggcgttcaccgtcgccattggcagtggcgtggctataatcccctgcggcaataccaccaccgcaattccttacacccgtggtggtggtcaccgaacgagaagaaagctccatctccatgtggcgcgcgcgaagaagcccctgaacggcgacgacgtttccatttacactgagctcctcaaaaccgaagtttccgttttcgaaaataagcccctcggcgacaacgatgccgctttgaagttcgtagagaagatagaccgtcaatttcaataccccgatttctgggaaggatcccagtgggactggttaggcatcttcgtcaagttttccccaatcattggcgtcgctgttgcggcatgtcttgctatctacggttgctttacatttcatgaaccaccaaaagaaatgagggaggctgctgaaaggctgtattctgtgcagtccggcgtggagtctagtgcagagtccggtttggagtctagtgcagattccagtgtggagtccggtaaagttattgaagagcctgatgcatatgactcagatgtttttgattccaatccaacagaggtagcacctagtttggagtagactctccctagatacactgcaaatataccttatttttagcatttaaacccaggtgaatggattcaaacctttactgcaattaatttttaaggcaatgcttctggttacatgtaaaccctcttaaagtgtatcaattttgagacagatcaagggaattagttgtatgtgt

SEQ ID NO: 52887 - DNA, 669 bp, Glycine max
  Clone ID: PAT_MRT3847_1876C.1
atgacacacgtcctcaccttcagagggctgcacgccctcgccttcaaagggcgactcgtcctgaacttcagagggctacacgccttcgccttcagaggactggacgtcatcaccttcagagggctacacgccctcaccttcagaggactatacatcctccccttgagagggatacacgccctcacctttagaggactgcacgtcctcaccttcagagggctacacgtcctcgtcttcagagggctgctcgccctcgccttcaaaggactacacatcctcgccatcaaacggcgacacgtcctcaacttcagagggctgcatgccctcgcctttagaggcctatgcgtcctcactttcagtgggctccatatccacaccttaagagaatttaagcaacattctgcccaatggccacaatgccaatctccccctgtggaagtatcagttggtctgtgtcgttccgacgtagggattatgcccacaagacacccaatggacccggagaagtccaacagggtcttggggtttccagctctggttataggcctctgtccatcctacagggtgcccgtccccccagcaaggtcatgccaccgtgacataggggtagcgcccacaagacatctagtggacccgaaagagcccaacaattggccaaatacaggctaa

SEQ ID NO: 52888 - DNA, 419 bp, Glycine max
  Clone ID: PAT_MRT3847_18770C.1
gacctttgggctgattgatgtgcttggcctgcgttttggttagaatgatcctatccacctgaatagagagcgagcagcctccgtttgcgttaatttctgagacgagcgttagtatcggcacaaggatacgaagcccagtaacatcgcgaaggacgaagagggccctttcagccccgtttcggccaataaggtcatcggctaggtcactaagtaccttaccggaaagagttacttagcctgatccgccttacataacttagaccccgccgacgagctaacttcgcggctggagagtaaggatataggcgagggtcccaggcgtactaggacggcgaataatacatgtccgggtcccgacgtatcgtacggagacaaggattacggcggtgcgtgcgacggaatcatcgctgcatctcggg

SEQ ID NO: 52889 - DNA, 447 bp, Glycine max
  Clone ID: PAT_MRT3847_18771C.1
acgagcatagcctttgctgtaagcatggtaagtcagtttatgcatgcaccaggacatgaacacttggaggcagctttcagaatcctaagatatttgaagggatcacctggaaggggactttataaaaaccatggacatcttcaggtagaaaaggctacactgatgcggactgggctgggagtgtgacagaccgaagatcaacatcaggctattgcacctttgttggaggaaacttagttagttgaagcaaaaaacagagtgttgtagcaaggagtagtgcagaagctgaatttagagcacttgctcatggaatttgtgaaacattatgggtgaaaaaacttctacaagaattaaaggttcatagttctcctccaataaaactatattgtgataacaagtcagcaatatctattgcacataacccagtcctacatgataggaccaagc

SEQ ID NO: 52890 - DNA, 622 bp, Glycine max
  Clone ID: PAT_MRT3847_18772C.1
ttcacaattcccacttccattgaaatctggcgcaattcaagagtaagggagaaaagtgtgaagggatcctccactttgttcctcaaacttctttctttgccattgattgaactgtgtttttgaacatggcatcatggtaatgcgtttctcacgcttctctgcttattgtttcttgtttttcttccctctctaatccacccttcaatgccatttccaccctttccgagaaaacgggaaaccaaagtttggatttgttcaaaattcttaattttctggtttttgaacggtatgaacattgttggttttaaggggagctgattttcttacgttatttgatgtgatctcgtgcttagtttggtgttttgatctgttatttgatatgggctgtgatcagttctcccaacgaacaaggaaggatggcccatgtggtagaaattagaatagtgtgacacgtttgttttgatttggttgtgcattgaaaactgaggttttttatgcgtatgaggtgtttgtgagatttgattatgtgtgaaggaacacgagtactaagaatctacgtttgattggtataaagcataggaaaaacatgcaatctatgttggaggaagggaaggaccctgct

SEQ ID NO: 52891 - DNA, 328 bp, Glycine max
  Clone ID: PAT_MRT3847_18773C.1
gccgattcaaattattttattcacatggtacttcatgccttaggggcccctctttgggacattgggcgtacccaaaatttcatacctctctcttctatcgtatgtatatagttactacgatttgtgactcgtataccaaatctaccctgtgacagtactactcagctacacgctacacagtcttaatcagtctttatacctacactggcagataaatactttaatacggattgtttcctaatcttttctagttctacttatcctaatgatgctgttcaatcttattacaaattattatttcttaatctgctacataaaaacttctact

SEQ ID NO: 52892 - DNA, 1278 bp, Glycine max
  Clone ID: PAT_MRT3847_18774C.1
tttctgtggcgggaacctcttgcggctggcgaacaaaacccgcgtttccttgggtattggaatttggaagcacagcgaggcagagtagaagatgtttatgtggcgggaacctcttgactctggagaagaaaacccgcgtttccttgggtagtcgaaaggaagcagaatgggatccaaaattcttccaaaatgggcatcgaagccttgcgtaatgggaatcgacgaagctggaagaggccccgttttagggcctatggtctacggttgcttatactgctctcagtcctatctgaagaccctttccacgttgagttttgcagattctaagacactcaaggaagagaagagggaagaattgtttgaaactttaaaactcaatgattctattggatgggatgttgatgtcattgacccccgggaactctccgctaaaatgcttaagaagaataagattaacttgaatgagatttcacatagctctgccatgggcctcattgatagggtactgaaaatgggagtgcttctaactgaggtttatatagatacagttggagatgcagggaaatatgaaatgaagctctctaatagttttccatctatcaaatttgtggttgcaaagaaggctgatagcctttaccccgttgtcagtggtgcaagcatagttgcaaaggtcacaagggaccgtgctttaagagaatgggtgcttgatgagactgctgaaaacatgcagaggaattttggatccggatatcctggagatccccaaaccaagtcctggctagaggatcacaaacatcatatctttggatttccatcattggtccgatttagttggggaacctgcaactcttattttaaagatgccgcagaagtgttatgggagtctgacaatttagatgaagatggtggtggaagcaacaataagaatggcaagcggcaattgaaattaagcaatgtgggtttcaccacatccaagagaagtgaagaaatagaatcaagtggtaaaggacgctgtaggttttttcaggctcggaaacttgagcacctcacttatttctaaaagtgatgctcaagtattgtcccctctatttgccttattccagtaatatctagctatgtgaaactatatattattcgaatttcatccttagataacattttctgcatatacagatgatgctcagtctaacaagatgtgtaccaagtattgtgtcaatttaattattagtatacttaatatccattgaaattttaaaaaaaaaaaaaaaaaaaacccac

SEQ ID NO: 52893 - DNA, 285 bp, Glycine max
  Clone ID: PAT_MRT3847_18775C.1
ggcgcacagttcgtcctcggtctttaacgaagctcctgccgccaccgaagctcccgagatggttaccgttaccaagacgtcaagctcctccagtgcgcctaccgatgcgagcgtgtcatcagccagtgccacggccacagccacggcttcctctactgttgtggtgacgacgccaccggcgacctctagcgactgcctcaaggcgtccactgggactctttctacgtccagtgtgatggcttctgcggacgtctcgtcgccgtcgtcaactccaaggtacgcatg

SEQ ID NO: 52894 - DNA, 260 bp, Glycine max
  Clone ID: PAT_MRT3847_18776C.1
cacgcgtccgataagttcacagtcaattcttaaaaatgggttccaaggttttgcttgtttgggttatttgcatagctgctatacttgtgatctctactgatttgtcacccaatgaatactaaaattttaacttaaaagattggaagcatgctccaaatgggttatatgatatcatattgtgttactgttgttgtggtgtgccttggtatggcttcttttgtgtcccttattattgtggctgctttggtggcccttattat

SEQ ID NO: 52895 - DNA, 542 bp, Glycine max
  Clone ID: PAT_MRT3847_18777C.1
gtggagaagaaggcatttctagatattgcattctttttcgaagaagatgacaaagactatgttacaaggaaactggatgcttggggttttcatggagctagtggggtggaggttctccagcaaaaggctctgatcacaatatcagataatagaatacagatgcatgacttgatacgagaaatgggttgtgatatagttcgtcaagaatctattatatgtccaagaagacgcagccgattgagggataatgaggaagtatccaatgtattgagacaaaacctgggaaccgatgaggtggaggccatgcaaatagatgtgtctggaataaaaaattacctctgaaatgggcacttttaaaagatgcctcgctgagatttctcaattttttctcccttgctgcccgactttcccactggaaagcctgatggactattggtctccaaaaaacaaatgacctctttttctgcaggggcaaaaacccaggagggttgcaggggaattcataaaaaggcttccccaccttctatggatgcgggcccacc

SEQ ID NO: 52896 - DNA, 281 bp, Glycine max
  Clone ID: PAT_MRT3847_18778C.1
aaaaccaaaaaggccctttttttttttttttagcataaaaaagaaccatgaagtttgaatgggttaaattaccaatccttgaaaattataaaaaaaacctttttcccttgtaaaggggaccaatttttaaaaaattttttttagtaaaagcttggctgtttttaaaagttaaaatcagtttttgttttcccgatcccttaaaaaataaaataattgcaacaataaattttggggggtttttaaaacttggccttaaagaggaatggctttttttttaaaaa

SEQ ID NO: 52897 - DNA, 653 bp, Glycine max
  Clone ID: PAT_MRT3847_18779C.1
gcacgaggcattatgtgctggtgcatggggcatgccatggagcatggtgttggtataagttgaagccacggttggaatctgaaggccacaaggtcacagtgctcaaccatgcagcttctggcatcaacatgaagaaaattgaggatgttgacactttctcagagtacactgagcctttgctgcagctattggacacaattccctcaaatgagaaggtagttctagttggtcacagccttggggggatgagcatagcaattgcaatggaaaaatttccagaaaaggtagcagttggtgttttcttagctgcttttgctccagacgttgaacaccgcccatcttacgtcttggaaaagtacaatgagaggaccccatccgaggaatggttggacacggaattttgccagtgtgggaacaaaacattaattgtctgtggtcccaagttcttgtcttacaagctctatcaactctgccccattgaggaccttgaattggccatgacttgggcaaggccatcatcatatgtcatcgaagatttgtctaaggaaaagaaactgctccaaacgaagaatatgggtcgattccacgtgtttatattgttgtcctgagaccttggaatccattgaatacccacactgatgaatccaaaggtg

SEQ ID NO: 52898 - DNA, 551 bp, Glycine max
  Clone ID: PAT_MRT3847_1877C.1
ctgcattagcatggctttttcctggttgatccaatggtgtcgcgtgatccattctttttacagatctggaggcgttggtcctggatgtgattaccaaagtggttcagtagtcatcatgatggatattgaggatgctcatacgcatttcatgttgtgcattactataattggataggctttgcaccctgtgcattattcgtcgtacctgactaaacaacctcagccatgtcttgttcatacacacatgggtactattaatgtttttagagatattccataggatttttatgaagcatctagatcaagacctcgttttagacaaatcatatcacatgtcacatattcttttttgatccaaaaacgttcatatttaaattccgtctccagcccaaaagtctagcaagattgctttataaatgagctggaaagctaatgtggagagagtagtatgctgttgtgaacaactacggttttcgctgagtgtataaatgggattatgctcaaatgatccgcaactatagtgaactggtataacatgaaggattgatgtc

SEQ ID NO: 52899 - DNA, 531 bp, Glycine max
  Clone ID: PAT_MRT3847_18780C.1
aaaatacactacctgcagaaaagctagatgaattgaaaagagtccatgaacaaataatcatggataaagacttgtcaaaaagagggaagatatacgtcaaggcaaacattgtgtttgagacatttgcacaacaactagtggattctcaagaagaaaaagaagaacatcaagcaataacttctcaagaaaaagatggactaacaatcatcttcaaaaagaactcaaaagttgagattcataagaaaaaatgtcatcaacccaagaagcatccttagaagcaagaagagaaaaattcacaatcaaatattaaggcaagtgattctaaataaaataaataaataaaagacccaacatgacatttagtcttaaaaaaccttaaatcaagctttttcctaatacacattgttgttaaatttttcaattaaacagtgacatttagacattttttaaaaattacaagacaaatttctaaaagagttttttttttccttttaaactagcaaaggttatttaatattaaaaaaattcaca

SEQ ID NO: 52900 - DNA, 336 bp, Glycine max
  unsure (1)..(336): unsure at all n locations
  Clone ID: PAT_MRT3847_18781C.1
cncagaatgaactcggttncntggacnttccgtagnggatcntccttcatagntgataaatagctgtgnagnatcgctcgttatagtcatggactattggnncgcnaccctctcacatggctgcagcaaccacaatttgtctanggtccctcttctatngttcnanggtcanattnacntanacgaagacacttgaaanacacttcgtttnctgatcgtgtttctcctncaagatcatgactttgtagcggatgtgtnccaaggaagcctgcnttgggaataaactcttcggggtatcaaaaatcattgntgaatccgtgggaacttctgcttgca

SEQ ID NO: 52901 - DNA, 833 bp, Glycine max
  Clone ID: PAT_MRT3847_18782C.1
ccggaattcccggcacgagacattggatggcaaccctcgaagtccaaaagcagcccaaacgacccaagtatcgggaaagcagcgtctctccctctgtaaacccgcagcggcgcactcccgaggccgaatctccctccagctacagccacaggacccgcttctctccaataatggacttttttcattcttcttctcccacatccaaccatgactctttcccttctagcttctccaagttcaactccgccctcaccgctggcctcttaaacccattgtccccccctcccgacaagacccgatccagccctaccctcttcgaaatcatggccagcgagcccgacgtcccccacaggcccccccctctcatccctccaacccccaacccctaccccaacaagccccttattcttgatcctcatgccctcttgatgcagcgcatatccgagctccttgtttctcgcagccccggtaatcagttcaacgacgccgtttccagcgacatcaagctcactctcacctccaaagacggtacttgtgtctccatgaacttgcatcgccaaatcctcgttgctcacagtagattcttctctgtcaagctctccgatcgctggaccaagcaccagcaggagctgcagcgctccccggtgccctacgaagttgaaatcgccgactgcgacgatgttgaggtttacattgagacttgaggttgatgtattgtaaggatcttaggaagaagctcatgagggaggatgtctcccgagttctcggcattttaaaggtttcagctgcgattgggtttgatgctggggttttgtcttgtttggagtacttgg

SEQ ID NO: 52902 - DNA, 454 bp, Glycine max
  Clone ID: PAT_MRT3847_18783C.1
caggtcgactctagattcatgattggtgtgtaaagaacataattgaaaaaatagctaatattgttttaatgttcgcaataaataaatatttttttcaacaatggacaaatgaaaagaaaaaaaagtgtagaataatgctaattaatgtttttacaacgttgtttgaggaataaaaaaatatggaaaagtattagtagtattattttaagtatttttttatttattttattgtttatttttaagtattttttatagataaagaaaataaaatataatatttttttctttatttcattcattgtatgattttttaattattttatattatctttgtgtctttggagaataaaagtcatgaaaatgcatcattttttaatatttaaggatggtaaaaatatatatgatattttgcgttgacatagtgtttatatgaaaaagagaatagaagatgaat

SEQ ID NO: 52903 - DNA, 532 bp, Glycine max
  Clone ID: PAT_MRT3847_18784C.1
atctatcgtagaaatgtgccaggtccgtcacctagctggcgacatccgacaagctgtacgcaacgccacacctgactaacagtgtggtaaggctttcaccagcgcccggatatggcgcaaatgctcccagatggggccggctggtagcgggaggtatctgcccactacgggtggctgctggcgctgcacaagaaacacaacgtaatagggcggtcacagtcggggtttggtaaacacggtggtgagcagatattatagttgcgagggataccgcacgtggggcacaaacatagctacctgctgatccccgctgggtcgtagtggaacaatagcgggtaacaatggcaacacgcgtccctaggtcaaggatggaacgtaatactgcagaccctgaatgatggaagcattaactacctgaacaggcgcctaagcatggctatttagctactgtgaaacaacaaacagggttgttacggaccgggtaacgagcataatggctgaagccaacaaacgctttaaaggggacaaaggc

SEQ ID NO: 52904 - DNA, 262 bp, Glycine max
  Clone ID: PAT_MRT3847_18785C.1
tttttaatttttccaatggctttatcagtgttcctggaaaatcttatagaacatttaacttttaatggggaaaaaatgactgcaaattctttccatggggtttaaaaataatacaaacttatatttccaacctcaaaattttctggacctaaaaactccccctttccctttttttctgccccaacataaaataccctgtcccaaaaaaaaaataaatggtaacacaaataattcatttgacatcctgataccccaccccttg

SEQ ID NO: 52905 - DNA, 287 bp, Glycine max
  unsure (1)..(287): unsure at all n locations
  Clone ID: PAT_MRT3847_18786C.1
agaagnangngtagtaagtaggaattaggtngagaatgaatgtantatgnattntnattgnatagagatgtgnatggaagtnnannaagttgttgnanagaanatannanagtaaaannanaagntnagggnaaantnaagnaaattnnttnntangnangnnntgngnnaattnaaggnanaaantntaaagaaaaaangaanttgaataaaaaatgnntnnnaattttaaaggnggnngaantagaanntaaaannnggaatatgannagnnntggggntnanan

SEQ ID NO: 52906 - DNA, 234 bp, Glycine max
  Clone ID: PAT_MRT3847_18787C.1
tcaggtatctctttccggcctcattttcgtttttccacttctcctctcaaaatcctttctttttcccgcatcccaccaaacctgtttcagaaaaacgccgatcttggactcgttcaccgttggatcgtcgtgaaatttgagtaccacattcacaacccaatttcgcacattctcactgttgggaatttcaaaatcatatctgagcttagaggaaaacccttcgcattgtagcat

SEQ ID NO: 52907 - DNA, 613 bp, Glycine max
  Clone ID: PAT_MRT3847_18788C.1
gcaaagagccagttgggcaacatcccatcaaaaggatttatgtgagtcttactgctgggctacccaattctaaaaaggcccgttatgctgctagtaggtacaaagtaattgagatacttgctggggggagttgttcattggttgagtggaagttggaaactggacgcactcatcctattcgcgcacatgctaagtatttgggagttcccctactgggtgatgaggtgtatggagggacaaaaagcatggtcttctcactgctaaggccccgaactcccatcagtttgcatagcaaaattgtaaaaatggtttctaggctagataggccttgccttcatgctttgactctcgggtttcagcatccccatacaggggagcaggtgcatttttcatgcgaaccccctgcagacttcgctgagatcttgagccagcttcgtagaattggtagtgagaccgtttctttctcaaagcgttcaaatttatgacgagggcactatattcatattcagtaagcaggttttgatttcttatcaaactacttcgcaatacattttttcatatttatagacttgttaaataaaatctatatgtgcgccaaagtaaaaaaaaaaaa

SEQ ID NO: 52908 - DNA, 802 bp, Glycine max
  Clone ID: PAT_MRT3847_18789C.1
tttttgttaaggcgttttttaatctctatatcttcaaattcaatgtctaccactgtgctataagaatctgaatatattgcttggcaaatttttagcataaaaagtcctgtaaattgtcattaattagttttagaaagcattagggggaattcagattttgagatcacgatgagagtgcatttatccatgcatttcatttattttgtgcacattagcatgtggtttattaaaagttgtgttttaaaacataacttattcataactccgtaataaattcaaaaattactcatgttgataaatttttcaaaaaaactaccactgttatgtaaaaaaagcctaaattggaatacggttataggtctaataaactgtatattctaaagcatatagttaaataatgaaaatatacgtcactataaattcaaaagtttggagcatccttaaaaaaaaacttaattattaacttggttactaaattattttttaaaaggtttaatttattcccaaattttttaaaagtttactttagtcacaaattattgtaaaacagataaaacagaccaatatgcatttttttccatctaattaggttggtcggtaagatagcagatttcaactgattttgtttacaaaacagtgacgagtttttaccataattatatgtattattgttttaaaaaataaaatgattctcatttcttcttcatcggtcactatatttattattattttaaaaaataaaataattctcattttttttttctccacactttcgctattaccatccctcgggccgaattcc

SEQ ID NO: 52909 - DNA, 260 bp, Glycine max
  Clone ID: PAT_MRT3847_1878C.1
ctcacctcacactctccaaaccctagcggcactacacacgttatctctctctctctctctctctctccctctctccttccccaagatgtcgagcggcgatcccgaagaccgagaagtagcagaaggcaccggccgtcgcgaggaggaggacacgggagaacaggtggcccccatggtcaagttcaagaaggttcctgtcaccacgggcaaggaggaggaacatgcaatcctagatctcaaatcgaagttttacgggttcg

SEQ ID NO: 52910 - DNA, 465 bp, Glycine max
  Clone ID: PAT_MRT3847_18790C.1
gcaacataccatcaaaaggatttatgtcagtcttactgctgggctacccactccagttgctgggcgtgttgaggttccagttggccgtgatcctaataatcggattcgtatgactgctgtagctggaccagttaattctagaaaggcccgtcatgctgctagtaggtacaaagtaattgagatacttgctggggggagttgttctttggttgagtggaagttggaaactggacgcactcatcagatacttcatgacacaactttgaggaaatggttcatgattcgcacctatgctaagtatttgggagttcctctactgggtgatgaggtgtatggagggacaaaaaacatggtcttctcactgctaaggccccgaactcccatcagtttgcatagcaaagttgtaaaaatggtttctaggctagataggccttgccttcatgctttgactctcgggtttcagca

SEQ ID NO: 52911 - DNA, 173 bp, Glycine max
  Clone ID: PAT_MRT3847_18791C.1
gagaaataagggcacaatggtgtcgctgacactgcagaagcgcctctccgcaatcgtgctcaagtgcggcagacgacaggtttggcttgcccccaatgaagtcaacgaaatctccatggctaattctcggcacaacatcaggaagttggttacggatccggttatcatcacga

SEQ ID NO: 52912 - DNA, 808 bp, Glycine max
  Clone ID: PAT_MRT3847_18792C.1
ccacgcgtccgacggctgcgagaagacgacagaagggggttccgatttcccaaccaaaagaccactctcgacgagcttcccaaaacaagaagcaccaatggcagtcgcgaatctgcagagactgtcctcgcaagcgcaccgcctcccctccctctcgttcttctccaaatccctgatctaccgccgcacctcctcttccacgaagaaggtcgccgaccgcatcgtacggctctcggcgatcgacttcgtgggaaagaagcacgaggtggtgggcctggccggccagaccttgctgaaggccctgatcaacacgggcctggtcgacccggagtcccaccgcctcgaggagatcgacgcctgcgcggcccactgcgaggtcaacattgcccaggagtggctcgacaagctcccccctcgctcctacgacgaggagtacgtcctcgtccgcaattcccgagccagagccctcaacaagcactccaggctcggatgccaggtcctcctcgaccacgacctcgaaggtatggtcgttgctctccccgaacctaggccctgggacacttcctaagtccaaagcgaacctcttttatttttatggctcaataatgtgatccatgaacctttggaaacatagcagaactgtggttgaagcttgtattggtttcttcttgttatatttttggtggttttagactcccgtgccttttattggctcgctatggataactatttgcaaacttgtgttttgttattatgatgattatgatatgatgaatagcattgttatattaaggtcttgctttaactt

SEQ ID NO: 52913 - DNA, 295 bp, Glycine max
  Clone ID: PAT_MRT3847_18793C.1
ttccggtcttctgtcagcctctaggtttcttacaagccaaggcatgtaataaagaccactttgtatgttcacacgagtaagaataaaaatcacaacttccaacatccaaagcctggtgtcttattatgcaatgtaagctagtttcctgagctctatgtttttcttatttagataaagagtgccttttgtttctgtttgcctcattaccattgttatcctattgaagcacccttcttgaatggtgtgctcttatcttccattggattagaataaaaagctattgcttcttttgggc

SEQ ID NO: 52914 - DNA, 529 bp, Glycine max
  unsure (1)..(529): unsure at all n locations
  Clone ID: PAT_MRT3847_18794C.1
cacacactctcaacatgacgaggttgcaactctgaatacgagaagtcgtgggaacaaacacgcaacacttgacaacagaaaaaaacaaatccagattcacacattcattcatttcatcaattatctccaaaatccatccttactagtcaatactaccatgtgtggcaataccgcttttttcttcttctgactattcactccttccttcattccactgacccagcaccagcaccactcctttcatctttggtttggcaagatcaacaaacggaaagaaaaaaaatcctaccttttgcttctgttcctgagaaaatcacttttttgtcaataccccatgtgctatattcttgttattcccaacatcacatgttcgaaagttgattttgcagtttgcacccttgttagatctcagggtggtttatgttgtgtcacaaanaaattctgaaattttgatgaccatgtgatgaatttcacacctttgtattactgggtgacttcattngttttcaaaantggatattacataaaa

SEQ ID NO: 52915 - DNA, 762 bp, Glycine max
  Clone ID: PAT_MRT3847_18795C.1
cgcttccttggccgaacaacaatcaccaatggcagtggcgaatctgcagagactgtcctcgcaagtgcaccgcctcccctccgtctcgttcttctccaaatccctgatctcccgcacctccacctcttcctcctccacgaagaaggtcgcggaccgcatcgtgcggctgtcggcgatcgacttcgcgggtaagaagcacgaggtggtgggcctggccggtcagaccctgctgaaggcgctgataaacacgggcctggtcgacccggagtcccaccgcctggaggagatcgacgcctgcgcggcccactgcgaggtcaacatcgcgcaggagtggctcgacaagctaccccctcgctcctacgacgaggagtacgtcctcgttcgcaattcccgagcaagggtcctcaacaaacactccaggctcggatgccaagttctcctcgaccacgacctcgaaggtatggtcgttgccctccccgaacctaggccctgggacacttcctaagtccgaacctaagccaagtgtttattttctttttttggctcaataatgtgatccatgaacctttggaagcatagcggaactcggtgaaccttgtattggtttcttcctgttgttatattttgggtggttttagactcttgtgccggtaattggctcgctatggataattatttgcaatcttgtgctttattattatgattatgattaataacattgttatattaaggtcttgctttcataaaaaaaaaaaatataaa

SEQ ID NO: 52916 - DNA, 457 bp, Glycine max
  Clone ID: PAT_MRT3847_18796C.1
gaattcggctcgcgagtacgacaatattcacaaacaaatataatcaaaggggtacacgacttttgactacatgcatgacagtgtgaaaaaaaaatggcacgcagcgtgcttgctatgtgcccctattttggggacctacatgggagggagctaaaagggctttttagtgataaatcccaaggtggtcatatctctcttgatggtctctagaggtatcatccccttcgagaaacatattgcagcagtagggactactagcaacaatatgttatcaaagaaaaaaactctagatgagggttcactgtaatcaagcaagtcggaggcctagcatggccacagattcacctccactccttatgttcccatagacccgggtatagggccccttttcaactcaccgtgtgtgcaaatagtgttggtgtttgtgtgcatcaaatgaataaatatttacctcatg

SEQ ID NO: 52917 - DNA, 386 bp, Glycine max
  Clone ID: PAT_MRT3847_18797C.1
cgtcggaacctgtttccctgagtggttgtttgggtaggcccctggggatttaataaaaagaaaacaaaagggaaatataagagaaataaatagaaagcaatacgagactctctccatcagttccgccttcagcctccgtcccctattgcggtgaagtagttgcgctccgtaatgttgcggccggagactcccatttccgttctcttcatgcggcctaaggtggcaatgctttagtgaatcgtcgtaatggcactagaatgtctaatagctaggtttaaattttcgcggattgctagggtgcccgttgccgtactaaaaacgtcactggaggagctctccctctcctcaataattctaataacgtctagctcccgttcgtcaagcgc

SEQ ID NO: 52918 - DNA, 1396 bp, Glycine max
  Clone ID: PAT_MRT3847_18798C.1
gttgcattgagtcagatgatctaactacaaacacacacacacactctactgcatcatctccagcagtctcaggattaactgaagttgataatagagacaaagaaaatctagatttgtgttcatctgggttaaaggacaacaaagaaataaacggcttgcaagaacgttttgttcttccctctcctgagaaaatatctccatgtccgacacaaagtagtgcatctagttctaaaaccatgaaattaaccagaagcagaagttgtaaagcaagtctcatgagagatccattttcagattggtttgaccaagaagaaatgattcagaatacccccccaataggaagacccgggggccttcaaaggaagacttatacactcaattataatcccaatgctgagaggttatcatgggctggttacgagaattctctgggaagagcttctgatgcacagaatatgaaatcttccacctataatggaagttacaaagataattctttggcacctgtaagaaaagaaaagaatgatcttgaaagttcaaatatgcaagcgaatcttgaggttcaagagacaggaatggagtccgatgttactacaaagaagttcaaagatgttggtttggacccattgcaatctgaggaagaaaaacagttggaatggccttcagaattcaagcggctgcagaaagagattattgaactctggaatgcttgtaatgtttcattggttcacaggacttactttttccttctgttcaaaggagacccttcagattctatctatatggaagtagagcgaagaaggctgttctatctcaagcaaacttttgaccaagggaatcagactgtggaagatggacttacccctgaatcaagcaagaggtatcttagaggagaaagacagatgttgagcaagcaaatgcagaagaagctgtcaaaatctgaaagagagaacctgtacaataattggggaattcgtttgagttcaaagaacagaaggttgcacttggcccatcgcttgtggtcagaatcagatgacttagagcacattagagagagtgccaccattgttgcaaagctggttggttcagtagagccagatcaggcttttaaggagatgtttgggctcaactttgccccaaggcgcacaagaaagaaatcgtttggttggacagccagtatgaagaatattttgtgagcttgatttgattgtctaagcgaattttttttaggaagtttgatttggccatgtaaaaattcctcctttggctccatttaacatagggcattctttttttccacctcctgaaaacaatattttttctattgtatgtttctaaccctgattgctacttgattgtaagaaggtttatcaaggatgtgcaatcccaaggtttc

SEQ ID NO: 52919 - DNA, 505 bp, Glycine max
  Clone ID: PAT_MRT3847_18799C.1
gattgtaagatttatttcatttttttaaaaacaaaagggttcatatacgagggtgaaaacacaccataggcgatcgacatattggggagagcgctctcacatagtgagacacactatatatcgatcaccttatctggtaacagcatacgtttagtatggaaattgcgagtcggaagacaatcacttacaataaagtctctagaaggagacacgtatcaatggcgctttctataaacccacgatgaatttttatgcaataagctaatttcggacagtgattctaccatttaatttatccttgcaactccacctaccaaatttttctaacgatgatgtgctcctatacacagcattttttgcaactccacaatattgaccttaaacaaacaaactgttcatatgtggaaaaccagaggtttagcgatttcaattggtagacaacaaatgattcaaatacacagtacttgtacaacccacattaatttccacgccaccgttatttgca

SEQ ID NO: 52920 - DNA, 597 bp, Glycine max
  Clone ID: PAT_MRT3847_1879C.1
atgttggtgcgcatgatccacactcgtctctttgcagcggcacgggtgaaatcttgccccgatatgcatagtagctgcgtgatagcctccctttctggttgtgctagcacagttggtcgctcctccatgatcagagggaccttaaattctcttaaggtgtggatatggagcccactgaaagtgaggacgcataggcctctaaaggcgagggcatgcagccctctgaagttgaggacgtgtcgccgtttgatggcgaggatgtgtagtcctttgaaggcgagggcgagcagccctctgaagacgaggacgtgtagccctctgaaggtgaggacgtgcagtcctctaaaggtgagggcgtgtatccctctcaaggggaggatgtatagtcctctgaaggtgagggcgtgtagccctctgaaggtgatgacgtccagtcctctgaaggcgaaggcgtgtagccctctgaagttcaggacgagtcgccctttgaaggcgagggcgtgcagccctctgaaggtggttgcttctaaaggaagcaacctaactcgcctgggcgagctgagcatgcctgggcgagctgggtggcaagctcatccc

SEQ ID NO: 52921 - DNA, 512 bp, Glycine max
  Clone ID: PAT_MRT3847_187C.1
tcttgatctataactatgttgggtagaaaccggacttcaaatgggtgcctcaaataggcggaacatgcaggctattagatgaaatgagaacaaaactgaaaaacaggcaatcaactgaaataaccctcacaaccgacatatttaagccttttcagcgatagcgactgccgaagcagctatgtgccctaagacgaccagtgctgcttgcggcaatgagaccaaccttctgtgcaggaggagcatcaggcgtgacagttctaggatgaccgaattgctggaggttaccttctccgaggggatgctcaacagggttgatagcaacaccacgaacacttgggccactaacacctctgcactataaacgtgtggccagcatgtgcagccctgagaagaggctaatcaaatctccctacatctgcaacttggccaattatggccctaccgtcactaggaacaaatcttttgtgaaccatatgggagttaaactctagacgtgttaatagcatggatgt

SEQ ID NO: 52922 - DNA, 205 bp, Glycine max
  Clone ID: PAT_MRT3847_18800C.1
tctgttttccgcattgggattggctcagcagaacttgtctggtagactatctcctgggatgggggaacctactaacttacaatctgtcttgcttctgaataaaggtatttttggtagaattcctgctgccataggaagcttggaaaagcttccaacactcgatatttcccataatgcatttagtggtgagatacccagttctttg

SEQ ID NO: 52923 - DNA, 247 bp, Glycine max
  Clone ID: PAT_MRT3847_18801C.1
cgatatcctagtataccttaatcagtcattcaagagactatgctgagagcacggttcccattactgttgctgggacttgtcttcctggcttcagtttctgtctcatttggcattgcttactgggaacgagagaaccccaaacacaacacgtgtctccagagttgcaatagcgagagagaatcgtacaggaagcaagcatgccatgctcgttgggacctccttaaggtggagagagtcgaatgtgaag

SEQ ID NO: 52924 - DNA, 514 bp, Glycine max
  Clone ID: PAT_MRT3847_18802C.1
cgaaggaacgttgttgactcacaattacgaagaaggaaacaccgcgctctcagtgctcgttggctcacctcggtgtgtcctaaacccgcgcgtctcatagattatagagaaggaatcgccgctcccgacactcattgccctcacgttctcaattcgtctctcatcccaagcggtaatgctgcaaacttttgttttccatttgtaattcggttcttataatctagcgagaaccttcaccctaactacgtgctagcacgtagaatctcgagaaggaaacgccgttaccgtcacgttttcaattgtctctcatctattgtgtcccaaacggtaatgctctgtaatttcatcttttatttgtaattatccttataactatctctgtaaatgctgggcattaggttctatgaattctcttatcataggtcttctctagttccttttacctttagtttatttttagcttagaccttaatttgattttaatttgttaatttttaaaattgggattgaggat

SEQ ID NO: 52925 - DNA, 1307 bp, Glycine max
  Clone ID: PAT_MRT3847_18803C.1
atgacgaaactgaaagagctgatagggataatgaaggacaaagcctcgcagggcaaagccgcgatcctctccaagcgcgccactctctctctcctccgcgccaccagccacgactcctacgcccctcccacgtgcgaccacatctccatgctcctctcctccggcgacggctcacgcgccacttcctccgccgccgtccaccttctcacccaccgcctccagaccacccagagctccgccgtggcgctgaagtgcctgatcgtggtgcaccacgtgatcaagcgcggcagcttcatcatgagggaccagcttccgtacagcggcggcggcaggaactaccttaacctctccaaattcagagacaagagcaaccccgtgtgctgggaactctcttcttgggtacgatggtacgctaaacacgtggaacagcttctctgggcttccagaattgtcgggttcttaccgacggaaaaagagagagtttcgggtctcaccaacggggagttattgagagagacggaggctttgttaacggttcttgaagggattgggaacatacccgacgctgcatccatggaagggaataaattagtttctgaaatagcgactttggtggaagaagatggggttgcaacgttgagtgaggtttttgttagagttaacgagttcagagagagattggccatggggtgtctcggttttggagaagtggtggaattggtttacgtgttgaatagattggacaggtgtaaagagatattggtgatggtggtgatcacggagaagcagagattgtgggatttagtgagagaattgaaggtgaaggtagagaagatggaggtgtacagggaagaagggaaaagaacgctgacaacacacagggcaacaaagtctgacaggtttgctctcacgtttctcaattccgttgatttgggacggtttccctctgcaaggttcttgtgatattttgtaagtatcttaccactgtttttaaaatattgattgaggaagtaaaagaaaaaaaatatttattagtaaattatatgaaagtgtaaaaaaaattataaataatataatttttttcaataaaaatatttttttaaaaattcttaatcaatatccttagaatatatatttattagcatttaccattttgtaaataaatattaatcataaaatttttggttaaattgtttatttatttgatgcctgtgtatatctttcttttatcttttaataattagttcctgtaagttgaaattgtaaatttttggttctcagaaatgtataaaaagttgggtttgttt

SEQ ID NO: 52926 - DNA, 765 bp, Glycine max
  Clone ID: PAT_MRT3847_18804C.1
accccccaggatgagtaatctggttggtgctgggaatcaagctttgagggattctgttctgaagaaactgcaaaaggctgcggaaaagcaaagatgatgctgtcagaatgataatcataagattcaattgtttggcatggtcatccccagttctatttattaggagtctacaacctctggtgatataattgaaggaaatttccttttgatgaaaaccataaactgaaaatcgaatcagttgtttggttttaatgtcatctgggttctatgccaaatgctgttgggttattaacagagaaaaccaatactactgtgcaagcagatggaaagtcaaagaccattgattcccacgattgcttaaatattttagtctcagtcaagtcctgtgtgcttgcttattagtttggaattcgttctgctatcagcatgcagcacttaaatgggaatggaactcggattaagcccaaattctaagaacacgcatttggctaagctcactcaatgtgctggacgatgcgctatatagtgcaattacgatagtaactattaattggacacaggaatatttggcattttgcaagaacaataaatagttgtatatatagctttagaacgtgtgtcaagtatcatggttgtagaattatcgtcactactcattcttgttcgatcatctgtgtcggctgcgaggctttctaaaagtgccatttatactggtgattatgactctgtatcatcatcattatttttttttctggtttacatatc

SEQ ID NO: 52927 - DNA, 353 bp, Glycine max
  Clone ID: PAT_MRT3847_18805C.1
aaaacacgtccgctacgtcagtgtaatactactactcttaacagcgtcatgactaggccgcggaacggatgcggtgcactggacgaatttatggaccaaaggatcgatacggccgctcaatcggctcggtagacatcgtcaggacacgagagtgattgctacagcgcactagtttacagttgacacaagcgcactaagatgagctaccacagcccaggccatctcggtcgaacaaaacggtgacagatcggatgatgcggagacccagttcgaactcgaacgctgcaagtgtgacctatcgatccaaatgcccttcaggatatcaagctagatgtaccggacaagttactaca

SEQ ID NO: 52928 - DNA, 655 bp, Glycine max
  unsure (1)..(655): unsure at all n locations
  Clone ID: PAT_MRT3847_18806C.1
cccataaaccgcagctagtagtaatacagtcatttcaatcaacccatttagttagtatatacaatatctctgatcatgatgtggtgtctaacgagtaattatatttaggcacanccaaaatttaaaaaccaaaatttacactttttaatancgaaaaaanatgataatccgtctggtaaacaaacttgaatatcattaagaagtaagcactttcaaaaatatgactagaatggagggcaattaacattttttaatacgaagaaaaataacgacccagcaaaaggatcattataattttctaaattacagaaataaaaatagcaaaatagaaccaactttatgcaccccacaaaaaaaagtgttaagactaagattggtttattcgtaaaattcgaagtgatcataacaaggttagacatcgatgcataaataacagattaacaaacttttaaaaaaaaaacctcttcagcagggaatgctaatatgatatgctatgtatagcatcaaaaatgaaaagagatcaaaataagatgacactgagaagaagtcacctttgcatttgatgacttggccagctgtgctcgacatgatgaattaatagttagtgagaagaaagatgagaattgatgagtgagtttggtaaatggtattgaat

SEQ ID NO: 52929 - DNA, 492 bp, Glycine max
  unsure (1)..(492): unsure at all n locations
  Clone ID: PAT_MRT3847_18807C.1
gctgagtatggctgttgttctggctattgaaacaacaatttcttacaattggaggcacttctggttggaaactgactctaaccctgctcctcctcgctttcagccacccaaaatcagttcactggtctattaacactagctgaacgaattgtataaatcacactaatcatattaattttagaatctatcatatttatagagaaggcaatgcttgtaccgacaagcttgctttttttggtgtttagttttttgaatatacttaattggtgggattctcctctatcttatgttgttcaggagctcgttaggtatagacaagacttcctttctccagattttcttagtttatttagtctcggcatgatttggccctcccaaattattttgnatgtctcattcattgatatatttggagggggtctttttggtaaagtaggggatgaagggttaacatagttaggatctcaatctctatttttctttgccccactc

SEQ ID NO: 52930 - DNA, 304 bp, Glycine max
  Clone ID: PAT_MRT3847_18808C.1
ttttccgtttacgcccacggggctaatggtcgaagataaagcaattattctatggtggtcccgcctaaataacagtagttccaagctgttcgttctttggaatgaagattgctctcccgtgactatagaatatatcaagatcccttgaccatttgggcagcatataacacatcccactagagagggtagtcaaccttaaaacactgtttatttcacaggtgataagaaataagcaaatacgaatgttgttgattctaaattggatttagaagaggatccgaccttggcacctctactagggact

SEQ ID NO: 52931 - DNA, 467 bp, Glycine max
  Clone ID: PAT_MRT3847_18809C.1
tatttttcatcggaaagattttcttgggtgggattaaaatctataagtgttagcatcggtgggtagtttttctgtatttcatttttccttgtgttaatgttcatggtggttgaaaatttgctaataattgatggagaattagcatagaagtgcatgtgcgtgtatcttcatgtgcaagattagattatggtgatgatggaattaaggtcaaaagcgtagctgctaagagttccaagggtgaaggttttcaaattcattcatctcaatcaagtttgaagaaaatggagtggcctcatgggagaagagcaacaccaccgccatctcaaatatgtccaagaaggtgcgtgtagagagccaggtcctagacaaggacgccaaggagagcaagagcgtggtagagcatggcaagtcaaataacgcgtttagatggcgaaagcgtatgggccgtttggtccacttcatcccat

SEQ ID NO: 52932 - DNA, 1268 bp, Glycine max
  Clone ID: PAT_MRT3847_1880C.1
accactcgatggcggcgatgagggagatgatattccgaatagcggttatgcagcccgttcacatcgatcctgaatccataaagccacccaagagaaggaacgtgaagatctccaaggatccgcagagcgtggcggcgcggcacagaagagaaaggataagcgagagaataaggattcttcagagattggtccctggcggcaccaagatggacactgcttctatgttggacgaggccattcactacgtcaagttcttgaagaaacaggtgcagacgctggagcaagcaggggcaaatacgtcaccacacagtaatactaatagtcccaataatcacgttgttggtgctgctggttttccgctagggatgtcttctaactactccaataatagtagtgttaattattcttctttgttgatgaagggtggttgccaaccttgtcaaatgttcggttccacttctaaacaattgctcagctaatagttgttaggggaagtttgagagggaatttgcttgtttttgtgatgagaaagcaatgggttgtgtagtgttgatcaattggtgtatgcatgggtttggtggatcgggaagaacatgtttctccatgttaatgccattgttgcaatgatcttttgcttttacaatggtgggggtgggtgtaatcgaaatttcattaacataatggatgagtatgttctacagatgagggagatgatgagacgggaagcgcttgtgtttccgatgaatagaggcccggtatccatcaagccaccgaagagaaggaacgtgaagatttcaaaagatccgcagagtgtggcggcgaggcacagaagagaaaggataagcgagagaataaggatacttcagagattagttcctggtgggaccaaaatggacacggcttctatgttggatgaagccattcactacgtgaagttcttgaagaagcaagtgcagacgctggaacaagcaggggcaagtagacccttgaatgttgttggcttccctactactgcgtccaacgccaataataataatagttattctggttttgtgaagagttgtcagccttatccaatgctgggttctgcagcttctaaacaattgcttagttgagaagtgtttgtttgatacatgcatgaaaaatgaaaatcaatgaattatatatgtggtttttattttattttttatcttcatagtattgtgatcgatcgtgcatggattataaagacagtgtttgtcagtgtaattgtcattgtttcgagaatt

SEQ ID NO: 52933 - DNA, 523 bp, Glycine max
  Clone ID: PAT_MRT3847_18810C.1
tcgcatggccaccgcgtaccgtaagactttggattcctcttagtaagcggccgccacccccccccccccccccccccccccccccccccccccccccttttttttttttttttttttttttttttttttttttttttttttttaagaaaaaaaaaaaaaagggttttttttgcccccaaattttgcatttacccgggtccaaaaagggggggaaaattttaacccaccccccccaaaaaaatttttttttcagttttttttttccccaaaataccttttttttccggaaaaaaaaaccccaatttttaggggccccccccccccccccggttggaaccttccttttttccaaaatcccggggggaaaaataggggggggggctttcctttaaatcccggggaattttccggggaaaaaacttttttttccggggggggagctttttaaaaaggtttgggggacccagccggttttttcccaaaaatttccctaggcaaaaaaaccttggaaaccccaaaaatg

SEQ ID NO: 52934 - DNA, 460 bp, Glycine max
  Clone ID: PAT_MRT3847_18811C.1
acgggaaggcctgcacttgcaccaatcaagataatcgcttttggctggcatgctcgggttttacaacacgagtgtgatcacttggatggaactctgtatgttgataagatgctacctagatctttcaaaactgttgacaacatggaactgcctgtagcccaagggtgccctaaacttgctcctcgctaaaagtacactgcagctagttatgataacgcattacatggcggtatctaatgcattttagcgaaccattgacatttggagatcctaaaatggaaggcagattctttacattctagaaataatcttaacttaagaaaaaatgaatcttccttaattttcaatggcactatttcgtccaaaattggcattgcactacttctgaataattcaattcatttaagcttcaatggtcgaacttatactcgaaaaaaggaatcagaagtgtggactattg

SEQ ID NO: 52935 - DNA, 428 bp, Glycine max
  Clone ID: PAT_MRT3847_18812C.1
ggctcgagcaacacctctgtgatttgtggtgatccatacttctcaaccctaataaacctatctgcatccatggtcctttcttctaccatatacatgatgcctcattctaaaaaacctatacttacatcaaaaccaatatattgttaacttcccatatgctattggaaccctagaaattaaaggatcattctaatctgtcttgcatgactctatgacgctacaacaagtctcacaattcacaacactatatctgcacttgaagcttcattgtcgcctccagatccaactaactgcattcaaccttacccagaaaaagacactttctgcacaccacacttcttcatagactacgagcttcctccacacgatgacaagactttaccccttgatatcataccagctgctcattaggtcactgatgattacat

SEQ ID NO: 52936 - DNA, 232 bp, Glycine max
  Clone ID: PAT_MRT3847_18813C.1
ccacgcgtccgcgcagttgagatttgagaattgactctgagaatcgagaaaatggccgggttaccagcgaggcttcgtttacaacccacctacttcaaagctcccgccttgtggggtgttatcctcgacactttgctttttctactctatttattcttggtgatggttgtagtatactttcttatttaatttttttattttcttttctttttattattttttttattaattc

SEQ ID NO: 52937 - DNA, 494 bp, Glycine max
  Clone ID: PAT_MRT3847_18814C.1
gtttcatttgcccacctggacccccgggagcgccaggagcacccggccagcccggcaccggaggaggacagccgcaacccggagagcccggcccacctggacccaatggacagcccggacaacccggacagcccggagcgcctggacagcccggacaacccgcaagcccaccgccaacggagcccgctcctgcaggcccacctggagaggctggtgcacctggacagcccggtcagcctggagcccctggacagcccggcgcggccggacagcccggcccgaagggacctcccggaggcccaggacagccaggcaatggcggagccccaggccagcccggccaacccggacagcctggaaaccccggagagcgcggaatctgtcccaaatactgtgccgtggacggcggagtgttcttcgaggacggcacacgaagacgttaagaaaagcgattctgatcagtggaagaagaaaaagcagaaaaacagcagcga

SEQ ID NO: 52938 - DNA, 342 bp, Glycine max
  Clone ID: PAT_MRT3847_18815C.1
gaaagagatagggtaacctaatggagctagttgatagaaggttaggttcagatttcaatgaaaatgaggtaatgatgatgatcaaagtggcgctcctatgcaccaataccacttcaaaccttaagcccaccatgtcatcggtgcttaatatgctagaaaggaaaactatgattcccgaatttggttcagatccctctgagataatggattgaatggaagttgaggccatgcgacaacctttcttttcaaaaggaaaattggaggaggtggacacaagagcaaaatcatagtttatcaattgaggggccttggacgggcttattcttatcggttgcagatcta

SEQ ID NO: 52939 - DNA, 1912 bp, Glycine max
  Clone ID: PAT_MRT3847_18816C.1
gaccgtgagaataaaatgatgccaatcaattctatatctgttccactactagcaaactgtttcagacaagttgaaccggtgtactagcaaatacacacgaactgttccactacaaacctacgtgggggaagaaaaacaataacaagaaaggataaacatggggagcaatgaaattacaagagacctgccaattaatttagcaaggcttaatttcaaaacctatgctcagaagtgttcgagctgactccattgctttctcacctccaagctctagcgcttccccggtcagttctccttcggtgtccactgaccattgagtagaaattttcttgttttgtggggagtcaggtttcttcacctgcaaactgttcatggaggcaggtgctgcagcagccacaagaggagcacttggtggcccatgtcgtttcttggggactggcatgtcatggtcatgtacacccttgtatgttatgatgacggcatctgagttatctactgcggtctcaatgtgctttctgacaggacatccagcagaagtgcatctgtagtagttcctgggatgtggatttcctttcaccattttctgcccatacttgcgccatcggtaaccatcagcagatatccccacatctccggctgcatgtacaacaaacttggatttttttccaggttttactggagaatccatgtctgttaagtcacctttcttcattcttttttttggtactggctcatttacatgttcctctttcaaaataactttaccattaccactgatattagatgtgttttgtcgtttcttatcagtgctgcagggtgcttcttgtagagattcttttgaagaaatggatggatcagcatccttcagaactttgataggctgctccggaacactgttttctacaatgggttcactggaagacagaaacttattttccctaatggaattagtcttccgtggaggatcatgactgtgctcacttttatatacaatctctatcacatgacctgaatcatcacagcattcaatcttcttagcacaacaatctgaatgagtacacctgtaatagcttcgagaacctgtaggactcttcacttgcttctgaccatacttccgccagttgtatccgtcagatgctgatgtccttgcaacagaaacagcagataacgttttgcgaccagaaggatttttcctatctacttctggcacatgtgtgttattgacctttggagtagatattttctgtttttgtacggttggactagaaacaattgataaagattgtgtaacagaagttggtgatagatcagacaatggaattgaacacacagacacctgaagccgattttctgtctgagtttggagtggctgcactgctcctctttcaatagtttccttttcaggagattcaactgtctccttactttcggctttgccacccgaattcggagcagtagagctcccttgcaaatcgtcactccgatgctgcacagcaagggtttcaaccgaagaggtaacaccagcgcctagggtttctaaattggagtccgaacaaggtttgtcggagctccgtaactcgcggtgccgcgactcggcgtcggacagcgattccacaactcgttctgtttccttggtgagttgcgtttttgggtgagaatcgtttcctatggtgtctgactctgggagaggttggggtccatggcgctggtccatggcgcagtagcgcagggagagagagggtgaaggtttggagaggctgtgctttttatggtgtccaaaggagaaacgtttgggatttggcgaaacgccagcgtttgtgtgtgagtgtgtgagagtttgctggggaggggtgtgtgtctctgaccagcattgactcaggtgcctcttttcttaaggccctcgagccgaatt

SEQ ID NO: 52940 - DNA, 418 bp, Glycine max
  Clone ID: PAT_MRT3847_18817C.1
gccaaaatgctactggtaccctccatgaccgtgagaataaaatgatgccaataaattctacatttggtccacaactagcaaactgtttcagacaagttgaaccggggtacaagcaaatacacaccaactgttccactacaagcctaagtgaggaagaaaaacaataacaaaaaaggataaacatgagaagcaatgaaattacaagagacctgccaattaatttatatagttacaactgcatggcttctgaaggatgaattcagcaaggcttaatttcaaaacctatgctcagaagcgttcgagctgactccattggtttctaacccccaagctccagagcttccccagttagtactccttcggggtccactgaccattgagtagaaattttcttgttttgtgggggatcggatttttt

SEQ ID NO: 52941 - DNA, 358 bp, Glycine max
  unsure (1)..(358): unsure at all n locations
  Clone ID: PAT_MRT3847_18818C.1
aaaaacaccacgcaaacagcaaggaggccacnnccgacaggaacangcnacnaaannangnccagnnnaggggangcncccacncggagncgncaagggggacaangnnnnngaagacccaganggccnnaaagaacagcncnngcagcnncgagccgcggggggggacggggggannggggangngnggggggggagcananaacngaaggggccnaagcagcangaagggagagccnacaggagnnngnnncagcggggncaagaanggggcgnggcacggcangccacnacggcacgccaacaagggggagggaaccgaggagaaagaggnaacaacccaaaggccnaggggggg

SEQ ID NO: 52942 - DNA, 122 bp, Glycine max
  unsure (1)..(122): unsure at all n locations
  Clone ID: PAT_MRT3847_18819C.1
cacaacanaaaacgcaagtncaattggcgtcggcangattnagagatttggntcgctgcctgaaacctaatggntnngnagnccaaaccggngccatcgnaggctgtcctcctgtgnccncg

SEQ ID NO: 52943 - DNA, 208 bp, Glycine max
  unsure (1)..(208): unsure at all n locations
  Clone ID: PAT_MRT3847_1881C.1
tcgaggctttcccattccgttatcattgcaggcccagagcggcagtcctgttttattattagnatgtgcccggcaaaaccacgagacgaggtgaattangtgttgtgacatgaggcatgaancatattggcacctgccatgatgatatcacgctgttacatggagaagtctataatttgtctgcgccttggagcctgattctcttgac

SEQ ID NO: 52944 - DNA, 382 bp, Glycine max
  unsure (1)..(382): unsure at all n locations
  Clone ID: PAT_MRT3847_18820C.1
aagaagagacgtttattttttttttgcaccaccaggangggcccaaggggaggggggtgcatttaattattaaaaagctgtaggatttttcctaccattaagggcacctaaattttggtcaaagggaaacatacaatgttcgggtgaacagaaaatttcccaaaactgggaatttaaacgccgaaactggcccggaataaaccggaaccaaaatataggccggcaacttatcactggctgggactaacaaaaaaaaagccttttttgcccgaaaaagtgacttaatgaaaagatcactcataccattaggatgagcaaacatgggaccagaaccttggggttcatgatagagaacccagggaagcttttgcgctttgtattc

SEQ ID NO: 52945 - DNA, 721 bp, Glycine max
  Clone ID: PAT_MRT3847_18821C.1
gtaagaccggatagaataaatcttataattggttctggtgggaaaaaagtgaagagcattattgaggaatctggagtagacactattgatacagaagatgatggcactgtgaaaatatttgcaaaagatttacctagtttagagaagtctaaagctattattaatagtttgacgatggttccaactattggtgatatatataggaactgtgaaatcaaatcaatagcctcatatggagtttttgtagagatagcacctggacgagagggactatgtcatatcagtgaactgagttcaggttggctacccaaggcagaagatgtttttaaagtgggagatcgcattgatgtaaagcttatagagataaatgaaaagggacagctgcgccttagtcaccgagcactgcttcctgatacagaagcttcaccgaaggatggtttagtggaagaaaagactgaacagtctaaggataagtctagcactcccaatgtcacagcctcttctaaaaggagttcagaggatgattctgtgcttccttctaaaaagtttgtcaggagattggtcagctcttccctggataagcctttcactaacaaagacaagacaaagaagagtagcaacaaagcagttggtaagtgtgtctggcaaagatgaaagcagtttggttagtggagaggcgtaaaactgataatatattttgcaaataagcagacaaatgatg

SEQ ID NO: 52946 - DNA, 213 bp, Glycine max
  Clone ID: PAT_MRT3847_18822C.1
agggatgcagggtctaattattctgctccaagcttattgaatacagaatgtacctcaaatccattcaggtccaaaggtgcagaaaaatcttcttgggaaactaaaagtaattctaataagacctcctcatggggggctgcagtggataaaactggaattgcttcttatgcagatcaatcttgtggcttgggaaaaggtggagggagcttgggt

SEQ ID NO: 52947 - DNA, 441 bp, Glycine max
  Clone ID: PAT_MRT3847_18823C.1
aagattgttatttgtcgtgtctttttatgcttttttttttttgtggggaattttttttttgaaaagagaaaaatggtttccccccctttttaaggggggggccattaaaataaagggggaaacatttttgttccctccttaaaggggggggccacaaaaaaaagcagaaactaacaacgggaaaagagggaccccaaaggggggcccggaaaggaactgcgtgggaataaaatgaaacgcaggttgtatcaagttaaccgcctgtggaaaaaaaaagggcagagtggaagttctcgggctaaaaacctccctttttttttgggaacgggttgaaaaagggtttcgccccagggcggggggggagaaattttgaacctattggcccctttattgggaggggggggggaatttgtcaccataggtttgaccccggggaaaaag

SEQ ID NO: 52948 - DNA, 359 bp, Glycine max
  Clone ID: PAT_MRT3847_18824C.1
acaatctccaaaagtaaaaaatgcattgattaacaaaaaatggcgcccaacataacttgtacaattaaattaacacagctgggcgcaatatgaacctaaacgcatacttgttacaatagcccggaaacactccctgcggtgcaaaaatgctgcattttgaaaccttgctcaagttgatcattacatcaagtaacgccatagcatcttctggctgggaaaggtacgacagcagctccctcatcaaaaccaatttgggcctgtcaagttacatacgaatcttagcataccgaccccatgtcataactcggctactgatatcgcggagcaaacccgcccatgtgagacgtaggtaccttctt

SEQ ID NO: 52949 - DNA, 590 bp, Glycine max
  Clone ID: PAT_MRT3847_18825C.1
aaacaaaaggaaaaaaaccccacattaccaaacaaaaaccccgggaaaagggaagggggggaaacccccaaaaaagcttggggggggaaaaaagtcccccacccacacaaatttgggttaaaaaaaaaaaaatttttattaaaaaacggtaaaaacattggggggaaagcccatcatcggggaccccataaaaaaaaaaacatccccgggttttttttactttttgggggccctaggagcactaaaacccacccggggggcaaaacccttcccagttaaaaagggaaaccgggggaaaacgccccccccaggcgccccaaagggggggggacccccaaaactgggggaaaaaaaacagtggcccaaaggggggccggggacggggtaaaattgggaaaaaaaaaaaaaaaatatcccatcaacgggccccaaaagggcaattccaggtttaagttcaatggccgggggatcgggcccggcccaaggggaaaaaaaggcaaaaaattttcccttgggagcaacattgggggtatccaaacaacaaaatagggacagggtggacttccaacccaacgggtgtgggggaaaaa

SEQ ID NO: 52950 - DNA, 332 bp, Glycine max
  Clone ID: PAT_MRT3847_18826C.1
ccgggtcgacccacgcgtccgcccacgcgtccgcccacgcgtccgtacgggtgagaagacgacagaagggattggaatgtgcacacactgcacaatatgggaaataaaaaaaacaaaaataaaaactgaagccattcaactcatgtaatagcacagttgcttccgattagatgcagttatcctggttagtggttagcattccgtaaagtaaccaaaacatgtttgggatgtgccttactaatctatatgggtgatttcagctgtctgatgtggatacttgtttacaaaaaaaaaaaaaaaaaaaaaaaaaaaaaagcggccgctctagagga

SEQ ID NO: 52951 - DNA, 374 bp, Glycine max
  Clone ID: PAT_MRT3847_18827C.1
gttgagaatctcggtggtgctgctctataacactgctatttccgcgtacaggagttttcttgaaagcgttgattatcttgagcgttcactccccccgattgacaaggatacacttagttacaacccaaatcactacgcttcacctgagttcttacatccctctgaggccccagccttagtaagccccgggcaagacaaatgccagctcaactaaaacacagctcgccacctgctgtcagcctagcgtacttactgcgccaactctgctacctaatgtgaaccttcctaatccaaatacaccttcattcaacttccaagatacatcactgccactaaaacagactctgggcattatagcttgcaccccaacacac

SEQ ID NO: 52952 - DNA, 475 bp, Glycine max
  Clone ID: PAT_MRT3847_18828C.1
taataacagtccacccattccttttcaggtagggtggctctcattcaattatccggggggagttacaaacgatttccaaccctatcctatcccttttccttgtcacgccatttccctaatttcagctttcttcgtttcaatcattcccctttctagttaattgcatattcttatcctaattacgatttttcaaacagagagatatagagagagagagagagttctatttgctgctatttcgcccccaattctatagaaactatgataatgatatagaaagaagaatcaacgtgagttcgctggtttaaaaatgttattcggggtgggggattgattaatgattgccctttgtttccatgtatttgttgtttgctacaaatagcactttactggttcttgaatggcacaggagaacaaactatggatattgatgcaatttctgggactattccgcccgtgagtgtcccaaggaaga

SEQ ID NO: 52953 - DNA, 286 bp, Glycine max
  Clone ID: PAT_MRT3847_18829C.1
gcgtccattcgtccttctctcgtacacccacgcgtgcgtccacagctttcttcaagagaaggagaatgcttaaaaagaaaggttgcgagagatatggcgaggggttagactgactaccaatggttctgtaactcacgcacctagcaggctacctactgatagacgacgagtggaacaccaccgactgcctaagagatctgcggtgtacgctacatctcaattggccctcataatcatgggcgtgtccctggaagaggcttgacatcacgagttacctacaacacct

SEQ ID NO: 52954 - DNA, 281 bp, Glycine max
  unsure (1)..(281): unsure at all n locations
  Clone ID: PAT_MRT3847_1882C.1
ccttatctttttaaatgctatattgaaaaggaaatgtctaaattatcactttcaagatgacgtggagattcattttgaattatagattgaaaatcccttgcatatactgaataacaatcaagcatataaaagggattttctgggctgatgtagcggattctgttcaatcccatgccttgaagtggcataatatanaaccctcttaggcttgcctatggcttgttgtataacagctgatgaacggggtagtactgggcaggttggtcgaagcaatggtcaag

SEQ ID NO: 52955 - DNA, 255 bp, Glycine max
  Clone ID: PAT_MRT3847_18830C.1
ctgatgttataataattaaattctcacatcaggtacctacctcgatttcctcagtgatatttattgaagattttaattagtcctggtttgtttgacctgcaccttaggtaatgccaataatattctgttttagatgtcttattgattgtttaactcatggctgtgcaaccccaaaaaatgcctcatgagtatgcctcagttttctatagtgtaatcatggcaaggtttttgtcaattttagtaccattaaaatca

SEQ ID NO: 52956 - DNA, 507 bp, Glycine max
  Clone ID: PAT_MRT3847_18831C.1
taatataatattgtctatattacaaccataataaacatgcatggatgatagaatcagatggatagaaagaagaaaaaaagtgcattcaattagaaatgaaacatcatagcatgcacccgtacatcctgtgttttgaggtagcaataatgttgttagcttagcctccctcgaacctcaaaaggagaaaagcttttgatcagattaagctccctaaggacatcaaccatactcattctttcctttggtgattccactgagcaagcaagtgcaatcctaaaaagtgaaagtaaacatttctctgcatttggatgcacagggccaagcttttcactgccagcagtcctttcgagttcactggggagaatagtcgggtccacaatctgcaataggttatttgaaattgaaaatttaacatgattatggagattatggccatctttaaatatttcatctgtgggtctccttccagttaatatttctaaaaccagaatcccaaagctatacatg

SEQ ID NO: 52957 - DNA, 477 bp, Glycine max
  Clone ID: PAT_MRT3847_18832C.1
ggcaacaaaacaaaaaacccaattccggaacaaaccgggccaaaattttacatttcaagggagcggacgggctggctacaaacaaaccaattgaaacaaaattctttcaccaattaagcttttggccgtataacatgagtggggtaaaaaatatcagcacccaaatggggaaaagacatcatggattttaagtatcatattgacaacttgagtgacaagaaagaggtggtggtgcttcccgaccaaagcttaaaaaacattttgctcacgcatgttattagggccaacattattacaatcaacgccaaagggggggttattatcctttattgggggaaacttaacaggggataagggtctaatggggaggcccccctttttttcaggaggggccattgggagggcctcaaaagcctccccaaatgctttaataccatattggtttactccaggggttttatcagcaggtgcctcccc

SEQ ID NO: 52958 - DNA, 1321 bp, Glycine max
  Clone ID: PAT_MRT3847_18833C.1
gaagatatgataaggtgctcaagcttcagtggacaccaaccaaccactaacaaaaccaaacttcccatcatcgaagaacttgattacccatcccttccttccatcatcccttccccttaaaccacatagccctcttctaatcccttctcacaaactcaaaaaacccttacactcatttcccttaatggattcgagtacaacaacctccacagacagtgaagtagcctatgacatcccacccatcctcaaagtctacaaaaacggtcgcatagagaggctagaaggcgtcgaggttgctcctccgggtctcgatcctgaaaccaacgtggaatcgaaagacatcgtaatctccgaaaaagacggcttatccgccaggctttacattcccaaaaccacttacgcgccgcagcaaaagcttcctcttttagtttacttccatggcggcgccttcataatcgaaacaccgttttctccgaactaccacaacctcctcaacaacattgtttcaaaggctaatgtgattggtgtttccgtacactacaggagggcaccggagcacccggttcccgtcgcccacgaagattcgtggagtgccctcaaatgggtcgcttctcacgtgggcgaaaacggtgttgaagagtggctgaagaaccatgcagattttgaaaaagtgttcttcgccggcgacagcgccggcgccaacattgcgagctatttgggcattcgggtcgggttagaagggttacccgggttgaagctcgaaggggttgttttggtgcatccttatttctggggtacggagccgctcgagtgtgaggtggagcaggctgaaggcgctgccaaggtgcaccagctgtggcggtttacgtgccccaccacaacgggatccgacgacccgattatcaacccgggtcaggatccgaatctgggcaagctggcctctgggagagtgcttgtttttgtggcggagaaggatttgctgaagggcagaggtttgtactataaggagttgcttgagaagagtgactggtctggagttgtggatgtggttgagactaaggacgagggtcacgtctttcatatgttggatccgaactgtgaaaatgctaaggctttgcttaaccagattgtttcatttatcaaacaggattgaacgttgttatgtgtgtgctctctgtcttttttatgtgttttaattatcctttttagttgtcaatgtaattgtgtatgcattctatcttgtatcgtatgatcgtatcaatcaagttaaagaaaagttgagtatttagttgattgaaaaaaaaaaaaaaaagattttttt

SEQ ID NO: 52959 - DNA, 375 bp, Glycine max
  unsure (1)..(375): unsure at all n locations
  Clone ID: PAT_MRT3847_18834C.1
acgcttgcgngagctcgggattgagctcgaggctgatccacacattccaatcactgatccatacatgtgggactgagaccatggtgagaattaccgtcccacaaggacattcaattcggacaccaatgcacgcttgaagctttaccctcattaagagtctctattgtcaaagagcagggaggatcatgtgaccggtaagccaaagacaattttctgtgagcacttacatgagcgtcgtgactcttcgcgcgacagtggtaggtatactatgcaggcacatgccaaggtgctactttgctatgagtggtagctcttggtgctattactatacgagagccactgaatgggggaggtggatgctcaagtgtagtacta

SEQ ID NO: 52960 - DNA, 245 bp, Glycine max
  Clone ID: PAT_MRT3847_18835C.1
ttcactctgcccggtttgacttttttgacctaggccactaatctaagggcagggttaagatatcccacattcagctcgggacctaacatgctgggacagtgataaaacattgccacatcaatattctctaacaattgctttctatgcaaatagaatacccgaaactaaccaatattatcctgagagggcccctattaattgacgagttcttctaaaaccaaaacacataactgaaagaaactata

SEQ ID NO: 52961 - DNA, 263 bp, Glycine max
  unsure (1)..(263): unsure at all n locations
  Clone ID: PAT_MRT3847_18836C.1
cgcgtcgcttcgcaccagtttcaatgtacgaatatgtttgctgntatggagcgatccgtgaaaaactctgcaaacaggttggtttatcaggacctcgttacaggtgatgacgttctctcggactccttgcgttacaaggaaattctgnatggaatgctgtgggaagttgaggggaagtgggtttgtaaaggagcagttgatgtagacattggtgtcaacacttctgctgagggtggaggagaagatgagggagttgatgatgc

SEQ ID NO: 52962 - DNA, 502 bp, Glycine max
  Clone ID: PAT_MRT3847_18837C.1
gtttttcaaaactggaaaggttaaccgtgccttcatcgcgcaggccggggcaattcctcatcttaggaacttgctttcctcacctaatgctgttgcacaggagaattctgtgacagcactgctcaacctatccatttttgaaagaaataaaagcatgatcatggaggaggaagggtgtttggggtcaatagttgaggtgttgcgattcgggcacacaactgaggcaagggagaatgctgctgcaacattgttcagcctctctgctgtccatgattataagaaaagaattgcggataatgtgggggctgttgaagcactggcttggttgttgcaagaggggactcaaagaggaaagaaggatgctgtcacagcattgtttaatctctccactcacactgagaattggttgagaatgatagaggcaggggcggtgaaagctatggttgtggctttggcgaatgaaggagttgctgaagaagcaactggtgccttggccttgatt

SEQ ID NO: 52963 - DNA, 657 bp, Glycine max
  Clone ID: PAT_MRT3847_18838C.1
acggcggttgaaggaggcgtcagatgtgtctgccagaatggatatgttggtgatggttttgctaatggaactggatgtttgcaggcctgcataaaggatggaaaggaagcatatggaagtgactgctatatcaaaagacatgatcaaaggaaatttgttatgattgccggaatcattggcccagttctcattgttgcctccctggttgtactattttatcttcttaaaaggccaacaaaaccagggatgtttgacacagagcaggcttactatcaaaacattacaatccccaaagcttgtaaaactcggttattcagcctccatgagctagaagaagccactaagggttttgaagagggtcagaaactaatgcatgacaataatgggacaattttcgctggagttttaggggatggatctcacatagctgtccacaagttaaagtgtgagaagaatgacttaatccaagtcctgtcacaaatcgaggttctatcttctgttgtgcatagaaacatggcccgaattcttggatgctgtattgaatctggcaacactctagtagtttatgagtatacttccaatggtactctggaggaacatttacatcaaagcaaaggacaacaacttcgtttagattggtatagtagattgactatt

SEQ ID NO: 52964 - DNA, 2072 bp, Glycine max
  Clone ID: PAT_MRT3847_18839C.1
tcggcttgtgacacaagaagatggccctgaagttgacggggagctcacacagcttactcgtggtgttgatgggtcttcaacaaaggctctacctacaatctggttagaagtgatgcgtttcttcacaaatcctcataaacctatgatcttagccttgtcaaggccagatccgaaaaagaacataaccactttgttaaaagcctttggagaatgccgccccttaagagaattagctaatcttacgcttataatgggaaacagggatgacatagatgaaatgtcctctggcaatgctagtgtgctcacaacagtgttgaaattgattgataagtatgacctgtacgggcaagtggcatacccaaaacatcacaatcaatctgatgttccagagatatacagatttgctgcaaaaacaaagggtgttttcataaatccggctttagtggaaccctttggccttactttaattgaggcagctgcccatggacttccaatggtggccactaaaaatgggggacctgtggacattcatcgggccctgaacaatggtttgcttgtggaccctcatgatgacatagcaattgccgatgcattggtgaagttgttgtcagagaaaaacatgtggcatgagtgcaggaagaacggttggaagaacatacaccttttctcatggcctgaacactgtcgcacttacttgacccgggtggctgcctgtaggatgaggcatccacaatggcaaaccaacaatccagaggatgataaagctgttgaagaagaagagtctttcaacgattcgctcaaggacgaacacgacatgtcccttaggctctcaattgatggtgacttggctgcagcaagtggaggcactggtctagatatgcaagaccaagttaaacgcatcctaagcaagataaggaagacagattctggctcaaatggtaatggtggtggaaatatcaatatgctgcttgacaatgtaacgagcactagcactagcactaacactagcaaatatcctctattgagaagaaggcgtaggttgattgttatagcacttgatttgtatgacaataatggagctccggagaagaaaatgattgagatggtgcaaaagataattaaagctgtgcaactagaccctcaaactgctagagttacagggtttgctttatcaactgctatgccagtgatagaaacagtagagttcctaacatcaggcaatgttcaagtgaatgagtttgatgctttaatttgcagtagtggaagtcaagtttactaccctggcatcaatacagaagaaggaaagcttttgcctgatccagattatgaggtacatattgactatcgttgggggtgtgaaggtcttaagaaaaccatttggaaacttatgaatggtgatgagaacagccccattgaggaagatctcaaatccagcaatgcacattgcatctcatacaaaataaaggatcttagtaaggcaaaaaaagttgatgagttgaggcagaagcttaggatgagaggtctacgttgtcatcctatgtactgcagggggtcatctagaatgcatgtgattcctcttcttgcatctagagcccaggcactcaggtatctctttgtacgttggaggttgaacgttgcaaacatgtacgtcatccttggagaaaccggggacacggattatgaggagatgatttctggaactcacaagaccataatcatgaagggagtggtgtctaagggttcagaagagttactaagaggtccaggaagctaccaaagagatgatattgtcccaaatgagagccctcttgttgcatccattactgaaacaacacatgaaaacattgctaatgctttgaagcaactttccaaatctggaggaatctgaagtgctactatatattaagtaataaatttatgagagtggtatgaatatcttcacatatgtggtcactttcatatattacacactttatccatatctattatttttttatatcttatttttcttattggatcatatcacttattatatatactcatatttatatcaaaaaaaaaaaatgcataat

SEQ ID NO: 52965 - DNA, 466 bp, Glycine max
  Clone ID: PAT_MRT3847_1883C.1
gaaaagttagggtgtgtgttcgtgaaaaggaaatggcgcgattcagcgagagattgaaattgataagttgattgagggtgagattcaatgagaagtttaaactgatgagttgactgagggtgagattcaaacttcattcgtgattccgaaggaagatcgagacaagaatcgcaactccgtcgaagtttcgcttgtcaccgttaagaaccgtcgaagtttcgtgaaaaagagagctctcgattcagagaagtcaaagattgaaactccttcatcagcgattttgagagaagatcgagtaaagaattgcaattccgagagatggaaactccgtcgaagtgtcgcttgttgcaatttagaaccggtgaagtttcacgtcgtttctaaggaactgctgcagtcttttttgcagcttacaagtccacctcttttttcagcattgttgtcctgtgtagaatagtcttcaagt

SEQ ID NO: 52966 - DNA, 209 bp, Glycine max
  Clone ID: PAT_MRT3847_18840C.1
attcccgctggacgccactcatccctctaatataattctcactaacttttctttccagaaaactttatagatatacaggaatgtctcttcaacaagttgtttgttcaaaaacctttaatccttctttattactatttttataacattccaattccatacttacaatattttccctctcctaatttacactccctcattttcccttactt

SEQ ID NO: 52967 - DNA, 408 bp, Glycine max
  unsure (1)..(408): unsure at all n locations
  Clone ID: PAT_MRT3847_18841C.1
aaaggtattttgacacataagttaaattttcgactcagaacaataaatatgtattttatatcaataaacagtattttatcttgatattatcataattatttatatatattttaatgaacccttgaatctatgagctttggtacattgttacccatttaggtaatgttttgataattgtcattaaggtttatgctaacagcctcaatgatatttatctataattaataatcatgctttattggttttcatcatggttttttacctttgggtgtttgggtactcggctaggttgaatacttgatcgtcatgtcaaatacttaggcaaggttgtatgtagcttttagagatatccangtatttgacttggccaattacccaaatatcgagtgtggtgttgataagcaccta

SEQ ID NO: 52968 - DNA, 214 bp, Glycine max
  unsure (1)..(214): unsure at all n locations
  Clone ID: PAT_MRT3847_18842C.1
ctttgaatctcgaatcgatttctcaccttttcttntctaaancnacattgttcacttttgttactcttaaaagagcaaatggtacacaacacttctctattaaactcttttctcccataattatttacaaacttatttctttattcctactcatcttccctatatttattcctattactatcttctaaataatacttttttcataacctttttt

SEQ ID NO: 52969 - DNA, 1131 bp, Glycine max
  unsure (1)..(1131): unsure at all n locations
  Clone ID: PAT_MRT3847_18843C.1
tacggctgcgagaagacgacagaaggatacggctgcgagaagacgacagaagggcttcttcattgaagcttttgctagttattgggttgcttgtgtgttccattttatttgctgttgcggcaataatcaaagcccgggctttgaagaaggccagtgaagctcgggcatggaaattaaccgcgttccagcgcttggacttcactgttgatgatgttttggattgcttgaaggaggacaacataatagggaaagggggtgctggcattgtatacaaaggggcaatgcctaacggggataatgttgctgtgaaaaggttaccagctatgagcagaggatcttcccatgatcatggtttcaatgctgagattcagacattggggaggattcgacacagacacattgttagactgttgggtttctgttcaaatcatgagacaaatctcttggtgtatgagtacatgccaaatggaagtttaggtgaggttcttcatggcaagaaagggggccacttgcgtccgtacaccaggtataaaattgcggtggaggctgccaaggggctttgctatctgcaccatgattgttcgccactcattgtccatcgtgatgtgaaatcaaacaacatccttcttgattcaaatcatgaagcccatgttgctgattttgggcttgctaagttcctgcaagattctgggacatctgaatgcatgtctgctattgctggttcatatggatacatagctccaggtaccgttgaattttgacataattaatgcatcatatgcatggttgtggcaaatttcctttttctcgcctaatcataattgtacgtttaagcattttgttcagaatttgactctttgacttatgcatgatattgaggtgatgcccctaaatttattaacattgctatgtggtttttcttgactttggttttctatcatacccaattgattcgcccccttattttgtttttttttctaagccaagtactgaaagtaaatggtaggtatctctgcaccgtttgattntttaccctaaccccctctccccacctatgaagtagataatgctgtagtcgtaggttaagagtcattcacaatcggaaactgatggttatgggcaaaaacatca

SEQ ID NO: 52970 - DNA, 4130 bp, Glycine max
  Clone ID: PAT_MRT3847_18844C.1
ggttgtgttttctgagtcctttcactcactcagggtcagtgctcagtagcagacactcaaatatagagtttgatttccatttccattctcagacagaaaatgcgagtcctcgtcttgttcttccttttcctccactccctccaagcagcgcgcatctcagagtaccgcgcgctgctctctttcaaagcctcctccttaaccgacgaccccacccatgctctctcctcctggaactcctccactcccttctgctcctggttcggcctcacgtgcgactctcgccgccacgtgaccagcctcaacttaacctcgttatctctctccggcactttatccgatgacctctcccaccttccgttcctctcgcacctctccctcgccgacaataagttctccggccccatccccgcctctttctccgccctctccgccctccgcttcctcaacctctccaacaacgttttcaacgccaccttcccttcccagctcaatcgcctcgccaaccttgaggttctcgacctctacaacaataacatgaccggagaacttcctctctccgtcgctgccatgcccctcctccgccaccttcacctcggcggcaacttcttctccggccagatccctcccgagtacggcacctggcagcacctccagtacctcgccctctccggcaacgagctcgccggcaccatcgcgcccgagctcggaaacctctcctccctccgcgagctctacatcggctactacaacacctactccggcggcatcccgcccgagattggaaacctgtccaacctcgtccggttagacgccgcctactgcggcctctccggcgagattccggcggagctcgggaagctccagaatctggacacgctgtttcttcaggtgaatgcgctctccggctcgctcacccccgagctggggagcctcaagagcctcaagtccatggacctctccaacaacatgctctccggcgaggttccggcgagttttgcggagctgaagaatctcactctgttgaacctgttccggaacaagctccacggcgcgattcccgagtttgttggagagttaccggccttggaggtgttgcagctttgggagaacaacttcaccgggagcattcctcagagtttggggaataatggaagactcactctcgttgatctttcttcgaacaagataacggggacgcttcctccttatatgtgttacgggaaccgtcttcagactctgataactctcgggaactatctgttcggtcccattcctgattcgcttgggaagtgcgagtctctgaataggattcggatgggagagaactttctgaacggttctattccgaagggtctatttgggcttccgaagcttacgcaggtcgagcttcaggataatcttctcacgggacagtttcccgagtatggttccattgccactgatcttggccagattagcctctctaataacaagctctctgggccgttgccatccaccattgggaacttcactagcatgcagaagcttcttcttgatggtaacgagttttcgggtcgaattcctcctcagattggtaggctgcaacagctttcgaagattgattttagtcataacaagttctcgggtcccattgctcctgagataagtaggtgcaagcttttgaccttcattgatctcagtggtaatgagctctctggtgagattccaaaccagattacttccatgcggatattgaattatctcaacctttcaagaaaccatctagatgggtctattccaggttccattgcctctatgcagagtttgacttctgttgatttttcatacaacaatttctctggtttggttcccggcactgggcaattcggctactttaactacacttctttcttagggaaccctgaactctgtggcccttatttgggtccttgtaaggatggtgttgccaatggccctcgacaacctcatgttaaaggtccattctcttcttctctgaagcttttgttggttattgggttgcttgtgtgctccatactattcgcagttgcggcaatattcaaagcccgggctttgaagaaggccagtgaagctagagcatggaaattaaccgcattccagcgtttggacttcactgttgatgatgttttggattgcttgaaggaggacaacataatagggaaagggggtgctggcattgtgtacaaaggggcaatgccgaacgggggtaacgttgctgtgaagaggttaccagctatgagcagaggatcatcccatgatcatggtttcaatgctgagattcagacattggggaggattcgacacagacacattgttagactgctgggtttctgttcaaaccatgagacaaatctcttggtgtatgagtacatgccaaatggaagtttaggtgaggttcttcatggcaagaaagggggccacttgcattggtacacaaggtataagattgctgtggaggcttcaaagggcctttgctatctacaccatgactgttcaccactcattgtccatagagatgttaaatccaacaacatccttcttgattccaattttgaagcacatgttgctgattttgggctcgctaaattcctgcaagattctggagcatctgaatgcatgtctgctattgctggttcttacggatacatagctccagagtatgcctacactttgaaagttgatgagaaaagcgacgtgtacagctttggagtggttcttttggagcttgtaacaggcaggaaaccggttggcgagtttggcgatggtgtggacattgtacaatgggtgagaaaaatgacagactcaaacaaggaaggagttctaaaagttcttgatcctagacttccctcggttccacttcatgaggtgatgcatgttttctatgtagccatgctgtgtgttgaggaacaggcggtggagaggccaactatgcgcgaagttgttcaaattctgaccgagcttccaaaaccaccaagctccaaacaaggagacttaacaatcacagaatcctctttgtcttcatcaaacagtttagagtctccaaccacggcatcaaaggaacccaaagatcaacatcctcctcagtcgccaccaaccgatctacttagcatttgaattttgaagtgctcagttggggacagggttgtgtttcatatttatttcgtttgggttgtgatagcttatcttatctacttgctttcttcagttttcttttcttcatttggggtagggttttcttttaaggtgttaaatgtttgaatgtttattctctctttaatgtttttgtaatttgtacagtaggattggtggtgggagtatttttcttatataaagtctttgtcttcatcatgtagcacttgttttatggtacgtacagcgctgttgctgttctgatcctgcaccggggaacagtgtaaacatcgtgagaaagttttttttattttattttatggggtaccattgacaaggagagtgacaggggtatgcaatgacaccatcgggtttggtattaaaagagagaaatgtgtacgtcgcttataatactatttatgaaaccagagaggacagaagcaacgtttacttagcatttgaattttgataagatacacgaatgtgtgccactgccactatggctcaatgattatatatgaacccaggaagaagcagtgaaaaactttcctttgggtgatgaacaccttttaagggactcttaacattgaaggcacttgctcagaatcacgcaaaaaggtctgcaagggtctctttcactgttgagatgtaagaaatgtagcttccaatgtttaacaagtatcacaaggggatgggccagattcagttatagtgcttatcctcataagaaaagggtgtaatactgatactgagtgattaacaaagggaagacatgcttgatcaaaatttctgctatcatgttaataatggtcacataattgctgaagtacaagtgaatagagatggacatgttgaataacatataagtaacaaagactcacatatttaattacagtgtattcgatttcgcgtttaaacgtgatttgatgtttatttgtgtttagacacgtaccaaacacacaatttaatgatgcattgcattt

SEQ ID NO: 52971 - DNA, 251 bp, Glycine max
  Clone ID: PAT_MRT3847_18845C.1
cacccatcttgggaggtgaggattttgataacaggatggtcaaccactttgttcaggaatttaagagaaagaacaagaaagatatcagtggcaaccccagagcacttaggaggttgaggactgcctgtgagagggcaaagagaactctatcttcaactgcccaaaccaccattgatttctactccaccattactcgtgctagatttgaggagctcaatatggatctcttccgcaagtgcatggaaccagtt

SEQ ID NO: 52972 - DNA, 1779 bp, Glycine max
  Clone ID: PAT_MRT3847_18846C.1
gcacgaggggggtggtacttttgatgtctctttacttaccattgaggagggtatctttgaggtgaaagccacagctggggacacccatcttggaggtgaggattttgataacaggatggtcaaccactttgttcaggaatttaagagaaagaacaagaaagatatcagtggcaaccccagagcacttaggaggttgaggactgcctgtgagagggcaaagagaactctatcttcaactgcccaaaccaccattgaaattgattctctctatgagggaattgatttctactccaccattactcgtgctagatttgaggagctcaatatggatctcttccgcaagtgcatggaaccagttgagaagtgtttaagagatgctaagatggacaagaggactgtccatgatgttgtacttgttggtggttccaccagaattcccaaggtgcaacaactcctgcaagatttctttaatgggaaggagctctgcaagagcatcaatcctgatgaggctgtggcatatggtgctgcagttcaagctgctatcttgagtggtgagggtaatgagaaggttcaggatcttctccttcttgatgtcacccctctctctcttgggttggaaactgctggtggggtgatgacagtcttgatccccaggaacactactatcccaacaaagaaagaacaggttttctcaacctattctgacaaccagcctggtgtgttgatccaggtttatgaaggtgagagaacaaggactagagataacaacttgttgggcaaatttgaactttctggcattcctccagctcccaggggtgttcctcaaatcacagtgtgctttgacattgatgccaatggtatcttgaatgtctctgccgaagacaaaactaccggccaaaagaacaagatcaccattaccaatgacaagggtaggttgtcaaaggaagagattgagaagatggttcaagaggctgagaagtacaaatcagaagatgaagagcacaagaagaaggtagaggccaagaatgcattggagaactactcatacaacatgaggaataccattaaagacgagaagattggaggaaaacttgacccagctgacaagaaaaagattgaggatgccattgagcaggccatccagtggctagacagcaaccagcttggagaggcagatgaatttgaggacaaaatgaaggagttggaaagcatctgcaaccctatcattgccaagatgtaccagggtggtgctggtccagacgtgggtggtgcaatggacgatgatgttcctgctgctggaagcggtgcggggccaaagattgaggaagtagactaaatttagtttatttctgcttttgatttactatttatttttaaatgtctgatttcatgtcctttggttggatttagtttctcaagaaagacaatatttggtagtatgtcatgtcgatttatgttttcagtatcatgttacccttttcagttttcactgtgttttagtggacacatacaggctttaaagcttatgttataagctggttttttagtatgtttatgtttctatagcttgttcgttacggataacttaaagttctaaattcgtatctgatgagtcattctacattcctacgaatgacctcttgaaaaattacacggtaaatggataacggaggatagcgttctgaagctatttttatgccccatcaatatcttaaaataatgtgaggaaagcataaggccctagcttcaatttgttttcgtatccactgttttttaaaa

SEQ ID NO: 52973 - DNA, 314 bp, Glycine max
  unsure (1)..(314): unsure at all n locations
  Clone ID: PAT_MRT3847_18847C.1
aggatcgcgctgcgccgtggtttccagggttctttatactgactttatggctgagggaccacaggatacattagccgttcataatctagccgtacagtcttacctggaggccaagctgtgatcacatctttttctttgggaaagaatctgcttctgaccacaacatncttggccggctgcactcgcatggggtggctgatgggatacctgaatctacagtttctgcgcatgcttcaacaccagaaggcgtgcacggtttcaggactaagcttctgtggggtctggctctcccctggtgcatcgatatcagctgc

SEQ ID NO: 52974 - DNA, 328 bp, Glycine max
  unsure (1)..(328): unsure at all n locations
  Clone ID: PAT_MRT3847_18848C.1
aagtcaatgtatattaagatctcaagaagaaaagctgagagatctccngtnnttgctgttttttctcccttgaacaagggcatggaacaggaattctggtgtcttaaacggtgcccttttcccgagcagcctcggggcaaccactcatttcctgtgacgcccatgttttgttccttatctcttgacacctcttctccttctttacccatgaacgatttcctccacggggatccccttctgccctcgcaccatgtgagccacctcttttcccctgctcactgatccctctgtttggttggtgtgcaccccccccggccgctaggggccc

SEQ ID NO: 52975 - DNA, 177 bp, Glycine max
  Clone ID: PAT_MRT3847_18849C.1
acgagtataggaaattatcctaattcgtgtgtcatcttggcaccatactttgtttatgggatcaatgggctcacccaccctataggatctttaagtccttcaatacgaggactctcgacataaggtgtatcacgggaccaaaaccatgagtcattccacacattaattttttcatac

SEQ ID NO: 52976 - DNA, 738 bp, Glycine max
  Clone ID: PAT_MRT3847_1884C.1
ccacgcgtccggctcaagaagttgtagcacaagttttctgcactgactgtctctctgcatgtaccgtttcacttagcataaaataaaagtaattagtaaacataatgactaattggacgggtgaatgccattgcttcaacatggtgtcattttgcttttattgtgtttaaagtccctgcttaggttacatgaatgaaattgtagcatcaaaggtacttggacttttgcttttatgataaggatgaaaacatgttttatgtagagactatacttttgtctattttcagatgctggtgcatggaaatatgttgagcaaaatagacgtgcttattttaatacaatgcaggtaaccttttttctctctcacccattaactttagttattaattttgctttcatgaatagctcaatatgcatgcttttgagcaaaatagacatgtttttccattatgtgtatatcacttatatgattgtttgtctactgttttgagagagtgagtagttgggatttagtttgatagactaggttctcaacttgtattttgaacaatgatgaagtcttgcaatttacttactccatggatgacatgacagatggataattctgtccaaaataaaggaagtgaaatagtgcattttataatttaatcattgatgtcaacttcaccaaagatgctaaggcaaggtgcatgaagggtttgtacccttcagcaggtgcttgctgtttttcaatttttg

SEQ ID NO: 52977 - DNA, 241 bp, Glycine max
  Clone ID: PAT_MRT3847_18850C.1
gggggaaaactgataatctcttaatttatcattgtacactacaaacagtgagaaaaaaaaatgtatatactttaatgtaaactagactccgaggtgcatgagttgagttcctccaagtgagaaaacctgtgaaaaaaaaatgccataagctcatctgaatttggcagtacaaagttatgtttgctacacgtctctagcatattttgttctgctaagataccaattgttcacttttagcctt

SEQ ID NO: 52978 - DNA, 482 bp, Glycine max
  Clone ID: PAT_MRT3847_18851C.1
ggaagaatcggggaggaagaaattaaagagattatcttgccttagcgccactaccaacaacttgctacatacagaagcaggcagaggatatgcggattgatatggagactagacgtgaagaccacgatggatcatggttcacgatctagaatgctcttgttgcatggaccatcccattctactagaggagatggcaagtacctgagacacatgcttagcttatcgcttacccctatagatgaggactatcctattacgaggtggtacaaaagcaccgggtgcttgctgcaggataattggcccataacttgggtatcgctactgtggattggcgagatgttagggctatttgcctacaaaaaagcgcagggacaagacaacctgcatatgaagtgatgggccattgagtatgcatggtcaaaggtgcacccgagtcacttagcttgaacatggctattatcttgctaccggtttgccgaaac

SEQ ID NO: 52979 - DNA, 238 bp, Glycine max
  Clone ID: PAT_MRT3847_18852C.1
taccaaacaaacaaacataaataacttactttaaacttaaataaatataataatgggctggttcattactaagcgatattatctcactatctttatcctataaatacctatattttacttatactatcttattatttctactcttaaattatcccttcatcctcttatattatcatccaatcatttaactaattctttatatatctcacctttcatttcatccaattatttcataaaa

SEQ ID NO: 52980 - DNA, 914 bp, Glycine max
  Clone ID: PAT_MRT3847_18853C.1
ccctctttttctggttttttttttctttttttatataaaagatatatctgattattataataactatagaattcttttttgcattcggtgcaatcatataataatttcatgctgcaatctgcatcatagcagccacgaccgcaatttagaactatggattgtactgtgcaaatcatacagaaagaaaaatttccagtcatggaccttatacaacatcatgagtctaatgtcattgacattactctgacactagagaacattggccttacaagatacgactcgaattgaaaggtgatatccagtacaaaatacaataaaacacttcacaacaaagcaaaaaagttcccccagatcaggcatgcaaaggacactttacatatcagacacaaaagatccaaaaacaattttaaaattaaacttaatgcaagttaacacctcgtcccgatcattcttcagtgtcatcttcagagagtagggtcccggtggagtaatcgaaggcaatgtttgggtgtgagaaatcagaaaattgccattggcaacaggacaggatacttcatgacagagatcaattctttcagtatggacaggcaccccaacgtatgaaactccaattacaacttctccaccataaatagctttactagaagtagccgagatcttaaaggtagcaggcttgccactctccacagggtctggtgatatttcaactccagacaccttcacaggatagtctgccttcttatcgcagtaagtgactttagttttagcttgagcgtgaaagggtgcaaggaagagaatggttaaggaaagaagaaggtagaatctggaaagagactgaaactccatcgattacttcaaaagggtctttggaatagaagaagagagtttgggaagagaagagacacaacacaacc

SEQ ID NO: 52981 - DNA, 370 bp, Glycine max
  Clone ID: PAT_MRT3847_18854C.1
cccacgcatgcgtagaaaacgataatccccgtgcatatatatatatatatatatatatatatataagttctactaggtggggggaaacgcggatacccctgaggatacataggctgcacggaacaactgggcagaaggaatcgtattatgccgaaaatagcacatcggttgtgtatccgtactcaatattagtgcatcagattacaatttctacatctgacatgttatataagagttccgaactaattgttctgggcgacagaaatacgaacaagattcttttatttactcttcctcacctgtacttgaagcagctcttcgctttggatgacaggattcaggctgtgatgcagatgattatggctcccac

SEQ ID NO: 52982 - DNA, 388 bp, Glycine max
  Clone ID: PAT_MRT3847_18855C.1
tcttgtccgcccaagcagaaacactagcaggggggatcttatgggatcatgtgggcgatccccacccggacaggaaaggaattgcagcctagcgcagcgtggacaccgatctggtacgatgtgaaaatattgacgggcgcacggatggagttaccccagataacatgagctgcacactcatgtgaaagggccgtaagagagcatattgcgaagaacatagcgggaacagagagtccttgtgtcaaccaccatccacggagcaaatagtctgccaataacgggggcaaggccaagaagttccatgaattccacacacccaagaaaggctaccacgaggcgtattgagttggcaattgcacggtgcccacaagtgtaaagatttttaact

SEQ ID NO: 52983 - DNA, 522 bp, Glycine max
  Clone ID: PAT_MRT3847_18856C.1
ggctcgagttctatccaaagattttgagaatgtctagctgtgggtgtggaagcagctgcaactgtggcagcaactgcaggtatggaatcgtttttgcttctttttttctaatatgctcgattaaccttcaaaactatttttttaaacttatattctaataaaataaaatttgtgttggaaacgaatcttaacatgttattgctttctcaaaaatatgggatttttttttcttgctttatcatgaaatgttctgattggtttttcggatacccttttgatttaattgtgtgtgaatattgttactttatttttctgactgtacaagtttctaaatgataggatttgctgcatgtgagtattttgattggatttttagcaccctttgttttataaaattaaaattagatgctttttttcctccctatgtacatgggcttataagggtagagttctcctatcttttaggctctgctttcttttcaaaccgtttctctctccaatgataaattttatggttattat

SEQ ID NO: 52984 - DNA, 858 bp, Glycine max
  Clone ID: PAT_MRT3847_18857C.1
gggtttctttgggtagcagtagcacgagcactagcagcggctcgaccgggtccggttcgggtcggaacggaaacaataacgcggtttcgaagagatctcattctggtgagttgtctgggtcgagcgagaccaatagtccgacccgggtttcgaaaccgggtcaccggagatccaattcgggtcaaagccagagatctccttcgtcgtcctcctccgctgtcaattctccgccgctgaacgttctcccggccgggaacatctgcccgtccggaagggttctcaaggcggcgaccgcggccgtggcgccaagccggagctccaggtcggatgttctgggctccggcacggggaattacggccacgggagcataatgcgaggtggaaaaggtggcggcggcggcggcggtggtggtggtgatgtgaggatcgctggcgaatcggcgaagggcgtggatccggaggaggtgaagaggattgggaatgaagagtataagagagggcactttgttgaggcgttgtgtttgtatgatcgagcaattgcaatgtctcccggcaatgccgcttaccggagcaaccgtgcggcggcgttgaccggtttaggacggttgccggaggcggtgaaggcctgtgaggaggctgtggggttggatcctaattatgggagggcgcatcagcgcttggcaatgttgtttctcaggttaggacaggttgaggatgctaggaagcacctttgttatcctggcctgcagctggatcctgctgagttgcaaaagttgcaaattgtggaaagcatattaacaatgtggggatgtacggaggatactagattggaaagggtactgagggaggttgatgctg

SEQ ID NO: 52985 - DNA, 316 bp, Glycine max
  Clone ID: PAT_MRT3847_18858C.1
ggctcgaagcctccccttgagttttttttcccctcaagtaaattttttatgagaaccttaatttacttctggagagaaaaaaaggttctcataaaaaatttacttgaggggaacctttttttctctccagaagtaaattaaggatacatcgtgtagttggttatatgattgtacacagcatagcatcctccccaaaaagtaaaagaatattaatttttcttttgctcattggttgcagcattgaagttctagcagtgttcaagaggggccctcagaaaaagaacccagtggataaagaggaaaaaaaagagattgg

SEQ ID NO: 52986 - DNA, 352 bp, Glycine max
  Clone ID: PAT_MRT3847_18859C.1
gaaaaacgaaaaagcaaattgtcactatatattgaggatcacagctgccataatattgagacataggaactggagcttccatagcattcaccgctacactacctagactcgttgacaggggctacaagcttacaacattgctacactgcaaactactattatgattcattacagtaaaaaatttcgccccatgctagaactgaaaaattgaaaattaaagaatatttataactaaaggacacactagcaaggcaaaatcgggttttagagaggggggacatctcaggtataccaagccatgtggccaaccacttgaagctgaaatctttgatgggccgtcttttgctgggtg

SEQ ID NO: 52987 - DNA, 306 bp, Glycine max
  Clone ID: PAT_MRT3847_1885C.1
atctgaccactattttatctttgggtttttgtttttttggaaaaaaaaaagccctaaacccttcgaaacccccccccaaagacagactcatggggccccaaaacataccaaaatcccgaaaaagattttcggggccgggggtgaaaaatacccctctttgccgggggttctcaataaaacccaaccaaggacccccgggaaaaaactacttttggttaaaacctcatttcccggggggtctttcctatttttatacccatagccccaataattagcattggcatatggggattggtgggccctgcc

SEQ ID NO: 52988 - DNA, 543 bp, Glycine max
  Clone ID: PAT_MRT3847_18860C.1
gttttggaagcttgttggtgacatgaggagtgccgggtttgagatggaagctgcgacgtttgttaaggaattagggcggttttgtaagaggagaatggtgaaggatgctgttgagctttacgagtttgctatgggcggtgcaaataagcctacggtacagtgctgtgtctttctgttgaggaaggctgctgctgggaaagagttggatacggatttgttttcaagggttttgaaggtttttactggaaatgggaatgtgtctactgattctgtggctaatgctgtgctgaagtatttgaccaatgttggtaggactggggagtggatcaaggttttgaaagaaatggaagattgtgggactgttgctggtggtagtttacagagtaaaaatgcctataaacttcgtgctgcgggtaacaaggaacacgctcatgagttcatgaatagaattgaggtgtctggatccaatctatatcgcaagacatgagaatctttaatccacgggtactgtgtagctgcgaacttcgataaagcttttgaatc

SEQ ID NO: 52989 - DNA, 321 bp, Glycine max
  Clone ID: PAT_MRT3847_18861C.1
aaaaaaaaaaaaaaaaaggggggtttttgaaacatgtcagagggcaagccccatacaaatttaaaatccaaaatgcttttcacttttcagcaaaacattactcaacgggaagagaaaaagattccccagtttcgggctaaaccagttaataaacatgtcggagtcatgctgttttttttgcatttccaagattccccagttttttttttttttaattcagcatcaataacaatctgcaaaagggggcttaaattttcggtaaaacagttgacagatccggtgggacatttgaacttgcctgaaaattttttggcaacattg

SEQ ID NO: 52990 - DNA, 550 bp, Glycine max
  unsure (1)..(550): unsure at all n locations
  Clone ID: PAT_MRT3847_18862C.1
gtgcangtacncgtacgtaagctcggaattcggctcgagtgcaaggctgtgttgcagggcccggaaggctcactgttccgaaatggccgagcagtcagacaaggatgtgaagtactacactctggaggagattcagaagcacaaagacagcaagagcacctgggtgatcctacatcataaggtgtacgatctgaccaagtttctcgaagagcatcctggtggggaagaagtcctaagagagcaagctgggggtgatgctactgagaactttgaggacgtcgggcactctacggatgcacgagaactgtccaaaacatacatcatcggggagctccatccagatgacagatcaaagatagccaagccttcggaaacccttatcactactgtcgagtctaattccagttggtggaccaactgggtgatcccagccatctcagccctggtggtagctctgatgtatcgcctctacatggcagaagattaacctgtctgtccgaagccaaggaaggaaaagactgccccagagaggggagaaaagaagccagtg

SEQ ID NO: 52991 - DNA, 452 bp, Glycine max
  unsure (1)..(452): unsure at all n locations
  Clone ID: PAT_MRT3847_18863C.1
ctcaatcttcattccccattcttactactgtgaccatttcagcattggagaccgaatcggtgcaagttaatgcagtgcaggggtatacattttcatcaaatcttcttggaggttctggcaggataatcccagagagtgtgatctacagttatggaactgttcttctggatcttctaagtggcaagcatattcctccaagccatcatactatgggaaagcgcagaaagttgaatatcattcagaatgatggtcaatcacaagcaaaagagcaatcaattgaaagctctactgaagtgaaccaaaataacaactctatacttgaagaaaatgcacaatttgaagaagaacaacacatacaagaagatagtcatgttcagtctcatacttctcttgaaagtgcaagtgaaagttcaactaangataaaaagaagactagaggttatacacatatg

SEQ ID NO: 52992 - DNA, 364 bp, Glycine max
  Clone ID: PAT_MRT3847_18864C.1
aaacccaaaacaggccaatattattgatatttgttaatagaggcccttgttttttaaacatgggcaactacccgggtaattttacattgctttcttggaaagggtaatgggaaaaaaatgacacatattttttttcattgggggaaaacgagggggaccccaattttttgcaacctcagggggggggagtttttttttttttttgaatgggggggggggcattttggttttattacaggggataaccagtttgatgtattttttgggcggataaaaaaacctttttagtttttcctttttaacccccaccacttttttaaaaactttgatttttaaaacaaaaaacaatggtggtaattggggg

SEQ ID NO: 52993 - DNA, 377 bp, Glycine max
  Clone ID: PAT_MRT3847_18865C.1
cggccggaatatttgcgggatcgactttcatattagccggagggcgcccttttggggtgtgtttgctttaggccagtcatgtggatcacaaattcacgtcacaaaaaatgctgaaggcccatttgagtgatgtcccagagccacgaacagtcaggggtaacgaatgcgttaccaaacacactgatggtcacaaattgtgcagctcattgaacattacggtgcgcttatcgcaagggataagacgtggtttagagtgggcgtgctacaccctagacgacagactgggaatgattcccataacttaccctccccttgaagcaagtcttaaatactgtggatggagcagggtgatggttcccctcggccccaaaaagcaa

SEQ ID NO: 52994 - DNA, 354 bp, Glycine max
  Clone ID: PAT_MRT3847_18866C.1
gccacacatccttcttgaccagctatacttgatgcttaagaaggttataagagattcgcgtcaaacaatggcagctactcaggaagatgtgaagctcttgggtattgtgggaagcccatttatgagcagggatcagatcgcccttaaggagcagggagttgaatacataatttactggaacaaaatctgtgcagcatgagtgatctgcttcttaaatacaaccttgatcacaagaaggttacagtgcatgatcacaatgagcaagccatagcagcagtctcttgagattcgaagagtacattgcatgagacatggaagaacaaccccatatggacctaagatccttaccaaata

SEQ ID NO: 52995 - DNA, 1134 bp, Glycine max
  Clone ID: PAT_MRT3847_18867C.1
atttgcaatcccttctagcagaatcaggagataactcgcatcttctgttgtccattttggtcaagcacttggatcataagaatgttgctaagaagccgatccttcagattgatattattaacaccaccacgcagcttgcacaaaatgtgaagcagcaggcttcagttgcaataattggggcaatatctgacctcattaaacatttaaggaaatgcctgcaaaatttagctgaagcatccagcaatggaaatgatgcatataagttgaatgctgaacttcagtctgccttagaaatgtgtatattacaactttcaaacaaggttggggatataggaccaattcttgatttgatggctgtgacactggagaatatcccaattactaccatcatagcaagatcaacaatctctgctgtctatcaaacagcaaaattaatcacttccatccccaatgtgtcatatcacaataaggctttccctgatgccttgtttcatcaattgctcctggccatggctcatcctgactgtgaaacacaaattggagcacatagtgtcttctccatggtgcttatgccatccatgttttctccttggttagaccacaaaacaaagattgctcagaaggcacagaatgacagcttctccactcagcatgaaactttttctggagctgaaaacttgaatgggaaactggaagaaggaaaggcaatagccagtgtcaatgggaagaaatatgtgattcatccatatcatcgctacagctttagtccgaagctaactgatggaaaagatgatcgaagttcactcaggctgagcagtcaccaagtgagtcttttgctttcttcaatctgggttcaggcaacatctgtggaaaatggccctgcaaattatgaggcaatggcacacacctatagcattgctttattattttctcgttccaaggtgtcaaattacatggctttagcaagatgttttcaacttgcattctccctcaggagcatctctttggaccaagaaagaggtttacaaccatctcgcaggaggtccctttttaccttggcttcatacatgcttatctcctctgccagggctggcaatgtccctgatcttattccaaaagttaaagcatcactga

SEQ ID NO: 52996 - DNA, 424 bp, Glycine max
  Clone ID: PAT_MRT3847_18868C.1
gattatcaaaaccaaaaatctcacatactttgggcgccaatatcctgccatcacaaagtctctctctctctctcctctttaggctatagctaccccactgtgatattttgctggtgaaaccacatatctaccagaagcagcctctccttttataggagaaaaaggctagagaactatccttttctttttttccttctctctcttctttttctctttctcttgaaaccctaatacttgatccttttcacaatctgtagtggtaatccaaaacccaggacaaagaaagaggcaagagacatagcaaagacttctctcaccctctcaagtcccaaacagagtaacttgtattcacaacctctctctgcaccaagtatattaaatgcatgatcatccgtggtctgtttattcccttgtttacgtaaca

SEQ ID NO: 52997 - DNA, 125 bp, Glycine max
  unsure (1)..(125): unsure at all n locations
  Clone ID: PAT_MRT3847_18869C.1
tatttgnagattctganacanccagantgtttntgatcatcgtcgtcgctgatctctgtntcctccgttactgtntctgattgcagaggcgaaaggttttngcatcaaaatcgattttgttgctc

SEQ ID NO: 52998 - DNA, 310 bp, Glycine max
  Clone ID: PAT_MRT3847_1886C.1
ttttttttatgttgaaacgtgcactttatgacacataaccctcgaacatttaatgggggatctggggcgagcatacatgccttatagaccaattccaacatgcatatgtagagtttaacaaatcacgaagtccaccaccacaaagctatctttttcaaagacatgaatctccatacccgcaatgaatacagtatatcctgcgggatcacatttataccgaacgtagccccccccaatattatattttgcaaccaactttaaaattaattaaaaattacaaacttgagtacatgacactactactactact

SEQ ID NO: 52999 - DNA, 212 bp, Glycine max
  Clone ID: PAT_MRT3847_18870C.1
attctgatgaatgctgtgctttctttaaaaaggggttattattttccattggaaaaagaaaattctaaaccatttttgggggccttcgcccccgggaaaatcaaaatttttaatcccctgggtctttcccccatgcaaaaacttgaccttattcatttgcttaaccttatcttattttccctcccataacccattgcaaaatatgaactttt

SEQ ID NO: 53000 - DNA, 101 bp, Glycine max
  Clone ID: PAT_MRT3847_18871C.1
agacacaacacaacaaggttgcaaagtgataaaggattaacccatgaaggctctagttaaaatcctcacgcggtgcatgattgctgacaccttcttatcac

SEQ ID NO: 53001 - DNA, 398 bp, Glycine max
  Clone ID: PAT_MRT3847_18872C.1
gaaacacgcacatgtttgaaagcttttttagcccatggtgcagttcatccgccaggaaggtgatgaaaaggccaacgagatctctgtctactccgaaaaggaattcactatcaagaagctacacttcgtctaagccgacaataaaaacatcatgctagaatacgaacgcagagatccccaaattgaaattcccaagaagattgagtactcgatgcagctaaatgcttgtcgaattaaagttcttcaagctcaatatgacatgatcagatacatgaaagaagctgcattcaacgaactgcagaatgtgagtcatcatatgcatgcgaatctactgagtcatcatcatcatgagtacagaaaccttctgaaagatcttattgttcattgtttgcttagac

SEQ ID NO: 53002 - DNA, 243 bp, Glycine max
  Clone ID: PAT_MRT3847_18873C.1
gtgaaaattttcgaacggaaaggcccagcagcggtcgggcagagattcaggccggagcacccgacacaccacacgtagggcgacatggaccccaaagcgcttaggccaagaaccataaccagcataggtcgacactgcaatgaaggaacagggtaccttggccaacagatgccagcaaccccgcgtggggctgaaactcaaagagggaaaggaacgaccccatgtccaaggaggtaactgggg

SEQ ID NO: 53003 - DNA, 971 bp, Glycine max
  Clone ID: PAT_MRT3847_18874C.1
aatacaactagtagtagaattttcatagctatagagagagaggttattgggttttagtagttcttacttgagggcttggtgattggttcttttccatgttcccctttccggggattcttctcttttccatgaattttcaaaatatctttttgggctttgggctttgggctttgctttctcttgtggtctctctctctctctctgaagcatgtgggttttatgcttttccctctggaggaaatgtaaaacatcaccacactgctgagataaagcctgagcctgactttttgagatgtggtttctgagcctcagatcacactgcagagcatgtctagtttagttctctgtttcatgtcagaatatccattcttattattatttcttgtttcttccaatggttcctcccttcttctagggttctcttccacttgattcatttcactctctgccaaggtggaggcacttcactggctcatgtaggattttgacttgagacccatttttcttttcttttctcattacagtaaaaaaaaaaacaaaaaaaaaaagagatggaatctggaggtaggttctactcagttgacgagttcagattggaccccaaatggctgattgatcctaaccatctctttgttgggccacagattggagagggagctcatgccaaagtctatgagggaaaatataaaaaccaaactgttgcttttaaaattgtacataaaggagaaacgacagaagacattgccaagagagaagggcgctttgcgagggaggtggcgatgttgtctagagtgcaacataagaacttggtgaaggtgggaatttggttaaggcttttcctgattcttataattgggtctgtagtatgttgttgaaggaaagatatgtataatatacagggaatacttgttatatgccaagttttgaacaagtgatagtaaatattgccactctgtttctcaatagtttat

SEQ ID NO: 53004 - DNA, 2113 bp, Glycine max
  Clone ID: PAT_MRT3847_18875C.1
gcgcgtggaattagaatacaactagtagtcgactcttttccccataaattttcaaaatatctttttgggctttgggctttgctttcgtctctggtcacgctctctttctctctctctgaagcatgtgggttccatgcttttgcctctggaggaaatgtaaaacatcaccctgctgctgagtttttgttttttgatctccgggcctgactttttgagatgtggtttctgagcctcagaacaacaacacactgcagcagagcatgtctagtttagttctctgtttcatgtcagcatatccattcttattattatttcctgtttctttcaatgcttccccccttcttctagggttctcttccacctgattcatttcactctcggccaaggtggaagcacttcactggctcatgtaggatttcgacttgagaccatttcttttttttctttctttctcattacagtaaaaaaaaaacaaaacaaaaaataaatggaatctggagatatgttctactcagttgatgagttcagattggaccccaaatggctgattgatcctaagcatctctttgttgggccacagattggagagggagctcatgccaaagtctatgagggaaaatacaaaaaccaaactgttgctattaaaattgtacataaaggagaaactacagaagacattgccaagagagaagggcgcttcgcaagggaggtggcaatgttgtctagagtgcaacataagaatttggtgaagtttattggtgcgtgtaaggagccagtaatggtgatagtcactgagctgttattaggaggaacattgcgaaagtatttgtttagcatgcgccccaaatgcttggatagacatgttgcgattggttttgcgcttgatattgctcgggcaatggagtgcctgcattctcatgggatcatccaccgtgatcttaaacctgataacttgctattgactgaagaccagaaaacagtcaagctagcggattttggtttagcaagagaagagtcattaactgagatgatgactgctgagacgggaacttaccgttggatggctccagagttgtatagtactgtcacactaaggcaaggggagaagaagcattacaaccataaagttgatgcttatagttttgcaattgtgttgtgggagctcttacacaacaaagttccttttgaaggcatgtcaaaccttcaggcagcatatgctgcagcctttaagaatgtaaggccaagtgcagaaaatcttcctgaggagttggctgtaattcttacttcatgctggcaagaggatccaaatgcccgacccaacttcacccagataatccaaatgctcctaaattatctttacactgtcgcaccacctgaacccatgattccttcaagaatattcagttctgagaacactgtcttgccgccagagtcccccggtactagctccttaatggcgaaacgtgatgacacaggtgatacaccaagagcaaaggacgaaatcaagcctaatggttttctttgctgctttagtcagtgttattaactcccaaaatcaagggtgagttaaaaatggcataaaaaaaatgttagatagaatctagtgcaaagtgatccttttgacaactaggtaaatgttcagattaatacctttgcaattccagtaaaattttgtttcttttttcttcaatcccacctagcatgttttttcatctgacatacatgtatgcataggtatcagtctgctgaagctgactaatcattcagcattgttaaaatttgcaccttgagtttcttaatcattggattatatcttgaattcggttcaagggatatatagtggagtgatgaaattagaagcctttgtgttacattcatgttgcacctaatgtctcaagtatgaagccaaggtaagcaatggcaggagtaaatgatcaaaacttgagtatttttataggcctttgcaattccagtaaaatttagtttcttttttcttcaatcccttcttgcgtgttttttcatccgacatacatgtatgcataggatatcagtctgctgaagctgactaatcatccagcattgttaagatttgcaccttgagttgagtttcttt

SEQ ID NO: 53005 - DNA, 568 bp, Glycine max
  Clone ID: PAT_MRT3847_18876C.1
ctcactcgtccgcccacgcgtccgctttttctccacaaatcaaaagaaagaaaaaaatactactaataaaatagcttcttctgaatatcgtcccattctttactctgtaattaatgcataatgcatagtctcacaatccttttcgtggatcatgattctgtctgcagatcaaggtaaaaaaaaaaaacaaaaaaaaaaagagatggaatctggaggtaggttctactcagttgacgagttcagattggaccccaaatggctgattgatcctaaccatctctttgttgggccacagattggagagggagctcatgccaaagtctatgagggaaaatataaaaaccaaactgttgcttttaaaattgtacataaaggagaaacgacagaagacattgccaagagagaagggcgctttgcgagggaggtggcgatgttgtctagagtgcaacataagaacttggtgaagtttattggtgcttgtaaggagccagtaatggtgatagtcactgagctgttattaggaggaacattgcgcaagtatttgcttagcatgcgccccaaatgcttg

SEQ ID NO: 53006 - DNA, 1275 bp, Glycine max
  Clone ID: PAT_MRT3847_18877C.1
gaacaaatatctgaatgctgtataacggtgaaattttaagtattctttctatggatcatctacacttgatgtgagattcatttgtaacgagtatgagttcctgtatcaaagactctctatctatctatctttaaaatgcatttggtataaactaccaaaggaaacaagaaactgtacatgatactatgtttttgcatgatcaattatagaacactttgcaacttttcgaccaaattatggatatcatctagaaggaccagaaatattgcccctcttcaaataatccttgtcattgtcaatattttggtccaatgcaggccgtttcagtctttgaaatatatcatcaagggactcagatgaggacacacgagacatcttagcttcctgtgtttgccgtatgggcaaaaatccttttccccctaagttagccccaaaactccgaaaacctgttgtcattgtttgccatgtcgaagccaagcctgaagttccagcagcattactagaatgagcattgccgtgatcaagcaaggaaaccttcgcagatgttaattcactctgctgtctgacagcagcatacttgctgctgatggcttccctgcttgagctatatctccttgtctcttccttcaaagttttaggcagatttccatctgtttctttattaactaaagcagaatttcccttcatttcaacaccattcttcaccataatattgtcactagactcaacatcaattccattaaaattcctcactagtggaacaacttgctcgcctacattgcctccttgctcaagccaatatctttctttctgcaagataattaaccctgacggatcaaaaccatccatatcttcagcttcagtttcgaaaacatatctcttccagctcccaagagaatcaaataccctatcaaagaaattgcttgcaaccaaaagggtgtatataaccataataagtggatagattctgttaaacttatctccaaagaaagggacagcattatcaatgttccccattcgctgttcaaatatagttgttttatcagaaccaaggcgaataagattgaggaagttgtatgagatggggggagcatatcgagcaatcatagagcatatcataagcaagctaactgagctggtgcctcggggtgtcaatgagtaaaacaccaatgttccaattttgaacaaggagtaatacgtgcagatgcacataaacatgagaggaacaaaagcaagtacctgcacaagcacctcctgtgttccaacagattttat

SEQ ID NO: 53007 - DNA, 120 bp, Glycine max
  Clone ID: PAT_MRT3847_18878C.1
gggagcacatagaaattatcacgtgatggtttcacaagtcccgactgcaacagaggcggtgcatggctcccggccgatactcattataccaacactgttaatgcacacactagtataatt

SEQ ID NO: 53008 - DNA, 389 bp, Glycine max
  Clone ID: PAT_MRT3847_18879C.1
gtgagttttgtttttgcacaaattctcacatcttttatttttgaaagcagccacagtcttgtgtttgtcacctttaacggaacaagtaaactccaacactgtcttttattctctttcctttgatccatggaagcctgtgatctcatgtgatagttggtgtgctgcatacgaaatgctttccaacctgtaacctaaagtggtttcactgcttcacagttgccgaatctagcttcttgcttctttctccttacaagatattctttgattcaaactttgatcttaacccctgatcggctttcattctccgatttatacacccttttggttttccccttcttaacccaacttgtttcaacatccacaaaattttttaccgtgttgtttttctt

SEQ ID NO: 53009 - DNA, 785 bp, Glycine max
  Clone ID: PAT_MRT3847_1887C.1
ggaaggcatgtggcgaattcgttgccacctttggtttctgctcggcgccacatggatacaagcactcttggtgttgatccaaaaaagagaaagacatcaactgtagaaaatgccgttaatttgcaagctagagagacacttgatcatgaaattgctaggatgttttacgcttcggggctgccttttcatttagcaagaaatcctcattataggaagacatttggctatgctgccaataataagatcaatggttaccaacctcgaggttataataaattaaggacaacattatttcaaaatgagagaagacatgtggagaatttgttacaaccaattaaaaatgcatggagccaaaagggtgtgagcattgttagtgatggatggagtgacctgcaaagaagatctcattaatttcatggttgtcccggagagtggacctatgtttttaaaggccattgattgttcaaatgagatcaaagacaatgatttcattgccaaacatatgagggaggtaattatggaggttgggcactcaaatgttgtgcgaatagtgatggataatgcagccgtttgtaaagcagcaggtttaataattgaggctgagtttccttccatctattggacttcatgtgttgtccatacattaaatcttgctttgaagaacatatgtgcagccaagaatacagaaaaaaaaaaataatgttgcttatgaagaatgttcttggatcacccaaattgcggatgatgcaatgtttgtgaaaaactttgtcatgagtcactctatg

SEQ ID NO: 53010 - DNA, 524 bp, Glycine max
  Clone ID: PAT_MRT3847_18880C.1
ggtggggagaaaaaaaacgaatgtgatgttcataggtgacgggaagggcaaaactgtcatcacagggaaaaagaatgtgatagatggcatgacgacattccactcggcatccttcggtaccgttccttttcatctgctggcttcttaatgttgatgcttttatctaattatacaaattttgcttatcttttgttatttagcattttgcgaaaagtatgggtaggaaaatgtgaacgaataacatgcacgataattgaacaaagcaagcttgcacgtggcccatgtcgttctagttgttaatgttaatattcctatccaaactgtctagttgcatgtctattccatgtccaagtgagtgtccacttggacaatattacccccaccggcaccatttctgtatttactatgaaagaccaatacgcgactggcagtatttttacttttagaaacaaaaaaaaaaaaaaaaacgcgatatatgtatcatctttttttttgggaatcgggttttatgtatcatgcataat

SEQ ID NO: 53011 - DNA, 572 bp, Glycine max
  unsure (1)..(572): unsure at all n locations
  Clone ID: PAT_MRT3847_18881C.1
ggctcgagaaaaaaaattctatcgaattggttccaactgcagttgttttgaccagggatgagtttgaaggagaatgtagctaagacaggcaacactgaggacaatgctagtcaaatgtggaccttatgcaaacatgctttctatgatttaactcatgtctccccggtggtgtttctgttcctgctgaaagaatgttattattatggcacatgtaaggcatcaacaaaattccgagcccttcaacatcaagtacatcttgttcttagtaatgatccaaaacccgaaccagcaacttttattgttcagtgcatgtatgtctctccattatttgaagatcatagtcaaggatttactcatctgataatatctgctcttcgccgattcctgaaaagatcaacaaccactacagaagactcattggaagtgaaagacctggttgcccatctacttgtagatattatttggggccagatcgatcatgatgaaaagatagtcatgaagctactcgagattnnttgatgtaaactaacaaatgtngagaaaagcaatgtgtcaaattaaggaaaaacatg

SEQ ID NO: 53012 - DNA, 497 bp, Glycine max
  Clone ID: PAT_MRT3847_18882C.1
gcataaacttcgtactccttggtatcctaatcttaagaccttgatagattcccctgaattttgaaggaatgattgggtatacgcgtaggctttgcctttccaagagctgccttggatcaagtctccacatcatactattggtaatcttttgttatgaacttttgtgtaggactgagttatgggcttagtgaaagaagcaaacttgtccttgacagagctcctcctaatctaacacagacttttctgaaatagtctcttcctttcctccaatccaagtctgcctttttatatggctatataagaaagggatcctgattgataagatcataactagcaattatcctaataaaaatcagaaccagaactgataaggattctgttacacagaatcttatcaggataaataaataaataaaaaatcataatttaaaggaagataataaaaagtaatcgtattcaaccaaatatcctctgttgatattgtttcccctcaattg

SEQ ID NO: 53013 - DNA, 107 bp, Glycine max
  Clone ID: PAT_MRT3847_18883C.1
gcctaatcaagaggcccaagccagaactaaatcaaacaatgtcaatgccatagtgttgtattatgaatcatgtttatagtttatagacaaactattgaccccttttt

SEQ ID NO: 53014 - DNA, 570 bp, Glycine max
  Clone ID: PAT_MRT3847_18884C.1
agaacacagccaacttttataattatgatttctgtggatttctacaccgtccactgatcacttgaacaccttcatagagctataacatgcattgtctcttctaaacgaagagttcaatatgttctatttatacccaataaaatcaaatatataaagtaacaaagaaaatcaatttttaaataaaaaaagaaaagcaaatttacaaaacaaagttcatatagcattctcatttgttctattagtaaattcatcagtgagcatcaagcagaaaaactcctttaacgaagttgaagatgctaattgactgccagtggaattgattttaccaaatccctgaacttgagaatgtaaaacatctccaagtacctcctagtttctctcttctcaagcttagacacatgcttccagaagccatacacaccagctaaagtcaatagtctctcagagtatatcttccatgtatacctctcatgaatgcgcctaagccctgcatcagaaatcttgttccagtagccaggatcactctggcattgctcaaaaaagttaattaaaattgcagcaacatgatcc

SEQ ID NO: 53015 - DNA, 451 bp, Glycine max
  unsure (1)..(451): unsure at all n locations
  Clone ID: PAT_MRT3847_18885C.1
tanttatgtatgggtgcctataatttctggtgtgaaacccacacttttttctctctttttctttttttaattatagtcccctgctactgcatctatctctcactttcaggggatttggtataataccatcaaacagaagtacaaaagcgatgtgcagctgattccattgtgaagaagagagcagaaagaaatacgctctattataatgtatacgaaccaagccttttcttcaggttcttatgcggagatgatgtctgggacttctctgttacctcatgactacagagaaactgtttggggaggacaaaacgaggtttagtttatcacagcaatgggtgagacagagaccatgcactctattaatggtcatttcaatgctgcaaatggggatccatcatgcaactcttttgctggggattcccacgttgcttcaaggacacaaatgggaatg

SEQ ID NO: 53016 - DNA, 405 bp, Glycine max
  Clone ID: PAT_MRT3847_18886C.1
tgcgtactggatgcacgccaatgggaccactccctccaataaggctatcggatcttggttcaagaatgaaatcttattgtaactgtccagctcaccctctgaaaccatatcacatccctgatatgatgaactcagatgaattgagacggtatttcagtatgtacttagttaggttgaataaagccactatttctttattttccgatcggctgtaacgaacaagatggctcttttgtactttcttcacaattactgatctctagtagaactgagagcaggattcgcactcagatgaagatctgtccatctgtcggagaaacatgaccgagtacctgtagatcactgggatctcatcatccatacctaactaagtggtgagccatatccaaatcatgagctatgagc

SEQ ID NO: 53017 - DNA, 131 bp, Glycine max
  Clone ID: PAT_MRT3847_18887C.1
cttcacaatcgcaaatcttctatgccaaatcgtagatctacggaaaaatacgttatacatcggagcttacatgtcaaatacgaggattcccagatctgaatatacatctttcggcacacccgagtatgtcc

SEQ ID NO: 53018 - DNA, 293 bp, Glycine max
  Clone ID: PAT_MRT3847_18888C.1
ggctgcgagaagacgacagaagggcccattaccagagccttcatcgagaagtactacaccccaagtaggcgcagggcgaggcaccacagcagcctggagacggccagccgcaggcaaccgatgcatcaccatcacccccgaagtccacctcagctcacttatggaggttagagcattgcatatgacatgtggctagccagcaagaagccaaccacaggggtcaagtgcagctgaacgagatttctatcagtacactctccgccagtagggccaggattccagcccttacacat

SEQ ID NO: 53019 - DNA, 663 bp, Glycine max
  Clone ID: PAT_MRT3847_18889C.1
ctcacttgtacttctacgcgtacggctgtgtagattctgctatacaaaattttgaattttgaattctatgagcttttgatgattgaacctcgctcttaccttattcacctaacgaagcagaatagcaggggatttgctataataccatcaaacagaagtacaaaagcgatgtgcagctgattccattgtgaagaagagagcataaagaaatatgctttataataatgtatcccaaccaagccttgtcttcaggttcttatgcggagatgatgtctgggacttctctgatacctcatgactacagtgaaactgtaggtggaggacaaaacgaggttaagtttatcacagcaatgggtgagacagtgaccatgcactctattaatggtcattccaatgctgcaaatggtgatccatcatgcaactcttttggtggggattgccacgttgttttaaggacacaaatgggaatggcagatagtgagcaaaacgtaaattgtcagggcctatctctcagtcttgggacactcatgccttctaatgcatgcgtctctccatttcaataccaatatcacgacactggtctcttaccactaatgaatgattatcccaatccaaagggagccatgtctttcaaaaatgatgagggcaataacctacataggg

SEQ ID NO: 53020 - DNA, 354 bp, Glycine max
  Clone ID: PAT_MRT3847_1888C.1
gggggaagaaaaaagaaggacaaacggtttttttttttcattttttagatgcccaaggaaagggtcagggttttttacttccccgggggacccccaaatattttttttcacccctcccaattttggatggaacaaaccctttaacaccgtacaaaacctgggggaaaaaagaaacccctttaaccccggggaggaggaggaggaggaaaaaggaacccgtttctcaacttggccggggggggaaataattcaaatggttcccgcccgcccgggggcggaaaaaaaagatcaggggcggaaatgcccccccgggggacgaatcaaagacatttgttctcatgaaagatcttaacc

SEQ ID NO: 53021 - DNA, 154 bp, Glycine max
  unsure (1)..(154): unsure at all n locations
  Clone ID: PAT_MRT3847_18890C.1
attctttggtcgtcccacgcgtccttcttactccgaaaccagggcttcccactagcgggggttttaaagcaanaccgggggttttaaacaaccanccaaanggattgaacagctggaacgaaacatcatcctttcagaccctaaaccggagcac

SEQ ID NO: 53022 - DNA, 507 bp, Glycine max
  unsure (1)..(507): unsure at all n locations
  Clone ID: PAT_MRT3847_18891C.1
ggaaacagcccgcccacacgtncgaaaaataaaaaaaaaagagaagaaatttgaaagaccaagaaaaactaaaccgctacaataaaggaagcatcgtcaatgccatagcgtacgatatgttccctctacgaatgaacactgtctctgaaaacggtggccaaaggggggatgccccccctgaaagcttgctgtgaaataacaccccccctttgggggggagaccagggctaaatagtgcgttgaagcancaaaggantacatccatggcgaacaatatagatcagactacaaaacagggaaccaacaagcttacttgtatgccagagacctcgaagtccatcccaaggacacatggtgagttcaggatagatggcaccgcaccctctaatatgccatactacaaaaaacatggatatggggcggagaaacttaactccacccctgatgatgaatgggttaacaagggcaatgcaccggcactgcccgagacccctaaaaaacacaaca

SEQ ID NO: 53023 - DNA, 357 bp, Glycine max
  Clone ID: PAT_MRT3847_18892C.1
tgagaactgaacaagtttgtcctaaatgtgaaggtagtggacaagaatttgaagaaccatgtccaacatgtaaaggaaaaggtactgaaaataaaacagttaaactagaagtaactgttcctgaaggtgtagataacgaacaacaagttcgtttagctggagaaggttcacctggtgttaacggaggaccacatggtgacctatatgtggtgttcagagttaaaccatccaatacatttgaacgtgatggagacgatatctactataatctagatattagcttttcacaggctgcactaggtgatgaaattaagatacctacattaaaaagtaatgttgttttaaccattccggcag

SEQ ID NO: 53024 - DNA, 151 bp, Glycine max
  Clone ID: PAT_MRT3847_18893C.1
gcggccatgaattaataaatgtacttggcacattataggggatagtttagtatagactcttgtttgtaccaattcacatgcgtgttgcttgatatttcatttttgggaaaaggggtactataacacggctttgagcatgaggttttttatt

SEQ ID NO: 53025 - DNA, 307 bp, Glycine max
  Clone ID: PAT_MRT3847_18894C.1
cctactcgtgggtcctgacccaaatgataatggggggctactgtagagcattgccgcgttgggtccacacggagcaggaaaagcttttgcaaacaagattgttgctggggatcaccttgtgacggttgagacaccaaagctctgcgctggccaccttacagcggagccttggatgccaatcaaagtgaatcgactgcatgcggaacggcacttaccctcaggagctgcggatgacactgagacatgtctaagtggacagggggggattgttaaaagtggggtcaaggctactgtagtgacgggttaa

SEQ ID NO: 53026 - DNA, 278 bp, Glycine max
  Clone ID: PAT_MRT3847_18895C.1
tcgcgtgtactttcttacgaaaccgagagagcgaatgggcaaacacaatttctcttatctgctaatgtattgcttctatagagagagagatagaaaatgttggggatcttcagcagattcagtggtgtcgccgccggatgatatcatagtcgatggtagacacgaatgccgtagcagaagacaatggcggcataagctgtctgcaccaggttacgtgcgagattcaagcgtcgtcagtatcgctttacctctgagaacacgtgcttaaacgtacacac

SEQ ID NO: 53027 - DNA, 475 bp, Glycine max
  Clone ID: PAT_MRT3847_18896C.1
tatgggaattgtaattaattgttctttatgaactacaaacaagtacaaacaatgccgccttcaatattaaacaatctctctgccggttttaatgcttccgaagaacactctaccattgcgacacagggaaaccccgccctgcctagtgcatttcgagtgaacacgcaccttgttggtgatggaatggactacacgcagagaacttgggcctcgagaggagtgaatcttccatagcatagggccctttatgcgtcgatcatacttatgccacaaatagctatagtccctcgaaagctgcctttgctgtgtcaaaaaccggttgatgaaaagagtagcctttgattcctcccgccaaatttaaaatgtaaagacccttctttccaaccctagtaacgtcccatttgggttcacacgggcgggacgacttatgtctctgcaagatcaatggtacacggtattgctcaagctgcatcct

SEQ ID NO: 53028 - DNA, 249 bp, Glycine max
  Clone ID: PAT_MRT3847_18897C.1
aaaatttgagggtgttattgtctccgatcaatggctttatagccagttcacgtcaggatgagcttctcagcctgatagcaaaatacgtgtctgtacagaataatagaggctaattgacgatatcgaacatctgatctcctgtagaggataatttaacctcatacgaaactatcttcacttgatcagcttataatccgaactcatcagagaataataatgccttggtacctgtgtacaataaatgatctg

SEQ ID NO: 53029 - DNA, 331 bp, Glycine max
  Clone ID: PAT_MRT3847_18898C.1
acatcctggtgacaatgtgggatttcatgttaataatgttgctgtgtaggatttgaagcgcgggtatgttgccttatactcaaaggatgatcctgctaaggaggctgctaacttcacagcccatgtcatcatcatgaaccaccctgttcagattggatatggctatgcccctgtcttcgactgccactctacttacatagctgtcttatttgctgaactctggactctctttgtcaggcgatccgtcaatgagcttgataaggatcacaagttatggaagaacggagattctgtatttgttattatgattcctgctcaactcctggttatt

SEQ ID NO: 53030 - DNA, 462 bp, Glycine max
  Clone ID: PAT_MRT3847_18899C.1
aaaaaaaaaaaattttttttaaaaatttttaaaaaaaaaaaaaaaaaaaaaaaaaaaaaaaaaaaaaaaaaaaaaaaaaaaaaaaaaaaaaaaaaaaaaaaaaaaaaaaaaggggcggcggtttaaaaggataaaagctaacatccgctggcatgaaacgaaaaagtttttaaaaaggggaactaaaattaaattcaggggcagcaaataaaaaacctcgtaacgggaaaaaccctggctttaccaaaataaagccccatgaaaaaaacccccttttaaaaaaattaacctaatagcaaaaaggcccgaaccaaacccccttcaaaacagttgccaaccctgaagggcaaagggaacgcacaatgtgccggccaataaagcaagaagattgtggggataccggaaaggggaacatataaaatttgccagccccaaaccacatttttttttaaatttaattcc

SEQ ID NO: 53031 - DNA, 285 bp, Glycine max
  Clone ID: PAT_MRT3847_1889C.1
aaaaaaaaaaaaaaaaaaaaaaaaaaaaaaataaaaaaaaaaaaaagggcggacaaaaaaagggaaaaggggcttacagtacacgggcatgcaacaaaaaaaactcttatataaaaaaacatgggctgccgtttattgggacccaatttaaattaccggggcttggaaaacaacgcttttttttaggaaaacctaaatgcaatccattggcctttctttaaaaaggatgatactggaaaaacctggccttatcccaattaaaaccccttgcacaacctttccttt

SEQ ID NO: 53032 - DNA, 462 bp, Glycine max
  unsure (1)..(462): unsure at all n locations
  Clone ID: PAT_MRT3847_188C.1
tcacattcagttacagacgtgaatatatgggaagggttcacggatccctcgctcgtgccggaaaggtcaagtctcaaacccccaaggttgagccccaggagaagaagaagacccccaagggccgcgccaagaagaggctcacatacacccgccgtttcgtaaacgtcaccatgaccggtggcaagcgcaagatgaaccccaaccctacctcataagccaaccatgagaggacgggcgaacgaaacgagcacgatgagctagagaacacggtcatgaattcggtttcctcaggatggctatgactctggatcagagggagtgggaatcacggacgtcgctacggcacgttcctcagcagcagcatgatcccacactttgggatgatgggggcatattcatggcgtacatgtacattctgctttttgcacagctgcatcacgaantctagcttcttgtgttccc

SEQ ID NO: 53033 - DNA, 3038 bp, Glycine max
  Clone ID: PAT_MRT3847_18900C.1
caacaacaacgtacaaatgtaggtgtacacgacatcataagcatgttctgtcggtccctcgttccaaacgcaacaaaaccgagactattgcattcccacattcttctccatttccccaacccctactgctagcaatccatcttctgcatttccatgtaagaggagggacttaataaggttaaggatccaaagctttcaactttgaagtttgaatctcactctctttttggctcatctatggacccaaacactcgtcttgatcatgccctctttcagctcactccaaccagaaccaggtgtgaccttgttgttgttggtggaggtgtgagtgaaagacttgcttctgggctgttagaaccgtttctttctcacctcaagagtgccaaggatcagatttccaaaggtggctattccatcactctgcgtccacctggtggacatcctcactggttcacgaaagctacccttcaaaggcttgttagatctataaacaccccagccgttctagagagggttgttactatagtaagagagatagtgcagattgaaggagaatttcaatcatctgagagaagcaatttggaggcaaaaacatatggaggtattaaatttgctgacgagcgtgtccatgtttaaagtcatatgatgccaaaaaaagaagactcattcggggctgtccaggaagtagctgtcgaaccgtgcatctgtcttcttgattctttcgtccatagagtccaatccaagacttcattagaaaaagaaataacatatgcccgtgcttaagtagcacgatattacgcaaatgttggccagcttcacgccgatcctgctgatgcatttggagcttcacgtttgggaggaagcatgcattaatttcttagagctgtgcaaacaaaagaatgaagacaagctatggatagatgagatagtagtcatgcagtcatcacctcagcctgaactgcattacccagcaaaccccaaacagtttcttgctggagaagatgatacaagcagtaaattaaatggcatagttgatgcctcaatttctgagtcaacaccaagtcatgcaagtttggacatactccatgattatagcttgccaacatcgggtcaaacaccatcaacagatggaagagctcaaataccaatgtcctggccaaaccatcttccacagtacatgcacaactttcaagaaagagctgaagcagaatcacccttgtggattgattggtacctttatcctggtatgcaggttccttcttcatattatccggggaatatgcaatggccttcaaatatggaagaccctcatattgttcatgaccgagacaaggattatcataaatcatcgtataagaagaagaaaaagaaacattctcaaacactgcagcaatcacacgtaggtagctctacagcatcctctgactctagttatgagagtgattcagataaccattcaaggaaaggtaaaaagcactcttcaacagaacatcaccacaaaaagaagcatggaaagaagtcctcaaggaaagtggttatacgcaatataaactacataacttctaacggagatggcgaaaagggtagtgtcactgagggaagtttgtccaatgaggaagaatttatcaatggagattccctgaaacagcaggtagaggaagttgtaggatcatttgaaagaagaaacaagtcaagctcccgtcaccgtaagaaacagcatattgcaaagcactctggcaagctaaatggttcaaatgatgctgattccaatggcatgaaaggcaataacaactgggatgctttccagaatcttcttttgagagatgatgattctactcctgatactgaagaacagcctatgaagttccaggaggaatatattggcagtcagaattttgagaatggaaggtcaaatgaatttaaccacgaaccagactttagtaaaactcgagcagtttcaaatgattcctttgttgtgactgagaggggattcgatggtgaggttcaaaaccgtgttgataactttaaggatggaaaggatgctccttcattaatgaagaaaaacattaacacagatgaggcgatgttgttttctcagagaaatgacaaatcaggtagctattctatgtcaaatctgtcgggcaatggcccagaatcttccctcactaaatgccagacagaagaggattggttcattatcaaccagtctggtaaaccaggaaatgtggatcaaaaccgagatttcagcatgtttgatggcatttccgtttcatcatcagctactgattcgtttcatgtagagaaaaacagaaaagacattgtgactgatgactctttcatgattcaagctcgatcatcagaagatcaattcaattctcagtcagcagctgatcttagtttggtttcagacattgttggggctactgaattcatgaatagcacacaagaaggttcacacaataagaatgaaaccttaaattcccatgagcctgatgatctcttcatggttcttgaccgtgattctactttagagcaaagtctggcaccctggagcatggaaatggattatgataataacatttcttcaaatgaagctaatagaaagctatctgaagttgaaacagataaaaatcattcatctaatcttgagggtaccgatacaaaaactcctggagtgaaaaatgggaaagtttccagtaaagaggcaaagcctaaggctctaaatgcatctcttgggaaaagcaaatctaatatcacgtcaagaagcaaagcatcccctggaagcaaaactagagttactaagagcaaatctgagaaggaagaggaaaaaagaaagaaaaaggaggaactgatgattcagcggcagaaaagaattgctgaaagaagtgcctctaagaagactggaactaagacttccttgacttctgcaaagaaagagaatcctaagatacatccatccaatgaggagaccaagaaattgcaaaaaccagtcatcaggaattccaccattgaacgccttgcaactgcccgagtaagtc

SEQ ID NO: 53034 - DNA, 203 bp, Glycine max
  Clone ID: PAT_MRT3847_18901C.1
cagaaacacttatttaattaaggtgcttagtgaaatcagtctctcagtaaacatatatatatatatatatatatgtatatgtatatatatatttttatttatatatatatattatgagttggagggctcctttgttcaagagttcatatgctagtcttataaaagtcagtttttagttttttaacatcaagggaaagaacatc

SEQ ID NO: 53035 - DNA, 375 bp, Glycine max
  Clone ID: PAT_MRT3847_18902C.1
gctaactgttgttaccaaagacctacgtgatagcactttttgtggattggaggatgtaaagggttcaacaaggcgcactgctacatctgaaattgctgggaacagatcttctactagttatcatgaaaggaatcgccacgctcatggaactgacattcttgctggttgtctgacaaactgaagcgcactcataggaatgagaggctctgagatctgcgtcacaaagacttgaccacatgttgatcacatggtaatgaacctacctgcatctgctcgtcagattctagatgcattcatgggattcactcatatgaaatattggtaaggatgtttaccatggattcactgctatttgctcattagggcgactgaaac

SEQ ID NO: 53036 - DNA, 307 bp, Glycine max
  Clone ID: PAT_MRT3847_18903C.1
ggggggtaaaaaaaaaattttggcttaaaaaatttttccggaattattttacaaaagtgaccagtgaaaacccgattcttcaatttcccactgaataaaaacccccattattttcttttgtcttgtcatacattcattttaatgaggggatatttcaaagaaattggcccctttattcccttctttaatccttatgccgaaaaaggccccctcctttgaaaattgttatttttttttcaaaaattgatttttacacggggttttgtattttctttttcccaaactttaattgtaaaaaccttttttt

SEQ ID NO: 53037 - DNA, 335 bp, Glycine max
  unsure (1)..(335): unsure at all n locations
  Clone ID: PAT_MRT3847_18904C.1
tagctcatcaggtatcttcttctttctcttgttcattatctcaaatagatgatcacaaggccccaatgatgggaagagtcatggaagaaccaagccaagatcttcttcagcagtaacaacaagccctatagcgccctcgctgcgagacttcaaacaccaagttctgctgctgcaacaactacagctgtgcacagcctaggcacttttgcagagcctgcacgcgatactgaacaagaggtggccctctcagaaacattcccgatggtggcggctgcagaaaaaacacgcgtgtgaagcgaacaacanatcacggtgattcttctgcttcctgctgc

SEQ ID NO: 53038 - DNA, 550 bp, Glycine max
  Clone ID: PAT_MRT3847_18905C.1
gaataaacctgcgcgtccgcaagttggtgggaggagcgttgtgaacaaagacataacacagctagttgaggtgaggccagataatgaaaggttccttagactcttagaaatattgggggaatggtatgagaaaggaaagattgtgatatttgttcactcacaggagaaatgtgatagtttgttcaaagatctgctcacgcatggttatccatgcctttctctgcacggggctaaggaccagacagaccgtgaatccacaatatctgattttaaaagcaatgtctgcaatttgttggttgcaaccagtattgctgccaggggattagatgttaaggagctcgaattggtgatcaattgtgatgttcctaaccactatgaagattatgtacatcgtgttgggcgcaccggacgagctggccgaaagggttgtgccattacatttatttctgacgaagacgcaagatatgcacctgatctgctgaaagccttggaactatctgagcagattgttccgaatgatctggaagctcttgctggtagctctatggca

SEQ ID NO: 53039 - DNA, 691 bp, Glycine max
  Clone ID: PAT_MRT3847_18906C.1
aacgccaacacataattcagatagtactgaggctacttgtgagaacgggacttcattaattggtcatgaccatggtagtgatgatgcttcccaaatcaatcacaaagtcaaggagaatgaggcttctggcttaccagggctagttggcaaagattctcctgatgaactatttgatgttccatttgttggggttttaggggaggagaaacacactctggatttctcacccatcctggtttcttgttcatctggcaagcctcaagttagtccattgggagaacagtcttgtaatgctagtcaatgtgaagctgtgtccttgagaaatgagagcaagaatgaacctggttgtaccagttcagctgctggtcacattattgttggccatagagcagacaaaggtagttcaaagtggcagtcaaaaggaaagaggaattcaagacatacgagtaaaaatataaaacatgcctcaagaaaatatgtggacacagacccccaatccagtgcttatttgtcaggaatagggatctcggatggaatctatcagggtgcttgtcagaaagttgattggaatggcatgggtgcaccgaatacttcatacaaatgtacttctcaagttaagtgcaaacctgttgctgtgggccaactggaaggattccgggacttgaacaagcatatcaaggggacaacaaca

SEQ ID NO: 53040 - DNA, 347 bp, Glycine max
  unsure (1)..(347): unsure at all n locations
  Clone ID: PAT_MRT3847_18907C.1
ggtgccggcaaggtaactctttgttgcttctgatttttcaattattcattgtgattttgggagctgaaattgattgtggttggtatccaaacacacactaagaacaaggttgaaacatgtgaggaagctagattttctatcaagaattgcatggaaatatcatataccattatatactcaggtttatgttagatgatactagtatttgggcgggattctttttatctctctccacttagtactcgaattacattgatctaggttgaaaagaatggttccagcatttcaagctgttgggaggatttttattctggatcattgatatgagaaagaagtattgtaacana

SEQ ID NO: 53041 - DNA, 428 bp, Glycine max
  Clone ID: PAT_MRT3847_18908C.1
acctttaccttctttgattcttaaaaaaccttctttttctctccactttagttcaacttcacacatacatccttcatggagcaactacggccaccaccgttgtcgggtcgtcaactttcattggcggctcggctgaattcgatggtggctcaaagtcgcataggcaagtattttagggttgccgagcgtaatactaccttcaccaccgaacttcgcgctggtactgccacgttcctcactatggcctacatccttgccgtcaacgccaccatcatcgctgattcgggcgggacatgcagcgtctccgattgcatccctctatgctccgaccccaaaacgccactctccaaatgcccgacccatctcctgacccgacccggattgtcttgcaagtaccctcccgtcaacccgggctatgcggcgtgcgt

SEQ ID NO: 53042 - DNA, 608 bp, Glycine max
  Clone ID: PAT_MRT3847_18909C.1
aatgtggggaaaagcaaccgaagagaatgtgggggaagatgtccctggccagcaatcaccaaccacagaaaacgttcctctcttgcaaagctgtaaaactgatacagctgagaagaaaatgcatggaagtgtataaatgacaaacaaaactgttcataaatcttaacattattgaaattacacgaaatagcaaagaaaagcatggttttgttatcccccaagctgaccatgcaacgccaatagcaaagtaggtacccactcctctagagactagagtctagaggacagcatatgtaagaaatagttaaagtgttcaactaatctccattcaccacgtaaacgaaccttcctacaagttggtgtacgaacactcacaaatgacaacggagcaacttccctttccctgtttcttgtaacaactcatccacattatgttttataaaatctgccaagattctgtaacatccccaaaaaattttaagtatttttatttatttactagtgtgttgactcgttcatcacgcgacctatattttgatgtttttcttatgaatatcgttgtacattaatagaaaattctaatatattcatgtaataagtacagttgt

SEQ ID NO: 53043 - DNA, 397 bp, Glycine max
  Clone ID: PAT_MRT3847_1890C.1
aacaagaacctgatttaactttttaaatgggaaacaggggaaaccttttttatagccaaaaacccaattaaaaattaaaagggggctggggggttggaacttggaatgatgctttccacaacttttattggccggttacaaaaactttaccacaatttttccaaacaaccttctaggagaaagcaagaattggaaaaaaaaaaaaaaaaaaaccccccggttttttttttcaaaaaaaaaaaaatgggcgggattttagggggggccaacctttgggaaatccctttaaattatatacaaatttacaagggggcttatttggttaaagggggattttcactttttggggggccctttttttccaaaaacccccccaccttcccaataggggggggga

SEQ ID NO: 53044 - DNA, 651 bp, Glycine max
  Clone ID: PAT_MRT3847_18910C.1
gaaaaatcatttttcataaaagtgacaggtgaggttagaagagtggctaatcactgagagaactacacctgtaaagtgtgtaacctacgaatattatcgtatgattcatactaaatatatctatatagagagagagagagaaagatttcagctccaacttccaacgagactgcgtgtggtatccttatagattggctgcaatattaccctttttcatttttgaagtatcgtttgaaattgaagtacaatggcactttccttcagggaagaaagagatacctttggagccattcaagttccctccgagaaattatggggagcacaaactcaaagatcgttgcagaacttcgatatcggtgggccccgcgaacgcatgcccgaacccatcattcgcgcctttggcgtcttgaagaaatgcgctgctaaggtgaacatggagtatggtcttgatcccaacgtcggagaagcaataatgcaagcagcacaagaagtagccgagggaaaactaaacgaccattttcctctcgttgtatggcaaactgggagtggcactcaaagtaacatgaatgctaacgaggttattgcaaaccgagcagcagagattcttggccataagcgtggtgagaagtttgtgcacccaaatgaccatgt

SEQ ID NO: 53045 - DNA, 641 bp, Glycine max
  Clone ID: PAT_MRT3847_18911C.1
cagtttccaagcatttagcttaagatgaaaaattatcagcatgtgtcaaaatatagagagatggtaacagctatgaatataaatattggcttaccaggaagacaattccaaatgacccagtccccacaatgcgttctgctatataacttttagtctaaaagaatcatcaacataaacgttaaatattcaaagatttgctgatcaaaaaaaaaaaaaaatattcaaagatttagcatggatcataggtgaaatcctctctctaactaaatcccataacatttaaaaatccaagttacatttttaacaaactcagtatctgaaaaaaaaaaatcttaatagctgtttacaggaaaaatgggtttcacaaaaaaatacctgtttgggcttcccattttttcctccaactgtagtagatatgatgtgaccattcagagaatcattaccatcatcagcggaagtggatatctcgtggttgtgatctgacatgaggtaagaggacgttaatgggatgggattggataaaaaagtggagaaaaagatgagattttgaagacttggcctttatagctactggtggtaatgtacctgtccaccgccgtgatgaactaagtatctaactgcttttcaattttacaaaaata

SEQ ID NO: 53046 - DNA, 756 bp, Glycine max
  unsure (1)..(756): unsure at all n locations
  Clone ID: PAT_MRT3847_18912C.1
caggtcatagaaaacccatgtgcaagttacagtgggtggatccccgggtcgatttgcgcttccggtgttcaagctgaaacgcagtagtatcatgcctgggaaggttaaccctacccagtgtaggctttgacaatggtgtgtgaggtcataggaaaccatgttgcagttacagtgggtggatcaaatggtcattttgagcttaatgtgttcaagccaatgattgccagttgtctcctgcattcgctgagactgcttggagattcatctgcttcctttgaaaagaattgtgtgagaggcattcaagctaatagggaaagaatttcaaaattactgcatgagtcactaatgctcgtcacatccttaaacccaaaaattggttatgacaaggcagcagcagttgccaagacagcccacaaagaggggtgtactcttaaggaagctgcattgaaactcggagtgctcagctctgaagattttgacaagcttgtggtacctgagaaaatgcttggaccgtctgattgactggctcgcaatgttttgttctaataattccttgttttatcatcggctacattgaggtagtattttttagctacacccgttgattggtttgagaaatggcaacccaatgaacaataatttggcttcctcagttgatattcgcgagggaagagctcttccaaatttgtaacgagacaatgtattgcagaaatttactgagccaaataaagggaaattttttattcaaaaanaaaa

SEQ ID NO: 53047 - DNA, 320 bp, Glycine max
  unsure (1)..(320): unsure at all n locations
  Clone ID: PAT_MRT3847_18913C.1
atggagaagcttttccacattttgcttttctttnagnatgtggtctagtaccatttaagcgagcacggggaaanggccacataatctaacggaatcttggtacatgccacatgatcacagnccctaactccctaccataatagcacaacaatttaaaattttaaatagctgaccgggataacatagcggattcctttcaacccacaaagatcacttgttcgcccgctcgcttgctttacaacctgtaacaaagatactccgagaaagagaatctctcaatcccttagtgacaagaatcaattcaccgacactactcctga

SEQ ID NO: 53048 - DNA, 2591 bp, Glycine max
  Clone ID: PAT_MRT3847_18914C.1
ggaattcggctcgagcacatattacatcaccaacaatcaaagcaatcacttttttaattttattttttctttcttttcaggtgtaaacacacaaaacaaataattttcctttcgataggggtggtaatatttagacttttatcatttacaaacatgttattaatattttattttatttttttatctatttctgtcctgtcatataatcaatcttattaatcatgtattttcatctgtcagtatttctcttatggcgtttatgggatctcgaaaaatcatttttcataaaagtgacaggtgaggttaaaagagtggctaatcactgagagaactacacctgtaaagtgtgtaacctacgaatattatcgtatgattcatactaaatatatctatatagagagagagagagaaagatttcagctccaacttccaacgagactgcgtgtggtatccttatagattggctgcaatattaccctttttcatttttgaagtatacgcctgaaattgaagtacaatggcacttcggtccggcccgggtcgaacccacgcccgtccgcggctcggtgtccttattgggtacatactttggcagtattgtattggtgattggtcagactagtgttattctccggtggctccttccttccttcgccatggcgttctacgtgctctcgcgtcgtttatcagctggatccaactcaacgacgctcctcgccctgcgttttgtttcctcttccagatccttctcctcttccttcagggaagaaagagatacctttggacccattcaagttccctccgacaaattatggggagcacaaactcaaagatcgttgcagaacttcgacatcggtgggccccgcgaacgcatgcccgaacccatcattcgcgcttttggcgtcttgaagaaatgcgctgctaaggtgaacatggagtatggtcttgatcccatcgtgggagaagcaataatgcaagcggcacaagaagtagccgagggaaaactaaacgaccattttcctctcgttgtatggcaaactggcagtggcactcaaagtaacatgaatgctaacgaggttattgcaaaccgagcagcagagattcttggccataagcgtggtgagaagtttgtgcacccaaatgaccatgtcaatagatcacagtcttctaatgatacattcccaactgtaatgcacattgcagccgcaacggaaataaactcaagactgatccccagcctgaaaacgttacacgatactctaaactcaaagtcagttgaatttaaagatattgtcaagattggacgcactcatactcaagatgcaacacctttgactcttggacaagagtttagtggatatactacacaagtgaagtacggtattgatagagtaattggcactttgccgcacatgtatcagcttgcccagggtggtacagctgtagggactggattgaatacaaagaaggggtttgatgccaagatagcagcagcagtagctgaggaaacaaatctgccttttgttacggcagaaaataagtttgaggccttggctgcccatgatgcttttgttgaaactagtggagcccttaacactattgcggcttctttgatgaagattgctaatgatatacggttattgggaagtggtccacgctgcggtcttggggagctcattcttcctgaaaacgaaccaggaagcagtattatgcctgggaaggttaacccgacccagtgtgaggctttgacgatggtgtgtgcacaggtcatgggaaaccatgttgcaatcacagtgggtggatcaaatggtcattttgagctcaatgtgttcaagccaatgattgccaattgtctcctgcattcgctgagactgcttggagattcgtctgcttcctttgaaaagaattgtttgagaggtattcaagctaatagggaaagaatttcaaaattactgcatgagtcacttatgcttgtcacatccttaaacccaaaaatcggttatgacaaggcagcaacagttgccaagacagctcacaaagaggggactactcttaaggaagctgcattgaaactcggagtgctctgctctgaagattttgacaagcttgtggtacctgagaaaatgcttggaccatctgattgattggctcgaatgttttgttcttataattccttgtttcatcatcggctccattgaagtattaagtattatttatacgaaagcaaaaagcttatatacatatatcctagaacaatgcaccaaagaccttagggtcaaggtttataaaattgtggttatgattgcagatgcgattatcgcgattgtggttattgcagcagctacagcgggaaataatcttatgtttgtacctgatactaaaaacatgtaattctttatgtaccttttatttagaatgttatataaacttcttctttttttcccattgttaaagaaaaaaagtgtcaacccaataacccataatttgggcttccccagttaaaattcgcgagggaagagtttttccaaatttgtaacgagccaatgtattgcagaaattttttgagccaaaaaaagggaaatttttttttt

SEQ ID NO: 53049 - DNA, 328 bp, Glycine max
  Clone ID: PAT_MRT3847_18915C.1
cgtaagctcggaattcggctcgaggaggggtgtgaatgttatatgctgttaggcccatcatgaataatgcggccagtgttgaagatgtgggggcagcagcaatggggaagaagaaagtgaagaaagagggtgagcagaatgtggggaagcgtgtggtggaggaagaggagagaaaggaaagttctagacacatgttgtgtgtggatacatcttatccacacatgatcttgcgtattgcattgattgttctttttggcttcttgtacaatccactttaagttaagtatcttgttctatggttcaacttctatgtgtgacttgatgcttt

SEQ ID NO: 53050 - DNA, 331 bp, Glycine max
  unsure (1)..(331): unsure at all n locations
  Clone ID: PAT_MRT3847_18916C.1
gtcgcatgcacgcgtacgtaagctcggaattcgggctcgagnatattttctcnntnnctttctctcctaantggtcgnntgntcanaagaaatangnngnncaanacgaaggngtctcacnactacttatangtcnggggcanaanatctttcagtcanctnctatcttctgacccatttcagnaggaaccagcaaaanatagaggcagaaggttctagangccgnngattcncaggnttatgtggatggcgaatannaccngtngnnccaanngtntgagattnagcnnagtgnntcccttgggagtcccaaccggttgagntcccggnn

SEQ ID NO: 53051 - DNA, 313 bp, Glycine max
  Clone ID: PAT_MRT3847_18917C.1
aaccaggtaacagaattcggagggctgggttacccttattacacaaatttttttgtgggtccaattccaaccttcccaaggtaaccccccatttaaggttttttaacatttttttaaagcaaaattaaatcttttccggttaatacccgccaaaaatttcctttttggaagttcaacctttttgtattaccaataccaggtcctttaattttggaggctaattatttaatcatggttcaaaatggggggaaagccccacccaattaccttcctgggagggccttgcttgcccattccttttgggaggttgggt

SEQ ID NO: 53052 - DNA, 366 bp, Glycine max
  Clone ID: PAT_MRT3847_18918C.1
acgaccacccttttagaacaagggaaggggtgtaaaacaccaactttccatactcaaaaaaaaaaaatacctttttattttttaccatttgcaggaaagcattaatcttaagttgtacagaggccttaaaaaaatttggtgaaagcactcaattggaaaccaccctatgcccccttcctgcaaaaaatatatctcttgacaccaatcaccataatgctataaaaactttgcgcccttatttatatgacccgcgcccgaagggcatcaaacattgtttactggaaggtaggctatgataacaatacccttggacgcctcatacacgttaccctcacaactttcaatatatacagaagcctaagcttt

SEQ ID NO: 53053 - DNA, 223 bp, Glycine max
  Clone ID: PAT_MRT3847_18919C.1
aaacagtaagttttatttgttatcgtcattaagcttaggaaccaaactctattcataaggactctgatactctaaattattgggggaaactggacctactgcatatattattaaattcgtagtacactttaaaatttatgatttgacctttaactttgtaatccctatccttgaaacactcaagatgatgaacgtgatttgaccttagacattaggcgacggc

SEQ ID NO: 53054 - DNA, 806 bp, Glycine max
  Clone ID: PAT_MRT3847_1891C.1
cgcctcccacactctcactctcttttcaactcacccacgcgtccgccaacgcctccctctctctctctctctttccttctctcttttcaactcattgaggcattcatcaaacaccttctcaaaatggccaaagttggaaaactaacaaagctcaagtcagcaatcaagagatggccctcattgaccaggctcagccgcaacagcagcagtgtctcttccaacaaaggggtctctggaaaaggaacatcccttaattcatccaaggaacacgagcatgaacaagaacaacttcgtgcggtttatgttggcaagtctaggaggcggtacctcgtgaactccgaagtgatcgatcaccccgtgtttcaggagctagtggacaggtcttgctcttctaattcttcttcttctcatcatcatgacgatgatggggtggtggtggtgtcgtgcgaggtggtgctgttcgagcacttgctgtggatgcttgagagcgaagagaccaagttggggtccatggatgagctggtcgagttctactcttgtgcatgctgacaaacacctagtaataataactgactttaattgtttcttctctcatgtggtcacgcaaaaccattggtcatgactgctttgcgaattcagattgattcaaatgttatatattatataaaaatatatatattgctattattatataaaatgggcatgttgtagttgacatgaaagtgatattagttgttatgacattgttttaggtgaatctaatgcgacttcaaattaatcacctatttcatttgcaaaaaaaaaaa

SEQ ID NO: 53055 - DNA, 413 bp, Glycine max
  Clone ID: PAT_MRT3847_18920C.1
gatcgaggcttttctgtactgccccatcaagtacactacattctttatggttctcttctttaaactctcatgttatttaaactatcgtcataggtggctatcgcaaagagttttctttttttctctttagaaaaaccgagatcagtcgggtggtctgagtcaaaaggggggagtgatagcctaatttagcctatgggggaatgaataatttgacgaggatacaagatcattctgtacttttcttgcaaacacctttgtagatgtgaccagctcaaccctttatttcttcggcctatcgataaaacttttttttgcttagtcaccagtaacatcagaaccatctattttttttccttgaaagaagggacacacaagcgttcacctttggggctgcaacagcaatctcggtggaa

SEQ ID NO: 53056 - DNA, 419 bp, Glycine max
  Clone ID: PAT_MRT3847_18921C.1
tttacgcgtttcgggcttacttaagcttcttagtgctgcttcttgcagctctaattctatcccctcaagtgctagcgaactatgagaatcccccagtgtacacgcctctcactgagaaaccaccagtttatcagcccccagttgagaagcctgctgtgtacaaacctccatatgcaaacccgccaatttataagcctgcagtggagaagccaccattgtacaagcccgcagttgagaaacccccagtgtacaagcccacagtggaaaaaccaccatggtacaagcccccagccgagaaaccaccagcggacaagcccccagacgagaagcccgcagtttacaagcccccaattgaaaaacccgcagtgtacaagcccccagatgaaaaaccaccagcgtacaaccccccagttgagaag

SEQ ID NO: 53057 - DNA, 453 bp, Glycine max
  Clone ID: PAT_MRT3847_18922C.1
ccacgcgtccgaccccatcaagtgtttgtgaaaatgccagccagaaacttctccgtccacaccccacgaaggtcacccaggttcctcccccaacaaaaccacgacactcccaaccccaaatctgcgaaactcagcgtttctgccaacaaatcggagaagtgcgctgttgggtcgagaagatctccgaggctgaacaacgttgaagaacaatctccccctctgagacgatctcccatgttgaacaacgagccagtcggtaaacaattgaaaggcactagagtgaagaaggggggtgtaactgcaacgaaggaaaatcgtgtcgtttcggacgagggttttggtggaggaaagaagaaggagagaaacaggaagagggttgaagtggaaacgcaagaaagtgtcgttttcggacgagggggtttggtgggagggattaaagaagggagagaaaca

SEQ ID NO: 53058 - DNA, 309 bp, Glycine max
  Clone ID: PAT_MRT3847_18923C.1
gtgattttggcattggtgctaagttgataaccataaacaatctgtgtgcatatgggctcgatcctggtatttcacgttctcgcttttggggcaccattcctcagtacatttaacagcaaactgtgattaatcaaatggcaacagtgagaacaccattgaattttgaatttagcaagcagagcttctgtcaattttctattgaccttctcggctgaagaattttagtggacaaaactggagattggatcacacttatacaaaattctccaattagtaacttgttgagagctgctgctaggaagaaaggct

SEQ ID NO: 53059 - DNA, 510 bp, Glycine max
  Clone ID: PAT_MRT3847_18924C.1
aggacagattgacccctcatgcctcatcagggcagccctcaacttcacaattcgagaacttatgtaaaatcgaatgccctccaatagtgtaataattggcttatgtctgtagtccattattacattattgaatgcctcacacatgttatttacttgcaaatcacactttgtgtttaccttaaaagcagaccttgtccaacaagcaggttataacttttgcagatcattccaagcttcttcatcataatttttaatctgcaacatggctttttgccagtcaggggtagttgttgctcgagctgccatccacatcaactctttcatgtgtgctcccgggtacttattcttccaatagccatacaaatgtttgacacacagctgatgttctacgttttcaccatgctctttgattacctcaaccaaaccctgcaaaaaatagcggaccaattgaatgaaagccatagttcatgttagttccaataagtatttaccttctgctggttagaaatg

SEQ ID NO: 53060 - DNA, 416 bp, Glycine max
  unsure (1)..(416): unsure at all n locations
  Clone ID: PAT_MRT3847_18925C.1
ggctcgagttaatattatacaacaaaaaataattaattatttttctaacaatatgccaattttataaattatattcctaattcgctaagattattgtttcgtagcatattggaatatgacccttttcaaaaggacaatgattaccttggggaagtgccttaatataatttattgtattttggtgaagaaagtaccttaatatataatgctgcccaatatctatgcttttcattctcaatcagtagtactccataacggttgaaacccaccaacttttcatcaaatctgaatggagcaaaaaggcttgcaattatatgataatgagtccaatagaaattattatatcaaaggtattgacaatgacatatcgtttaagatanaagcaagatatctaacatgcattgagtngctttagc

SEQ ID NO: 53061 - DNA, 323 bp, Glycine max
  Clone ID: PAT_MRT3847_18926C.1
ggcagtctttaaatttttaggctcgacaccacccttgatgtttttcttggtgcaaccaaaccatcccttgatctgtttaaccccaccatcattgttttaataattggaaaccgcttaaccattaacatgcccatgagaccaaggctccccatactgacaaataccattagaattccccatccaaagcgcggaatacaactgcatttaaaaccttgcagtcaaggggtggttatactcaaaagggttctattaattcaagatactctacctatcattcataacgaaaaggtgatcatttgttgtcggacccggaactgtcctta

SEQ ID NO: 53062 - DNA, 432 bp, Glycine max
  Clone ID: PAT_MRT3847_18927C.1
gggctcgagagcagattgggctactgagatggcgtttaaacattatcgactcattacggagctcactccacagggacttatggagagcataatgctaatcgcatgactgcaaccaaatatgagaacttgactatttgcagttgacgactgtttacacaactgaatgtgatatggaccacctgcaggactacgaggggattgctttccggcgtaaataggtttagaaccttaacgcactaaccttatgaagaaacttgaataaccaaattccaatcatgttaacatgtgaatgaaactccctaaacattctgatttccgagccgttaacgaatggaactacgtgtggactggggcttgagaccacaactgatgaaaaccttatgctccgtgatgcgggtgtactgctacttaataatgaatacatgtatagta

SEQ ID NO: 53063 - DNA, 273 bp, Glycine max
  unsure (1)..(273): unsure at all n locations
  Clone ID: PAT_MRT3847_18928C.1
ctttgtaattnattttnctggtggttatantcaattnctcaagcactttgttttgctacatggctattcttaagattgaatgaagtagcagttatatatgttatgtatgaactaacatctattattgcaaatttgctttccattacttctatttatntgtatttagcaatgtgaaaatcgttagtgtattggatgatcggtagtaattactggagtctgtagtttagtttattgatggtaatatgttcattctccaagtaaagatgtcttnga

SEQ ID NO: 53064 - DNA, 314 bp, Glycine max
  Clone ID: PAT_MRT3847_18929C.1
aaagagggaaaaccatgggtttttcatttaaaaagcccaccacacaacacttccaagttccaaggggatacttttacctcttaaatggataaatccattccggattccctaaagggaatcccattttccattggtataaccgcttatttaccacacccttaacaatttttcaaaaaaaattcttcaaaaaggcttatttgaccggtttgggcaaacccacttggaaatttcccgaagccaaaaccggggggtttgcccctatgaaaaccttggccaaaattccggcttccattccattagtttaaaaaaaggga

SEQ ID NO: 53065 - DNA, 236 bp, Glycine max
  unsure (1)..(236): unsure at all n locations
  Clone ID: PAT_MRT3847_1892C.1
gaagagtctatgatcgtcgcatgcaccgcgtaccgtaagcctnncggaattcggcttcgagcccatnntttctatcttctttcgttggtcgccccgttcagttcacccagcgtanngcctctgcttcnntcgaagatggctttcctcnnccagaggtgnngtgagtgggttcanngggcgtggtcaggggtgaccagagnngtagaggaaaggggtgnnngcggtggaggggaaga

SEQ ID NO: 53066 - DNA, 222 bp, Glycine max
  unsure (1)..(222): unsure at all n locations
  Clone ID: PAT_MRT3847_18930C.1
tttctcacnagcgcgccctcaccgccgtggttcaccgatccggcgggctccaagaagtgaacccgccttctcatgtcatccaatttttttcccatgaacaaaagtctctctttcagcgtcaaattctgttcttcaaggtgcgcaatatgggcagtcctgctcagaaaccctgttgtccaagttatgatgttcgtcaccggaattaaggtattccctctcaaa

SEQ ID NO: 53067 - DNA, 820 bp, Glycine max
  unsure (1)..(820): unsure at all n locations
  Clone ID: PAT_MRT3847_18931C.1
ccacgcgtccgcggacgcgtgggcacaggcccagtttaaaaggacaaagcattgcgaggcttacatagagatcattcagcatttaccactagctagtgcgttaattgaagcggtatattgtaagagaaaaatatgacatcactgcataattaacttcccagaaatacaacctttgttttcactccctcccattagcttcaaatatgccaaccatctttttctacctgatcatgtgcagaccaactcatacaatgaatgcgacaaaccaactaggagctgtcaacaatcccacttgaagtcaatttaatttaatcttccatgttcttgttagagacacaaatgctctggccaaaattagaacctataaatctctactcacatggcatggggtttgttactccaatattcattcatttggcttcaggaaggaaatctttcagtatattacacccttttcattttccattttccctttcatagcttcaacttcataattaaattcaatgtgtgactcacttcaatatagatgaaaacttgtgttgcattatactttgttactaattataaaattctttcaattaattcatgcttcttagaaaaagtattttatttaattaatcacattaaatctgttaattaattatgttatcattttaaaaatatttttttcttatttttttatccattnaattggtattctataaattttgggagaaaaaataatttaaataaaatttattaggaaaaaatataatttaatgtgttctaaaaattaaaaaaaaaactattaaaaaagataaattaaattggttgggaaaaa

SEQ ID NO: 53068 - DNA, 179 bp, Glycine max
  Clone ID: PAT_MRT3847_18932C.1
agacaacaatgttgaacgttgactataacaaaattaacaatgagctaagacggattatacatataacatcctgcgttagatgtgacgtttcaagtatgaaaccgtaacctttgtagactgctggtacaagtcatgcgagctcaacactataagatcagcaatgtaggcattggcacgtt

SEQ ID NO: 53069 - DNA, 364 bp, Glycine max
  Clone ID: PAT_MRT3847_18933C.1
atcaagctcactcatcacttctcatctttcttcacaataactattagctcatcatctccagcacagctggacatgtcatcaaatgcaaagctgcggttgcatgggacgcacggaacccatttgttattgaagaagtaaaggttgcactaccacaagctggtgaagtgcgtttgtagatgctctagagatctccttgccacactgacgtctacttctgggaagctaatggcgacaatcgagatgatcttcgtggatttagtgatgaagctggtcggattgtggagagcgtaagataggatgtgactcatcgtaaagtagaggaccatgctctcactgtgttcaccgaggagtctatggactgcct

SEQ ID NO: 53070 - DNA, 312 bp, Glycine max
  Clone ID: PAT_MRT3847_18934C.1
attcggctcgagaaagaacataatcatcatatacgagtcctagtttcatataatagtgccatattacaaacattatgggggaagatcatccacccggccttcgtctttccccaacagtagaagagcttgttgccttctacttacactacatgcttgaaggtcaaagaatagccatcactcttgccacagcccgattcattccatcctttgacttcactatcttctcagcctcactctccaccttcacctctctccctgtcttatcctactcctcttcaaataccactcttcactccctctctctcatttccc

SEQ ID NO: 53071 - DNA, 328 bp, Glycine max
  Clone ID: PAT_MRT3847_18935C.1
aaagcacattctatcgccatcatatagcacctaagatactcatgccgtggatgagacgctcgtcacatcaggcgagctttcactgttagaaataacacatgcagtcttacttttgaatattgatacatctgatacgcattcgaaacttatgcccaaatgctctcacatgcaagcacgtatagcgacatacttttgatgtcgtgcacattcacaacaactacaaaatccatcgctatgatgcacccaaaaggatttcaaacagacgctatataggacagtgctatatttgaagccacaagaaccagctataggaggttattcgactatt

SEQ ID NO: 53072 - DNA, 375 bp, Glycine max
  Clone ID: PAT_MRT3847_18936C.1
caattcatatatgaacgctatggacttcaaattgcaagaagaatgtaatattggtgttaccagagcctttctgtatgatttaatatgtgctccatgacagttctgaacaggcctcctgtggttgcaagtgatttgtctgcatacaagccaactgattttttggaagcgtgggcttcaaatctgaaagggtagtaacttttagttccacccgaacaacaagctgggaacataaagacaccgatttttcacaatggttatacaaccaacgcagccatgttacttttatcatttgacaaccatggattcacacggacagactctgtgaaaacatcctggttgtgtacatgctatatttaaaaaaagaaaagtacaatg

SEQ ID NO: 53073 - DNA, 735 bp, Glycine max
  unsure (1)..(735): unsure at all n locations
  Clone ID: PAT_MRT3847_18937C.1
tttttccccccccccgtttttaaaaaccgggcccgtaaatttttttttggggcccaaaaaaaaaaaaaaaatatttcaaaccccgggcaaaaaaattttgtcctttaaaagggcccccccccnnnttttttttttttttttttttttttttttttttttttntttttttttttttttttttttttttttttttttttttttttttttttttttttttttttttttttttttttttttttttttttttttttttttttttttttttcaaataaagtgttaccacttgagaattgagcagcaaagctacagaagttgtcaagtaatacaataaaaaaactgaaataatttttgtcaactttcgaagaggctcgaacctaatgctctggccatatgaacaaatgccgtttgcaaaacaatgacaacaataatccaaaggaagcctttagagacctcatttgcatacacaaaatgagaagtacataactaagatagcacggcatttactaccattcaagttgacctaactgtaaagatcatcttcatcagctccaccagcagaagcaaatggatcagatgcggtggcagcacccaccactggaggtggaatctgcaaacctgaactcacttccaaaccctcttgactgctgtaatgtttgggcaaatgcctggtacttgcgaatgtcggcatcgctaacactccttcgagcatatttcattgattcctcaaaatgagct

SEQ ID NO: 53074 - DNA, 243 bp, Glycine max
  unsure (1)..(243): unsure at all n locations
  Clone ID: PAT_MRT3847_18938C.1
ttaacatnnttnctnctcactactacaaaatactcaatgtaaatcatccacccactcatnaatatattatttaactcttataacaaaaaaacaatcaaatcccacccagataagaaccttcaataccctcttaataaacaacactttcaacccaaatttaaacaaatttcttatccctatcatctccttattcacccaaaaaaccgccagatctatgacttttacngtcactattcccttaac

SEQ ID NO: 53075 - DNA, 293 bp, Glycine max
  Clone ID: PAT_MRT3847_18939C.1
cgaacgctcgcaactaatttgtcctttattctctaaccggcacatatatttctgaatacgaaccaccatctttgtgctgcgggagatttatacgctgggtttggggaccacaatacgagacaaataactcacgaacaaaatttattatgatcatgaactttaccctcccaacatcaacaagtcctttgactagtactctatcactgatcgatatccccaattcactcctgtgggagcaaattgactgcttctattgacacccatgacaattactcctctcacaactgtaccat

SEQ ID NO: 53076 - DNA, 385 bp, Glycine max
  Clone ID: PAT_MRT3847_1893C.1
gggttggggttttcttgtttttgtgttttttttttttttttttttttttttccccaaaaaggggcaaaaaaaaggggcttggggccaccccggaaaggggccaaaaatataaaaacccccccccccccccccttttaaacaaattccccaaaaccccaaaaggcgcccttttaaaagcccattcaacaagggggggggggttacaaaaataccgccgggggtgggaacccacccccgcccctttggggcggtattaaaaggcccccaaaaaacgtcaccaccccggccgaaaggggcctcttaaaaagagcaaatccccgggccaaaaaataaacaaacgggttaatgccccgggtgggaaaaacccgcacgggggggggcaccc

SEQ ID NO: 53077 - DNA, 362 bp, Glycine max
  Clone ID: PAT_MRT3847_18940C.1
gctcatctgtgcacaggtgctgtattagcagaagcatattgaatattgggttgggttgagaccctgggttgaagcggcgcggacattccggctgttgctagagggcttcgctctctcatgcatgtgaccactgtgcgtctgctgacatgttgcgcaactgccaccaagccttcggcgtacggtgtgcgtctgagcttcgctcctgaagcggcagcctacaaagacttgctctagtcacctggaggtgaacgcggtgacttgtagctgctcgacatctggtcgtcgtgcaacatactgacaggctacatgcgccacaacgtagccgagacgtacactttcttacttcataggatcaccacctc

SEQ ID NO: 53078 - DNA, 441 bp, Glycine max
  Clone ID: PAT_MRT3847_18941C.1
acacagagaagagcgggtgctgaagttaaagctcttaaagaagtagaggacatgaggaagctattggacgctctacccctaactgatggaagatataggagatactgtatagaggacattgaagcagccaccaactacttttctgaactccacaaaattggggaaggaggttatggccctgtttatagatgttatcttgatcacactccagttgctgtcaaggttcttcgtccagatgcttctcaagggaagtaacaatttcagcaagacgtgatcaaccaagatagggacgcgcttactattcctgcatcagaccaagcctgaacctttagtgcaccgtgatctgaaactagggaacattttgctggaccagaattatgtgagtaagataagtgatgttggattggcaaggcttgtcccggctgtagctgaaaatgtaac

SEQ ID NO: 53079 - DNA, 204 bp, Glycine max
  Clone ID: PAT_MRT3847_18942C.1
ttcgatggtttgggtttctcttcctcccttggagaaaaagaagagccaccgctgcgacgccgttcgtgcatttgtgaggtgccgctgtcatgtgtgggcgtggtggaacaaggatgggttataacgccaaatatgatgatatgctcgggatttccaaaaatgcgagtgaagatgatatcaagaaggcctataagaaggcggcta

SEQ ID NO: 53080 - DNA, 253 bp, Glycine max
  Clone ID: PAT_MRT3847_18943C.1
cgaccgaggcggaagctagaggctgatgacgctagcaccctcgtgaataccctaattccgagggtttcagtcttcgacctgtcacttgagctgcaacatcttcagccataaggctgctagccagactgcaatcacacacaatgactgacggctacgaatgagacaggaaccctgagatactgcagatcatgaacacggtctaggcgttggacgccgatctaggtcatgagaccagcatgaactcactgatgat

SEQ ID NO: 53081 - DNA, 261 bp, Glycine max
  Clone ID: PAT_MRT3847_18944C.1
gacaagggagtgtttaccattaaacaaaccctatcttatgtttctgaccgagcataggcactggcaccctaaaagccgtgctccactataaggtacctgtttatgattactgcgattgcaacgtattcgaagtctcagctgtaccacatgaggtgcatatcggccatcaaagtctaaaacggtggcattcttgccttgcactattccaaaaccaaggcccaagccccggcccagaagccgcccaagttctaccccgcggac

SEQ ID NO: 53082 - DNA, 438 bp, Glycine max
  Clone ID: PAT_MRT3847_18945C.1
aaaaaaagccaaaacttccgccgggggatatatgccgataaaaaaggggggacaaacatttttaccccaaaccaagggactttgggagaggagtaacaagaggggagcataacaggaaaaaaggggcctacttattctgggaagcaaaacatttaacaggcaccccaacaatgaagccttttctttaacatagttaccaagcttttaggggaggctccctaagcttttgttccccaccatggccatgactaaacattaaccgccccctacaaagggcgactgggcatgccacgtcccctcccttgtccattatagccggaccctcctccttttccataaaaaccacctggggtacctccaccacgggcagggccacgggccccacaaccaccaaggggcctcacaaaatcaccaaacgtctcagtatcaatcttgatt

SEQ ID NO: 53083 - DNA, 239 bp, Glycine max
  Clone ID: PAT_MRT3847_18946C.1
ggaaaactatgttattttataactgttatttgaagcgggagcatttatacgagacactaagcaactatgaactatgaaggtaagagcgttaatatgtctggggtacacacacttaaggccatagtatccatttgcgatcaacaacatcggccaccttatgtgatacattatgcaaaaaaaggtaggctatatttccataaaacaaataccctcattttttggggtggtttatccctcct

SEQ ID NO: 53084 - DNA, 179 bp, Glycine max
  Clone ID: PAT_MRT3847_18947C.1
gtgtgcttgcattgcactaacaggttacgacttagtagctacctatgtaccgttaataaggggggataccatgatcattgctaggatgaatcatgtctagatcatccagaatatagcaatgatgatcacacttgttcttctgaactaaaatcatcgtcatctatctttgcagcacgcac

SEQ ID NO: 53085 - DNA, 493 bp, Glycine max
  unsure (1)..(493): unsure at all n locations
  Clone ID: PAT_MRT3847_18948C.1
aattgaaaagcggaaatcaaaagggatggcaaaaaaagctgggagccttagacaagcgccaccagcaaatacattaccccgagttcccaaatcccaattcctaagaaaaacatttaaaaaccacaaaacaaaaaaacaacccagaaattcgaaaaagaccaaatggaaaaaaagacaagtaaaaagggtaatgaaaattaaacagaaaactccaaaataaaaaggtttaaatcaaagggccaaaaaccgggaccccttgcaaccctccccaacggagccacatacccagaaaattttttaattgaaacaacccgggcaaaaaaaagagaagggacaacaaacatagggaatatcagcaaaaatacagaggcaacttgcaaatttaaagtcagnggccacagcaaaagagcccaattaaagcgnttcaatnaaaatttaggtgggggcttccccttttcttgcgacaaagcattcaacacacacaatagaaagg

SEQ ID NO: 53086 - DNA, 349 bp, Glycine max
  Clone ID: PAT_MRT3847_18949C.1
aaaatggcttttcttacaaaggaatcccctaaaaaaccataaacttattttaaaggggccaattcaaaaaccggataaattaaaaaaattaacaagttaagtaaggggttaaaagtaaaaatccggttagggtgcttaataaaaacatacgaatcggggggaacccgaaaccaagcttacgtgcgcgggaaataaaaaaaaaaaaattttttatagccgaacctaaatttaattcaccggggcggggaaaacaaaaactttactgggaaaacccttaaataacccaacttgggcgccttttaacacattcccaattgggaaaaccgggggataaccaaaatgaaccccc

SEQ ID NO: 53087 - DNA, 536 bp, Glycine max
  Clone ID: PAT_MRT3847_18950C.1
cggaattccttgttcttcccacgcgttcgtgcttcttggggtttgattacagttctgcaaaaatgggtcctgagaatgagcaagttgaatactctgttcaagaggatgggaaggtctttaagccaaagatgagggtgaaagttaaccaagagcttttgcaattatcaaaaagtggatttgcaaatagagaggggaaacagatttatgatttctttctagcattggcagcctgcaataccattgtgcctcttgttgttgacacatccgatcctatggtcaagctaatagattaccaaggggaatcaccagatgaacaagcgttggcttatgctgccgctgcctatggttttatgcttattgaacgaacctcaggtcacatagtcgttaatattcatggagaaaaacaaaggttcaatgtcttaggtttgcatgaatttgatagtgatcgaaaaaggatgacagttatattagggtacagtaacaattctgtgaaacttttttttaaaggggcagaatacatccatgtttagtgtgat

SEQ ID NO: 53088 - DNA, 627 bp, Glycine max
  Clone ID: PAT_MRT3847_18951C.1
tcgcctcgagacggctgcgagaagacgacagaagggggagctctacttaaagtctgtggctagagcaaaggcagcaaaacttgcttaattgagcaaaagaagggttccctgtgcaatggttcaattttgtcagtttctacatagagacaagagttcagagttaaagctcaatcagcaggatttcactgagcataccagccattcaagaacatctcagattgggaatgaatttaataaaaaatattaaatgcaacatggctgctgaaagtatgctgcaagttccacgcctcatcacccagttactcctttttccatttgaacggggttttgatcatggaagcaatctttctcatatactttgatgaattctaggtgatatttcaactttactacgccttgcaacatcgtgtagttattttttctattattaccctcttttcttctcttattcttttaatatttcaacagtatacaaaagtcggtcatacatgtaaatcgttacaacttagttccctacaaaaatatgttacaatgtaatcaattattaaacaaaaaaatgttcaccacttgtagcaaaaagagaggacgcaggagacccgccccccacccacaaaccccacccccccc

SEQ ID NO: 53089 - DNA, 388 bp, Glycine max
  Clone ID: PAT_MRT3847_18952C.1
agccccaaaaaggggaaaatattatggggaaggggagtttgcatttggcatgccagggacaaaaaacaggtttggtttcctaacccggaccggaattggccaaggaatctgcaaaagcttacccatttccttggtcttttaaaaagtaaaccccacgaaaacctcccaagagcaaaagtttgccaaaaccatccctttggattggcaggaaccatccttttagcccgggcccaagcataaagggccccagcaatttgggcacctgtgccccaaaaaaacccccaccttgtgacccacattggcccaaagacaaaatgacctggacccctgaaaagggacctgacccctatggcagggaaaaaagcgccacaaaacagggggaaccttc

SEQ ID NO: 53090 - DNA, 489 bp, Glycine max
  Clone ID: PAT_MRT3847_18953C.1
ccacgcgtccgcccacgcgtccgaattcgagcggccgcgggttttttttttttttttttttttttttttcagggaattctttttcttcacagcatttatttattatttttttttctgttcttctctttttattttattctgatctatcttttttttttcctgtactttgtttgttttacattctcttttttttctatttttttcttggcccttttttcccttgatcatctccttctgaaaaccgaagccaacttcaaacaccaccacaacaatgtcaatattgacatttttagttttatggcttttatctttcttgttagggttgttatgatatacatatgggatttttttattacatcttttgttttggataaaatatgcatgttattggaagtaaatattgatttatccatgttattacaggttcattagcatcatcaattacaaaattgcatttgtgcattcaaaatttctagttttatagtttct

SEQ ID NO: 53091 - DNA, 585 bp, Glycine max
  Clone ID: PAT_MRT3847_18954C.1
tccgatgtacactcctttgatgtagataggggaatttttctgtgtttttagggccttgatgagtattaacaaaggacactgagctgaaattgtctagatctgggataattttcatgtaacatcggaatatctgatgtaattctggctaatgtgaattttctcttattacaataaaaaaaaaaaaaaaaaaaaaaaaaaaaaaaaaaaaaaaaaaaaaaaaaaaaaaaaaaaaaaaaaaaaaaaaaaaaaaaaaaaaaaggggggggccggtaaaaaggaacaaaaataaaaaaaaacaaacggggggggccctttttaaggaaaaaggtttcctaaccgggggggggggggccaaattttttttttgggggccccaaaaaaaccttgcgggggccgcttttaaaaacctggggaagggaaaaactctggggttccccaatttaaggggggggggcaaaccccctttttttccaaggggggaaaaaaaaaaaagggccaacggaaccccctttcaaaaggggcatcaacctggggggggaagggggcccccccctttggggcccttaaacgggggggggggggggg

SEQ ID NO: 53092 - DNA, 237 bp, Glycine max
  Clone ID: PAT_MRT3847_18955C.1
atttctctctgtttccttcttcaccgcatcaatggagttcgacggcgttctcttcggcatgtgaaaccctctcctcgacatctctgtagtcgtcagtgacgctttcttggaaacatacggaatcaactcgagaggtgcgatgcctgttgcggttaagcatctagctatgtgtgcgtacctagatacgaacctaaggatctcgtacctggatgcatgggctacttcagatctggtccc

SEQ ID NO: 53093 - DNA, 454 bp, Glycine max
  Clone ID: PAT_MRT3847_18956C.1
cccaagccggtctcaaactcctgagctcaagtgatcctctgcctcagcctccagagtatctgggattgcatatgtcggctaccgtgtctggccgttcacatctttggccactatttgcttgtgaaaaggtataatgaggtggtacttatcatttttactgtgtctcatgttttgtatatttttgtttcatcaactaagatgcactgtaacatctctgaaatctggatatattatcaatggtttatcatagttttgttagcaatacactgtcttttagtggtgcctaaaataatggtatagttgtgaggtgatcttagatttgatgaagcacagtatgcaggtaggcctaatgggggaagatggtaatataaaagcaagaagtattttttttttgtaatgactgaaagctgttctgtggatgacctaccctttcctttaaacacgattctctcac

SEQ ID NO: 53094 - DNA, 511 bp, Glycine max
  unsure (1)..(511): unsure at all n locations
  Clone ID: PAT_MRT3847_18957C.1
accagaaatttgtaaaaatgagctctaaaggagaataaacagaagtagaaacatgaaaaggtaatatatgagatttacccatacaacaagaagcactaaacctgtggaatttttatttgatgaaggaatattacaatgagtgagaacaagtttcattacatgatcattaggatgccctaacctagcatgccagagattagcaatgctgagagaagaagaaacaaaattagacattacagtagaactattattattaatagcgagagttgaactaggagagtctccaatcacatgaaaactagctccagaatttggaatccaggtggtatcagcttgcccattcctttgagaggttaaactagtgagcatggcattgggttgactatgatttggaccaggattcttagaatttggattaacccaggtgtttgaggttctgactgaaccagtagagtattggataggctgtaatgtagtgggatcaaagaaagctaaagacttattangatgg

SEQ ID NO: 53095 - DNA, 269 bp, Glycine max
  Clone ID: PAT_MRT3847_18958C.1
gggccgcccttttttttttttttttttctgggaatgacactgtattttgagggaacccagaactggtgactaggtactagagtactggctcagttggaaggggaaaaggaagtagaagaagagtcggcgactaggactatctagctgccttgctatggtgcgcggcctacggggatagcggagccttaatcaaggggaggaggaagagctggttgactgaacttataaaccaatgaaggcgggctgggtggctgtgtgcttgtgaaatg

SEQ ID NO: 53096 - DNA, 453 bp, Glycine max
  unsure (1)..(453): unsure at all n locations
  Clone ID: PAT_MRT3847_18959C.1
cccacgcgtccgacgacagaaggctcttacatctctggcccaatcttcttggagtcgctaccgaatcgcgatcatgatcattccctacattgttctcttgttttgtgtcgctcgtgcaacaattggttagtcttttccaagagtttaatgtaatctatgtacccttaggggttccctctgttattatgtgcatattcatcttctccatttatcatcggtgatcacattttttatttgtaaagtttaatcctaaccgatcactagtacagtaacattgtctttaaagcgattgaaagttaataaacaaaactagaataaaaaacaacaactcataactaaatttctctccatgaaaaatcacttgagatcgtttcaaggtccaacgccttaacgacctgcttgtttgtcatanaaatgaatatctcaaaatcataaaaccaactcaacacacaa

SEQ ID NO: 53097 - DNA, 400 bp, Glycine max
  Clone ID: PAT_MRT3847_1895C.1
ccaaccctcaaaggaaattaaaattctttccccccaaagttgaaagggaaagggcaaatcaaccaccttaagaaaaaagttgacaaaaatttccgggcccctggaatttgtctccgggcttttaaaaaaaaagggatccaaaaaacggaccccaaagcaccttgtttaaatctttaaaaaaaaaaaggattttgttaaaaaaaccttcaaaccctgcaattgtttattcccaaactggggggaacttttaccccaaaataaaaaagcagggcctgacaatgttttaaagcgggcttgccggttgtttccaacagtgggttaaccttaggggggaaaacccccattggttcgcccttggatttcccttaaaaaacctttcatgcctcccatttagctttgc

SEQ ID NO: 53098 - DNA, 429 bp, Glycine max
  Clone ID: PAT_MRT3847_18960C.1
ttgggctgatttagtgcttgcatggtcgtgagaagatgatagaccgggattcctatttactaacattaaaacgatgaagtgcataacctcttctactgtctcctctcctactgtttatattcgtcgtgttcttaaacggtaatagtattagtaagagagtcgttgtgagtagtctaaggggactaattctaattttcgcgagtataccacggagaagacttaagtcggttgttgtggtgaggatggtagtgatgaagactatacctctactacgattacgttgggaagaactaatcatactaggaagaacgaaggaaaagaagaagaagaaggatatacgtagaagcgtcgtagtgaaacgagtgagtcgaaaagttttacacgttaccgtaaagtgtcatagaggacaacggacaattagagtgagta

SEQ ID NO: 53099 - DNA, 326 bp, Glycine max
  Clone ID: PAT_MRT3847_18961C.1
tgatttatgtgcttgtttatgtgcttgattacctgcttgattatcctcgtcgatagacgataatagatggtcatgggcgtaataaaattaccgaagggcatagacagaaaaagataataaaaagtggttggcccagagaacataattcaatgcctttgcctacataatattacagactcccctcagcgctatacaatcataaactatcgtttgctgcacaataatactgagatccataaactttcgatgataattaatccacctggtccgtagaatacgatagcccgactaggccgtgcaacaatgataaagtttcatattcactg

SEQ ID NO: 53100 - DNA, 251 bp, Glycine max
  Clone ID: PAT_MRT3847_18962C.1
gagacagagaagcattagcatttgcacgacgaactagtctgagcatagatggcctcttcagtgatggcatctgtggccctcagacctgcacctttcactgttgagaggtcctcagttataggccttccctccatctcaaggaactccgcttcatgcagagttgtggccagtggctggcaataatgatcatgactgacattcctgacggtattaatggttgcatgtctttgacggaatgagttgatgcatct

SEQ ID NO: 53101 - DNA, 451 bp, Glycine max
  Clone ID: PAT_MRT3847_18963C.1
atgggtctggacctggtttttcttttcccagttcatccttctctgcaagcagcggaagaacgttattggctccctgggtccccaacacaaatatttcctctggaagcttcaagattgttgctgtagaagagaagaaagagattgaagagacccatcctaccgacatggacagatggaagggtcttgcctatgatatctcagacgaccaacaggacatcacaagaggaaagggtttggatgacttcctttttcaagctccacaggatgctggaactcactatgctgaaatgagctcctaccactaccttagcactggacttcgcctgttcttggacaacaacatggatggatattacatcgctccatcttttatggacatgcttgttgctcacattaccaagaacttcgtggccctgcccacatcaaggttctttttttttggatgcgggga

SEQ ID NO: 53102 - DNA, 1031 bp, Glycine max
  Clone ID: PAT_MRT3847_18964C.1
cggaattcccgggtcgagcgacgcgtgggcggactcgaggattcctcaactcaccatccgcgttcattttccctcccaactcactcgtccccttttcactttcattcattcatgactctctccttttctatcggaaccaccatccaatgagacggcgccccgtggcgggtgttctccccgaccaaatggagaaagcaaacaccaaaaaccctaattccagactttgctttctcgcttccctctccgtattcttctggttcctcctcctctacttccacttcgccgtcctccgccaccaacccaccaaccctaaccccgtagtccccatcactctccaacctcaacaacctcgtaaaaacctcggcttccccgagaaaatttcccaaccggagaaacccactttccccttcgaccgtgccctccgaaccgccgacaacaagagcgacccatgcggggggcgctacatctacgtccacgaccttccctcgcgcttcaacgaggacatgttgaagcattgcagaagcttatccctttggaccaacatgtgcaagttcactaccaacgccggcctcggtcctccgttggaaaacgtcaacggcgtcttctccgacaccggctggtacgccaccaaccagtttgccgttgacgtcatcttcagcaacagaatgaaacaataccaatgcctcactcgcgatccctccgtcgccgccgcgttcttcgttcccttctacgccggtttcgacatcgctcgctacctttggggatacaacatctcaatgcgcgacgctgcatcgcttgacctcgtgaattggctcatgaatagaccggagtggaagatcatgaacgggagagaccattttctcgttgccgggaggatcacttgggattttcggagactcactggaaaagaatcagattgagggaacaagtttttgatggtgccttctgagatgaactttctcttggttgtagcgaatttggatttaaagctggattttctacctccaaccctgctaagtttcatttcaagg

SEQ ID NO: 53103 - DNA, 582 bp, Glycine max
  Clone ID: PAT_MRT3847_18965C.1
gctagtctcatgccaagctacaatggaatcttgactatcagttgtatccggacattgacccagattgcattaaagctttcagggttcattcctcttgatcgagtttatggacttgtaaagccttttcgggacataaaggcattgtggcaagttcgaattgaagcaagtagagcactccttgatcttgaattccactgcaagggcatggattcagctttgcttttatttatcaaatacatataggaggagcattccttaagaggttgtaaatcttttccctgagagaggatttatagatgatgtgtgacaaactaaaaatttggttcagaatggtagaattaaaattatttatagaaatgtttctaaagttggacaaatttcaaaacatatgtagattgtgcaaaatagttattgtttaaatcttgatataagttttacattaaaaaatttctatagagcaagggagagaaaaatatagtaaatagctttattatcacctagtaatggttacctttgagctaggtttgattgtttttttttttcaaatttttagtcattatcatacaagtttatgtatctgat

SEQ ID NO: 53104 - DNA, 707 bp, Glycine max
  Clone ID: PAT_MRT3847_18966C.1
ccgtcaagtgtaaaggataaccacacatctcaagccaacaaatcaatataaagggttacttgatcaccaaatcaatccagaaatagataatatatgtataaaaggaggattaaaggacctactaacaagaaagatgaaaaataaagaacagaaaggcagactaacctccatattaaggaatatctttttgctgaacagaatctcaatggtctggagtgcataataagttcatcagttgattagagattcacgaataaacaataaaaattgatttgtgtaaatagatctacatttcataacagaggaggcaggcaatgggtgttatatatgcaacataaaagaaaatacgtaaacttttttatgaaataattttaaggattgatgttaagtagggtgctaacaaggattctctatcctggaaacatataaatgaagataccactacaacccatggatcagtgttaccttgtagctaagtgaataaagtgaattgttgggcctttaatggtaatacttatgttatatcctagggtacaccaaactgtcttttgtcaggaagtcatgtgtgtagtctgaagtctcagttttgaggctgttatagtagtacagtcaacagtgtatacacctgacttattacaataaataaatatgcacttgaaacctaactaaaatgaggatagtgtaatccatcatacagcaacattcct

SEQ ID NO: 53105 - DNA, 688 bp, Glycine max
  Clone ID: PAT_MRT3847_18967C.1
ggctcgagcgtgatccataaggtttcgtgacattacgaaaagaaaacaagcatcgttacgaaattcgtaaagtttcgtaatgttacggaaaaagaatcaccaaaataaggaaggggggtgtatttagtaaaaatgggggttcaaatagaaaccaggcccactcgggccttccaggatgttcctccagaaggcaattgcttatggaggaagcaacctagctcgcctgggcgagctgggtggcaagctcctcccctattttcctataaatagagggaggagtgaaggtgaaagtggttcagccgttctggtacttcgggatcacttaaaattagtgagaaaaattgtttccgtgaagaaaatctaagtcgaggcgcttccgtaacgtttctgtgggtgatttcgcgaagattttcaaccattcttcgtcgttcgtcgttcgttcttcatcgttcttcgggctccaaccggtaagttcctgaaatcgaacttttcaattcattctatgtacccttggtggtccccatttgtttcgcgtacttttattcttgttttatttactttccatacccctttttgacgtgctttaatcatttacttaagtcattttctcgcctaatcaaaaaataaaataaatttccaccaatcatttgatttgaatatccgttaatttcggttaaaatgaaattcg

SEQ ID NO: 53106 - DNA, 319 bp, Glycine max
  Clone ID: PAT_MRT3847_18968C.1
cggacgcgtgcgccgacgcgtgcgcgtatactttgggataaagtagtgcgcttttttgtgtcacaagtttgagtttttgggtattgagaaagctgtgaattattttctataattcttctttttttgccgtgtttcaatgtggtgtgtgattgatgtgcgtttaactgttgagattcaaaatggagtgagcaatggttgttgcgaaatgggtacgtggaatgattgtggtggttccattgatgatgctgataacgttttgatggatggactcggggaagatgtgaacagggaaggccttataaagacaccactttacgta

SEQ ID NO: 53107 - DNA, 367 bp, Glycine max
  Clone ID: PAT_MRT3847_18969C.1
gagtgaaggaaacgatctcgagggtggtggcacaaaatatatatagatagacataacagcataaggaggaataagagcagccgaaacagaaaaagaaagacgcactctcactgaggcgcacacagacagagagagagagagagggatagaaacaaggatatcgaccccattgcgaatgcgagatataggcgaaagagagagagagagacaaaagttagatacatatgcagagataaagatgtgtgtaggaatatatagagagagggcggtagaggaggatctaccagaaggacatgcagtcaaaaatggtgagaacaaagatgcagtggagggcgggataaaaagagagagagatgaagaagaagaa

SEQ ID NO: 53108 - DNA, 260 bp, Glycine max
  Clone ID: PAT_MRT3847_1896C.1
taggtagcaaatcaaagcccagccactttgatgtgagagaccgaatatgctgaattcatgatactatataaaaaggtggtgtaaaccgaaacttcgacctaccgggctcctgccgcttgcccataaacatgaaatgaaggcgtgacatcggaacttgctttatagctaaagttggagtgtcagttactggctcccgcggagacggagcaccatgtgaagggacgactcatgttggaaaatgcacactgacaaagtgctgc

SEQ ID NO: 53109 - DNA, 788 bp, Glycine max
  unsure (1)..(788): unsure at all n locations
  Clone ID: PAT_MRT3847_18970C.1
cacaagcgtcatcccacgcgtccgccaaaaaatccgcataggagaaactgcgaaaatggcatcggagtcaggtcaaagtcccaatccttcttggtttacgcccaaaaggcttcttatgatattttgtctcattaacatgctaaactatgtggatcgaggagctatagccagtaacggtgtcaatggaagtcttgcaacttgcactgactctggaatttgtacaggtggcagtggaattcagggggattttaacttgaacaattttcaagatggagttctgtcatctgcatttatggttggacttctaattgcttccccaatatttgcttctctggccaaaagttcacaatccattccggcttattggtgttggattgtctgtttggactttagcgatagctggatgtggtagttcgttcgatttttggtctattgcaatatgccgaatgctagttggtgtaggtgaggcttccttcataagtcttgccgcaccatttatagatgacaatgcccctgatgcacagaaaacagcatggcttgctacattttacatgtgtataccagctgggactgctctgggctatgtttatggtggaattgttggaagccaatttaactggcgtgttgcattntgggttgaggcaattntgatgcttcctttntcccattttggtttntgtaataaagcctttgcaattgaaaggttttgcacccttggaatccaaacaaacactaacatatactgaaacaaatgtttcagaaactggagatgatgacacgcttgcttg

SEQ ID NO: 53110 - DNA, 297 bp, Glycine max
  Clone ID: PAT_MRT3847_18971C.1
tttctggataacatatgagaaaatatttcaaatttatacatgaatgaggtgagagtaaccatatctccacagaaattaacgcgtgggaataacagggcttcaaaaatcaaattttctattccaaggcttactatcctgaatcctgccaatcccttctttgtcgaccgcgaaaacacccccttgcaatgatcctactctttaaaaaagggaacttttttgggcataccttcccttacctagagaatacactcttgacacatgccacttgtcgaggtgatgctctgtctttcacaaaaa

SEQ ID NO: 53111 - DNA, 382 bp, Glycine max
  Clone ID: PAT_MRT3847_18972C.1
tgctcgactcgagccgctcgagccgctcgagaagacgacagaagggagtagtatcaaatatttgttcctcttgtaaaggaggtaagataatttgatacttctcttattgtgagtgatggagtaattttttaaaattatatgtaaaaatatataaacaaatttatatacccagttataaaaaaattgagtaattaatattagtaaatataaatttaattatttaattccaaaaagattactcatttggtctttgcacattctttatcttttattttctatacttaaaaatcatcccttactacttgtacaacacttctatcttttagttccctatcgtgacacaaaccacatatgttattatcattttgtgacagcacgaacc

SEQ ID NO: 53112 - DNA, 1091 bp, Glycine max
  Clone ID: PAT_MRT3847_18973C.1
ggaattcggcacgagtctccttcttcttcttcttcttcttcttctctcttaaactacaatggtagaagacgtgtgtttattttttggcatgttgtatgcagagaaggtggaagaacacattaaagttgagatttttatctcaaaaaatttactttatgagtacagattaggtgaaagaacaaagcaatgatatgaattttatatagaaaattagttgagaatattattggaggagttaatcagaaaggataataattatattgcaaaatttccgtgatgattgccccataaacacaaaagcttatatttttttggttgtgattcctttattttgtttttagacgatggttatataaaaatttaaattttttttagtttctgagccttctccaacgtgctcattgcttcttataccaatctttttgtgttttcgtccttttttggtggtgtaatggttcaatatattttttggcatattgtatgcaaagaaggtggaagaacacattaaagctacgatttttatctcaaaaaagctttgagttttatcttaaacagacttggcttccttgtccctccgttttcattttctttgtttctttgtttctcacaatacaacagcctcaaccttctccgacgtcctgcatatgtttgttttatgacatttcacaagacaaaaccttaattttttttattcaaccttctttatgagtctctattgcatgcagggaaggtggaaaagcacactacaggtgtgatttttatctgaaaactccacgagtacaaattccttttctttgattttttggtttgcggttaaattttttcatcttcgtcagccttctcgaatgtgctcattctttcatatacccacttttttggggttttgtgattttcgcaagacaaaagctttaatttttcatctgactttattttgttttttgagttctcgcattgcaaaaagcttaatttttttttgtgttcttgagcgttgcatttaacggcaaggacttttggcattgcaaaaagcttcatgagtctaggtttgttttctcagtcatctccacctttttgtgccttcgtcctttttttgg

SEQ ID NO: 53113 - DNA, 390 bp, Glycine max
  unsure (1)..(390): unsure at all n locations
  Clone ID: PAT_MRT3847_18974C.1
cgaaactttcanagcacatgcttcactatgtcaacactactggctcgggacagcaaaccctgggggaggggggctgagacatgactgagggtgcaggaccttatgggcttactgctacccttgcgaggcgcgctcttttggctgaatatcatgctggtgtcccttatattgaataaggaattaccagtcggaattggtacgcgaggcattggacttgctgactatgagtctcctgaaggttttggtgaaaatgcccacaggagccatagtgctcacattgctgggaccagtgcgtcattcagagacggccaatctgatactactctggcaagggtgaaggggaaaatgagtgcattttgggggcatttggttcacagatggcctaccatg

SEQ ID NO: 53114 - DNA, 493 bp, Glycine max
  Clone ID: PAT_MRT3847_18975C.1
ggaatcttttgcaaaaatgaatatgcatgatgagccaaaacctactccagaaccaaatatccaagcaactgttgttgattctgaataccctcctgttggaaaccacgatcagtttgtgccacacctctctgctgcaacacaaactcagtatccttctgctgaaagtcatgatcagttcaatcaggaaacaacatccacaaatatcaacagaaacctggtaaatcccacagaaactggacaaactttcaacaccatcacaaccacaattgaagaaaaaccactctatgaagcaaagactgatgaagttatctctcctaaagatgtcatagcttctgaggctggttcaggagagaaagatgccataaaggacaaggtggtaacaaataaagagcaacaaaaaattggggatgcttctaacatgtctggctcaactgcacaacatggaaagaacattgctcactctctgactgagaaattagctccagtttatgat

SEQ ID NO: 53115 - DNA, 540 bp, Glycine max
  Clone ID: PAT_MRT3847_18976C.1
gtgggtcgcaggatttttcggtttcttctcgtcggagttcgtcagggcaaaataaaagcaggcgaaacgtagtgtcgttttccgtagcggcacgctgcgttcataacccctcattttcattgcgcaaagaagtaaaaccccaacttccctttcgtctctgccctcacctgcagaacagaacgcgtcgtctcatttctctccgcatcgccgtcgcaacaacaccgccgagaagataacctcttcaatcggaaaatgaacgctgataacggttccagagacgccaaactcgacaaccaacacgcaaaagacaaagaaaaggaggaactcaccgagaatatgaacaagttgcatattgaaggatcttcgtctgggagtggatcatctagcttcagaagaaaacctgtcatcattatagttgtgggaatggcagggagtgggaagacaacactcatgcataggttggtatgccatacacatttgaaagacattcggggttatgtggtgaatctcgatcctgccgtcatgacacttccatatgct

SEQ ID NO: 53116 - DNA, 271 bp, Glycine max
  unsure (1)..(271): unsure at all n locations
  Clone ID: PAT_MRT3847_18977C.1
tctncgggnaggaaagccagagngaaaagaacaaccccanaaaaanannagagaagcccaagggaccaagaaaaggacacaaggaggagaccaaanatctgatagagcatctgggttagaactcagttctttttttctgatttggaagttcttctcttttaaccgnggaccanacaaagangaacaccncncaaanaaaccacagcaagaaacagaaggcaggagaacacgcaaacaaccnagcnacacaggggggggaggcacacaccac

SEQ ID NO: 53117 - DNA, 885 bp, Glycine max
  unsure (1)..(885): unsure at all n locations
  Clone ID: PAT_MRT3847_18978C.1
ggctcgagattgttcggtttcttctcgtcggacctcgcgtccgcaaaataaaagcaggcgaaacgtagtgtcgttttccgtagcggcacgctgcgttcataacccctcattttcattgcgcaaagaagtaaaaccccaacttccctttcgtctctgccctcacctgcagaacagaacgcgtcgtctcatttctctccgcatcgccgtcgcaacaacaccgccgagaagataacctcttcaatcggaaaatgaacgctgataacggttccagagacgccaaactcgacaaccaacacgtttctctctttccacttttttctctgttctctctcttaggaaacgaaatatactgtaaattgaaattcgattccactatttaacggggaagttcagttcgccgttagattgcgttgttgacttcacgcgactaggtcatactaggctcgtaggatagttaaattgttcttctataaaggattaaccctaactatgttatttaatttgatgagatttttttatgctcattctttggttttgttcgattttgaaggcaaaagacaaagaaaaggaggaactcaccgagaatatgaacaagttgcatattgaaggatcttcgtctgggagtggatcatctagcttcagaagaaaacctgtcatcattatagttgtgggaatggcagggagtgggaagacaacactcatgcataggttggtatgccatacacatttgaaagacattcggngttatgtggtgaatctcgatcctgccgtcatgacactcccatatgctgctaacattgatgtgagagacactgttaaatacaaagaagtcatgaagcagtttaaccttggccctaatggtgngaatttgacttccctgaactt

SEQ ID NO: 53118 - DNA, 1781 bp, Glycine max
  Clone ID: PAT_MRT3847_18979C.1
atggaaatgcctctcagaatcccttgtcacacgatttttttttttttttttttttctggcaaagcagatgttcaagtcatttataagtccaaaaaacaagttgcatcaaaatcaagcacagctatctctgcaagtagtgcaaaaatataaacgaaaagaacctagagcaaaaagtgctgacagtatatatgaaataaactagttgattaattagtagtcaaactttcaaggttgtatacatttaccaaatgaaggtcaaggcgctatacaaagatctagctctgatgcagtccaactggtgaggaatcacatcagaagccaaacctatcaatctcctcgtcttcgtcctcatctatagcatcctcctcttcagtatatatccccaaatcatcatcatcatccatttcctcgtcctcgccttcctcatcctcttcatccatcatgcttttacttgcttctttgttcttcaaaccagtgctcaagactacagtttctcccccagatttctccatgtccctcctcagtttatccatgctctccctcctgcggtcttcctccaaacgttgcttctcttcacgtcttttatcaagatcagccttatatgtctccatgtattcctcagcactggcttcgacagcattaaagaaggcttccattcctacaccagaaactgcagaaactccaactgattttaaattgttgtagaattcatctagcacaagagaaaggctctgagttaaagttgatgtgtacgactgatctgaacttgctgctgtttggaacgcctcaaaatcctccatccactccaaagcaaattgatgtgctgctacatcaaccttgttgaatgtcaagatgagaggtaaccttgtcttatagaggatactacaagcatacaacatgttgctcatgaaagtggtgggatcttctgaacggggtgtatcaactacataggcaactacagtgggaaatgtggatgcaaaagcttctgtaatgatagcaccagaagcagaccaggtaaatatttcaatctgaccaggggtatccacaagaacatagtcaagttgatctgcccgtttctcaatcacagaaattacctcatcaaacttagtggcaaacaagttcagggaagtcaaaattccaccattagggccaaggttaaactgcttcatgacttctttatatttaacagtgtctctcacatcaatgttagcagcatatgggagtgtcatgacggcggggtcgagattcatcacataaccccgaatgtctttcaaatgtgtatggcaaaccaacctatgcatgagtgttgttttcccactccctgccattcccacaactaaaatgatgacaggttttcttctgatgttagatgatccacttccagacgaagatccctcaatatgcaacttgttcatattctcagtgagttcctccttttctttgtcttttgcttgagcaccggaatccgaatccatttgcgtgggtgtgttgtcgagtttggcatctccggaaccgttaccggcgtccatttccgattgaagaggttctcttcttctctgctacgacgatgtggacagaaatgagacgacgatgttctgttctggtgagggcagaggcgaaagggatgttggggttttgcttctcttcaattttcttgcgcaatgaaaatgagggtttatgatcgagcctgccgctacggaaaacgacactacgtttcgcctgcttttattttgccctgacgaactccgacgagaagaaaccgaagagtcctgcgacccaca

SEQ ID NO: 53119 - DNA, 528 bp, Glycine max
  Clone ID: PAT_MRT3847_1897C.1
ggctcgagaagaaaacaaaataataatctggaaaaaatataaaaatcgaaaatttggggaatttcaatttcaatttcagggattctattagggtttcgaatcgccaagagattctcaaaccctaatccctcaattcgccctcgtgatcttcgatatctgtgggacgaatcgattgttcggtggcatgtcggttgagatccaagaaaatgtccaatatgtatgatggcgtgtgacaattgggggaattttggtgtgggcgtttgttctgttgattttctatggaaggcagaacagaaaactccaatgacactacatgtcccaagaaatcaagatcactggatcttaaaagtctatataaatcaaaatggacagaaaacacggcaaagacgaacttaaagaggatcggcaatagtagtgggggtggtgatgagaagaggaagaaaaaaaaggctagaaaggaagtctctttaagtagcttagaaaatggtgatggtagcagggagttgaagttagggttgagtcaaagat

SEQ ID NO: 53120 - DNA, 1971 bp, Glycine max
  Clone ID: PAT_MRT3847_18980C.1
aggtactgggtacttggtgattgcccctgggtcaccaaccaagtactcggtacacataatgtctgatctttcttttgggtttcgatttgcaaaggaatcattttccatttgccaatcaaccttcttcatccctctagatcgaaaggccaattttttctttttcttttcctttttcattattatttcatatttttttccccttttcaattcttcaaaaaattctcgcgactaaattcacgtcagtacacggaaacataaaattcagtttttttttattaaaatttgttggcaaacaaaaacaaaaaaaaaattgaaattttgatccgttttgccgaattggactgcgcgttcaattgggttgtcgaattcgaggcagaggaatcgtgggtgtacgaggaatttcgactgtgttgttgtactttggtgattgtcagaaaacggtgtcgtttggtttgagagaagctggggacttggggtgatcgaaacgacgtcgttggaggagaaggagaaggagaagggatggattgtaggatttgcgtggccaccggtggcgatttgtgggtcagagttggcggcggacgagagattggtggcggtttcagccacgagagcgagcatgatttggcgctcatggttagcgattttttagaaaatggaagtagtggcgcagagtcttggtgtagcagtgatagcgatactggacattctgatttcgctcaactcgccgagaggattcagatctgtaagctgtcagtggctcaacatgagagtgacttgctttcagttgtccattccctcatacggtcaatgaatgagaccaaccttcaagttatgaattctggtccatgttatgctagctgtatcaggttttatcttgtgaagttgatgagactttctggttatgatgctggtgtttgtgcatctaaatggcagggtagtggcaaggtccctggaggtgatcatgaatatattgatgttgtggttgacaataattctggaagctcggagcaattgattgttgatattgatttccgaagccactttgaaatagctagagctgtcgattcatatgataggatactgaattcacttccggttgtctatgtgggttcctttacaaggctgaaacaatttcttggaataatggaagaagctactagatcttctttgaaacagaattctatgccgcttcctccatggagatctctagcatatctgcaagccaagtggcagtcaccgtatgaaagatacacacattcagaaggcaatattgttagcagcagtgattgcttcgatcacaagcaatgttgtggacatttgaagaggctgcaatcttgccttcaatcaggaatcgaaatagagcgaatgttgaagccaagaaacattgaaagtaactggaggatgaagcctgagagatggagacaccccttgtttaggcctctttgacatgtacagattttggctttgaagttaacaagagactgaacgaaaataatacagaattttgcggctatttttccctctatgaaatcttcatcttactacctaatagatctgatcaacaaacaacagtttaaggcagccttagcaacaacaataagccattttataatgaaacggttctttctttctttcttgtccatgtttttgaggtgtcgcaattgcagagtcgaagttttggttggtgtccagtggcaatcaccaagtactgggtacccataatgtctgatatttattccttgtctcgtatatttgttgggtctgggaatttttggtaccatatgttaatgttcctatccttcaatttatactcttatgattaattttgattggacaatcctagtctttagaatttctgatcagctatattatttgaaagactataactgcatccttcaatttatactcttattattttgattcagcacgcaataagaaaaaagaaacaacttttgaaattgcaaaaaaaaa

SEQ ID NO: 53121 - DNA, 472 bp, Glycine max
  Clone ID: PAT_MRT3847_18981C.1
ttgggggtggggggggggggggggggggggggggggggggggggggggggggcgggggggggggggggggggggggggggggaaaataaagtaaagtttgggcccaccaaccaaagcccggtgagttttatcgggttaacccccattttcccaaatttttttttcaaccctttaactggcgtttgcggtatggacatttgttttcaaaaaaaaaacaacccccccaaaaaagtttttacccccattttggaagggggaacaaaaaatttttttttcccccccaggggtagaattttgggccaataagggaaccctttttttacccctgtaaaccctttgccaaacctagggcccgtaggttgcaattgcacccgcgaacccctgctataccctttgccgataacccccggtttaaaaaaaaatccccccccttttaggggctacccgcctgaaagggaaagccctttgatgg

SEQ ID NO: 53122 - DNA, 112 bp, Glycine max
  Clone ID: PAT_MRT3847_18982C.1
cccactcgtacattctcacttcccatatctcgatctaccccctaaatcatatactgggttaagggtctcaatattccgggagattgactcctgcatcactcattcattactc

SEQ ID NO: 53123 - DNA, 240 bp, Glycine max
  Clone ID: PAT_MRT3847_18983C.1
accggtggcaagaaaacaacggaagggggctgaacacaactctagacttttctgtgagggccctacttgggacatgactgtgggatcccttcttctgtttgttcagacaagggatccgctccggtgacttcgtagttcgcacacccggatcataattaagacatggtcatgcacctactcttttgccttttgttagttggatacataccaaccacgctcctggttcttgggtttagttac

SEQ ID NO: 53124 - DNA, 335 bp, Glycine max
  Clone ID: PAT_MRT3847_18984C.1
accgcagcttgggctaaactgagtcctatccctaatctggctacaagcaaatgaaaatgccctacttaggccgcttatatcgtgacaacactgccacatatagatttttgtttatacaactaattatattgcttgttcttttggcacaagatttctactactagacgatcatagtggtaactaccgcggtatgacttcccactacattttatattcttacccctttttaagcaacttggattcctttgcctggggtggaattctaccaccctatacacactgttttgctccagctccgatctaatccccttgagtgtcctcttgaactcctacca

SEQ ID NO: 53125 - DNA, 392 bp, Glycine max
  Clone ID: PAT_MRT3847_18985C.1
aaggaatgcaaacttgggaggcctatgatgcatattagtggattttaataaaatttgaagaacatcagaaagagtaggtatatgtcaaagggtgcaagttgagagcattatgaaggaatttaatggatggattgcagacctagaggttgaggatgtgccttgtgcgggacgaaaattcatcaggtacagaccaatgggacaactaaaagtagattggacaaaattcttgtatccgcagaatggcttgccaaatgacaaggaagcacttagtttatcatggattgcaatttcttagaccattgcccaattctcttgagatccacaattgttgataggggcctgaagtcgtttcgggttctggattgttggtttgaggataaatctttcaggaa

SEQ ID NO: 53126 - DNA, 278 bp, Glycine max
  Clone ID: PAT_MRT3847_18986C.1
ctcacacgtcatgaaagtccttgtcttagatattgtcggctattcttataactttagccttgggagctgatatgtttacaacagactaactcattctcaatcttacaaacttctgtattaattcaacactttcattattaccactcaacacatatccatacatacaggagaagactccatattcttatcaaattaccaagcaccaatattctaatcttactattcaaaacagctccgcttattatcggactatacatatgcaatccccttattactat

SEQ ID NO: 53127 - DNA, 421 bp, Glycine max
  Clone ID: PAT_MRT3847_18987C.1
ggctcgaggaaagctgtgaattacatttggcattacgctgacgccatgtataatctcggggctgcttatggtgagatgcttaagtttgacatggccattgtattctatgaacttgcctttgacttcaatgcgcattgtgcggaagcctgtctcaatctgggagtcatatataaagaccgggaaaaccttgatagagctgtagaaggctaccagctcgctttgtcaatcaaacctaatttttcccagtcattaaataaccttggtgttgactacactggccagggctaagtggatgctgctgcatgtatgagtgagaaagctattactgcatatccagcatatgcggaggcatacagcatcctatgagctgtttacagggatgctggggatatagctcgagcaattatgccttatgagcaat

SEQ ID NO: 53128 - DNA, 337 bp, Glycine max
  Clone ID: PAT_MRT3847_18988C.1
tccctccacgcgtccgctaaaggttccatgggggaggttaattttgctgacggtgggattgcactatccaaacccacagttgggggaaccattctgcgtcgtagtccataggcaaattttgtcgtcataccgtgatgtgggtgctagtcatgatggggttgctcctaatggtgtaaagggaactgttgactttgttgccccggctacaattcctgagattgcgggaacttcctaggcatggcctctggatctaccttgtgacagatttgctagtgtcttgattaccactgtatagagtttggtcggctcagaacattgatggatcttgaccttttct

SEQ ID NO: 53129 - DNA, 703 bp, Glycine max
  unsure (1)..(703): unsure at all n locations
  Clone ID: PAT_MRT3847_18989C.1
aaacactgctctggagtatctttccttttgtatttgcccaaccttgtgctccacgcttttgtactcgtcattactccaagcctgtatttaattggggtttcccaaaggaaacacctctgttaatctaatggaaccatccacactgtaanccgacaactttaataacttcttcatacaaccataggtttattagtagaaaattgatgtgttcatgcatgcatctttggtagtagggttgtgtcaataatggatgctgcaatagccattctacccgtcactctactattgattttattatagcagtcactaagagtaggtttaagacttcagaggaaacaggtaactgttttgtttagttttctttcaattttcatttgtagccttcgaaagagtcgcagttttagttgaagaatgatacaaataaccattttaattattctcttcttaggatggaatcttgattggttgactcgtttgtttataatagaatatattcctttgagaaaggttggcatgttatatgcaccattatgactatgattattagtttaagaaagaacccttgaatttggaaaactctcttttggccctactaactttctccactatggttgtgatctagatgttagaaatgaatgattcattatagtcaaatgacacctaataactaatttgcttcattatacatataatagctaattta

SEQ ID NO: 53130 - DNA, 226 bp, Glycine max
  Clone ID: PAT_MRT3847_1898C.1
tggaaagtcataccaccccgtgagagcggattaccagaaggcgcgcgagaaggcaaagaagaatcccatacgactcagttttgataagactggacgctccagaatgctcactaagggatggaacggttcgggaacataggacaggagctcgatgaccggaggtccctgcagagccataaagcacccctatgaactcgctcacggcgcgaacagcggtcttgacatg

SEQ ID NO: 53131 - DNA, 324 bp, Glycine max
  unsure (1)..(324): unsure at all n locations
  Clone ID: PAT_MRT3847_18990C.1
taannngcncnnggtacgtaaggnagnaattnntttcganntgacnntaanttggannngtnaaatggnntnannantctctcccctttccgcnttccgctnccgangttccttccctnggntnattcnngctncttggtatggnagaaccnggttcagttngnaancnggtaggtttcacnantttcttaggtacngcaagttgcaaaagggaattggtgaacntggaaggttaccgggctgttactcctgaacttggaaatgggaagaacntcggggganantttcatgggtctggggaaaatccttgnagggggcnttcct

SEQ ID NO: 53132 - DNA, 384 bp, Glycine max
  Clone ID: PAT_MRT3847_18991C.1
cactacatgaggggcacaatgattgtccgatggctagtgcggatgcagagtacggtctggtttgtgcgagggctggcttggcccactgactagcatgccctatagagagcctaatctcactgcggagaaatgagtgtaaccaaaattatcaagcactagcagacaggaagatacagggggtttacgagttgcgaccttcagactcatagcagaccatgaaagatgcacatcggagcgaagaagggacatgactagtacggacacaacatcactgtcgatgaacatgagatccgaagcgggctatgcagcggcatgtgaggatgatacatttgtggaagcggttgatatggtggtcgtagtggcggtggcggtggtggataccgt

SEQ ID NO: 53133 - DNA, 508 bp, Glycine max
  Clone ID: PAT_MRT3847_18992C.1
gtgcaacaaaagtgaacgaacgaaccacagattccctctgctggtaccttctccaacagccccccgccaaacatttacattaaccgaccaactgcgatgcactcaacagctcaaagctacatacttcaccggcctggatcggttaaaccccgcctgagaaagcaggttgcccaccaccggtagatcacggcacaaaacaccctgaaacaccggcggatccaccgtagaagaggacaccatataccaatcctgagacatttgagtactataactctcaacgaccttattcaactcaacagcagcttcattggcttcctctttctgtgcttcaagagcttgcaaagcacccttctttctctgctgctcagcaccttcctgatcgctaagattacccatcacattagtgcaacccttctgtaccaatttatctaacaacaacgaagacattctcaccctttctttaacagactgaacataacgctcatctgcatgctcgcaccttacaatg

SEQ ID NO: 53134 - DNA, 501 bp, Glycine max
  Clone ID: PAT_MRT3847_18993C.1
tattaatatgtatcatctagcagtaaaggaatcccaaattctttaaatggttgccatattggtattggatacttctagcctgactggtggcatcctgtatttattattgaacattcgtgccgatgtaggtgagatatcataagaattgtacgaactatgtctctacagtgacgagtgtgaggctgatgacattcaatttgacgctcttattgttacttcacatgtatatttttgaaacttcttgctgaaagagatttttttttctctctacttttttccctaatcattgattggacccaactactatttttaatttatggtagctatagagtatgttaggtgggaaatgaggactaatcttgaccatgcaactatacatgaatggaggcttgtgattgtatctgtgtgtatgggtgctttatgagatgatgtagccgtatttttgtgttgtgtgtgataccacacctatacttgtgtgacactggtggagccttgtctcta

SEQ ID NO: 53135 - DNA, 371 bp, Glycine max
  Clone ID: PAT_MRT3847_18994C.1
attgcccaaattgaaaaacaagtcaacaaaaatattggtcttatctgtgacaaacagggggaaaaatgaattctccaatgttgtctggggatgctaagtttcccaggttataggagaaagaaaaactcatgaagttctctctaatgcattttaagtacactgaattgatcagttcacaagggtgcctgcgacatcaaaaaagagcttcatggatggtttggccctggtaattccacccacccagagtaacacatggggagacacccgaaggggcctcaaaagatattttaatagtcatgggctctcctggcccaagtgaaaaatagttatttgggtaatgaataggaagaattcttgtgtcttccccctcc

SEQ ID NO: 53136 - DNA, 1926 bp, Glycine max
  Clone ID: PAT_MRT3847_18995C.1
cgaaaagatggcaaatggattgcaatgataccctgcaccaactctacaaatatgaataataataataagaagaagaaaacagcagcatccataaaaggggtactttatgctggttggttctttccccgtttttatattcctaattatttcccatgtcactatgttgtgcaatgaaagataattaatatcaccacactttgtccacattctcattctcctcactcccatcatcttttccaatggcctccaacggcgacgccgttcatccccacccttccaaaaagatcaaactcttcagcaattccattaactcaactaattcctcgtttatcacccatgccgagatcgaatcggaattctcccaccaccaccccacggtggcgcgcctcaacaacggcgccttcgggtgctgcccggcttccgtgatcgccgtgcagcgcgagtggcagatgaagaacctccggcaaccggaccacttctacttcaacgacctcaagaagggactccttcactcccgcaccatcatcaagaacctcgtcaacgccgaacacgtggacgagatctccctcgtcgacaacgcctccaccgccaccgccatcgtcctccagcaagccgcctgggccttccaggaagcaaaattccagaaaggcgacgtggtcctcgtgctccactacgcctacggcgccgtcaagaaagccatcgaggcctacgtggtgcgcgccggaggcaccgttatcgaagtccccctccccttccccgtcacctccaacgacgacgtagtcaacgaattccgaaaagcccttgagaggggcaagtcccgaggcaacagaattcgcttagcggttatcgaccacgtgacttccatgcccagcgtggtcatccccgttaaggacttggttaaaatctgcagagaggagggtgtggagcaggtattcgtggacgcggcacactcgattgggtgcacgcgcgtggacatgcaggagatcggagcggacttctacaccagcaacttgcacaagtggttcttctgccctccctccgtggcgttcctctacgcacgtgcctcctctaaggcacgtgacctgcaccatcccgtggtgtcgcacgagtacgggaaggggttggccgtggagagctcgtggaccgggaacagggactacagcgcgcagctggtggttccggcggttatggagttcgtgaaaaggttcgagggtgggattgaagggatcagaaagaggaaccatgatttggttgttgagatgggggagatgctggtggaggcttgggggacccaccttgggagtccttcgcatatgagtgctagcatggtgatggtgggtttgcctccttctttgggtattgggagtgactctgatgctcaaaagcttaggacccgtttgagggatgaatttgatgttgaagtaccaatttattttcgtggtggggaagatggctctgttactgcgtatgcacgaatttctcgtcaggtttacaacaaggttgaggactattataagttcaggaatgcggttaatcaacttgtgcaagatgggtttacttgtgctcttctttcggcttgaaattggggtagcctatgctctgctcttagttttaattaactcctcaataacatattcgtccattttatatgtgggatactatttgcaaatgttgagtttgcactttgctgattgcgctattttgcccggtctgttgaaaatttcattgtctatatatccaagtatttgagtggacatttgttgtttaacattttgactactcgtttctgcaatattgcaccatcagtactgtagtggtctggtggttgcttctttgatattttacaacattgctgctgaagcacaaataaacacccatgatatccataggtttacactaaaacccgatgccaaattggaaatttgc

SEQ ID NO: 53137 - DNA, 134 bp, Glycine max
  Clone ID: PAT_MRT3847_18996C.1
tgagtttcgaaagaaaggtaaaatcagagatggttgagcccattctgataaatctgaccacaagtagcattattctctgctccagggccaaatataaaggacttcacctcccaagaagcagatcctcatcaaac

SEQ ID NO: 53138 - DNA, 344 bp, Glycine max
  Clone ID: PAT_MRT3847_18997C.1
tgcacgcacccggccggaattccttgttcttcccacacgttcgtttgaaccaagacgacagaaggggagggggggatttcttgcaacaaccggccaaaccgcccagaaccacgaggacgcccccaaggaagctcaattcctcatgtctctcagaggcctaagcacatccaaatgccacaccaggcaagggtgttgccgatcacaggaaaaacaccttcacggaatcgacaccaaccaaggtccatcgagatgagaccaaaaaggccgatgagaagaaaagggaggaatggcccgacaaagacttggtggcccggctgagagctataacaaggctgctgcaatct

SEQ ID NO: 53139 - DNA, 837 bp, Glycine max
  Clone ID: PAT_MRT3847_18998C.1
gctacatctaaattgcatggtattgtttttgacaagttttatttatttattttttaatatctttttctgggttttatttgtacttgaatttgaatcttttcacttagattagtagttttagatgggggaactcatgttcaataatgtacgtgacttatcttgctcaagtatcaaatctgttgcaaagcataaattgtgagaaaataaaaataccttatgatttttacacacattgttcacatttatttgcttctgcctctgcaaccttgtttactcgtttttgctttttatttttgtatggaactttgcaagtttactacttgcattctctggggagtagcataccatgttcctaaaagctaaaagaaggtttgtgatttgtcccataaattttgaaagataaaattactttgtacccgaaaaactagaagtcaatcaatttagtcttttattttacttcaattaaaggattatattgactgacgtttttattttcaggggatgaaaatttaaagtgattttaaaatttttataaactgatgtgactcatctcatatctgtcatataacgcaccaaaatatagttttactcattttgtgggagatggtttctagtgggctttccttccattattcctcaggtgttgttacgtgtaccatgcaaattattagtacatccagcataatttgtgtaattcctattttgctcttcatataggttgggcaattcgtaaattgggcttacggattggctaattcgtacaaggttatggattgttcaaatctgtaagtgactcaaactatttttattttgaaaattcatatatgtaaacaaatt

SEQ ID NO: 53140 - DNA, 341 bp, Glycine max
  unsure (1)..(341): unsure at all n locations
  Clone ID: PAT_MRT3847_18999C.1
ngttgcatgcacgcgtacgtncgctcggaattcggctcgaggntcacnnttttnggctnntggacanacgcntgcntcgactaccaccngncnctgattctacaangacaaactgnacncctnnatnnttnngnngttcnncntangannagctaatatgtcangacggtttnnatgnaggatgcaatgnancctgatgangnntgcacttggtgccancacgggnccnaggcattngtncnaanntatangntngcntccccnntacacaangggnctctgacnacgacncngnnctcaacntgnacnnanaagccagngccnacnnccaaaaaangann

SEQ ID NO: 53141 - DNA, 214 bp, Glycine max
  Clone ID: PAT_MRT3847_1899C.1
aatgcggctcgagagagactaaaaggacgcgcccgatacactttgtaagagaagaccaaacaaccacatggagagacaaaaaaggcggcgggaaagaccgcccaaaagcgacaaggcaaaagacaaaaacctgacaaagaagggcgcgaaacaagagcaccaccgagacagccgctccgttgcatcaacatgaagcccgcgccaaaaaccagga

SEQ ID NO: 53142 - DNA, 379 bp, Glycine max
  Clone ID: PAT_MRT3847_189C.1
aacagaacgggtgggtggatacgacgaacgggcacatggagctgattcacgcattcaggggggagatcagaatagctccatgaagcctacgggatatttgccgcacaaaaaagggataaacatcgaggggcagatgatgggggctgatggaattaaaccgccgcaaggagagggtgatgataatcctccgcattggatgccccccgttactccgcgtactcataggagatatttttgaacgaaagcgtggcgccgctatcatgaattgttgtcaacgcatctatatcaccaacaacttgtatgaaatgttcattgaaatgatggtgcacgatcactaatgctttaaattattcttctgataacaatggagaacaacata

SEQ ID NO: 53143 - DNA, 1085 bp, Glycine max
  Clone ID: PAT_MRT3847_18C.1
cagccatgtctccacgcgtccgcccacgcctgcgagaagagacagaagggggtgaaaccgtcatcataaattcatatatcatcagcctcagccatgtcttcttcgctcttgcacctcctcttccttccacaactacgatcttcgatagtgctttctcagattcttccttcgtggtaaccggtcgaatcatggagcccatggacattgttggcaagtcaaaggaagacgcttcgcttcctaaagcaacaatgacaaaaattattaaagagatgttacccccagatgtacgtgttgcaagagatgcccaagatctattgattgagtgttgtgtagagtttataaaccttgtctcgtcagaatccaatgaagtttgtaacagagaggataaacggacaattgcacctgagcatgtattgaaggctctacaggttcttggatttggtgagtatgttgaagaagtttatgcagcatatgaacagcacaagctggagaccatgcaggactctttaaggggtggtggtaaatggagcaatggagctgagatgactgaggaagaagcattagcagagcagcaaaggatgtttgcagaggcgcgtgctaggatgaacggtggagccattgcttccaagcagccagatgctgaccaaagtttagatagctaactttaggatcttcattgaagcatagacaaagcaccaccctgactcctgtctgtgcttccaatgagctcgatggtgtacaaaaaccattcactagtttgctggcccatgtggatgtgctcatttgtattctttcgataaatccatatttgtaagtcaatgtaattagtgagagatcatgaaaaccctcccgtttagcatttacttgtaattatttaatttacgtttttgtatcttctacatactaacaactcctagcttgattctgacagtagctactatgttagattgtaacaaattattaaatatgtagaagcaatagtgctctgtttatttgttacaaaaaaagaaacaaaatgggcagatcatggaaggaacatatattccacaaatgactatatgtatggactagttgaaagatatagg

SEQ ID NO: 53144 - DNA, 403 bp, Glycine max
  Clone ID: PAT_MRT3847_19000C.1
ccgggtcgaccacgcgtccatccacacaacgggacagaaccataagcttcagcaatgggaaccacacatttcgagaaaaacagcttttacatccatgaacttatgggtattctcgtatactcttgaatcttcgacatgtcatcatacttgacccttattcccattcggtgatgattacagccggaatagtgtatgcgtcatacagacaatggttcaaaggtttgtgtaatatagaccacaactgtgctttggtctgcaagaacataggtttctacgttggcatgtacacaagcttctgccgctgctacatttgcaccaagatttgttgagatctcattagtcactactcttgctaagcagattaataaatcatttcctaagccaaatacattgcatctactct

SEQ ID NO: 53145 - DNA, 1175 bp, Glycine max
  Clone ID: PAT_MRT3847_19001C.1
caaatgctcctgttatctctcttctgggtgccaaggtagaagttggtaaaaaagaatgtgttcctcaaaggttgtctttgcagaatggcaaggctactgaacctgcaatagaactaacaatgtcaagagcaggtagcgttttagggatgaccccaacagtacccttcaatcattcatctgtttttggctataatggagtggcgtcagcatcagtgacacccgcaatgtctttttcatcagccatgtacggatcaggtggcacaattccatacatggtggactcaagaggagctccagttgtccctcaagtgggtggatcctcatcaactgtcctttcatcttactctcagccaccaatctttatgaacatgactggtacacaacttgggatgaatggatttggaccttcacgtcctaacttggacctgaactctggcttcatgattgagggtgggaatagagacacattagctgcaaggcaatttttctttcctggtcagggcagggctgtggaggagcaagtaagatccatgccacaaccctcaagttcaggggttagtgggaaacgaaaggaaccagacagtggtttggaaccctacccatttatctacaaacatccgcaacctcctggaagtagcttctaatttatgatttcacctctcttctgaactgttcataaacacacacctttccaattaatgctttattacccgaaatgatcatcaacagtagtcagtgctctggcatcctttagtaacagaagatctcgaactcaataaatgctgggggaagatggatgtaatatgattcaaacgattgattgttaaagggggcaggaattggattttcttattgttctttttcttttctttcgttgtttatcctttcttgtagcttcacagaaaggcattacaagcacagaaagtcttggtgcgtctagctgtaatttctctttcatatgtcaaagaaatttataggcatagtatcatgtctcattttttcggtggcgctttagtatgtggccattatttggccagttttcattattaagttaataacccgtataaaaagaaggaagaaatcccctcctaagaaaggcctctgttcaaaatttttttgtgcttacactgtttaacattcccaccaatggtggtgttcatcgtgttttactgttc

SEQ ID NO: 53146 - DNA, 258 bp, Glycine max
  Clone ID: PAT_MRT3847_19002C.1
cctagaaaggggaaaattattgagttaccagttcacaagtaaatgacctgtatgaaaaataccattttagtatttggaaaaccaacattacatggcttttggggacaatgccaattacaactccaggccccctaacatgacaagcctctgactttgtgattaagtttcaggcgaaacattttggtacagtttctacatcaagggcttcttcctatgtattaaacccaaaagggaaatggaatattcaccaatgagaat

SEQ ID NO: 53147 - DNA, 404 bp, Glycine max
  Clone ID: PAT_MRT3847_19003C.1
tgtatactgtttctgaccaatgttatcctgagtgggctccagttaattgtcgaggtcatcgacttccaattcacatcacttaaggaaattatatcagaaagcaagatgtcagcattgaatatgatgcatgtacaattccaaatgatattggatcattggttgatgccaatgttgctaaatcacaaacatatagttgctttccatgttgctgtaagcatatgaagactgtgatatgcatcattgataccatatgtttagccagtagttcatgctctaagtgctgaagtttactttgacttcttcactgaggagcatgattgtcaagacatagttgctcacattggtgaattgaaatctagtgtctatgttccactgcctacaaaaactaatactattgaatctcc

SEQ ID NO: 53148 - DNA, 1475 bp, Glycine max
  Clone ID: PAT_MRT3847_19004C.1
cccacgcgtccgcccacgcgtccgcccacgcgtccgcccacgcgtccggcattaagagcattgatatgagggactctgcatcaccgcacaaacaagttcaaattcagtagaaaaggacacaaatagtaaccagacaccaaaaaaggtgagggagcacatttatgattacataattaagaccataacaccaccttccagctcactctccataaaccctaacgcttcgtctagggtttcgctgaatccccaattttcctaaccccgaccggacatgctccttccccgatggccgtcgtaaccagcaacggcaagcgccgccaacattggccatccgcgaattaccactttccatctcccaattccaaaagacccagagtttcaacaatgtcccaaaaccacgcgcaatccttgttatcctcgactagtatcatttcaagaatctctaagtaccccgaaaccaagccaccactgcatagggaggttcacgccccgtgtagaccacgtaagtttgattctcctgccttcaatagaagttttcattatcctcgcaaagaagagattagttacgacaagggcaacgtgctcagtaaaaactaccaaagggcgaaaaattctgcgttggctagcattaggtttggggaaaagggcaaggaggtgatagaagtggatgctgatagttccaagggtatggtgtcggaggattcgagtgtggaaggtgatggacgagagcacaagtggcaagaacctggtgatttggttgtgacttacttgaacgatttggatgctcatgatgatatgcatgctgtccctcagcatcagtcaaattctcactccagtccacaatttaataaatgcgatcacattttttatcatattcatgtaggccttatcccaatttcttttgcttggtccatctcctcacagatttgtaatcatacccattcttgccacttattaacatggttggtcctgaatcgcgtaaggctctatgggctgaagttcaatgtgagggcaaataccagatgctgaatggcagagcgggtccaaaaacgccacgcatgacagcattgcagcaccataacagttatttaaccccgcggacggctccccggctcgggctgggggctgcactggaggggagcgggcagcggcggtcctcccgtcaactgttgcgcccgaagaaggaactagtagaggaagttccattggaaccttttattcctcttactaaagaggaagaagttgaggttgcacatgccttttctaccaaccggaaaaagatcttggtttcccatgagaaatctggcattgagatctcgggagaaaagtttcaatgccttagaccgggtgcatggttaaacgatgaggtaataaatgtgtaccttgaattgctgaaagagagggagagaagagagccacagaagtttctgaactgtcattttttcagtacctttttctacaagaagttaataagt

SEQ ID NO: 53149 - DNA, 279 bp, Glycine max
  Clone ID: PAT_MRT3847_19005C.1
agccaaaaagcacatgtgttcgacatttaacagattattacagaaacactgggtccttgccatccttaatattaaacctaagacgccggtgggtcaaacgtttcaggttcaatttaaatggacatcaaatatgaaccccgaatgcctcttttggctcatgtgagtattactagaaaaactcgtacagcactcaccataattcacaacttatctaattgctacaatcagagcttgccgagacaaactctggctgctgctcccgctactacttggactact

SEQ ID NO: 53150 - DNA, 166 bp, Glycine max
  Clone ID: PAT_MRT3847_19006C.1
tcgggtcggtgaattgtaatgtctgtgacctgtccttgcttttccttgctgagtagaaaacgaaagcgtgttcctgtcttctaagcaagcggtgggccttaaccctgaaaatcttgtcgtctttgtgctgacagtgcattgtattttgcatggtgcgtaatcggtg

SEQ ID NO: 53151 - DNA, 1554 bp, Glycine max
  Clone ID: PAT_MRT3847_19007C.1
tcatatcaattggcgaagaagcccatacttgtgggagatagatggcacgcttgtcactgctcattttcgcgttctgcgccgtcgccgtcgccgtcgccgtcgcgggctcctccttcgatgatgccaaccctatccgtttagcgtcggacttggagtcgcaggtgctggacgtgatcggacagagccgccacgctctctccttcgcccgcttcgctcgccgccacggcaagcgctaccgttccgtcgacgagatccgcaaccgcttccggatcttctctgataatcttaaactcatcagatccaccaacaggaggtctctcacctacacgctcggcgtcaatcattttgctgactggacttgggaggagttcaccagacacaagctcggcgctcctcagaattgctctgccacgctcaaaggcaaccacaggctcaccgatgctgttcttcctgacgagaaagactggagaaaagaaggtatagtcagccaagttaaagatcaaggcaactgcggatcttgctggacattcagcacaactggtgcattggaggcagcttacgcacaggcctttgggaagaatatcagtctttctgagcagcagctagtggactgtgccggtgctttcaataactttggctgtaatggtggtttgccatcccaagcctttgaatacattaaatacaatggtggcctcgacacagaagaagcatatccctacaccggaaaagatggtgtctgcaaatttacagctaaaaacgttgctgttcgagtcattgactctatcaatatcactttgggtgctgaggatgaattgaaacaagcggttgcttttgttcggccagttagtgtggcatttgaggtagcgaaggacttccgattctacaataatggagtttacactagtaccatttgtggtagcacgcccatggatgtaaatcatgctgttcttgctgttgggtatggagttgaagatggtgttccatattggatcattaaaaattcatggggaagcaactggggtgacaatggttacttcaagatggaattagggaagaatatgtgcggtgttgcaacttgtgcatcttatcctgttgtggcttaaatgtatgcagagagatgtggtgcccgatatgcccgtgtaactgcaccttgcacgtcatgcttcgtatcgtccatcttaaagggtgaaacattgtactgcgataaaaatttacagtatatgttgatgtttatctgtaaaataagtttggaattgggatgttcattctccttgagctgaatcacattacaaaatcgtactgtaaatcatttgtcacatagaggtatcatagaaattataaactgtgttatgctccccaatctctagcaatgtaaggatagcgtgctgtgtaaaatctgcgcacacttgagttatcatcagtcccaatggagtaaagtttatttggttagtccatctcaatatcactttttaattttaattaaaaaaaaaaaaaaaaaaaaaaaaaaaaaaaaaaaaaaaaaaaaaaaaaaaaaaaaaaaaaaaaaaaaaaaaa

SEQ ID NO: 53152 - DNA, 356 bp, Glycine max
  Clone ID: PAT_MRT3847_19008C.1
ggaaaacagtaccccctttcactttaaataacccccaaccaaagacattttttccaatcctttttaagttttagcccataggcttcccaaaattgggggccccccaccccaaccccttaaaaggggtgggggggggccaacttaaaaaaaaaatttttgtttcccaaagggggcctaaactaaactggggtaactttcccgggggaaactttggaacgggggggcccgacccaaccccaccaagtttccttttttttttaaaggcggggaaaaaaatttttttatttttttttttccctgacgggggcccaaaaagggggagcggggtggggccccttttaagggggccctttttt

SEQ ID NO: 53153 - DNA, 1403 bp, Glycine max
  Clone ID: PAT_MRT3847_19009C.1
ctcccctctccctccagccacccttgcctcgcatgtctgtgcctgctccccaacaccagccgacgcatgcttgcgcaaccccacctcccgtgactcaagtgacgcctcagagtctctgcagtttcccctctagaacaaacccacaaaccacccttaaatcaaaagatttgcaagaaattcagtacttcagcaggattggttcaaattcacaaaggaacaagtccccaaccacagaggtgagttcatccattagtacaagttctagaaccacaattgtatctacagtagtagaagaaagtacaaagaaaaagcgaggaagcagcaagcttttaccaagtatgtgttctatggtggatgtatcagacaatggtaggccaaatggttcctcagcctttagttacaggaacctgaagtccgacatgaaaaaatttcagatctagattatgctctcagatagcttcgaaaaaccaagcttcttgagacgacttgccaagggtgtggcccaagccttttctgcattcccacattttatgtccacgatttcaacaatgttaggtatctttttatcattttttcccctctctggagttctgaccactgaacatttatcagaacctagcataggtattctctgtgtatttctgctattagtttttgttttctgtggcatgccattgccagggactctacggtttgtatttttactgcttccactgctaccggcttcaactgatgattttctttgttgtagtcttttttgggttgtacttgtactgccacagggaacagaaacaggaagtgtttgagttttacttcttgctgaagatacctgcttctttgatgcagaagagatgtgatccaattcccttgtcattaaggaacttattgttccagtggtgcctagcttgatggatcctcctccaccttttatacctttcagactctgagccatgctcctattagtaacacctccaattcaagatccaaatgttccagtctttgagatgaatgctcccagcagaattattcaatgatacacagcaagcttatggctccacacgtatgaaaattgcagatttgaaacagacccaacagaggtagggaacttttttgcgaactttttgagctaaaattcagagaaagtgaaagttcggaggcaacgagtttgagaaactgcctctgttctagaaaaaatcatcatatcatatctaatccaaccaactttgaggcacagcctctgtgtcttattttgtagcgtgtgcatccaatgctgtgttgatttgactcacaaacatcatcgtcttggaaaagttaactttcccaccaaatattcactactcattatggagaaattaaatcataatcatcaacataaaatactggatggaaattccaaatggaat

SEQ ID NO: 53154 - DNA, 377 bp, Glycine max
  unsure (1)..(377): unsure at all n locations
  Clone ID: PAT_MRT3847_1900C.1
tgcttcacgaggtgcatcccaaaaaaacgcggggccgtctggaaggacaggccccgcaatcatacgctttgcgctttcaggcgccggctagaaccgatcgatcaaactgccggggtggccggcacgccctcgtcgctgcggtcgcccgacagcacgcgagccagtttggcgcgatccaattcacgctcccaggccgagatcaccacgcaggccacgccgttgccggtgatgttggtcagggcacggcattcgctcatgaagcggtcgataccgagaatcagcaccatgcccgccaccggaatatccggcaccacggccagcgttgcggccagcgtgatgaagcccgcaccagtgatgcccgagncnnccttcgaacc

SEQ ID NO: 53155 - DNA, 270 bp, Glycine max
  Clone ID: PAT_MRT3847_19010C.1
cgaaagtgttgcagagacgaaaggaagtggtgttgtgattctgattgcgattccgattccgatggagaggattcacgtcagcgttcgtgcaaagcctctctcccaggatgaggcaaaaaccagcccctggagaatctccggcaactccatttccattcctaacctctccaagttcgaattcgatcaaatattcagcgagaattgtgccaccgcgcaagtcttcgaagctcgcaccaaggatattgtggaagccgcagttcgcggattcaa

SEQ ID NO: 53156 - DNA, 252 bp, Glycine max
  Clone ID: PAT_MRT3847_19011C.1
ataaagagaaatatttgcttactcataagcttgagccctttggtactatgtggctagtttcatacggactcaacgtcgctttgctgtaagatgttcactgtgactcaacagtcctacgactattatcttgtcatgaagactcaaagatcctctgtctttatgctttcttaggactcaaattcctctgtcatttacattttgaagacttcaatatcttcagtcgtttacgctttcaaaagactacaatgtctt

SEQ ID NO: 53157 - DNA, 541 bp, Glycine max
  Clone ID: PAT_MRT3847_19012C.1
cactataagatgactcataattttttcacctattctgactggagggctttaccgttaccatggctgtgttgaaaaatgatacttgctcttttacacttttggtttgtttccaaacacaactgatctcgtgagactaattgcccacccctgctcttatttttttcacaacggcggtcgtttattttgggacagacataagaggcctttggtttgtaataactagccagtctggatttggtaaccggcggtctttctttggccccgtcggactttgtaaaattgaaagcctgcagctccaggcggatatccccgcttatttttatacgcctcttttctcacaaaacgcaaaagattcctgttccctttgcttcactagcagtactggggttctcaggacaaaaaaaaaggtttgtataaccaacactctagcagaacttttcttcctaaaaaaagtttttagggtaaactgagagttaggggggacggacctatgctacttctttggagcgccataatggggggccaatttttttaataatat

SEQ ID NO: 53158 - DNA, 564 bp, Glycine max
  unsure (1)..(564): unsure at all n locations
  Clone ID: PAT_MRT3847_19013C.1
tcgaggaggagaaatcgggtacctttaactganntggattannttcttatntnncccattctcttttttattnnngtttcagcnnattgttgnngaaaccgccctggtgtttgtgtcctagcgggaaagagaggcgcaaactcgtccanntgggatgnnacatttatgtcctttatgtccanttgaacttannaacaactactgaagaatgctttnntacaatctggcgagacnncaaaaacttcatataannatggcaattgccttttggcttttgagtttgggaatagtctttgccttcataagttannttggttttggaacttgtnntctttggtggaggcnacaaacacatatcannacaagcnnattctttgnnatgttaaagaaccggcatttcattgaagaagtcttactcttggaaactttgaagaaggttcctaattcacgaggaactcctagattggcttactaaaaactttcagcaagcaaaaacatacttgggaaaaggtggnttttggaaatgtttacaaagggaattctccctgatggcactcttgtagc

SEQ ID NO: 53159 - DNA, 437 bp, Glycine max
  Clone ID: PAT_MRT3847_19014C.1
cgaattcgagctctgtacccggggatcctctagagtcgacctgcagacgcgtgttggaaggcctcaaccgctgaccaccctgacttcaacttatagccgcgccaacctaccttgtagattggcttgtgttgtgatcatcagcaccaactcaatgcccttctgctgataatggctctgacttgagcattcaacggatgctgaaggatggcacactgagctgtgcctcaaaactgcatcacctatgtcctactctgtgagcataaataaatgaacatgtgaagcaaggatatttacttgagggacgcggaaattaatagggtgctctctcttatgcaggctagattacgtaacttatttcatactttcctcaaagactcatagtgtatccactgtttgctctggatatccctacactgagaacaatcgctgtgcgttca

SEQ ID NO: 53160 - DNA, 189 bp, Glycine max
  Clone ID: PAT_MRT3847_19015C.1
agaataaaaatttaatgctattaaaggtgagaatccaatttttatatttgagaataacacactaaagtgtattggacactaaacgtgcagacaacaatctaaaatgatttccaataatacttaaaaaaaaatttaaattataatcaagggtctggtacaaagtccttatgggcatcttttgcataaatt

SEQ ID NO: 53161 - DNA, 245 bp, Glycine max
  Clone ID: PAT_MRT3847_19016C.1
aaccctatccactactcactgaatcaccacagatcaagacatctcctataaaattgaaactcttggacaactatcttttacacacaccaaataatccaagcttaatatttaaaattaacataggacctactccacacaatatcagtatttgctcctttatttaattttcacccaaaacatggtcatatcgccttatcattattcttcttaaccccacctacatacattattactcacttcttcta

SEQ ID NO: 53162 - DNA, 809 bp, Glycine max
  Clone ID: PAT_MRT3847_19017C.1
atcagattaaattcctggtgtgagtttgagagaaaaaaattaagggcaatgtcaatcccattgatatatccgtgaggaactcacttcaacctagctagagtaaaaaaagacgttttacatttatttatttattttcctgatcagagagagagacgtatatatttatattaatgaacctcttcaatcattaattcaatttcaaaaacctttgatcccgccgcattaattcctgtgagagaaagcaaacatgccagtgaccttgaaagcttgttacactgtgaagcctttagagacaacatggtgcggacgcgtatctttatctgaatgggatcaaacaggaaatgtaactcacggccccataatctacttctaccgtactccctcgcaagagagcaacaacaacagcattgcttccaccttgaaagactcgttaagcagagtcctagtgccattttatccactagccggtcgtttacactggataaacaatggtcgtttagaacttgattgcaacgccatgggagttcaattcattgaagctcaatcctcatcaagttttgaagatctcggtgatgacttttcaccctcttcagaatacaactaccttgtccccactgtagactacactctcccaattcacggcttgcccttggttctgattcaattaactaacttcaagtgtggtggcgttagtatcggcataacactttcacacgcggttgtggatggaccaagtgcatcacactttattagtgagtgggcaaggcttgcacgcggcgagcctttgcaaacggtggcgtttcatgatc

SEQ ID NO: 53163 - DNA, 588 bp, Glycine max
  Clone ID: PAT_MRT3847_19018C.1
cccacgcgtccgggttgtaacagtgatgaggtggacgaattgacaagaatgagatatgcttgtcaattcggctaggaaaaaataattaactctgatttgaaaagaaaagatggtttgtgtcctttaacacctgaggagactgcccttacacttagggcccttgacattggtcagagcattcaaatctacattgcagctggggaaatatatggtggggacaagagaatggcaagtcttgcgaagaactatccaaaattggtcagaaaggaaacactgttggaaccatctgatcttcagttcttccaaaatcattcctctcagatggcggctttggattaccttgtctcattagagagtgatatctttgttcctacatacgatggaaatatggccaaagtagtcgagggtcatcgcagatatcttgggttcaagaagacgattttattgaacagaaagctcctagttgatttgatagatcgataccatgatggaatattgaactgggacgaattctcttcggctgtgaaggaagttcatgctgatcgcatgggtggtgcaactaagagattggtgatccctgacaggccc

SEQ ID NO: 53164 - DNA, 665 bp, Glycine max
  Clone ID: PAT_MRT3847_19019C.1
ctgattggaactagaaagtagaagctgaaaagagaagaggttgcgaccaactttgcaatcgcacctcgaatcaatcgacactcagcggaaaccctagaaagtagaaactgaaataataataataataataataaaaataatagaatgcgaatttagagattttgcaaatggcgaagcattcggtggcaatggcgaagaagcggtggccgataatgttggcggcattcttgtccgtctcaacagtgacggtgctcttaatgagatccaacaactccgattcctgcaacaccaaccattttactgttgcacaagataatcagattcgttcccctgtccaactcacaaatgcggcttccagtcccctaattttcatgaagtccaagctagttctcatggtttcgcacgagctttctctttcaagcgggcctttgctgctgatggagttggcgtttctgctgagaggcgttggttctgacgttgtttggatttctaatcagaaaccttcggaacatgatcgggtcgtttacagcttggaaagtaagatgttggacagaggagtgcaggtcctgtctgccaaaggtgaaaatgctatagatacagctcttaaagcagatatggtcattctaaatactgccgtagctgggaaatggcctggatgccattct

SEQ ID NO: 53165 - DNA, 889 bp, Glycine max
  Clone ID: PAT_MRT3847_1901C.1
ttgccggcaccagtgccgttttatctgtttacttctttttcgtattctttgtgttgaaccttgttttctgtttgttgcggatttttctgtatcttgcatccttcaaatggtcttgcaaaaatagattgttgagcagctacatggtatctatcataacctgaagtgcacctttctctctctgtctccctgtctctctctccctctctctcaatatacctcttttcctctgtgtgtgtgtgtgtgtgtgtgtttgtgtgcgtgtgctttgcgaagcaaagctagcaaaccctgatctggaaggtgcaataaggttatgaatgaaaccagtgactaaagctgtagatgattgttttaagctatgagatctgagggcttcaaattctctttttccttccatatttcatccttgtgcctctactttcttgtttttaaattatgtacctcaatgtttctttatgttgatttgtttattgttggttgtgttcagtgactgaagtttcattttagaattcttttactggtgcatgctactatttaattctgttgataccagattatgctagattggatgaccctgctggagtgcagatagtgatcatcctcctgttcagtcattattggcctagcatatcatcacctatttttcattgattgtaggaaatgtgaaatttgagatattcagtcatttcagtgtaatattctgggttatgcctactgcctaagggttgcttgtgatcaaatgtcgattctatagatattttcaatttattctgcgtttgtaatcaatgagatgtttgtgggaagaaacgatagacttgtgtcctcggcatgctcgaataacgcttcaattctgctcgagactagttctctctctccagactagttctcc

SEQ ID NO: 53166 - DNA, 205 bp, Glycine max
  Clone ID: PAT_MRT3847_19020C.1
ggctcgagaagctaaatcggtgtgcagcgctccctgtcctctagggcagttataccaaaacttaggaccgaggatactcggtaaacgcatctggggcctgcctagggcctatgcggggagattaagactcttcctgtcagacaagatccagtaccctgacctgggccggccgtgcgagcttgatcagcagtcgcataaattgtgc

SEQ ID NO: 53167 - DNA, 703 bp, Glycine max
  Clone ID: PAT_MRT3847_19021C.1
cttcacctgccccaccacgatgcaggagctctgggatgattccgtcactccaaacaccaccctttacaggctcatacacatgtggttctcgcagaagtacttgctcatgaagaagaggtcagaggatgttcaaggaagggcttctgaacttcttgagacactgaagaaggtgaagagtcaggctcgggttcaggccctcaaggagcttcaccaattagtggcttcccatgccactgcacgcaagactgtcattgatgaaggtggagtttctgttgtatcttctttgcttggtccttttacttcccatgctgttggctctgaggttattggtattcttgtgactttgacacttgattcggaatctaggaagaatctcttgcagcctgctaaggtttccttgatggtggacatcttgaatgagggttccattgagacgaagatcaattgcacccggctgattgaatcgttgattgaggagaaggattttcgatcggaggttatatcgagtcatagtctcttggttgggttgatgaggcttgttaaggataagcggcacagcaatggagtgtgtcctgggttgagtctcctcagaacaatttgtttgcataaggaagttaggaatttgcttgtgagcattggggctgtttctcagttggttgaattgttgtctggcatggagcctgattgtacggaattggccctt

SEQ ID NO: 53168 - DNA, 222 bp, Glycine max
  Clone ID: PAT_MRT3847_19022C.1
agcaaaaaagggcttttttttagccaaaaaactttttgttttttaaaggggggtccctttcccggggagatgctttccccttacaaggggggggtaaaagggtaaccttgatccgattcacccctttttgtgaaaggggccgctgggacaatttacccaaattgggctttaacaggggttggcaaataacccccgaatcccccttggggggtaatccttttt

SEQ ID NO: 53169 - DNA, 837 bp, Glycine max
  Clone ID: PAT_MRT3847_19023C.1
ttttcaaagaagggtttgggttttaaaattcctctgacccaaaagcagggatagactttttcactcttaatgggtttgggataggcttaacaatgggaatcagctttggaattggcttaacaatgggatttggctttagtattggtttaataataggaattggtttcacaatgggaactgattttggtataggcttatatattggaatagggataggcttaacaatgggaattggctttggaattggcttaactatgggaataggttttggaaaaacacctttgaatttttcttcgtcattaggaattggtttaacaatcagaaatggcttcggaataggcttaacgatgggaataggaataggtttaacaataggaattgactttggaataggtttaataatgggaatgggctttgaaataggtttaataattggaattggttttggaaagaatcctttgaatttttcctcttcattttgttcttttagactggatttggttaactcttcacttacaaccttcccatgtgtgttcacttcattccctgaaatttcagctttggccaaaacagaaggagcaaaactgaagctggcaagcagcaacaagggaacccagaagcgcaaaagtgcgcaatgcatagcggaagcctttttcatgagaaaacaacaactaggccacactaatcaaagctcaaaagggaattcctattcctttgtaaatgcctccaccaattccaccacctagaccacttcctcctccataaccaccaccaagaccactaccacctccaagtcctccaactccaccacctaataataataattttacatcttta

SEQ ID NO: 53170 - DNA, 1082 bp, Glycine max
  Clone ID: PAT_MRT3847_19024C.1
tcttcgcgtccgcccacgcgtccgtgattagggtggcctagttgttgttttctcatgaaaaaggcttccgctatgcattgcgcacttttgcgcttctgggttcccttgttgctgcttgccagcttcagttttgctccttctgttttggccaaagctgaaatttcagggaatgaagtgaacacacatgggaaggttgtaagtgaagagttaaccaaatccagtctaaaagaacaaaatgaagaggaaaaattcaaaggattctttccaaaaccaattccaattattaaacctatttcaaagcccattcccattattaaacctattccaaagtcaattcctatagttaaacctattcctattccagtttataagcctatatcaaaaccaattcccatcgttaagcctattccgaagccatttctgattgttaaaccaattcctaatgacgaagaaaaattcaaaggtgtttttccaaaacctattcccatagttaagccaattccaaagccaattcccattgttaagcctatccctattccaatatataagcctataccaaaatcagttcccattgtgaaaccaattcctattattaaaccaatactaaagccaaatcccattgttaagccaattccaaagctgattcccattgttaagcctataccaaacccattaagagtgaaaaagtctatccctgcttttgggtcagaggaatttttaaaaccaaaacctttctttgaaaagcctattcctaaactaccacttgatcctaaattcaagaaacctcttctaccaccattgccaattcacaagccaattccaaccccataaaatgataacactctacgccataaagctataaggatattccttccgtttctaatgcctttatatatataaatgcaccgcattaatttcaacctgaatcatgatttcgataatcctttcgtacccctcttgtgtactggattggaatatatatgtacttgatgttttctatgtaatgaaggtctcaatattattatttgtaagattaattatattattaagaaatggttcgctttttttgttttgtttaagcc

SEQ ID NO: 53171 - DNA, 847 bp, Glycine max
  Clone ID: PAT_MRT3847_19025C.1
ggtccgacccagatcccaaatctcttcaattcttcaaccctcttcgcaaagttccctcctttgttaccgtaactgcagcatcggcggcgtttctctttctgggtttttgtcgcaatgggtttatcaagaagtcgctgtcatccgtggtttccatccaacaaggcgtccgtgggaagggaatgcttgaagaagaagaacctgtggttttgcatttgaagctcaaaaagagagtccctattgtgcacgatttcaagaaaacgagaatcgcagatgaagaggcttggcaagtgttgaaagctgaggtttttaactccagcgagagatttgagtttgcgaaggttagatttgaagagatgttggagaaggagcgaaaagccttccatgattgtgttctcgaacacctggaaaggattgatgaatgtaagaccctgttgaaggaaatcaaagtggcaatggacagatgtgagaagaaaaacacaaatttaaagtgttccctcaggttcttctccaaggttgttgctcatgtaagggtcttggaggcaaacatgcttcatgctttgaagtactataaggagcttgacaaagattaagaggaaggaatttcttcacgaaagggggtattttttatttatttatttagttttcgctatgatttttatatgaccctttaatcataaagtattagtttactagaatgagaaactctactgagtagacgaagcttgttggcaggaaaaactgaaaaggaccaagtctagtgcacatgtatgcataattaggaattgaatatatacattgataatttatccccagaagtttcaattatgattttcgttgttcttgtgtc

SEQ ID NO: 53172 - DNA, 314 bp, Glycine max
  Clone ID: PAT_MRT3847_19026C.1
attgcaacttacgcccaataaggcactaattactctgtaacaccacctttatattttcttttcagctaaagcgactcacgccctgttcgactccttttatcctacgactccttcctgcttattctgtgcatcttcacctgatcctctcttcactactcactttcctatttagtgggaaagaattacgagctgtttcagtcgttgcgaaaaggatgaccttcctatggctgctgaaagtggaggaccctatggtgtaaaaaatccagccagggaatgatggaaattatcacgctttttcataccgcaatggacgg

SEQ ID NO: 53173 - DNA, 592 bp, Glycine max
  Clone ID: PAT_MRT3847_19027C.1
aaaaaacctaaaaagccacctttttttaagttttccccaccttgtttttcccccgggggaaagaaaaaaagaaagctgctttgcaacaaaggagatttgattttccaggacgggaaccgcccaaccaggtaaaataaaaggagaaaaaaaaaagggcttaaaaaaggttaaccccgaccaaaacccaaaagatttaggctttttagggaaaaaaccctaaaaaaccccaaacccctaggggagaaaaccctgtggggggctaccccctggaaacaaaacccaaggaaaagggatgggggctagcattttataaacaaaccccgcccagccaatctaaatatacaaattttttttttcactgggcaaccaatcacatttttttaaaactgaaaaaaaaggcaaaacaaatcaaatccggggggacccaaatgggggataaatttccttttaaaaacaccaatttttgccacgggggggtttgggaccgcctccttaaaacacagtggagcttaaacacctttaaaaacaaccccttgggctacaattttactttggggaacaacgggttaaccacccttgggggcatctccag

SEQ ID NO: 53174 - DNA, 283 bp, Glycine max
  Clone ID: PAT_MRT3847_19028C.1
ggcttaaaaaagcccccctggattttccttaaagccttattaaagccccctggattcttaccggcccccttccttaaaaggggaagttcccaggcttggcccaccttccccacccccccttatttattttattttccaactttttgttccccagaagccaaagccttgacctattaaaccaccaccgtaagtctaataggcagggcccttaaataaatggggtccccttaaaagggcctggcttccaaggaaagggcaaccagggttagtcccagaaccacct

SEQ ID NO: 53175 - DNA, 281 bp, Glycine max
  unsure (1)..(281): unsure at all n locations
  Clone ID: PAT_MRT3847_19029C.1
agaaagcctccttcaantagtactgnattctttcttnncttcnaaatggtaggangaggcatccagagcaaaagacttgntgatttcggacatngcgagttacgaggctatnaagaacttnnnnnnnnnnnnnnnnnnnnnnnnnnngatggcantcntccataaccngatctctgaatncaagatctgncantgtttctnccaccattggcccanantacnccgcttcaccttcacatcnacaacattattggggaacaacactnatcgaangcaccaac

SEQ ID NO: 53176 - DNA, 116 bp, Glycine max
  Clone ID: PAT_MRT3847_1902C.1
ctgacgcgttatctgagaaacccttcactcgtgagttcaaactctcctcttacccaaatgtgctgcatgtcaataaactggtaagcatgcctcgatcctacaccttgaaccattcg

SEQ ID NO: 53177 - DNA, 241 bp, Glycine max
  unsure (1)..(241): unsure at all n locations
  Clone ID: PAT_MRT3847_19030C.1
aaaagcgggaacaagggacaacaacagagggcgaacaccaaaaaacagnagaagcagggangcaaaaacaccaagccaacaccaaaaagcaaaaaaaggaaaaagcccaacgggaaggggnangcaacgaaaagggcaacaccagagagcacggagccgaaagaggacaaagcaagcacccaggaaaaaagacacaaacaagcagaggaagagccgcggacaaaaagagaacagaaacaac

SEQ ID NO: 53178 - DNA, 606 bp, Glycine max
  Clone ID: PAT_MRT3847_19031C.1
ctcaggaagaagcctatcttctgcgaggtgattagctgatggccggcacctcgttgatctccaagaatatcgagaacaaacgcgtctagaagtatatacacccccagagtgatcaccagatctccgtcgagccaagctgtcgcacacccaagaggattgcactctcaagccaggtagaaaatcatgggatgcactttgatgccccacattgtgtatgatctcagacaagaacacccggcctcatctaccaaacggattcttgagatttgtcgagcaccaggagacctaccggatcacttctcatgatgcatgacaagacatattgagctgagataggtctccatgcatccacaaggaagacgaaagacatagtagagataggtggtcttgttgatgttgtcttgacgagcaagactctcatactacgtctccaggaggatgagtagatcccctccatggcagagtatttatgatttgaagtgagcttctgttgacacccttgatgatacattttgattttttagcatctccatcactttgttgcatgccatacaattctatatgtagcttattgtctatctgctgctgctagaaaaaaaaaaatac

SEQ ID NO: 53179 - DNA, 826 bp, Glycine max
  Clone ID: PAT_MRT3847_19032C.1
gggggcttgtagaagactacagaaggggacaaataacaatggggctttgtacagttcagcctatcactctctcgaagcttcctaacgcctcctcttttcttcctaaacctaaaccctctcttcctcagtcttacactccctccgccgcacacttatctcggtcagtttgcttaaggaatctgtcgccaaaggcaacatcttctgaagaagaaaggtccagtgggggaagtcaatttttcaatgagaagcgcgatggtgtaataatcctggaggatgttaaagaggataataataagaatgagttcgataaaacggtgattgaagatacaaagcaagacttgtttgatgatgatggacagggtctatcatttgatttgctggataagctcaattttgatactgatgacactggttccattgtcgtgtatgggggtggtgccttggtggctctgtggctaacatcagcggttattggcgcaattgattctatcccattgtttcccaagctgttggaagttgtggggcttgcatatacagtgtggttcacttcccgttacctgcttttcaagcaaaatagagatgaattgggtgctaaaatagaagagctcaagggacaaatttttggttcagaggataattgattgctctgaacggatgaaatgtttgtgctgccacttaaaacaatgtacagtaacagttaccgttgttttagttttggctgagatgtaaaaatatagtcagcaccagatttctcttattcaagtttttgactgctattgccaaaattgtctctagtgcattgtgggtgcacgttgcatttctttat

SEQ ID NO: 53180 - DNA, 954 bp, Glycine max
  unsure (1)..(954): unsure at all n locations
  Clone ID: PAT_MRT3847_19033C.1
gatctcactcttcaattcaaatccctaatgtctaccactctctcgaaccttcctaacgcctcctcttttcttcctaaacctaaacctaaaccctctcttcctcacccacaaacccctctcactcactccgcagtacttttatctcggtcaatttgcttgaggaatctgttgccaaaggcaacgtcttctgaagagcgatccactggaggaagtcaatttttcaatgagaaacgcgatggtgtcataatcctggagaatgttaaagaggataataagaatgatttcgataaaacggtgattgaagacacaaaagaagaagagttgtctgatgatggacagggtctgtcatttgatttgatggataagctcaattttgatacagatgacactggttctattgtcttgtatgggggtggtgccttggtggctctgtggctaacatcagctgttattggtgcaattgattctatcccattgattccgaagttgttggaagttgttgggcttgcatatacagtatggttcacttcccgttatctgcttttcaagcaaaatagagatgaattgggtgctaaaatagaagagctcaagggacaaattttcggttcagaagataattgattgttctgaacggatgaaatgtttgtgctgtctcttaaacaatgtacagtaacagttacctttgttttagttttggctgagaaggaaaaatatagtcagcaccagatttctcgtattcaagttattgactgctattgccaaattgcctctagtgcattgtgggtgcatgttgcattttttattgtttacatacggtctatattttttttaaaaaattgtaactagaaaatttgaggacgtctggtttccaaaagcacactcgatatctaacattaaggatgcaatgtaaagggggcaaaaaaaaaaaaaaaaaaaaaaaanaaaaaaccgccc

SEQ ID NO: 53181 - DNA, 374 bp, Glycine max
  Clone ID: PAT_MRT3847_19034C.1
ccacgccgtccgaaaaaaaaaaaaaaaaaaaaaaaaaaaaaaaaaaaaaaaaaaaaaaaaaaaaaaaaaaaaaaaaaaaaaaaggaaaaaaagaaataaaggaaaaaaagctggggtccgccgttcatagcgaatccatatcttctgctctgcgttgcttcctaaatttatttcttttttttggggcttcactaaattaattactgggaggggccgtgtcattacccaactgtttgggaattgccctgcttttcccctttttaactttcgttgtaatagctccttttttcgcccggtgcgatcttaccaaagtggcccccgcctgaatggcttttcggaatgtgccctgtattggaggattaagggcgcccgcc

SEQ ID NO: 53182 - DNA, 570 bp, Glycine max
  Clone ID: PAT_MRT3847_19035C.1
attcggctcgaggcaataaagacagggtgggttcatcccaatatcaatttagaaaacccagatgaaggagtggataccaatgttcttgtcggctctaagaaagagacactagatatcaaggcggccatgtctaattcattcggctttggtggccaaaattcctctatcatatttgcccctttcaaatgcaatagattttagaaaatattacttgtttattactttaaagaagaataaccagacaatgtattggatactcacactactcctttggttgaacaaaaatgattataggggggattgctttcttggatgatcacttatgttcaaaaacattgaagtaatcctctagaatcaatatttctagacttgtttgttcaaggttttagtgtctatatagtcattgatgaaaaataacacttgatgggacatagacattgttttatttccatgtacgaaatggccatatagtagacacaacaattttaatgcttagagttagatagcattttcatttaaatttatgccattgaatttaatgacaattttgtctttttcaaaaaaccaacc

SEQ ID NO: 53183 - DNA, 300 bp, Glycine max
  Clone ID: PAT_MRT3847_19036C.1
tcgcaaaaccatccaacaagggaaacattatattattccattttttcacttccacacgggcttgcgttcattccccattttcaactatggcctcttcagctcaattttccaccactttggtcgtactatgtctcttccaattcctagcaggtaatcatttatactcattaatttttttttttgttttaaacatgttgacttttgtaatattcaattccagttcctggatatgcaactgggtgatcttttagaagaaaatgttagctacttgtattaatggtcatgtgttatgtttaacgt

SEQ ID NO: 53184 - DNA, 1738 bp, Glycine max
  Clone ID: PAT_MRT3847_19037C.1
tacggctgcgagaagaccggggttctttgcgagatagaagagaaagccgtcgctatcctagtctcttcttcccctctacccatttcagtttcagtggtctcgtggaagtgtaagcaagcaaaaccctagcggcgcctgctttctttgttcgtgttttgcatcaggatggagtctcaggtgaagcacgcacttgttgtcaaagttatgggtcgtactggatccagaggacaagtgacccaggttagagtgaagtttttggatgatcagaaccgtcacatcatgaggaatgtgaaaggacctgtgagagaaggagacattctcaccctactcgagtctgaaagggaagcaagaagattgcgctagatggtctcttttttttggcttgcctccaaattcgaacaaaagcaatatttttcttgatatttatggtagttagtcggtgctaaaggggttatagcaccctatcttattgttttggatctattttcattcgaattattgcttgaattttgtatgtttaaacttcgagattgaggtatgctttggtttaatatatgatttgaattatggcaaaacccagaaccctagccctagccctaacctaataccaaaatctcgttgtggtgctttcgccttttctctcacatcaatggccgactctgtaatttcgattcagtaccttaaagatttcgtcaattctcaaatctacgacgatgagaagtgggccttcaatgcgaaattgctgcgtgctgctggattgtttgcaggatcaatattacttatgcgaaactatggtgaccttatggcaatttgaaagtagaacagcaaattgtctgccatgagttactattatctactttaacagtaatgtgatgtttaggcttcttttttttcgttctttttatcagtaatttgaacatgaagtgagttttttggtttgaagctttcggtgaacgatggcaatgcttttccgattgggttatgtttaatagtacattcacatactatggctacgatgtgtttggtatgaaatacagtaactactttcgatattccaaaagcattcacagtttcacacgaaccaaacaactgatagggtaaaaatacaaatatggacatggcacacatcacataaaaggaaaaaagaaaaccaagtccagcaataacatcaaaataacagatcagtcttcttgtacttcagcataaaccttgtttcatttgataggatgcatcctacaccagattcttttgttgagggaggactaaatttagtgatgctgaacagtatacgacttccaaaggtcaaaaattccaaaaagcatgctaatgaaagaatccaacatatcatttgttagaacactcgggtctacgttacttcaccaaacaagccacaaacactatgcgacccaaattaagaacaaaagatcaacacatacagtacaaattcaacgtcacgtagaaagcaataataattccaccatgaaattgaaatcataaacacagtaacagatattgaaaatttgaaactcgaattaaaagaaaacaatttcaaatgacggagccaaataagaagcagtgaagcgagaacaatacatgaaaaataataataaattaattagagaagaaggatcagctgtggatagaaatcaatagggtgagttcgcacctgatgcaaaacacgaacaaagaaagcaggcgccgccagggttttgcttgcttacacttccacgagacgagc

SEQ ID NO: 53185 - DNA, 428 bp, Glycine max
  Clone ID: PAT_MRT3847_19038C.1
ggtttgtatagatgatttacgaaagtatcagtgataccaatgaaaatttgttagttactgggggatacagagctagatttctgggtttgtgtagataatttacgaaagtatcagttataccaatgaaaattaaaataatatatgcatgtgcacgttttctgtaagaccagctaaatcttaaacctgttccctaactttctatgttctgatatactagtttctgtttggtctgaatgggttggatatttgaccatatcagtatattggcaatgagtagcatctcagactgtcaactgacattttgtcaaagaagaaattgttttgaagatttaagctatatagtattttatgcatatttttaggcagatctagttatatttcattggagccatttttacttgaaacgtatagataggcagtaaggaaac

SEQ ID NO: 53186 - DNA, 1991 bp, Glycine max
  Clone ID: PAT_MRT3847_19039C.1
tacggctgcgagaagacgacagaagggggagagagaacatataacaggtgtggacttttgtcttacttttagacgttaaatttgtgagagaatagagatatttatttttctagatatccaatttctttagtacatgaaagagtgctgacaaaatggacacctctattttataaatatttcatcaatatttatctttttctcttttcctatagtgtcataatactatatgtaatgatatttgaacatcaatttattttaaatatttcattaattatttctttttattttttttctttttatcacatcataagcgcatgatcataataaggtgttttttttttttttttaaaaaaagctaaaaattcttcttatatattatacctggtaattaggttaatacttaacacatatttgtgataactcatgccacagatgaaggtgaaggtgatgatgatgaaggggaacttgctaatgacattaaaacagatgatcagttgttgcaatttgactttgcaaccatcaaatttgcaacaaatgacttctctgacgcaaataagcttggccaaggtggatttggaattgtttataagggtacgctttctgatggacaagaaattgcaattaaaagattgtctatcaattctaaccaaggagaaacagaatttaagaatgaaattttgctaacagggaggcttcagcaccgaaacttagttagactacttggattttgttttgcaagaagagaaaggttattgatatatgagttcgttcccaataaaagccttgattatttcatatttggtacgttacaaatttttgctttaattttaccttcactttgatgaaataaagagttgttttgaacatttttttaggagccaaaaagatgtaactcatttaaattgtgaaagactgtgtatgtcatatgttagcctgggtatttatgtagatccaacaaacgtgtaaatttgaattgggagatacgctacaaaatcataagaggcattgctcgaggtcttctttatcttcatgaagattcacgattaaacgttgttcatcgtgatctgaaaacaagtaacattttgttagatggagaattgaatcctaaaatatcagattttggcatggcaagattatttgagatcaatcaaactgaagccagtacaactacaattgttgggacctttggatatatggctcctgaatacattaaacatggacagttttctatcaagtcagatgtctttagttttggcgttatgattctggaaatagtatgcggccaaagaaacagtcagattcgtgatagcgaagaaaacgcacaggatttattaagctttgtaagtgtggtatatgataccttttcactattagttaattaatttccctgtttatttgaggttcggaagcgtatagttcaacagattaaattttcaacatttaagaaattccattataattgttttattttcaatcgagcaatttttttgcaggcatggaacaattggaggggagggacagtttcaaatattgtagatcccacattaaaggattattcttgggatgaaataaggagatgtattcacattggattactgtgtgtacaggaagatatagctgatagaccaactatgaataccgttttattaatgcttcatagcagctctttcccacttgctgaaccttctgaacctgcgtttttaatgcgccgtaaaagttctttgcctatgattatgttgtctggcagtgagcaatattcagaggtaacaagatcaagtgattcaggaagtcaatatgctcaaggatcatcaatagttaagactccaaccactgagccatatcctcgttagatatttatttatttattttatcaaatttacttttaaagcgctttgggcaaaaagggtatgaatgattctggaaacaagattttaattattgaaacttcttcctttggagttaaaaaaaaaaaaaaaaaaaaaaaacacaaa

SEQ ID NO: 53187 - DNA, 3124 bp, Glycine max
  Clone ID: PAT_MRT3847_1903C.1
ctcttataagcaaccccatctctctgtcccaatcccaacataccccccactggtccttttccattctttatacagacacacacaataaagaaaaagaaaaactacgttttcctttcactattctttttcaccctctccctctctcccatatatgatccaatatattgctataatacaatagaaccaacaactgtgacagacaaactctgagtagtacctcttttattctcctcctccttctctttcattctcaaaccactctgccatagtcttttctttcacctcttaatgaaacctcttggtttgtgtggttgaaacaaacaaagataagtcataataataaatcgggttggattcggaagggatgatggcggtgagttcagcctgcaaagatgggagcaaggtggcactggacaacggcaagtacgttaggtacacacctgaacaggtggaagcactggagaggctctaccatgaatgtccaaaaccaagttctcttcgccgtcaacaactcatcagagagtgtcccattctctccaacatcgaacccaaacagatcaaggtttggttccaaaaccgaaggtgcagagagaagcagcggaaagaagcgtcacggctgcaagctgtgaacaggaagctaacagcaatgaataaattactgatggaggaaaacgacagattgcagaagcaggtgtcacacctcgtctatgaaaacagctttttccgccaacagacacacaacaacaacgctacgcttgccacaacagacacaaacacaagctgtgagtcggtggtgacgagtggtcagcggaacttgacaccgcagcagcatccaccgagggatgctagccctgcaggacttttgtccattgcagaggagactttagcagagtttctttcaaaggccactggaactgctgtcgagtgggtccaaatgcctgggatgaagcctggtccggattccattggaatcgttgctatttctcacggttgccctggagtggctgcacgtgcttgcggccttgtgggtctagaacctacccgggttgtcttttcctcttgcaactttgcagtggagtggatgagcatgcagttggcaccagcgcagaacttgtttttgctccaatcgatgcatctttctctgatgatgcgcccattttaccttctggttttcgcatcatacctcttgattctggcacagatgctgctagtccacatcacttttggaggacggtagttttgtggtctgtgaaagatcacttaacaacactcagaatggtcctgctatgcccccagtgcagcattttgttagagcagacatgctgccaagcgggtatttgataagaccctgcgaaggagggggatcccaaccatggccagacaatatgttcgtagtatcattgcatctgttcaaagggtttcattagcactttctccttcgcgctttggttctcacaatgctttccacttaccacctggcactcctgaggcacaaacacttgctcgatggatctgtaacagctaccggttctatcttggggtagaacttctaaaatgtgaaggcagtgaatccattctcaagtctctttggcatcactcagatgcagttttgtgctgctctttagtccatgttagagagtgatggcattgatgatgtcacccttcttgtgaattcctcacctagcaagatgatgggagttagccttgtctataacaacaatggatttccttctgtgagcagttctgtgctatgtgagttcccccagataatgcagcagaatgtccctccagcaattcttcttagattcttgcgggagcaccgatcagaatgggcagacagcagtattgatgcttactcagctgctgccatcaaagctggtccctgtagcttgccaggggcccgatcaggaggttttggcggtcgggttattcttccactagctcacacaattgagcatgaagagttcatggaggttatcaagcttgaaaacatgggctactatagggacgacatgagtatacctggtgatgttttcctcttgcaactttgcagtggagtggatgagcatgcggttggcaccagtgcagaacttgtttttgctccaattgacgcatctttctctgatgatgcacccattttaccttctggttttcgcatcatacctctagattctggcacagatgctgctagtccaaaccgtacacttgatttggcttctgcacttgaggttggcacaacagcaaacaaagcagctagtgacaactcagctcattctgggagcacaaagtctgtgatgacaatagcattccagtttgcattcgaagttcaccttcaagagaacatagcaaccatggccaggcaatatgttcgtagcatcattgcatctgttcagagggtttcattagcactttctccttcgcgctttggttctcacaatgcttttcacttaccacctggcactcctgaggcacaaacacttgctcgatggatctgtaacagctatcggttctatcttggggtagaacttctaaaatgtgaaggcagtgagtccattctcaagtctctttggcatcactcggatgcagttttgtgctgctctttaaaggcattacccgttttcacgtttgcaaatcaagctggacttgacatgcttgagacaactttggttgcacttcaagacatcactctggaaaagatttttgatgacaatggaaagaaaactctgtgcactgagttcccccagataatgcagcagggtttcatgtgtattcaaggtggtatctgtttatccagcatgggaaggccagtgtcctatgagagagcagttgcatggaaagtgttaaacgaagaagaatccgcccattgcatctgttttatgttcatcaattggtcctttgtctaatatattaaacagtattaggatgtaggaaagaaaagtagagcacaagagtacctaactttggcgaatccctagaatgctttaaaactctagtgggcatatgcgccaccaagatctatctatggccccatttgttttatttttaaaaaaaagggcggccgcccacaaattagctagctggtccagccattaattcagtccgggcccgtgccggcgggcgagcc

SEQ ID NO: 53188 - DNA, 538 bp, Glycine max
  Clone ID: PAT_MRT3847_19040C.1
ggccgccctaaaaccatttggggaaaaatggggaaaaaaacaagcccccaacaaaaagaaaaggggttataaagggggaaagggccattaaaccaaaaacaaaaaaaggccccaaaactaaaaaaacattacattttaaacaaaaaagttttccacttaatcgcccgaaaaaaccaacgggaacgggggggggggccgccaaaaaaggaacaaattcccgggaaacattttaagggggggaggtttggacaaaaaaccccttttggggttccccggatacccccccaccagggaacttcccaaggggagcgagggattggaacttggcccggaaggcaagggcattttgggcggccttaagggtctgggggcggcccccccagggtttaaagggaggggtttggggggctctggaaaaaaaaaaaaacacgggccacgggttgggaaatgggttcatgggattaaaaagggggggagtttaaacctcaaaggggcaacagaaaaaaaaataatccagggacagaggggggaattctcc

SEQ ID NO: 53189 - DNA, 494 bp, Glycine max
  Clone ID: PAT_MRT3847_19041C.1
acaaaacatagagtatgaatcgcactatatccctgctaaaaactgcttatgcactaaaaaaatagtgaatctcagtgctctataacacttttggtataaccaatggccaaaagaaacctccgacagccactaactgaaaactgaaattaccacaagcagtatttatcccttcaacaaagagcctcaatgtacaaaaggagccctatgttttatcttcaccgtctgaaagcaggcaatcttgtatttggtccctcaaaacaagtatattgccacataaccttcgatgacatgtgttgaagaaaggtctacacataaagtgcctaccataaaatttcaagcatacttgatacttaaaagaaaaccataggcacaattactaaaattgaacataacccatgccattccactgaagaaaagcgacattacattaaagtgtgccatttccatacttgtagtgtaaccaaagcctgaacaagtgaaagaaccccttacca

SEQ ID NO: 53190 - DNA, 329 bp, Glycine max
  Clone ID: PAT_MRT3847_19042C.1
tcaaacaatcatatccattacaatatccatcataaccctcactataactaactcaaataaaacatatacctacccatcactaacataaaccccatcataaacaatccactacctactaatcataaaatcatcaatgactccaaataaactattcattaatccttatccccatcctataacatcatcctatcatactcatatatacatattcattaattacattcacctcatccaataatacatcattttatctaccaaaaaatttttcacaatccctcattttatcccatcttatcacatctcttttaaattctataaactaatttaaa

SEQ ID NO: 53191 - DNA, 244 bp, Glycine max
  Clone ID: PAT_MRT3847_19043C.1
acccacgcgtccgatctctctttcttttatggaatttatcaatctagatccacttaacaataaggggcctaagtggcgattattgaacctctggggcttcaattttaagactgtttgccttctgccaaaccatactacaagcagactactcaccggagctgcgctacccttccatatatttcttacacctactcttgcacttcttatgcacatactgcttcttcaaactttcaaataccacact

SEQ ID NO: 53192 - DNA, 369 bp, Glycine max
  Clone ID: PAT_MRT3847_19044C.1
ggaaactaaaaaataaatgttacataaaacatttgccctttgtaaattcccggccttttttttcaggggggggggggggttcctaatttggaagtttttggggcaaatttttttaaggggaaatttttcgggccttcccttaaattaagggttttttttaaagggctttttaagcatttttttctttttttaagggtgaattaaaaaagaccaaattcagtttttttattccatttttttgggaagggggaaaccttttttagcccggatttgcttttttgggggccttttttttgttggccaacgcatgaaccctttagaaaggtttaagaatacaatggtccactttttttttttttggatgggaaa

SEQ ID NO: 53193 - DNA, 454 bp, Glycine max
  unsure (1)..(454): unsure at all n locations
  Clone ID: PAT_MRT3847_19045C.1
ggctcgaggacgcaaaatggtgacccctctcgtaaaacacaagatcgtgaaaaaacgcaccaagaaattcgtgcgtcactattccgatcgtttggttcgtctcaaccaaaaggtgtcatggcgacgacctcacggtatcgactcacgtgtccgtcgtcgattcaagggtaacatgttgatgcccaagattggttatggtacaaacaagaaatttaaacatgtcctccccaacggtttgctcaaattctccatcaacaatgttcgcgaattggacttgttattaatgcacaatcgtaaatatgctgctgaaattgcacacaatgtctccatccgcaaccgcaaggctattngtgaacgtgctgcacaacttaacgtcaaagtcatcaacggaaacgccaaggttcgcacagaagaaactgaataaattatacacacctacaaccaacaacaaact

SEQ ID NO: 53194 - DNA, 421 bp, Glycine max
  unsure (1)..(421): unsure at all n locations
  Clone ID: PAT_MRT3847_19046C.1
tgagcatcgtctagctatctcgatcgaactgtccaaggtcctgtcactcgtggtgcccgaattatcctgttatgtcaataacgctcctaaggtttaatctggtgtggtgacccccacggtcaagttgcgcacgtgggtaagagcatcgtcggtggcaagttgcacaagctgtgcaaaacccatccaaccaaggaatgtaagcaggcccgtaccaacgtaccgagcatgggcgtacgatggtgagtagcgagttgctaggtagttggtaacaatcgagataccacgtagccgtaccaaccattatggcnaaacccgaggagcggcgtaacngagcagcccaagtgggcatngatgatagcatgaaaaccattcgggggtgaaacaatcccggaaggtacgagacctaggagagctgtaataa

SEQ ID NO: 53195 - DNA, 487 bp, Glycine max
  Clone ID: PAT_MRT3847_19047C.1
ggtgatttcgcgcattaatctgctgcacacaaaacagatatgcaactgcatgcacatgtgctaggatattagactattcttgcgggttggtcaagaggcaattgctagaatctaggtggagcatatcatacaggaacgaaatacatgggctgcatatgacattgtggagacgatctgtgaatttgctcgtgcacgggtacctataattgaaaatcacaaggagtgccccaccgtattgccagaagaccttgcaagtataattattgctgctcctatatgtgcacatgtaccacacttattgcacatcagagacttgcttaccgctaaatatgctaaagaatatgcctctgcagtatatgagattacggctgattcggtgcgtgacctgcctatcattgaagagcactacgtgagagctccatcaggagaggtaataccctatgtcttgaagggagatgcatcaacacccgagattccatgggattct

SEQ ID NO: 53196 - DNA, 374 bp, Glycine max
  Clone ID: PAT_MRT3847_19048C.1
gggaaatgaacaaacattaagtcgcagcatcgtcaagacattcattatgttccttaccctcacaatctgaagcaacgccaaactgaaagcgccacaattcggacaaggcaacaagcattattgctccgttccccgtgtgatgactaagttcatcccatcaaaagccattgcaagaatcaatatctatctcgcgtcgagctgggccttgaaagatctccgtactctcctacattaacaaccactattttttcctttgcacataacacctgaatagactatcccccattctacattacaagagagatgaagcctgatgccttgctgatggatgtgggacaccatctgagattcataatgacggcgacgggcctatc

SEQ ID NO: 53197 - DNA, 536 bp, Glycine max
  Clone ID: PAT_MRT3847_19049C.1
ccacgcgtccgtacggctgcgagaagacgacagaagggggagagagaggggacatttaatattttctttctgaaaaacaaaatgggtcatatcagcaaatttgcgagaagatgatggtcactgtgatattgttccactcttgatgcttcttttgggtgttcaggttagtgaggcagaaacaacctgttatagaaaaagaacaaattttcccatctcattcacagctcctctcagtgggtttgatttggtgtgattattaccccatgctcctcttcctcctcctcttgttatgttatctcttcaacttcaacctacacggatatccacaaaaaaacgaactttttggttggaccactccagttcaagcataatggagctcctttcttgagatatatcaactgggttttgtgcaacttttctcttttgccttgtggaagtatcataaagcaccaaactttatgtgccctgaggggtggattgctgagaaaatatttgggtttgcttcaattttgcttatgcagttgaagattcatggt

SEQ ID NO: 53198 - DNA, 1261 bp, Glycine max
  unsure (1)..(1261): unsure at all n locations
  Clone ID: PAT_MRT3847_1904C.1
tcggnaattcggcttcgaggggaaacgagttcatcccatgccttttcctgattcatctgtacctgttcaaccaagacctatggatcctaaaaaggatattgcagtttatggatatggaagtgttgcatggaaggaacggatggaggattggaagaaaaaacaaagtgaaaaacttcaggttgttagacatgaagggggtaaagatagtgatgagctggatgatcctgacttaccaaaaatggatgaaggcagacaaccactttggagaaagttgccaattagttcaagcaggataaatccatacagaatcataatagtacttcggattgcaattctttgcctcttttttcattatagaatcctccatccagtcaatgatgcatacgcattgtggctcacctcagtaatatgtgaaatctggtttgctgtgtcttggattttggatcagttcccaaaatggagcccaattcttagagaaacataccttgatcgtttatctctaagatatgaaaaagaaggaaagccatctgaattagctgatatagacgtttttgttagtacagtagatcctatgaaagaacctccacttataactgcaaatacagtactatccatccttgctgtagattatccagtggagaaagtttcatgttatgtctcagatgatggagcagctatgctgacatttgaagcactttccgagacttctgagtttgcaaggaaatgggttccattctgtaagaagttctgcattgaaccacgggctcctgagtggtattttgctcaaaaggttgactacttgaaggataaagtggatgcaacatttataagagagcgtcgtgctattaagagggagtatgaagagttcaaagtgcggatcaatgcattggtggcattggcacaaaaggttcctgaggatggctggacaatgcaggatggtactccatggcccgggaacaatgtcagagatcatcctggaatgatacaagttttccttggtcaaaatggtattcgtgacattgaagggaatgagttacctcgtcttgtctatgtgtcacgtgagaaaagacctggatatgatcaccacaaaaaagctggggctatgaatgccttggtgcgagtctcagcagtcatatccaatgctccctatgtactcaatgttgattgtgatcactacataaataacagcaaggcccttcgtgaagccatgtgcttcatgatggatcctacatcagggaaaaaaatatgctatttacaattt

SEQ ID NO: 53199 - DNA, 371 bp, Glycine max
  Clone ID: PAT_MRT3847_19050C.1
aaaaaaaaaaatttgtttataaaaaaatttataaaaaagaaaaaaaaattgtatataaaagggaaaaaggggggggggggcccgtttttttaagaaaaaaaacccccagtattgtgaaaaaaattaaaaaatggtgtttttatttttaaagggggggcgtgggggaaatcggtattttttgggagggtttcatgggaggaaaacactttttcataaaaagggaagcctgtaaagggtaaggaaaaaggggaataacgttttttggggggaaaaaaattttgggtttaaaaacggacaaaattttgagccagaagaaaaaatgtataggcccggtggggatagagaggggcccccaaagagagggggggggg

SEQ ID NO: 53200 - DNA, 345 bp, Glycine max
  Clone ID: PAT_MRT3847_19051C.1
cccacgcgtccgaccacgcgggcgtcaacgcgttcgaccactcggacgcaacgtgaatggcagcctgatgcatgctatgcaccctcgtctcctgcctactccctacaaagccacgcaatcttcccatcataacgcgatagccactgcacaagctacttgccaagcatcaagaccaggaccaccactcgtcggtacagctgtacagcgtggtgaacctgtgccacacgcatgcgaacacgctcttttaacggacagcgtacaacgtgcatgtggcggtgcgacgagaactagccataggagaggctactgaacacattcccagaagaggtcatgagagccggagtc

SEQ ID NO: 53201 - DNA, 389 bp, Glycine max
  Clone ID: PAT_MRT3847_19052C.1
tgaatgcaaagcgaactattctttcgccttttactaaagaataccgtgtgtgtcgggatcttaagcggcatacgtcaattttttaaagagtccttctgttttgaaggctctgcaatgtattttcaatagttgatcttgctcatgaacttctgttcatttgtatttctgttctatactgcagttatccgaagaattgtaaaccaacattggatatatgcatagattccagattagccaattagatttgatgcattggttgcagcgcttccaatatctgtgtcaggtgaagaagcgcagcttaagaggatttcagaactacaggctgaaaatgatgcaataggccaagaacttcagaagcagttggaagctgcagaaaaggaattgaatta

SEQ ID NO: 53202 - DNA, 675 bp, Glycine max
  Clone ID: PAT_MRT3847_19053C.1
ggctcaagtgaattcggcacggcaaagcgaactattctttcctctcgccctttactataccgtgtcgtgcgtcctccttcttaagcggcatacgtcaattttttaaagagtccttctgttttgaaggctctgcaatgtattttcaatagttgatcttgctcatgaacttctgttcatttgtatttctgttctatactgcagttatccgaagaattgtaaaccaacattggatatatgcatagattccagattagccaattagagttgagcctatattttacttgttatgtcatgtgcttcattatgtatcatgccttctgtcttctatattaaatttttttattggatcactcataagtggtctgttgaaatatacctggtttcttctgcagtttgatgcattggttgcagcgcttccaatatctgtgtcaggtgaagaagcgcagcttaagaggatttcagaactacaggctgaaaatgatgcaatatgccaagaacttcagaagcagttggaagctgcagaaaaggaattgaatcaggttcatgagctgtctacgcaagcatcagattattggttgaactttaagaaaccatatgagatcgagatatctacttgtgttccaggcaacggcagaagaatgattttaccacaatcatgggactactgcagagaat

SEQ ID NO: 53203 - DNA, 466 bp, Glycine max
  Clone ID: PAT_MRT3847_19054C.1
gcacattttgatctctcacatgatataagtatataaatattttagcatgatgggaaaaatatataatatattttagccaaactgaataacaatataatatgattactttgaaattattcaaaaaaataaatatcttgttttcttatcggcatgatgaacaactgtataaattgggggatagcaattaattaatcattagttataccatgaaaaatagtatttttatatttttacaatctgtctaattgagttaattagttaagttgaagacttgtataagatatggttaagttgaaaaatagtactttttgttgaagtgcatgaattaatttataacaacatgaataaatatcttaagtaattaaattaaatatgggggccagctagcaaaagagaatgaggatgatgtaagtaattaagtatcttggttttgatgatgacaaatgtttttttcttctttttctta

SEQ ID NO: 53204 - DNA, 250 bp, Glycine max
  Clone ID: PAT_MRT3847_19055C.1
ccgtccttttttttttttttttaatatctgcgtccgaaacatgggaaatgtggctattagattttacacaactacaacaacacaacccatcaccttctctgggtttgaacttacaccaccacccccggttttactaaaggaacgtcttcatcccccccaccagcaaggataatattttttatatctacaaggagggccccgcaaatcttttttttatacggaactggaaagtatgttcccactgaacaag

SEQ ID NO: 53205 - DNA, 559 bp, Glycine max
  unsure (1)..(559): unsure at all n locations
  Clone ID: PAT_MRT3847_19056C.1
tcagctcgagaaccaaactgggtcaaagttctaatattctccgcatttgcggaaatatgctatgtaagttggtttacttaatattaatataagggggtgtaatggggaaactctcacctgcacaccgtcacgacatctttgtattgaatagactcaagcgtgttgtgatcattcgtggcttcaataaatattcaaaggttcgtactgctttgcagccatgatatagggagacctaaggaaacccacactggntacatggcttagcagtgtctacgcctggtanttcataccggagagaagtgttggattagaacccaagttcccatccccacttcagtatacgatcctcttcttattttttttttttcgagaatcgcaaaaaagggtattagcgtaatctcatggcactagtatcacagcgtcataccgccggtcattgtaggtgtcacctcacccgacccacctacttcacttacctttacgtgccattttgctcttttttacccttctttcaaccctttattaaaaccctatntngatcgcactcacccacacacca

SEQ ID NO: 53206 - DNA, 1490 bp, Glycine max
  Clone ID: PAT_MRT3847_19057C.1
tacggcgcagagaagagttcagaagggggtgtgttccgtgtgagaaagaacctctctctctcatttggtacggtttggtcgtgcccattgtcctgtttgtttcggtttctgttttgctttgaaagcagaagaatcaaatcaaatcaatccttcaccgttcgttcgttcattaattcattcaattccctttcttcggtttttctattttttccctcaaaaaataaaaatcggaactttgctttaaacgtggaaccccaccctgagatttcgcccccagaatcttgatccctttatccagaagggtacttattgtttttttttttaccactgggattcttgttgttgttgttgttgtggttcattgtttgtggaagagaaatggcgacgagtatagggattatggatagcgcttactttgtcggcagaaacgaaattctcagttggatcaacaatcgccttcaacttaacctctctcgcattgaggaggctgcatctggtgctgtacaatgccagatgatggacatgacatatccaggggttgttccaatgcacaaggtgaattttgatgcaaagaccgagtatgatatgatccagatctacaaagttctacaggatgtgttcaacaagctgaaaattgaaaagcatatcgaagttggcaggcttgttaaaggccgacccttggacaacctggagttcctacaatggctgaaacgctactgtgattctgtaaatggtggcattatgaacgagaactacaatcctgtagagcgtaggattaagggtggaaaggaccggaatgttaagagtctaaagagctcaaaatcactgcaaacaaatactatgaatcattctggttcaggcgactcactcaggtccaagcaattgaggtcaagtggaggagctgacggggttaattcttcagcagagatacaagctttgtccaagcaggtttctgatcttaaactctcagtggatcacttggaaaaagaaagagacttttactttgcaaaactaagggatatagaaattctctgtcaggcttcagaactagagaacgatcctatgtctctagcaattaagaagattttgtatgctgctgatgcaaaaggatcagcattagatgaagctcaggagtaccttaatgatgtcatcaatggcgatgaagatgaagctgaagctgaagcagaagctgaagtagaaactgaagcctgattagtcttacaaatagatcctggctggtccttgttaaacaagcttagttccatctgtgatgactgagactgctggtaatctgccgtggccatgaattaccataatgacttagctgtagttgtatggatcttttgttttcttcttgtaagcctggatcgataatcagatattctggttgatgtttccaataaataaagttcatctcattgtcctttatatcgattcaaaagaactttataatgaactttgttttgaaatggatgcgttctacttcaacc

SEQ ID NO: 53207 - DNA, 309 bp, Glycine max
  Clone ID: PAT_MRT3847_19058C.1
atcggcgtcagtgagcggcttatagggtacgactttggcttttacgattttcataaattaatccccacgcaatctggcgctctgaccagattcaaaattgttctttgctctacgacatcgtgccgggcgcttgcgatgacatagacaccacgtcgaatgaccaacccttgaaccaattcaccagcgtcccaatcccaggaatggttctccaggcaaaccgtttgcagtttctcccaccaggtccggcgtgcacgcgccaggtagtgccgctgcatgatcgcctcgcgtaattccttcaggagcgcagta

SEQ ID NO: 53208 - DNA, 287 bp, Glycine max
  unsure (1)..(287): unsure at all n locations
  Clone ID: PAT_MRT3847_19059C.1
tttccaaaaatgaattgcatattttatttcacaatatattccaaaaaatggtagtacataaagaatcaaaattggagtagcacgcagtttaaactgcattttagatagaattcccaacattgtagatatcaagagcacacaacaagccgtgttgctttcagaatagaaagaattacgctcttgaaggatctccaagtgacaatggcgtactctgagacacctcatcaacaactcagcanatcagcaacacaatcatcaaaacccttgtttcattaaataaataaaaa

SEQ ID NO: 53209 - DNA, 908 bp, Glycine max
  Clone ID: PAT_MRT3847_1905C.1
ccgggcgacccagcgtcggaaaagaacagctgatcgctattggtttaattctaggcttctttcattgttgacctattatttatcacaacttttcaagaaaaaaaaaggtggagatgcagggcattgaggatcagaaaattcaacagaatgaacccgttggttcaattgctccaaggtatgaagctgataggattcagcaaatagggaatccatggagcactggactatttgactgtcatgagaatcagacaaatgctgttatgacagcattttttccctgtgtaacatttgggcagatagcaaaagtacgtgttggcggcggccttagttgtcatctggggagcttcatttatctattaatgatgcctgctttgtgctctcaatggattatggggtcaaagtaccgcacaaagttgaggaagaggtataatttggtggaagctccatatacggatatagtctctcacatcttttgtccatgttgttccctctgtcaagaattcagagagctaaaaattagaggacttgaccctgctcttggatggaatggcattcttgcacaacagcaaagtgatcaaacattaaagaatcctcctttaaaccaagtcatgtccaagtgaacacagttctttccgaggggagctgttaaaattaaattgaattgtatttgttttgatttgtttggtgtttgtttatttttaacgtctggtatagaaatttcggtttgacagtttatcaacattccacggaatagaaatcatgacatgcatgcggttctagttcagtttcgctcttcttaaatcttataccgcaagatgcaactgccttgcacaaatattttattcgtggatacaacttctacaaaacatacagtacactagttgattataaaaaataaaaaagttaca

SEQ ID NO: 53210 - DNA, 628 bp, Glycine max
  unsure (1)..(628): unsure at all n locations
  Clone ID: PAT_MRT3847_19060C.1
gtgagagagagaaagaaagaaagacaaactctgttctgatcgatcccagctaagattcaacgttccaaataatcgaacacaactttattggtttttcgatttatctgaggttgtgctttcaattctgctatagtttttgttgttgtgaaatctgaggctgtgatttctacgcgagcccgcaatcgtgtagaatttttcaaattacttgcgggggtgatttgtttgggtgggtttttgattccggggaatggatcgaagagggagtgcgattttgattgggacgaagggttctcaatgcggaggtttaagctggagggtttgatttttgtgtttcgttgtatttttttggatgatttctgcaggaggtagggatgcaataaaggggctagggttagggttagggttgggagctgggaggagagagatggtggagtcagagcttgaagaaggtgaggcgtgctcgtttcagaaccatgaagattatgatgccaccgtagatcccgatgttgccctctcttacattgatgaaaaacttcaagatgttctgggacactntcagaaggattttgagggtggggtgtctgcggagaatctgggggcaaaatttgggggctatggatcatttttg

SEQ ID NO: 53211 - DNA, 412 bp, Glycine max
  Clone ID: PAT_MRT3847_19061C.1
agattatgccgctagctggcgccatacgctatattttaccacaggtacgcatgacttaaagctcatgaatatacatctgacttctgtagcgacatccagtcattaaatgtatcaggagctaagaccatgccatgagccttaaaccatggattactcaggcagcggagtgggaatttatgcatgaggaacggggatctgaagctgattgattccgttgaaagcctgaggtgaagatcatagacgttacagctggtggcaatggggtcacttacttaaagatgggacaccgattactgtggatgaggctgcggctgttctcctgactgttatgagctttaattttgcagatcagaaatgcggcgtggcggttctccagtaccagcatgagtatactggtatcagctaccacatt

SEQ ID NO: 53212 - DNA, 109 bp, Glycine max
  unsure (1)..(109): unsure at all n locations
  Clone ID: PAT_MRT3847_19062C.1
tttggggcttntctcttcaaactagggtttacagnatataagcnctctctatctttggttttcgtcattcaaatcgaatcgaatatnaaatatgagtngtcatcccgng

SEQ ID NO: 53213 - DNA, 651 bp, Glycine max
  unsure (1)..(651): unsure at all n locations
  Clone ID: PAT_MRT3847_19063C.1
ggtggatacctaggcacccagagacgaggaagggcgtagtaatgtacgaaatgcttcggggaggcatggtccgagtagtatgtggaagcagcaatgaagatgagacagaatgccaaaacatgaggtttaaggttaaggaaggtgatgcttttctggtgcctaggtttcatccaatggctcagatgtcattcaatgatggaccatttgtttttctcggcttcagcacttcagcagcacagagggaacaagaacaagctaaaagagagcaagaaaggagagaaaggagacggcaagaagaagaagatgaagaagaaccaacacggtgggagagaagaggaagaagagagaaggggaaaagtccagaaggagtagaatgggagcaagaagaagccaggagacagcaagcagagagtgatagacaagtggaagagcaaagccacaggaacagctttgaaggaaggagagctttgaaaataaggaacgtttgattccctcttaagacttagactcctggtatgtattacaataagagcttctttttatgtctttgtcacgtttttgcttccgtttgttttttatgactggttgttacaaagttgaagaccaatgtttcatgaagctnntagnnnannngtcatnnngnnnaaataa

SEQ ID NO: 53214 - DNA, 404 bp, Glycine max
  unsure (1)..(404): unsure at all n locations
  Clone ID: PAT_MRT3847_19064C.1
ggtttgaaattggttctttatttaattaagatactgtaataaaagtgtagcaggggaatgaactagtcaattctgtctattctttcacttgaggttgttgaatacattttaaactttccaacatgcaatatacacatgtccttaatactgtttgaaattttttggctgaataaagattaaagaatgattcattcatgttactttggttgctaaaagacaaagatacagttgttttttagcaattacaacaatccaacaaccatgcttaatgtaacactaacatcattatatgtcatacaaagaatctaatcatgctgtcctaaaaatagcatctcttatataagtgagatttctttgaatacattgacatgctaacgtgtttctttcattnttggtaaagttaa

SEQ ID NO: 53215 - DNA, 1042 bp, Glycine max
  Clone ID: PAT_MRT3847_19065C.1
ttttcttcaagcacgccctggattttcttcccctacaccttcaccttcaccaccaccaccacctattttttcttttctcgaaaaccctaattcatacgtcgccgttttgtctttctctctctgagttctccacaggatcaggaaccgaagcgttgaaatggggtaatatgatgatgatggtgatgaatcgaatttccatttcctgatgtgaggaacaaagcaccaccaccaccttggctaggttcatgtagggtttgttgagaatcttatagttttttattttctttatcaaattcttcgcttgatcaggaattggatttgtgagttagaacaggaagctaagagagaaagagaggaagaaaaagctaggatggagaaagaaagggaaaggaaaggagaagaggaagcagaaagggaggaagaagaagctagaagagagcaagaatggagaagaaaaaaggaagaagcagctgctaaaagagagcaagaaaagagggaaaggaggagacaggaagaagaagctaaaaaatgggcagaagagaaggctgaaagggagcaagaacaagctacgagagaagcagaagaagcacagagggaacaagaacaagctaaaagagaagcagcacagagggaacaagaacgggcaaaaagagagcaagaaaggaggcggcgagaagaagtagctggaaagggagaagaggaggaagaacacgcaggaagagggcacgaaaggagaaaagaagaagaagaaacagcacggagggaacaagaacaagaacaggctgaaagacagcaacaaaagagagaaaagaggagacaaaaggaggaacaaggagaaggagaagaagaagaagaagaagatgaagaggaaccaacatggtgggagagaagagaaagaagaaaacagaaggggaaaagtccagaagaaggagtagaatgggagcaagaacaagctacgagagaagcagaagaagcacagagggaacaagaacaagctaaaagagaagcagcacagagggaacaagaacggggcaaaagagag

SEQ ID NO: 53216 - DNA, 2406 bp, Glycine max
  unsure (1)..(2406): unsure at all n locations
  Clone ID: PAT_MRT3847_19066C.1
tcaaaattccataaaatggagcctcgcaaagcttcaccattatcgtgggtcttgatcttcttccttaccatttccttgtggggagttaaggtatcaagtgaagagcaccaccaccatggcaaatctaaagagggacctgtggtggaaagggatcaaaggaggacattacttgtcactgaatttggagagatcactgccattgacatcaaggaaggacaaaaggaactaccctaccatcttcagttcatcacattggagccaaactcgctatttctccctgtgcttctccaagcagacatggtcttttatgttcatacagggagtggaaagctgacttgggcaaatgatgatggtactagtacgattcgtttacgcgaaggagatgtctgcagtctcaatgaaggatctgttttctatatacagagcaacttagaggctgagagaaggaaacttaggatttatgcaatgtttaccaacacagacgacaatacttacgatccatcaatcggtgcttactcaaggatcaatgaactggtcaaaggctttgataagaaaatcatgcaagcagctttgaaggtgccggaagatttgatcgaagcaatcattaacaagacggagactccagctatagtgcatgcggttccagagaagcgaaatattgtccaggagctggaggcttcgtttcttaaaaactttttaggcgttgggtccaactccaagaaactcgaaacatacaacatctttgagcatgaccctgacttcaaaaatcccattggttggagcacagcagtgaccaaaaagcaactaaagtcattgaagcggaccaacattggatttctgatggtgaatttgaacatgggatcaatattggggcctcattggaatgcaaaggcaacagagttgacagtgggagtggatggggaaggcatggtccgagtagtatgtggaagcggcaatgaaaatgagacagaatgccaaaacatgaggtttaaggttaaggaaggtgatgcttttctggtgcctaggtttcatccaatggctcagatgtcattcaacaatggaccatttgtttttctcggcttcagcacttcagcaaagaaaaaccaccctcagtttttggcgggaaagggatcagtgcttcatattctagacaaaaagatactggccaggtctttgggtgtgagtaacagaaccattgatgagcttctgcgttctcccgaggactccatcattttcagatgcagttcctgcgcagaggaagaggagaagataatgaaggaggaggaggaggaagaggagagcaagaaagaagaagaagagaggaagaaaaaagaagaggaagaggaggaagaggagaaaaagaaaaaagaggagaggaagagagaggaagaggaagctaaaaggcaacaagaagagagggaaaagaagcgaggggaggaggaagctaagagagaaagagaggaagaaaaagctaggatggagaaagaaagggaaaggaaaggagaagaggaagcagaaagggaggaagaagaagctagaagagagcaagaatggagaagaaaaaaggaagaagcagctgctaaaagagagcaagaaaagagggaaaggaggagacaggaagaagaagctaaaaaatgggcagaagagaaggctgaaagggagcaagaacaagctacgagagaagcagaagaagcacagagggaacaagaacaagctaaaagagaagcagcacagagggaacaagaacgggcaaaaagagagcaagaaaggaggcggcgagaagaagtagctggaaagggagaagaggaggaagaacacgcaggaagagggcacgaaaggagaaaagaagaagaagaaacagcacggagggaacaagaacaagaacaggctgaaagacagcaacaaaagagagaaaagaggagacaaaaggaggaacaaggagaaggagaagaagaagaagaagaagatgaagaagaaccaacatggtgggagagaagagaaagaagaaaacagaaggggaaaagtccagaagaaggagtagaatgggagcaagaagaagccaggacagcaagcagggagggagagaagaaaacaccgagagagtgatagacaagttgaaaaacaaagccacaggaacagctttgaaggaaggagagttttgaaaataaggaacgtttgattccctcttgagacttagactcctggtgtgtatttttacaataagaacttcttttatgtctttgtcatgttttacttatgtttgttttttatgactggttgttacaaagttgaagaccaatgtttcatgaagcttggagttgattagtcatttagcccaaataagtgaatctggcttctcccaannnaaagggggaaaaaaaaaaacaaaaaataaatataaccccc

SEQ ID NO: 53217 - DNA, 333 bp, Glycine max
  Clone ID: PAT_MRT3847_19067C.1
attctttttttttttttttttttttttttttttttttttttttttttttttttttttttttttttttttttttttttttttttttttttttaattttttttttttttttttttttttttttttttttttttttttttttttcggggggccggaagggcacccggaatttacctaccgggcttctggaggacaaggcctttttttttaacatgggaaaagttttgacggtgatttgtcagaaacaaaagggcgggttgagaaaagtcttcaaaaaaattaaataccccccaataaaccccctaaaaaaaaaaaaaaaaaccggggaggcccaaa

SEQ ID NO: 53218 - DNA, 953 bp, Glycine max
  Clone ID: PAT_MRT3847_19068C.1
ggtccggaattcccgcgtcgaccccgcgtccgcggacgcgtgggcggacgcgtggggccgaacccggcctttagggaaaaaagaaagaaagaaaaaaaaaaaacccttctttcccctccttctctcttccatagagatttttctccaaagagaaaaaatggcggcagcttcaagaaaatcaagaagtgcagtaattggatccctttcctccacccctaggttctgcaactctcactttcactcttactctccatcatcttcatcttattcctcagctttcgcctcttccacctccagcttcacttctcgctcctccaccttctttcaccgctcttcctctccgacacgtgtcaacctctgcggttcctccgctccctccgtccgcttctccctcgaccgctccgtctctccgaaccggtccatctctgtggcgcctcgaaccggcgtgtcgaggcagagcggtggtccgcaccaccaccagcagaagcggacctgcatgtgctcgcctacgacgcatcctggctcgttccgctgcagcctccacaagaagagccacgcgccggcgccggcgccgtactcgccgcaccgcctcaacgcgcgcagatccgcgatgacgaactcgctcgtgagaattcgcggcgtcgagggagatctcgtgaagcgagctctcgccgcgttgattcgaccttcctcgcaccagcagagaaggcgaggggactttcacccgaggcctagcaggctctccgttatgtccaaggcagaggacctttgatttgagatctaacggatgcgcggacggtttcgaaatccaagcgaaaactgattgtgtgtttcgtctctgtgtttgcgtgtgtctgtgtgtatataatacagaacttatattattcagttgcagccaaaaaaaaaaaaaaaaaaagcttctggacctaattttatggaaaacgattttgatt

SEQ ID NO: 53219 - DNA, 415 bp, Glycine max
  unsure (1)..(415): unsure at all n locations
  Clone ID: PAT_MRT3847_19069C.1
aggnnnaannnnaaanaggnnaanaanaagnaggagaannaggnnngaaaagggaggnnnngaanangangngnnggnnaagaannnngagaaggagnnnnngaagaanannangggnaagaaggagaannnnanngannnnanagnnanagaaannnngnnaaggnangnannngaagaaganaattttttttttataganggnggngannantgganttntgatgttggttnattagaggnatttaagagggttggaaagaagtttgaagagattgaaaagaagnttatagagaagaagaaagatgagaaattgagaaanaggtatggggaagataaaatggnttaaaatttggtttatnnttttagtgaggagggattgatttttagaggagtttnnaaaagtatttttatt

SEQ ID NO: 53220 - DNA, 319 bp, Glycine max
  Clone ID: PAT_MRT3847_1906C.1
tgaggtgaatgatattaatgaccttgctggaaattcgcctttcctcacgtggcctaataacataaatgaccacgaagatctgacttacctaaagcttgacaacgataaagatgaatgtcatccttcctgcattggcaaattaacaatgaaaggcagaggaggcttgttccttcgctacacttacaatggatgtattgatatattacgatcatttggcgttcttatcttcgtatataaacacgttgtgcgtgtttcaaccaacatatctagattaccggctcccttgatgcttctgatattagaggtcacagctactatt

SEQ ID NO: 53221 - DNA, 1877 bp, Glycine max
  Clone ID: PAT_MRT3847_19070C.1
tcctacggctgcgagaagacgacagaagggggccaaaccaaagagccgaacccggcctttagggaaaaaaagaagaaaaaaaaaaatcccttctctttttgtttccctctcttctctcttccatggaaaaaatggcggcagcttctagaaaaccaagaagcgcagtaattggatccctttcttcaacccctaggttctgcaactctcactctacatcatcatcttcttcttcctcagctttcgcttcttccacctccagcttcacctctcgctcctcctccttctttcaccgctcttgctctccaacacgtgtcaacctctacggttccaccgctccctccgtccggttctccctcgaccgttcggtctctccgaaccgctccatctcggtggcgccgcgaaccggcgcttcaaggcaaagcagtagcccgcaccaccagcagaagcggacctgcatgtgctcgcctacgacgcaccctggctccttccgttgcagcctccacaagaagagccacgctccggcgccgtactcgccgcaccgcctcaacgcgcgcagatccgcgatgacgaactcgctcgtgagaattcgcggcgtcgaaggagatctcgtgaagcgagctctcgccgcgttgattcgaccttcctcgcaccagcagagaaggcgaggagacttttacccgaggcctagcaggctctccgttatgtccatggcagagagaggtcatttgaattgaactacttcccctacctctaccgtttccggccaccgcggacggcgacgaaaacggcggcgacggatccaaccgaactggtttgagatctaatggatgcgcggacggtttccaaatccaagcgaaaactgattatgtgcttcgtctctgtgtttgcgtgtgtctgtgtgtatataatacagaacttatatattcagttgcagccattgatggccattcttggagcttctggacctaattttatggaaaacgattttgattaaaatttaaaaacaaataactaatcctcaattaaaattcaaaactatattcagtcaaaattttggttcattacaaatgttccacttcgttcaattttttcagttcaatttcaatgtcacgtctcttttttatttcttctatagttttcgtttttcttttttaagtttttatcttctcgtcgtgacgtggcgtttgtcataaacttttccgtggtatccgttcgtcaactttgccttgtatttatttgttgtgcgttttttcgtaatcgtgtgtatttctccgtatttttcactgatatattccgtatttttcactgatatattttcgtgtgtatttgtttacttggtgagatacgtttacaacacgtattaattctttttagtttgatttaattatttgttgtttttatgctattaataattgtttctagtgtttgttttgcagggaatatatctttggtggcaactggcaagtgggggggccaacacgggacacgataacgcataacgggattggttggatccaactccaagaacaggataaagctttgttaagattagagtgcaagacacaatgtttatcatcatcaatataatcatataatgatgcaccattattgctgatggagtctctggtaatgacgatagagacccgtttccattccatgccatagactggatgaaaattgaaatgatgaatggcagtggcgtgaatatatatttgtggaatgtgacgtccggcatcagaattaggatagataatgacttgaccctcaaaagaagaaaaacattatggcatgaatacttcacacggtactttacagttaaatggaaattaaagttaatgttataaatttaaaaaaaaaaaaaaaaaagggcggccgcc

SEQ ID NO: 53222 - DNA, 394 bp, Glycine max
  unsure (1)..(394): unsure at all n locations
  Clone ID: PAT_MRT3847_19071C.1
cacgcgtccacccacgcgtccgcccacgcgtccgagaaaaaaaaaagacccttctttcccctccttctctcttccatagagatttttctccaaagagaaaaaatggcggcagcttcaagaaaatcaagaagtgcagtaattggatccctttcctccacccctaggttctgcaactctcactttcactcttactctccatcatcttcatcttattcctcagctttcgcctcttccacctccagcttcacttctcgctcctccaccttctttcaccgctcttcctctccgacacgtgtcaacctctgcggttcctccgctccctccgtccgcttctcnctcgaccgctccgtctctccgaaccggtccatctctgtggcgcctcgaacgggcgtgt

SEQ ID NO: 53223 - DNA, 778 bp, Glycine max
  unsure (1)..(778): unsure at all n locations
  Clone ID: PAT_MRT3847_19072C.1
cacgcgtccgccggactctaaaatccctttaacattcgccatctcctaatgattcatgcagtgaattagggttcgctagaattattaagccgaacttgtggcgggtatgcagcgctattcgcattggttcggaattctgactttccagtgaaaggtctcacacacagggttcagctaaacaaatggtaaatggtacttgttctagtcacaacgctaaggatgaggaaaataataacaggagggtgacgcgaaacagcgagaagggaaaaatcaaatcacatcgtaatgtatcagatacaactggtgtcagaaggtctcctagagagacatcatcgaagaagaacattcctagcccttcttcaagtacccgtaagtctgggcgacttgaaaatagacccccaccagctcctgtcaacaaaaggaaatctgaaagggttgaaaaaaaaaaagccaagtcctttgagaagatctggaagaactaggagtcagtcttctaccggttattctgattctaaaagctcagggtcagtgagttcagaccctaagccaaaaaaagagaagagtgtgaaacagttgatatttgaagctaaggaagtgaatggaactgagcagcatgatctgggaacacctcaggttaaagtaaagagaatgaatgctcgtatgtatcggtctctctttcattaccaaaggaaagagcctaatagatcgataacttaaatcagggtggcaacnaatggtggaggcagatggatgagtgctctggagagtgtcatgattt

SEQ ID NO: 53224 - DNA, 488 bp, Glycine max
  Clone ID: PAT_MRT3847_19073C.1
tttaccgctattagtgtagttcgtatatatgagcattgtaagatatataattgacctgtagcgtgtgtttctagtagtgataattactatgcaaatcacatttccatacacaatataatcgcgtagcataaagtgaaattttgcagttgtaatgatatgaaatacgtacattaatatcgttgttctcactgttgctatcatgaatgaaaatgggacgccacctgtattaatgaataagcaacgcgcggtggaggtactttgagtattgcgcgctaacttggcatttcttttaaccaccgatacttgtcaatatcttgattgcctttctccgcatgttcgtgagatatttgcatcaagctgtacatgctgggttgcctttacgggtgaaatttatggttgatggtggcttacagcggaatataatatgatatggttatggtatacgtatatggcactaccgatatatgacagctattcgcatttgaact

SEQ ID NO: 53225 - DNA, 442 bp, Glycine max
  Clone ID: PAT_MRT3847_19074C.1
ccacgcgtccgataaataataataataaaaaaaaggagcttgcgttttttcccggcgagtatgcaacgaggcgaaagtcacgaaacccaacctaaagctttggtctttctccttccatcaatttctgagccaagttctgctgaataataataatacagtcgttgctgttttctttttctttttttctttttgggggttaaatggtgtttacgtgttcggagaaagaagagagcatggctatgggacccgagagatcgaagcctcttcacaatttcatgttgccttgtttgaagtgggggggtcagcgccacctccgctgcaccaaacacccctccgactcctcctccgccgacgccgccggagatcgccgatctccggcgccgcgcgaattcgactcgccgcccccgccgctcactaatgccgacacccgaacgcgcctcac

SEQ ID NO: 53226 - DNA, 364 bp, Glycine max
  Clone ID: PAT_MRT3847_19075C.1
aaaggacaatggatgaatctttcaataaccaaaagctacaagatttcatcccgggaatttaactacaaatttaaaaattcttccggggcaagatatcatgattactctaatgggtccacaaaatctcaacctcaagtacttggaaaaattattttagaggggcaaaaaaaaaaaaaaaccccaagaaccctccgatggaatgtgcgggtccaaacccagaaaagaaaaaaaatctgttactatggcatgggtggttttgacccttttttttttcgtttttcatccatcaaaaacaggtctaagttagcaactccatgagggcactctttttcttttttgaaaatcctttcaggccacaagtttt

SEQ ID NO: 53227 - DNA, 460 bp, Glycine max
  Clone ID: PAT_MRT3847_19076C.1
gcggtgcttccattcgactctggttctgagcgacttttcaagaaagtcataccatggcagtgaaaccatacgaggccccattggacttgcgcgaatctgatactggttagtctggttgagaaggacatcaaatttgcagtagcccctgttgatgtcactagggtggagcaaaaggctcctgagttcctctaactccagatgttgggagttgttactgtcatctaagatggagagtataccttatatgaatcgcgtgctctattgaggtgtgatgcgaaaatatactcatctcaaggggttgagttggtgcgctgaacaatgtatgagtgggttctagagtagcagaggctggaggctgtttctcacaactcttttccgacaagcctgcaactagtgcatgctggattgattgggtactgttggctgtgactatcaatcccaatgtgtttgctgacagtga

SEQ ID NO: 53228 - DNA, 1449 bp, Glycine max
  Clone ID: PAT_MRT3847_19077C.1
aattctccgcgcacgctctctcgcacgctatggccactgttctcagaacccccaccttccggccaccgcctccgccgcgcgccgcaaagtcgccgaaaccatcgcgcttcgccgtcgtgtccttcagacagagcaccacctgcgggagaaaaccctcctcgcttctctcctccctgccgttccctaatgttccctctctacggttcgtcaggttcgttcccttcgctttcgacggcgacaccgaggccccgcaagttcaggagccggaggttcaggttctggacccttcagatggtgctgttggtgtaaacgacagtgcaagtgataatgaggttagtgatgctgatgaaacatttgcttcacctttcttactgttacttcaatcgtacaaagaagcattagctaataacgacgaagtcaaaattgctgagttggaatcgtcattaaaatccgttgaagatgagaaaatagaacttgaagtgaaaatagcttctttgtcagaggagttatcagtagaaaaggatcggattctaaggattagtgcagacttcgacaattttcggaagaggaccgagagagatcgcctttcactggtcacaaatgctcagggtgaagttgtggagagtttgttgcctgtattggataatttcgacagagcaaaaacccagattaaggtggagacagagggagaggagaaaataaacaacagctatcagagcatatataaacagttcattgaaattctaaattcacttggagttgaaccagtggagacagttggaacaccctttgatccattgctacatgaagcaattatgcgcgaggattctgatgaatttgaggatggcatcataattcaagaattcagaaagggttttaaacttggtgagcgtctcttgcgtccatcaatggtgaaggtatcagctggtccaggacctgcaaagcctgaacaagaagcaccgcaagaagaacacggcaacactgaaatttctgaggacagtaaacaaaacgagggcagcacagaaacagagtcttgaaaggtcaaaacttttgcctgatttcagttttgcaatagtatatcaattttaatctccctgaacataatgttggctgtaagagtctcccaggagatattcctcccaaatttcccttaaaaagaaagttattattctgagattttgaattatatttttagattttatgtccttgcatggctttcatagagatgactgaattttcaaaggtaccattttcctggaaggaagagttagttgcaatgttcaagtgcttgatacctggaatcagaatcgttgtagtgtgagagcattttaattaatttgattaaaggttttatgatgacataatttttttcatcttattgcataataatgtattctttggtcgggcgattgatttcagagcggtgactgaatggtgaacggttttacc

SEQ ID NO: 53229 - DNA, 241 bp, Glycine max
  Clone ID: PAT_MRT3847_19078C.1
gggcattgagaaggaagctaagaagcgtaaacgtcttgcagatgattttgttcatctgctacattctaccaaggactttactgtgtcttcaaagtgggaggactgtagaccacttgttgaagatagccaagagttcaggtctattggagatgagagcctttgcaaggcagtatttgaggagtacattgcacagctaaaagaagaggcaaaagagaatgagcggaaacgaaaagaggaaagg

SEQ ID NO: 53230 - DNA, 377 bp, Glycine max
  Clone ID: PAT_MRT3847_19079C.1
ttttccatgcgtacgcccacgcgtccgttcttttctcgcgtcggactctccacggatacagatgcggactctctctctctctctctctccgattaccgcacaacaccgtatcggcgttcagggtttcttcgctcctatttggatcttgctcccttcgcgtcgctcgcttagaatcgataatgcttttcttgcttgtactgtctcggctcgagatccggaccaagcacagaagaatgcgatgctgacttggataacatactcactggtttggctatgctcgggctctttgaataaaatggctatgagcgaggggttactggctgatgggcagagggaactgctaaaaattgcacgccaatatgccgagaatctgtctt

SEQ ID NO: 53231 - DNA, 614 bp, Glycine max
  unsure (1)..(614): unsure at all n locations
  Clone ID: PAT_MRT3847_1907C.1
attggggttgagattgttgggaaaaaagaaaatttggaaaagtgttaagtgtgtgggaaataagaatgctatttgtttgtatagggatattggatatgggatggtaattcggctcgagtacggctgcgagaagacgacagaaggggaatgggtttgggttgatgggtgtggttacaccaaggggaaacaagtgcataattgtccaatcagaggggcacttgttcatccaagtcttgcctcctctcttatcttttaaacgatagtagtcttctttttggtacaagttgcaagtgacattgtgaagtgttgtgagataaataatttatgtttgaattcaaaatgtaacttggctttgctacaaacttattaaaaaaatgtgaagcaggtgtaaaaattgcacataggcgtgggcgaaaatcccatccacatgaaatcaaataacctttcaatctatgccttttgctctgcatagcctgtctgaattttgtccctcttatttgggttgctcttaattaatttgggcttagtactttgggttttcattgagttaaaagatgggcttgggctatttatactttntcttttgtcaaatacgctgttcttgtttctttatc

SEQ ID NO: 53232 - DNA, 538 bp, Glycine max
  Clone ID: PAT_MRT3847_19080C.1
gggcccaaaattgaacatatcataggggaaataaatataattcatgattcaaaaaaaataggcaaaatacagggaatcactacttggccaaacaaaaacacaattaaatattggccccccatcaataaacaacggaaacaaataaatagctggacccaatcaaaagtccttaccgcccaaattttttttttaataaaaaagtccaataagggagaggcataggcccaacacccccttgaagctaacactaacaaacaccattcatctgggcattggtctttttcctctccaaaaaaaactttttccaaaagggagggatttccccctgagtccccaaaagattctttttaaaaaccactaccttgccattttcttttgccctgaggggcacaggggggctgctgaagacccttgcaggaagggaataaagcccatgcaaaaccttttccacattggacacaaaaccccccgggaggggccttgaaaaggcccccctggtgacaacacaaaacactgggacatggtgagcatttggggg

SEQ ID NO: 53233 - DNA, 1247 bp, Glycine max
  unsure (1)..(1247): unsure at all n locations
  Clone ID: PAT_MRT3847_19081C.1
tttggtcgaggtctttcttattcggcattcctccattcactcctttccgtcttgcctttttttcctttaaaatattatggccatatttccatagttggtggcatatatattctttctgcgattatcatctccttattttcatttttattgttattctctcatataccaaaagagtgacgttttctcacgaggatgatctttccccaattcgtaccacctttttcttcggctcgagccgagggcggccctttttttttttttttgttggctttttgagaaaggagaaccaaaacacttgcaagtgaagttcttagttaaaagaaattatttgtttcaggaaaaaaaaagctaaaaatggggtcgaagtggatgtggttgatattacactttgcatcggttttggtgtttgtttggggagatagaacaattttgaaggtggaagggcctatgttgttggataattcacagagatatgaaggcagtttcattagcaaagcagtgaacttcttatggcaaccaggggaatcaggttatcaacacgtttggccagacatggaatttgggtggcaaattatcttgggtaccattgttggattctttggagcagcatttggaagtgtaggtggtgttggtggtggtggcatattcgttcctatgctcagccttattattggctttgatgcaaaatccctcacagctatttcaaaatgtatcatcttggtctcagctagaatacttcctgtctatacgttttcccattccttacgctctctggattttccttgtggctactattgctgccttcgttggacagcacattgtgagaaaactaatcatcttatttgggagagcatctcttatcatctttattctagcctctacaatatttgtcagtgcagtctcattaggtgaagttggcattgtaaatatggtacacaagatcgataatcatgaatacatgggatttgaggatctctgcaaatacgggtcatagcacatattggaagattattttgtcgtatttacattattattcaaggtccctaccaaagccaagaaccaaggtggccaaaattgacttcaatttcgtgccatggctacaatagtgttagttaggtgtcatttattttattgcttgccaagtcatggagtgattcggtggggaattcagatactccattattcaaaatattcattgtgttcaaaaaaaaaaaaaaaaaaaaaaaaaaaaaaaaagggcggccnct

SEQ ID NO: 53234 - DNA, 2153 bp, Glycine max
  Clone ID: PAT_MRT3847_19082C.1
ttattttcatatttccatagtctgtttgcagtatgttttctttctccgattatcatctccttattttcatttttatttttattttttcatataccaaaagagtgaagttttctcacgaggttgatctttccccaattcgtaccacctttttcttcggttcatcgtttcattggctctttttttttttttttgttggctttttgagaaaggagaaccaaaacacttgcaagtgaagttcttagttaaaagaaattatttgtttcaatgaagttttctcacgaggaaaaaaaagctaaaaatggggtcgaagtggatgtggttgatattacactttgcatcggttttggtgtttgtttggggagatagaacaattttgaaggtggaagggcctatgttgttggataattcacagagatatgaaggcagtttcattagcaaagcagtgaacttcttatggcaaccaggggaatcaggttatcaacacgtttggccagacatggaatttgggtggcaaattatcttgggtaccattgttggattctttggagcagcatttggaagtgtaggtggtgttggtggtggtggcatattcgttcctatgctcagccttattattggctttgatgcaaaatcctccacagctatctcaaaatgtatgataatgggtgcagctttgtcaactgtttactataatcttaatctaaggcaccctacactgaatatgcccatcatcgactatgatttggcactgctcattcaaccaatgctcatgcttggcatcagcattggagtggtctttaacgttgtatttcctgattggattgtgactatattgcttattgttctcttcttaggcacatcaacaaaagcattctttaaaggggttgaaacatggaaaaaggaaaccataatgaaaaaggaagctgctaaacgtcaagaatcaaacggttctggggctgaagtggaatacaaacctcttcccagtggaccaaatggtgccaatgaaaaggacaccaaggaacaagaggtgactattattgaaaatgtatattggaaggagtttggccttcttgtatttgtttgggtttcattccttgcactacagattgccaaggaaaactatacgactacttgttcaacattttattgggtactgaacttgttacaggttccagtttcagttggagtaacagcatatgaggcagctgccttgttcagtggacgtagagtaattgcttccacgggagaacaagggaaagatttcactgttctccagctaattatctattgtgtctttggtgtactggctggtgtagttggtggcatgttgggactaggaggaggattcgttatgggtccactttttctggaactgggagtcccacctcaggtttctagcgccacagccacctttgccatgaccttttcctcatctatgtctgttatagaatactacctgttgaaacgttttccaattccttatgctctttacttcgtccttgtggctactattgctgccttcgttggacagcacattgtgagaaaactaattatcctatttgggagagcatctcttataatcttcattctagcctctacaatatttgtcagtgccgtctcgttaggtggagttggcattgtcaatatggtacacaagatccagaatcatgaatacatgggatttgaggatctttgcaaatacgggtcatagcacatattggaagattatttttttcgtatttacattactattcaaggtccctaccaaagccaagaaccgaggtcgccaaaattgacttcaattacgtgtcatggcttcaatcgtgttagttaggtgtcatttattgtattgtttgttgccaagtcatggagtgattccgtggggaattcagatgctgaattattccgaatattcattgtgttgagcttttgtctcatcttgattttttttaatgataagtacgcgtgatcctaatctttcagcaatggccttaaaggacaagttaggctccatgaatttgtctgatgtttattttccggccacctaatgctataaatcgtgatcgcgctttatttttacatatgagtcaattgtttgtgcaacttactttataaacacttaattccttacatatattattcttttccaaaat

SEQ ID NO: 53235 - DNA, 397 bp, Glycine max
  Clone ID: PAT_MRT3847_19083C.1
ttcttgttctccctcccgcaaaaaaactccaaaaggggccgttttgcagaagacgacaagaggggtcataagggggaatctacagaaagcaaatgcaaaagaaaacccagaggcaccatccactaaggaataaagccaaggaagaaggagcctcaccaccaaaaacagccttacataagaagccagacgaggatgcttcaatggaagaaaagaaacaaagaacaggggagcaccaaattgaaggaatcaaccaggctaagaaaacccactctcaaccgaatctaatcaaactgtcatacatcaaacgtacaacaagtgtcacacatacttataagtatagacccgatcgctctcccgaaaagctctcctgacaaaacttcctatagaaccctccttg

SEQ ID NO: 53236 - DNA, 2544 bp, Glycine max
  Clone ID: PAT_MRT3847_19084C.1
aagaaagacggttctgtacaaacccactcactgcgaattgttgtgatcccatccttcatttccatctcttttttttcgtttcaagccaacaaatccttctttttttttttttttctattatatcttcaatatcgcaaaagtgaaagtcctttggaggttgctcattcgttttctctgtaaaaagaaaaaagtaatagatttttctcattttttttcttcggttcttcttttccttgtccgagtcttctttaccggtcaaacagagactctgttgattagagaagagatttcatcaatcaccggaaggtgaaaacattaggaaaattaatttcaatcaaagcaaatatacaataatacgatggtcgagtttggaacgaggcagcaacagttcaggtcttgtctttttttggcttgaaatattatttccatatttccatagattgtttgcatatattttctttctccgattatcatctccttattttcatttttatttttattttttcatataccaaaagagtgaagttttctcacgaggaaaaaaaaagctaaaaatggggtcgaagtggatgtggttgatattacactttgcatcggttttggtgtttgtttggggagatagaacaattttgaaggtggaagggcctatgttgttggataattcacagagatatgaaggcagtttcattagcaaagcagtgaacttcttatggcaaccaggggaatcaggttatcaacacgtttggccagacatggaatttgggtggcaaatctatcttgggtaccattttcggattctttggagcaggattttgaagactggggctgctagatgagcaattgtaagttagcgtatctgcatatccctgatccacgtgtttgtgcgaacgcctcaaaacttctttcatgggagaacaagggaaagatttcactgttctccagttaatgatctattgtgtctttggtgttctggctggtgtagttggtggcatgttgggactaggaggaggattcgttatgggtccactttttctggagttgggagtcccacctcaggtgtcaagcgcaacagccacctttgcaatgaccttctcctcatctatgtctgtcatagaatactacctgttgaaacgttttccagttccttatgctctttacttcattcttgtggctactattgctgcctttgttggacagcacattgtgagaaaactaattatcctattcgggagagcatctcttataatcttcattctagcctctacaatatttgtcagtgccgtctcgttaggtggagttggcattgtcaatatggtacacaagatccattatcatgaataaatgacaccagttcccatgtggacctggcagtgacattgcaaaggacaccagaaacgagtgaggtgtactattgcattgaaaatgtgtactggaaggagtttggacttcttgtttttgtttgggtttcattccttggaatacagattgccatgaaccagacaagcaaatgttcaacaatatattgggtactgaacatgttgcagattccaatttcagttggggtatctggatatgaggcagcttccttgtataaaggacggagacaaatttacttcagtgggagatcaagggaaaacttttacttctcagcagctaactatatattgtatctttggtgtattggctggaatagttggtggcttactgggaataggtggaggattcgtaatggggccactctttttggagctgggagtcccacctcaggtttcaagtgccacagccacctttgccatgaccttttcctcatctatgtctgttgtagaatactacctgctcaaacgttttccagttccttatgctctgtactttattgcggttgctgctatttcagcaattgtagggcagcatattgtgagaaagctgatcgatgtgcttgggagagcatctctaatcatctttgttctagccttcacaatacttgtcagcgcagtctcactaggtggagttggcattgtagcaatggtcaaaaagattgaaaatcacgagtatatgggatttgatgacctctgcacatatgattcatagcccatttcactaaattattttatgctttgttttgtctcaagttcccaataaaggagccaagagaacctaggtcgccaaaattgacttaaggtatgcttggattcccgtaaaaaacagtggacttgaaagcaatgcatacatgcttctatgtatttatctgggttttttgtgaggaaaaaaatgttagatgttggacactatttcaaacactcacttgtgctctgtgtgtgcctgggctcttgttaagaggtatgatatgtacatttatatttttgttgctgctaagacatgtattgatgacactgttgaagattgagaaactgaaatcatgttattttaatattctttatgtcctaaatttcgaacaaaaaaaaaatagtttttttcttttatgaaaaaaaaaaaaaaaaaaaaaaaaaaaaaaaaactcgagactagttctctctctctctctcc

SEQ ID NO: 53237 - DNA, 553 bp, Glycine max
  Clone ID: PAT_MRT3847_19085C.1
gttgtttctgaagtagaatacacaccaattcccagtggacctggcagtgacattgcaaaggacaccagaaacgaggaggtgtctatgcttgaaaatgtgtactggaaggagtttggacttcttgtttttgtttgggtttcattccttggaatacagattgccatggtttgttactttcttagtaattacttgaattcccatgtcagtaattaacatgttctacaaaagatcagtctgtaccctggaatctttctaatttgactcctaaacatttcctattggtaatggcaacagaaccagacaagcaaatgttcaacaatatattgggtactgaacatgttgcagattccaatttcagttggggtatctggatatgaggcagcttccttgtataaaggacggagacaaatttcttcagtgggagatcaagggaaaacttttacttctcagcagctaactatatattggatctttggtgtattggctggaatagtttgtggcttactgggaataggtggaggattcgtatggggccactctttttgagctggag

SEQ ID NO: 53238 - DNA, 240 bp, Glycine max
  Clone ID: PAT_MRT3847_19086C.1
tcacccaccgtccgaagactatgctttatcattgctttggattatatgccgagacgggatatggagaatgtgtttaatgatactttctcttcccaagatttatccccccatctgtatgtactttgacccttccacaaatatctgaaaccatcaactttaaatagtctatttaaactgcaatttttatttatttgccttttttctgtaaatattttttatttaatcaatcacaagctattt

SEQ ID NO: 53239 - DNA, 1237 bp, Glycine max
  Clone ID: PAT_MRT3847_19087C.1
ggctcgaggatcttgttgaggtggttcctgaacccattagcaagtggcaggatgttggacctgatcactttaacattttggatgccttttatgccgagccgcaacggtatgcctacacctttcagaactatgtgtttgtcacacgggtcatgcaggaaagagagtcatctgctggaatcaagcctcttcgtttgatggagaggagtgttttcagtgacaggatggtttttgtacgagctgtccatgaagctaactggatgaatgggatggagatcagtatctatgactcgtggtttgatcctgtagtatcctccttgcctggacttattcctgatggttttatctatcttagggcaagtcctgacacttgccataagagaatgatgttaagaaaaagaacagaagaaggtggagtcagccttgactatctctgcgacctccatgaaaagcatgaaggctggttatttccctcccaaagtggtaatcatggagtattatctgtcaatcagctgccccatcatattgacaactctttacaccctgatataagagaccgtgttttttatctggagggtggtcacatgcattcaagcattcagaaggttcctgctttggttttggactgtgaacccaatattgatttcagcaaggatattgaagcgaagaggcaatatgcacgccaagttgcagaattttttgaatttgtgaagaaaaggaatgaggtttcatccaaggaaggaagtagccaagcccaaccgcaggtgctgctacctcatgagggtggcctgtggctaccagatggaaagccttttccccgggaagctctcaaatctttggacttcagacaagcagcaacgtcattcatgtccggctagtgactgctaaaccttgtgattcagggcaaagctatactactaatgtccccttgttgatgtgttcacgtttttcttgcatgtaaagattgactccggaccttgactgatgtaaaatagtggtggtatttgtggttgcgtaacgctttgctgacacacactacttggtcgtagattatatactcttgttgctgtgattagaaagatggtcttgagcataatatcattttgcctactccttatgtttatatcagcatctgttatccgaagtcctagctagtgctttcaagaaccaaatatggtgttggaacatcagattttgtcggttgatttttctaattaatttctaattctcttggcttttt

SEQ ID NO: 53240 - DNA, 1225 bp, Glycine max
  Clone ID: PAT_MRT3847_19088C.1
cccgggtcgacccacgcgtccgcttttagggaggttgtggtttctcttgatgggaatgtcgttggtgcagtttggccctttagtgtgatctacactggaggggttaatcccctcttgtggaggcctattaccgggattggctcgttcgatcttccctcgtatgatattgaggtcacaccacttttggggaccttgttggatgggaagagccattcggtggggttcagcgtgacgaatgcagtgaatgtttggtttgtggatgcaaatttacatctttggttggatgggaagagcagtaggacagaaggaggagttgtggatcttgttgccaagcctttggttgagtctctggtgagtgactttgaaggtttgaatggaaagttctggactagtgcaaggaggtccgttttgtctgctggttgggtcagatcctcatatgggaatgttactaccagttttgtccaagattttgttttcaacaattcaatggtgatggggaagaatgggaatcagcaaattgtgaatcaagtgattcttttcaatgacagtgttcatgctaaccttccatcaccctttgttgaggacacatacagaaaattttccctatacttggacactgatgaagtggatcagggtgatgatacttatttatcagtttcaaatgttacattgggatttgatgtggacatgtctacgagctcggcttttggattttcaaagagctctctcaaaaatgtgcaggatgctcagggtactatggttatcaaagggaatttggttgttaggggattgggtgaaacacagcaagattacagttacacaagtgatggatactgctattctaggaaagttggcagctcaaattacacaattctttacgacaaagtcagacattcgtgtaacaaaagaagtcactctcatcttggtcctcattctatcaaaaagttgttcattctctaggttcccttcttataagaacatagaactttattctccccggctcagtcccacaagtccttcctttccataaagatttgcctttctagctccactctcagactcagggatttgttctgtgcttactgtgtcagtttgttacatatttgccactaagatttgtctgttttactctctctctctctcttttcaataaatatgcattatgcaatgacaaaattgtgattttcttccccagtataatcaaacatgattagttttcagggct

SEQ ID NO: 53241 - DNA, 1286 bp, Glycine max
  Clone ID: PAT_MRT3847_19089C.1
cctgcgtggataagtccggcgctggccacgcagacgcgcaacctaaatgcgtgacaagtgaccacgcgtccgaatctgacatgaccgaggcaggctgtttctggtttcaacttgttatgatggtgtcatcttctccattctcattctcattctctgtcgctcacggctagcaatcatgtcttctcgcttagatgagtgcttgttggaggtggatgggtacggtgatggcgatggaaaggcgaaacccaaattcctgataaggaatctcagcagagtttcggaggatggggttcccatcctcaaaggcataaatcttgagatcccagagggtgtgatcgtgggagtgataggccccagtggtagcggcaagtcaacgttcttgagggcccttaaccgcctctgggagccaccctccgcctccgtcttcctcgacgcccaagacatctgccatctcgatgtcctctctctccgccgtaacgttgccatgctctttcagctcccggccctctttgaaggcagcgttgcggacaatgtgaggtacggaccacaactcagagggaaaaagctaagcgatgatgaggtgcgcaagttgcttctaatggccgacctggatgcttctttcatggataagtccggggctgaactctctgtcggtcaagctcaaagagttgcacttgctaggactttagctaattcaccccaggttttgttgctggatgagccaactagtgccttagatccaatatcgacagaaaacatagaggatgccctggtgaagctgaacaagaatcagggcatgacagtcatcatggtctctcatagcatcaagcaaatccaaaggatcgctcacatagtgtgcctgcttgttgatggtgaaattgttgaagttctcaaccctcataatctctctcaggccaaccatcccatggctaagaggtttcttcaactcagttcttaaagccaagataaatctacttgcacctgctcgtttatcggccacatatatatgttcacctctcctcgattcatatctttcaatcaattatcttccacatatgttgctttaatttcaagacgtgcaggttgatgacatatatatgattttatgatagtggaggtttagttaccaatatgatattgcaaaatgctactatagaataggaatttcgtttttcaccaaaacaaaactattgtccacagttttttctatttgcaatacaaccaattggatgtaagcgtactctttggtacaagtttcgtgaagaaagttctagtcccactctctc

SEQ ID NO: 53242 - DNA, 286 bp, Glycine max
  Clone ID: PAT_MRT3847_1908C.1
cgaggtacgaggcactgaacatcgctggttttcttgacaccaatcttattataatctcacccgacaatgaacaagtttcccttcccactgcaaccattgatggaccagctccaccggttggagctcttagtagagccctcgccaggctaaatactagttctaagttccatcaactacgcgacctcgcaaagggcatcacgaagcaaattggaagccgagcatatgaatttacatctaaattggactcctaccttagagggatggtaggtggtgctggtgcatgttt

SEQ ID NO: 53243 - DNA, 277 bp, Glycine max
  Clone ID: PAT_MRT3847_19090C.1
ttccccagctagggttgatgatgatgctctagaggctggtgagattaattctcctgagctttcaagtgatgattagaatgatgagggtgacttggtaaaagaagctggttattggtctgaccaggtgattgatggcaacgaaccaattttaacttaaagcgatccagtggctgaacctgttgcgagttagactggtactttgacaagcactgtttcaaagagatgctcctttaaagtggacttaactgttccaaagcaagggacccctaatgccccc

SEQ ID NO: 53244 - DNA, 392 bp, Glycine max
  Clone ID: PAT_MRT3847_19091C.1
cttttcttgatgaactcaactgtagcatactggcgatgtatggttcacaggcaaaaatcctcaggcttaacttacggtcttccaatgaacttcaaactccttttctctttgctaactcttcaccaggtatagacattgcaaagctaaaaggcagcagattgaagcatcctaccccagtgggtcaccctgaagaagcaggtacttgtgtcacaagaaacataggacgaagattcagtgtcaaaatctgactcgacaacttctgtttatctaggctatgaacaaaaccctctgtacgagggtcagggccctgagaaaagaacagacgaatcaagtaactaaccaacaaatgaattttatgtccaaccaccattattcttcgatcttgaaagaga

SEQ ID NO: 53245 - DNA, 1236 bp, Glycine max
  Clone ID: PAT_MRT3847_19092C.1
acggctgcgagaagacgacagaaggggaactgcaattacgacaaccacattggggttaaggcatagtcatttcaacctgtgtttgacaactccatattttgccgtaattgtcccaaccttgttttgaaatgaaactgcgatttaaatacacctagggtttctaatacgtgcattcacaacacaaaattgaaaatggcttcttcacgttttagttccattttccttctttctatcatcttgaccataagcaaatttgcattgggtgggaatttctacgaagattttgacaatctctttggagatgtaagggttgacataaaagatgaaggccaaagcatgaccctaacaatggatgaatattctggctcaggcattgtatcaaagaatgagtatttgtttggaagattcgacatgaaaatcaagcttgtaccaggaaactctgcaggaactgtcacagcattttatctaagctctcaaggatcaaaccatgatgagatagatatagagttcttgggcaacttgactggtgatccttatttgctctcaaccaatgtatatgccgatggtgttgggggtcgtgagatgcagtactatttgtggttcgacccaacagaggacttccacacgtattccatagattggaaccctgatcgcataataatcttggtggatgacattcccatcagagttatgctcaataggcaaaccattggtgttcctttccctacaagccaacccatgaggctttacactaccctttggaatggagactcttgggcaacaagatggggggcagtgaagcttgatttgtcaaatgctccattcattgcaggcttcaaacatttcaatgctaatgcttgcattgcaaaggaaggtggtgcaagttgcaaggggttcaatcgtggcatatttagagatcttgatcaagaaagcaagaaaaaaatgcgaaaggtccaatcaaaatggatagtttatgattattgtcgggatttaagacgttatgctcatggtctcccatttgaatgccgcaaggagaatctattagatcaatccaaatagtaattgcattaatcatgcattttgcaccttcgtttaatttgttcaattcaaattatggaatgatttcctaaaagctgaattgcctatgacagtacatgtaattgttatgttatataatgtgtatttgcattaccgtgaaaaaaaaaaaaaaagggcgagcgcgtctagatcttcaga

SEQ ID NO: 53246 - DNA, 423 bp, Glycine max
  unsure (1)..(423): unsure at all n locations
  Clone ID: PAT_MRT3847_19093C.1
atattactgtttttttttttacccattgtgcggaggcggggcaaagaggtatatttaaattatggccgtcttaactaagaaacaagggcatactagggtgatcaacacacataatgttcagacacgaacttatcgagaagagactgtacaataaaaagacgctgacatgaataatggggaactcaaacacttatcggcattgttaccaaacatcgagcaaacctacataaggcatatatgccaaccttcatgntctgtcatgaagctttcacccctgattgaaatttacaagctaatacgccataaactactagcctttgaaccacatatggaacttgtccatgttcacttcaaccatcaaaagcgtatgcattagtgagtaatgaccaggaatgtctaatgagcgatcttacatggattaaa

SEQ ID NO: 53247 - DNA, 276 bp, Glycine max
  Clone ID: PAT_MRT3847_19094C.1
gaaagcacaaagcaaagctcatccttgagttaaaaaatggcagcagcttcttccatggctctctcatccccatccttggctggcaaggccgtgaagctgggcccatcagccccagaagtgggaagggtgagcatgaggaagaccgtctccaagcaggtctcctgacgaagcccatgctacggacaagacctagtcaagttcttaagccccttctctcgggaaactggcgtacatcttgagctttgtatttcttattcgcgtcaggttgggtcactg

SEQ ID NO: 53248 - DNA, 475 bp, Glycine max
  Clone ID: PAT_MRT3847_19095C.1
gaacattcattgttccttctttttttttttcctctctttccatcaaattccaataatttggtgaatgggaacgttccagaccttaagaaaggcctacggtgctctcaaagactccaccacggttggcctagccaaggtcaatagcgaatacaaggaattggatattgcaattgttaaggctacgagtcacgtagaatatcctcctaaggaacgtcatgtcagaaaaatattctatgcaacttcagcacaccagcctcgggcagatgtagcttactgcatacacacactagccaagaggctttcaaagacaaggaattggatagttgctataaagacattgatagtcattcatagaatattgagagagggtgatcctactttcaaagatgacctcataaactatgcgcgcaggggacgttttcttcaaatatctaatttcaaagatgactcaagtgctctagcttgggactgctct

SEQ ID NO: 53249 - DNA, 916 bp, Glycine max
  Clone ID: PAT_MRT3847_19096C.1
aaaaaattggtccgtccacgaggcgtggttccaacttccgagccattcctcctagaaaacaatgagttttaaaacgaaaaaaaaaaaagaaaaagaaaaacgatatcggttaggttaggttccaatttgatttgatttgattcgttacttggcggcggcgagaagacggcagaaggggattcgcaacgagaacgagaggaggggttcgggtgtgagagcgagaatcagaagatgaagaaggaagacacagtgaagctgatcagtgccgaaggttttgaatttgtggtcgacaaagaagctgcaatggtttcacagaccatacataacatgcttacttctccagggagtttcgctgagaggcagcacggcgaagttacctttcctgagatcagcaccaccattctcgagaagatttgccagtacttttattggcatctccaattcgccagtgggaaggagacggaatttcccattgaacctgaattaactctggagctaatgatggctgccaattacctccatacatagcattttgacttccccaagggtgatagttcttcggccacataatggaactattgcctagttgggcattcaaagggaaatcagcgtattagtgttgccactgaaactatgtccttgctggaactaagtatatatgtaatttgtataatttagtgactgttagactcagcttgcaagactctgatgccgtcgattgatgttgctttataaatcaactggttttaaaattctaatttaatgggaacattaccatctcccgataaggtaaatcataatgctcttgtaatgtccattaacaatatagacattgttatccaaacaaggaaaggaaattcgctctacgatcaaaaaatgaaaaaaactttacttttactttgaaaaaaagggcggg

SEQ ID NO: 53250 - DNA, 763 bp, Glycine max
  unsure (1)..(763): unsure at all n locations
  Clone ID: PAT_MRT3847_19097C.1
aacgagaaggagaggaggggtttgcgtgtgtgagagagaatcagaatcagaagatgaagaaagaagacacagtgaagctgatcagttccgaaggtttcgaatttgtggtcgacaaagaagctgcaatagtttcacagaccatacataacatgcttacttctccagggagtttcgctgagaggcagcacggcgaagttacctttcctgagatcagcaccaccattctcgagaagatttgccagtacttttattggcatctccaattcgccagtgggaaggagacggaattttccattgaacctgaattaactctggagctaatgatggccgccaattacctccatacataagcattttgacttccccaagggtgatagttcttcgtcctcatagtaagcctttattattattctcctggagtctaacaagtcatagtagttgttcttgtagttgtgatcttctgctattttcgctactttattgtgtcgttcatgcagatggaactattgcttagttgtgcattcaaagggaaatcagcgtattattgtttacattgaaactgtgcccttgcaagactctgatgtacgagtggctctaagatgccgtcggttgatgtttctttataaatcaactggttaacaaaatatgctaatttaacgggaacattaccatctcccgataagttagatcataatatgctcttgtaatgtccataataacaatatagaccttgttatccaaacatggaaagngaattcgcccg

SEQ ID NO: 53251 - DNA, 1627 bp, Glycine max
  Clone ID: PAT_MRT3847_19098C.1
cattcaagttcaattattccattcagttttacatttatacattcaagggggaaaaaacatgagttttattatgttttacaaatttcgtaatgaaaactccaattttcctgataaatatccaaactggaaattttacggacggattttaaatttttgaatttcattacgctttaactttccttgaatcctgatatttaatgaaatgaattgtatcgagcacgagttgtatgctaatctaggttaagccacaacaaacgatgtgggaagttcttttttcactcgtgagttaccaaatgcgtgaactcatacggctaaaggtaatctcagacaacagacggacaatgtagccatctattacaaatttctgttcagagttctaagatccgtgcaacagttaacggagctctatgccacaatggtgtcaatggcttactttagcagtgaacaaaatccagaaccatttcaatatatttaagttggatccatcaaaagtttagatccctcgtaactcgtttttgcattatttttgattaagcagagagggccacctgtgagaaaaaaaaatgactgactgatttttcgttagacgcacctttttcaaaattcaaatcatatcattgaaattgtacaaagtcagacaaacttaaaacactcttcttagaagttatgatgctagagttataaaactaatgctcctgggaaaattttctaaagaggcctttatagtaaaagcatacaaaggcttaagctcttccactttgctttttaatcctggagtcacttgttgaaagcgctgacccagagatcttgttaacttcatacagcaatgcagccgagaacaggaaacatgtagtgatgcaaactcggtggacagtgcttgcagcaatcagagcaactgcttctgcaactatgacagctccccaaccagttcttgcaccaattgtttcctgcaaatttccaatgaaggttaggagcacaagaaataggatagagctaacaaaccctccaagtatagtgtataattctgatgatgctagtttccctcggtacatttcttgaagtgagagaatgactgtgaagagaagaaaggaatacagcatggaactcccagacccagccatggcctcagatcggagcagcggtttccttagtttccactccattattaggatgtcttgacatatctgtgaaagcaataaaagtttaatgggatgtactggattagaattttagaaggattttaaaagaatttttttataaaagaatttcttgtaatatttttttaggatttttaaataatataaataagcttatctgtacccgttcaattcagctccccaaccagttcttgcacaattgtttcttgaaaaattccaatgaattgtaacgtgaagccaagtctttctatctacagctaggaattcatcccttatatacaaaagagctccagatatcaccccactggctcgaactcttccggcagccaaatcggcaaaatccgcggcggcactgtcgccacatcgacgacggagatcccagaagaaggcgaaacgacacacaattttcctctctgagcgacgatttgttcggctcctatgagtctctgagacggactatgcattttcag

SEQ ID NO: 53252 - DNA, 292 bp, Glycine max
  Clone ID: PAT_MRT3847_19099C.1
atattttttttttttttttttttttttttctacaacgactaaaaccccgcctaacaaattactacgttcccaagttccatgctttacattaactttctgaaaggggcaaaaaaaagaaatagtctcggggcacaatcatctagttttttttaagaagggggtgcttggattcaacataattttctttgccctttaggaaaagaccaaaagcaagtgcctccaaaactagcatggtcaaccccgaaaaaatgggggaaaccccctcctctttgggtgtttcaataaaaccccc

SEQ ID NO: 53253 - DNA, 735 bp, Glycine max
  Clone ID: PAT_MRT3847_1909C.1
gccgtttgtttggttgccttgcgtctcgcgccacctacactgcacgcaccctctttccctcttcgtcgtcgtagcgacaacgaaccagggagcgtagttttaatggaacccatttgattttcagctttgatcctcccaactacaatcattgtgttcttccaaatttcattttaataacaattccgatattttaatttttgtccgttttctattcccttattcttcttcttcccaacagcaatagacgacgtcgttcgttcctcagctagggtttcccccaatgccgccggattcctccgagcaagacctcgacgatcccgacatcgagttcgtcgagattgatcccaccggtcgctatggtcggtacaaggaggttttagggaaaggggctttcaagaaagtgtatccttttattgtttctctgaatttttctacgcttagtcaataatcaatagatattaatgtgtgtaagtagcatggattgattccttttgggatttttgttcccccttgactgtgaaatggtaatttagatatcgagcgtttgatgagttggaagggattgaagtggcttggaatcaggttaaggtggcggatctgttgcgtaactccgatgatttggagcgactttattcaaaagttcatttgctcaagactttgaagcataaaaatatattaagttttacaattcatggggttgacacccaagaatgagaacatcaacttcattactga

SEQ ID NO: 53254 - DNA, 281 bp, Glycine max
  Clone ID: PAT_MRT3847_190C.1
gggcggaggcggcaggaaacgcgggtgacccacaggtggaaaccaccgagagacggcacaggggggggcaaagaaagagacagcgccgggacccccccggcagaccagaagaggacgagccgacaaacaggagaaacaaggcccccaaagccaagggaacaagcggaggagacacacaaaagaagaaagacgccaagacacgcggccggggaacacagaaccgagaggcaggccgacggggacaaaagaagaaaggcgcccggggggacagaagaagagga

SEQ ID NO: 53255 - DNA, 863 bp, Glycine max
  Clone ID: PAT_MRT3847_19100C.1
gcaataaaacgaagtgttttgagctgtctgaaattgctggtcatgttggtgaattcagtgcggatcggtgcgggagtcgatttattcaacaaaagcttgaaacagctactacagaagaaaaaaacatggtttatcaggaaatcatgccacatgcccttgctttgatgactgatgtctttggtaattatgtggttcaaaagttttttgagcatggacttgcatcccagagaagagaattagccaacaaacttcttggccatgttctgacacttagccttcaaatgtatggttgccgtgtcatccagaaggccatcgaagttgttgatctggatcagaagatagagatggttcaagagcttgatcaattatgttgtccaggtaaatctattatgattacatatagtttggacttttcaatgccacaattgtgaaaggtacttatggtttgggtttacttttggttgggtatcctaacaatgctcttatgttttcctgaaattaatccctcttttttggagttttttactgagattctgtcaattgactttaaggtatggatgtcttctctttgttttgatttaaggtcatttgcttaggatttaatactttgttttattttgaatgtgtttgaaagcatgaactcatcagtcataaatataattgttacttactttttttaataatctgttgctgaatgttataactggcagtccttttggctttatgtgtataacatgccatccaatttttttcttgtgatatatgggcttctatctccactcaaatgcttctgatctcttgcttcgtttcatcttctcttaaataacagcatgtacttgagcatgggaaacctcatgagcgat

SEQ ID NO: 53256 - DNA, 367 bp, Glycine max
  Clone ID: PAT_MRT3847_19101C.1
aaaatacttctattattgtttcttgagtgtttttgtgttacatgaatatgttcatcatttaggttagtgccttttgtctcgcagactacctatgaaaatttccggtacagagctgaacgcaggatcaatgtttttaaccggggttgtttaaataattttctggaagtgttttgcacaaaagtaaagccctcaaggaacaatttcagggcatttgctcgagaggaggtaccaccgagacctctggctccgatcattccccgggatcgtgaggacttgggtggagaccaccgccctaaggttgaagccgatcttgatattggtgaagacctattgaagatatcacagcgcaggaacatcgaagaacttg

SEQ ID NO: 53257 - DNA, 894 bp, Glycine max
  Clone ID: PAT_MRT3847_19102C.1
ggatgaaaccaaaaggaagttcctagattggccaaagcgtttcaacattattaatggcattgctcgaggacttctatatcttcatcaagactctaggctgaggattattcacagagatctaaaaacaagcaatgttttactagatgcaaatttgcatcccaaaatatcagactttggcttggctcgatcatttttgggagatcaagttgaggcaaacacaaatagggtggctggaacatatggttacatacctcctgagtatgctgcacgtgggcatttctcagtgaaatcagatgtctttagttatggtgtgatagtactagagattgtaagtgggaagaaaaacagagaattttcagacccagaacactacaataatcttcttggacatgcatggagattatggactgaagggagggcgctggaactattagatgaagtgttaggagaacaatgcacactctctgaagtcatacgatgcatacaaataggcctactatgtgtgcaacaaagaccagaagatagaccagacatgtcatccgtgggtttattcttgaatggtgataaattattgtcaaagcctaaggttccgggtttttacaccgaaaaggatgttacatctgaagcaaattcttcatcggcaaatcacaaactgtgctcagttaatgaactgtccatcacaatattagatgcaagatagggaatggaggcaagcaaatgttagggcttcaccttataatgtgaaacataacagctattttcattatacataactagtgaaagttctattatgattgccagctttgcctttgtttcatgtatccaaataagtgtatgagataagcatactttgaagacaataatattgctatctgcactagaatagagttctgg

SEQ ID NO: 53258 - DNA, 323 bp, Glycine max
  Clone ID: PAT_MRT3847_19103C.1
cgaaacaaagaattctaactttaccaatgctgctgcactcaataatggcatggtgaagtggaaacgagtccaaaccaagtattctactacattacttggaccaaagaaaactgacatgacccatgctgatgtacttgataacttccttagatgggacgggaccaaagctatatatgagcccctgggacgttagctttgagtgaggaccatgaaatgcgcacagtagtacatacaggagaacatggatgagccacttttgcccatacccccagctaaggtccataaaagtgaccctgacaatgccacataacaacccacttatg

SEQ ID NO: 53259 - DNA, 286 bp, Glycine max
  Clone ID: PAT_MRT3847_19104C.1
gctgatgaggatgagctcatgctggccatcacacacaaaagttatggtggtaaatctacagtggaagctcagataggactctgggcgacatgatgttaagagcgaagacaattaccttcagaagctggcgcagttaaaccgacatttagaccggaaaactggaggtgacccaacactggttggactgaatagactaatcacgagcggaacaaacatatcccccgtatgattcggacagctcttgaagaaggttaaaaaaataaatttcttaatagaggtggtcctt

SEQ ID NO: 53260 - DNA, 440 bp, Glycine max
  Clone ID: PAT_MRT3847_19105C.1
ggaaaaaaacaaacttgttctgggttttatttttgcccttcactttagcccaacggggaaaactcttggttccccaaaatcttccataagtccaatgcttggccctaaaaaaacaagccctcgttgttttgaccctttccggctcaaaggggggagggatcaacttttggatgacctttaacgcgagcagaccccagggtttctgattcctttttggggggggatgaagcgaaatatttcttccccccccctcctaataaattccccgggtttttttggatccaaatgtaaccattttttccccaattttttccccatgaatttttcgctttccagtaatttaccccatccggtgaaccttaccccacaagtaaaacaaaggggttattcccctccgggcttggacagttttttccatcataaattcccccggggtttaa

SEQ ID NO: 53261 - DNA, 204 bp, Glycine max
  unsure (1)..(204): unsure at all n locations
  Clone ID: PAT_MRT3847_19106C.1
agcacgcgtacgtttactcggggnngtcgttcagtctacacaacacaacaaaacctcactctttctttcacgaactcacgctctgttgggagaggtgaagacacataacccgaaccatcaaacggttaggtgacgctgggacttcaatggcagtgactgaagctcaaaatactcatcttggagaaaacacaagaggcagctggt

SEQ ID NO: 53262 - DNA, 198 bp, Glycine max
  Clone ID: PAT_MRT3847_19107C.1
ggttacttctaatttttctagaaaatatcctatatattaatttggctgttaacaaccaaactgttgtgcctacaaaatggaccatttattgccttattgatgttggaatattttcaattgtcacagttagccagttaggtaatgtttggcataacatattttaagcttctcttctcattaaagggagaacttagacca

SEQ ID NO: 53263 - DNA, 252 bp, Glycine max
  Clone ID: PAT_MRT3847_19108C.1
cccggacagaacgcattagggttatcggcccgaaagcagatcatgcttggcggtcttagcttccttgatttcacgatctggatcgtgaccccaaagctcgaggtgggcaagcctattgcaccttcagggtggctaacttagaccatatctaccttttgtttcggccaaaccacatgtcagtcttcatacttctcgaggacccaggccagagcgattaccggaaataaggacggccatctcaaggatgacctg

SEQ ID NO: 53264 - DNA, 347 bp, Glycine max
  Clone ID: PAT_MRT3847_19109C.1
aaccccccaaaaaaactaaactttcaaattcaaaaaaataaaaatgccagtcccccgtttcccaaaaaaacaagaaattgggtccccccccctctaaaaaaaagaagaaagaaaccttcccctgggccattccctgaatggaattggggggatacccccccggaaaaaccaaagcgggtttcacttaaatggataaccccccaaaaaaatttccctttgcaagaaccatataaggggggctcccggtggggaaccccaaaaaacaaacccctggtttttttttgggggtttccaaacccttcaatattaagtcccagggacccgggattctacaaaaaagccggccc

SEQ ID NO: 53265 - DNA, 338 bp, Glycine max
  Clone ID: PAT_MRT3847_1910C.1
tgagaaacatggctttcttaagctccttagtgctgctccttgccgctgtaattctatcccgtcaaggtcttgcacactatgagaatccgacagagtacatgcctaccactgagaaaccaccaggttataggcccgcagttgagaagcctcctgtttacaaacctccagttgaaaaccctccagtttataagcctgcaggagagaagccaccagcgtacaagcccgcagttgagaaacctccagttgataagcccccagttgagaaaccaccagtgtacaagcccctaggcgaaaaaccaccagtgtacaagcccccagttgaaaaacccccagtgtac

SEQ ID NO: 53266 - DNA, 353 bp, Glycine max
  Clone ID: PAT_MRT3847_19110C.1
ccccacaaatgaaaaatttctcataagaaccttgagagaactacacaaaatatagttgtcataattgaaaagcccaaaaacatataaaccctacactagaatcccatagtttcaatataggactcaagtcccataccttggaattggatccatacagggtcttgtcataatatttgtgtgtctacattctaaaggatggagaaactgactgaatcagttaactgcactaaagtgtttgtcctagtctaagctgagggatagaaatacaccaacaagcaacaaggagccagagcccatggatattcctgctgaaaccttaaagtaatgctaattggcttctgattactccaatt

SEQ ID NO: 53267 - DNA, 324 bp, Glycine max
  Clone ID: PAT_MRT3847_19111C.1
tcccactttttttttttttatctatttaaggggggggaacaactcccatccccaaccatagcacgcgacacaatctatagacccccgaacactgagagtataaaacaccatttggactactccagttctgagagagtcgatcaagagccaaaggttactacagatcttaaattcctttaaaaataaacgctccctaaagaatcaagctggagagaaccactggatccaaccggcctctcaagacctacttctcagcggatggtaggaaatacgcttcgggcttgagaacaagaggctggttctgaggaaaaacccttttaccca

SEQ ID NO: 53268 - DNA, 264 bp, Glycine max
  unsure (1)..(264): unsure at all n locations
  Clone ID: PAT_MRT3847_19112C.1
cagattggnatcatccgtgtncctcnctctcatctcnccntctcnctgtncccacggtttccttactttgaagtttaatccaatccaataatccaanaactacatacaaagtngaacaataccaccatcataggcgtatcancatcagaatnccaaggnggattagctncancangnaacgggcttcatgcngcatgagtaaaggccgttatgttatgctcanggtggatttgtgcaactggggtaggggaattgatgatgtgg

SEQ ID NO: 53269 - DNA, 905 bp, Glycine max
  Clone ID: PAT_MRT3847_19113C.1
tattataattttcgcctgttagaattcatgtaaagctcattccagcactctggaactcttttagtgtcacttacaaagttgacaagtaaaatactaaaacattactctgaaaatacaggatcaaaactggcaaaattgcaaataacttaatatgccatatatgcttatctcccaaacaaacacctacaggctatactttcgccgaagcaaacaagatacttccatctacgtatatgatttaaaattggataattttggaaagatattgtaaagctaataacaatatcagctcttgaatctgatgcttctactgatagccgcattaattccagaggattctccaccataaggagcagtcggcctcttgatactctgaacttgccccttgcggttcttaacagccttttgatgcttgagcttgtaattctttctgggattcttttttgccttgttgcgattgcgggttagtcccctattcttctcaatctgaaaaaaaatatggcgctttccttttacaatctctggcaatgaaaaaactgaagtgttccttgagtaagtctcaacttttgctgcaagttttgcagctcgcagttgttccacttgtttgtaaaattcattttctgagtccccacttccaccgtcatcctcttcatcggtaacctcattaggtccaagatcagtcatctgatcatcaccatcatcatcctcagtcctaattccagcaccagccaacacccgaagctcgtgtttccttcgcctttcaccaatatcatctctctttggtaaatcatcatcaccagaaaccaccttgggcttcttcatatttgcattaaggaattgtgaaacttgttttgagccataaccattaatcaatctagcttccccattggcatccatggtatcat

SEQ ID NO: 53270 - DNA, 1931 bp, Glycine max
  Clone ID: PAT_MRT3847_19114C.1
acagacccttgtttttcagtttttcctcgagggaagctctaacttttagcatttccaaactctgtgcgccaatgtgatccttctgaggtttaacttttcttgttttctgtacactattctttgaggtttccaatttttgcatctcaaattgcttgttaggcactgtttcttctgttgatttggcagagacaagaggctgctcttggtttttaatgatagaatcagctgttgttggagcgttctcattatctgaatttactactgtttctaacccattatttcctttaagaatgtcctcaagttcaaatggaagttttgtgtcaagttgttttatctgatccaataatttcttgatctcttcaaggcgagctattatgggatgatcataaactggctgcccttcagacttgaggagaaggtagaaattattggatcagataaaacaacttgacacaaaacttccatttgaacttgaggacattcttaaaggaaataatgggttagaaaaggtagtaaattcagataatgagaacgctccaacaacagctgattctatcattaaaaaccaagagcagcctcttgtctctgccaaatcaacagaagaaacagtgcctaacaagcaatttgagatgcaaaaattggaaacctcaaagaatagtgtacagaaaacaagaaaagttaaacctcagaaggatcacattggcgcacagagtttggaaatgctaaaagttagagcttccctcgaggaaaaactgaaaaacaagggtctgtacagctccattgctccaaaacctagtaatgcattaaaacgtttgaaaccagttaatggcatgctcgaaacatatgatgattttaatgatgataccatggatgccaacggggaagctagattgattaatggttctgtctccaaaagagtttctcagttccttaatgcaaatatgaagaagcccaaggtggtttctggtgatgatgatttaccaaagagagatgatattggtgaaagacgaaggaaacatgagcttcgggtgttggctggtgctggaattaggactgaggatgatgatgatgatcaaatggctgatcttggacctaatgaggttaccgatgaagaggaggatggtggaagtggggactcagaaaatgaattttacaaacaagtggaacaactgcgagctgcaaaactggcagcaaaagctgagacttactcaaggaactcttcagtctcttcattgccagagactgtagaaggaaagcgccatatttcttctcagatcgagaagaataggggactaacccgcaatcgcaacaaagcaaaaaagaatcccagaaagaattacaagctcaagcatcaaaaagctgttaagaatcgcaaggggcaggttcagagtatcaagaggccgaccgctccttatggtggagaatcctctggaattaatgcggctatcagtagaagcattagattcaagagctgatattgttattagctttacaatatatttccaaaattatccaagtttgaatcatttacgtagatggaagtatcttgtttacttattacaacggtgaaagtatagcctgtagggtattggttgggatataagcatatatggcatatcaagtcatttgcaattttgccagttttgatcctgtattttcagagtaatggtatatttttacttgtcaattttgtaagtgacactaagattgtgtttggattgagaattttaattgaggaaagtaatttatttgagaaaaaaaaaaaaaaaaaaaaaaaaaaaaaaaaaaaaaaaaaaaaaaaaaaaaaagggaggaagatataaaaaaaacaaaaaaaaaaaacgcgagcatgcaaaggaagtgggtgtgttatagtgaaaccaaagttcatttccctggccggcggtttaaaacttgtgaatgggaaaccc

SEQ ID NO: 53271 - DNA, 736 bp, Glycine max
  Clone ID: PAT_MRT3847_19115C.1
tttttggaaggcgaagataatatattatatatgaaaccaagtaccagaggtactacagattacataaaagggtcctgataattcaggagatacatcaccctacacagaagagacccctactaacagaagctttaactaaaagctatagacatatttgaagaccagctataataaggaatctggaatttcctttcccaacccctcagccaggtccataagagaaacagagtgttatctgtcagtctagtgatatcaaaggtttgattctggaaaattatatcatttctgagcctccaaattgaggttgtaactgctatccaccacattgtccttcttctgttagcatcctttgaaactgctgaggagaagtgctgaagaaaattgtccaaaggtctgcagtgaaacaccttttcttcctttatccaagataggaattcccaccatataggcataattttgccacaagtgaaataagtgggaagcagtttcaggttgactatgacagaatgggcataaattattatccacctgaatctgcctcttaatcaaattgtccttcgtaggaagtctatcccatagtaacctccaaccaaaggagagggctttaggaggaagtttaatctcccagagtgtcttgaagcccaggtactgaccttcatcatccctgtcagctttaataacttgataaccagatttagatgttaagaccccagtggattcagctctccaaatccag

SEQ ID NO: 53272 - DNA, 385 bp, Glycine max
  Clone ID: PAT_MRT3847_19116C.1
cagagggtttccctcgtctaattatcgaccaagatacttccctttctcatttcaacaattagcctccatcattttggtcaaattgcggattatgggcgaagccgaaaattccggtttgaaccaatgggttcattctttgtcaataattctgggttgtctggatcacaaaaaagcggaagcatgtagcatcacccttgttccggagcaacttcggagatccaaagaggaagcttacacgccacacgtggtctccgtgggaacccctccacaagggaaagagaacggacctactatacatggaagagatcaagctacgctgcatgctctatctcctctatcgatgcaaaaatggtgatatcgataagctcgatcaagttttgctcaa

SEQ ID NO: 53273 - DNA, 1334 bp, Glycine max
  unsure (1)..(1334): unsure at all n locations
  Clone ID: PAT_MRT3847_19117C.1
ccacgcgtccgggaggcttctccaaaaatccttttagcaaagcctggactcgtcaccggaggtcccgtcgccggtaaattcgggcgtggtggcggcggcgatgacgactccactcagctccgttctcgtcttccgtctgcagcatccctcaaccttctctccgactcctgggatttccgcatcgatcgctttctcccttttttgactgagaatacggactttactgtgattggagtgattgggtcacctggagttggcaagtccactattatgaatgaaatttacggttttgactcaacttcccctgggatgctaccaccttttgccatacagtctgaagaaactagagctatggcacggcattgttccacgggcattgaaccaaggatttctactgaacgtattattcttcttgatacccagcctgtatttagtgcttctgttttatctgagatgatgagaccagatggctcttcaacgatttcagtgctaagtggagaaaccttgtcagctgaattggctcatgaacttctgggtattcagcttgctgttcttctagcatccatttgccatattgtgcctggnggtgtcagagggaatccatgatgatagtatgtggcatttgatgttgacggttgacttgttgaagcatggtatctcagacccatccttgatgacttctctatcacagagctctagttctgggcttggagaaagataagcttcctgaacatgaagaatacatggctactcccgtgtttgtacacaccaagttgcaagatcaagactttactcctagtaattctgtgcagttgaggaaggcactcatgcagtatttcagaccatcctattttgtgagagaacacaccgaaaacaaacctgaagagcatgtttcatcttctccggttcatggcagtcaaatggattctaacatgataaaattttatgcgatccctctcaagaaaaaagacgaaaatccaagagctcagcatgaaagttacgtttctgcactatggaaattgcgtgatcagattttatcaatgaagtcaccatctttcacaagaccagtgtcagagcgtgaatggttaaagaattcagccaagatatgggaactggtaaaaagctccccaacgatattggagtattgtagaacacttcaacattcgggtatgtatgggagataattacgaaatgtggaaagattcgagacattctctgaaattgtatttcaattcaagatgtatcttttttaatgcaaaatcataatgaatcaattgcacattctttaagctgattttattgctggtgaatacaattgtaaacctattattagt

SEQ ID NO: 53274 - DNA, 720 bp, Glycine max
  unsure (1)..(720): unsure at all n locations
  Clone ID: PAT_MRT3847_19118C.1
ggcttcttcaaaaatccttttagcaaagcctggactcgtcaccggaggtcccgtcgccggtaaattcgggcgtggtggcggcggcgatgacgactccactcagctccgttctcgtcttccgtctgcagcatccctcaaccttctctccgactcctgggatttccgcatcgatcgctttctccctgtaaatctctcttcactctcctttcctttgtcacacaacaaaaatgtttactattaattgccattgcatttggaaaatgttggcagtttttgactgagaatacggactttactgtgattggagtgattgggtcacctggagttggcaagtccactattatgaatgaaatttacggttttgactcaacttcccctgcctgcagggatgctaccaccttttgccatacagtctgaagaaactagagctatggcacggcattgttccacgggcattgaaccaaggatttctactgaacgtattattcttcttgatacccagcctgtatttagtgcttctgttttatctgagatgatgagaccagatggctcttcaacgatttcagtgctaagtggagaaaccttgtcagctgaattggctcatgaacttctgggtattcaggaacctttctagcttgctgttcttctagcatccatttgccatattgtgctggnntggtgtcagaagggatccatgatgatagtatgtggcatttgatg

SEQ ID NO: 53275 - DNA, 254 bp, Glycine max
  Clone ID: PAT_MRT3847_19119C.1
agagaaaacgcgggttttgtttcgtttcgccctctttccgttacgggtgcagatcattggcaggagaccgtacctgcgcgcggagacatatcttaaacgcggcggcatcctaacgagtcgaactgcaccggaggccgcgaatgcagctcggggcgcgctccacgacgatgagcgccacacgcgctggcggccacaaggcaaggcttcctccggccactcggcagatggttcagagtctacagcagctactgagc

SEQ ID NO: 53276 - DNA, 393 bp, Glycine max
  Clone ID: PAT_MRT3847_1911C.1
ggggttacaatggggaactcaaagaaacatatccacagcaagcatatgaacggatcgaaaaattaaatgctgggaatagatagagcttaacgtccatatatgcttattgaatggaaagtgatttggaactggaatacagcttccaagaaaatgaaggaaaattttgttgactaagtgctttttgacttgtgtcgtctagcttcaagctttaagtacagtccattgccatggcaaactccacaatgacatggcatagtagtgctactgctatctagctaagattaattagcatacaagtccatggcttccttaaagcatgtctacatctttaccctactcagcttcatcaattttaaggagtgaagaaaaacgtttttggaagttacgcttttg

SEQ ID NO: 53277 - DNA, 415 bp, Glycine max
  Clone ID: PAT_MRT3847_19120C.1
ggcctacgatggcattacctacattgctacctacagtggaggagtgcactgcatgcacgtgtggccaccagttggcaataataagtttgatactatttcctacctgccagaccttgatgatgcacaattgtcaaaggaagtagaataccttcttaggaagggatggattccttgcttggaattccagttggaacacggtttcgtgtaccgtgagcacaacatgtcaccaatatactacgatggacgctactggaccatgtggtagctgactatgttttgtttcactgatgctactcgactgttgaaggagcttcaacaggctattatgtgttgacccaacggtttcatccgtatcatcggatgtttcatctttgcgccggttgcaggtctcatgcttcttggcttcgagccttat

SEQ ID NO: 53278 - DNA, 541 bp, Glycine max
  Clone ID: PAT_MRT3847_19121C.1
cttctgttgagagtttcagacgggttatcaagcgtttcattgatcaggtggagctgaatattggctttgtgcaaaagaaaagagaagaggtgcctttctcaccgaaggatcagcaatctgttgaatcatttcttcaggttgaaaaacggaatggtaacactccgtttacacaatattataaaagcatcatgaacaaggcatcttctaggaaatcaatttcaaatagaaagtcttcaggcaaaggaaagaagaaaatgcaacatccaaatggcaacattgacgtggtcgctactgagtcttgaaacaatagttgctttcttcttgcttttgttctacatgaggttaatgaaaccatattttactttctgtagtctgacacatttacgtttggttgagattatctcgtcaaatgtaaacgttcattacaaatgcagttccatttattggacccaatgagcgttatttttgaaatattctagattttgatgtattgagtcccgaggtttcaaaggaaatgtaatacatgaatgaggttgaaatt

SEQ ID NO: 53279 - DNA, 767 bp, Glycine max
  unsure (1)..(767): unsure at all n locations
  Clone ID: PAT_MRT3847_19122C.1
nnnnnnnnnnnnnnntcaacgacaatttcttatctatatcaattaaaatttgttggccttttcacttaaacagatattttcaataaaaataaaaaaagaattatacaatgaatatagaaaaattggaaaagtagtaatagtaaatatttatttaattccgaaatggcatttaaggatgctgacacgtttagcgagaaggcgaagcatccgtttccgtctaagtgactttgtctacttgtgtcccccagaagccttaaagctcttctctgctttgaaaatggctgattggggcccggtggtgatcgcagtggtgctgttcgtgctgttaagcccggggcttctgtttcagatgccagccaggggaagggtagcagagtttgggaacatgcaaaccagtggggcctccattttggttcacgccatcatctactttggcctcatcactatcttcctcattgccattggcgttcacatctacactggctaactcctggatctggttcagtttcacccatctatgtttatctctgccttttaattagtctttttagctttacaataatttccttgtttgatctctatgtatcttatgtggggttgggtcatgggtgcccagaaaaaaacaatagattcagataaggatgatgctgctgtgtgtgttttttttttttttttatcaagatagtatggatcatgatcctttttgctttgtgacggtgaacattatttacaacgttggtattattattattattattgcttttgcc

SEQ ID NO: 53280 - DNA, 407 bp, Glycine max
  Clone ID: PAT_MRT3847_19123C.1
gaattcccgtttcgacccaggcgtcccgtcacactcactatctactagacactggttttagaatacatatatctatttctgattcagggcgcgattgttactaagcctgggaagttcgtacccatagtacttcatatatagtggaattctacatgaaggtgtctatgctcgatcacatggaggattgtcacaaactcggtcttaccatagctcattgcagtcagtaacttgtccatcaataagcttgaaaaattgctatctttcgttaacatctgttccgcagtgaatcaagttatgatccaatcattaagctaatcacacattaatttaattacgtgactgatccactgttcataatcaatgatctaactaaaccttaattaattcttaacaggtctaagttaacc

SEQ ID NO: 53281 - DNA, 457 bp, Glycine max
  unsure (1)..(457): unsure at all n locations
  Clone ID: PAT_MRT3847_19124C.1
gagcatcgtctagctatctcgatcgaactgtccaaggtcctgtcaccaaagcctcagcctaagcctctggtctacatgggtagtggtaaggcataacttgtgctctttgtgtggtaagcttccggtttgtgatgataacgtcgtgggcttggagcaactgcgggatcataaccacgtcatttccacggatagccttcaactacggcaacgtgttatggcaccgtcgccagttgcacagcgtgcagaggaggcactggcacaacgtgacataagccaacccntgacaagcgagattcgtacacaagggtattgtgcactgtgcacaggtacgtccgcgcagtccggaggattaataaagatacgcacccggatttccacgtaagagaggagcctccaaagcacgagaggcatagcgtgcaaatatgcgcttaaacgtcgctttgacacgtggggacag

SEQ ID NO: 53282 - DNA, 135 bp, Glycine max
  Clone ID: PAT_MRT3847_19125C.1
tacagctgcgagagacgaccgaagtttgtatgaggttgctatgaagcaatacagatgaataatggcaatccgcttgttgttggttgttgcttaaagttgtgttggcatatgaatccaaggggtcagtctacaaga

SEQ ID NO: 53283 - DNA, 878 bp, Glycine max
  Clone ID: PAT_MRT3847_19126C.1
gacatatactcctttgggatgtgcatgattgaaatttttacttctgagttcccatacagcgagtgctccaaccctgctcagatatacaagaaagttacttcggggaagctgccagaagcgtattacagaatccatgacttggaagcccaaaaatttgtgggaaaatgtttggcaaatgtctcagagaggttgtcagcaaaggagctcttgttggatccatttttagccacggaacaactagactctccacttcctagcccaacattacccaaaaaacaaacccccacactcaatttcactgcattactagccaaagagctacctccaccaaagagttaccaaacaaatgacacacacatgccaatcactggatcaatgaatgaagagaatgacatagagtagaagtgatggaatatttcttacaaaaatagtttagcgagaaacatattctttctattcggtgtcataaaatgcacaggctaaccaggatccgttctttcgtcgatctgaggagacagcaacagcaacgatcactggtggaagagattcacaagaggaggatgttcaagacggttggtgccattgagaacattggatttcaggatccagaaggagatggatgtttttcttactgaaactccatcaatctccataggttccaatgctctttttctttttttaatttgttcttctttggggtgtttattaattattgtattgccttatgaaataacatgtccgtgaaaatttgtgtaccatacggactcatctgaatattgcaaagtaaaacttgtaatatattttaatctatgcttatgttaggagatgtttgcttgtttgtaagacttttctttgtgatatttctcttttgcatgttg

SEQ ID NO: 53284 - DNA, 302 bp, Glycine max
  Clone ID: PAT_MRT3847_19127C.1
agaaaacaaggggaagagttttaaaatctaaaagatcaagggattcccaaatccaaaggatgggttattaaaaaaataaaaactctacacaaagcttcttttaaaaaaaaaagttgaaaacccatttttcatttccatttttgaaacccaccaccatgcttgccaaaatggccaagctttccatgcttgcaaaacttgccatgttttccatgctgaaacttgccgggttttccatggtggtggaattttccatggggggtggaaaccccatgggcaaaatattggccataagacccatggga

SEQ ID NO: 53285 - DNA, 481 bp, Glycine max
  Clone ID: PAT_MRT3847_19128C.1
gtgagctcaccgcaacacattgggtctaaataacataaggagcgaatattcctatactacagtaagaatgcaatgcacggcccatccggatatacgtactggacgcctggtgtccatgcgtgcctaactcgagcgccacactatatcattgtgcaagctaccaacgtgctcgctgatgtgactacctatcgagttgtaagagtgtacatatggcaaagacattgctatttacctcagagatccgtgaacaagggacaccatgacaagctctacgaccaaatctccaatgctgtgctcgacgctcgcctcgagcaggacccagacagcaaagttgcctgcgaaacatgcaccaaaaccaacttgatcatggtcttaggagaaatcacgaccaatgccaacgttgactactagaagatagtgcgtgacacctgcaagaacatcggctctgtctcacatgatgagagactggatgcctacaact

SEQ ID NO: 53286 - DNA, 475 bp, Glycine max
  unsure (1)..(475): unsure at all n locations
  Clone ID: PAT_MRT3847_19129C.1
tccaactgtttcagcttcccgaaaaaagcagaagacatcccattcggtaccacctcttgtatactatgtgatgactttaacagcacagtttttgtgttcatattcagtgcttcaattgtagggggtgcttttaggatccagatgccaaaatccatcatcgcattgcacttaaattctttacttgagaagtacaaaatgaaagatatattgatgtccatttgatttccaccaattttgctaccagggtcagtcattgcctgctttatcttcagtgaagtctgtacagtatacatctgctggacctactggaggcaggcattttgcaaatcacaattctagtgctcttgcatctaatgcatctgctaccgaagcagcagcctttgatccattgattgngaagaaagtttggactcggtggcctgaaaataaccacttttatgaggctgttgtaactgattacaaccctgctgatgta

SEQ ID NO: 53287 - DNA, 439 bp, Glycine max
  Clone ID: PAT_MRT3847_1912C.1
tatttgttcttttttttaacttcttgcatttttttttttttttcaactttgacggaacaaaaaaaacaaattttttcgcaaaattttacccactatttccaaatatgccattcaatatagagtgttgggggcattcaaaaaatagatatccatcccccttcagccccctcaagaattcattttaattttgcccaaaacctttatataaaattttggggggccctaaaactaaccaggctttttctcaagggggggaaccaaaattttttgagctaccaaacaacacggggtattttttataaaaagatttccttttctaaataaaaatcccgcccttcttattgtggcctgtggtgagcactgcccccagaggaaatggcgctgcacagccctaaaaaccattgggtggacccccccaaggccacaaaaattttttttt

SEQ ID NO: 53288 - DNA, 433 bp, Glycine max
  Clone ID: PAT_MRT3847_19130C.1
tgcttgcttactattactaaagtaggggatgactgtattgacttatgtaggccttggcaataatagtgttttttttgtcagtagaagactattgaaccatattagatactctttttcccataatagaagacttattcagcccaattggaacttcattatggtttgaaaattttattaaatcattaactgaaattggtcgcatttatattaataatttatatattacttattttaatgcataggatgatgagaaagggaaatcatagatggtgcttgaaattattggctgacaaaaaacaagtggttgcaacatgcctgagaatatacatgatgaaatgaggcctaatttattgatgcgacacatatggtggttgatctgttccatttccatgtacattttctaaaacttagttaaataatcttactataaact

SEQ ID NO: 53289 - DNA, 272 bp, Glycine max
  Clone ID: PAT_MRT3847_19131C.1
ctcgagccgtttgaatcaacaggtctcttctttcaatttcaaccaacaagagtgttcatggatcaggtgggaaggaaggagagtgagtatcaaattaagggaggaggagataatgaagacagcatgagcatgagcgtggcatgtggtgtgatcaacactgtagactggagaggcagaccctccaatcccaacgtgcatggtggaaccagagcttctgcttttgttcttgggcttcaagcatgtgaaataatggcaatagctgcagtgggaaa

SEQ ID NO: 53290 - DNA, 278 bp, Glycine max
  Clone ID: PAT_MRT3847_19132C.1
agacgtcagacagacggcatcaggggaacagaaagtgctgcatcagtgcgttcgctcatgattaggattagcgacagtgtccttgatttcaacgtcgatgctctctccgttgatagcattttggtcgcagtggaatcacacccacactagatggtcactcttcggaggcctcatgccctcaggtgcttctatgttccgatgtgaagtgtgcagcttttacgcacactgtgtaggaacatcagaccattgatgctgagaccattcttgaagagtgtgtt

SEQ ID NO: 53291 - DNA, 508 bp, Glycine max
  Clone ID: PAT_MRT3847_19133C.1
cactaatggatacaacgccgcacggacgctctgcaactgtctcctcttcctcaccgagactgattttactcaaaccttcaatcacaccaacaccggttgaaccatggaactgctcgcgtcgactcttctcatctttatgcagatgcataggtcagattacacagatatgctgcttcggatcatgctacagattgatgatgatcacactctcgctcacctcgacaatgcttggctcaattagactgtggctgggctgcacatacatgacgctgatctgatacttcgggatatgtcacaaaggtatcagtgcaccagctagcttctagatgacacagctgtatgctgcatgcacatgggtaactattacgaaactgcgaccctatcggttgatgcttttaacacagatgccatagatcctcacactctagccattgtaggtggatgctgtctacctctcatctgctcatctttcacatcatgttccttcatgaactctctcaccctgagc

SEQ ID NO: 53292 - DNA, 430 bp, Glycine max
  Clone ID: PAT_MRT3847_19134C.1
gggcctggaatgacttgctggttccactcacgcgccctttcgtacgtgcgcgcaaccggcggcaacagtgggggctgctgggagtacaggtatgtcagcggtctggcctgagaatagatcgtttacgaggccaggcgattctgatattggcgccaagcggtcacccataaacgatatgtgtgcatatgggcgcaatcctggaatttcaaggtcttcgtctttcgggccaccatgcctcaatctattacacagtaaactgtgtggaatcaaatggcaacagtgagaacaccattgaactttgaatctagcaagcagagctgttgacaaaattctattgaccttctccgtggaggaatgatagcggacaaaaccggtgatcggatcacacttatacaaaaattctccaattagttcactcgattgagagttg

SEQ ID NO: 53293 - DNA, 597 bp, Glycine max
  Clone ID: PAT_MRT3847_19135C.1
tttttttttttttttttttttttttttttttttttttttttttttttttttttttttttttttggaaaaaccagcagggaccattaaccattaaacaaggaaaacccttcattaatgggttaacaaattgggcaaaaaaaaaaaaaaaaacatatctgggggaaagccaacttttttttttaaaaggcaattaaaaattagggcccagaaaggggaaaaatccccccaaaaaaccctggttaaaaaaaaaaaaacccaaattcggggctggggaaagcttccccagcaccaataaactctcagaaaagggggggatggaacaggggggcccccttcagggctaagccaaatgggggaaacaaacattctcgggggggccaatcaaaaatcatttaaacaccccaaaacagcccatttatccccgaaccccccgacaggctccttcaccccaagaaccggccaatcaagggggccatgggggacccctgccttaggccccctggacctcagcacaatagcttcccctttgggacccctttgcccacccacaaccaaaagttgctctccacaagcctggaaggccaacccccacccttt

SEQ ID NO: 53294 - DNA, 702 bp, Glycine max
  unsure (1)..(702): unsure at all n locations
  Clone ID: PAT_MRT3847_19136C.1
ccggaanncggnncgagaattacttgaaggcagtgattaaagaaacttttcgattacatcccccaattaccatattggccccaagggaatccacgcaaaatactaaggtgatgggctatgacattgcagctggcacgcaagtaatggttaatgcttgggcaattgcaagagatccttcatattgggaccagcctgaagagtttcagccagaaaggttcctaaatagttcaattgatgtcaaaggacatgatttccaactgctcccatttggagcaggaaggagggcttgcccaggattaacattttccatggttgtagttgagctggtaatagcaaaccttgttcaccaatttaattgggcaatacctaaaggagtggtgggggatcagacaatggacataactgaaactactgggttatccattcatagaaaatttcctcttatagcaattgcatccccacatgcataagaaatgtttttttattatcagtggtggaaataagaagccatgaatattaaagatatacaagaggaaatacctgaaaagaaaaataagggagtattctctcgttaatgtatcattaaaataacttatggccaagagtgccttcatagtataatctatggttaatgatagttgaactgcattggttggtttatttagttatggttattcaattattgtatttttgaaaaaaacc

SEQ ID NO: 53295 - DNA, 474 bp, Glycine max
  Clone ID: PAT_MRT3847_19137C.1
attggggggaaactttgtttttgccaaggttttgtttgttaggggaattccactggatgggtgacagggcccccataattttgggaaaaaaaaaaaaaatttgcccagcccgggggaaaaaaaaagggaaaatacagggctagatctactttcctgggaagaatatgagtgggccgataataaggacatagccaaaaaaaaaacagggaaagaatttttaaaggcttgtttagcatataggcaaaatcagttttaaatcattggttcgggaccaaatgcttttgggcaagttttgtttgcttgagggacggggttaaacaaaagggccttaaaaacctgggacattaaaccatgcacttgctccacagttttttttgcactgccacaagtaattttagcaaggggggattccccctttttttttttaggggggggtgctattaggggcccaaagggggagggggccaactgatt

SEQ ID NO: 53296 - DNA, 627 bp, Glycine max
  Clone ID: PAT_MRT3847_19138C.1
agctcccttagcccaggatagctcacaggagggaatacaatgccacactcttttggtttgcgctctcgcactcgccatatgttcgccgtgccctttggcgagcatggacccacccatttgtcgacctacatgattaacttcaagctcggtgatatcgttgatatcaagggctccggtaaggtccacaagggtatgccccacaagtactaccacggtaagactggtcgtgtttggaacgttactcctcgcgctgttggtgttgaggtcaacaagcaggttcgcaaccgcatcatccgcaagcgcatccacgtccgtgtggagcacatcaagaagtccacctgccagcaggactttatcaaccgtcgtaaggagaacgataagaagcgtcgtgaggccgcccagaagaagcagtcagtttctttgaagagacagcccgctactcccgccgccggtaaggagctcaaggttgacctctccaaggtcgagctcgtcaagcctatccgcttcgagttgacttactaagctcattgatcaaatcaaaaatgacgaagagcgccgtgtggctctgcacgctgtgctttgtgttccaatcatgtataaatccctctaaatccaattaagagctac

SEQ ID NO: 53297 - DNA, 280 bp, Glycine max
  unsure (1)..(280): unsure at all n locations
  Clone ID: PAT_MRT3847_19139C.1
gtggtagcactcacataactgtngaagangtgaagaaggagataggtgatttacttacagaatatgtggatagtggggacncattggaggcctgtagatgnatacgtgngtngggggtttcattcttccatcatgaggttgtnaagagggctttgatanttgccatggagatncgttcggcagancctctaatgtngaagttattaaaagaagcagctgangaatgncttgttagtcccagccanatngtnaaagggttttctcgtttggcagaatcncc

SEQ ID NO: 53298 - DNA, 1509 bp, Glycine max
  Clone ID: PAT_MRT3847_1913C.1
gcagcataccatatccaatcattctaacggataggatagaaaagagcaaaactgtttgagtctgagagaacttgaaacaacaatggcttcactttccctctctctctccacaccaacaacaccaacctcactctccttcacatcatcctccatcttcttctcttcacaccaattccacacacacaataattctttcaaatccaacagctttcccgttttaccctccaaaaaacccctctccatttcctgcaaggcctcccctcctcttcccgtcctcaacttctccggcgagagggtcggcgagtccttcctcgacctccgctccgcccctcccgacaccgcccgagccgtcgtccaccgcgccgtcgtcaccgacctccagaacaagcgccgcggcaccgcctccaccctcacccgcggagaggtccgaggcggcggacggaagcccttcccgcagaaaaaaaccggtcgcgcccgccgcggctccaaccgcacgcccctccgccccggcggaggcgtcatcttcggcccgaagccccgcgactggtccatcaagatcaaccgcaaggagaagcgcctcgccatctccaccgctgttgccagcgctgccgccagtgccgtcgtggtggaggacttcgcagcggagttcgccgagaagccgaagacgaaggagttcatcgcggcgatgaagcggtgggggctcgacccgaaggagaaggcgatgttcttgatgacggaggtgccggagaacgtgaggctatcgagcaggaacattgggaccttgaagatgcacacgccgaggacactgaatttgtatgatattcttgatgcggataagcttgtgctcacgcagggtgctgtggattacttgaatcagaggtatgggggtgattatcaagggagtgatgatgaagatgaagaagaagaagaagagggatatgaagagggtgaggaggaaggtgtagtggatggtgaagaaggacctgacgcaggggatagtgatgtggtaaattgagggtttaaagtcttctttgtgccattttatagaggaagttgctgatacagggatggaaggtctaaagtcttatttatttctaccaatttatgtttctttcctttccatcacataggatcctaatcttggtaacctgtaaggatatttgcctttgcccaatttcaatcatattagcttgcaggctcctttgtgtaatttattgaatcaattttgttgcttgtagtttgttttgtgcaaatgcatgtatatggataagtcaattgttttgaataaattttgttgcatgtaaaaaaaaaaaaaaaaaaaaaaaaaaaaaaaaaaaaaaaaaaaaaaaaaaaaaaaaaaaaaaaaaaaaaaaaaaaaaaaaaaaaaaaaaaaaaaaaaaaaaaaaaaaaaaaaaaaaaaaaaaaaaaaaaaggggggggcccttttaagggacccaagttttcttccccggggttgggaaagaaaatttttttttagggggcccccaa

SEQ ID NO: 53299 - DNA, 385 bp, Glycine max
  Clone ID: PAT_MRT3847_19140C.1
attcccggctggacgcactcatacgtaaacacttcccaaaataaacttttgccctagcaaaaaatttcacctttagaggcaaaagagaaaattttaatgtcgagcggttgtctaaaattcacatctgtttctacaactatagtattcatatccaccactaaacatattttattatttaaaaaattattaaatctcaacctaactaactattctactatcataaaatcaaattcttcacatactcttcataaaaatcatctctactcatttatattacctcacatgactccaatgtacagatattcatctgttgccacatatactgtgtctatgccttctcaaaagctagaattcattggtgcaatactacatgagtggcttttaa

SEQ ID NO: 53300 - DNA, 296 bp, Glycine max
  Clone ID: PAT_MRT3847_19141C.1
ttctttacggctgcgagaagacgacagaagggggcgataaaacggagaaaagaaaaaagaaaaatgtaagtggaagaagagaaagtggcatcgcttaggtacagatacagacacaacctggtaaaaatacctaccgcagtgccatacaattttgcttcactgtgagtggttgctcacttttgatctagctcgttccttcattacaaggcatcgtgcacaaatagtggactggggacagatggaccgatgtcttgcagcaggatcgttaccttctatcaaagagaaacaaccagaaa

SEQ ID NO: 53301 - DNA, 2031 bp, Glycine max
  Clone ID: PAT_MRT3847_19142C.1
gtcgacccacgcgtccgtaagcatacatctattcctcgtctccatcattttgtgttgtgctcgctctgtctctctgtctctgtaaagcgcgtttcagcacccgttaccggcgaacatggagagggttatcggcgggaagtttaagattggtcggaaaatcggaagcggttcgttcggagaaatttatattgcatcaaatatggatacctctgagattgtcgccatcaagatggaaagcaagaagaccaaacatccacagctattgtatgaagcaaagttatatagtattcttcaaggagaaagtggtattccaagtatgaagtggtgtggcactgatggagacaataatgttctagttattgatcttctgggacggagtcttgaagacttttttgtctactgcgggaggaagttttcattaaaaacagttttgatgttggccgatcagatgctgacaagaatagagtgcatgcattccaagggatttttgcatagagacataaaaccagataacttccttatgggtcttgggaggaaatcaaatcaggtttatattattgatttcggactagcaaaaagatatagggaccctaacacaaacaaacatattccttacagagagaataaaagcttaacaggaactgcacgttatgcaagttgcaacactcacatgggaattgagcaaagttgtcgtgatgatttggagtctcttggctatgttcttatgtactttttaagaggaagccttccttggcagggtttgaaagctgctaccaaaaaggaaaaatatgacaatatttgtgagaagaaattatcaactcccattgggatgctttgcaagtcgtatcctgcggagtttgctacttactttcactattgccaatctttgacatttgatcaacacccagattatggatacttgaagcgcttgttccgtgatttgttcaaaagagaaggatatgattccgactatatatttgactggaccatcctaaaatatcagcaggcgcaacagacaaagaaacaaaatcaatcatctccttcaacagcagtgcctagcagtctagaaccagtagttatggaaaaacataaaggagtcaatgattcagctcatgttactgtaacaaaaatgttggccaatcttgaacgtccaagtgcacgtgcacgtgtgcagcctaagccatctaatgttcagaatctggatgccaagaatcatactgagaaacatggtgtgaacaatagtccatctacttcctcagccattcccaaatcctctacagaaaatgtctcaaaaccagaaaggcccacaggaacctcaaaccttggtcgtgtatttgggagtaatgctcgtgtttcaagcagctggattccttcgctacgccgaatttcttctgccaaatagtagaatatttggctgtgccactgccttggtgtgtttctcaaggcgtcacttagagctctttttctcttttgcaaatgtcatgtacatatgtaactccaccagaggaacattacactgacatgacaagcaagatacactgacatgacaagcttcctgcacatgacactattaccaaatgtattggcagatacattcttgttgagtgaggtggatgctctcattttttaagagttggaaagagggaaagggagtgtgaacgattttgaagatcgaggtatgctggtggatgtccacacgaggctcagggtaattggttggtgggccttaaaatgcgagagtttggcagggttacattttatttttatttttctaatgatgatgaatctaacatgtatgagtgaggggaagcattcttattgtacccgtcttttttttctattcatcttttgttttttcaaacattcactatacaaatttggttatcttttcctttgtacagttattttgtcagcattataatcacattgtaccccaatcccaacaagggaattattcacaagtcaatcccattcatagttatttgatactaaaaaaaaaaaaaaaaaaaaagggcggcccggacgcgtggg

SEQ ID NO: 53302 - DNA, 354 bp, Glycine max
  unsure (1)..(354): unsure at all n locations
  Clone ID: PAT_MRT3847_19143C.1
tnnatggtggggagcgtatgtttttctttttttaaactcaaaattatgatgaatcaaaaggtggggatcttatgggggggggtgatcacttaagaaggtttaataactatatctcatgttactgatactgattatcttttatgtgtattaatttggtgaaagtgcattaggtaaggttgacaattgtggtttttgagaatagagattattagttatcaacattctttaagtgattatctagtggcttcaaaaactttgattgactacccttatggtacaaggaaggttgcttattatcatggttttttgttacctttttaaaaattgtagacttttctgtaaaaattactttct

SEQ ID NO: 53303 - DNA, 832 bp, Glycine max
  unsure (1)..(832): unsure at all n locations
  Clone ID: PAT_MRT3847_19144C.1
ctttctcagtgaacatatttcaaacatggtgacaccagaaaagagcctttcaacagctttaaatgccagaaccataggctcaggcaatgagaccatagttttgtgtcacgggtttggaacagaccagtcaatttggggacaaaatcattcctcttttggctgaaaactacactctagttctctttgattggcccttttctggggctgtcacagataagagcctttatgaccatgccaagtacacatccttcgaaccttatgctgatgatttaatcactatcatagatgagatggacctcaaatgtgtcacttttgttggacattccatgtctgctatgatcggttgcattgcctcaactaaaaagcctgagctctttaagagacttattcttgttactgcttcaccaaggtatataaacacagatgactacgaaggtggctttgagagttcagatattgagcaactagtctcaaccatagagtcgcaatacgaaaattggatctcaatctatgctcctattgcagttgatccaaatgatgttgcctctgttgacaaattccacaactgcttgaaaagtatgggtgctgaagttgcaatttccttagccaaaactgtgttttacagtgattatagagacatgcttgaaaaggttcaaataccctgcactatcatccaatcaagcaatgatatggctgttccacttaacatagggcactacttggaggaganaatanaggngtgtccactttggagatcatagacatgattggtcatttccctcatctaactgcacaccttaagctagttgaggtgttgaagggtgttttgaga

SEQ ID NO: 53304 - DNA, 522 bp, Glycine max
  Clone ID: PAT_MRT3847_19145C.1
ggcaatcgggttttaaaacttttttctcacccacacttaaacatggagcttaacatatataggtttcacaaacacctaaaggctcttgcaagttaaaaaaagcatatagcacaggaactcgcacggcccgtttaacacatttataaggccacaaaacccaaaaaattcggccactttagtcatacgggggggcatcaaccctacttttaaatctatgcatggcctttcctggcatgcaaaaaaaactaaaggggagatatgatatgaaagataaaaggggcatcactcacatgggtaggggctggggggggggggtaggaccaatacacaaccgggcattatataaatatggcgggcccacttgcaggggcagcaaaccccatgggatggggggccttggggaccccctttttttcctccccaataatagcaaaaaaaagacagaccccacaaatttacaatttgaaagggaaagaaaaaataattgcgggaacaatgagacaatttatcctttaaaaccaa

SEQ ID NO: 53305 - DNA, 464 bp, Glycine max
  unsure (1)..(464): unsure at all n locations
  Clone ID: PAT_MRT3847_19146C.1
attttatgaatgaatgaaaaattaaaggcatgaggggcaagtgtggaaattaaaagaaacggctgcatcgaccagctcgtcacttcttcttcctcttccatttccatttctcggtgttgttgttcttcatccatggctttccctcagcaccacttccaacggcactaccaaagccagcagcaacaacaacaacaacaacaacaacaacaacagcagccacaaaccaaaaacttcaggcaattaatctaattatcctctcaattttttatttatttattgaaatcccaaaccatttcccttcctttccacccttcattttaccaaccctttttgatattttgtttatttttacaatttaatcttctttgcttctttatantttccccctttattgttttcctttgctttcagaaatctgcaaacaatcgatggtcaaatgtcacagcatgtggcgttttacaacc

SEQ ID NO: 53306 - DNA, 320 bp, Glycine max
  Clone ID: PAT_MRT3847_19147C.1
gaaaggaggaagagtgtattcatgtctccacaatgccgaaagctattggtccaattaaccaggggccatcgaataacaccgatgtctattccatgcatccctttccgcacaacagtgacatagccattctgtatgccaaacaccaaactacttcattgtcaaaaaaaacgacagctttgaaagctcgagatccagattcaaagcagctgaccatccaggaatacgagacttagtcccatccacccgcggcaaatggagcccaggcgttccattttgaagcaacaggcacagccacagttttgcccgaccactccgagttg

SEQ ID NO: 53307 - DNA, 284 bp, Glycine max
  Clone ID: PAT_MRT3847_19148C.1
caaagcctgtgaggtctggtggttagaaagtccaaaagcacagaaattcagatgatgatgagaggaggaagctgttgcagaatttgagaggtagggttgagaagcttagtaaattgtgtaaggtttctgctaatgatgaagaagattctgagtctgaagagggcattcatgataatggggtaaccaatcatttgattggtggaaggaatgaggtgccccaaaacaaatatggggtgttccttcctaggcaaggagctcaacctggagtgaagaatactgtgagg

SEQ ID NO: 53308 - DNA, 333 bp, Glycine max
  Clone ID: PAT_MRT3847_19149C.1
tcttcacacaaacatctctctctctctctctctctggcatgggtgccagacacaatcgccaagacacacaaacactacacatgacaggcccacactgaacgcaacaacgaccaacacctactactgccagcccgccaggacactaacccgccatagccaaagagacccagctccggcacaccaacctcaactataccacgcaaaaccacaaccaactgcactgcctgactcacacaacagaatacagcaccacacaagacgcccacaaacccaagaacatcgaacaaccacacagagtgcacatataccagacccaaaacaaggtacccacat

SEQ ID NO: 53309 - DNA, 210 bp, Glycine max
  Clone ID: PAT_MRT3847_1914C.1
gctcaaaaatcggaagcctacttcatgagatatcgggggcagttccatataagaagagagggttggaccgattaccgtgccaggattgggttgattaatctagacaagaacaaatatggcactccgatataccgatttgtgggtgggtttagcaacaaggacattgtggcacagaaaatatctgctaacattgccggcgatttagatctt

SEQ ID NO: 53310 - DNA, 830 bp, Glycine max
  Clone ID: PAT_MRT3847_19150C.1
gcgcgagggaaagatgaaaaggactttgaaaagagagtcaaaaagtacttcttggagtctttcccaaattaagacttattttggtttgtctggaggggtgctgtagttcgcgatgttctcttcaatctcattggttatgtttatcagaaatgaataaggcctaactcaaccagtcttaacacacacaggactggacatctgtgactggacctaactcaacccaaaattaaggggtataatttgtttaccctaatagatcactttcatagtagaggtctttatcggtccatctttttaagcataatggaaggggaggaatccctgcaacggttttctccagaagtaatgattcaagatccaaacattggaaatgcgaattctctattacctcctgtagttctttttcatggaactggggattattccataccatcagatgccagtaaaacatttgctgaagctcttaaaagagttggagtcacagctgaatcaattttgtacgaagggaagacacatacagatgtgtttctacaggatcctatgagaggtggcaaagatgatatgtttgaagatttagtagcatatatccactctggtgatgctgatgcccgtgccagagatgcaacggctcccccaaggagacgccttgtacctgaattcatgttaaaattggctcatagtgtcagtccattctaacctgcaagcagaatgaactaacatgcatagttgattttattatttcactctgtacataaccattattatatcttcctaaattaattttcaatatgataggtttggcagatcccattccattattagatttaaca

SEQ ID NO: 53311 - DNA, 459 bp, Glycine max
  Clone ID: PAT_MRT3847_19151C.1
gaaaaggcaactcccaagccaataaaaaaattcccccttttaaaccgttcttgggtttgggggttgcccaataaacctttggcaaaaaaaccgattttgatttgcaaaaacaaaggggtttctaaagggcaaaacaaaactgaaaaataaatttttggaaaagccccggggattttaaacaacccaaaatgccttttcagccggatcaagccccaactccttaagggggttccttagccaagggtttattaaaggggctttcccccttgggcccaacattttttggggaatccccatgaacccccatcagttttcccagatcaaacttgggggctttaaaaatcttaactttacgaataaacccattttggagggggtatttgccaaagggggcctctttaaacccctttccaatcatttcaggggtgaacttggcccccaatttttttaaaatacagg

SEQ ID NO: 53312 - DNA, 1793 bp, Glycine max
  Clone ID: PAT_MRT3847_19152C.1
ggctcgagagagaataaagataaggagaatgaaactgaagggatcctcatggggaggaaaatcatgagcaagatagtaaagaaatgacagatgagagcaatcaaagagaagctgagaaagaagaacatggcaagattcaagaagagacttcatctgagaatcaggctcaggatggggggaaaattgaggaagagcatcgagaggaaaattatgcaggagataatgcctctagtgctgtagacaataaatcacaagacgacacctcggatgaaagttccaagacagaagaagaatctgacaaaaaggaaaagaatgagtttgagtctcagaaaaatggtactgaaactacagaagtggctgattctactgtcacaacaacaaacagccaaggaaatgaaaatcagacacagtcagagaatgattcacagaaaagtgttacatcggagtcaaaatggcagcagcaagagcagaataaccccacaaaggtagaggaatccggtgtagaaactcatacaactgaagcattggaaaatgaagataactccaaggtagaggactccaatgcgcggagtacgacacaaaaaactgaagattcttcttctaactcagatgcctcggaagagaaggctgagacacatgacagcaatgcaacgaacggtgaagacaagaacaaggacacctcgactaattctgctcaggacgaaaacaccagcaacaattatgtccaagaaggaaatgttgcgtcatccaacaatgacaataaagatgctagccaagatgttcaactcacttcctctgatacttcctcagaacaaaagaaagatgaatccttgaatctagaaagtaacactgactctgctcagaatgacaatgaaaactctgatcaaagcaacaaaaacagtgatggaagtgctaatgacaataaagatgctagccagtcctatacttcatccgagcaaaacaaagaaggatcctcaaactcagataacaatgctagcaaatcagatacttcatctgatcaaaacaacaaagagggatcctcaaactcagataacaatgctagccagtcagatacttcatctgatcaaaacaacaaagagggatcctcaaactcagataacaatgctagccaatccgatacttcatctgaacaaaacaacaaagagggatcctcaaactcagataacagcaacgatgctaaccagaatggctctaacagcaatgaaaatgcaaatgacaatgggaatgctagtcatgaagcacaaaacaatgctgatgcgggacagggcaacaatgaggccactgttgagagtaaggcaagtgaaaatgaaggtggtgctcaaaacgaaacagtggagtcacaaaaagaggaggaatctgcacactccggcggagatagcaattctaacttgaatgatcaaggaagttctgatcattcaatcactcaggaggataaagaatctcgcgtggatttgggaactctaccacaatccaatgcagaaaacaataacattgaggttactgctgctgagtgataattcagatagagtaattgtatcaagcttcttttgatcctacttctttttttctatttttgttgtgccatgtattgtttctttagttggatattatgctatcaagttttttgctttacacagggtcagattaagaatttagaaagacctagagttctatttgtataaatcatttgctattattcatatgtaacctgaacccttttatgtaagcaataattatgacgtctaaaatatcatcaaagcaaagttccttct

SEQ ID NO: 53313 - DNA, 257 bp, Glycine max
  Clone ID: PAT_MRT3847_19153C.1
acggctgcgagaagacgacagaagggctcccatgaacaaaactgctcaaaacaaaatgactcatttaacatggtttgaacttgattgaaatgtgtggtatgtgactcaaaatcactaaaggcacaaatgggaaggattctagtgatgttgtcataactgaattcagtaattataactaaattcagttgtcataactgaattggtcttagtaccaaagtatagtctttgttcctagagctagcaactagagtatatat

SEQ ID NO: 53314 - DNA, 658 bp, Glycine max
  unsure (1)..(658): unsure at all n locations
  Clone ID: PAT_MRT3847_19154C.1
ccccccgcgtccggtttagtttcttaccttttttattcaaaagaattcttgtagcaatgtctgagttagctggcaaatgttgttatattgcatgcattatctcttcaaaagaaatcttgtagcaatgtttcagttagcgcacaaatgttgttatattgcatgcatcatccctcatctcaaattgttttacttaaccagaataatgtactttgatgcatgaaggttgttgtcttattctttattcaatcctgtcctgcaggtaatcatggtgcagaagcgttcttttgatgctgaggaaatacttgaggggtctttcaaacacccaaaacatgcaggaccaagcactgagcttttttcattatcagaatctgttttccccgatgatgattgccattcccgtatgccaaaaacttcaggtgggtgattagttgatgaccactccatgtttgagcatcagctgcaaaatttggaataaaaaatatgcatttcaacgagtttcaagtttgtaattaattgactntttagataatcactgtagttcaagtctgatttattagtcaaccatcttaaactgtgcttcagagtttagagttattctactgncttattttttgcttcttttatcccacatttttgngtgattncattatattatata

SEQ ID NO: 53315 - DNA, 407 bp, Glycine max
  Clone ID: PAT_MRT3847_19155C.1
aggacctcgtaatgccgttgtcaaaaaataataatgtataaaccagtggccgtagaataaatacaagaaagtgttgcagcaaaacatgacatttcatatcatagttgctagatgttacgttcctattatgatattatctataaaatttaaaaaattaaaggtgtaagcgtcactcaccaaaaaagaaatgacaaaacaaaatcaagttggtttgagatcttggaacagtgaaggccagagggtgtgatcatcatcatcaaaatcaaaatcagctttgggcttgttataaggactgtaacccattgggctctcagtttcagcccttgctgcatccgaaggccgtggcagtctcgggcttctattctcaaccaacactcttggatccagaggcccagacactcttggac

SEQ ID NO: 53316 - DNA, 340 bp, Glycine max
  Clone ID: PAT_MRT3847_19156C.1
cccaagcattcgacttgattgtgcatctgacgttaatggatctgcattgacaacattaatgtatctagttgttgctacctaccgatgctaaactgtcatacgaagtgggtgatgagaagcaccgaagccatatacatgagactctgaaactctaatgcagataagactagcactagctgagacttaaattatgacattagtcgatgaatcatttggatcaagtcctcaaatttatatgctaaatatttgaccacatggcattattgatgcaactctgcatcatcttcgaagttaatatcaactgtagcgcaatttgaattcactggcgggcgaacattct

SEQ ID NO: 53317 - DNA, 482 bp, Glycine max
  Clone ID: PAT_MRT3847_19157C.1
cctattagttgagaaaaaataaacatatgaacagaatacctgcaacaaactcgaaagaattactagtattatggttgtgtaaattttatgaaaattgttctgtaccttttaaaacctttcttttgtgtaaaaaaagaaaaaaaaagcacctttctttaattatactcgagtattagaatatcataagatttccccacctaatttagtgtaccacaaactttttaaatgaacaaaatgtatgccacaaaaagaaacccggtcagcatcacacattgatcacaccccattggatgtggacgtggcacctaattaagtgcgtcttctgttccttctctgccgaatcaagatattaattactattttgcaagacacaaattttaggatatatttcctttttttataaaaaaaaattcatccttagcttcgccagtactagatttgctagcatttagacaggttcttaaccatcggcttctgacttg

SEQ ID NO: 53318 - DNA, 884 bp, Glycine max
  Clone ID: PAT_MRT3847_19158C.1
tgcgagaaaacgacagaaaggaatctctcgacagaagaaaaaagagaagaagatgggtttgaagaacaacatggtggtgctaaaggtgtgtttggtgctacttttccttgtggggggtactactagtgccagcttgaggctgagtgagcttggcctgctcatgaaaagtgatcatcatcaacactcaaatgcagaagaaaaaagagaagaagatgggtttgaagaacaacatggtggtgctaaaggtgtgtttggtgctacttttccttgtggggggtactactagtgccaacttgaggctgagtaagcttggcctgctcatgaaaagtgatcatcatcaacactcaaatgatgatgagtcttcaaaaccatgctgtgatcaatgcgcatgcacaaagtcaaaccctcctcaatgccgctgttcagatatgaggctgaattcgtgccattcagcttgcaaatcttgtatttgcgcattatcgtatcctgcacagtgtttttgtgttgacataaccgatttctgctatgaaccttgcaaacccagtgaggatgacaaggaaaactactaatgaacaagtgttatgcatgtaagctctctctccaacggacaaagccccctttatgctttgtttgttatgtaaggaatgactaaataaacttggaataaaacttcctctcttttcgtggcccataatttgctttctgcaaatctgggtcttcttcattccaatgttaaaaaaaaaaaaaaaaaaaccactcactacctaaaacaaaaaaaaaaaaaaaaatctcgaacgcgccacagcgttgctgaactgacaactgataatagcggttgtgatgccacttgacttcaaatgagtgagatgagtgatgaacagccg

SEQ ID NO: 53319 - DNA, 353 bp, Glycine max
  unsure (1)..(353): unsure at all n locations
  Clone ID: PAT_MRT3847_19159C.1
gctcccgcgcgacccaacccgaatcgccgcgcacacacacagaactaccaagcttctccaaatgcttgtcttctttagttttaatcacaccctctttcaggtaactcatattctttcacctttgaatcatttccaatccttcgcaaccttttggaaaatgtgtatctttgttgaaattgcttagaaaatgtttcgcataacaaattggtattttattaaaacggatggcattttgtatctacttattcgtggcactattgctcntgtgattgcgattatgaaccgcagaaaatgtcttgcctttttttggttgctcacttaagatattattggattctattagataaacaatg

SEQ ID NO: 53320 - DNA, 343 bp, Glycine max
  unsure (1)..(343): unsure at all n locations
  Clone ID: PAT_MRT3847_1915C.1
catgcacgcgtacgtaagctcggaattcggctcgagtacggctgcgagaagacgacagaagggggggtntnnannnacaangtntnattccngatanagtnancatngtcananggtnntcgcaanggtctgccantangnttgtcantgcncctctccaggnattgtnngngngttggcccaanagattcanttnnatnacctngggnngganncccgtatngtgcngctggtatgacnngacagatgcntancgtgtcnnganntangagntctcgnacaaactnacnnngnncgannttgancnctcatcngcggcaacgattgagatgtctcatggnna

SEQ ID NO: 53321 - DNA, 3143 bp, Glycine max
  Clone ID: PAT_MRT3847_19160C.1
cccacgcgtccttttgctttagaggttcgcacaccgctacagtcgtaccctctttggtatgtatcctagaagtcgtagaggggagactccatgacgtgacggtcttggttctggtctggatggagcagggggaaccatttgttctagccgttccaatggagttaaggttgttgaagctgatggagcaccactagtcgacacataagcttcgcatgctatgattcggttatttcgtgtagtgcacccactctataaaggcctactccagaggcttctattaaatctttgtgcccatagtgaaacaagaacctctctggtgaaaattctcatggacttgctaatgcttgatgtaagaaagcccgctagttattttagtgcagttgaacctccatacagactatatggttgtcagagcaatgtaatgtactcacgccctcaatcgtttgatggagttcctccgttactctctcggcgaatacttgaaactcttacctatcttgctcgccatcatccatttgtggcaaaaattttgcttcagtttaggctgcatcctcctgcattaagagaaccagataatgctggtgttgcacctggcaaagctgtgatggtggttgaagatgaaataaatgctggttacatatccattgcaatgcttttgggtctcttgaaacaacccctttatttgaggagcatagctcatcttgagcagttgctaaatttactggatgttatcattgatagtgctggaagcaagtctagttcatgtcataaatctcagatatctactgaggcagtagtgggcacacaattttctgcgccggaggtttgaagtgatacagcatttagaagatcttctgctcttgacaattcacgaaagcaagtgaaggttttggatctggttgagaaccgtaataaggaatgcccagaacataaaatgtattacaattttaggttaggaaactattttaaatctgctcactgcttgctcaagaaggtggtcgagattttgcatataatcttttgttcggatgtaatgaaaaagcatattggcattgctccaattcattgtcagctttttgtcactcatctggcagaagcagttcgaaacttgacttcatctgcaatgaatgagttacgtgcttttagtgaagcaatgaaagctcttatcagtacctcttctactgatggagctgcaattttaagagttttgcaagctttgagttccctggtaacctcattggctgagaaagagaatgatggattaactcctgctctttctgaagtttggggaattaattcagcattagagcccttgtggcatgagcttagctgttgtataagcaagatagaagcctactcagagtctgcatctgagttttcgacatcttctagtacctctgtgtctaaaccatccagtgtaatgcctccacttccagctggctctcaaaatatcttaccatacattgaatctttctttggtggtttgtgagaagctacatcctgcacagtcaggtgctagtaatgacacaagtgttcctgttatttctgatgtggaggatgccagcacatctggtactccgctgaaaacatctgggcctgctatgaaggtagatgagaaacatgctgcttttgccaagttttcagagaagcacaggaagctattaaatgcttttataaggcaaaatcctggcttgcttgaaaaatctctttcactcatgctgaagactccaagatttattgattttgataacaagcgttcccatttccgatcaaaaattaaacatcagcacgaccatcaccacagcccattaagaatatcagtaagaagagcgtatgttctagaagattcatataaccagcttcgcatgagatcaactcaagatttgaagggaaggttgactgttcatttccaaggggaagaaggtatcgatgctggtgggcttacaagggaatggtaccaactgttgtctagagttatttttgacaaaggagcgctacttttcactacagtaggcaatgaatcagcattacagccaaaccctaactctgtttaccaaacagaacacctatcttattacaaatttgtttttagattggttggaaaggctttatttaatgaaaatttggtggatgctttttttacttgatgattctacgggaacatcgatttggtatgagcggacagaggtgactgattatgagctgattcctagtggacggaatacgaaagttacgggggagaataagctccaatatgttgatctggatgctacttataggattgccactgcaagtggacaaaatttattttgtatcagggaagggttcaatcaaataattcccaggttgttaatagacggaatcaaaaacaaagagctggaaatattgatcagtgtatttcctgaaatgcatttcattgatttaacactgcttttcgaactcaaaggaatgcgtttcttggaagggttcaatgaattaattcccagggagttaatatctatattcaatgacaaagagctggaattattgatcagtggacttcctgatattgatttggatgacttgagagcaaatacagaatattctggatatagtggtgcatcgccagttatccaatggttttgggaggttgttcaaggtttgagcaaagaagacaaagctcgactgttgcaatttgtgacaggcacatccaaggtgcctttggagggctttagcgctcttcaaggaatttcaggctcccagaagtttcagatacacaaagcatatggaagtcctgatcacttgccttctgctcatacttgcttcaatcaattagatttgccggagtatccatctaaacaacatttggaagagaggttactgctggcaattcacgaagcaagtgagggttttggatttggttgagaagcttcagtggggatgggacaaaatacaatgtattacatttttaggttaggacctattttaaaatggaattgagtggtacagggcagggggtcgaagtttttaagttcatatcatgttaatatgttgtacagtcgtatatttgcaatgggaaatgccattggcagtttttcaattcaacagttttacactgctaaaaagccttgtttatttcagtaactcaggttagtggttttgcg

SEQ ID NO: 53322 - DNA, 522 bp, Glycine max
  Clone ID: PAT_MRT3847_19161C.1
atggcttctccaacactgagtttgtggcctcaaaagcctacaatagtgttgttccttatatgcgtttcattttcatattcagttgaagaagccataacatcttctaagaagttagaccaaccagtgtttcctccaccagcatacactgagatcaagtgtgcatcatgtccttgtggagacacctgtggtgagcaacttcccccaccacctccaccatctcctcctcctccctgtcaatcaccaccaccactgctaccatcgccaccaccaccaccaccacagtctccaccacctcctaagtttccctcttgtccacagaattgcaaccccttgccaccaccaccaccaccaagattcgtatatgtgcctgtgccaggtgtaccaaaaccatacacttgggtatattattactctgctgctgaaaacagaggtgtggggttccttgttttggctggtttgggaggactctcaatggcaacactactcttggatgacatcatgaagctaaagctatatttctga

SEQ ID NO: 53323 - DNA, 215 bp, Glycine max
  Clone ID: PAT_MRT3847_19162C.1
aggaggcaagatggcattttaaatattaaatattaaaattgtctgatacgtcccgaagagttttcttagaagacttgctcagaaaacaaaaccctaagccaccaagtttgcttaaaattaccctttgcctttacacatgccccttactaacgagtcaaacccccctgccatcctttgtttgggccccttaatattccatgaagttgcttgagttg

SEQ ID NO: 53324 - DNA, 739 bp, Glycine max
  Clone ID: PAT_MRT3847_19163C.1
atgagggtgatgaagagaaatataatggaaggaatcccggaaacaatttgaagaggaaagaaagtggtggtggaaaatcagctttggatgaaatgatgagggaagaagagaagaaaaaggaaaaaattaatcggaaggattattggttgcacgagggaattgttgtcaaggttatgagcaaagtcttggcagagaaggggtactacaagcaaaagggtgttgtgcggaaggtgattgacaagtatgttggggaaatagaaatgcttgaaagcaagcacgtgctcagagttgatcaggccgagcttgaaactgtgattccacaagttggggggcgtgtaaaaatagtcaatggtgcatatcgaggatcaattgctaagctgttgggggtggatacagataatttttgtgctaaggtgcagattgagaaaggagcttatgatggcagagtacttaaatctgtggaatatgaggacatttgtaaagtagcctagtgagtttgatggaattaataactcgatggttctgtttatcagtatcttatattggatacaattcttttcttggtaatttatatttctgactataattgggccccaaacgtgcagaaaaagatggcatcatgttgcaggtgcaattagactgcagttttattttgtaattctgtggcgagtaaagttgaattctaattcttgctctttgttttctgttactttgaatgaactctctcctcccttgtgtg

SEQ ID NO: 53325 - DNA, 291 bp, Glycine max
  unsure (1)..(291): unsure at all n locations
  Clone ID: PAT_MRT3847_19164C.1
gcangcacgcgtacgtaagctcggaattcggctcgagcagttgatgaggcaaacttgggatnnnnctanancgtannnggnggngtngggntgncagncacnntgganaanntcacatncgaatgcaaatnggcngcnggtgccaacgganngtctgatgggaagctaantgtcagataccanaccaaaggngatgcncagcccaacccagacgncctcaaaattggcnaagtcaagtctgntgctcttncnnggncgttgaggcttacctntngccaatcntcattacan

SEQ ID NO: 53326 - DNA, 616 bp, Glycine max
  Clone ID: PAT_MRT3847_19165C.1
attgttgtcaaggttatgaacaaagtcctaaaaaggggtcccacaaccaaaagggtgttgtgcggaaggtaattgtcaagtatgttggggaaatagaaatgcttgaaagcaagcatgtgctcagagttgatcaggcaaagcttgaaactgtgattccccaagttggggggcgtgtaaaaatagtcaatggggcatatcgaggatcaattgctaagctgttgggggtggatacaaataatttttgtgctaaggggcatattgaaaaaggagtttatgatggcagagtacttaaagctgtggaatatgaggccctttgtaaagtagcatagtgagtttgatggaattaataactcaatggttctgttttattacatgaattgtagtattcgttcttatgtatctttctctagcgggtcatctttgtagcccaagtcatatcattatcttatattggatacaattcttggaaatttatatttctgactataattaggcccccaccgtgcagaaaaaaatggtggctgagaaggctgaaatatcccattgcaggtgtaattagactccagttttattttgtagttttgtggcgagtaaagttgaattcctatttttgtcc

SEQ ID NO: 53327 - DNA, 324 bp, Glycine max
  Clone ID: PAT_MRT3847_19166C.1
tttttgttggttttatgctggaatttgcattttttttatcaatttgattttttttttttttttttttttttttttttttttttgggaaacacaaactgggttactgggtaccctttttttgggtcaaaaacaaaaatggacacttttttgttaaaaaccacactttttttttaaaaaccattggacaccttttggttaaatccttcccaatgaaaattaattgtgggaatgggttgagttaaatttcccaaatcaaaaaaatttttttttaaattggaaacattaggggccggcccccggggactttttaagtttggtacaaaa

SEQ ID NO: 53328 - DNA, 1097 bp, Glycine max
  Clone ID: PAT_MRT3847_19167C.1
ggtgccacaagttggcggctaaggttggtagtgtggtgggccaaattgtggaggaacgaaaaagagatggtggttttgttgggaagaatgatttcttagcactttgctatccttgcccaaagaagaaagattggctgattcagatctggtggctattctgtgggaaatggtatttcgaggaacagacacagttgcaatactccttgaatgggttatggcaaggatggttttacaccaagacttacaaaagaaagcccgcgaagaaatcgacacgtgcgtcggccaaaacagtcacgtgcgagactcggatattgcgaatctcccttacctccaggccatagtgaaagaagttctccggctgcacccaccaagcccgctactatcatgggctcgccttgcgatccatgatgtccatgcggacaaagtcctcgtgccagctggcacaacagcaagcgttaacatgtgggccatttcgcatgactcgtccatctgggaagacccatgggctttcaagcccgagaggttcctcaaagaagatgtttccatcatgggatcggacttgaggcttgcaccccttcggggctggacgtagggtgtgtccgggccgggccttgggcttggccacggcccatctctggctcgcgcaacttcttcgccacttcatatggcttcccgcacaaaccgtggatctttccgaatgccttaggctttccatggaaatgaagacacctctgcgatgcctagtggttcgtagataaataaataaaaaatcgtaagcccttgaaccgaaccatgtttaatgtgcaattaggatgatcgagctttgtatctgttgtttgatgttaaatttggtactcaaatatctagtgaaatatttagagatgagtttatcgtataattagggagcttatctctaagttttatttcactttatttttaaagggtatcaaattattaaaataaatatctagtgccagttgactagaggtgggtgtaagaagagagtggcttaagaaggctttatgtatctttaaattgtaaaatgtaaattactgtaatgtaatgcatgcatttttcttcttgtttgttcgcccccc

SEQ ID NO: 53329 - DNA, 133 bp, Glycine max
  Clone ID: PAT_MRT3847_19168C.1
gaaaaaagaagagactagtatgctatggcgttctaccccagacgcaacaggtaaataaacagaatatgcagtgcccctctcgttcaaattgagaatggatgcgctcaaactgggcgatctaacatggagcccg

SEQ ID NO: 53330 - DNA, 354 bp, Glycine max
  Clone ID: PAT_MRT3847_19169C.1
ccattagaagaaaatctcaagccaaaagcttttttttttttgttttaaaaagcgcacctgtccatgaaaaacacaaaatccttactaaggaaccccttattaaacttttccaccaggcgcactttgggaataggcatcattaacattttttacatgaccccttttgcttgccttaccgggacaagcacataaaggcattactccattaaggcatcacacggtcctttttttgaaaaggaatcttttactctggggctgaaaaaacagttgttccttccccctggtttttcttcccatcaaataaacaaaatttttcataagatataagtttctaagttcataaagggggagggc

SEQ ID NO: 53331 - DNA, 249 bp, Glycine max
  Clone ID: PAT_MRT3847_1916C.1
agacggatggagagagagagagtgaaatgttttgcttcctctaatcttgctaatcattcgttctatcaaattttgcctaaaactcctattccctgttttagttaactcgattaacgtcaatctcaatcttctacagcttatcctatatctctcttttttcttctctttcctctactacaatttcaatcataactctctatcatctgataagcatatgatgatccttctgctggtttgatttactatcat

SEQ ID NO: 53332 - DNA, 295 bp, Glycine max
  Clone ID: PAT_MRT3847_19170C.1
gggtattttcacatatgaggatgaaaccacctaccctggggcgcctgctacccttgactcagctctatgtacagatgcctacaacgatttgaaaaatgctgtggaggccgtctggagtggcgaaaacctatttgggaactagaggcctggaaccatcgtgaagatcactgttctggaggatggaaaaaacgtgtgggtgtttcacaagatagaatcggttgacgaggcagacttggtataccgctataacggagcgggtggaagtatgttatccgacacaatggtaaatatcaca

SEQ ID NO: 53333 - DNA, 422 bp, Glycine max
  Clone ID: PAT_MRT3847_19171C.1
gagagagtgaaaaaaaaataagaaaaaaagaggaatgaacagtaaaataacgtgagatctacacttttttattctacaataattgcagtggtcttctgaagatgcttttcattttagcatttttgcttgcatgacttgacacactttgttaacaatgtttctattgtacatgtcttcagttgttcgccggcaatacgatgtcattctacctcccagttttgagttcctcaactgcgtgaaaaagtgcttctacctcgacctacagagaatgctctcctggttcaacgctgtacaaactcagagctatatcacttggttttctgactctcaggaagcactgctaatgctgttgtcaagaggagtattgaataggtgacaaaggtgatggcacaaattctactgcatgggacccttcaagccaa

SEQ ID NO: 53334 - DNA, 437 bp, Glycine max
  Clone ID: PAT_MRT3847_19172C.1
attcatggtttacagttacccccaatacaagagggaagaaaataaaaactaaaacaggataaaaatgacaaaaacaaactaagaaggggccgaaaacatatgctactttacaaaaatgacaagaccgaaaccccaggaaggaaaaaatttacaacctgaaaaatgtaataaacggcaaccggaacggctggaacggaagcaaggaaacctggaacctctttgacttccaataactccaaactggcaacaccgccaacagaaacgggggatatgagactaacaactcctactttttccacagcagcaacagaatcagctgcttcaataattggggtaaccccctttccactgagaacagccagatatgctgccttagccgctgtgcccacagcaaccttggcaaacttaaacactcccaatagtccattccataaaat

SEQ ID NO: 53335 - DNA, 435 bp, Glycine max
  Clone ID: PAT_MRT3847_19173C.1
gtcgttttaatgaatgccatttgattttcagctttgaccctcccaacaactactacaatcaccaccttaactgttcccgcacctaataccatcgtgttctgtcgaattccattaaatatcaactgcaataatttttgttcgttttctattcccaacaacaatcgacgacgttgttcgttccacatagctagggtttccgccaatgccgccggattcctccgagctagacctcgacgatcctgacatcgagtttgttgaggttgatcccacgggtcgctatggtcggtacaaggaagttttagggaaaggggctttcaagaaagtgtatccttttattggttctgattttttctacgcttaatcaataataatcaataaatattaatgtatgtaagtagcatggattcgttttgggaatctttgttgccattaact

SEQ ID NO: 53336 - DNA, 330 bp, Glycine max
  Clone ID: PAT_MRT3847_19174C.1
attaacactttcttagttcaatatggggaagcccttcactctctctctttcttccctttgcttgctactcttgtcgagtgcaaaaacaaatcttaaatactgcctttttattaaggggattgtaaggtcctccccccttagaataaaactaggctcccggggatgaagtttgggccattctttttattatcatacaaaatttttttctgtgttgttattgaataaaaggggccaatctcaacaccatcaggcttggcatttatgcgactttaaacgggggggagccttgttgatactcagggttcaccaaaggaccccaatttgcttttt

SEQ ID NO: 53337 - DNA, 138 bp, Glycine max
  Clone ID: PAT_MRT3847_19175C.1
ggcagttcaattccagaatagtgcattctctctgcgtatatccctacctctcccttgaaggttgcagatcttcggcaagaccctgaccggctagaccatcacccttgaagtggaaagctctgacgccatcgactacga

SEQ ID NO: 53338 - DNA, 119 bp, Glycine max
  Clone ID: PAT_MRT3847_19176C.1
gccggaccagagcaacttcggttctggagaatagcaatgcaagcattgactttaaaccacacaacatgccccacttatccagaagatataacggttctgtcgtgaaaggaaaccccaca

SEQ ID NO: 53339 - DNA, 555 bp, Glycine max
  Clone ID: PAT_MRT3847_19177C.1
ggaaacaaacctctgactaatagctttagcgaaaaaagggggaaattatttactttcaaaaagaaaaagtcaaaccttcaaaaaaaaaaaaaaaaaagaccgacctttgccttgtcgggggtgggcatcatatatctatgttttggaaaaagtcctattcccagaaacctattattttttccaattttagcatcccaaaccaggaagtaacctaaaggaaggtaccttctaaggtaaccaccgggaaaaaaaaggatccgtaggacaaaaacttatcccctggagggggtttcatctactgagtatggagggggataagttgaaggaccaccatttctgtagccgaataggccatagctagcctgccctgaataaaaaccactaaaccggtaaccaaacggccccaaattgtcaacaggaataaagaagggctgttgggttattccagccggcctttgaggggggaaagttccataggttgctgcataaggattaccagtggcaccattgtatatggtttggctggggtaattgaatggaccaaaaaattttgcc

SEQ ID NO: 53340 - DNA, 436 bp, Glycine max
  Clone ID: PAT_MRT3847_19178C.1
gagcttacatatcgcccccttcttttgtgtcgtggttgccatgtgtgtcgttgaggaatctcattttttctgtgtcgtaatgaaggatgataatgccgacctaattgcaagactgggttactatgaaatggtgctgtggttcattgatcatagcgaggaaaaggactccggcttctgttgacgattttgcagacatactggagaagattcatctgatcttcactataattctttattaactctttgagacaagtgaacatgatggactgagattccgaagctactgcaaatcatatacctaagaagcctctttgcatgccgctgtaatctagctgcaagcagtattatgcagcatctggaagattactataggaacctgaaccggccaaggccctttcagactccttgacaagtgatcatgaggcagatcatattg

SEQ ID NO: 53341 - DNA, 264 bp, Glycine max
  unsure (1)..(264): unsure at all n locations
  Clone ID: PAT_MRT3847_19179C.1
ataaagttagtctccgantctctgttttctnttataaattgattacattattagtgtatagacaatccaactcaaggtgtggtactgtattttattttaatncatatatgccttgtagactattcgtgtnattgcccttcatctagttatcnccacttgggaattncatcacggnataatnntgcncatgtttaacttcattttaggatangggntgcgacacattttccgaaaactgtncagangtgcaagcgtanattttaa

SEQ ID NO: 53342 - DNA, 323 bp, Glycine max
  unsure (1)..(323): unsure at all n locations
  Clone ID: PAT_MRT3847_1917C.1
cgtngaagaagcagcgatcgtttctacttcctacaccaccactactgccgagggacagggtctgttttaagagaacaaagcccaccttcttttgataaatcacaacatcgtgagccctccaagataaggagcatagtgcattacctgaccaaagcaacccacggaagagaggtgacacatctcctgtcattgataggttggccactcatcaatataggtctgactacactgatggtactagacggaaaagtaaaagccctgctatccctgcaagggaaccgaatcagggtggctatgatagccctaaacctaatggacatagc

SEQ ID NO: 53343 - DNA, 124 bp, Glycine max
  Clone ID: PAT_MRT3847_19180C.1
tgccaggtcacagatggtatgagatgttcctacttcctatacatggatagatgctgtcaatgagcactctatagctttatcttcctgtaagccgtcacagaattggtaggttgccgactttcgg

SEQ ID NO: 53344 - DNA, 298 bp, Glycine max
  Clone ID: PAT_MRT3847_19181C.1
ggctcgagctcgagccgaatcggctctttttttatctctctcaaaacaagttatggtagagattgtaattaattctacaaaaccggatcacctttggaccgatggcttctaaaacccgataccttagtccactctcgttctttccttttcggatgctattgatgggactgtgaattggtcaccggtctactcctttttagagcttgatgctaagtaattaaataacatacacgtttggttttttgtttttaccgaagggtttttattacttcaacatcccccaacgaggcataggttg

SEQ ID NO: 53345 - DNA, 435 bp, Glycine max
  Clone ID: PAT_MRT3847_19182C.1
acggctgcgagaagacgacagaagggatcatcagaaacttctaaaggtttattttacgagtttgttatgtcagcaatactacatattgggaacacactaaaattggactttgatgtataccaagttaatataattctactatgtaaggttcttcacgataggaagataaaatgaacctatatttttgcaatattttatgaaatttactatatatagctgagtgtgtttaatgtaatgatgtaattgaagccgctcaaaaggctgtcactgaactcacctgtgacccttgaaattggaagacaaattaatttgcctgacagtggataactatgtttatgtctcactttgtgagaaataagttcatatgtacttggtgtattatggctattggaataggtatattggtatcaattttgatatccagtgatttagttg

SEQ ID NO: 53346 - DNA, 569 bp, Glycine max
  unsure (1)..(569): unsure at all n locations
  Clone ID: PAT_MRT3847_19183C.1
aaattcaagcttatttcccaatcccaaacatttactagcacttatatagtgcattactcaattcaaatgacttgataccagcaatatctgactctaaatgatcttcatataaaattcaatatgctatcaaacgaggttttgaaacctagtttcatggaattatctcaatcatacaatcttgactctagatgatctctctaaattgtttgcagtttccggctttaaacttttggaaaactcagtactgcagctatatcagtcttgaagtaggaaagctctgatggttagccctcttcanatcttattcaaatgaaacccctttttgtggtacaacccgaaggaaaaacagaaacagctttaaaaaaaacaaacttcatctttcttctaatcaatgaagaagcacaaacccccaatttggcctcgaaagattaccatatgacctcaatttggtactggtaaatggtaatttcagggctattttgaagcaaaaaatcactatcaaattaatgcagtagtaataatccttaccaaattcaaattctgaaaatcatcaaggcaccagaatagct

SEQ ID NO: 53347 - DNA, 1927 bp, Glycine max
  Clone ID: PAT_MRT3847_19184C.1
cccgccggcgagggctttgttaacgcttagccatcggagatagctggcaggtaattccaatatattggagaaggcattaacaaacaccgtcctgcatctaagatgaaaaaaaatgttcccaccatcagtagatttattatctctaaggcttgtgtcgtcgatggaagcttatcaccaacttcaattgcatggaaggaattactttactggtttcagtcgatttcgatggattccttggcaggtccttctctgtttgcggcgcgcggatggaaatccattctgttggtggttgaagaaagcacaggggattcacaatgtggagggtgacaaaaactacaaagcctacatgaaccccgattacttcgatgctcatctcactcccttgggatggcaacaggttgacaatttgcgtaagcatgttcgcgactctggccttatcaacaccattgatctagtcattgcatctcctttgatgaggactctacaaacaactgttggggtatttggaggtgagggctacacagataaaacagacgtccttcctcttatggttgcaaatgcaggaaatagctaccgtgctgcaatttcaagtctaaattccccaccaattgttactgttgaactttgtcgtgaacatttgggagttcatccctgtgacagaagaagaagtgttagcgagtatcaatttctttttcccgctgttgatttttcactgttagatagtgatgaggatacctggtggaaggccaatgttagagagacaaaggaagaacttgcagctaggggggatgaagttccttaactggtatgagtttgttataattagaaacttctaaaggtttattttttgagtttatgccagcaatactacatattggaaacacactaaaattggactttgatgtgtagcaagttaatataattctactatgtaaggctcttcgctataggatgataaaataaaccattttttaaaaaatattttatgaaatttactatatatagctgagtgtgtttaatgtaatgtgattgaagctgctcaaaaggctgtcactgagctcacctgtgacccttgaaattggaagacaaattaatttgcttgattcctttgtctgatatttcagtgggtaacaactatgtttatgtttttctttgtgagaaataagttcatatgtacttggtgtattatggctattggaattggtatattggtatcaattttgatatccagtgatttagttgaagaattatgtaattctctctcttcaggaaaaaagtggtaattttctttttctgttttaacttttaacctcccattacttgtatgcaagaaacaggaaattgccatcaaatgtgatgtaattcaaatctgtgagactgtgtttctacttttcacttcatcacaggttgtggacacgaaaagagaaggagatagcaattgtgacacatagtggattcttgtttcatactctgaatgcctttggaagtgattgccaccccttggtaaagaaagaaatatccaagccctttgctaattgtgaacttcgctccatggtcattgtggatagaggtatgataggattggaacaatcaaccactaactatccaggcaagataccttcagggctggacctccctagtgatgttgcagatgagaagtctgagaaataatggatttggcttcttctacttgtttgtatgtgttcaggaccattcaagcattggttcttctatttgaagttcactattacaaaatctaacatgattatgtcagattatacaaactgtgctgattctgtcttgaaatttatcaattattgtctgcagaaaatatttgttaacaattataaccttgttggaaatcagatgacccatgtgtggcaacacagtcacaaaacacttttgtttgttgatggaacagtttcgg

SEQ ID NO: 53348 - DNA, 169 bp, Glycine max
  Clone ID: PAT_MRT3847_19185C.1
tacggctgcgagaagacgacagaaggggttagtactttaataaactatcacatttttaactatggaaacttctaaagaaacataatatagtttacaaatagattaaataatatatccactgaaagtataaaatgtcatccaatatgcactgattaattaaagaatttaa

SEQ ID NO: 53349 - DNA, 656 bp, Glycine max
  Clone ID: PAT_MRT3847_19186C.1
acgagctcacagcaccatttgtgtacttcacttccatcatcaactcagccacctcttatcttctagtccggttcttcaccggcttctccctcgccacctttgtgtccacgcagttctggatgagctccatgttctctgctccggtggtcggttcggccaacggactctccggtggatggggaaaccttggaggaggggctacccagctcatcatgccccttgtgttctccctcatccgcgacattggcgctaccaaattcaccgcttggaggattgcattctttgtccctgccatgttccaaatgctcacagcattctcaattctgatatttggtcaggacatgcctgatgggaacttccgccgcttgaagaagtcaggggaaaaagccaaagatgatttttcaagagtcttatatcacggtgttacaaactataggggatggattctggcgttgacttatggatactgctttggggtggagttgaccatagacaacatcatagctgagtacttctatgacaggtttaatctgaaactcacactgcttggaatcatgctgccaggcttgggcttgcttacatattttctaaggctggtgggggtatatatctggatgtatggcgaaaaaggttgcatgaagggaaaattgtgggct

SEQ ID NO: 53350 - DNA, 255 bp, Glycine max
  unsure (1)..(255): unsure at all n locations
  Clone ID: PAT_MRT3847_19187C.1
ccattagctggcattggttatgctatgnccttcatttctgttcaacatctgcngttgtctcccttgtataattctatcctggggtaganaggtatgtcacaaaacagaggggaacttctgatctantaatgcttgccgattacagttcaagatgacgaaanataaaaganatggnaatggcaactcagctgtgccgaagtngagtgtggctgcaggactgaaaaagaanatgtgatatctggagaagatgcggtt

SEQ ID NO: 53351 - DNA, 408 bp, Glycine max
  Clone ID: PAT_MRT3847_19188C.1
accaccgctgttccataatccggcccttcaaatcgccatttcttcctttctcaccaacaaattacaaaggcaaaaaatatgggaaccagggaacaagtttgtccgaccaatggggaaattgaaggtttggcaattattactaagaagaagaagaaaagattaagattaagaagaattggaacaacaagaagatagcagatgcaaaagctgttgcatcaactggaatggacaaggccaaaactgcaccaattgtgggtgcccacaaagtgaagagtgtaacctctgctggcctcaaatgggtcacgaatcactatcacaaaaggacttccaagtgtaactcacacactcacatgcgtcttggacagtttcacatccacagctttggtaaataatacatgatgctctact

SEQ ID NO: 53352 - DNA, 462 bp, Glycine max
  Clone ID: PAT_MRT3847_19189C.1
gtggacttaggggaccagtaataggttccatttacaatgagaaacgatagctgtattgttgtaatgccacaatcttctttggggcacattatggacccatgggttcctgatgcaacatctaccaattctaatgcttgtggtcaacgaatacacctaacaaacgtagattctggctcacatggataactctaatatcatacatgacgactgacatgggcctacccctaatcatggtagaagaaaataccagctggacctgatgtatgttcttgataaaaccttcttttgtggacatttattatccgatattatagtgggtgtactcaccttggcgtagatactcataccacatggatgctagatgctcatgaccttctcactcacatgatgattctagagatagtggtaccagaggctgctatgaacactctagacatggcgcatatagccttgttcaacata

SEQ ID NO: 53353 - DNA, 193 bp, Glycine max
  Clone ID: PAT_MRT3847_1918C.1
cccacgcgtccgctcgcagggtattgttggatgtgtacccaaaacatttcaagaacggtgatgtataatgggtcggtgataatcaccctagtaaataaattcgctttgtgttaaactcaattgtgtcccattaataatagcactctaatctcccacctacgtccgttctgaaaaggaaatgagcattctgcgt

SEQ ID NO: 53354 - DNA, 1825 bp, Glycine max
  unsure (1)..(1825): unsure at all n locations
  Clone ID: PAT_MRT3847_19190C.1
gcacgaggattggtgcatttcacgacagctatggtggggtcaccaaatacctgcatggtatgtcactttggaggatgatgttcttcgggaatttggtgcttataatgatcattgggtagtggcaaaaaatgaagaggaagctcagaaagaggctagccagaggtataatggaaagcagtttcatttaagccaggatcctgacgttcttgatacatggttttcttctggtctgttcccattatctgtgctgggatggcctgatgacacagaggacctgaagacattctatccaacttctgttctggaaactggccatgatatcctctttttctgggttgcccgaatggtgatgcaaggattgaagttgggtggtgatgtgccttttacgaagatttatttgcatcctatggttcgtgatgcacatggacgcaagatgtccaagtccttagggaatgttattgatcccattgaagtgataaatgggatatcacttgaaggtctacataagaggttagaggctggtaacctggaccccagagaactagccactgctttagagggtcagaagaaggactttccaaatggtattgatgaatgtggtgccgatgctctccgttttgcactggtctcgtacacagctcagtctgacaaaattaacctagatattcaaagggtggttgggtatcgccaatggtgtaataaactgtggaatgcagtacgatttgctatgagcaagcttggggatgattatatccctcctgctaatttgattccagaggttctcccatttagctgccagtggatactctcagtgttaaataaaaccatatccaagacagtgaattcacttgaatcatttgatttctcacaagctaccactgctgtgtattcttggtggcagtatcaattgtgtgatgtatttatcgaagtgattaagccttactttactggtaatgatcctaagtttgcttccaaaagacgctttgcacaagatactttgtggttttgtctggacaatggccttcgattgcttcatccctttatgccttttgtcacggaagaattatggcagcgccttccttcacccagggaatgtgagagagcagaatctatcatgatatgtgattatccatcaactgtagagggctggaataatgaaagggtggagaatgagatggacattattgagtccactgttaagtctctcaggtcactggcaaaagaaagtcgtgacaggcgaccagcttttgttctctgccgagcaccggtggttactgagattattaacagccaccaactagagattgtaacattagctaatctatcctctttgacagtaatcactgaaagagatgctgttccatctggatatgctgatgctgttgtaaatgaaaacctttctgtttatttagagcttcaaggaactaattctgcagaagcagaggggaagatcaagaagatagatgagctgaaaaagcaaatagaaagactagagaagattatgaatgctaaaggttatgaagaaaaggttttgccaaatattcgagaaaagaaccaggagaagctagattcccttaagttattgcttggggaaatggctggtctgactctctagcttcaaagtatgaacttgtttgatcaatttttttactttacatgcttgtattatggatatttacagttcgaactaggtatttttgtggccaaactatattgcatgtcttttactaaatattagttttgctaaatcaatacaaactttaattatcttttgcctcaaaaancncccaaannttcccttcccncgcgtccgcccacgcagccg

SEQ ID NO: 53355 - DNA, 396 bp, Glycine max
  Clone ID: PAT_MRT3847_19191C.1
acatggtatggggctctgtatggagaatcgtcgcctataatatgactgatttacacgagaaagagactatggacaccttggatctgtgatcaccgatcttgggctatgggcactccgacgaagagttggttatggatagtatcatatgcttcatgaatagcgaggagggacactacctacgcggcgctaacgtgggtcttctggctgattctctgcaccataaagtggaggaggaggtggatcacgaggttatggaggactacgcgtgctacacacccgggtatgatgaggtgaaggacatgggatacacacactcgatggtgcgcgagagcatgaagctgaccccggcggagtcgcacgataccattgaagaggggggagactactcctaccctg

SEQ ID NO: 53356 - DNA, 765 bp, Glycine max
  unsure (1)..(765): unsure at all n locations
  Clone ID: PAT_MRT3847_19192C.1
ccacgcgtccgaactccttcattttttgatataaagatataaataaaaatataaatgttttttttttgttatacaattttataagagatgagcaacaaactattcaactttcagaggctcgagattgagagctttttctgttgttgatcaagagttaactcgaccaacaaaaagagttcaaaataatgtgacaaatgatgtcacaactattcaactattgaagagtggactagatttcaagatacattagcagtgaatatgtttgctaattatcaagttagaaaactttgcttaggaagtgttttttttatgtaatttgttattgaagagagacttttttttatgtatttggtttaattacatactataggttgctactttaagaaaaaattttggtgactgccatgtgtttcttcagaaaaataaatatttatttatataatctataattgtgtattgtatgtgatatttgttatgtgcaattaatcatgttaatagaattagaaaaaaactcaagtttcacattgactagagatagtatcaagatagagcatataaggtgaggacaacccttactctatgaactagcttttagggttgagttagatgaggtgactttgataccaaacctttataaacaacantggactaaagcccttaaatgtaaaatctctggagacagtagtttacctacacggtaatcaaacttagcccccacccggtgtttttgtaaggtggcgaaaataattagagccaagtcatgtc

SEQ ID NO: 53357 - DNA, 984 bp, Glycine max
  Clone ID: PAT_MRT3847_19193C.1
ctgtgatgacaatagcatttgaatttgcatttgaaagccatatgcaagagcatgtaacatctatggcacgccaatatgttcggagcattatatcatcagtccaaagggtagcattagcactttctccttctcatttgagttcacatgcagggcttaggtcaccattgggtactcctgaagcacaaacccttgctcattggatctgcaacagttataggtttgtcaaatttactgtctttgcatactgaggttgaggatcatgcaatgcattttaccctgtgcgataggctgatagcattgttattcttgatttttataagagagccaaaattaatatgctctcattaaataaagaaactaacttaatgataggtttggtgagttgcatgcagagtgaaatttcctctttcctgattgtcagttcttgtcttctaaacaaatcccacctcctttatgtttgcatatttgcatagaataatcttaccagcgcagatgctgagttctttaagatgcatgggcagcatggcaccaagttttgaagtagtttattacttctaagtttctaactggctggcactggaagtgatgcaaatactcataaattgtaaaatcttgtgtcatcattcatcaaatactctgacaaggattaatcgagagacttcgatctaaaattcaagacctgcatatgaattagattgacatttttttcgtctttcatgaactcacagtactcacaaatttgtgaaccagaatttccctccctatttttatatttttttaaaatgctgttaataaaatccattgttgctttggttcaagctataatggagcatagggtttattttctaatgtagtgatcaattctgcctttttgggcttctcttctccttaaaaggaaaacttagcccaaacaatttcttaagctcttgaatatatatatatatatatatatatatatatatatatatatatatattagagaac

SEQ ID NO: 53358 - DNA, 242 bp, Glycine max
  Clone ID: PAT_MRT3847_19194C.1
ttattaccatttcctcgacctctttcgacaccatactgatacacacttaataatattatattataaattatccaccaaattacactaacccctttatatatacaacttaatatctttattttatcaatattaaattaaaatcatttgcaaccaatacctctttacatatttcattacaaatattaatttccaccgattatatatacttatccaaaatattcatcatcttaaattcttctttt

SEQ ID NO: 53359 - DNA, 425 bp, Glycine max
  Clone ID: PAT_MRT3847_19195C.1
cgccggacgcccggggcacagttccggggttgaccacggtccggcttctcatttgttggggttgaatgtcccacggatgagaaactgcctggtggcagaaatttcggcagcgctctgacgcgcagtgtgactatattcgcgatggtggataatctggcggctccgtgacaagttgttaaagttacagaggattggtatgaagaaaagggacaagctgagctggcaagctagggtgaacccatactccatggaatggactggttaggccaataagggactgaccaagggcaacgatattctgtgtcgcgattgtgctaagaatgacggtttgtttaccaagcggggcttgagcaagatgggatatatgataaacagtgtcagaggcggtgatgaaaaagtgatgcgtgaaaggacacacctgctgt

SEQ ID NO: 53360 - DNA, 627 bp, Glycine max
  Clone ID: PAT_MRT3847_19196C.1
ccacgcgtccggcactttgcagtttagtttctgaggagcgtttttttttttttctttcttatgagtgtgtgtctgttcttagttgctgttattgttgttcaagtttcggttactactactactaccacatgtccatgccccttcaatttctgttcaactttgtgactttttgtttggtttctaaggaaaaagattgcaacttgtttctgggtctagtttgcttttggttgggtttgttagtcaccgctggcaactcggaatagtgggtttttttttggagggggttttttttttcttcttttggaggttcaaattcttgttctgattcgtgtgaagggggaaaatttatgggtgctgagaggaggaaaaagatgggatttggtggaataaatgtaaaactattcggcgacaacatgtctgcttgcttttttgggacggctttcttgtgaagattttgggtttaaaaggttgaggaagatgcttatgccttatgcttatgcttgcaacttttttttttaaaacccattttagcatcaagtataaaagtttcttcttggtcttgtttccaagtgtttgaggtgatgggggttttgagcatgtgagtgattcatgcctcattttggagct

SEQ ID NO: 53361 - DNA, 376 bp, Glycine max
  Clone ID: PAT_MRT3847_19197C.1
ctttttgtaactccgcagaagtgatgtctttgatgggaaggccgcattttgtattcgacactccagccactgaagattgttaggctggtgagggcgctgaatattccattgaaaacatatatattctagcctgatagagattcctgaggagggtgttaggaaggttctatcctatgggagtcttcggcctcatgtgacattgaagctcttgttcatgacaggtctgatgaacccataggaggtacttcgttcgcccttttggttgagattggtagccatggagaagataccggatccgtggagccgtgtcttataactgcaactagagatgctctggggtcatgtacgatggcagtacatgagcctacctaggtta

SEQ ID NO: 53362 - DNA, 358 bp, Glycine max
  unsure (1)..(358): unsure at all n locations
  Clone ID: PAT_MRT3847_19198C.1
ggtggagaaggcgaagggtaggaaggaggaggtggttaccanagagtccaccatttacctccacatgcgcctccatggctgcacatttaagaagaaagctcctaaagctattatggagataatgatatttgcccaaaaggccatggggaccaatgatgtgagggtgtatgtgaagttgaccaactttgtctggcgccattgaatcaggagtgttccaaggaggattagggtcagaattgctcgcatgaggaatgactatgaatattccgatgaagagctatgctctattgtcaccggtgttgagattcctatcgatgagctcacagtgttacgcaccaagggttttgatgatgaggat

SEQ ID NO: 53363 - DNA, 862 bp, Glycine max
  unsure (1)..(862): unsure at all n locations
  Clone ID: PAT_MRT3847_19199C.1
cttggctttagcggtgaataattcacaaaacatccttgtgttgttaacaaagttcgatcttgagtaaatacctcatttttattctctgttttacatgtgaaattctaatgtctataaataaagattttcaatattggtaatgtcattccttatttattcttatgtttctgattttgatcttctaatttattcctaaataggactataggagacattaacataaatattaggagattgtttaatacaaattatctctcccgctctgcacacacagttttgagttgcattcttaaataccttatctttaatctctgttttacgtgtgaaattctgattatagaagacattaacgtaattgaatctttggagattgttatactgatgtctataatgaaagatttaaaatattgataatcccattccttatttttttcttatgtttgttattttgattttctaatttattcctgataggagacattaacataactgaatctttggagattgtttaatatggatatctcccccctcccccaccccacaacacacaatgtttcagttgcattgttaaatgccctatctttaatctctgttttacaggtgaaattctgatttttatagcaaaagattttcattaccattccttatgttttatgtttgttattttgatcttctaatttattccaaatcagagacattagcataactgaatcttangagtttgtttaatacaaattatctctctcctgacacacagtttgagttgcattgctgngtgttctattttgtcattgtcacgaacttgaaactntcttttcatgtggggaacaatcacnagcaaaataataccatcaacaattga

SEQ ID NO: 53364 - DNA, 592 bp, Glycine max
  Clone ID: PAT_MRT3847_1919C.1
cctcgtgccgaatttattctttaatgagttgcgacatccgcttcgccaagttccagtcatcttcgaatccgatcctgcaggtcaaaacagaaggccagatgctagttgaacgtgaaaacttcaagagaatgcaaatcgaaaacaacaacagcgatttcatcggaggcattttcgaaattattcgaactatcaaggaccctgaacatccgtataccctcgaacaacttgatgttgtgaacgtcaatgacattcaagttcaagaaaagaagggcaaaatgtatgccacagtgtattggaagccttcagttcccacctgcgcatttactattcatataggactcgccatcctagtgaagctcgaaagaaattttggctctatgaacaacagcatcaagctcaaactgttaataaaacctggaacccataaacaacagaaaataatcgataaacaactgaatgataaagaaagaataatcgctgctaaagaaaatgagaaccttatgagctcaatcgaagggcttatttcctaaatttgtgcttttaaataaattaacatggtcttccgttaacacagaagaagtctttattaata

SEQ ID NO: 53365 - DNA, 577 bp, Glycine max
  unsure (1)..(577): unsure at all n locations
  Clone ID: PAT_MRT3847_191C.1
ccacgcgtccgcaaatctctctctatagcttgcaacttttccaccttcttctgctgctaaaccctagaaaaggctactactacaattcaaccctgctccctcgtacactcatgtgaatctccaaacattttcctgtcgcctcgggattctccaacaccttcttttgtccgctaattcaacctcgtacgctcccacggttttctgtggtgtgtaagatttgagggtttgacttgagcttttgttttgaatggccccaaattgctgattcttgtttgtagaggagaaaaagtggcaatggagagctctgctgctatggaggggtggtgacaggatttacgataatggtaaagaggatgcgagtgtgagcaatcacattgacatacttaaggaaatggactcctttctggaggacattgatgagngggttgattatatctaggatggntggggtgactctgtcattaagggcatggttaatgctgttgaggagcangcggctgagcgaatcgctcaaaagattggaagtgggtgggctaaagaaaattctagacagtttcgggtgggttcggatgaaact

SEQ ID NO: 53366 - DNA, 688 bp, Glycine max
  unsure (1)..(688): unsure at all n locations
  Clone ID: PAT_MRT3847_19200C.1
cggcaattttgagtaccctcctttggtttttgttcatggaagctaccacgctgcttggtgctgggctgaacactggttgcccttttttttcatcttctggccacgattgctatgctattagcttgttaggacagggtgaaagtgattcacctcctgactctgttgccggtacacttcagtagacacatgcaagagatgttgcagattttatctgtcgaaatattggatcaccacctgtcttggtcggacattcatttggaggacttataattcaatattatatttccaatttaggaagtgacgaactcaaagaagatttatacccaaagcttaaaggagctgtccttgtttctctgtacctccttctgagtgggattgcgttatatctttccaattgtgacacgcagcttggcagcaaaagcctttcagacctccctatctctttgtagggagacatttttctcagccactatggaagatcatgagcaaaaacgttaccgagctccctttctctatgtatggagacagttttctcagccactatggaggatcatgttgttagaagatatcaagagctaatgaaggaagttccaggatgcgcattgttgatttaagaaagctgaatgcatctcttcagtttctcagtgccaactgcccttttgaaaattctgngtgggtgcaaagatga

SEQ ID NO: 53367 - DNA, 435 bp, Glycine max
  Clone ID: PAT_MRT3847_19201C.1
cggggtcatataaaaggggtcagggcccccaatttgaatttaatattctcctggttgaattggaaaaccaaagacttttcccctttggtcaattacccattttaaaaacctgaaaaccacccggccttttttatttgccccccccttttttggtttacttcatttatttttaacttcccaacctaagggattttaaaaattttaaaattcaccacccttagttattttgccaaaaattaagggttaaccattcattaccccctttatattttaacccttttcccgaccttctattcattaataaaggttttatttgaccaccaaatcttgtttggttggattaaggataaaaagcgtttattttatttactggccgtcccaaacaaacctgaaaggggggtaggtccaaaaaaaaaggtaaagtaccttgcaggg

SEQ ID NO: 53368 - DNA, 227 bp, Glycine max
  Clone ID: PAT_MRT3847_19202C.1
ccgcttggaaaaaaacaccaaaagggatctgtcattttattaacacgtaacagagaactgtggaggggaagctaaaggcttcctcaatgatctctaccccagctgttaccactttcaaccgtgccactgatggcatggttgctccattcacttgcctcaactacattgctggcttccccaccagaaagaccaactatgactattcctccattgctatcaacaatgga

SEQ ID NO: 53369 - DNA, 404 bp, Glycine max
  Clone ID: PAT_MRT3847_19203C.1
tccaatttaaattttaaaaatgacttttattaacttaagaattcaattatcgaaggtgaattatttaacaattcaattggattgttcaaattgtttcaaaaaaatggagtacttactcccatttcttatttattattgaattaaccgatcaactagctttgttatcgaacatttcttttctatttcaaaaattttccggaaaaaatttgaaatctattttatttgcgaatcaatcctacttcttctggtcccgaaatttttgctcttgataaaaaaaatctggtacttttcttccaaataattgggccggtactttattatactttttccccaagttatattcctaatatttacaatgctcttatttttaatggtttaaatacttgttgttaacaaaataattt

SEQ ID NO: 53370 - DNA, 130 bp, Glycine max
  Clone ID: PAT_MRT3847_19204C.1
gacattttctacgtattgaatctcaagattctaagagagattttgctgctctttgaacaatggtgtttgcttgattttggatatggcgctgggctcacatctcatcacccttaacctctcagacactagt

SEQ ID NO: 53371 - DNA, 156 bp, Glycine max
  Clone ID: PAT_MRT3847_19205C.1
gtggctgtcttgtaggtgacagtccttgatttcatcttagctatactatagctcgaggtggtggaagtatacgtgcgctttgttcccacgccctaagacctctgacgagtgtctacgcatacgttaagtgttatcatttttttaggtctgtactgt

SEQ ID NO: 53372 - DNA, 346 bp, Glycine max
  Clone ID: PAT_MRT3847_19206C.1
attgggcctacaataagaggttgacatcgtctattacattaaatgctgtgaccgccataattcaacaatgaaaggttctacgtgcccaattattttaaacacccaatgaacttgcgaacggggaccaggtttgccactaagcattggtagcaaagcattgaaccatgcttccttaaagtgcattggaaagaaccaagaccgttgaagtgggcctttgaaatttttccagactgcaatacggacgtggcaaccttctgaaggaaatctcccaggtatactggagcctgggggaaccatttttgatcatccattgaatatttccatccataccgtgcttgaaaaacct

SEQ ID NO: 53373 - DNA, 973 bp, Glycine max
  unsure (1)..(973): unsure at all n locations
  Clone ID: PAT_MRT3847_19207C.1
ccgggcgtctgttgacgcgaccgcccacgcgtacatacggctgctagaagactccaaaagttgagagggacacgaactcaaaccgtttaagcttctccgagttttgacctacaacactctcgaatcccctcttgtgtgttgtagccgccccgtgaccatcaatggcggaaactgctgtcgacaaatcccaatctctcgctgaggaatattatgtgaaggataagcaaacagctgtagttgaaaaacctgttgaggtcaaagaagttgaaaacccagaggaggctgcttctgaggaaccagttgctgagaaaactgtggaagaaacaactcctgttgcccctgcagttgctcaggaaagcagtgaagtcacccctcctcctgctgaagaaagcactgaagagcaaagtagtggaaatgttgatgaaaactctggcaatgaagatgtagctgaagagacccctgaaattaagcttgaaactgctccagcagatttccgttttccaactacaaatcaaaccaggcattgctttacccgatacgttgaatatcatcgatgcgtagctgccaagggagaaggtgcaccagaatgtgacaagtttgccaaatattatcgttctctttgccctggtgaatggattgacagatggaacgagcaaagggagaatggaacattcccaggcccgctgtaggtggtgtgcataactgaaatggctgcacaattcgtttttcagtattatatttcaaattgctagagataaactcccatacatttggggaatgtacgcattggcctaataagaaattttggatatatgtttgaactaagcttgagttatacaattttcaggaaacgcacctggtgaaatgtccagagatatatgctataatttaactggattctttaagccgaggattctttggtattccaaaaaaaaaaaaaaaaaaaaaaaaaaaaagcggccgctntagagga

SEQ ID NO: 53374 - DNA, 124 bp, Glycine max
  Clone ID: PAT_MRT3847_19208C.1
agagaatgggaccaaatctggaacgagtgagaggaggggaatcgcggtggggagactcgacactgacacgaggtgacaatgggtcttgagacgaagaattggcaggagatcacaggttgaacac

SEQ ID NO: 53375 - DNA, 130 bp, Glycine max
  unsure (1)..(130): unsure at all n locations
  Clone ID: PAT_MRT3847_19209C.1
gngtgttgtngttgagtgtcgccgcgttgtgcctctttgcccaatgatncantancagccaanaggcttaatcagtctggnnnagcnagactggagcacactttgtnctggttcggtgcggatnaggttg

SEQ ID NO: 53376 - DNA, 248 bp, Glycine max
  Clone ID: PAT_MRT3847_1920C.1
ccccacccacttgtccaggtgcttcatgttccgctgcctcttctgacacccaaggcgccgtcctacctgagtgggtcaatcctacctggccaacctgccacctttctcgctcgcccttccattcacatgataccggcctcaccgatccattctaggccgttcagatttcaccctgtcccacgtgctgtcctttacatgatcttactaactgcacctgcttctgctggacctggacctggacctgggcg

SEQ ID NO: 53377 - DNA, 1563 bp, Glycine max
  Clone ID: PAT_MRT3847_19210C.1
attgaacttagccatcattccctgttttcaagtcatggctgccctgggcatccatagatacctctgaaaaccaaattagactcttgcaccgcaataatggcaataaaatactagcataatttatttgtgagtctcaaaaccttagcacacagtatatatacactgcatagccttggggtcttcaaaatcatcaattcaatggcttccctcatgagcaccatcctcatgcaaaggtcttcttctacttcacttgctgctgggaggttgttctccacaacaacagcaaccattattgattccccttcacttgctcagagaatcagagatttgcctaaggacctccctggaaccaacatcaagaaacatgtttctcagctcattgggaggactccacttgtttatcttaacaaagtcactgaaggatgtggagcttatgttgctgtcaagcaagagatgatgcaacctactgccagcatcaaagacagaccagcatatgcaatgatcacagatgctgaggaaaagaatctgataactcctggaaagacaactctgattgagcccacgtcaggcaatatgggtatcagcatggcatttatggccgccatgaagggatacaagatggttttgaccatgccctcttacacaagcttggaaagaagggtgaccatgagagtgtttggagctgaattaatcctcactgatccagccaaaggaatgggaggaacagtaaagaaggcttatgaacttttggaaaacacaccaaatgcccacatgctgcaacaattttcaaaccctgccaatactcaggtgcattttgaaacaacaggtcctgagatatgggaggatacaaatggacaagttgacatatttgttatgggaataggtagtggaggcacagtctctggggttggacaatatcttaaatccaaaaatcctaatgttaagatatatggagtggagccaagtgaaagcaatgtgctgaatggtggtaaacctggtcctcatcatataactggcaatggagttggattcaaaccagacatattggacatggatgttatggaaaaagttcttgaagttagcagtgaagatgcagttaacatggctagggtgttggcattgaaggaaggactcatggtagggatatcatctggagctaacacagttgcagctctcagattggctcagctgcctgagaacaaaggcaaacttattgtgactgttcatccaagtttcggcgaacgatacctgtcatctgtcctgttccaagagcttcgtcaagaagctgaaaacatgcagccagtagcagttgattaattccatacataagtttgttgtggttacatggagcaacctagtttttacaatcctgttgtagcaaaaattgttaacatcatcttacaattcggccatagcaaaaattgtcaaccaaagctgtgttaattgggaaaaggttttgatacagcttacaataagagctgtgttaatgttttgtattgttctttatttttcatttttaatcgaaaaaggtataaagcaatcgaagtgttctttatcgataaa

SEQ ID NO: 53378 - DNA, 583 bp, Glycine max
  Clone ID: PAT_MRT3847_19211C.1
gaatttctggttttctttctgagtcattattaactagccacctcggatcactcacaatggatgaaagtgaagatggtaggaaagaaacttcatgaatgaaagtagtgcagacagtttcagagcgaactgcgacacctgtgcttaatggtgatatacctgatgatatctgccttaaggattctcttaatgctgcccgtaatgctacacacgctgctgatcgtatatatcaagtattcagaatgcagtcatttcagaggaagcagttagctctgtatgaagatgatgaatttggattgtcagatcaacaagctctttctctcctagcttctaaggcgtgcagatctggtcaaggagagggtttagccaatgctgctgcaatacaaatacagacaaagtttcgtggttggacgaagagaaaagaattcttgattattcgccaaagaattgttaaaatccaggcccatgtaagaggtcaccaggtcaggaagcagtataaaccaatcatttggtctgtgggaatcctgcaaaaggttatattacgctggagacgcactggcagtggattacgtggatttcgaccagc

SEQ ID NO: 53379 - DNA, 417 bp, Glycine max
  Clone ID: PAT_MRT3847_19212C.1
aatggccacttttgttattaagcaataagatttcgcgggtaaaactgttttaaaccagttaaatgggtgggtccgaaggacgggggcccccgtaaaaggtggaaccaacatgcgccgaaccgttaagagggctcctcaaagaattaggtatggcccggacggtccaaagaacctgggtccataataagaggagattccgtaatacttgaccggggaattccttggggtttacggatggggcattgttggccaatgagctgacccggaatccttttccagaaactgggggctggtggtggttaaaaggaattggcccttgtctgggtgcatttggcgtgacttttccggtgttcctttaaaagaatggtgttaaatttgtcggggcctatggttctaaggttttttattttatttttt

SEQ ID NO: 53380 - DNA, 1085 bp, Glycine max
  Clone ID: PAT_MRT3847_19213C.1
cgctttctctttctctcctcatcctcttattctaccatggccttcccacctcctcacggtttcacgtttaacactactcatgaagaagatcaccaccacctccctccaacctctctcaaccccttcccctctttgccaccccaacactttcaagggggtgcatctttcatgttgaagcggtccatgtcgttttccggcattgagaacaagtgcgatgaagtactacatggagacgatgagttatccgatgatgggatcttcccttgtgggggtttcacgtttaacacgactcatgaagaagagcacggccactaccctccaaccgatctgggcgccttgcttgctttgccaccccaactccttcaagggggtgctttggggttgcagccaagacaagttgccatatggtttcagaatagaaggggccagatggaaaaccaagcatttggagaaggaatatgaagtcctcaagaaacagtttgaagcagtcaaggccgataatgatgttcttaaggttgagaaccagaaactacaggcagagttacaagctgtaaaaagtagggattggtgtgaagctggaatgatgagccataagaaagaaactgagggttcatggagcaatggaagtgataacagtttagagattaatctagatcactcaagaacactaggtttgaatagtcccatatcttctcagaaaggctgaaacctatgactacccaattcgttaaaccccaccagcataacacaactccttcaagatgatggcttgtgcaacatgtttcacaacattgatgcacaacagaacttttggccctggcctgatcagcagcaccagcgtttccattgaccctatataaatgattttgggtattaatgatatgatatgagcagaaattatacaatacaatcttttttcttcagttttttttttctttcaatttatttaggtgcagtagattgctgtataaagtttgaacaaattaaatctatttgagtcatgaggagtcggtggactttgagcagtgcaatttctttccttgtattgcagaatatataaaataatatttacgttaggctgaagt

SEQ ID NO: 53381 - DNA, 402 bp, Glycine max
  Clone ID: PAT_MRT3847_19214C.1
cccccaaattcggatggcagtagtaaacattataaattcgacttacaaaaataaagcagggaaaaaaactttatccagcaggcccttttgtatagaaacatcctgggttaacccatttagggattaaggaaaaaaaccccaaaaatgggcctacatcactggggggaaaacaacccagggtcttttgggttcaaataatgttgccacaactccaagactaaaacagcttttttccagcaagcattttagggaagggcttccaatcactatcaacactgaagggtttgtcaatatgaaagaggcccaatagtgatcctgatccagaggggggcatctagcccacataaaggatgcctttttcaggatcttcaccatcgcaatcatgggcatcctcatttgggg

SEQ ID NO: 53382 - DNA, 217 bp, Glycine max
  unsure (1)..(217): unsure at all n locations
  Clone ID: PAT_MRT3847_19215C.1
gncatgtccactttaacgtggattttttgtcccatatgatccccttgatggctccgcattgttacacaaatgtacgggaccaccatatttggtgattgcctgcacataagtgactgggatcaccgaaagagataagttgcttcagtcatgcagctttttgttcctacaacaacatatgtacttgctataaaagactttactgacacccatgaattta

SEQ ID NO: 53383 - DNA, 435 bp, Glycine max
  Clone ID: PAT_MRT3847_19216C.1
cttgctggtagacctcagaatgaggatctctccctgaaagttgaggcagcttattattctgctggaacccttatactttctgatgcatcaccttctaccatgccttcactccttgttttgaacagggattcaagcacgcaatcatcgccgtcaggtaatctaggaacaagtacgaggagttcccgggcattaagggagtccgtatcttccttaccagttgaaggacgaatgctttctgtggcagatgttttacctttgccagataccgcagctactgtgcaatctctatattcggaaattgagtttggtggttatgagagctctatggaatcatgtgaaagggtgtctggcaaactatgggccagaggagatcttgcaacccaacatatactaccaagaagaaggattgttgtcttcagcaccatgggcatgatg

SEQ ID NO: 53384 - DNA, 411 bp, Glycine max
  Clone ID: PAT_MRT3847_19217C.1
tccatgtcaccatagtgccaagcccggtggtggtgaggataatagtctttctaattagcattagcctgctcagtgctgttcggtatcgtgggcttcgggttggttatttgacatagcgtcagaagtgtcgatcatactcgtttatctccataaccgttcgtatcggcgtgtattcaccgaccaatgcagcgttagcgatcagtacgccgtgacgcaactatcccaaccgcgataatctctgcctcacaaccacacacgtggctacagtggtacccataattcgtgaggtagcatcattatgatgttcccacattaattgatactgtcatgcaatatcggtctgcagtgtattaatcacaagatccccttacgatgcccaattacagcagtttattcactgccaacatttca

SEQ ID NO: 53385 - DNA, 884 bp, Glycine max
  Clone ID: PAT_MRT3847_19218C.1
tcctctagagcggccgcctgcggccccgacggctgcgcactgccggcgcgctcgtaacacgacgcatcacgcccgccccgagcgttcggtccgggcgcgccgctacgcgtctctgctgccacaaaccggcaggaagcccgtgccgacgacgtctacaatgcatcctttcagataactatcagaaggctgcaagcccatgacccacgggattcacggcgagaagcgctggtacgcgctgatcgtcctctgcctcggcgtgctgatgatcgtgctcgacagcacgatcgtgaacgtggcgctgccgtcgatcagtaccgatctccacttcaccgaaacggccctcgtgtgggtcgtcaacgcgtacctgctcacgttcggcggctgcctgctgctcggcggccggctcggcgacctgtacggtcagcggcgcatgttcctcgcgggcctcgtcgtgttcacgctcgcgtcgctcgcctgcggcctcgcgcaatcgcagacgatgctgatcgccgcgcgcgcggtgcaggggctcggcggcgcggtcgtgtcggccgtctcgctgtcgctgatcatgaacctgttcaccgaacccggcgaacgggcgcgcgcgatgggcgtctacggtttcgtctgcgcaggcggcggcagcatcggcgtgctgctcggcgggctgctgacgagctcgctgtcgtgacgctggatcttcctcgtcaacctgccgatcggcatcgcggtctacgcgatgtgcgccgcgctgctgccgcgcatgcgcgcgccggccggcgccgcgcggctcgacgtcgcgggcgcgatcaccgtgaccgggtcgctgatgctggccgtctacgggatagtcggcggcaacgaggccggctggctgtcga

SEQ ID NO: 53386 - DNA, 292 bp, Glycine max
  Clone ID: PAT_MRT3847_19219C.1
tcgctgttttgtgaaccgaggagaacgaacaggcgatggtgagaagctcgacgataggggttctctccatgagcccgcatatgcatacaaacactggcttgacgagagcagccacattgaccacatctccctctgggcgctattaaagtctgaaaaggagacacactgaacttcttatggggagcacatagaccactctcaaaccctagccttcacgcacgcgctcataaatgcacgggggaccgcctaatataccgccgtaggaaaatgcggcttctgcagtgcacaagat

SEQ ID NO: 53387 - DNA, 456 bp, Glycine max
  Clone ID: PAT_MRT3847_1921C.1
aataaataagagaaagagttaatgtcctaaggtatcagcttctaacatttgaagctcaaattggattattctctcacatgtttagctgcaaacttgattgattatttcctgctacttaatcaatacttcaaaccttggtcaaaggtggggaattaagcatgtcccattttcatactgaagtctgttagttcataccagaaccgagcaagtttcacatgttattttttggacttgtgatttgtttgacttgttgcattatatctgataaaatccagagcactgaagagcagaaaatggggaggtgaaaggaacactgaactctatataatttgatcaaagcagttaaactccttccaagcagagaattaactctgagaaacagtaggataatagttatatagttagacaaaatgaagaagacaactggaggatactctggagagtggagagtcagag

SEQ ID NO: 53388 - DNA, 316 bp, Glycine max
  Clone ID: PAT_MRT3847_19220C.1
gctatgtcaaaacagatataaacaggacaaagagcattgatgtggactgaggggttcacctgcatggctgctcatcgttttgtctagcacattatggaccttactggagccttatgtggctttcaacttgtgctaacttacttggatggtcgtcagcttcttattgaactccatcctggggatgttggccagcctgatccatacttggctatgcccgatgagggaatgcccatgtatcagagctcattcatgagggggaagctttacattcactatactgtgcacgttcctgattctttaaacactgaccaggcta

SEQ ID NO: 53389 - DNA, 202 bp, Glycine max
  Clone ID: PAT_MRT3847_19221C.1
aaaaggcggggaaataatcctccttcctttattattttccacgatattaaaaaataaaaatccttctcccaattgggcttcctttttgatggtaaatataaaaaagccctttcaactttacaattttggaaccctaagggatggaaagataaaaacaaatcccgttgaccattaacctaatgaattttagcggacccttggg

SEQ ID NO: 53390 - DNA, 295 bp, Glycine max
  Clone ID: PAT_MRT3847_19222C.1
tttttattctatttattttgaaaccttattattcacaaaattcataatcttggtgagggattcactacatatgagctgtcgaacattaatgttctcatactcatttcatacacacccctggagcaaaaccaccccaaaaaatgcagaattttgcctggcaacaacggcatgcccaacattaatcatctcaaggaatggctccctcggttactagaggccactttcgtttgagaaaccctgaatgtgtgcggaattcatttaaacaacaacccaacattggggaacaaatccaaag

SEQ ID NO: 53391 - DNA, 368 bp, Glycine max
  Clone ID: PAT_MRT3847_19223C.1
ggtaaaacaaaattttcttccttaagaacaatggattacaaagcagtgttaaacaaaaaaagaaagggtaaatctacatattttcaagaagtctttggcttcgggaaaacttttttctccatgaaattgatgaaacgcttaccatatgtttttggttccaccactgatataatcatagggtcatattgcagtgatttgcaggcatgcttaagtttcttttttacagtgtattcttgcgatatattaattatgcccatgtatagcgaccacaacattaacctcaaaaaggtctacttatgattccttcaccttatccccctgaagtttgcgtgttgcttgagccggaatgtttacttctaattgcaccc

SEQ ID NO: 53392 - DNA, 599 bp, Glycine max
  Clone ID: PAT_MRT3847_19224C.1
tttgcttttacttcgaatagcttatttacattttaattttgtttttcggtgacaaaatctgccacaattatgaacaatggaggaagactctttccgcagaaaccttagttgcttcacgatgaacacttctatttctattatgcactgtgtcttcgattatcggagctgtctttctcagcctctcccttccacatttctgacagactctggactctggcaccgacgcatggacaacgttgaaccatctcatcaataacttgcttgtcgtggaggcatgctaggtttcgatggagatacggtgtgatcggcaatagtattgcaattgttcaagaactcgatggtcttcagcgttagtaatgggtcaaccaaattgggcaagggtagcaatgatggcttccattaaaaacaatcggattagcatcacaaggcactcagggtgaccaatgaaacgtgagaaacgagaggagagcgcaataagtttagaatgctaacatattccaactaaaaaagaagtgtgatatgttattaatgcctgcaaatttaaccttaaaccattgctttaactaattcaaacacctgtatgatttaaaaaacaacgt

SEQ ID NO: 53393 - DNA, 341 bp, Glycine max
  Clone ID: PAT_MRT3847_19225C.1
gaacatatattacagaggtggccctggttcacaaagatgacatgcttatgaggggttcaaaataactgtgactgatcctgataccgctttaagaactatcactagagaagctaaggaaacaggccctgactgtcaagaggtgactaaagtggagccagctgaatcagaagaagtgaaagattcttttgtgaataatattaaaagaccaatgaccccccaacccttgaaaattaaggcatacatcgaaatgaaatgtttacaatttaaaagagttcttcccattaaggaggcatagcgtaaggtggatgctacacgaaatgatgactgacccgtcaaaataa

SEQ ID NO: 53394 - DNA, 351 bp, Glycine max
  Clone ID: PAT_MRT3847_19226C.1
ctctctcatttttcttatagtcttcaatggttcctactgttattatggggaccccccaggcccctgggaaaaccctagaaacgaacttggttattggccccggaggatcgttcgggggttgcctacgcccacttcagtgttgagatcccagtgattaatgttgccggacccgacaacgtggatggacacaaaatagagatgcccgtgaagaacgaggaggcttgcgataatggggcgttattccaagaagctgatgacggagtggatcaacaactcgtggtctagatgacccgcctggcggagagttctttgctttggcaccgggcgagaagctttcacatgatatgggcg

SEQ ID NO: 53395 - DNA, 204 bp, Glycine max
  Clone ID: PAT_MRT3847_19227C.1
ggaatcttgagaaatggcaagggaccgcaagaaccagaatctggtcattggaaggaccggttaccttggaaaattcatcggggaaaccaacggccaagcttgccaaccaactttccttttggtgaaggaatccaatcttttcaaacccggaaaatcaacccttaatggccatttcaaaaggcctggtggcaaatctggtttaag

SEQ ID NO: 53396 - DNA, 554 bp, Glycine max
  unsure (1)..(554): unsure at all n locations
  Clone ID: PAT_MRT3847_1922C.1
ggctcgagaagaattggaaagggcttgacgttcaaccttctctctctcacacacacactctctcttagaagatcctctttcgtaatctcgcgccgcttcttcaccgttctcgcctccgtcgagctgcttcctcgtaggttccccgccgacaggtacgatgtctcctgcgatggatcccaaaccattcacacgaagcccagaccgttgaattttcgagcgtcgttggttccgcgcgatgcagtccgtcgtcgagcgcgattactctaactacaaggaggttagcggcgcaaacaatgatgaaggactagcgatcgcgaatctcaggattgctctgcagatcatagatgctctggccaagaaagggattgcggagctcttccccattcaggtaacgtgtatttgttgtgttcattagtttttgtttggaaaaattgtgacttcttttttggtaataagttttctgctgttaattaatgttgcgaggttcattaatatttgtctgacaagaagccagatgaaattcccactgtaaggcctatntaatttttaataga

SEQ ID NO: 53397 - DNA, 302 bp, Glycine max
  Clone ID: PAT_MRT3847_19230C.1
tcgagatattccttcttgatcaaccggacattcccagctcttgccttgcctgagtcatagagtgccgccattgcttttcataaacgcttaatgatctgatgaatatagcaagagtgcctcctgctggtaagcaagtggacttgcacccacgatggcagcagcgcaaagctgcatgcattctgtgaatctaaaggagttcatctgtctggatattctccactgtgcttacccggagtattcaaaagtgacattcttaaaaatcctgttgtgatagagattgcagagaaattgtggaagacacc

SEQ ID NO: 53398 - DNA, 435 bp, Glycine max
  unsure (1)..(435): unsure at all n locations
  Clone ID: PAT_MRT3847_19231C.1
tattgttaaanntntatcattttctttatgcttttttctccattattactcacctccaataagagatgtttttatttcaagcaagaacggtcttttccattcctataatttaactcatttctcatacttcttatcatctaattttcttaatccacattcatccaatttaacctcattttcattaacctattaatactctttttctgaacttgcatacacaattaaatcaaatcacaaattttatctctatagctttcttctcttttcttttttaaatattatttttatagcaccctttttatcttacctctttctctataactatcattttacttcacatttacctcatcactttatcatatctacatttattattaaattttactatcttcttcatcttccacaacccctatttataaagtatttatttcaatt

SEQ ID NO: 53399 - DNA, 229 bp, Glycine max
  Clone ID: PAT_MRT3847_19232C.1
cctgagaagcccttcgcttaaatcatactgcaactcgccaattattattgtatctgttaacgtgaaatagttttttatttttggtagaaagcaagcataggagaggttttagccaatgaaatctattataaaaaggaacatgtgtaatggggaaaaaaaaaaaaaaaaaaaaaaaaaaaaaaaaaaaaaaaaaaaaaaaaaaaaaaaaaaaaaaaaaaaaaaaaaaaaa

SEQ ID NO: 53400 - DNA, 779 bp, Glycine max
  Clone ID: PAT_MRT3847_19233C.1
caaaaaacaaacattgaatgagttgtttcacacttgtttttttgagttttaaaaaatatattctatttttaaggaaaaaaaaactattcaacacgtcaaaattaaaattattcacacccacgctaattaaaacaagagttaagcaccgccgattcatcaattcaaccagaacaaaaaaagaggcaaaaacatttgaacaaaaaaaaaataatagaattaagtacccgaaagtcgcaagctgagcaaggaagaacggatagttcctcagcggaaccaacgcgagcttgtacagtactctgtttccggcgcccatcaccaccgtcacagcggcggcgagcatcacctccgccaaccgattcccgctttcccggccactctccgccgcgaatctccccaccgagcgcgggcgaggcgccaccaccttcttctcgcctgatctctcccacgcgccgccgcatttagccggcggaggcagtcgcagcgcgattgtcggccacttaggcaagtagccgtagcggaccgcgccaatcgcagcggtcctcggagcgcaacggaggcagagttggccggttccgacggagggatgcgccggcagagtgacgtcatggttgcgtgacgcaatttgagaattggaagtgtagagaaagaaagagtagagagaacgggagtggaggggactgtgtgagtcacattagtcacgttggtgcgaaggtgaaaagcgaaacagagagaagcagtataaaacggaaacgttgtgtgcgtacgcaacgcggatagct

SEQ ID NO: 53401 - DNA, 266 bp, Glycine max
  Clone ID: PAT_MRT3847_19234C.1
cctcgagccgaatcggctcgagattaaataactaattattttaatactgcatgataagtcgaacagctggctccaaagtacatactaaaataacttaaaaatcgaaataaggatactcaggtcaaataaaattattatatacgataaaatctgtatttaatgcaattatatatagagaattagaactcaagtcaatttacttgaacacttaatagcattccaaatttgatttgctctatgacaatcacgtgacatctaaagaatgt

SEQ ID NO: 53402 - DNA, 677 bp, Glycine max
  unsure (1)..(677): unsure at all n locations
  Clone ID: PAT_MRT3847_19235C.1
cggnaattcccgcgtcgacctcacgcgtccgagcaaatattacaagtaacttatttgatgctcgctctcacagactcattatcagtgcctctgtcgcgctgcgtctgttgctggagctgtccctacgaacccggagaggctcgaagtccggggccgggccgtgggacaaccacggcccaccaaaaaagggccaaggggtgcctgttgaaccgggcgcctacgcccccgggcacaggcccgggggtcggaggactggaagctgcgctgctaaacgacctactatcactgacacactgagttagtcgcgtaaggctgtcggtgcccttaaggcggcgcgaagcctccagtaggcatcntcgcaatgcgcaagacgctcgcagtgcgcacangacagaaaagcactctttggataccgctctcgagagcatgcatattaacctggccctacgattaacctgtctgtctactaggctaagtaacgagcgaccggacaacatcatggctcctccgacaattcgcactgagtgcactcggatccgtctaagttatgtactgttaaagggaagagaaaaaaagctgctactgtgtaataagggtataacatctcttctaattcgaactccttgctgacacttaaatgtgaacactgtggattgaatagagcatggagaagatcc

SEQ ID NO: 53403 - DNA, 274 bp, Glycine max
  Clone ID: PAT_MRT3847_19236C.1
cacttgtgtaatgtattgatatcgaggtattttgttctgacagcaagtgatttggaagagtggtatcgtaaccccgagtcttttcaccatgagcaggatatggttcagtggacagaaaaattgaggccatgtgctgaagctttgtacattgtattatttgaaactaatagccaattgctaggtcctgttgtggtctctcttcttcaagagtctatgaataattgcccaactccagtgacggaaattactcctgcattgcttcttaaagatgctg

SEQ ID NO: 53404 - DNA, 1953 bp, Glycine max
  Clone ID: PAT_MRT3847_19237C.1
ccacgcgtccgtgaaaggatagagcgaaacgcatcgcactttatcgtcgttcgatgctgatgatgacggagggaaacaacagcagctgcggcagcggcagcggagtgcagcaccatacgacgtcgtcctcgtcctcgccggcgcagagccggcagcagcggcagaaggtggaagtgtacaatgagattctccgccgcttgaaagattccggcaacgaagaagctatgcaacctggcttccacgatcagctttgggctcacttcaatcgactccctacacggtatgcgctggatgtgaatgtggaaagggcggcagatgttcttatgcacaagagattgctgcatttggcgcatgatcctgctaataggccttcaattgaagttcgattagttcaggttcatcccacatccaatggaaactcagctgacacttttgaatcagatgatcctgggatagaatctggacaaagttcttcaaagtactcaagcagacagagtatacgcatatgcatgaaatcaccatctcaacagatgacaagcccaagcttctcagtcagttaacccacgcgtccgctgctttgctttctgagattggactgaacatccaagaagcacatgccttttctacaactgatggtttctcattagatgtgtttgttgttgaaggatggccccatgaggaaaccgaaaagcttaaagctgctttggaaagaggagtcttgaagaagattgagaggcaggtgaagtctagtccacaatccgtatcttctgttgacaagcccgatcaagcaaagatgaaaagcgaactggattatttgacaataccaactgatgggacagatgtttgggaaatagatcctaaacatttgaaatatggaactcaaattgcatctgggtcatatggtgaactatttaaaggtgtatattgtagccaggaagtggccatcaaagttctcaaggctgaccatgtaaactcagaattgcagagagagttcgcacaggaagtctatatcatgagaaaggttcgacacaagaatgttgtacaattcataggagcttgtaccaagtccccacgcttatgcatagtaacagaatttatgtctggtggaagtgtgtatgactacctacataagcagaagggcttttttaaatttcctacactgctcaaagtagcaattgatgtttccaaaggaatgaactacttgcaccaacataatataatccatagagacttgaaggctgccaaccttttgatggatgaaaattgtactgtaaaggtcgctgattttggggttgctagagttaaagctcaatctggcgtcatgactgcagaaactggaacatatcgatggatggctcctgaggttatagaacacaagccgtatgatcacaaggctgatgtatttagttttggaattgttttatgggagttgctcaccggaaagcttccatacgaatatttaacccccctacaggcagctataggagtggttcaaaagggtttgcgacccaccatcccgaagaacactcatccaaagtttgtggagcttcttgagaggtcttggcagcaagatcctacattgagacctgatttctccgaaattatcgagatcctgcagcagttagcaaaggaggttggagatggagaggagcggcacaaggataaatctggaggactcctgtctgtcctcagaagaggacatcactaaaaggtttctttgaatagatgatgtccgtaacatggtcataggtaggatcaatcgcagcacaagggccatttcccatttgtttctaaattgtcatgtacagttatcttcacattatctgattgcttttatgatagatttgtatttgagcatttcctaacctgtgatgggacgacgaaagaaaataaaagagattggttttctaagaagaaaatgagagggagttgccatcaatgtttatttaaggg

SEQ ID NO: 53405 - DNA, 436 bp, Glycine max
  unsure (1)..(436): unsure at all n locations
  Clone ID: PAT_MRT3847_19238C.1
agcaggtcatgatgatcgaaggctcgttngcggggccgacgacctcactagtccgggggccgctagcgactaagacgggggccgtgcttgcactttttgaagaagctgcaatgcaagagagtcatgtacgggggagctctataattgtatatgtcctctatctccctgaggatcactgagatagaatctctctagctcagacatcagatggccgcgcctttctatgttctcccttctagaggtactttcatcagctttagcctcttcgacgtccacctcccgtgccatttcaagaaggtggaattcttggtcttcattccttttctgaataatggattatcgagcatgacgcctctagtgcactttggccacaacctctgacaaagagggaagctacgctgcaaggtttcatgatctcgtatcaggaggctaaatg

SEQ ID NO: 53406 - DNA, 405 bp, Glycine max
  Clone ID: PAT_MRT3847_19239C.1
gcttttaattataatgttttttagaattaaataaaattttagttctccaaaacttgaaccaaattcaatttaattcttaggaaaaaaatttcttaacatttcatgatcaaaatttacaaaatgctagtgtatttaaccattgaggccgaaaattataatctgtaataaatgttaagggggatcgttacgtaacattataaattattaagttttactcgtctggaacatcattatctctaataatacatgcgatttaaacaaaaataaaataaaacataaatcagtaatttatgttataattataatttaatgaaaccatagtgcatccttttatgtttactgttttttttcttccctgcaaagtgtaaagtgaggactgaggagggatgagttcgtcctctccac

SEQ ID NO: 53407 - DNA, 461 bp, Glycine max
  Clone ID: PAT_MRT3847_1923C.1
gggggttaaaaagttcatttgattatactgtaattgttacaaaataaattaacacgtgcattgatcttccgacataacttttcactagtctatacaaactgaagaaccaaagttctgtgataaaacctacttgccatgctattgccaatatacatgtacactaacatttgatatatgggaagctagcacctagtcaatgaatcaggcatgtcctgtggaagattgtcttcaaggctttcccttctggtagatcattgaatcttctcatgctaggattatgcatgtacaacaacaccacctgaacacagctgcattttgtcaaaattacatcatgcaatcattcttgcctcctcagggtccggaattataatgtcaagcctcatcatgggcttgtactcttctggtatctgtgcaccagcttgcatgcacacttgaaccacagccggagcctttacataata

SEQ ID NO: 53408 - DNA, 877 bp, Glycine max
  Clone ID: PAT_MRT3847_19240C.1
cgactacttacttaagcagaagggctttttaaatttcctcctcttctcaaagtagcaattgatgtttctaaaggaatgaactacttgcaccaacataatatatccatagagacttgaaggctgctaaccttttgatggatgaaaattgtactgtaaaggtcgctgattttggggttgctagagttaaagctcaatctggtgtcatgactgcagaaactggaacatatcgatggatggctcctgaggttatagaacacaagccgtatgatcacaaggctgatgtatttagttttggaattgttttatgggagttgctcaccggaaagcttccatacgaatatttaacccccctacaggcagctataggagtggttcaaaagggtttacgacccaccatccccaagaacactcatccgaagtatgttgagcttcttgagaggtcttggcagcaagatccaacattgaggcccgatttctccgaaattatcgagatcctgcagcagttagcaaaggaggttggagatggagaggagcgacacaaggataaatatggaggacttctgtctgtccttagacgaggacatcactaaaaggtttctttgaatagataatgtctgtcgcaacctaacctgtgatgggacgacgaaagaaaataaaagagattggttttctaagaagaaaatgagagggagttgccatcaatgtttatttaagggaaacgttagaaaaataataaaaaaaggtatgcgatctttgaaaagaaaagattcgggaattgtttacgcatagggtaggtgctatcacccacgcacccgtcacaaagaacaacaacctttaaagtctttaatcgagtgtgcaataaaaataacgtgccttt

SEQ ID NO: 53409 - DNA, 744 bp, Glycine max
  Clone ID: PAT_MRT3847_19241C.1
attcggctcgaggaaggctgccaaccttttgatggatgaaaattgtgtacaatgtttcctttatctgttgtttcttaaaagtataatctgatgcaatgcttcttctgctcctccccccctcaatgactaacataatatagcacatgtgtggctaaatacagtgaattctataaactgggcatacagaactgaaagtagtacatttgttccattgcagactgtaaaggtcgctgattttggggttgctagagttaaagctcaatctggcgtcatgactgcagaaactggaacatatcgatggatggctcctgaggttatagaacacaagccgtatgatcacaaggctgatgtatttagttttggaattgttttatgggagttgctcaccggaaagcttccatacgaatatttaacccccctacaggcagctataggagtggttcaaaagggtttacgacccaccatccccaagaacactcatccgaagtatgttgagcttcttgagaggtcttggcagcaagatccaacattaaggcccgatttctccgaaattatcgagatcctgcagcagttagcaaaggaggtataacaaggttacatttatgttttttggggtacggaagattacttttatgttaatgtatgtgtgttattttctttttttttactctttacccgacatacatatttatataatatcatacttgaaaatttaaaattaattaaaatgattttattcaataa

SEQ ID NO: 53410 - DNA, 808 bp, Glycine max
  unsure (1)..(808): unsure at all n locations
  Clone ID: PAT_MRT3847_19242C.1
aacgcatcgcactttatcgtcgttcgatgctaactgaggtattcaacggcagctttcctcatcttcatcgtgggtgcatcaccaggggacggtctcctcttcctcgcctgctcatagtccggcacagcggcggcagctgtggctgtacgaggagattttcaatgagatgctcggccgcttgaaggattccggccaccaacctggtatgcaacctggctttcacgctcactttaaggctcactccaatcgcctgcaaagacggtatgcgctggatgtgaatgtggaaagggcggcagatgttctcatgcacaagagattgctgcatttggcgcatgatcctgctaataggccttcaattgaagttcgattagttcaggtttatcccataaccgatggaaactcagctgacacttttgaatcagatgatcctgggatagaatctggacaaagttcttcaaagtactcaagcagacagagtatacatccacctcctgcttttggttcttctcctaatcttgaagcactggctcttgaagcaaataattctgaagaagacatagaagaggaacaatctgtacatgccaatgttcaatattcacggcccatgcatgaaatcaccatctcaacagatgacaagcccaagcttctcagtcagttaactgctttgcttgctgagattggactgaacatccaagaagcacatgcattttctacaactgatggattctcattaaatgtgtttgntgttgaaggatggccctatgaggaaacagaaaagcttaaagcagctttggaaagtgaagtcttg

SEQ ID NO: 53411 - DNA, 3177 bp, Glycine max
  Clone ID: PAT_MRT3847_19243C.1
ggcttctctggcgttgctccgcagaaagcttatcatcaccagaaccacactctcctactcgcacgtgcgcgcacgagccttctccgcgggaaacaacaaacaccgcatcgagaagattctagtagccaaccgcggcgaaatcgcttgcaggatcacgcggaccgcgcggaggctcggcattcaaaccgtcgccgtttacagcgacgccgacagggattcgctccacgtggcaaccgccgacgaggccattcgaatcggaccgccgccggcgcggctcagttacttgaacggagcctccatcgtcgacgccgcaattcgctccggcgcgcaggctattcaccctgggtatggattcttgtcggagagtgctgacttcgccaagctctgtgaggagagtggtctcacttttatagggcctcctgcgtctgctcgtatgcctaattgagaaagagcatttcatgttggctagaaatccgcctgggggcagcagcttgctccctatatggtattctatgccaccattcagagtccattatcaagctaagcgtagaatgggacttgagtgggataatgaatatggtagtggtagctcaaagatcatgaagcttaccatcacttatcaccactgaagggagatacctaattgagacaggagaaaatggatctcctgttttagaagtgaaagcaatatatgtaaaagataactattttagagttgaagctggtggtgtaatcaatgatgttaatgtagctgtttactcaaaggatcaaataaggcatattcatatttggcaagggtcctgtcatcattatttcagagagaaactaggcctgaagctgtctgaggttgaagaatcccaacataaagccaatgttgaaacatcagccaatcctcaagggacagttgttgcgcccatggcaggtcttggtgattaaggctctgatgaattttactttatggaggtgaaaacacgtcttctggttgagcatcctgttacagaaatgattgttggtcaggatcttgttgaatggcaaatccttgttgccaatggagaagctcttccattgagtcaatcacaagtacccttatcaggtcatgcttttgaagctcgaatctatgctgaaaatgttcaaaaagggtttcttccagcaactggagttctacaccattatcatgttccagtctcatctgcagtccgagtggagactggagttaaagaaggagacaaagttagcatgcactatgatcctatgattgctaagcttgtggtgtggggagaaaatcgtgctgctgccttggtcaaactcaaggatagtctgtcaaagtttcaggttgcaggtctgccaaccaatgtcaactttcttcaaaagcttgctaatcacagggcatttgcaaatggcaatgtggagactcattttattgataactacaaagaagacctctttgttgatgctaacaattcagtgtctgtgaaagaagcatatgaagctgctagacttaatgcatccctggtggccgcatgcctcattgaaaaagagcatttcatattggctagaaatccacctgggggcagcagcttgctccctatatggtattcttctccacctttcagaatccatcatcaagctaagcgtagaatggaacttgagtgggataatgaatatggtagtggtagctcaaagatcatgaagcttaccatcacttatcagcctgatgggagatacctaattgagacagaacaaaatggatctcctgttttagaagtgaaatcaacatatgtaaaagataactattttagagttgaagctgctggtgtaatcaatgatgttaatgtagctgtttattcaaaggatcaaataaggcatattcatatttggcaagggtcctgtcatcattatttcagagagaaactaggcctggagctgtctgaggatgaagaatcccaacataaacccaaagttgaaacatcagccaaccctcaagggacagttgtagcacccatggcaggcttggtagttaaggttctagtggagaacaagacaagagtggaggaaggacaacctgtgttagtattggaagcaatgaagatggagcatgttgtaaaggcaccttcttctggctatgtgcatgggcttcaacttatggtgggtgaacaggtttcagatggcagtgttcttttcagtgtaaaggatcaataaaatcgcacttgacagctttacgccaagactttggcaagggggacattatctggaattctggatggatagttatacgcaggttaacaaccgaacacccgaacacctgggagttgattacttgcttaacaatctttgtaactcaatttttcaagttacaaaagttgaaatatactttacaataatgcaagtagttcctccagccattaataacaaagctgtaatttgcttcatgtttagatattcttccatcaacgggtcttcacctgccccttaaataaatctctaaaggggagatgcccacacgcctaaaatcatgtgatagtcggaacaccatattccaactacgaatccaagattcaattgtcttgggggaaacaagggtactaacttatggattcgtttcataatatacgcgtttcatgctagcaaagtgaagagccataattgaaacttttacattgttggtctaaaataatagtgccacactgcacgtattgatttttcacactattagattttgcctcgttaatttccaaattttgaagtcgttatatgcatacggtttgttggagcttcaaagggaactccaaatctgaaaaaaaaaacctagcgtttattaattgaagtgatgaccatacatccatcacatgcctgttgagttcaagcaacttgatctggaccactccagagggtgagttatttttcttcttctgaagactcaattgatcattaggcgagagattttgacgtgcttcatcagtacattatttatggcttttgatagatattagagatagattaactctcgttaaactaccaaaacaaagtactccgtactccacctttaccttaaagactgaatgaagtggttgatggtcggttcaggataaactttgatacacttttctctaattctagtctttaatttaggttatcactttgtatgttataactcgcctgtgcttcccaaacttgagt

SEQ ID NO: 53412 - DNA, 382 bp, Glycine max
  Clone ID: PAT_MRT3847_19244C.1
cggacgcgtgggaaaaaaaaatttaaaaaattctaaaaaaaaaaaaaaaaaaaaaaaaaaaaaaaaaaaaaaaaaaaaaaaaaaaaaaaaaaaaaaaaaaaaaaaaaaaaaaaaaaaaaaaaaaaaagggggggggccgttttaaaggatcaaagtttacttccgggtgtttgcaaggtaatagtttttttttagggcaacctaatttaatttaattggcgggggttttaaaacgtggggattggaaaaaccttgggtttaccaaatttaatggctttgaagaaaatccccttttcgcaagttgggttattagaaaaaaggcccgaacggttggcctttccaaaaatttgcccaccttaattggaaattggaaccccccttt

SEQ ID NO: 53413 - DNA, 644 bp, Glycine max
  Clone ID: PAT_MRT3847_19245C.1
cccacgcgtccgggtcttagacagggagatccattgtcacctctactatttaacattgttgcggaaggtcttaatggattgctgtccaaagcgatagagaagaggttatacaggggattcttagtgggaacaaacaaagtggagattagcctcctccagtatgcggacgatacaatattctttggggaggcatctatggagaatgttagaactattaaagccatcttgagggcttttgagcttgcttcgggcttaaaaatcaattttgctaagagtagctgtggggcttttggagtgtcagacttatggataagcgatgcagccaattacctccattgtagcttgatgtcttttcctttcaactatcttggtctacccattggggccaatccgcgaagatgtcagacatgggaccctattattactaaatgcgagagaaaactagtgagatggaaacaaagacacctgtcatttggggggagagtgactctcataaattcagtgctaacatctattcctatttattttttctcatttttcagggtgcccaaaaaagtggtgaacaagttaacaaggttgcagaggaattttctatgggggggagtgtcggagcaaaacaaaatagcttggatccgttgggaaac

SEQ ID NO: 53414 - DNA, 373 bp, Glycine max
  Clone ID: PAT_MRT3847_19246C.1
gctataaaaaaattacattgggggggagcattaaggaccccttttgcaaacaaaatattttattggacaacaaaatttcccaaaatgaattgaattgaagagatcccccaagatgcttgctccaaaaaacttaactccttaggactgataaacattttaaaaaaaacaagggtctaaaacccaacccagtttgaacgtccattactggtgtgcattggggaccacccgggtaaaggaacaccccactcttaccaaacctttgtagaaccacaaccacgccaaaaatgtatttcaagggtagaaccgggattcaaacaaatgggtgtccttaatgggaaaaatattgcaatcccatcggacatttttggggttg

SEQ ID NO: 53415 - DNA, 610 bp, Glycine max
  Clone ID: PAT_MRT3847_19247C.1
tttattttttttttttatgtttttattgttgtttttgttatttgaggcaccaacaatattatcgcaagcgtcatctttatgtctacatgtatctgacaaacatacaaagagaatggaaacccaaaaacggcccccttgttgatgcggcctaacctatgaaaatgccctcggactgtgaggtttacattaatctactccctcccccaatatgaatgctttggtttggctttctccacccccgtctctcatgtaaatagggggccgggcggtgttataaatcttcctcattcggaacaggataccgagacccacccccgtgaccaacactttgtgcatgatttggggcttggcatccgaatcctgttgggtctttggacaatttataacaccgccacttgcccctataagaggggaatctgcagccgtgccaagcctaaccggacctttcttttggcacaacggtttagggactgctagtcccaaccccggggggttctactgggtacacccacaacaacctcgcagcctttttgggtgccatcttttgttttttgcaatctgatgcttaagtgccgtcggataattcgggttgcctccttccctgccccct

SEQ ID NO: 53416 - DNA, 473 bp, Glycine max
  Clone ID: PAT_MRT3847_19248C.1
aataaaaaacccccctttctatggatgttttattttctacaaaagcctttttactgccccaattacaggggccaaaaaggccaaaaccctttaccaaaagaatgcctcacattattttgaaaatatactttatgggtggaactggtcccattttcaaaaatcccccccatcaaaatttaaaaatctgagctgcctaaaatgggaggggggaacaatacccccctttaagtttattggggcaaaaggcacctaaaactgaactcatagggcattatttgtaccaactgagaaaggggctttttttcccttttttgaaggcaatcaattgcttcctttctcacttcaatggggaagtggaggcaaacccaatccaacaaaattcacaagttctttggaaagccaagagaataccactctagaaactgtggaattactaacttgtttggttttgaaaagcccactgttgcctgaaa

SEQ ID NO: 53417 - DNA, 573 bp, Glycine max
  Clone ID: PAT_MRT3847_19249C.1
gtgcgagtgtgcccataactaatatttttttttcccccctttttcctctttgccaaaaactgaaaacactaatttaatggggtgggggtataaataaacacaaaaaaattcttgttccccgaataaaacaaaaacgaacattttatcttccctccaaacccttttctggaagcaccgtttcctctctctctctctctacaaccggcaaaacccgatataatattactatacttgctcccccctccaaaggcttaacacctttgtccttttagatctcgccccacgcgcctgttgccgcctccataaaaaaaggggagctgagggaacggcctcattcgctccgcgaagaaaatagaaagggccggcttctacgactttctaacgattcccacgcctacgcttggcgagggggagaacttttccgggggaccgtccctttccaacgtgcgcgcctttttggcgaagcacgcgctgcttccgaccccgacgaggctctttttgcacctgttgacaaaacagatcgtgttccccctctgcgaacttatcaagggcccccacgcgccctcggtgtgc

SEQ ID NO: 53418 - DNA, 412 bp, Glycine max
  unsure (1)..(412): unsure at all n locations
  Clone ID: PAT_MRT3847_1924C.1
acggcttcanaagacaaaaaagcgactttaaaaacaataaataatataaggaggcgaaaatcttaaagtacctaaagtcctttttatccctcctttcctttgaggggttaccacatcaccccatgaaccatacctctttaaaaattaaccagcattaaattaataatattaataataatcaaaacccatctcttaacctttcacaatcccacccctaataccctcctaatacaattttttaaaaaattacctcaatataatcctcactcaaattgtaaaaccctgtatttaccacctcctcacatcacaaaacatttgccactatcttatacactaacaatcttatcttataacctttcatattcccatataattatcttaaaatactttatttctttttttttaaattaaa

SEQ ID NO: 53419 - DNA, 170 bp, Glycine max
  Clone ID: PAT_MRT3847_19250C.1
tgtcgagcagaatcggctcgagcagacaatgggcagtgcttctctgagtacagtttcgtggtagtcttggcggacactttctagtttcaaggaaacggtgacaaccatggacgcaaaaccgtggcctgaagcacattcggaacgcaagacgcctgatttccgtagttaac

SEQ ID NO: 53420 - DNA, 188 bp, Glycine max
  Clone ID: PAT_MRT3847_19251C.1
gcctaagaatccggcttcgagctcgagaggaccaggagcatattgggcactgggtaaacggagccgggtacgcgtgcgccagtgacaaacgatctagccctctggatcacaacaccccagagcctcgacgcccggtggacctatcagcgagcgcctttcctagtgtagcagtcctacacacataccac

SEQ ID NO: 53421 - DNA, 536 bp, Glycine max
  Clone ID: PAT_MRT3847_19252C.1
ctctagagcggccgctaagaatttttttttttttttttttttttcccgaatcaatttaagttaatgtactatatatatgacgaaatttttttgaaaactgttactaattttaaaccttaaccacatttcacattgttgcaaggcctactcttctgaataaccattaacttctaacaaattacactactatatgaccactgaccattcctatataaatagcaaaatattgcacttcacataaagtgttcaaaaactaaacacactactgataaaaaattaccacctcattatctaccaccaaatcataaatatatttatcatctttataaaaacaaaccataacattacctatctaacttttaacactcaaccacgttttaatttactttcttcctaaatacaacaattcttacattacaatctatattttaacttaaaaataattactttttaataataaccaaacttacctattattaaaatttcctactaaacataatttttttaacactttataaccacttaaccattttttt

SEQ ID NO: 53422 - DNA, 1175 bp, Glycine max
  Clone ID: PAT_MRT3847_19253C.1
gggaagtctggaattagattggactggattagaaggctaaaaatagcccttggtgctgcgagggggctggattatctgcatgaactagcaaatcctccaatcatacacagggacatcaaatccactaacattttactggatgagcgcttgattgctaaagtatctgattttggtctctccaagcctttgggtgaaggtgcaaaaggttatattaccacacaagtcaaaggaacaatgggctacttggacccagagtattatatgactcaacagttgactgagaaaagtgatgtttatagctttggagtgctattgttggagctgataactgcaagaaggccaatagagcgagggaaatatattgtgaaagtggtaaagggtgctatcgacaagacaaaaggcttctatggtcttgaggaaattcttgatccaaccattgatctggggacagcactgagcggttttgagaagtttgtggacattgcaatgcagtgtgttgaagagtcaagttttgacaggcctacaatgaattatgtggttaaagaaattgaaaacatgttgcagttggctggttcaagcccaattttttcagcatcagcatcagtatccacttcatctagttataataatgcaaccaaaatttccctgcatccttacaacaatgaatactttgattcaagtgtggtacttccacgagcataaattgagtctgtgttggagattttattacatggttcagtatagcgtggtttcgactaatctctatgtatcatgtaaactatgtagaagagattatatagttaggatcacatgatcacaaaccatgtaataatttctcactgtgtaggccttttcattttacacctcaaacgtaacttgtgcaaataatgtacaaaacaagagagctgcagtttgataagtctctagttagattcttgtttacttttagtttctcattttagccgggattgtgtaacatatatatattgcttttgaacatattgtagaaaagatttctgctcaagttggctagctagtataatctctggattgcgtaatatatatgaaattcttctcattgttctaataattaaatgcaaccgcatactttgataaggaatgctatagtaataacttttctaacacactctcttcaatactccttacaattagtt

SEQ ID NO: 53423 - DNA, 296 bp, Glycine max
  Clone ID: PAT_MRT3847_19254C.1
cacgtgtgagaacacgtcagaaaggaccacagaacgagactgatactgattcacatctcttcgggcatgaaaataatttttgattatacacatatacaaataattacgtggagaatttgatacacgtgaaccttcatataccagcaaccacttcgactattatcttattgacgaaggactcaatcatgaccactagcaacacgtcatctgagaggaagacccacctctcatcctacacctataacacaggacacagctctccataattcacgctgaaggactttccataattgacc

SEQ ID NO: 53424 - DNA, 250 bp, Glycine max
  unsure (1)..(250): unsure at all n locations
  Clone ID: PAT_MRT3847_19255C.1
gngaganacatggcttccttaagctccttagngctgctccttgcagctctaatnctatcccntcaagttcttgcaaactatgagaatnccccagtgtacaagcctcccactgagaaaccaccagtttataagccnccagttgagaagcctcctgnttacaagcctccagntgagaagcntccagtgnagaagcnacnagtnggngaagcgangagtnggnaagcgncnanttggggnaanntcgggngta

SEQ ID NO: 53425 - DNA, 134 bp, Glycine max
  Clone ID: PAT_MRT3847_19256C.1
ctagttctttagcggcccccgttgtcacttttaaaagggaagagtttaattgcattcatacctgattatccaaaaacacgcaagcccatacaattgcaagtatgactgaatggcatttcagacagatgaaaatg

SEQ ID NO: 53426 - DNA, 185 bp, Glycine max
  Clone ID: PAT_MRT3847_19257C.1
ctcctgtcaatgaccatggatgctgtgcgatctgttgggcattctcagctatcggttcagtctaccgcatccatcacatactcacacgcgacctgactgcgttatcacagcatcaactggttgattgtgggacgccatattaccagcgatgcagtcgacgacttatggactatgcatctgcgtcc

SEQ ID NO: 53427 - DNA, 290 bp, Glycine max
  unsure (1)..(290): unsure at all n locations
  Clone ID: PAT_MRT3847_19258C.1
gagggagaggagtaagtaggaattaggatagagganaaatgtattntgtttgagtttgaaanattgattagttgtttnntntgnaaaattaaatgntnattgtgattgttgatgaanaattgaagtgtntntgagatttgaggattaggaganagnaagagatgatnanaggaggagaaggtgatanttnnaaagaagggangannnnaaaaannanaagannntnaaaananaaggttgnnagangtaaanggnaannnannngnnggagnnntgnatagataagtngg

SEQ ID NO: 53428 - DNA, 1083 bp, Glycine max
  Clone ID: PAT_MRT3847_19259C.1
tctacgttgagcacgcaacccgccccctacagcactactttcagttttttctgtctctgaatctcaaactcttcggaaagattaacattaatggctccaagggatatcaatagatccaacgttgttgttgttgccggagctcgagccgcagcactactctctgatcagttttttcttggtctccgaatcacaaactcttcgaaaaaactaacattaatggctccgagggatatcaatagatctaacgttgttgttgccggaggatccaacccgacccgtaaagagatccgataccgcggcgtgaggaagcggccgtggggccgctacgccgccgagatccgcgatcccggcaagaagacgcgcgtctggctaggaacgttcgacaccgcggaggaggcggcgcgtgcgtacgatgcggcggcgcgtgagttccgcggcgcaaaggctaagaccaatttccccacccacgcggagctgacgcacgcggcggcgcgtagccccagccagagcagcacgttggattcgtcctctcccccgacgccgccgttggacctcactcttgccgccccactcgccgccggtggcgcgttggtgttcccagtggcgcggcccgtggtcttcttcgacgcgttcgagcgtgccgaggtgcgcgcgtcgttcgatcttcccgtggcggcgttcagcgactcggactcgtccacggtcatggattacgagcggggctcacgtcggagagtgttggatcttgaccttaatgtccctcctccgcccgaggttgcctgaaccggaaaaaagatccggttttttcgcagctcggtttttctctctctatctgagtgagtggcgattatcaatttatcgtagtagctgacacggtgctagagtttatgtaaatatattataaatagattacaattaaccaaaccaaaaagaaaaagcaggcttatgtttttttttctctattctgcttttttttttccttttcgcaaaggaagaaggaatttcttacctcactgttgcccggtgatgttaactttttatatatataatgccatttctatattaattaaaaaaaaaaaaaac

SEQ ID NO: 53429 - DNA, 213 bp, Glycine max
  Clone ID: PAT_MRT3847_1925C.1
aacgcacaaaagataatgaatcttttgggggggtagcattacactgtgattaaattcttcaattagcctaaaaagaaaaaggaaataacagcccgggccatagattgacgaaacaaattacgaatggtctattggacaaatttgaggcgaaagtgactcggtcaggtaaaaattaaatttcttaaaaaaattcatcagaaaatcttggttctt

SEQ ID NO: 53430 - DNA, 460 bp, Glycine max
  Clone ID: PAT_MRT3847_19260C.1
gataattgttttggaagatacaaaagagtacattagttatgtctcaaaggaagaggctaaaactcaagatagaagaccttttgatcttttggtatgtgtagatgtggagaaaaggagattattctatttaaatttatagttttgtttttccctttaggtctgttactttaatacatcattcattagttctcttgaggcaggtgatcctgaatcccaagctagagaagaagggcaagaggactgctctgttttttgaagggtgcttgaggtgtccttctttgttaccactcattgctttgtcagactatcaattcactttttgtgctcgttataattcgggttttgagatgagaagtagaagctattgcatacctgttattacttaagaaatttctacatgtcttatgttcaacattttactgctctgactctcactaggctaatttccctttcatgagta

SEQ ID NO: 53431 - DNA, 255 bp, Glycine max
  unsure (1)..(255): unsure at all n locations
  Clone ID: PAT_MRT3847_19261C.1
angggtantgggttgtncgacgtcaggagcagggntcntcctaangcttttgtntanatactgtgtgtgtgctcnccgncatancagtncgangtgtttcatggcggcngttgnctccagtggctaccatggntgaccaggcgtncttcgtagnagcccaaacgtagttcaagtttggncnntgnnagcgagaagcaaaagctcaggccnatgtntaatccgcagccatcgaagcgcagagtactccacatggct

SEQ ID NO: 53432 - DNA, 296 bp, Glycine max
  Clone ID: PAT_MRT3847_19262C.1
ggttcttccaatcccgcgcccaaaaatacaactccaccgtgttccgcgccaacatgccccccggccccttcatcgcctccaatccaaacgtcatcgttttgctcgacgccaaaagcttccctgtccttttcgacgtcagcaaagtcgaaaagcgtgacgtcttcaccggcaccttcatgccctccacccaactcaccggcggttaccgaatcctctcctacctggacccctccaaacccagacacgaacaactcacgcgcctcttgttcttcctcctgaaatccgcgaagcgtcgc

SEQ ID NO: 53433 - DNA, 626 bp, Glycine max
  Clone ID: PAT_MRT3847_19263C.1
gaagaagagttagcactacccaacaagcctacagacaaactcgagccgaatcggctcgcaattcttctaagctctactaaaaaaagatacatagaaacaatcgaaattatttattattattaaagcaacatggttttgtcatggacaaaagggagagtgttccggcgtgccagaaagggtaaggagttgaaatattctggtggcgacatggagatagagattgcgatccccacccacttccggtgcccggtaaccttggacatgatgaaggaccccgtgaccgtttccacgggcataacctatgaccgcgacagcatcgagaagtggatcgagtccgggaaccgcacgtgcccggtcaccaaaaccgagctgaccagcctcgacgacatgatcccgaaccacgccatccgtaggatgatccaggactggtgcgtggagcaccgctcccacggcatcgaacggatccccactcctcgtatccccgtcaccccgtacgaggttgccgacacgtgtacgaggatcctgtcggcggcgcagcacggcgacgagaacaagtgcgtggagttggtgaggaagatcaaggcttgggggaaggaaagtgagagaaataagagatgcatagtttc

SEQ ID NO: 53434 - DNA, 475 bp, Glycine max
  Clone ID: PAT_MRT3847_19264C.1
ccggaacggactgggccggctcgaccgacccgcccacccgctgtaacaggacgacaaaaccggaagctgatagatatgattttactgcatttctaggacctaaagaaattctctttctgaataaatgttgaatgcaatgaacctctggctattatcattcgatgcaaattacacaggaacagacttaatttttttagtcaaaagttatgttaaacattaaagaaaggtctattcttttatgtaattaaaagaaagtttaacaaaaatcgattgaattattttcttaaaatataaagatgttagcaaaatagaatgtgccatcaaagtagccaatgctggttgatttgattatagcctatactaaattagtttgtaattagttttcatgagcttaactcaactctacaaaatcaacttgtaaggtgaggatttgttcccacttatataagttatctcgacactatctttatttgat

SEQ ID NO: 53435 - DNA, 332 bp, Glycine max
  Clone ID: PAT_MRT3847_19265C.1
gcgagatctcaagaaagctccgattctagcaagcaaagcttttgtaaagttgagattgaccttctcgggggtggaaggtgcgtgcacaaatctgccaatcgcgacagacttatacaaaatgctcgagttggctaccacgcgagagttgttggttggaagaaaggcagttgaatggtcatgaccgagatttgtgcaagggctgtacccaaaaagtgtgatagctcctgacgctgacaagtgtaatgaaccatcaggaaccggacagagcattttgctgcatgtaagtggacaaaaacacaaccacattcctgggaattaatctttccaataga

SEQ ID NO: 53436 - DNA, 1258 bp, Glycine max
  unsure (1)..(1258): unsure at all n locations
  Clone ID: PAT_MRT3847_19266C.1
attaaatctttgtgcccatagtgaaacaagaacctctctggtgaaaattctgatggacttgctaatgcttgatgtaaaaaggcctgtcagttattttagtaaagttgagccaccatatagattatatggttgtcagagcaatgtaatgtattcacgtcctcaatcttttgatggagttcccccattgctgtctcgtagaatacttgaaactctcacttatcttgctcgcaatcatctgtacgtggcaaaaattttgcttcagtgttggctaccaaatgctgcaataaaagaaccagatgatgcacggggccccacgcgtccgtacggctgcgagaagacgacagaaggggaaagtaatgatgggtacatcgccattgcaatgctattgggtctgttgaaccaaccactttatttgaggagcatagcccaccttgagcagctgctagatttactggatgttatcattgacagtgctggaaacaagtcatctggcaaatccttgatacctactaacccatcatcagctccacaaatttctgctgcggaagccgatgcgaatgcagattctaacaatttaccttctgcggatgatgcatctaaagttgatggttcctccaaaccgacagtctctggcattaatgttgaatgtgagttacatggagtgttgagtaatcttccaaaagcagaactccggctcctgtgctcactgcttgctcaagaaggtttgtcagataatgcgtataatcttgtagcggaagtaatgaagaaattggtggccattgctccaacacattgtgagctttttgtcactgagctggcagaagcagttcaaaagttgacttcatctgcaatgaatgagttacgtgtctttagtgaagcaatgaaagctctgcttagtacctcttctactgatggagctgcaattctgagagttttgcaagccttgagttcccttgtcaccttactgacggagaaagagaatgacagaggtactcctgctctatctgaggtttgggaaatcaattcagcattagagcccttgtggcatgagcttagctgttgcataagcaagatagaatcctactcagagtctgcatctgagatttcgacatcttctagtaccttttgtgtctaaaccattctggtgtaatgcctccacttcctgctggctctcaaatatcttaccatacattgaatctttctttgtggnttgtgagaaattgcatcctgctcagcccagtgatagtcatgaactcag

SEQ ID NO: 53437 - DNA, 441 bp, Glycine max
  Clone ID: PAT_MRT3847_19267C.1
tatttggcaacctcaaaagccgaccaacttaatggcttgaatgtcagcacataatgatgactgattactatctgaatattaacatgacattattatgatatgtgtgtaaatatctcctgaatttttttataaaatccaaacgaatttcccctgcgctcatccaataacaagggcaactccttatcattttcttggcctaaatgagaataaaccgtaacaacatagctgaattcccgtccgtacatgaacgacgcacatgtccggtttgcctgcgagtaactgcacatcaccaccttaaatactgtgattcaacctggctattgctgagatgtgcttgttaaccaccacctacagggaaccctacaagtattttcctgatataccatccgggaatatcttaagggctttggtaaaggaaaagtgatcattatgtccatcttc

SEQ ID NO: 53438 - DNA, 337 bp, Glycine max
  Clone ID: PAT_MRT3847_19268C.1
ataagcagctgtgaacagatcgagggcagggttttagaaggtggtataggcttggatgtgagcctcagaggcagggttgacggagaaaggctctgcggggtttgggaagaccaagcatcgagtgcattgttggacctgcttacaggtctatggaggatctttaaaacttgactcttgaatgcatgagtgttatcagtcttaacatgtgccatgggaccagggagtggcaccgtgatgtgatcatgaagatcaagaagtttaatgaggataaaggactctgtgttactcgaatgattgacacctgcggttggtaggatcatgctgatgatcatggagc

SEQ ID NO: 53439 - DNA, 737 bp, Glycine max
  Clone ID: PAT_MRT3847_19269C.1
caccccgtaagctaaaattagcttatacttatgttaaaattgtgtttcgaagaagctaaatgagagcttctaagttaattttaactcttgagaagcagattatatcattttacctgagaagtttgtccaaacagggttttattcaataagtgattagttaagctgtttacccaaacaggtatgctcatgctatttatatccatgtcagtactatgtatacccaaacagattatattcatttgtatattttgaaaggttttccttcttgtgctagcttccaaattctttatgactgtttaagagttactttagcaacgtgaaattctatttaatgaagagtcgagttttgttacttaatatgcaagaccatcgtgtttatgattttgaagtcctgaatgcaaccaagttttatggtgtgttaggtccaatgtcaagatgcatgagatgtgtgaatttttggaagcaacctactgttgcttctactatttttaaaaaattgtcatggttttacatgtttgagacgtgtgtccaagcacatttagtaaatatttaaatacataaaacttaaggttgtgtctgaaatttcaatgcataaatatttgaattagttccttttaggttcaaagtttacacttgtttaatctgttttctgataatgactgacaacaattatagttgagtttgtcaatgacattaagattcacttcttgcagaaaataaagaacttgtcaatattc

SEQ ID NO: 53440 - DNA, 184 bp, Glycine max
  unsure (1)..(184): unsure at all n locations
  Clone ID: PAT_MRT3847_1926C.1
tgttctcccccccgaatataaccccancggccgcacacacgggcggggctcatttatggaaaaaaccccggacttacccctcgaaagaaaagcgacacaaaggtagacaggatatcacgcgacccaccccgctcatctccagccaagacacacacaagatacatcaggaacggagatatcaacc

SEQ ID NO: 53441 - DNA, 361 bp, Glycine max
  Clone ID: PAT_MRT3847_19270C.1
ggctcagataggccattgattggacagagcttggctctttgtgaggaggataaaaccactgtggtgaatgagtgctgcgataagtacagcattgcagtaccacgtgtactataaatactctataaacatgaacactggatatatcaccctgaatggtctgctgaattgatacttgatccagtttacttggttaacgatgcacatgtaaagttcctagatcatttcaatagattaacttgtgaacacgagagagatctagattagctatcgacatagatgactcttcgagacaaatctccagcagtgttacttgaactcatgatatctagatcatcatggcttgacaaatttatgcacaagc

SEQ ID NO: 53442 - DNA, 1090 bp, Glycine max
  Clone ID: PAT_MRT3847_19271C.1
cagcgaagcttggaatcaccgagtacatagatgcgatgaggaaggctaatcctgacctcttatgggccatcgacaagaacaagagaggcatattttcgcatgcaattctcaatcgtagaaaagatgtcttccgactcataaaccgtgtcaatggacggaaggagatcatcaaatgtcgtgcagacgcgtttggcaacaacctcttgcacttggcagcatatttagggccttcatccgatctcgatcgtagatccggtgctgctcttcaattgcaaagggaacttcaatggttcaaggttgttgagaatattgtgcatcccaagtgtaaggaagagaagaattcagatggtaagaagccccgtgagatattcagtgaaagccacctggagatggtgaaagctggtgagaaatgggcaaaagacacagctggttctttcactcttgtgggtactctcatcactaccatcatgttcgctgcggctttcactgtccccggtggaaaccatcaagaaactggagcacccatcttcttacacgatcacatattcactttgtttatcatagcagatgcaatatctctctttacttcttccacttcagttctgatcttcattgggatcctcacgtcgcgttatgctgagaaggatttcctcaagacactgccgttgaagttactttgtggccttgtgacccttttcttgtcagtggtggcaatgatggtagcattttgtgcttcgcttgctatgatgctgaagggatatcaacgactcataatagcagccatgtcacttgcgagtattccagttattgtactagtgccgtcacagcttcgcctcttccttgagattttcaattctacaatgaatgcaacatatatcaagtgaagggaacctagagtaagtgctaattgactagtctaggccattggagtagttgttggcaatatgtatttggaccagggactgaggcaaatggattctgcaggaagaaataattaagatatcgtaataatagtagagttatctagcttagaaaagggtgagattattcacgcgcgctgcaaatttgatatatttgcttatcttcaaaa

SEQ ID NO: 53443 - DNA, 308 bp, Glycine max
  Clone ID: PAT_MRT3847_19272C.1
acggacgaacgtttttctgctattttctgggatccttcggagagcgttattttacatatatacctatctgttataaaggggtcgagtcccttaatgaaagctctccatataaaatgaatacacccactcataccttaacaatttattttgtaccacaatgccccagattttgagacaaacacaaactccgctctacttgatgggattcctggtagagtcgaatgtaaaaatatacctattctctttaaaaaatccttacttctatttttttgggtcccaaaggggagagagatggggattcacaattg

SEQ ID NO: 53444 - DNA, 466 bp, Glycine max
  Clone ID: PAT_MRT3847_19273C.1
aaggtttcccgtcatcactgtatgacgtcctccttctttggggggggggggggggagtgtaatgtcgaacgtaggaaggagggggtaattaggtaacgccaataggtgatatagcaaacctaacaggatagtatagacgtcagtggggcatagaaaatataagtggttatgtgttaaagtaataatgtacaggagggaaagagttcagtataacactagtgggtgttggggaaaggtgcaagtcaatgcattaaccgaggtggttatcaccgcgacggcatagttccggataatgtacacgttgtaattttcaaccaccgtgtaagtgtaaataccgctccagtatttggtatcaatatgcacgcctgcagcttgaagattataggcagggcaacaacgcattgtggtcagcgttggcacaattggtgttgaccagatagaaaggggggtcacccgtggcttaagt

SEQ ID NO: 53445 - DNA, 408 bp, Glycine max
  unsure (1)..(408): unsure at all n locations
  Clone ID: PAT_MRT3847_19274C.1
ccttcccctgggataggaaaaaaacctcttcctaaatccaggattgatttcatgggcccttgaaaattttcaaggtttgggggctattataaattattatagcaaattttgggggctgaagtccatagctggcttgtgcaacagttagcntgtgtgctgcgagtattaaaccctcccaatatctggaccattttgaagttctcccataaaccctgatgaataatacccaatagctgttgactttttttttatgactgtaaagttttaggttacacagtgatgatttaatttaaaaagagtggtcaaagaatgttttgacgtacatgcagtgcgggaaaaccaccagtatcgccaggacgggtagagcagtaggcaaatccttttatctgcatatatcatatatttttt

SEQ ID NO: 53446 - DNA, 507 bp, Glycine max
  Clone ID: PAT_MRT3847_19275C.1
ggctcgagagctatctgtccctcttttaaaaaccttagacaccaagaaattaaaagagcatgatcacgctttgaagactcaaacgtgtgagatgtctgtgacctgtgaatgaaggaagaagagacaaacatcaacatagcccggcacacacatgacagcatcattatgtgttcttccttcgagaaccacacaaaaaaaaatgctggatccacgaagagaccagcccacattttgttttccattgtccaaggaaataggacacatagctcatgggtatgacacatggggtgccacaaatactgattgtatggcatcaaagaaacggccaaaaaattataaaattggccacagctacaataacgacatgggagtgccattgggaacaggatcaaaggtggatgatgatgaatctggtatttgctcacctcctctttggactacaagcccaccagagagtcctcagcagtgcaaaaaccactataggtgcctgtctactgcgtccaagac

SEQ ID NO: 53447 - DNA, 485 bp, Glycine max
  Clone ID: PAT_MRT3847_19276C.1
aataaaacgcatgctttattttatactaacatacgttgtactaaaagatcatcctacaaatttcaagtataaaattcagctcatctttccgaaagagacactgtttataaaaaaaaaaaaatatacatattccacaactcgcgtcacaatcgaaccatcaaaaccaattcaatccaagacctaatcaccatgtgagaaaccaaaaaaaaattggtaattccctacgcatatattgttcaataaagtacctctcactttaattgaacttgtattaaaaaatgaagccgccaacattaagaagtaagaactcattatcgaggtcccaacgaaacagtcatatcaggcattttaatactatctgaccagatccttgacgtcaaataaaacttggagatcttgccagcgacgcgtcccatgttcgggctcttatctggatccacgtgtacacacttcagcgcgacacgtgtgcatttttcagctacatc

SEQ ID NO: 53448 - DNA, 368 bp, Glycine max
  Clone ID: PAT_MRT3847_19277C.1
agtcctagatccgtgcgttcgatcgcgatctatgatgcgagttatctaaccccagtgggagtttcactcacacaccgaagtcagttacaacataacatactgcttcctctcacctcacatgaatctttctgtgtctgatatccgcgccttctcttcactttcatattgctctggctctatatctccgaatcacacaacaggagaattttctgtgggagagtttcaatttttcaaatcctgtcatggatccatttggaattgcacacgcgtttctctccttctatcatcgtcagatattaatagcttttcgtttctagaaggaagggtggtttagtttttattaaccatagatgcaatcatggtataaa

SEQ ID NO: 53449 - DNA, 253 bp, Glycine max
  Clone ID: PAT_MRT3847_19278C.1
gtcaagtgaccatggtgtcattgcgtctgaaccatctgctgctgctgctgccatcccacgcgagccactggatttgatgactgcctaacaactcgtgctcagaaaatcgctggcttatcgtggcttgtcgcgtatccttactgagcgtgcaaaagtaattgataaacatcctgcgctgctctgtgtacttgcgtaatactgtgaccagcctgactatgttaaacatgcttaaggccctttgtgcatagcacaa

SEQ ID NO: 53450 - DNA, 311 bp, Glycine max
  Clone ID: PAT_MRT3847_19279C.1
acccggccctcgtcatcgagccgcagcagcaagccgaaggccggggcgggcaagtggcgcatgggctcgggcggcgactcactgccgcgccccagcaagcgcccgaacagcttgtcccctgcgctcaaaattgcagactcgagatgaccgtcaggttcgcgggaaggctgggcaccgtgccgatgccaggtaacaccagaaacggcaggacattacgcagttgggatgtcgggtacgtgatggtgaccgtcaggataccgcccgagtagagcgccgtaatattgttggcggcggtgaagttgaagctgctg

SEQ ID NO: 53451 - DNA, 245 bp, Glycine max
  Clone ID: PAT_MRT3847_1927C.1
gcacgaggcttatatatgatgacattgaaaatcccacaagtttttctgaagccattgcaagttatgtgggatgctactgtgttcgggatgtttaatgaagacttccctttgtacataaatcatgaagatttgtttgaaatagcatacagtagtcaatgtcttagcatctctattatatagttatggattttgtaagtcaatttacattattgttaattacctaacttattgttttaaattcaaaa

SEQ ID NO: 53452 - DNA, 1281 bp, Glycine max
  Clone ID: PAT_MRT3847_19280C.1
gaaaaatagaaaagcgaggagccaggtgatgctaatgtgaaaagaggagcagaatctccgccatgtccacgtcaccgtccggcagtaccctcggtaaggccacggcggtgatgaagagcctcaacttctacctttcagatcaccccgcaatcgtgactttcagatggagtcacgacctatgctggggttccacctggtccttcctcttctcctcaatcgcctcttacgtcgtcgtttcgatcttcctccacctcacattagcctttcttcttcgacgtggcagacccgttccgctgggacccattcccgcgctccacagcctctcgatgtccgtcatctccgccaccatattcgccggcctcttggtctccgccgccgccgaaatcaaagagacacggtggctctggcggcgctacaagaccccgctccagtggctgctatgtttcccccttgggacgcgtccctctggtcgtgttttcttctggtcctacgttttctacctctcgcgtttccttcacatgttgagaaccgtcctcgtcgtcctacgacgtcgtaagctcgttttctttcagctcttctaccacgcgatttccaccttcatgtctttcctgtggctcgagttctcgcaatctttccaagttctggcgatcctcttcaccacgctcgcgttctccgttatgtacggctaccgcttctggacatcagtggcggcgcgtggcgcgtgcctgccactcgtgctcaactgccagattgcgctgcttgggtgcaacttggtttgccacgtagcagtgctcttgttgcattttctaacaggagggtgtaacgggattggcgcgtgggtcttcaattccgtgctcaacggtgctattttgttgctgtttcttaatttttacgtgaggatgtatttagcaaggaggaggaagcgtaagggtgtcgtcattgatcatcgttgtgagaatgataataacattgctcgctcctctgtcttgggcgctggaaaagaaccacatagtaataaagtgaagtccaattaaagcacagatatatatttgaaggttgagtcatggcttgcaaggtcccaaactttgtggaattgggcatccgagtttattttttttttgtaattaaaagcacgcgtgcaggttctatataaaaggccaatgtgattgtaggaagatagagagttttgttgagtactctttttgataacattgtaagttatatataatcgttcttcatctctttcacggattgattattgaagtcttctcaattctaatc

SEQ ID NO: 53453 - DNA, 317 bp, Glycine max
  Clone ID: PAT_MRT3847_19281C.1
tacggctgcgagaagacgacagaagggggatgctgaggaaacattggtagaagaaattgaagatagagagagatagagagagagagagacagggttgcattgattaccttcttccttctctgtaaagagaatctaatctctatcctcattacggataacttcattcctctctcagtcttttatgatgtccccgtttgatatcctggtttgcgccgaaacacacccaactaagattttttgtttgctctgaccttcttcatcttgctgttatttgactacgacatgtctgaataggtggatgcatccgggtctggagc

SEQ ID NO: 53454 - DNA, 484 bp, Glycine max
  Clone ID: PAT_MRT3847_19282C.1
aaaaggaaaaaacttttcattttttatcaagggtcatgggccctttacattggaaaaaaaaagggggggaaagggggcttggaccccccaaacgaaattataagcagctcaacttcactttttaacgggtttttgatcagattggcccggacaacaaaaaggggcatacaggggaagctcactaatcctaaaaaatatccctgcccctttttaaaaaggaccactttacaattgaaggcccactaaagaaggaaaaaatatttttacatcagggggatgactttgcggggataaaacaaacaaaatggggggggggaaacccaaaacaaaaattattggtggaaagaaaaagaataaaaataaaagggggtttacaacccttggcaagggccaacaaccggttttggggcttccctatatggctatgagaaacacataccctaagcttcccttgcctacttatttaaaaatcggaaggggggat

SEQ ID NO: 53455 - DNA, 149 bp, Glycine max
  Clone ID: PAT_MRT3847_19283C.1
tacggctgcgagaagacgacagaaggggatgcgaataaccaatgagcctactgcatcagccattgcttatggtctggatcagacagggacaagtgttcgcgagacaaatggggagctttctgagcctggtggtgagacacttgatgttt

SEQ ID NO: 53456 - DNA, 328 bp, Glycine max
  Clone ID: PAT_MRT3847_19284C.1
cacatttcaacatgtaaatactgggctatgttagcctacgagacaagtactctggatacagatgataagggagagccacgtgagctttaccgcacgctgcctttacttggctacattagaccaggcttgaatgcaaatcttaaccttctgaggaactaaagaaagcttaggaagagtcaaaggtggtaagccttatgacttgttcaagatgcggctctctggcgccgaccacctgctattactcgatggcgcgggctagctgggttctacattcgtaacgaagggggctgacagcaataccatactatctggaaacgtcagttcagca

SEQ ID NO: 53457 - DNA, 230 bp, Glycine max
  Clone ID: PAT_MRT3847_19285C.1
gtgcccgtgatactaatctattggaaacataccaaatggcggtcggtctagaggatgcaagcttacatacgcgtgcatgctacgtaataactgttatatagtgacacctatattcaattcactgcccgacggtatacaactattggactgataaaaccttgacattacgcaactgaatcgtcttgcatcacattcaattttggccatctggcgtaatatcaaaaaggccc

SEQ ID NO: 53458 - DNA, 492 bp, Glycine max
  Clone ID: PAT_MRT3847_19286C.1
gtggttgatgagaaaagaaaaaaattgatgaaaggtgcaccatatcactatggaattgagatgaatcttgtggtgtataataagtgtgcatgggggaccacttgtaacagtgatccatcctatacaccatctattttagcctagtatgtatgttgtatttatatttaatctaaataatttttaatttgaaaaaaatcttataattttgattcattgcttaatattctctctcttttacgccggggttttggttgctcacaccgtgttctctgccgcacgagataactagggtttagaatctcgcagttacagaaaacatggcgactgtggtgccaacctccgaagaagacgctgcactctccgtcgttcgattcgcctctgaacttgcctgggccgatgccggtcctgaagttgctgagccccaagttagcagactctgcacggaggctgaagagttcattgttatcggaaagtggttggagttagcatcag

SEQ ID NO: 53459 - DNA, 387 bp, Glycine max
  Clone ID: PAT_MRT3847_19287C.1
atcacactaaaggatctgattaattgaaggcaatatatgctggacaaccgcgcaccactcacttggcatatatggaacacatacataatccatatcgcattacttagtggcggggcatgtgttactcatgtctaatgcacaaacatagcaggggcatgaaggaaaaccacaaaattaaaacgaggatcatatagctgataataataacaacaacacatgcactataaaaaccacatgcagtagtggtagcggcatcttcttcagattgggaacgcgctattgatggaagggagagcgctgatcctgatgatgacgtaacgtgcgaaaacggttgccttgaacgggcacgaccagttgtgttcggacctatctttgccaccggcgttg

SEQ ID NO: 53460 - DNA, 243 bp, Glycine max
  Clone ID: PAT_MRT3847_19288C.1
aaaggggcggggacaaacaaaacaaccgggccgaaaacaaccaaggaaacgccaaaacaagacgccccccaacacgagggaaccgggggcaacagggccacgaacccaacgacaaacgcacccggaaccgcaagaaacgcccaaagcaaccccaaacgaagccaggccaaagacccccaggatgcaaaggacgccccaggggaagcaaagccagcggacgacgccaaaagccaggcgaaagca

SEQ ID NO: 53461 - DNA, 577 bp, Glycine max
  Clone ID: PAT_MRT3847_19289C.1
aggtaccttttccgggttcaccggtcgacccacccatccgagttcaacgagtttgcaaccacacacaaaaaccatacccttcccgatgtcattgccgtcgccggtgtccacggtggtctccgcagccgcgccgtacgaccgcgccaaagcggtgaaagagttcgacgaaaccaaggtcggagtcaaaggtttgatcgattcgggaatcagaaccatcccccctttcttcgtccacccgcccgaaaccctagcggacctcaagcggggtgccgaacccggatctgtgcaggagatccccacggtggcgtggtggagaaggtccggctggcggcgagcaccgtggggttcttccaggtggtcaaccacggcatcccggaggaactcctccggcggacactggcggcggtgaaggcattccacgagcagcccgcggaggagagggcgcgggtgtaccgtaaggatatagggaagggcgtgtcgtatatttctaacgtggacctcttccaatcaaaagccgccagctggcgcgacacaatccagattaggatggggccaaccgtagtggattccagtgaga

SEQ ID NO: 53462 - DNA, 382 bp, Glycine max
  Clone ID: PAT_MRT3847_1928C.1
gcaaaatggaatttggttaattttacaagttttaatccaaacatgccctaacttgttttaatgaccctgcccatagagacaagagatcgttattaattggtggccaagaccctttgaatttacaagatatgccattgttttgcccaacggaaaaaccctttaaagaataaccctcttttcaaataatcatattttcagtaacaaaaaaaggggatttggagaactactatcggggaattaatcaattttccaggcggacaaccaagagggaacttaggaggatagaattccttattctggctcggcttgttccatatgtaaaaaaaggaaaggggggtatttttaccctttgagcaaaaaagggggtacccatgggcccttg

SEQ ID NO: 53463 - DNA, 491 bp, Glycine max
  Clone ID: PAT_MRT3847_19290C.1
ctcttcgttcggttgctcataacgttaatcagcccctatataaagattggttggagggaaattattgctttgatattaaatctcgctctagattggaaaaagtttcctctactaaagcacattttgttagtggaaaaaccttctaatatgacataatcggagctggatcacattcttcataagattatcctgaaaaagaagatcactaaagacccaaaaagattgatgcctgattgagacaaactatagatcctcaatacaatgagggtcaagctcaaatggaaacaaattcgtttaaattgtctctcgatgatgtcgaaacatctaacaggcccatgctggatcttaaaatttctcaatccaaaattgcactctccaaaacacagttggaggaaccatctgcgcagtgatctattggcaaattgtttgacagagggcaatattagagcaagtgtcgatttgcagcgcactcatcgtattaaggaatgatt

SEQ ID NO: 53464 - DNA, 146 bp, Glycine max
  Clone ID: PAT_MRT3847_19291C.1
ccgtcgttgtttagattcgtgaaacattgtgagactaggcatgctctgagagagcggggagaatgagctcttattgattcatactgtgtgataactattgatgacatttataaatggctggcggctactctcgttctctgggctga

SEQ ID NO: 53465 - DNA, 1428 bp, Glycine max
  Clone ID: PAT_MRT3847_19292C.1
cacctcctaaaaaaaaacgaacatattcatataaatacttctactgcagattcaacctttcgttctctgccagttctttctccaaacctacctttctatcttttctttttcatcggagcattatttgataccctcttgagtcctctctgcagcaacgcatttttcctcattctcttaaacaatttaacttctcctcgtttgatctgcataaaattgcattaatataaaaaaaaatgaagaagtttgtactaaagttagatttgcatgatgacaaaggataagcagaaggccttgaaaacagtttcaactctttcaggaattgatgccatagccatggatatgaaagagaagaaattaacagtgataggaacagttgatccggtaactgtggtgagcaaattgcgcaaatactggaaggcagacatagtagcagttggaccagtgaaggaacctgagaagaaggaggatcccaagaaagcagaagcaaagaaggagggagaaaagaaagaggaggaaaagaaagaagaagaaaaaagaaaagaggaaaaagaggatgatgagaagaaagaccccgccaattagcatgctttggtacgcgtagaggctgatgcagaggataaccagtacatagccgaacacaactatgaaccaaacatggaagagaaacacaatgattgtgtcatttattagaaaaacaaaaatagttttaattttataaatatatatgtttggtattatcgaccaaaattaaagataatatagataatctacatgtaaacttctattatgtagattattgaaataaaactttaattttgatcaaataacaaggttataaggagcctaaagatttgtatgtaagttttgtttcgttgctaaatagtaagttgtccaaacacaagggaaggacataccttttcaatatggtaatatattctattgtctttcactcccatatgagcgatcagccaaaagtaaaggaactccttgtatataatatggtgatgtcttgttgagttattactgagagatattttcaatgtgtagagaagaaggaataaaattttggggatgtatattttttggtggtggtgtctcctctagttttgttctgggacattagcaatgtgtagagagtaggaataaaattttgggagatttgttttgacaatgatcacaaatgtaatcatatactattatgttaatttcctttttttttttttaagttgctgcctgcatgtatacagtattagtggaatcagcaattagtaattttgtacgttgctgatgccaacaggaatttatgagaagaaaaaaagagattgaaaacgccaacccgtgcatttcatagtggtcaaaatggtagtagaagtctcaatctcttatcacattcaccgccacttgatgtcataaagattaatgtttgtt

SEQ ID NO: 53466 - DNA, 1716 bp, Glycine max
  Clone ID: PAT_MRT3847_19293C.1
gttgatccagaagtatatgaggctcacaaggtataaagcattggcatgttaaattgataagtatgcagatctttacaaaatttgtgatataataatgcacaatttatattttgggtgatggcacaataaacatgaaatgtatagctaaataaataagtttctttgtagaaaagtaataaatgcactgatattttctttctatgaatctatgcactacaacaacaacatcaaaagccttgtcctagtaagtgagtctggctacatggattacccaatgttattttgctcggtcaaagactaaaaatttagaaatattatttaccatgagatctatcccaaccaattcctccgaagtccttattggcctccctcttctcttcttcactgggctataatcatacagtccattattctcattggtgcttcccttggccttctttgcatatgtccaaaccaccttaatctactttttgtcatcttttcttctattggtgctacaccattcaccaaccacttcccatatacaatcattttgtatcttgtcttttattgtatgtccacacatccatcttaacattctcatttctgtcactccgatctttttctcttgtgcatgttatatcaacatttgtaagaaagtattatagattttttgctatgctagttaattgaacctgtttacttgttccagcttatttactgatgtttaatgcttctttcatatgttgtatattataaatcccgactatgattttagcataatcaagtactactacattttgtttgtgcacgaaggcaaccagaatattgttggcgcttgtttaccgaccaaaggttctagaatacaacgagagtggggaaccaaaagcaaccagaatattgttggcactttcatggttgaagcaagctttgatgaataaccctgggtataacaagccagtcgttgagcgtcaagaggctgcacaaattcttcttgaagcatctggagattacaaaacagagcccatcctatctaatgttgatccagaagtatatgaggctcacaagcacaaattagaacctgatctagccaaaagagcagagcattatttctctgagaatatgcgagttttgaaaggagttgaggcttgggcgatgggcaggttaaaagattttggaatgcttattacagcttctggtcggagttccattcaaaattatgaatgtggttgtgaaccactgattcaactgtatgagatccttttgagggctcccggtgtattgggagcgcgcttcagtggtgctgggtttagagggtgttgccttgcatttgtggaggctgaccttgcaactgaagctgcatcatttgtcaggagtgaatatctcaaggtacagccagagttagcaagccaaataagcaaagacacagcagttttgatatgtgaatctggtgattgtgcacgtgtaatttaaacagcattgttgccgttaatacttctatttcatcatcgttcttataaatagcaatcgcagctgtcaatatcattgtaattcatcaaatcttttagttctgtccttgtatttcatggcctggaataaactcacgttacattattagatttgaaagaggtgtattttagatggtgaaatgtagttataatcctttgattataaaattaatataacttattatttattttaaaaaaaaaaaaaaaaaaaaaaaaaaaaaaaaaaaaa

SEQ ID NO: 53467 - DNA, 503 bp, Glycine max
  Clone ID: PAT_MRT3847_19294C.1
cacctgctcaataaaaaaacgagcatattcatataaatacttctactacagattcaatctttcgttctctgacagttctttctccaaacccacctttctatcttttccatcagagcattatttgataccctctctgcagcaacgcatttttcctcattctcttaaacactttctcttttctccttcgtttgatctgcattaaaattgcataaatatataaaaaatgaagaagtttgtactcaagttagatttgcatgatgacaaggataagcagaaggccttgaaaacagtttcaactctttcaggaattgatgccatcgccatggatatgaaagagaagaaattaacagtgattggaacagttgatccggtaactgtggtgagcaaattgcgcaaaaactggaaggcagacatagtagcagttggaccagtgaaggagcctgagaagaaagaggatcccaagaaagtagaggcaaagaaagagggagaaaagaaagaggagg

SEQ ID NO: 53468 - DNA, 475 bp, Glycine max
  Clone ID: PAT_MRT3847_19295C.1
aaaaaaaaggggttccagccccccaatctaaaactaaccaaggggggatgccaaagaactaggggcgcgggggactcactcaaccaagggaccaaaatgaagcttagggtaaccccaaaacgattaacaatgagcgctccaaaaagggaaaaaaggggcggaaaaaacggggatttacaacgctaaatacaggggtccccccaaggaaaaaaggttttacaacttttgtccccgccccggggactcgggggggtgggccccctttcatgacatgggattccgggaggcacttcttgcggggggggggcccccgcgaagccaggggtctattagaacgcccaaagatattccgcagttttgttgctcccacaccccgcctttcaatcggcacgggaaaacccaagggggggaaagaaaaagctcccaagagccctattgccgaactccggaaaaccaatatggcccggggagcacc

SEQ ID NO: 53469 - DNA, 292 bp, Glycine max
  Clone ID: PAT_MRT3847_19296C.1
caatatcttactagaaatgtcccggcgagtaattatgaagtcgtgctgctccaccagtgacatcctggcagtgatcctccaagtgactgagcatatgttgcaccacatgaactcgaccatctcgtaacaccatcataatgagaacatcgatgtgagggaatcttaatctcatgaagtactgccagctccttgcttcttaccaacactctgtggtatccttcatccaacttatgtattcttctaactatgatgttgacatgtacatagacactgtacatacaccatgcaaatt

SEQ ID NO: 53470 - DNA, 259 bp, Glycine max
  Clone ID: PAT_MRT3847_19297C.1
ggcatcactctttggtaaacattactcaaaccaaaaaagggaaaaaaagccttttttttaaccaacaaagacagcttcacaagctttccattacaaccaaaaacctggttttaccccccccagcttattaaaaatttgcgtgggttccctttatgacacttgggaattggtggggtgagggaagggccactcaaatgggtaaaatgagaaaagaaatgatgattctcccgcctaagattcaacttttttgctggagccc

SEQ ID NO: 53471 - DNA, 573 bp, Glycine max
  unsure (1)..(573): unsure at all n locations
  Clone ID: PAT_MRT3847_19298C.1
cccacgcgtccgcaattgtctttttctgttgtttctttaaaataaatacttattccaggtagttactattttcagcatcctaaatcagaaatagctggagccaagttttgcagttctgacttggatgatggtagttctgagttgagtttaggaagcacagaaggtaataatgaagattattctagaaaaacaattcattggagtggtagagaaaatactggaagaggaaggaataaagaaaagaaaataaaaaaagacaggaagaatttagagacaggagagaatttaaacaagcatttgaatgacataaaggaagcctccagtggaacagatgatggtaaaaatcttagttttatcaaatcaaattttgtcacagattttgcagatgcaaaaaattcaaggtcctcttacaagggttccaggatgaaaagtacaaagctactgttagagaaaggtatttggtaattgctttaataccccttcctcataaaggtgggtgtcctctttataactggtatctttacatggctttctatttctaaactgaactttgtgcttancttaatttttttt

SEQ ID NO: 53472 - DNA, 803 bp, Glycine max
  unsure (1)..(803): unsure at all n locations
  Clone ID: PAT_MRT3847_19299C.1
attttgcagtttgcatacctatattattagagttcccttttagtatcattgttattattcatttcccttattcaactgctttttaaactgttaatggaaatggcttcctcatccttcatcttaggctcagatttcaaatgcatgttctcttcgaggaacactaaaaccatgtctggatttggtgcactgagacatccacacccaaatggtttgttcagtaaatgcttccactttcatactctatctactagaacggtgtcagggactacaaagatggtttctgatgtttatgttggtggagtcacaagtttcagagtcaatagcaagatgtacaccaagttggattcttgtttggtgataccacctaccccaaatcgtgccaagcctcgagctatagtcaaattcctgggtggtgccttcattggtgctgttcctgaagttacttatggctacctgacagaacttttggcaaaggagggttttcttgttgtggttgtgccttataatgtgacatttgaccattctcaagctgctaaacaagtatatgagaggttccaagcttgtttgggcacaatcctgacatctggtattttctcagaaaataagcttcctgctcagcttgaagaccttcctcttttctctattggtcataggttggtggtttgtttgatgcttagtatcattcttactggaattaatgtgatgaaaagaaatatatttcttgtttgttgaaatctgtagcaatggggcacttcttcaagtactcacaggaangcttattttctgagaaaataccctaagtt

SEQ ID NO: 53473 - DNA, 231 bp, Glycine max
  Clone ID: PAT_MRT3847_1929C.1
atgaaaatttccgaagttgtggatgagttcagcaccattccaaatctcaactgtcagggacgttggggaccatggcaggagctcgacgacggtgagtttaaggattcacaacattggagccgtggcagcgaagatctagagaatgaaggagacgacaacggtcttaaggtcgacaagctaaccacacatcgccctcattgtcgtctcaagcatcgttctcctatgcggtga

SEQ ID NO: 53474 - DNA, 356 bp, Glycine max
  Clone ID: PAT_MRT3847_192C.1
cgaaagccaggccattattaactggaacaagtttaggccaaatccacaacactactaaagggaggtaattttaaaaaccccaggagggggatccaaaaaagctccagacaattaacttatgggagtttacataaggaaatacctaaggtaaggacacattagcaaaaaagggggccacaataataggagaagttttaaggggagcaacgggaattacggggctcaatatggaaggcacccaatctggaaaaagggcccttatttttttccacttttttggagcccaaaacctccaaagcttcccttgggggggccctgggtttaaaactccttaagggcctttgccctttcctttt

SEQ ID NO: 53475 - DNA, 333 bp, Glycine max
  unsure (1)..(333): unsure at all n locations
  Clone ID: PAT_MRT3847_19300C.1
gggatagtgttcgatcaatctgggacaagaacattttggcacccaccgtggggtccactagcgcaagtcccgtcctcgagagctatggcaataattggaactgaaacaaacacaacaacaatggagcatccagtaaatcatcaaaatatggagatatgcatagaagatcaaaccgatttatcctcgattgtgaggaggtttgttaatgttttaattatgtttaggattatgtcggcctaatgtaactgaattcccaattgtagtactgaaatcgaagcttagttgtcttccaaaaaaaaaaaacanannanaaaaaaaaaaaaaaaaaaaaaa

SEQ ID NO: 53476 - DNA, 226 bp, Glycine max
  unsure (1)..(226): unsure at all n locations
  Clone ID: PAT_MRT3847_19301C.1
caagcagcatagaaagtggtgtccagtagcaacaatagagcagcaacggcgaccaagatattatccttccttatgctgcttgctgtttctgcatggtggtgctgacgcgacgataanttcctcaatgctgacaagctgctatagctgcccttcttcctccataccttccatcaatgatggctgcagtatgtgaaaacacagctcttcaaccctattagctgcaaca

SEQ ID NO: 53477 - DNA, 233 bp, Glycine max
  unsure (1)..(233): unsure at all n locations
  Clone ID: PAT_MRT3847_19302C.1
ggaatttcccggngtcgacccacgcgtccggcgcgactacttacggacttctgattccgtaataccatcctgctgccgaaacagccctggttattgcactttagaaccgagctgagatgttgccaccactgtctcagagggctgatgctgctttacccttggctaggttttgacttggctcccgatatattgttgcgccaactctgctatgcttaagcttatcgccaacctcg

SEQ ID NO: 53478 - DNA, 541 bp, Glycine max
  Clone ID: PAT_MRT3847_19303C.1
tacggctgcgagaagacgacagaaggggaacgcagccaaagaaaagaaaatcctcaattttctgagcagccaaacactctctctctgtctctcgaaaattctcagtttgcagagaaaatctgaatcatgtcgtggcaagcgtatgtcgacgatcaccttctgtgtgacatcgaaggtaaccacctcactcacgctgctatcatcggccaagacggcagcgtttgggctcagagtaccgacttccctcaggtaagctttccattttcctttactctttttcccagtcggatctcgatttattgttaattgcttagggaaagttctagattcgccgatctatgctcacttgttatggagattgaagaaaaagaatcaacatgcaaaaatatttctgaaatcagcaacggcagttcagtgcatcttcatcttctctgataattaacaattaactaattaacaagaaaaccagaggatcacttgtgttgattcagattctgtacttgccagcaactattgtattttaatgctaacataacattgt

SEQ ID NO: 53479 - DNA, 447 bp, Glycine max
  unsure (1)..(447): unsure at all n locations
  Clone ID: PAT_MRT3847_19304C.1
cgttcntancgtncgtnagcgcggaanncggctcgangngttntnnacgcannanntncgntncttnatgcangattgntaangaanagtgttacanagnnagtngtagnangttggtacngtccaggcagtgtgctcgggcgntgtnnnacncngnaatggngtnngtgnctcatggnangaaacncctcagagncggctnttngacacacagcnnanacantanannatgtgtgngnttctnacngcggcagtgtgnggngcgtnnacnangatcnnanggnngcagcnacgatatgnganntagcnggnatngtcagtgtnntngtgnnggngagagcagcacgctaactgtctnnnaganttctctgngagacanantncgngtgtngngtgtctnntnngnnngangacgntcgnnntncgtanannngatcganntngatn

SEQ ID NO: 53480 - DNA, 241 bp, Glycine max
  Clone ID: PAT_MRT3847_19305C.1
attatcacaagcgtcacttgctatttcctaagttagagatacagccaccattcttcattgaaatctatatccaccattcttataaatcaccatcatctacaatacaaacccctatccaccttcatcaccatattatctctataaaaatatatatatcttaaactattcacttcacttatccatgtactaaactcttctcttgataacattttcaaaatcctctacttacaaaattatcatt

SEQ ID NO: 53481 - DNA, 334 bp, Glycine max
  Clone ID: PAT_MRT3847_19306C.1
gtacgatactgtgtatggacgggctctaggcccatatttgaccattggcccagcttaaccatgcagctaatgttaccgactaacgtgagatgcaacatgattcttgcgctcagcacatgatcattgaagggcatgtaggacatgacaaacaaactgatgagatgagatgaacttgtacgtctccacacaaactgtttcccagtaatcgcagagttcatcacatacgacacatctataaggacatctggtattagcagtacacctgcgcatgaccgttgaagactatttgctccatggtcgatcttgaatcaagaggcgcacgtatactcttact

SEQ ID NO: 53482 - DNA, 706 bp, Glycine max
  Clone ID: PAT_MRT3847_19307C.1
ccaagtcccatttcttccacaaatcttactgtttcttctacttctcaaaagcactttttcaactccaatcatctcaacccttcacttccggccattcccaaactagcttatttccaatacttcaagacaccaccaccaccacccatccatccctgcaaattccccacttccagcaaccacctaggtttcctttcaattttctcctttatatattcattttccaaacgcgcccttcttcaattgcagtccccgaaacactcaatccccaatggactccaaacaatgccgcctgcagaaaccctaatttcccctcccaacaactcatgaccaatgacggggcaagagccgcgcccgacgacttcggccgcgccgccgcccgcctcgccgtggcgcagctctgcgacgccgccgggttccatggcgccaccgcctcggctctcgacgccttcgccgacgtcgccgtccgctacctcctcgacctgggccgaaccgcgagtcccacgccaaccacgccggccgcactcagtgcaccgtcttcgacgcaattcgcggcatggaagacttagaagcgccgcgagccttcgccggcgccggcggcatcagagagatcataaacttcgtcgaatccgctgccgacgaaattccgttcgcccaaccgatttctaattttccggttgttcaggaaacgacgccgcatcatcccgag

SEQ ID NO: 53483 - DNA, 567 bp, Glycine max
  Clone ID: PAT_MRT3847_19308C.1
agatagtcttcattgaggttagtcttctaacttgtagctcctttccttcatgacatcagcttcctatttttcatataataataataattcctcatctttatactttacttattcccattaaattagctttggggaattggtaggtaggtgtgtgagatctggattcctttttttttactcctaataataaatgagcacaatgttacgtattatatttatatcgtgtatgcatattatacggcacaaaataaagaagatacagctagaattagggcctacatgcttggaaactacgagactactttagctaaagtggaaatgtggaacacccattacgaatagtattagacttttgagggcaatcatgagggctttaaccagaatttccgagtaaagtcaagagttgcaatattagtgaaagtcgtaataaaacttgtagttatttttttgaaatggaatttcaaggaaatgaccttttgaatattatattctgatttaaagttaaaagaagattctacttcctataaaccatgcttaattttttttattatccttcaacttagtata

SEQ ID NO: 53484 - DNA, 441 bp, Glycine max
  Clone ID: PAT_MRT3847_19309C.1
aaaaagaaaaagaccgttcaataaatatgaactttattattgctgagcttacaaatatgagaaaagcatgttataacagttttctctgcagcaggtatgggaggggagactccggaagattgatccttcaaattcacaaaacagatccttggtttcatcttctagggtaactctaccatccaataagatcatgcaaaagatgctgctgaaccactaaagaagtttgcaaaactgtaaatatattcatgtcatttgtttttaagagaaattcaaattttgcttcaatggaattatattgaatcaaggatccaaatgcatccagatcaattttgtaagagctacaacgactatcatggtctacgtcttggaccattagaaaattgatctggatgcatttggatccttgcttcaatggaattatattgaatcaaggctcgagcc

SEQ ID NO: 53485 - DNA, 228 bp, Glycine max
  Clone ID: PAT_MRT3847_1930C.1
atttggttttggatgctttgaatccgcttggattcaccaacacacaaatttgttacagatgcaaggggtcgttatcaaaatgatcgtcgagacccaatatccccaaaaatataatttactgaaagaatatcaccaattgaccagaccaaaaatgcacttgatcactggcacttgcatcccaaggggatatttaaagtctaccaacaactacaaagaacggaccaaaaa

SEQ ID NO: 53486 - DNA, 627 bp, Glycine max
  Clone ID: PAT_MRT3847_19310C.1
ttcccgggtcgacccacgcgtccgcccacgcgtccgcccacgcgtccgctttcctcgttttacactctttaaagaagtaaacacccctctctgagtctctcacctcaccaccacccacctgaacaatttccctgcacccaacacggtttcaaatatcactcccctataaaacatccttaaaaacggttaaacacccaaaaggggttttcaatttcacgcaattccttccattcccacaccaacaaaaaaaaaaaaaaaaaccatcacacatattactacattataattgctatagattatgaagaaattgaagaattactacatgcacctccggcaccaccacacggcggagcgcaagtgggtgttcccactcgccatcggctccctcctctccctcttcctcctcttcctcgctaccctaacctccccggagggcacccccattctcccattctaccgctccatcaccgccgcctcctactccgtcttcgtcgaatccaagctccgccccctccccgtcttccgccctcctcccccgccgcgcctcgcctacctcgtcttcggctccaagggcgacggcgccgccgtcacccgcgtcctcctcgctctctaccaccccatcaatcg

SEQ ID NO: 53487 - DNA, 152 bp, Glycine max
  Clone ID: PAT_MRT3847_19311C.1
gcgaggcttgcattgtctattgagttatcgagctaaggtacctatttcgggggtagcaataacgggtgctagcagaatatcatgcatctaagggctcgcgcatgaacattttggatacatcatgacctactcatggtttactgtcgcactgt

SEQ ID NO: 53488 - DNA, 595 bp, Glycine max
  Clone ID: PAT_MRT3847_19312C.1
aaaaaacgaagcggccactttccttttatacttgggagaaaaggggttaagggccaaaaagcaaaaaaaaaaggtttttaaataataaaagaaaaaaaaaaccaaaaaagaaaaagaaggggggaaaattaaccccccctttccccttgaaaattcattcacgggccccaagccccccaaatcctttttccaaggaaactaaaaaaccttttcaccgaccctttttcctaatgggcaccgccttgaccagcctaaacctcgccgggaccagggccgttactggtactttccggaaaaaattccgggggggaaaagggaaactcggggcgagtcatctggggggggtggggttttaaacccctcttggttctctgggcctttctaaaaggctttggggggggggggaaaaagtcttcaaagggggcaaaaatttcgggtaaaaattggggggggggaaaggagttccaggggccccagtatctcatggagccccggaagcaactgcagttgaaaagaggggggggatccccccccgcgacaaccttaggtttccgggaagggttgccgaaaaatttgttgttggatgaccatgaaa

SEQ ID NO: 53489 - DNA, 1105 bp, Glycine max
  Clone ID: PAT_MRT3847_19313C.1
tttttgcaaagaatcactaatcttgtttagaagcatacgaatgaagctgaacattaatgctttttcacctcgtatacccaaacaatgaaacaaatcatgggacacaaactacacgtccaaaggatatatattttgcaccagatcaagttgtgttttgtaaattgcagttggagctccacataacagtgatatcaaagtgtgtagtacatacaaaccacagaaaacatgattaattaaaaagggttggggagtgcaaatacagttcaaatacttatgaacaacatgatgcagccctagttccttcggcgggtctatcaacaagtaccatcccagctgggttctgagctggctgagcccttggtaacctcttggctatttcatagaatatatcattaacgttggatgcagttttggcagaggtctccatgaaaaacaaaccattttcttcagcatatacacgtgcttcttcagctgtcactttcctcttatcttccaaatcagctttgttaccagcaagagccatgaccatattaggattcccttgcttttgaagctcttggacccacttcttagctcgggtaaaggagtccgagctagtgatgtcatagacaatgatagcagcagcagcacctctgtaatacatgggagccaagctatggtacctctcttgtcctgctgtgtcccatatctcaaactttaccgtcgcgtcatttactgccagcgtctgtgaaaagaacgctgcccctattgttgattcctgaaattcgagaaattgacccttgacaaagcgcaaaacgaggctggatttcccagcacccatgtccccgagaagaaccaatttggcattgagattgttgtgtccgatcgtagccatgggaagaaaattggatcgatcggaaacgaagagagaaaggagtagaacccaataggcgaaagattagaactttgcactcagcggattgatggatatatagaaaaattgaagattggaatgatcaaatcaaagatacagagcaagagactctctttctctctctctctgaattctattgcttatcgcttacggtgggtttccttccccttctgtcgtcttctcgcagccgta

SEQ ID NO: 53490 - DNA, 1856 bp, Glycine max
  Clone ID: PAT_MRT3847_19314C.1
gagctccacataacagtgatatcaaagtgtgtagtacatacaaaccacagaaaacatgattaattaaaaagggttggggagtgcaaatacagttcaaatacttatgaacaacatgatgcagccctagttccttcggcgggtctatcaacaagtaccatcccagctgggttctgagctggctgagcccttggtaacctcttggctgttcacaaaagcaaatgtgagtcatacaaaagtaaatacggttcagcagtttatatatagcacaagaaacactgtctaaaagtaatgcagggtactactacaatcacataagcagtgcaattagaactatttgcttgctttaacagaaattcagaaaataaacagagcagaaccttttttggataaacttctccatgaacacttatttaagagaagaaaataagaatgaaaaataaaataagttttctcatgagctaaaattagcttttgcataagctaatttgtaaaaactctcctattagcttctcccaaatctggttttaacttgtgcataagctaattttagtttatgaaagaagcttatttcattttatttcctttttttcttattttcttttcctataagtacttatagagaactttatccaagcaagatctaacttggtaaagaaatatgtaatgtgccacaaattgaagtggacagtggataccacctggaacggaagaaaaatagtccaagaatgttgccatagtgcaataatgacaaagtgaagagaaaggatacaggacaaaaaatgtagtaaagttatagatccaacacatgtttcaatgagcttgatatgttatcagtgggtcagataaccagtcaccagttacagattttatgaattttaaacttcaatgagcagtgaatataattgcaacttggccagtgaagtgggggtagagagagtttctcgattccctttaaagtttaaaggcttccttcctctttggactgatgtccctcttaactttattctaagcgattcaatttaaagatgaagaaaataaaatactcattaagaagcctaaggcaaaaaaaaataggaagggccccaaacctatttcatagaatatatcattcacgttggatgcagttttggcagaggtctccatgaaaaacaaaccattttcttcagcatatacacgtgcttcttcagctgtcactttcctcttgtcttccaaatcagctttgttaccagcaagagccatgaccatattaggattcccttgtttttgaagctcttggacccacttcttagctcgggtaaaggagtccgagctagtgatgtcatagacaatgatagcagcagcagcgcctctgtaatacatgggagccaagctatggtacctctcttgtcctgctgtgtcccaaatctcaaacttcactgtcgcatcatttactgccagcgtctgtgaaaagaacgctgcccctattgttgattcctgaaattcgagaaattgacccttgacaaagcgcaaaacgaggctggatttcccagcacccatgtccccgagaagaaccaatttggcattgagattgttgtgtccgatcgtagccatgggaagagaattggatcgatcggagacgaagagggaaaagagaagaacccaatacgtgaaagattagaaatttgcactttgcggattggtggatatataaaaaaaaattgaagattgaaatgatcaaatcaaaaaatacagaacaagaaactctctctttgaattctattgcttttcgcttaagttgggtttccttgctaccgtctgcgtccaaaagcgttcgttttatttgtttttggtgtcgtccccttctgtcgtcttctcgc

SEQ ID NO: 53491 - DNA, 564 bp, Glycine max
  Clone ID: PAT_MRT3847_19315C.1
cgtttgcgtgggcggacgcgtgggcggacgcgtagacggactcgtgggaaaaacctgcgcgagtatggaaagtttttccatgcttgtgttgttgcattgtccctgaatttgtacttgattctgggacgtcactcagtctgagtctgtttctgcaaatttcaaaaccctctctctcgttactcgccatcactagcgagtgctccttcttcctcttcgcgaaattcgtatgcgaagaaggaggtagggattcgcgctcctgctttctcagactgcctaattatcttttattctgcgaagtaactgagagattgaagatgggaggagatgattctggtttggagagtgacaattttgattggaacactgaagatgagcttgaaattcagaactataactcgtcgtcttcatgtttaacccttcctaatggagatgctgttactggctctggagaggcaagctcgtctgcagttttggctaattccaaggtgcttgatcacttcgtcagcatgggattttctagagaaatggtttctaaagtaattcaggaatttggtgaggaaaatg

SEQ ID NO: 53492 - DNA, 388 bp, Glycine max
  Clone ID: PAT_MRT3847_19316C.1
aaaaagggaaattttgttcttacaaaagggttttaagggaaaaacaaaagggggaaagccaaattttttggggaaaaatttccaaaatattctgggggacaaatttggggggctagaaatttttccaatggaaaaaagggaaagggaaaaaggggggaggggcccaacctctttggaaccgggccctgtaatacggggggaaatcctgaccaaaaaggccgggtttaccaaggtccggcacccacaatttttggcaaaaaaaatttttttaaaaaaacttttgttttgggccagcgcctggaaaatagggccggggaactttggggggggaaactagagcaccccaaaaacggggccccccgttctccccggggggtccgaccgggaa

SEQ ID NO: 53493 - DNA, 962 bp, Glycine max
  unsure (1)..(962): unsure at all n locations
  Clone ID: PAT_MRT3847_19317C.1
ttcttttccatgcttgtgttgttgcattgtccctgaatttgtacttgattctgggacgtcactcagtctgagtctgtttctgcaaatttcaaaaccctctctctcgttactcgccatcactagcgagtgctccttcttcctcttcgcgaaattcgtatgcgaagaagggttgcgttctctctctttgccgtttttgtttgtttaattttgcgtagctttacgaggttgaatttgagctgacgtgcattttttttgagttttgtgcagaggtagggattcgcgctcctgctttctcagactgggcggacgcgtgggattctgcgaagtaactgagagattgaagatgggaggagatgattctggtttggagagtgacaattttgattggaacactgaagatgagcttgaaattcagaactataactcgtcgtcttcatgtttaacccttcctaatggagatgctgttactggctctggagaggtaagcttttagagactttttctttttctttatgttttgagtggttgaatattaagaattttgaggatatattaccagaaagtttaagataatgcaaatacgttgtctttggcaactataaattttcttttgggattttggccttctctaattccgattgttgctggcgtacttgataaccaactaaccataatgaaccaaaatgataaactaaccttgcaggtcaatgcagaaagaaaaaaaacttccggattgaaaccatacaaaactatttttcatgtataatgtctattttactgtttagattttgtggaattcatacatgtattaatttttagctactaatgtcctattctctcccccttcnagcaagctcgtctgcagttntggctaattccaaggtgcttgatcacttcgtcagcatgggattttctagagaaatggtttctaaagtaattcangaatatggtgaggaaaatga

SEQ ID NO: 53494 - DNA, 223 bp, Glycine max
  unsure (1)..(223): unsure at all n locations
  Clone ID: PAT_MRT3847_19318C.1
tgttgctgaagacatgtttcactggcaagccacaattattggtctccaaaacaggccttatgctggagggggtttcctagtcactattcatttcccttcaaaatatcccttcaagccacccaaggttgcattcagaaacaaggtatttcaccccaatataaatagcaatggaaacatttgccttgacatattgaaagagcnagggagccctgcgcttactatt

SEQ ID NO: 53495 - DNA, 477 bp, Glycine max
  unsure (1)..(477): unsure at all n locations
  Clone ID: PAT_MRT3847_19319C.1
cgtgttgtgaaggcttctccttttgaatggatatttgtcaaggcttattgaatgttaacatgagaatatatatactatttgagatgagaaggcaagcttttgatatttaaagtatgacttattattagcagcaaatgaaccacctcttcagtagccacactgaaatattgcaactctcatgagagcacacaatatcatgtcacgtggtttcgtggttggcatcagggtacaaattactaccttgagcaactttggttatgtggagttaagataatcttaattctgcggtaacataaattgcaccaccaaggctaacaaattgggggctcattggacatgtggcgtgggagccctttatgtgtggtaattgcaaggcatgtacgccatttttgtattcataggtggctgatagtggggttcatatttagcattnttgaatttctgggtgttttgggttgttggaggctgttaaacact

SEQ ID NO: 53496 - DNA, 4618 bp, Glycine max
  unsure (1)..(4618): unsure at all n locations
  Clone ID: PAT_MRT3847_1931C.1
accaacgcgtccgctcaagctggcaaccttgtggatcagacgcttgcacaactccgggtagtgctggccttttgttggggaagtccagagccttgcaggcctcttcctcagccttgaagaagttgcacaagaagacttggctacaaaactgggtttgcaaagggaatgggaattgggtgccacttacttttgttgttttttgctgttacgcgcttctgttgtggtatggaggctatctggttaggcaccacgccaccaacggaggacttgccattgcaaccatgntntgctgttatgattgntggatttgggnnttttggggccaattccgcaccaagcatggctgcatttacgaaggccagagttgctgctgcgaagattntccgtataattgatcacaagccaagtattgatcaaaatagcgaattcggcttgaacgagggatataaacacagttactcgagcctcattcaatcttgtgtccggatgttgcgtgatctgtttagaatttcggttgctttgctaactggagacatatgatttgtatccctagagtcaaggaaataatcttcaagccaggctgtagatttatagaatagaccaactctgaactttgctagatgcctttatatgacagtttaagctgtgaggtggaaaatgagagtgccgtcagtgctgctacagcgttgtttttgtgccaacaaatttctggaagtggatagagattagcagttttagcactttttgcttactacgcaattggtctttggtatcctgtttggctggtgaagcatgtgatctcggacttctctaaaacaatcagagtttttatggtcctaatggtttctgcaaatggtgctgctaaaactttaacactggcccctgtctttatcaaaggagggcgagtcatgaggtcagtgtttgatctccttgaccgcagaactgaaattgagcctgatgatcaagatgctactcctgttcctgatcgtcttcgtggtgaagttgaacttaagcatgtagacttctcttatccaactcgcccggatatgccagtttttcgtgacctcagtcttcgtgcgaaggctggtaaaactcttgcccttgtaggacctagtggctgtggtaagagctcagttattgcacttatacaaagattctatgatccaacatctggtcgggtcatgattgatggcaaggacatcaggaaatacaacctcaagtccttaagaaggcacatttctgtggtaccacaggagccttgtttgtttgccactactatttatgaaaacattgcttatggacatgagtcaaccactgaagctgagataattgaagctgcaactcttgccaatgcacacaagttcatatctggtttgccagatggatacaaaacatttgtgggggagagagtggttcaaatgttgaggggacaaaagcaaagaatagcagttgctcgggcttttgtgaggaaggctgaacttatgcttcttgatgaggccacaagtgcacttgatgctgaatctgagaggtctgttcaggaggctctagaccgcgcctcctcaggaaaaacaactatcattgttgcacacaggctatcaacaatcaggaatgccaatctgattgctgtgattgatgacgggaaagtagctgagcaaggctcacattctcagttgttgaaaaatcacccggatgggatttatgcgcgcatgattcagttacaaaggttcacccacagccaagttattggaatggcctcaggttcaagctcttcaacaagaccgaaagacgacgaaagagaaggctagccattcaaatgatattaccagctacaggattataagccatatacccattataattattggcatttttgttttgaccatagtatagtttgtgtatcatccctaccccccctttctcttcctattcaagaatgtatcttcttgtctttatgaatgttactaaggaaatgacaaaatacaggaacgagattgaaatggatgaatagatgctcatccttattaaagcttgctttcaaagagcaagctagttccttctggagacttgcaaaaatgaactctcctgaatggctttatgctttaattggctctatagggtctgtagtttgtggatcccttagtgccttctttgcttatgttctaagtgctgtcctcagtgtgtattacaatccagaccacagatacatgatccgcgaaatagaaaagtactgctacttgttgattggcctttcatcaactgcacttctcttcaacacattgcaacacttcttctgggacattgttggggaaaatcttaccaaacgtgtgagagagaaaatgctgatggcagtgctcaaaaatgaaatggcatggtttgatcaggaggaaaatgagagtgccaggattgctgcaaggctggctcttgatgccaacaatgtcagatcagccattggagatcgaatttctgtaattgtgcagaacactgcacttatgctagttgcctgtactgcaggatttgtgttgcagtggcgccttgcccttgtcctcgtagctgtctttcctgttgttgttgcagccactgttttgcagaaaatgttcatgaccggtttttctggggacctggaagctgctcatgccaaggctacacaacttgcaggagaagctatagccaatgtaaggacagttgcagccttcaattcagaaacaaaaattgttggccttttcaccaccaatctccaagctccactacagcgttgtttttggaagggacaaatttctggaagtggatatggtgtagctcagtttgcactttatgcttcctatgcacttggtctttggtatgcttcttggctagtgaagcatggcatctctgacttctctaaaacaatccgagtttttatggtcctaatggtttctgcaaatggtgctgctgaaactttaacactggctcctgactttatcaaaggaggccaggccatgaggtcagttttcgaactccttgaccgcagaactgaaattgagcctgatgatcaagatgctactcttgttcctgatcgtcttcgtggtgaagttgaacttaagcatgtagacttctcgtatccaactcgcccggatatgccagtttttcgtgacctcagtcttcgtgcaagagctggcaaaactcttgcccttgtaggacctagtggctgtggtaagagctcaattattgcacttatacaaagattctatgatccaacatctggtcgggtcatgattgatggaaaggacatcaggaaatacaacctcaagtctcttagaaggcacatttctgtggtacctcaggagccatgcctatttgctactactatttatgaaaacatcgcttatgggcatgagtcagcctctgaagctgagataattgaggctgcaactcttgccaatgcacacaagttcatatcttctctgccagatggatacaaaacatttgttggggagagaggtgttcaactatccgggggacaaaagcagagaatagccgttgctcgggcttttttgaggaaggctgaacttatgcttcttgatgaggccacaagtgcacttgatgctgaatcagagaggtctgttcaggaggctctagaccgcgcctcctcaggaaaaacaactatcatcgttgcacataggctatcaacagtcaggaatgccaatctgattgctgtgattgatgatgggaaagtagccgagcaaggctcccattcacagttgttgaaaaatcacccggatgggatttatgcgcgcatgattcagttacaaaggttcacacacagccaagtcattggaatggcctcaggttcaagctcttcaacaagaccaaaagatgatgaaagagaaggctagccattcaaatgaaattaccagctacaggattataagccatatatatacccattaattattggcatttttgttttgaccatagtatagtttgtgtatcatccctaccccccctttctcttcctattcaagaatgtaatcttgtctttatgaatgttaccaagggaatgacagacgaatacaggaacgagattgaaatggatgaatagatgctcatccttattaatttattcaaggacacttttgctcctacatttcttagcaaggtatcaaagcctgtttgaactataactagtggtcaagttttcaactcttccactgcattcttcatacttgaatgaaagttgagtatttaactttgtcctatattttcaactctgatggcaccaaataccggaggggactactttatccaaagcttaattcttcccaggcgacttcggctgcacttttacctaacttcttcccaaacagattttagaccgccttcttcttaacaaaatcatttttttttttacaaaataaggtgagcttattatttacctttacttcaaggacaaaaggctttgctctagtgccgtgtttgcgatatatatcaaaataaattttggtatttctcaactgcttaatttggttctttcctctgttcaaatctctatcattntagaattaattattcnntgggcgtgaaatgtttatanctatgaagatctcttcaattctagtgatagtgtttgtacatcatcctg

SEQ ID NO: 53497 - DNA, 523 bp, Glycine max
  Clone ID: PAT_MRT3847_19320C.1
cccacgcgttcgtccacgcgttcgttttatatatgtctgttgtaagtcttacatcaggacctgctgtaagtacttacacatcaccacccttcgtgatcaccttatggacccgacttggggtcaccactgagagccatatctgtatcttctggcgaggcactattcgcactttttttcggatcaccgttatcactgttcgacttcttattgttatctggtgaaaaaatatgatgattaatgggagaaaagctcattggttcacttgaataggtgtacagtgctcaaggggtaagattgaaacctaaactgcttgtttcattatgaagtcaaatacataaatgtctgagaataaaacgatgatgatggatgaagatatgggtttttgtggcgatgtagatatgtacattgctacccttggagaatgggacattaccatccgtgaaaatgagcctaaggtgatagaagatgatgattataatcatgaaaaaaatgatgtgaacgacctaatgaggatgatgtggat

SEQ ID NO: 53498 - DNA, 326 bp, Glycine max
  Clone ID: PAT_MRT3847_19321C.1
gccaaaaacattggaataataaacatttggctggggggaaaaatcagtcagatgggcaagaaccttccaattcttttttcaaagcaatttaaattggaaacaataccctaaatcttttattccccaactgtcctttttctttccccccagctttttttaaccaaaaaatagccttttcttaacaaagccttttaacattcctaattttttactatgccctatccttggacccttaaaagggtttttttttattttcccccctaaattatttggggccggaaccacaaaccacaaatggttaattaattttcacgcccccttttttt

SEQ ID NO: 53499 - DNA, 171 bp, Glycine max
  Clone ID: PAT_MRT3847_19322C.1
ggaacaagaagatattaaggaaatacgcatcgaggagcacgtgcgaacttgaaaatcggcgagtttcctgtcagggcgacgtttcggactctgttgcaaacttcggatcgtcatatcatcacttctttttacatccatgttttgtccaatgtcgcccccgatcttctccac

SEQ ID NO: 53500 - DNA, 1671 bp, Glycine max
  Clone ID: PAT_MRT3847_19323C.1
ggtccggaattcccgcgtcgacccacgcgtcggtggatcgcggttctccctctcctatcgtctttctcttctcttcggatctccctccattccttcaagtcacaatctcaatcactgtttcttctcttctacctcgtttccctattctccctcaatttttctttcgcttccaatgacatacttttaatttttttatcaataaatcactctttttcgtggatatctatgatttttttgactaaaacattggtctttcagatctaacgtatctatgccaacacccattgcacaacatcatcttctcgttttcgtgtatcattttccaattaactgatacccttttgcctgttttattaatttattccttcttgaccggacttgattcatcacacaactgcattttttggttggttggttggttggattctattattcttttacctgaaaaataatggttatggtgaatctgggaatgcttcattacgtgttggaccacgtatatggagcattcatgcaccgaaccaaaatgagcaccccattcttctcgcgagggtggggtgggacgaaactagagatgcttgagagggtgataaagcaattgttccccgaagtggaggggcataattggcctccctcaatgattgaactaaccgtttgggagacaaagatggcttctttgagagaaggggtgtcagaaccccttgtgaggagcaactgctgggtgcattgccccctgtgttctatacagcaagggctccagtcctcccgcgcggcgcaacgcttctgtgttagtgacttgcttttattaggaagacccaaccttgaaaccgcacctcggcctctacactgggtctgcctcgacgcaggttttagcaagatggggctttgtggacttagtatgggaggagtacatgctgcaatggttgggtcacttcaccctacacctgttgcaacactcccttttctatctccacattctgctgttgtggcattctgtgaggggattttaaagcatggcactgcctgggaagcactgagaaaggatcttgcagcccaaaaggttgctatgactctagaggaggttagagaacgaatgaggaatgttctgtctctcacagatgtcacacgctttccaattcccaaaaaccccaatgctgtaatctttgttgctgccactgatgatggatacatcccaaaacactcagtcctggaacttcagaaagcttggccaggttctgaggtgagatgggtcacaggtggccatgtgtcatccttcattctccacaatgatgagtttcgaagagccattaaagatggtcttgatagattaccatggaaagagtctcatttgtgataaataatcctattgcacatgaagaggaaattactttttcattgttgattgtacagtggtcctgtccatttctaatactcacctaaacttgtaacatgcataattgatttcatatcttcatatccaaatggagagggaaggagttgtaaattgtcatcaagaaaatgtacattgaagttaaagccatggggatagaagtttgtgaaaaaactgataaaattgttgaatgggaatttaacggttctgatctgttttaagtttttaaacaaaaaaaaaggaagagggggcagagtaatgatagagctcgccgaacttaa

SEQ ID NO: 53501 - DNA, 416 bp, Glycine max
  Clone ID: PAT_MRT3847_19324C.1
cgtccttttttttttttttttcactcacataaccatcattcgagactgattagaccaatccccgggctttcttttgccaaacaaactgaggatacttctgtgtaggggtaacagaacttggctgttgaggtttctgtgataggattggataggcttaaactttacatcttttttttaaactgaaacccaagaaaacacaccaattgcgaccatataaactaaatcggtccgaattaattaaggcttgtctggcaaactttatatattctggtaatttcccatcaaagcattttaccaggccgcccttgcaattatgaaggttgggtgaacggtacatggcgtcctagcttttaataacctggccattgggtttattcggaggtttaggcattcgaaaaaactcacctggatcatta

SEQ ID NO: 53502 - DNA, 1461 bp, Glycine max
  Clone ID: PAT_MRT3847_19325C.1
ccacgcgtccgcccacgcgtccgtacggctgcgagaagacgacagaaggggattgtaacagagaaagaaacatttgagcaaaaatggttcaagcacagcctctacaacatgttggtaatggtgcagggaaagaagatcaagcttattttgatccaagtgctccaccacccttcaagattgcaaatatcagagcagcaattccaaaacattgctgggagaagaacacattgagatctctgagttatgttctgagggatgtgttggtagtgactgcattggtagctgcagcaatcggcttcaatagctggttcttctggccactctattggcctgcacaaggcacaatgttttgggcactttttgttcttggacatgattgtggtcatggaagtttttcaaacagtcctttgttgaacagcattgtgggccacatcttgcactcttcaattcttgtaccataccatggatggagaattagccacaggactcaccatcagaaccatggccatgttgagaaggatgaatcatgggttccgcttacagagaaagtttacaagaatctagacaacatgacaagaatgatgagattcactcttcctttccccatctttgcataccccttttatttgtggagcagaagccctggaaaagaaggctctcatttcaacccttacagcaacttgttctctcctggtgagagaagagatgtgctaacttcaactctgtgttggggcatcatgctttctgtgcttctctatctttccctcacaatgggtccactttttatgctcaagctctatggggttccctatttgatcttcgtcatgtggctggatttcgtcacgtacttgcatcatcatggttacaagcagaaactgccttggtaccgtggccaggaatggagttatctaaggggtggtcttacaacagtagatcgcgactatggttggatcaacaacattcaccatgacattggcacccatgttatccatcaccttttccctcaaattccacattatcatttaatcgaagcgactaaagcagcaaaggcagtgctaggaaagtattatcgtgagcctcagaaatctgggccattgccacttcatctaataaagtacttgctccacagcataagtcaggatcacttcgttagcgactctggcgacattgtgtactaccagactgattcccagctccacaaagattcttggacccagtccaactaaagtttttgatgctacatttacctatttcactcttaaatactatttcctatgtaatatgtaatttagaatatgttacctactcaaatcaattaggtgacatgtataagctttcataaattatgctagaaatgcacttacttttcaaagcatgctatgttagaattgaatctacttttcaatacccagatcatcaaaaaaaaaaaaaaaaaaaaaaaaaaaaactctagaggatcca

SEQ ID NO: 53503 - DNA, 384 bp, Glycine max
  Clone ID: PAT_MRT3847_19326C.1
ctcatcccggacctcgtaattagcctcgagggcttgacctcatctgattccaacaagctcggcaaggggaccgagattaccccagaggagaaccctcagcttctggacttggatgtcttcctcactgttgtctatatgaacgagggagctctttttctgccacacttcaattcaaaggccatactggtactagtgattaatgaaggagaaacaaacattgaacttgatggcattaaagaacaacatcacaggcagcaacaggaagagcaacctttggaagtgcggaaatataaagctgaattgtctgaaccagatatatttgtaatcccaacaggttatccagttgtggtcaacgctacctcagatctgaatttctttgctttt

SEQ ID NO: 53504 - DNA, 163 bp, Glycine max
  Clone ID: PAT_MRT3847_19327C.1
actcataactctcgactaagaatgcgttgtatgttctcatctctatgtatcactcttgagtacacttgtgtcaatcatatgttatatatattaatatattatatacacttcttctcttggacgtagaaacattctattcgtattttgcttgatgtgttcgacc

SEQ ID NO: 53505 - DNA, 529 bp, Glycine max
  Clone ID: PAT_MRT3847_19328C.1
ggctcgagggcggactccggcggcgacctcgccggcatcatttgttcgatctcccatgagcccctcaacctcatcagcgaggatcttcaatcggtctccatctgcgtccacgtttttcacgagctctgtctgcggcaatggttggagtactcttcgaaagggaagaagcacacttgccccatttgcaagcagggttgcagggccagcgacgcttgctggctctattttcagtcagtgggagatgcgaacgatagtgtgaagcctcagaagagctttgaattggaggaagatgctggggttcctgcgtagggaggtgaatgtttcggggcttaattctcaggttgaagggcaaacaaaggaattggaaggacttaatgagaagctttgtacttgcaaggagcaggcaaagatagagatagctttaaagaatgaggttttaaataaaaaagcatcaattccagcttcaaatgaaatcagaggtgaaatactctgtagccttctgttttattttggacaagttaactattta

SEQ ID NO: 53506 - DNA, 396 bp, Glycine max
  Clone ID: PAT_MRT3847_19329C.1
actatacacatcactcttgtccgtgagcctgtagaattggggttgtgcgcatggagctgagatcatccatgccagcagttgatgcagccagggaaagagatcaagttaacttggcaagtttttgcactaaaaagattcaaaaaggaaagcttagtgagcttgtagacccatcccttgggtttgagtcagaccaacaagtttaaaggatgctaacttcagtggcaggattgggctttcggtgtgtgctacgagacaatggattaaagccgtctatggatgaagttctggaagcactcacgagaattcaaagtgggaaatatgaatctgagaatctacagaaaggagatgatgttggtggtggtggtgttacctcttccacttcctccaccgaacaag

SEQ ID NO: 53507 - DNA, 483 bp, Glycine max
  Clone ID: PAT_MRT3847_1932C.1
ttgggctgagttatgtgcttgcatggtcgtgagaagatgatagaaggggagagcgcggaattcctgtcaatttcaaaacccctgcacaatgaaacggtacttatggttggtgttgttgtgagactgaccccttgcctgcgccttctctgttgtgttgtgccttgctctggtcttgaagttaaagtggtctggctcttgccttgtgctgtccttaattaattctctctgtgactcatatctaggcgctttgccgaaccgagtccccgcgcggaacttacgccattgcattacatagtaatcgtcctcgtcccgacgatcctgacgtcacttgctctctgttatagtcatggccggtccttcgaaggtaaagagaagatcacccgaagactaagaactaaggccgggacgatacggattctccccgacgccgggtcccaaataaaacaaattacctccaccaggaagacccgtcagacactcact

SEQ ID NO: 53508 - DNA, 1989 bp, Glycine max
  Clone ID: PAT_MRT3847_19330C.1
agccgccgcaagcgatggcggactccggcggcgacctccggcggcgacctcgccggcatcatttgttcgatctcctatgagcccctcaacctcatcagcgaggatcttcaatcggtctccatctgcgtccacgtttttcacgagctctgtctgcggcaatggttggagtactcttcgaaagggaagaagcacacttgccccatttgcaagcagggttgcagggccagcgacgcttgctggctctattttcagtcagtgggagatgcgaacgatagtgtgaagcctcagaagagctttgaattggaggaagatgctggggttcctgcgtagggaggtgaatgtttcggggcttaattctcaggttgaagggcaaacaaaggaattggaaggacttaatgagaaggtatttttattttattttattttttaacggttgtgtttagatgggagagagagactaagaagcgcatcggaggagattgaaggatatcacgctttgtacttgcaaggagcaggcaaagatagagacagctttaaagaatgaggttttaaataaaaaagcatcaattccagcttcaaatgaaatcagaggtgaaatactctgtagccttctgttttatttgggacaagttaactatttacagcctgaattaacttgtaaagatttatattgaattaggagcttgagaagtcaactttggagtgttttagattaaaagaaagtaatatggctttgactaaagaacttgcagctttaaaattatgagtggagcttcattttgaattttgatcgagtaaccatattttgtttatgatataatttttgtttattttttttacttcttgctatgttggtttatggcctgcaccgtagagtatatctgatctggacattgatgaagaggaggttttgaagcttgccgctttgggtaaggggccaacagtaaagacacagtagatatattgaaaagatctctggtggtcatgcggaacaggagttataaacaattgatggccaagtgcaatattcttggaagaggtgaggcttggtatagcaaaaagctttagaaggctaaagagaagatcactaaactgaaggagagggtacaagaactggagacattaactgaagcaaaagagaacgaatatctgagcttgcaaactttcatcaaaagaacaaagcaaccgaattttgacacccaaatctggaattgacctgactgcaaacgacaacagtaaatattttcaatctttgaagatatagaactccaatgttactaaaaataaggctgtgaatgttagtaatggaagtaaaactaccttttctcttgatataaaaagagagtatatctcaattgatgaggatgatccagaaggcactaatgctttgcaaggatgttcaaaacacaactacaaagatcaagacagggatgatattgcttttagcaagccttctctagtgaagctagagtctgtgtctggcataaagactgaaacatcattgcaaggaaattgtactttggctgcgtctcctagagttgatattgacattggcattgacatggctaacatttcagctggtgctatggatgaagatgtaactttacaaaccaacattaaacaacccgtggtgaacattacaaaggagttaccattaacactttcaaattcagggtgataagaaaaattcactaagttcaaaaaggtcaaagtggtttgaaatcctagttgcaaagagtaaaggaatgcagatagaacttttttggggagagtcatccagtaatatattggtctgtatgggcctggttgggaaacccttgttccaaaaaggaaaggaatgcctcctttgtcccggaggggaaccaatggtagattaaataaatttattttttggaaaagttttcccccctttgaataatgatctttggggattttagctaaacgggtccgaaaatctagtaattgattgattgcttggcttcggctcct

SEQ ID NO: 53509 - DNA, 1262 bp, Glycine max
  Clone ID: PAT_MRT3847_19331C.1
cacgcgtccgccaagtgcaattcttggaagaggtgaggctcgttatagcaaaaagctttagaaggctaaagagaagatcactaaactgaaggagagggtacaagaactggagacattagctgaagcaaaagagaacgaatatctgaggtctctgaaactttcaaaaataacaaagacttcaaagaatctcgaagaaaacatcaaatctgattctgaggtattgacagcgtgcaaattttcatcaaaagaacaaagcaaacaaatttcaatacccaaatctggaatagacctgactgcaaacaacaacagtaaatcttttcaatctttcaagatagagaactccaatgttactaaaaataagactgtgaatattagtaatggaagtagaagtaccttttctcttgatataaaaagagagtatatctcaattgatgacaatgattcagaaggcactaatgctttgcaaggatgttcaaaacacaactacaaagatcaagactgggatgatattgcttttagcaagccttctcttgtgaagctagagcctgtgtctggcataaaggctgaaacatcattgcaaggaaaatgtactttggctgagtctcccagagttgatattgacattgacatggctaacatttcagctagtgctatggatgaagatgtaaccttacaagccaacattatacaacccatggtgaacattaggaaggagtcaccattaacactttcaaattcagctccagggagcatctgcttttctggtggattgcttggtcctgatggaactcatcgatacttgggtaaatggtgcaaacgaggacagaacagtgaaccatcatctgcaaaacgatcaagtgatggggatttaattgctgttggggctgatggtagagggggaagaataaaagttctaaggacttctagccaaattctctcgggtggtaaggaaaatttactaagttcaaaaaggtcaaagttaggagttaaaacaagtggtttgcaatcgcaggggtgcctgcagatagaacacttttttgggagagtctctcagtaatatattgcaaagagtaaaggaatgcatcctttgtcactgaaaggaaacgatggaagattaaagaaattggtttttttttttgtaaaagttttcaccactgagtaatgagctttggaggattttggctaaacgtgtaccaaaatctagtagtcgattcccatggcttcagtatctattcaaatggcaaagttgtcctttcaattcc

SEQ ID NO: 53510 - DNA, 175 bp, Glycine max
  Clone ID: PAT_MRT3847_19332C.1
tactgctgcaagaagactacagaaggtgaccatcaaactaacaatttaccactggggctggctccatttaaaggttctaaatcctactatccaaactctatgcccttctcatcttacttctaaacctatttgtacttcttaaatcaccattttgttcatagcccatattcccctt

SEQ ID NO: 53511 - DNA, 299 bp, Glycine max
  Clone ID: PAT_MRT3847_19333C.1
ctataataaacggggggattaatttcacatgacccaaattacgactggctacaagattttacgtttacatgatagatatggacttacacatgttgatgcaagatgcttgcgggttgacattggcgttatactttgggcgcctacctttcccccatatactacgggaaaaaaaggtaagataccattgccaggattggaccgagcctggaaagagtaataaacaggttttagcccgttgaatgctaaatgaaatgaacggcgactatgaaacgccgcggggatgatatccttatgaagat

SEQ ID NO: 53512 - DNA, 747 bp, Glycine max
  Clone ID: PAT_MRT3847_19334C.1
cttattttctgatcattcttctgctctacgaaaattcagttcctctttcacctgcgttaattattaataattttattttagcaaattatagctatatctgtagtttcctaattcctttgaagtttacttaatccttgttgaaatatgaattgatgagtaacaattgttatacacgaccctttgaattttgtgaatagattgccaacttgagctgtgcaaggaaagacctgggatggtattggaagaatgtgatgaaggagcaacctatgccacaagcaattaaagaccttgttgaggattcacaagcatcagctgcagggaagaaggatctttttatcagggacttcgatgtaaagcctaatgtcatattatatcacacccatgttgtgtccatgaagcagaagcataagccttttctccagaattgaatcaaggttgaagtaaagcacaggatatgctacggttgaacaaactatatattcatatataaatgtgaccagtggactatgatgcatattatcttgcatgtgttgggctagtactgattggcgtttgaggctttattttgcaggaaattaattaagctgatagtgtttcaaaacttgtattttattaaaagcttgagccctttagtacgtgatagatagatatagctttaattaattgtggttatctagttatatccttccttttgctgcatctgcttttgatgggttttgatgaaatttataacaataattatgctgt

SEQ ID NO: 53513 - DNA, 781 bp, Glycine max
  Clone ID: PAT_MRT3847_19335C.1
gaaaaatggtaaccatcaaagcttctacactgtggttccaaatcaaccaacacctaaaggtcgattatggctatcaaatagtgaccaaaccgcacgcccagcacacacaccaaacctttacatctacaaagcaaaacacaacatcatcgaatatgacattgagaaaatgatagactctctcagcatcattttagtgtactactatccggtagctggcagattgagtgttacagaaagtggtcgaatggaagtggattgcaacgcaaagggagtgacattgatcgaagccgaaaccgtgaaaacaattgatgattttggagacttcacaccttctgagtcagtcaaggaagagcttgttccagtaattgattatcactctcaacctatagaagagattcctttggtctttgtccaagtgacaagatttaaaggtgataaagaacaacaacaaggccttgctattgcagtcgctgtttctcatcctgtggctgatgggtctgcttggattcactttatcaacacatgggctaaggttaatagaggtgacatgttaggtcttaatgacatgccatttatagatagaaccatactcaaatcttcgtcgtcgttgtcgtcgttgtcaccaccaccctcaccacgcttcgatcaccctgagttgcagcctctaccattcatactaggcagatctgatagtactgaagaagcaaagaagaagacacagctgctatgttgaaactacatcagaacaagtggagatgttgaggaaaaaggttaatgaaaa

SEQ ID NO: 53514 - DNA, 168 bp, Glycine max
  unsure (1)..(168): unsure at all n locations
  Clone ID: PAT_MRT3847_19336C.1
cgcatgcactcgtacgtaagctcggaattcggctcgagntaattccnanattctctcanttttcangtttcanccangnnaancagcaacantgtcnggtcgcggaaanggtggnnanggtttanganagggacgagcnaagaggcatcgcnaggtgctccgnganan

SEQ ID NO: 53515 - DNA, 169 bp, Glycine max
  unsure (1)..(169): unsure at all n locations
  Clone ID: PAT_MRT3847_19337C.1
ccagtntanatgctttcaccaactnagtactngcagagtactagnaacagaacnaaacngatcaaggggctcggnagaactnnagagtcccnngaccnnggtnctgatccagncatatatcccccacgttcgttcgttcatncttcggtttctccgaatctgatngcgg

SEQ ID NO: 53516 - DNA, 218 bp, Glycine max
  Clone ID: PAT_MRT3847_19338C.1
gttagaccttagacgtagatgtatgatcttaattttaataaattaatttttggatattgttaaattacaatttattaaattcaattgttttctataaaatcatcatgagatcaataatgtttagaagtccgttaaaggcaggtttgtttgtcaatggatttaataattttaccagttgtagtaataactataaattgagaagaaatcatacaatgctc

SEQ ID NO: 53517 - DNA, 497 bp, Glycine max
  Clone ID: PAT_MRT3847_19339C.1
atccttttaatcaggagcctgcttctgtggctttctcagctctcaatctcgcaatgcattttcatggttgggtttcctttttcattcttatacactataaattgcctctaaaagatggaaagaaggcatattatgagtatgctggtttgtggcatatgtatggacttttatcacttaactcctggttctggagtgctgttttccacagtcggtaagttacttatgtggatattttcagtattttgcactgattctaaagaatgattgattgttatgctgtctattggtatttcttagtgcagtgatactacttagttcttatattgaagttttaatcacctggcaaactatgtgacacaaattgaataacaatatatgcatacaacatgctaatgcataaactatttcttatgttaatttttagtatatgattattcctaatacttcccctttctaagacacattaacctctgtgaagactttttttcctttaaaat

SEQ ID NO: 53518 - DNA, 211 bp, Glycine max
  unsure (1)..(211): unsure at all n locations
  Clone ID: PAT_MRT3847_1933C.1
tcgagcgattcgntgaggaatannntcccaagggtttaacntttggcnntttaatatgcgntcagantgtcatgagtccttctgttgcggggagggcaaatatggctgtaganttctacaggatatgcctcagntgagcattatcaagacagtnagtttaaaggcaaagacatgttctcngncagannctcangcgngtgtannntggngt

SEQ ID NO: 53519 - DNA, 156 bp, Glycine max
  unsure (1)..(156): unsure at all n locations
  Clone ID: PAT_MRT3847_19340C.1
cacaacccgacccatcacgcaagacaaaagcgcgctcttgtgttccgtttccgtttgtttctgtntnctgtctctttnagatcncgaaaaatgcagagcgcggctttcactttctctcnctctctcnctctcgcaacccgnccnntaannatgngg

SEQ ID NO: 53520 - DNA, 519 bp, Glycine max
  Clone ID: PAT_MRT3847_19341C.1
gcacgaggaagaaaaacctgcgttctcctcactcttggcttcttcaggtttgccttgcattgttaattacttgccaataattcaaaatactaacttgcctaaacttaggataaaatttatatgtagtttgtttaattgtttttaatgtttttctctaattagaattaagttcattaatttaagtttcgtttatatgtataacatttaatataaatcttacctggattagcaaaataaaatttcattagataagaataacaatactaaattttattcttaaagttggcaacttatgttatatatcaaatgagtttaatgtttatgtaggtgtaaattattttagtataattattttaaaagttaactaatttatcatataagataagttatgattaaataattaggtaaaacttttaactcttttctttaatatcaaattaaatcatatagtctattgaaataatttaaaaaataataatttcatttgaattctttaaatcttgtttatatactatttag

SEQ ID NO: 53521 - DNA, 123 bp, Glycine max
  unsure (1)..(123): unsure at all n locations
  Clone ID: PAT_MRT3847_19342C.1
aacgccagtggtatccgaagccaccttcagcgcngaggggagaacccaaatcctgaacctcaacaaccgccggcatcacgatctgctggatcatcttctgtgcaaccctgtcaccaactttta

SEQ ID NO: 53522 - DNA, 303 bp, Glycine max
  unsure (1)..(303): unsure at all n locations
  Clone ID: PAT_MRT3847_19343C.1
tcccaatttnanttttnattctcaccatcctnnanaccttatcaaaattgatcaatttcattcttttttcaacntttttcaaccttaaaatactccttacatcnattacactcccttccaaaatcaacnncntnctatnacttttcctananaaaatatnaattatcncnanaaccatttcccccctcancaacaaaantttcactctattatcccaccacccaannnntatttaactccttttccatttccaaaaaaccntnattattttccatatncaaatncttcntacaaaaatcttac

SEQ ID NO: 53523 - DNA, 336 bp, Glycine max
  Clone ID: PAT_MRT3847_19344C.1
atcgcgtctacgtgttcttttcctctgttttaatttttcgtcatgccttcttactctttatagatattataattttccatgtacttcattcatgttcgcaccactttcatgtaccaatgaataagaatttctttttgcataggatgtaaaaaatatttcttaataaaattgtccttgttacaattaaaaatacacgaagttgatttccgaccacacctgaacccaacaaaaaccatacaaccaccgaaacaacaatctcaaccagacactccaaccactaccgactacttaagtccaacgtcgacgggtctccccctcatttaggtcctcctcacc

SEQ ID NO: 53524 - DNA, 325 bp, Glycine max
  unsure (1)..(325): unsure at all n locations
  Clone ID: PAT_MRT3847_19345C.1
tgcattggagatacctttagcagtgtgaagatagcaaaagtgcgctgtttcctaataaaacacaatatttccgaaataaatagaaacagcggtgganngtgaggannnnattagataccatactgctatgagaaaatcgggctcataactgccatggctaccctgaaaggcacctgtaattattccgaagggatcaaaattgtacatgctgcagaaaatatacactgacttccttgttannntgcctacgagtcctcatgnnnnaaacttacgagctaatttgataatcaggattgaccgttggagctattgaacatgctctcat

SEQ ID NO: 53525 - DNA, 3824 bp, Glycine max
  Clone ID: PAT_MRT3847_19346C.1
tttcttccttaatccaaatttccttcttcaacaaaatcgtgtgaccgaacataaatgccgtcgtcactgcaaatacaaaaccgaagaacatttcagggatccaaacgcccaatcgaattcgcaagctcggaaggttgaaagagaaacgcattgcaatcttcttcggtgcgtgcgtgaagatcgaaccatggatgacgaattgctcgagctgcagcgacaattcgagttcgcgcagcaagccaagtccagcattcgcttatcggagcgaaacgtcgtcgaattggtccaaaaactgcagcaactccaaatcatcgatttcgagcttctgcacactgtctccggcaaagaatacatcactctcgatcaactgaggaacgagatggtgtcggaggtgaagaaaatagggcgcgtttctttgatcgatctcgctgacgctactggagttgacttgtactacgtggagaagcaggctcagagcgttgtaacggaacaccgagaactgatgttgactcagggagaaattatgtcggagtcttattgggactcaattgcagaagagattaacgagaggcttcaggaatgtagtcaaattgcgctgacggaactcgcagcgcaattgaacgtaggtttggacttggtttccaccatgttggagccgcgccttggaacaattgtgaaaggaaggcttgaaggcgggcagttgtatactcctgcctatgtggctcgtgttggtgccatggttcgtggtgctgtgcgaggcatcaccgttcccacaaatttgactgtggtatggagctcattgcagcagttgctgcaagatattgatggaaccagtggtttggctgttgaaggatctttcttccagtctttgtttaatggacttgtgaaggaaggcaaggttctagggtcgcttcgtgcaggagtacactggacgcccgctgtatttgctgttgctcaaagggagtttgtggactcattcttttctcagaattcttttatcacatatgaagcggctgcacaaacttggaattccccagcccattcaattcttgcagtccagatatcctgaaggcaagccgctagttacaacatttgttcattcatcgatgattgagatgctagacgcttctactgaggatgctcttgaccgtggtagctggagtgattctctttccttattgccttcatcatttacaccccaagatgcatctaaaatgttgtccctatgtcaatctgttcaaaatgctcttaagtctaacaaagcacatatttttggggatttttatgtgttgagcagcagctttataaaggacatctgtgatcgtgttgtgaaagaattggagacattaggtgtttcagggtgtgctgacagtacaatgcatgctgatgttcaagtacccaatgaagcaaaagtagggcatgagtcaggcaggttgaatgatattgtgagtgatggtggtgccaacaggcatgctgataaaggatcaaagaaaaaaaagggaaaagccactgggaatgcagtagcaaatctatctgaaagcggtgcagataaccaggaacagactttgaccaaatctaagagaggccagaaaagaggtaaggatgcatcttcacaaacgtcagattcaaagacaggttctaagaaagaatcgcttaaagtgaaagaggataatcccagtccctcagaagattggatcatgcagaaaattacagcattggtttccgattttgaagaacaaggtatagatgatcctgaaacaattcttaggcctttggctaaccaattaaggcctacaataatcagttcttggatggagaaaaagaaggcattgcttacaaacaatgcagaaagaatgaaacgtttgcttgataatttgcagaagaaacttgatgagtctttcttaaacatgcagctgtatgaaaaagccttagaactgtttgaagatgatcaatcaacttctgttgttttgcataggcatttactaaggacagtagcagctcctatggtggatatgcttcttcaaaacctggatgagcacaacaaattaaagaatggacatgaggtgcaggaagctccaaattctgaatctgtttcacttagtcctggagacagaactgccatttgtaagagttttccaggagctcttgcaaataaggctcttgctgttgtagaagcattggaaggaaagagtgtggagatattcatggctgcttttagaatggtaacagaagagagtgggttgcctttgaaaaagcttgacaagaaactagaaagaacacttttacattcatatcgcaaggagttgacatctcaagtttctgctgagactgaccctgtatcgcttctgccaaaagttgtgtctttactttatatccaggtttaccacaaagctcttcaagctcctggaagggccatttctgttgctatttcccatttaaaggataagctaggcgagtcagcatgcaagattttaactgattatcaaactgccacagtgactcttttgacactattagcagcttcacctggtgatgaagaggattgtgcatctgataggattttgagtaaaaaggagcttcttgagagccaaatgctggacctcaaaagcttggttttgagcacctcccaatcttcataaaaatttgtaagccaagtttggctgctgaatcaagcttcatcgtaaggatgcactaattttgtgttgtctattttgttaggtgcaacaaagcctgtgatacgttgcattttgctaaagtagacaatcttgggaaattagattagattttgtggctattcattttattctaattcacactacaatcatcatgatgttgatgacagcaaaagggcaggaaaaatgtcaataacgagtctagcaatttaaaagtaatgtcgtcctatatacatcgttctcaacctttgctctgtacaacataacttttacagcaattaaagccatggccaatggctttgcatcaaagtttggtgctagcatgtaatgcgtgatatacgagctttcatatactagtacagtagtcaccattaaccatcgatcagttgaaaccatcctacaagctgggccaaacctagactacacatcagggattattataccctcacctaaactgcaatatactaataaattaataatagaccccaaaaaggcaatacaataagctggtcgttacaggtgagaggaggatggcataatctgatatctaaaacgtggaaaatcgttttttcaaatgctttatcagaaggctgcataaagaaagacaactatattttacaaactatttcaaaatccctatcacgtagtcccaaccattttttttaaattaaacctttaacagtaaatactaaatatactacttcatgattcatcaattcaaccacatttaaatcggaaaaaattacacatttaaatattacataatatggttagtgacaaacctaatataaaattattaaaaaacttacatgtctaacaaaatgaaaaatccataattaatagtcaaacaataaaaaaccatgcttaaatttcacgcataaacatctatttatttaaaaatatttttgaataaatcaaaagatcatttttttttaaaaaaaaagctcaactattttacagctactgattttatcagctttagaccaattagactatagtactcgaccaaattttacttccaccagttatgatctacctggagcatttttggatacctttaaaatcatggtggctacctcaaaacccgtgattccataattcatggtcaagctggtcaattcaattttagatctctgattgtaacagattcag

SEQ ID NO: 53526 - DNA, 133 bp, Glycine max
  Clone ID: PAT_MRT3847_19347C.1
gtcatagatgcgtcatatcatatttcgttactgactacactgaccctgcttttcaacataatacggcttcatgggttactatctgcggctggatgctacaaggtggatgcccttctcagatagccaacctttc

SEQ ID NO: 53527 - DNA, 174 bp, Glycine max
  Clone ID: PAT_MRT3847_19348C.1
gcttttactctcaccgccaattccaattggacctatttgccctgccaacctctcattaatcgcctttaggcctggggttaaatgccattttgaataataaaggccttctattcccctccgtattaccgggtttggctccctaatttggtttccccacctaatggcctaacccct

SEQ ID NO: 53528 - DNA, 491 bp, Glycine max
  Clone ID: PAT_MRT3847_19349C.1
gttgatattgtttttgttgtttttttttgtattgttttttttattgtttttgtttgtttgttaaggggaaaataaagaaagaaagaagagcccttgataagactctcgagaacatgccacacgtaaggagaggaccagacttgagaacagggagggacacccaaaagagatcggccgtgaacttggcccaagatttacacgcctctgatgcccgactttttatggggaaacggaaaaatggcaaccgaacaaagattgccacaaaaaacataatggcattaggaaaaggatgggcccgaactgtttaatgcgctaaaatccttggaaaaaaatcgtttgattatgccaaagatggcatgaccatgaacccgggacccaaaggctgggcaattggatgcaccgtgaaagccaatggacgtagctttctcaggccacaagggtcattgcaacgagacaagggctggccttctcatgctgaaaaaaaccttggg

SEQ ID NO: 53529 - DNA, 299 bp, Glycine max
  Clone ID: PAT_MRT3847_1934C.1
ccacgcgtccattctggcgtcaatagagcaacgaaagggagacaaataggggcaacatattcgaaaacttattttggctagtttcctggtaaacagttctagatatcaacagatctgggagtcggtaccctagttagagtaatcctccgcatacggatcaccatcatgattaagtacaagatcagaatgatagtcaccccgaaaacgatatgtagaatatgggcacgtataatcccaggttcctaatagcaacaataattttactcagtcatcattggaccttgctgggttactggaat

SEQ ID NO: 53530 - DNA, 508 bp, Glycine max
  Clone ID: PAT_MRT3847_19350C.1
ggaattgaagcatataaatgaatatgttttgctgattataaaaaaagcctccaagccccaacagctgataaaaagttagagatggcttcttcaagttttttatgtctgtgtttgatgtttgcttttgttgtggcttgctttgctcgtggcattcccacagaccaaccacccgtgctctacggagacacacacaagaatccatctacttcaaacattgagcatcatcaatggtcgggagacaaagttacacacccaatttcaacccatgtcaagttctcaagtttcacagagaattcagaaaggatactgacagaggtagattatgacggtccacatacacacccaaatccacctcctcatgctcagaagtttcgattgtaaacattgtcttctcaatgacaaaaaataaataaaattattatgtcacaattttaatttttcttatccttaatgtgccaaaatatttcgcatctttatgaccttttttaattaaataaaatttcttccc

SEQ ID NO: 53531 - DNA, 292 bp, Glycine max
  Clone ID: PAT_MRT3847_19351C.1
cttacccaccaaggcaaaaaaatgggggattaagggggggcctcccaacctaaattttcaaatgggttggaaagggttcaaaaacaaatattcttttgaacacaaccaacgctaaccactttacatactaaaaagctagtaaaatgtgggggggcccatttttatggtccaagaacttgggcgggcactgagtctttgcaccagtatcctacaaccttggtttacttggaccctttaggaatccatgttataatttgaacatagggttgctgtgtgtcccccaacatggaaa

SEQ ID NO: 53532 - DNA, 2568 bp, Glycine max
  Clone ID: PAT_MRT3847_19352C.1
ggtccggaattaccgctcgaccacgcgtccgctctgatgcaacacacactcttctcccactcttctccttcttctcttagggttccgcgactgtgagtgatgcttcttgcgaaatggataacagcctgaacaatccgagcgacaacggggaagacccgccaccgccgccggcttcccatgcaagtcgacggcttccaaccgttccattacgccaattgttccgatgaaggggaagaagctgttccggtcaccaatgcttcttctgctatgcacgccagagccagcgaactcaccatttccttcgaaggcgaagtctatgttttcccagcagttacgccggaaaaggtgcaggccgtattattactcttgggagcacaggagatgacaaatagtgcccccacctctgacattttgttgcagcaaaactatcaggaaaaagcagaagcagcagtacggaaactagagatgaaattggaaaaaaggcgagcatcctctatggataagattatgaacaagcttagattgctaggactcaaccggttcgcgccctcttctcttggacctccgcgcctgttatttatgcttctttcgttatcggtagtagcttcacccgctggtgctccattcagacagtgtttacggcattccttgctgtccccgcgcaatttcgcggaaccttgccctctcatcaagctaattgtgagaattgcacgaaagtaaccgttttggatacaaaagattctgcaaaaaagaaagagatcgcaatcggactcgctatttgcatagtgcgacaagggcgaaggttggtcccaagcaaccatgcgcggacgccggacgcttcagatgagacaaaagctaaagcaaagacgcggagtgaaaaatccaaactcctttgtgggtacaaatccctaagggcaaaggctgaagcagatatacggaatcttgagtttaatttgaaaacgaggacaagcgaaccctgacgataatattataagcaggacaaagagagggcccagaaaaaagctcaggaaatgagaagttcagttccacacaaccaaaccgatcgggttgtaagaacttcacacaaggcttcatcatttcttagaaccagccagatgcgttctttgagtggttgtttcacttgccatgtcttttaagcattctttcatgttcgagttttggggtcttgccgtgggtttcaaatccgccacatgtttgtgattttgaggggcacttcagttgacaaaattggtgttgttgcgttttgctatccatggcaccttctttgaaagtctcagatatcataaaatctaagccccatgttcgggagtttggattcaatgggtagcaatatttgtaagtaggccaaattttagaaataagatcttttgtatatgtttgagtgatggtgggtttccgaaggattcaaatgggccacatgttaatgattgaaaggggcacaacagttgacaaaattggtgttgttgcggtttgctatccatgtcactttccttgaaagtttcagatgccatcaaaattattactcttgggagcacaagaaatgacaaatagtgcccccacctgactgcattccaatgtcctggttttcaaaataagaattggagtttttctttttgacactagtatgttggtgttctgtttgtcctctagagtctagacgtaggttggttttcttgagattgacaatacttggttatctaataggatgcatcgtaagaatggacagtttgcatcattgaaggaagactacaaatctcctgctgaaaattgggattcaagcaatggtactccttgcccagactctactgagcgtagatgccagcattgtggaattagtgagaagtctactccagctatgcgtcgaggaccagcaggtccaagatctctgtgcaatgcctgtgggctcatgtgggcaaataagggaactctgagagatctcagcaaagcagcaaggattgcttttgaacaaaatgaactggatacttcagctgatataaagccttcaacaacagaagccgaacattcttttgctaagcaggacaaggagggaagccctgaagaaactaagcctgtgcaaatggattccagtcggtcacctgagaagacaaatgaccagtttattatcggaactgctgaatcagttactgacaacttgtccatccaagtggagaatcatgctcttagtctacatgagcaggatactcttgaggatcttgctgatgcttccgggaccgaatttgagattcctgcaggttttgatgatcaggttgacattgatgattccaacatgaggacttactggctgtgatctagagatattgctatgcacaatcagcatggtctgttcacaatggaaacaaatgtgcactgctggttcaactaacattagacttctagaaatagtttatgttttatagacaaactatttctggaagcagctgtgaattatatgattgtagacttacaatttcttacattagttcctgtacatccctttggaaccagatttcatttatataatgtgaatagttgagtttttttttaaaa

SEQ ID NO: 53533 - DNA, 471 bp, Glycine max
  unsure (1)..(471): unsure at all n locations
  Clone ID: PAT_MRT3847_19353C.1
tacggctgcgagaagacgacaaaagggtatatgtatagggacaacatgaaggatttaaaatgagtgcccgaatgcgattctaggcctaggaacccaagcttttgatttcaattcaagaaagcataaaaatgagggcattatgataagggtttccctttaggctagtggctgatttttggggctgcaccatgatgtttgcttagtttgtgtaaagatgttattcaccatgtacgtatatgtataggataggtagctagagaaaggacccttcaaataagatgtgtatatgttgaataggtggtcaagcactttatgaatatacgcacgtttgaatgcttcccgaaatgaatatatgatgtggagttgcctctcaagtgtagatagatggcatgaaaattccttttcaaatgcaagtgtgtgcgtgacacgagatgggctctcanatgtgcatatatgtatagataaatgtga

SEQ ID NO: 53534 - DNA, 624 bp, Glycine max
  Clone ID: PAT_MRT3847_19354C.1
gcgtttgttttccatgagagttgctagttcgttgttgtgttctctttggtggagatgcattgtttacggtagttcgtcaacaagtggtggttgtggtagtatttggtttgaccattaaaggtggaggtaaggtctttgatctgtattttttcatgtaaaacttatggattgatattccataagttatataaattggatgagtgataattcgtaagttttatataagttacggattggtaatccgtaagaaacttacaaattgataatttttatgttacttaacagattgacaatttgtaagttggcaacccgtaagtttcttacacatatggttggacatgtttttaaagttatcttatacatgaaactactttgtatgatattaaggtatgctttaaatcatattgctgctgagtttaaatgtgtatattatgttgtcaaaaactcttctcgttgtggatgtataatgagaactactcacggtcttccatgtgcatgtgagctagctagatatgttgttggtaccataccacttggcacaatccatatgttttggcggaggttaaatttttcagaccatggattatctgagcccgaagtcaacataactgaagagatgaaaat

SEQ ID NO: 53535 - DNA, 555 bp, Glycine max
  Clone ID: PAT_MRT3847_19355C.1
gtaagctcggaattcggctcgagctcgagccgattcggctcgagcatctcactacaccaaaaagaaaaaaaaaattaagaagaagatgaacaagagctcaatatttccaccactcccatcttgtgttgttgttgttgttggttgaagaaagaaaaaaaaaatacaaacacaaaaaaaaagctagccaacatcatcgatatcactttcttctctctgagaccattgttcctagtttctcaccgaacaagggtatggtactgtctctctctctcttcattctttctgggggaatcaagcgttgtggtccgatcattaattaactttgcttcatccagcaagtttgttaatttgactagtcgatctactttattaatagcttttagtgcatgctctttttgtaaacttttttccttaattgatgtgggtttcttttctcgatctcttttgagtgtttacatatctagggtttatttatatgttgatctgaaaagttaaaaagtttgcaagcttgttatcttatgttattggtgtattcctgtcttcgtgttagttata

SEQ ID NO: 53536 - DNA, 196 bp, Glycine max
  Clone ID: PAT_MRT3847_19356C.1
atttcattgttattataaggtgggtaatacctcagcaaggctattcacagaagcaaagaatcatgcttgtccaattttccatggaggcaatgtttctcatctgcataaactgctttccattgaatcaagttcacaggctctctgatgtaggggatctcattatggagatatactacgcagtaaataggttcctgga

SEQ ID NO: 53537 - DNA, 267 bp, Glycine max
  Clone ID: PAT_MRT3847_19357C.1
tataatacattttttgaaactaaaaatgggtgtatatagaaagactcaatggcgcattgtaaggggataataacctcaaacattcattacatggaagacgcatggatgaactgccgaaattcaccctgtcatgaaagaaaacccatggaagtgatattttgtttaatgacacatgacacctactcatcttttacaattgacgtataacacctttagcacttcatttttaattagttgatgaccataggagaaccaccttgggttaca

SEQ ID NO: 53538 - DNA, 153 bp, Glycine max
  unsure (1)..(153): unsure at all n locations
  Clone ID: PAT_MRT3847_19358C.1
ngtntncattcacgnnttcggnntcgagggangcgttctacttcggcaatggcgattncaganccatcccgaanggtcgcgaccgtcggatnacattctctacgcgcnatctgngcttnctgngcagatcttctncaccgtaacgtcgtcgct

SEQ ID NO: 53539 - DNA, 521 bp, Glycine max
  Clone ID: PAT_MRT3847_19359C.1
cgcgttttccaattccccccccaaatctcacgcctagggtttctatcgcaaaccctccctccctccaaccaggtcgcgtgcaaagggatttcgaagcttcggaagaaaaaaatgaaacctgttttctgtggaaacctggatttcgacgcgcgtcaatctgacgtggagaggctcttcagaagatacggcaaagttgatagagttgacatgaaatccgaagaaataatctgatctgccctagtcctgccattctgcattccctcagcattcattgctttttcattcctcatgacttttgctcagtgttcaatttccaacatgtttcaacatagaaaccatgatgatttcgcaactgtggcagggtttgcttttgtctacatggaagatgaacgtgatgctgagtatgcaatcagaaggcttgatagaacagaatttggtagaaagggtcgccggattcgtgttgagtggactaagcaagaacgtgacagtagaagatcaggtggtgattccagaaaatcttc

SEQ ID NO: 53540 - DNA, 189 bp, Glycine max
  Clone ID: PAT_MRT3847_1935C.1
tttttttttaaatacatttttccttgaattaaaggcccaaaaaacctttcatatatggacacaagagccaacctacagggggtcaaaaaaggctttgtggactgggccataaccgttgggaaggaagatgccagccgtcaatggaaaaagcttcttggtcttggtttatatttttggcctttcacacgg

SEQ ID NO: 53541 - DNA, 507 bp, Glycine max
  Clone ID: PAT_MRT3847_19360C.1
ctctttctctctcttcactttccaacgttggctttctctcgcgttttccaattccccccaaatctcacgcctagggtttctatcgcaaaccctccctacctccaaccaggtcgcgtgcaaagggatttcgaagcttcggaagaaaaaaatgaaacctgttttctgtggaaacctggatttcgacgcgcgtcaatctgacgtggagaggctcttcagaagatacggcaaagttgatagagttgacatgaaatccggattggattacttggaaagttggaatgtccatgctcttcttggatggatgtgcttctctgcatttcttttctagaatgtgcctcagcttctccttcttgtatttttccagaagaaataatctgatctgccctagtcctgccattctgcattccctcagcattcattgctttttcattcctcatgacttttgctcagtgttcaatttccaacatgtttcaacatagaaaccatgatgatttcgcaactgtggca

SEQ ID NO: 53542 - DNA, 233 bp, Glycine max
  Clone ID: PAT_MRT3847_19361C.1
caataatttaatggttattatcattgtaacaatcggaaagcttggcggtgtttgggggtccttagctgaaagggcccattccagagccactttgtgatttaatatttttaaagaatattgggtagcccaactatcgcaccgtgtgttctcattgtccgttatattcattatactatttctagcttacttgtaatagctgcatattgaccatccaacaacttttaatgagctta

SEQ ID NO: 53543 - DNA, 1512 bp, Glycine max
  Clone ID: PAT_MRT3847_19362C.1
ctttctttctctctccactttccaacattcgctttctttctctcgcgtttcgcaatttccccaaatctcacgcctagggtttctatcgcaaaccctcactcccttcattaaggtcgcgcgcgaagggatttcgaagcttcggaaggaaaaaaaaaaagatgaaacctgttttctgcggaaacctggatttcgacgcgcgtcaatccgacgtggagaggctcttcagaagatacggcaaggttgatagagtcgacatgaaatccggattacttggaaagttggaatgtccatgctcttcttggatggatgtgcttctctgcatttcttttctagaatgtgccccagcttctccttcttgtatttttccagaagaaataatctgattcgccctagccctgccattctgcattccctcagcattcattgctttttcattcctcatgacttttgctcagtgttcaatttccaacatgtttcaacatagaaaccatgatgatttcgcaactgtggcagggtttgctttcgtctacatggaagatgaacgtgatgctgagtatgcaatcagaaggcttgatagaacagaatttggtagaaagggtcgccggattcgtgttgagtggactaagcaagaacgtgacagtagaaggtcaggtggtgattccagaaaatcttcatctaattcaagaccatccaaaactttgtttgttataaattttgatcccgttaatgccaggacaagggatctggagagacattttgattcctatgggaaaatattaaatataagaatcagaaggaattttgcttttattcagtttgaatcccaggaggatgctactagagctttggaggcgaccaacctgaggttgtaattgccttcgcaattgttgactagttatttctgtcctcccattccctgaacttttatcctttgaaatactctctagtaccctgggtaaggaaggtatggggaaaaggggataattgcttattagtttaaaccttgttgattgtttaatgtttgattcgatttgcagcaagtttatggaccgtgttatcactgtggagtatgccataagagatgatgatgacagagacagaaggaatggatacagtcctgatagaagaggccatgactctcctgatgggagatatggtcgtggtagatcccctagtccttatcgtagaggtcggggtagcccagattatggtcatggatcaaatccatcttccagaccagatccaagaggaagccccaagtatgaacgagctgaaagcccaataaataatgggagatatgatagccgatctcccccaccccgagaaaggtcgcgatcttgaggaaaagctgaatagaactgtgtgaagttgttgttagaccattttaatttcattttagaccgtactttgacagcaaaaactcgaacttgttattgtatttactgttatgctatgtttggtcagaaccttaatgtgcaaatgaccattatattagatgttattatgttgctc

SEQ ID NO: 53544 - DNA, 354 bp, Glycine max
  Clone ID: PAT_MRT3847_19363C.1
cccacgcgtccgagcatgtgctgctgttggattgacatcaagttacactccaacttcattgttggaatctggtttgcaaaaagacagagggttaattggggagttttatggaaggatgattaacgtttgtgataacgacaatcatccccaagagaaagatttgtcggtggggaattatttgcttgacactaaattttgctctagatgggtaaaagtttgctttacacaagcacagtttgtttgtggaaaaacctttaaatatgatgtaataggtgctggaatacattcttaagaggatctctctgctatgggagatcaagactaacccaaaagagattgatgccagattgagac

SEQ ID NO: 53545 - DNA, 1121 bp, Glycine max
  Clone ID: PAT_MRT3847_19364C.1
gtcacaaacggtaatgagaagtgcacaccatgtgaaggtggttacactccatcaccaccaatagagtacttatcaccaccaccaccaatagagtatttttcaccgccaccaccaattgtgcctccatgttcggtgcacctaacaacgtaagaaatccatcattactacccccacctcttcctttccattcctctctccagaagtcctagccctacaatctcaaagacaaacccatcattcaaagtcataaccgatacctaaaatcctcattccaatcaaaaccaaccccaccatgcccacaaaattaagtcatcaaattaaagcaccgatgatcctcaatttgatccttgtgcttatttgtgtcactactccaatcaaaggtgagaaatcaaggaagcttgatgaggtcacaaacggtaatgagaagtgcacaccatgtgaaggtggttacaccccatcaccaccaatagagtatttatcaccaccaccaccaatagagtatttttcaccgccaccaccaattgtgtatccatcaccaccacccccttcacccaagaaaccaccaacgaagtattgccctccaccaccatcatcagcatatttgtacatgacgggtccaccggggaacttgtatcccgttgatgagaattttagtggagctagttccaaccgccaccatagtttcgctgttttcttgccacttttagttggcttgttgtgcatgatggccttttggtgatcagcttatcaagaaattaattcaggcctagaagaattcatggattaccaattaaggtctcacataaggtaaagtacgggagaattttgtactcaagtaattttattgtttgaaattaatgttcccttcttcgtttaatttgtgatcccaatctgtactataatagcaataatccttataatggcaataatcttttgctagctaatttgtgagaagtgtttttctctcttatttttgcccgttatcttgtccaaacactaataagtttctgggtcttttctggtttattttcacgaaatttcttaaatgagagtaggaaaaataaatttaaattatataaccgtacataaattataaaaaacttaaagttatacagtcgttt

SEQ ID NO: 53546 - DNA, 410 bp, Glycine max
  unsure (1)..(410): unsure at all n locations
  Clone ID: PAT_MRT3847_19365C.1
tggagcaccgcccccaccttcaacacctcatcaaacctctccctcaagcttctcgactccggtaacctaatcctctctgcccccaacggcctcgttctatggcagagcttcgattcccccaccgacacgtggctccccggcatgaatctaactcgcttcaactctctaacctcctggcgaacccaaaccgacccgactccaggactctactctctgcggctaaagccaccgttctttggcgaattcgagctcgtctttaacgacaccgtttcttactggtccaccggaaactggaccgacggaaaattcctcaacatccccgaaatgtccatcccttacttatacagcttccactttctctcccctttctcccccgccgcggagnttggattctccgaacgcgcgtcgga

SEQ ID NO: 53547 - DNA, 316 bp, Glycine max
  Clone ID: PAT_MRT3847_19366C.1
agttagcatgttaaaactatccgtttgagcaaaaaactgtaaggaaggcacgaggaatgactagctaaatacctcccattacatatgtgaacttaatttgaataattacgcctggtccatatggggggcgcggctgaatcgtgtattcttacgaggggaccaaccattgctcatgctgaaacctgattacctaagcctgaaccactcgctgcgcacaactgacacgagccatactattacactgaagacgttatcatgagagttggacgacatacccctcatgcctttaggccaatgtctatgactgacacaggac

SEQ ID NO: 53548 - DNA, 540 bp, Glycine max
  Clone ID: PAT_MRT3847_19367C.1
ctgccactagcagcggtccttgcctcgacagccgattctatcattcagactcacacaaaatgccaccggttcagaatatgtacggtcgtgctcagcagccttcgtgctgggatcgtgtcaagtacggcttcatgatgggtgcatgtgtcggccttgcatcaggtggactttttggtggattccgggcactaagtatgggactgctagtgacgagaactgatctcatcgctaacaaaagtaatggtgcaaggcggaggcacatttggcactttcatggccatcggcactgccattcggtgctagtgctattgtagtcactgccgtcgtaggtgaaaaactgtctagagcccgtagtgtttatccattgtgcaaatacaatcaacgccttaccttcgtcactaatgtaggaaacgccatccagctgattcaccgtgttgtccaacttttgaccaaacgaaaggtggttgatggtgtgcgatgtgtttacctatttgaatttttatatttgtacaaataaattatccaacaattccgcaaaaa

SEQ ID NO: 53549 - DNA, 262 bp, Glycine max
  Clone ID: PAT_MRT3847_19368C.1
attaataaaatggggaaaagattacatgtataaagcataaaagtttgtaaaacaattcaaaaagtcccatcacaaacaacatagaagggcacttaatactccagacaaccacccacttgaaacaggtggacatacttacaaacctaggcaataagcaaaaccggaattgtcttcgggggaactaatgaacaagaactacatactggattgataaggaaaaggctttacagaggtgtaccccagctgcccggatcactgggtc

SEQ ID NO: 53550 - DNA, 457 bp, Glycine max
  Clone ID: PAT_MRT3847_19369C.1
ggctcgagatctgttccaaaagcaacccaacatcgtcagagttcatgccctcagtctcagagagtgacaaatcagaaggttttggagattaaggatcaaattattagagccagagcatacttggggtttgctacaccaagcagcaactcacacttgatgaaggagttgaagctgagaattaaagagatggaacgtgctgttggagaagctactaaggattcagagctgtcaaggagtgctttgcagaaaacaagacacatggaagcttcactgtctaaagccaactgtgttttcccagactgcactgctatggcagctaagctccgtgcaatgaatcataatgctgaagagcaagttcattctcatcaacgtgaagcaacacatcttgttcatcttgctgcaaggaccaccccaaaaggtcttcactgtctttctatgcagctaactgctgattact

SEQ ID NO: 53551 - DNA, 212 bp, Glycine max
  unsure (1)..(212): unsure at all n locations
  Clone ID: PAT_MRT3847_1936C.1
tcttatgtaatatcacctttgtcacgcactatgctctagaactatcacggagtacacgtttgacttcgtaggctaccgctatccaccgtaccgaaccagtggctggncaaccactttcagcaccatgcaaccccgccgtggctaccaacccgcatatcaagaacaaccctgatatctgcaacaaccccatgaagtccgagaccgaaggacgt

SEQ ID NO: 53552 - DNA, 506 bp, Glycine max
  Clone ID: PAT_MRT3847_19370C.1
gggggggaaaaaaactttttttttaaaaacaaagggtttacgagcaaagttatcacaaacggaccggggacggcaaaaaaaaaaaccacatttacctccccaaaacaggaaggaggccaaaaaaattaaaaagggccccaaaccctaaaaaggctaaacacccccccttatttaggggccccacaaaaatttttaaaggccacagggggcaggggggggcccaaaaaaactgggcaggggccccacaaaagtttttggttccccccccttccatttacggcacgggcaaaaagaataacttttttcctatgctggcccaaaaaggcccaaggcccagaaaatctaccccccacccccaaaaggtgaggaaaaacagaggggcaactttccttaaaggaccaaaaaccataaggtggcaccacagctctgaaattttcaggcccggcaacaaatttaaaacaaacgggtttaagggggaaacaagggggcgggtctgccaaaactaa

SEQ ID NO: 53553 - DNA, 412 bp, Glycine max
  Clone ID: PAT_MRT3847_19371C.1
tttttacagccaaatatttagcaattcgaagaaggtgctttttacaagtcttcaaaatcaaacttttgcttcttgttgcaatcacctttattttttcttttccctcttccacgtcaaaacaaccaacaaacctcgccaatggttacatatacaaacacatatatatcttcccaattcactcacatttcacaatctttacaaatcagcaatcaaaaggaaaaggggcatctctgcaaattcacaaagcctggcgtggaccattttgatgaaaatgtcttcctagctagttaattagaggtcatatgagaaagtgcatggggacaccttccacaatcattgttatctcacaaagaagaaggaaaaggggaaagcatatttgcttccacatttgatgaatttggtgctagttctc

SEQ ID NO: 53554 - DNA, 335 bp, Glycine max
  unsure (1)..(335): unsure at all n locations
  Clone ID: PAT_MRT3847_19372C.1
anaacgcangcacgcgaacgnaagcacggaattcggcacgagacangactaccnncannaanaaaacnatacanccatcacaannngggcanaaccnnagnangagnagacaagnaaaaaatgaaaaaagagnaaaaacgacnagnganaaggancaaccggnanagaaaanaaancagaangngngagnngnagcncaanagagnncacnccaaannaaancnaaaacnannaangnaagnggagaaannagnaaaaannnagcaaaggacgagagggggnaagaaggaaaagnggnnnagngnncnagggaaaagcgcnaanaaaaggaaaan

SEQ ID NO: 53555 - DNA, 366 bp, Glycine max
  Clone ID: PAT_MRT3847_19373C.1
agataaccatatagagtttgattttcatgataatcttagtcattacattaggctcaaatatctgttaacaaaaaactaataataataacatttaacatttgctgataaaataaaaaaacattagccggttaacccttctaagtgcttcccaaactcccaacagtctctatagtgttaagagtttgatggattcatttgttgttgaatgttgcaattgcaggctaccaggtgactacggtttcgacccattaggactaggaaaggacccagcattcctcaaatggtatagagaagctgaactcattcatgggaggtgggcaatggctgcagttgtaggcatctttatagggcaggcttggagtggag

SEQ ID NO: 53556 - DNA, 226 bp, Glycine max
  Clone ID: PAT_MRT3847_19374C.1
ctcgagccgctcgagccgctcgagccgactcgagccgattcggctcgagcttttttcacactgccctccgctaaatctaggtcgcccatcatcttgcagatctaaagaagccctatcacaaatctctttttccacatattggaccttgattgaaacagatttgagtagactcccccgtcccacagtcgatcttgcgcgcctccttcacttttggctttggtggttg

SEQ ID NO: 53557 - DNA, 347 bp, Glycine max
  Clone ID: PAT_MRT3847_19375C.1
ggtaaatttagtgaaaatattatatttgtcactttctcaaaaacgccccagttgaagattattgtggagagattatttgaacactgtggatgtcaagtgcctgattttcaaagtgatgaagatgccgttaatcaattgggacttttgctgaggcaaattggtagaagttcagtgttgttggttctggatgatgtttggcctggctcagaagctcttgtcgagaaatttaaagtccagataccagaatataaaattttggtgacttctagggttgcattttctaattttgggcccccatggtatcttaaaaccactcgttcatgaagatgccgtaaccctttttcgtc

SEQ ID NO: 53558 - DNA, 793 bp, Glycine max
  Clone ID: PAT_MRT3847_19376C.1
ccattttagaaacctcgtgagtcccggcctctcctgagtctccttcctccaacaatctcgcggcgcctctgtctctctctcggtccctccaagtccaatgagtctgcgcctccgctcgccacctctatgtcgttgtgctacgccatcgaggtcaccctcacaacctcaccttctacctctgcctcagtgagtcttccccgccgctgcgccatcgttcctcagcaacttcgggtcgtccttgcacaacgccgtcgaggttgccctcacggcctcagcttctacttctgctttagcgagtcttcccctccgctaccgctgcgccgtcgtgccacaccaacgtcgggtcatctttgcacgacaccgtcgaggtcgccctcaccctcaccctcaccctctacctctccattctcgaacaaggtatgaatgaccgtgtgatgctattttattcttagtaatttcttaattagtgatctatgtaatcatgtattgatttgtttcgaaattgtattgattggttagattgcattgttaatttgatacttctgtattgatccttgtgactggtagactacattcagtgcattggtatttgcctatttggtactttggtattgatttgttttgatggatcatgagggtcaattagtgatctactggttcgaccactgatctagtgacccagtgccatgatcggatcagtcaccggaccggtttttaaagctatgcttttatctctttttcaaataaagaaatgagaaccggtactataatatcattctactcatattcagaa

SEQ ID NO: 53559 - DNA, 379 bp, Glycine max
  unsure (1)..(379): unsure at all n locations
  Clone ID: PAT_MRT3847_19377C.1
agcgggcgcccctttcttttttttttggcgngttttatttttgtaaaagcccaaacaatgaaacccgaatcaaattaaatgtgaccataacttctttggggtaaatacccaatgggggggaaaaaacactattatagcccacacaattggactaactttgcaccctatgacacgcccttaacaaatgaaatcccacagtgatgtgccatctacgagccaccttgcgctggacagttagttggcagacactgaagattcaaaaccgtcatttctagggtaaggtgaggcaccagaacaccacgtcgttattatcacccaaaaacacacgtacactattagtgccccgcggggggaccacaggcggataatttagggggga

SEQ ID NO: 53560 - DNA, 513 bp, Glycine max
  Clone ID: PAT_MRT3847_19378C.1
tatctaatgatagttgcatgtcactgtgagggtacgggttggtaattttggggggatggcaacttaaagagtaaattttggggtcggtcaattcagcttgatcctgttggcattttgactttggaatttgatgatggtgaagtatgccagtggagtaaggttacaacatcaatatacaatctcatattgggaaagctgtattgtgatcattatggtacaatgcgtatacagggaaatcaagactactcatgtaaactgaaattcaaggaacaatctataattgaccgaaatcctcaccaggttctatatatctgtttcatggattccatctttacagaggcttgtctttgctatgatattaacttctggctaatatagtacttggcatgtgaacttctctcaggttcatggtattgttcaggatagaaatgggaaaatattggctacattactcggaaaatgggatgacagcatgttttatattaatggagactatagtgggaaagggaaggg

SEQ ID NO: 53561 - DNA, 641 bp, Glycine max
  Clone ID: PAT_MRT3847_19379C.1
gatcccagagacagtgacagaaataaattgaaaacagagaaagatgaacggcgacgacgacaagggtttgctgtggaagctcccagtggtgaagtccgaccactttggcaaggtgggccccgccttcggcatcggtgccggctgcggcctcggtttcggccttggccttctcggaggagtgggtgttggccctggaattcctggattccaagttggttttggatttggtgctggatgtggtgttggtttagggtttggctatggtgtggggaaaggaattgcacaagatgacaacaagagatactctaatgttggaaatcctttccgtggttctagaagcatcatttctgaggatgatattactgcacttgtggacgaccttgtcattaatactaaaaagcttatcaaggcaacatcaaaagaaattgacaagtggagaagataattgaagagaccattttaagtacagttgtataaagaaaaagctctgtcaatattttccattatttatattaaatcaaggcaaactcagcttattcagactcgtaacagtatacatgagatactaaattgtcatgttaatacatagcgggggctgttatttggccttaattgaagttcgactccacaatcgcttaaaa

SEQ ID NO: 53562 - DNA, 282 bp, Glycine max
  Clone ID: PAT_MRT3847_1937C.1
cgctgagacacataccagaaagcatgagcgcatcgtggcctgtctaaatatgatcctcaggaaacccaactgtgtccttagtctaaatagagtacatgatatatgcatctgcatgctttttactttttttggcttgatgatacgcaggctacaataaagtcctcacatcttgcataagacggagatcgaggaagatcctatcaatagtgactcttaccaaggcatagcaagagaccacaagggtataccattacagaggctatttgccttagttataggagg

SEQ ID NO: 53563 - DNA, 390 bp, Glycine max
  Clone ID: PAT_MRT3847_19380C.1
atcaaaacgtatgttgtgcaatggaatatacaaaaacatgcaaaaattgtataatgaggttgatttatatagaggttcctcttaggctatctgctgcttataacggctgaaatgtaacgctagtgtctcttaggttttgtcctgggggaatcattttgtaatggcgcggttgtcaaattactttctttgagtaactttagccaatttgcagaacatggccctttttttaaaagccttaacttgggaaagccccggactgaacgccctttcttcgagtggagcaacccgcatttttacggggttgcgctttgtaggagggggtttaatcccggttggctttttaaagaaatggggcaaagtttaaattgtcaaaatgggaccccccccttt

SEQ ID NO: 53564 - DNA, 1908 bp, Glycine max
  unsure (1)..(1908): unsure at all n locations
  Clone ID: PAT_MRT3847_19381C.1
ccacgcgtcaaaagaatcattctctatatctgaatgcgaagtccaaataaacgaatcaaatttaaagcaccacacacagtatatagacaaagaagctctttttcactgacaccactctccctttcgcttttcgtcctaaccaaacaagaagaagaagatctaataaaccaccaattcattcatgatttcaacaacgtgtgtgtgggtccgtgtgaattattatgggaggggtaacgtcctcgatggcggcgacgctcgggttcttcccgccgaatccgccgtcgtacaaggtggtgacggacgacatgacggggctgctgctcctgacgccgttcccgcacagggagaacgtggaaatccagaagctgccgacgcggcggggcacggagattgtggcgctgtacatacggcacccgatggcgacgtccaccgtgctctactcccacggcaacgcagctgatctcggccagatgtacgagctcttcatccagctcagcatccacctccgcgttaacctcatggggtatgactattctgggtacggacagtcatcagggaagccaagtgagcagaatacatattcagatattgaggcagcatacaagtgtctagaagaaagttatggtgccaagcaggaagacataatcctttatgggcaatctgttggcagtggcccaactttggatcttgcagctaggttgcctcaattaagagctgttgttctgcacagtcccatactttctggcttaagggtcatgtattgagtaaagcgtacatactggtttgacatatatatgaatgttgagaagaaggaaaacgttgtaatttagaactctatcacgaataccttcgacatctcagaaaattcatatcctcggtagaaaagccgccatcataaggagtgagtgtcaggagaagcatagacagacaagttgaacaatctagaggaagtactgattgctttgaaacaccgaggaagagtactgatcagagggacaaaccaaggaaaagtactgataggacagataaactaaaatttcatgaattcaaatttaacaatacggaaaagttagagaagataagagtccaatttgatcagatggagaggtcacgaagaagcgtcgagtacaatgataaatcaagaagcattgagttccaagataaatccaggagaagtgttgatgttcagtttgagaggccacggaagagcattgattggctgtatagaattcgagctagctgaacctactgaagcataagtaatattggtagtgggttatttacaaatggagtagacgttcatagatacagacacagttacttacaccggggttttaacttatggtttgcagaatgcatatgttacacatgcagtttcatactttcgttgcaatgttcatgtatatttggatatgttgggacttgggatttgatatccttagttttttcattgttattattatttgcaattgaagcgactctaaccttgtgttagtcatgagaaagaaaatgaacatcatgtcaaaggtggttgctgctataatttataaaagttcaaatggattgaatatccttattgattttgccttcccaaggatatttttatggtgaaaacgtctgttggcagtgttttttccatcgtagattatgattgatgggttgagctcgatcttttatgacgagcctagaacttaaccggaactttacattattcagttttctctatgatgctaccacctcttgttccctccatacgtgtttgatttgtataaattccttatctaagaaatgctactaaaactttctggnccaggcattnactagttntctagtacactcagagaagcacaagaaacgtttactttctttttattttattttatttaggccaaggatatttttatgctg

SEQ ID NO: 53565 - DNA, 399 bp, Glycine max
  Clone ID: PAT_MRT3847_19382C.1
ctcgagccgaatagtctctagggtacaattgattgctttatttggtctgaggaatgtgttaccaggacctattgtgttgtaaatgctcaaaatcctcttgtgttaaataggtggatgggaaaattgactatacgccagggcacttcaccaagtgataagacaatgcctttttctatagcgggaggagctggtgcaaaaaatgctattcttatgaatatgccaaacgctggtcttttaatgtggagatattctgttggagatctcgtgttttaagaacctaagatgactcatccctacattaaattgacaacactctttcttcatagcatatcggaaatatggttgatgataccatcaaatttgaggcttgtccccacacatctggtgcagtcaggagag

SEQ ID NO: 53566 - DNA, 284 bp, Glycine max
  unsure (1)..(284): unsure at all n locations
  Clone ID: PAT_MRT3847_19383C.1
cccactcgtccgcgtttctggcttttcgggtttagcaatggccggaaaacatgtcggcttgggtttactggcttggctcgctggaatttcaaanaatcatctctactatattatgttttatattaatgtacttactttacttttttttttttactcttcatcattaacttttctcttaccattttctttgttgttcttcataattttctcttacatattctgttttttgtcctgtctaattctctttttttatttttttttttaccatattctcttttttcttt

SEQ ID NO: 53567 - DNA, 675 bp, Glycine max
  Clone ID: PAT_MRT3847_19384C.1
cttttacgatgttatctctctctctctctgactctatctctcccacgcgtcctcactgattgagtgaaaccagtgccagtgaaacctttttttccttcctcgccccctttttcttccaatccaatcaaaaccaaaacccctacgctgattctcatgttcaattacggtcgtttgctcaattcaattcccctctccgttgcttaggtctcatctcaatttctcgcagatttagccgttcatggacgccgccgtgaagccggagacggaatacgcggccgtttcgacggatcagcctcggaaagtttcggtggtgaatggttacattgtctacactcgcgccaagaggtcactggattcgtgcaacggtttttcagaacacgcggaattgaaggataacgccgaggttgaagttaaaacggagaacggagagtgtgagaagctgaaaaatgagtccacagaggtggttgcgaggacgcgcaagcggagccggcgatcggcgttggaagcgaaagttgagtgttgtgatcagatggttgtgagtgagacggaacaagtagttgcgaatggcggaagcggaatcaacggtgcattgggagctccgaggaataagatggagttgaagatgtcgaagaagattgtggtcaacaggaagcctatgactgtgaaaaagctctt

SEQ ID NO: 53568 - DNA, 324 bp, Glycine max
  Clone ID: PAT_MRT3847_19385C.1
catttgtaatttttccaatggcattttcggggttcctgcaaaatcttattgaacatttaacgataaatcgggaaaaactgagtacaaattcaggatagggggaataaaaataataaaaactcagttttggaggcaaaatcttatcgaaaccaaaaatcaaccacattctttttttgactgggccaacctatgcgtccctgttccactaaaaaaacaacaagggtttccacaaataattttggtgacaacctgtttcgctacctcttgaaaaaaaaaacccttccacctaagaagttttaaattttctttaccacgggttaaaaa

SEQ ID NO: 53569 - DNA, 159 bp, Glycine max
  Clone ID: PAT_MRT3847_19386C.1
ttaaaacacgagtgtaaggtcgtgggtattgtataattcatgagcagtgtctgaatcaggagggagaggccctgacggactcttcggagtgtaggccttgggggtcaccgggtttgagtgctcctttaagcctatgctgatctcatatggttggagcat

SEQ ID NO: 53570 - DNA, 2026 bp, Glycine max
  Clone ID: PAT_MRT3847_19387C.1
ccacgcgtccgattttttattctgacgcgtccgtacggctgcgagaagacgacagaagggggaggagaagaaaaagaagcagggaaaaactcgagcctattcggctctagggtcatggcaactcgaagactttcattgctcctctctcgctctctatcttccacttcttttcaagctgcttctctacttcactcactagggagaaactctggcaagtggggaaactttaacagattcagcactgcagcagcagttgaggatttaatcactccacaagttccaataacatacactaagcatctgataaatggacaatttgtggatgctgcttcagggaaaacttttccaacatatgacccacgcacaggagaagtgattgctcaagttgctgaaggtgatgcagaagatatcaaccgtgcagtatcggcagctcgcaaggcctttgatgaaggaccttggccaaaattgactgcttatgaaagatgcaagataatactgcgctttgctgatttggttgagaaacacggtgatgaacttgcagctctggagacatggaacaatggaaagccttatgaacagtctgccactgctgaattaccaacgtttgtgcgtttgtttcgttactatgctggttgggcagataaaatccatggtctgacagtgcctgctgatggaaattatcatgtggagacattgcatgaaccaattggtgttgcaggacaaatcataccttggaactttcctctcctcatgtttgcttggaaagttggaccagctcttgcatgtggaaatactgtcatccttaagactgctgaacaaacacctttaacagctctctatgtagcaaaactttttcatgaggctggtcttccaccaggtgttttgaatgtagtttctggctatggtccaactgctggtgcagctctagcaagtcatatggatgttgacaagctagcattcactggatctaccgagactggaaaagttgtgcttggattggctgcgcaaagcaatttgaagcctgtgacattggaacttggagggaaatcacctttcatagtgtgtgaggatgctgatgttgaccaggctgtagaacttgcgcactttgctttgttctttaatcaggggcaatgttgctgtgctgggtctcgtacctttgtacatgagcatatctatgatgagttcttggagaaagcaaaggctcgtgctttgaaacgtgttgttggggatcccttcaaaaagggtgtcgaacaaggacctcagattgatgtggaacaattccagaaggtccttaggtacataaagtccggtattgaaagcaaggccacccttgaatgtgggggtgaccaaattggctcaaagggcttctttgtccagcccactgtcttctcaaatgttcaggatgacatgttgatagcaaaagatgaaatatttggccctgtacaaaccatcttgaagttcaaggacatcgacgaagtaattcgaaggtcaaacgcaacgcactatggtctagctgcaggagttttcactaagaatgtgcacacagccaacactttgatgcgagcactgagggttggaacagtatggatcaattgctttgatgtttttgatgctgcaattccctttggagggtacaaaatgagcggcattggcagggagaagggtatctacagtctcaacaattacctgcaagtgaaagctgtggtttcaccagtgaagaaacctgcatggttgtgatttgtgaattgctcaaactgctatgaccgaaatcctacgtggctatcatctttttccgctgaggcaatggcatgcaataaataatgtgatgttactaagataaaacctgattaggtacctgaacattataccagttgaatttatgtatttttcacttgttaattgctcaaacacaaacttggatactgtaatgacactgttgctgtaggatataaattttgcaccattcacacttgtgtggattactgtcaaaaaaaaaaaaaaacaaaaaaaaaaaaaaaaaaaaaaa

SEQ ID NO: 53571 - DNA, 376 bp, Glycine max
  Clone ID: PAT_MRT3847_19388C.1
ggacggggttttcaatttctatataacaatttggctaaaatatgaaacagaccccatttttctgaaaaaacaccccaccccgtttaaaattttacaaccccatccatcattaatattatgggtggtaacacttcagccaaatttaacaaatttaaactgtggtttaatattcttttcaccttggaaagaaagataaattgctgaatgaatgggattcccgagctaagatcccgaacgagggttttaaatcttcttctggggctggtccttttttgggcccacaaccttggggacttccttcccttttttccacaacacaaaaggggggatcgcctggacctgaaactcctgggccacattaggtaattcgtggacg

SEQ ID NO: 53572 - DNA, 406 bp, Glycine max
  Clone ID: PAT_MRT3847_19389C.1
ggctcgagattattatcaattactaaggaactgtcccacaatagacgcatcaccatgaatggctctgttcggcgagggcgacaagcggcggatcttgtaggaccagaccccacaggaccaatgcgcacacctgtcattgatccgagaccaactgcctccactggaccaagaccttgttgaccaggcttttgactaacctacctattatctactgtgaggggaataccttgctcaaaacatacgtcgtcttctctccctatgctgtgaggcctacattaacgtgccaaaggagaagagaacatcatggctacgagatcagcctgactctgaattgggcgggcgaggccaaagactctcctggaacctctctttcaaggtcgccgtaccctggtaatccctacatatt

SEQ ID NO: 53573 - DNA, 531 bp, Glycine max
  Clone ID: PAT_MRT3847_1938C.1
ggacaaaaagctggtttaaattcctaccggcaagaatttatgccatatataccgccaagaacgggcaggacctttgaaatccttcaacttatccaacaggggcatattaacatccattggggggggaatgcaaaaccctcaaattggggacttgaccccttcggggatcaaggcaccccgcgatagaactttagggtttgaaacaacaatttgggactttggaaaggcaacagaaaaggtcccccccaacaaaatactaacagatttttctttgccggggggaattgcccaaacacaaaagccttataggggggggtgttatcaccaaagctttttaagaaactcttccccccccccagaggtgagccttctactgagaggggaaccggctctcccttgagagggccaaaaataaaaagggccggaaagaaagactctatcccatttttttttgggaggtccctgccccaagctccacacgaaagggggaacaaaagtgggtcatattcttgggccttctgcccccccccc

SEQ ID NO: 53574 - DNA, 708 bp, Glycine max
  Clone ID: PAT_MRT3847_19390C.1
taagaaaggagttagtagggactccaagtagatatgcgaaatggttgatgaacttccaatattgcaatgacatttatgtgaagctgaatggttctcttaaaagtggggtagatgattctttgcacactaacggggaggtaagctttgatgataaagaattacactctgacttgaacttgcccttttggtcacaatgtgagcatcatttacttccatttcatggtgttgttcacataggatacttcattcccaaagggtttcaccccgttgaaaaatcccttttacagtcaatagtgcatttttatggctttaagctccaggttcaagaaaggctcacaaagcagatagcagaaactgtttctccactcctaggaggaaatgtgatagtggtggtggaagcaagtcacacgtgtatgatttctagggggattgagaagtttggaagcaatacatctaccattgctgtgttaggacgcttttctactgaccttgctgcaagaacctcgtttctagagagtattccaaatgctacatctctttgaagaattatgactggctacctcactcttgttggaaggatttctcaattgttccatattcatcatttatctgcatgtttaaggtttgtgtcttccttcttaatgtaataaccaaatactatgttattgagggagtgagaattttaaaagttaaataaaaattgaagtt

SEQ ID NO: 53575 - DNA, 878 bp, Glycine max
  Clone ID: PAT_MRT3847_19391C.1
ggcagagtggccttgctgccacgatccactgagattcagcccttgtcgctttgattcgtctgcaaaggattctacccgccgctcgatgggaattgcgcattggcaagcaatctggtttctctctcctctctctctctctgctctgagtcacaggttgtgaaccgttgttggcacttggcagataattattgcatctaatgagtcatctgcaaaaattgtgtctctgaatgaccatcaagtgatccagtgcgattggaaagaaccttcccaattacaaagattgactacttgttattctcattgatttttcttggcggagtgaatacttcttttctagatgcaaacgtctcagaagcaccctagttcagctggtgcccatttctatcaccagcctgtgcaaggcatttaccaaatgttgcaaagcaatctatgccaagatagcagcagccagggaacaagtgtttcatttgaaacctgtaaggagcaatactttactctggaatcatgcccagcacccactaatgatttcatggattgtgatgattctccttcctatgccagtgtatcatctaaaaggactccattttctccacaaggttctcagtcatgctattcagatcaccaccagtcctctgacaacacctatggttcgccaataagtggcttgtctagtgttgatgaccggcatcaactaaagcacaagctaagagaactggagatttcattgttggcgcctgaggaatcagacattacagacagttgcggctgctgcgtcgtcaagggtggcctccatggatcatctcagttggccaaacataactgggttcagatagcagacaatattgcacaatttgacttgaaagagccctcaggtatgt

SEQ ID NO: 53576 - DNA, 190 bp, Glycine max
  Clone ID: PAT_MRT3847_19392C.1
ggggtctctctcattcttcacccgctcagacgcagtggatcagaagcctaagcctcagacatggccagagggtttgggaagcacctgaggatgctcactgctccatggattggagccttgactatctttgtggtgcttttgcatccaggctatcagcttgacctcatcagttcggggagtgtcttcctct

SEQ ID NO: 53577 - DNA, 1025 bp, Glycine max
  Clone ID: PAT_MRT3847_19393C.1
cttgtggagttccatttgaattccgcagtgctgcaatatctggctgtgaggttgtacgaggaaatattgaagttctacccggagaagctctggctgtaagttttccctatgttttgcaccacatgcctgatgagagtgtgagcactgagaatcacagagatagattgctgaggttggttaagaggttgtctcccaaggttgttaccattgttgagcaagaatccaacaccaacacgtccccattctttcacaggtttgttgagaccctggattattatactgcaatgtttgaatctatagatgtggcttgccccagagatgacaagaagcggattagcgcagagcagcattgcgtggcacgagacatcgtcaacatgatagcttgtgagggggttgagagggtggagaggcatgaacttttgggaaagtggaggtcaagactttccatggctggatttaaacagtgtcaattgagttcttcagtgatggttgctatacaaaatctcctaaaggagttcagtcaaaattataggcttgaacatagagatggtgctctttatcttggttggatgaacagacatatggccacctcttctgcttggaggtgaaactcactgattcgagagtttgcctcctttttgacctttaattgagcataattcaccatatatccgtagtagtctctccataggacttgagatttacctctgttctaaaatgctttctgtagaatctcaaagctcgttgtaaatgctaatactgaaacgaaagaaaagaaacgtctgttatgactctagcattattttcctgccctcttccgctggctgtagtgttattttaactaatgtgatatgagttggatactcgtttagttccttgtactgactcaaatgagaaaccttacactacagatttacattaagctcaaggttttgttggtctactactctactatatatcaccctgtagtcataatagatacataattctacgcatgcataatgaatttacttcttcttgagttt

SEQ ID NO: 53578 - DNA, 154 bp, Glycine max
  Clone ID: PAT_MRT3847_19394C.1
gaggaaaagaagataagttaacgttaaacgaagcaggtataccatgatagacactgatggaaactgggaaatcacagtggaagtcaaatgaatgacagatggaggggcgtcgacattatcggaggttaagccagtcgcgaaatcgtagagatct

SEQ ID NO: 53579 - DNA, 1487 bp, Glycine max
  Clone ID: PAT_MRT3847_19395C.1
ctggctgtgtctgacgatgatgttccgacagcaagaggctggatagataatgtattggggaaattggtatcagtctctggtgatccaatccagaggttgggtgcttacttgttagaggggcttagagcaaggttggaatcatcagggaatctcatctacaaatcccttaagtgtgaacaaccaacaagcaaagagctaatgagttacatgcacattttgtaccagatttgcccatactggaagtttgcatacatatctgcaaatgctgtcatccaagaaacaatggcaaatgagtcaaggattcatataattgattttcaaattgcgcagggcacacagtggcatttacttatccaggctcttgcacataggccagggggacccccctcccttcgtgtgaccggtgttgatgactcacagtcgactcatgcacgaggtggaggactttggattgttggagaaaggctttcagattttgccaggtcttgtggagttccatttgaattccacagtgctgcaatatctggctgtgaggttgtacgaggaaatattgaaatccgagcaggggaagctctggctgtaaactttccttatgttttgcaccacatgccagatgagagtgtgagcaccgaaaatcacagggatagattgttgaggttggttaagagcttgtctcccaaggttgttacctttgttgagcaagaatccaacaccaacacttctcctttctttcagaggtttgttgagaccttggattattatactgcaatgtttgaatctatagatgtggcttgccccagagatgataagaagaggattagcgcagagcagcactgcgtggcacgagacatggtcaacatgatagcttgtgagggggttgagagggtggagaggcatgaactttttggaaagtggaggtcaagactttccatggctggatttaaacagtgtcaattgagttcttcagtgatggttgctacccaaaatctcctaaaggagttcagtcaaaattataggcttgaacatagagatggtgctctttatcttggctggatgaacagacatatggccacctcttctgcttggagatgaaactgactggttcgagcgtttgcctcctttttgacttttaattgagcaagtagtctctccataggacttgagatttacctctgttctataatgcattttgtagaatctcaaagctcgttgtaaatgctaatacataaatgaaagaaaaagaaacgtctggtatgacttcagcgttattttcctgccctcttccacgggctttagttttatttaactcgtgatatgagtaggatactcagcttgtttcctcgtttagttccttgtagtgactgaaatgagaaaccttacaccacactacagatgtacattaagctcaaggttttggtctactactctactatatattaccctgtagttgtttcctgagtcataatagatacataattctacgcaaa

SEQ ID NO: 53580 - DNA, 334 bp, Glycine max
  Clone ID: PAT_MRT3847_19396C.1
ctctagtgcatgacgcaaaaaccagtaactcagtcatctaatcgatgagaatatcaaactattgatattccactacatacgtttattcaaagctgggcgtgggtacttcaacatcaaccattcatattgacatcaatgaacgaaactacctactttacgccaatgatttagccatcaatggagctaagaacgaccctacattgtgaaccaatgcccagacagttcatcccactgtgaatatttgagatttccattgcacaggacgaacccacccttgtgcggacggtactcgaaaatgatcttacaacaccctattcatgctctggtggacaca

SEQ ID NO: 53581 - DNA, 356 bp, Glycine max
  Clone ID: PAT_MRT3847_19397C.1
tacaggtgttagaacacgtcagagggggcagccaacagattcaaatgccctatctactgggtggtggaacggtttttagaacaccacaagaacgaacccttctcagactactacttatgggcgtcatcattacctttttataaccataaccggtatgtctttctttctatctgctcaaccaactataatgagggacggtgttatttttatcaatgtttacgtgcaattttttctgttaaatgtgatcgaagtgcacatgagatcagtcatcgaatcactattctacacattcatatcatcgaggcacttatatgatactggagtacgcctaacctactacaaactttaccggaaat

SEQ ID NO: 53582 - DNA, 1731 bp, Glycine max
  Clone ID: PAT_MRT3847_19398C.1
ccacgcgtccgtacaaatccatagttttttaggttagttgctggcattggcaagcaatctggtttctctctcctctctgcactgcaccccacaactcaaactgagcagtcacagacacaggtatgctctcgctggacacttcctagttttcaactacatgtgttcatgccttgtggggaatgcctctaattgctgtctcatctgttggatcattcagctcaaactcccacttctgtctcattttcaattttccggttttatcgacaatccccacatagaatacccgttggccaaccgacctccttaccattcaatttcgtcgggtttcagcaacgacttccactttttttattagttaagagaacccccccccaaaaaaatgaagaaaactactttcttttttacgtctaagtctctcttctgttactagtcagtcttgtggtgatctcaaagcctctaactttcctcagaggttgacgattttcggttttggcacccaaggggttgaatttcctggcatgttgtgtgtctttaaaacatctatgaactgttgttggcacttggcagataattattgcatctagcaacccataaagacggtgactatgagtaatctgcaaaattttaatgctatactctgtgtctctgaatgaccatcaagtgatccggtgcggttggaaagaaccttccgaattacaaagattgactacttgttattctcattggtggagttaatagttattttgtagatgcaaacgtctcagaaacacccaagttcagctggtgtccatttctatcaccagcctgtgcaaggcatttaccaaatgttgcaaagcaatctatgccatgatagcagcagccagggaacaagtgtttcttttgaaacctgcaaggagcaatactttactctagaatcatgcccagcacccactacttgtttcgtggattgtgatgattctccttcctatgccagtgtatcatctaaaaggactccattttctccacagggttctcagtcatgctattcagatcaccagcagtcctctgacaacacctacggttcgccaataagcggcttgtccagtgttgatgacgggcatgaactgaagcacaagcttagagaactggagatttcattgttggggcctgaacaatcagacagttgcggctgctgcgtcgtcaagggtggcctccagggatcatctcagttggctaaacataactgggatcagattgcagagaacgttgcacaatttgacttgaaaggagtcctcagggtatgtgcacaggctgtgtctgatgatgatgttccaacagcaagaggctggatggataatgtattggggaaaatggtatcagtctctggtgatccaatccagaggctgggtgcttacttattggaggggcttagagcaaggttggaatcatcagggaatctcatctacaaatccttgaattgtgaacaaccaacaagcaaagaactaatgagttacatgcacattttgtaccagatttgcccgtactggaagtttgcatacatatctgcaaatgctgtcattgaagaagcaatggcaaatgagtccaggattcacataattgatttccaaattgcgcagggcacgcagtggcatttacttatccaggctcttgcacataggcctgggggacccccctcccttcgtgtgacaggtgttgatgattcgcagtcgattcatgcacgtggtggaggac

SEQ ID NO: 53583 - DNA, 450 bp, Glycine max
  Clone ID: PAT_MRT3847_19399C.1
gttaattacataacctatttaatctctgtgttgcttctgtttatataaaccaattccttttaacatacaataaggatttacatttacactttttttcttaaaaaacacattaacctaagatcgtccgctcctttatataacacacaaaagcaatctctaagaaaccgaccaaaacgacagagaaaccattactatccccccccggcggttataacgaggagtaattaggcgagcgcgtaaccaacaccaaggcatttggtggtgaacggcccccaccataaaaacgcgatcgcatacgctcgtaaaaaaaaaaaacatcctttacacccccgcctggcggaggtcgcgtgtcctctttagagagcgcggcgctcatacacttctgcgcggtggtgagcccaaaccggacggtgctggagtcagagttcccggcaccggctggtttgagcc

SEQ ID NO: 53584 - DNA, 450 bp, Glycine max
  unsure (1)..(450): unsure at all n locations
  Clone ID: PAT_MRT3847_1939C.1
ggattctcttgtgnntagaagccanntgtcaaaggggtcncnntggtctcttancctctgaccattnnggcaagaaagggcctcgagatncctcctcttcaaggggactactcatncagtgacccnnagaagnnttcaccaaatcactactctnatctcacccnnactggagttgcttatttaacatctnctcagggacccannagaaaggtgantcnnnttttgtggctttgatgttaacccacccanngttgaagaaccaagaaccatcnnaccactganntatcaaattagaccacttaattctncaatcttctcacnaactatnncactgtcaatganngcctgctcctggtctcaagaaactatttttagcttcnnagagttcctgatcaaaaggtctggaaaggtggaagttcagtacttgcatgactatgctggaataagcac

SEQ ID NO: 53585 - DNA, 601 bp, Glycine max
  Clone ID: PAT_MRT3847_193C.1
ccaacccaaagatgttctgtaaattaattcagcgcactacccccattatcttctttcctaacgccctcatatcctagaaattcttacatttccattaaaaattcattgtgcaccaaccatttttctttccgaaaatccatggccaacactagaaggatcctccatcttgtggtaaggtttgtggcctttgcagcaaccttctgtgcagccattatcatggctgctagccatgagagaggtagcatctccacaatgtcctttgaagcaaaatacactgtctttcctttctttgagtactttctggttgtaaactctgttgccactgtttatggatttttggtcctttttattcccacggaaaacttgctctggcaacccgtcgtggccgtggatttggtacatgtccttaaaccaagtttaatggtatcgtgtgatccatatgattgagataaggctattattattgtgtaattttaaaaaaatatgtgtaaatattttattataatatcagctctattaattatagatgagtcaattccttgcaaaatttatatattaatgggttgattttatgagcaggttttgaccatggcactcatct

SEQ ID NO: 53586 - DNA, 752 bp, Glycine max
  Clone ID: PAT_MRT3847_19400C.1
ctgtatagaggtcgcccttttttattttttttttttaccatgcatataagcatatttcctttttcttattcatgcccggaaaaagggcattgcaataaccttcttacaaaaaaaatcaatgatccactaatgacggtatggaaatacctaccatagcgacttctacattacttacacgcgtggaaaccgcgcaacatgcccagtaacagagtgttcttccatcatatacagcaactgcatgctgcgaagccgagcaggaaacagaaattacaaaacttacagcaacaacacggccttgctgtgtaccataccatacgccgtgtgttctggcctgagtcgtcgtactggtacagactcggcacctcccttggccacgccggaagaaaatttatattcgattgcccctggataggatacccatgggtcgtcgtccggttcatccatgtttcagtgcttggcactgcctcgaacgaaaaacggtctgaaggtgaagacgaaaccgatgaacgtgaagatgttcagtatgaagaacaccaagtggtcgcctggaagaaatgcagctgtttgacgcctctgggcccacgaaaatatgattcctgcaacagctggagcaaccgctttagagatggacattagtgttacagctatcccattggctgcggctcttacatcctgagtcacagcttcattcatcaaaatgttgaacacggtaatggtagttaccgagaatgtattcttcagcggacgcgtgg

SEQ ID NO: 53587 - DNA, 511 bp, Glycine max
  Clone ID: PAT_MRT3847_19401C.1
ctctgctacatgctcttcatctcttttctctgatcacatatctcatacacaaataacttctctacctaattcaagtaaccttacacttactatatatagatatatagatggatcgtgtggcgaaattggcatcacaaaaggcagtggtgatcttcagcaagagttcatgtgggatgtgccacgcgataaagcgactattctacgagcttggggtgggtcccacaatatatgaggtggacgaggagtcgagagggaaggaaatagagtggtgtctgatgagactagggtgcaacccttctgtgccagcagtgtttattggtggcaagtttgtgggtgcacccaacacagtgatgacccttcacctcaatggctcactaaagaaaatgctcagagatgctggagcactgtggctttaattggaacatgcatgctaattgagttgtacgtccttcttttattatattttctttacacaaccttcttttagaaaaagataaaattaagtattaac

SEQ ID NO: 53588 - DNA, 309 bp, Glycine max
  Clone ID: PAT_MRT3847_19402C.1
gccgtagcctagcgtcagcaaagctaaatacctagtgcggactattttgcaaactgctgttggatatgcaagcgatacttcagaagaccaatctataactgacaatggaatagatgctctaaagccctctctacacactgtttgatggaaactgagctaatacatatagtagacagatgatagatgaatgaacagctatcaaactcatcaataagacagactaactaatcgaaatttccatcttatgaatttatccttctaactaacatttctggccactcctctctgttcagcagtttgataagctgg

SEQ ID NO: 53589 - DNA, 285 bp, Glycine max
  unsure (1)..(285): unsure at all n locations
  Clone ID: PAT_MRT3847_19403C.1
agnnnncctnnanngtagtaagtnggaattaggatngagttngtttgattttnngtnantttntnggtnggaaaacgcncntntgtgtnntngaatggnagancagntcactgangannagattgngagttnaaggaggnttnagnctgtttgacaaggacggngatggttgtattantagtaaggnagttgggagtgtgatgcggtgagtagggnaaaanncaagtgaggtagaagtgcaggatatgattaatgaggttgatgtgatggtaatggaacatggan

SEQ ID NO: 53590 - DNA, 523 bp, Glycine max
  unsure (1)..(523): unsure at all n locations
  Clone ID: PAT_MRT3847_19404C.1
cgtaagnctcggnaattcggcttcgaggaaaaaccataaactgaaaatcgaaccagtttgtgtggttttaatgtcatctgggttctgtgccaattgccaaatgctgttgggttgcaaacagagaaaaccaatactaccgtgcaagcagatggaaagtcaaagaccattgattcccacgattgtttaaaattttagtctcagtcaagttctctgtgcttgcttattagtttggaattcactctgctgctgtctgtatattgtatacagcacttaaatgggaatggaactgggaagtcggaataagcccaaattctaagaacacatttggcaaagctcactcttaacgtgctggacgaagcgttatatactacaattacgatatgtattattagacttggaagtggacatagaggaatacttggtatgatgcttcccttagctcatgtttgcaatttgcaagaacaataaatagttgtatgaactatgaagactatatagctntagaacgtgtgtcaagtatcaa

SEQ ID NO: 53591 - DNA, 476 bp, Glycine max
  unsure (1)..(476): unsure at all n locations
  Clone ID: PAT_MRT3847_19405C.1
gtggatggtgaaggtttgatcacagtgatgccttcctcagtgggaggactttcgagaacagtgatggtgatgcttcctgaggaagaactcgctgaactaagcaaagacgaagcaatattggagttggagccagcgatgcttcttgctggttgtgtggaccattagacttgtgcaaaaatttaatttttcggcttcttgtctctctctctctctctcccgctatgtaatgcaatgctggcaacctttacttacacatgggaccagagacgagacaagaataaagcttcttacacactgctcacagttgctaaaatttggaagaataagaaagtttttgtgaaatgtgatagaaccagctcatatctatttatgtagacgagttctagggtggacgcgaaaccaagtgttgtaagtgtcaaagttaaaaaccaaatcacgaagaaacttggttntcgtaattcaatgatcatttttta

SEQ ID NO: 53592 - DNA, 196 bp, Glycine max
  Clone ID: PAT_MRT3847_19406C.1
gccctacaggcctctgcagaggaggtactgcaggagatgtgctgatccatatacaaacaggggattgggacttaacatcctgatatcgtgaggggaatcgcccctggggtactaacttgcatcagacgtagtggaccctctaccattaaagaaggtgccacaaattcgtagagagctgggttctgttggccagatc

SEQ ID NO: 53593 - DNA, 286 bp, Glycine max
  Clone ID: PAT_MRT3847_19407C.1
gataagacaacctttttttacgatcattctgtgtatgggtctggttagttggagcctataaacgcttttatgagatctcatccgattactggtaggggactacacacagggacttcaatttaatgccatacactatgaccctataacattgaaaatctttcactctcttgtgtccagtgatacgataccgcgaggaattttgatacgtcaaaacatggtataagcatgggaagaggaaggtattgaatttaaatttggcacaaaggaagggttgggtggcaaaaag

SEQ ID NO: 53594 - DNA, 706 bp, Glycine max
  Clone ID: PAT_MRT3847_19408C.1
ctatcaatattttctcctaaatacccttttaattcattcccaatttcaaattaactttccagagacagtttttcattttttttggcttaccccatttctctgctactcacctcctcctctatagctccgttactcaaacccctcccatgccactcttccactcaaaccccatttaagattgaatgaatttgctccatctaggcctaatttatgagactgagcgttcaggttttttatgtaaagaatgtcataatgctgatgatgcttggtacacgaggaatattgtaaattatgagttatggctttagaaaattattattttgtttttattgaagtattgttgcaattttcattatcaaggtagaatggggaaattcataaccaatgctcaacaacgtggtgctgcaattattcaagtgcactagctgctagttctgcttgtaaccataatagagattgggtttttgtaactcctccggttggtttggcatttgtttgaattttagttcaggtataattatcatttgcctaacaacaattgtccttaatgggcccggtccaaaagatccaaacagtctaataaaagattagtcaaaacgtaatagggccagttgattcaattgttcagaagttggataaaaaaataattgtggtggtgaaaattaatccgataattagtcaaactttgaattaaaagaaattcaac

SEQ ID NO: 53595 - DNA, 715 bp, Glycine max
  Clone ID: PAT_MRT3847_19409C.1
aaatattcaaaccagattcaaaaaccaaatttaaataattcatatcgagcaaccaaaaaaaaatgccttgggacctcatatttttattcatccatgttccatgaagtaagtaactgctactgaaatgttgcttcctgcaactcatatccactttcaatacacctttccttcttcattgaatttttcccctcttcaattcccctaattcaaaaccagattccccattcgttgctcccctcccgagattcaaacccgaacctgtcaatctcctccgccattgaacgaatcgccaagaagctccacagcctcggcatcaccgaaccccttacctcctcctctgaaattcacgttctgttcccgcatgatctcccaaagcggcacgtggggcacaccttcgagcctaggtggagcatgccgctgaaaccggtgccgatcccaggaaccggcatcgcggcgctaagcaagagcgaggtgaggaagcagaagaaactgcgggtagaggagtcaaggaggaggaaagaattggtgccgacccagatggagctgagcctctcggactcagagattcggcacctgaccacgctagggtttacgacaaagaaaaagggagatacaaggcaacaatgagagagaggaaagtggacgctgagtggaaaatgaagggtcagcaggggagatacaaggcagcaatgagagagaggaaagctcgagcctg

SEQ ID NO: 53596 - DNA, 169 bp, Glycine max
  Clone ID: PAT_MRT3847_1940C.1
gcctttataacttaaacttcatggactctgatgacttgctttgcttgtaacgttaacctgcgattgcataaactttcaatacgctcagtgctcacacttgaatcacaagctttggttaagcacttgacgctagagacccattgacagcctcagctgtgtccaacacatt

SEQ ID NO: 53597 - DNA, 142 bp, Glycine max
  unsure (1)..(142): unsure at all n locations
  Clone ID: PAT_MRT3847_19410C.1
attagtcgttgccattctcatgcctgccttctgtactctatgcnactaccantcagtgntcatgnntccttacaagctaccggaccattccagcgcctttcaattgctccnttntggnctacaaattactggtgacncctgt

SEQ ID NO: 53598 - DNA, 345 bp, Glycine max
  unsure (1)..(345): unsure at all n locations
  Clone ID: PAT_MRT3847_19411C.1
aaaagaangaggnaaccctagctggataggtcaaacatcatcatgtcggacgaagagcaccatttcgngtccaaggcagacgccggtgcctcnanaaaccnancnnngncaagccggtaccattcgcangancggcnncatcgtcatnncaggangcccctgcaaggttgtggaagtttcgactncccaaaactggnaagcacngtcacgccaagtnccactntgttggnattgatatttntcactgccaagaaacttgaggatattgtgccctcttctcacaactgtgatgttcctcatgtgaatcggactgattaccagctncattgatattgctgaggatgg

SEQ ID NO: 53599 - DNA, 504 bp, Glycine max
  Clone ID: PAT_MRT3847_19412C.1
agttcaatatcttttccaaagccatggcctctgtttgcaaatcagattgtgtgaaggactcacatcgtccccttaggccaaccttcgtaaaccgccacaagtggccagaatccgaggtagagtttgtgaagacggtgaattctaacattcatgcgaagccaaaaggagcagttgatagcttctcgtgtaggcaaatgtacttgaggagttacaaattctcaagggagaaagtgggtgtgagagagaagaccctcaagtgtttcaataaactgaaggagagggtcgtttgtgtcagaaataaattgaatttgaagagtaagtataaggttctggtgagggccaaggatgtcacttttgctgcgttttcaatctttcagagttttctaccctgctctgccaaggtcgatgtgcttcatgatttctaatccaatctcacttgctttttaatttttatcttctgctgctttatactgtaccatgtagtatgtgccctttttcttttct

SEQ ID NO: 53600 - DNA, 662 bp, Glycine max
  unsure (1)..(662): unsure at all n locations
  Clone ID: PAT_MRT3847_19413C.1
cccacacgtccgtacggctgcgagaagacgacagaccgggatcacaatctcattcgttaacacatcaatttctatctctcttatactctcactactctctttgctctttcttttctccactatggctgcacaagaaaacaacttccaagactacttgcctgtgatggccaacaagcttggtggggatggcctaattgatgaactgtgcaatgggttcgatcttttgaaggattctgataaaggggtcatcacttttgagagcctcaagaggaattcttacttgcttggtcttcagggtctcagtgatgaggatcttcgctccatggttttggaaggtgactttgatggtgacggtgcactcaaccagatggagttctgtgtcttgatgttcagactcagccctgaattgatggagggctcaaagatgtggcttgaacaagtccttcaacaagagcttaaagattatttctaattcttgtaatttttttctctttctcccttactcttttaattcatttgtcattttgggcaatttcccatatacttatgtaagaaaatttaaaaaaaaatgaaatggcaaaagtgattaatttgatacttcctagttccttcaacctgaattctcaactttaattcaattattatgcacgctagnnnnnnng

SEQ ID NO: 53601 - DNA, 560 bp, Glycine max
  Clone ID: PAT_MRT3847_19414C.1
ccacgcgtccgctttgatctccatgaaggttataagacacgccctgtaagatacaaacaatggaatctcgcattgtagcacagaatgctctatgagcgtgcaccaatattgctacgccgacatattcctgccgtacggagctgaaccatcatacgcgccgaccgtgcggcgggcgacatgacccacgcgtgagaacagatactaaagcacgactgaaacgcccattgagaatgctgctgcggcagaagcaagacccccggagcccactctctagacatccccatatatcaatccttgttagctggccttgattctatgctcccggagctcttcactacagtatcgaatagcacctgtcatgagtgagactctgatggggaaactgacccacttgaaaccgctctgaaggagctgcgagagcggcaaacaccctttacaagcctgcgctatttgactgatacgctgtttgaagattgctgaggcgatgaactgaacggggaaaactcctgggagatgcaagccagtggtgattgatgattgaactgacaggacgcgctgag

SEQ ID NO: 53602 - DNA, 641 bp, Glycine max
  Clone ID: PAT_MRT3847_19415C.1
ctcgagccgctcgagccgctcgagccgctcgagccgattctctctcatactctcactactctctttgctctttgttttctccactatggctgcacaacgaaacttccaagactacttgcctgtgatggccaacaagcttggtggggatggcctaattgatgaactgtgcaatgggttcaatctgttgaaggattctgataaaggggtcatcacctttgagagcctcaagaggaactctgccttgtttggccttcagggtcttagtgatgaagatcttcggtccatggttttggaaggtgactttgatggtgatggtgcactcaatcagttggagttctgtgttttgatgttcagactcagccctgaattgatggagggctcaaagatgtggcttgaacaagtccttcaacaagagcttaaggattatttctaactttcctttttttttttctcccttacccttttcattcatttgtcattttgggctatttgccatatacttgtgtaagaaaattggaaagaaaaaacaaagaaatgaaatggcaaaattgcttcatttaatactttctcctccttcctaaatattctcaagtttaattcaattattatgcataaatgctagttaaccttcttctttttac

SEQ ID NO: 53603 - DNA, 393 bp, Glycine max
  Clone ID: PAT_MRT3847_19416C.1
gagaaaactaaagagataaggggaaatgtgttgtgtatttccagattgccaagaattcatgataaactattctgtcaatgtttgctggcaatggtaaaacaaatttgtacaaccaaatttcctggtttcatcacaaaataaaattttcaacatcaagagtatatacagatttgattatgatctattctctaattatgtagcagaatgttcattgcttgttgtacataatcaattacatggacataattgctagataattttataaggggaaatgtgttgtgtatttccagattgccaagaattcatgataaactattctgtcaatgtttgctggcaatggtaaaacaaatttgtataaccaagtttccttgtttcatcacaaaataaaatttt

SEQ ID NO: 53604 - DNA, 1869 bp, Glycine max
  Clone ID: PAT_MRT3847_19417C.1
tcaggctgcaacccacttccaccagagatatggcttttgcccaagtacgcccccattcatccagggaaaatgttatgctactgtcgcttagtttacatgcccatgtcatacttatttgggaagagatttgtgggtccaattaccgggttaatcatatctctaagagaagaaatgtacaaccagccttatgatcaaatcgattggaataacgcccgaagcacagttgccaaggaggatctctattacccacatcctctgattcaagatatgttatgggcatgtcttcatcacgtggcagagcctcttctgaattgctggcccttttccatgctgagagagaaggcactagaagtcgcaattgatcatattcgttatgaggacgagaacagtggatacctttgtattggtagtgtagagaaggtgttgtgtttgattgcacgttgggtcgaagatccaaactcagaggcatacaagcttcatttagccagaatccctgattacttttggcttgcagaagatggattgaaaatccagagtttgggttctcaactgtgggatgctacattagctatacaagcaataatatcatgtgatttgagtgaagagtatggacctacacttcgtaaagcacaccactttgtcaaggcttcccaggtgcttgaaaatccatcaggtaatttcaaagcaatgcatcgacacatatccaaaggagcatggacattctcaatgcaggatcagggttggcaagtctctgactgcacagcagaaggattaaaggctgcacttctattgtcacaaatgtctcctgacctaataggcgagaaaatggaagatgagaggttctatgatgctgttgatgtgattttatctcttcagagcggcaatggcggcttccctgcttgggagcctcaaagagcgtaccgttggttagagaagttcaatccaacggaaatcttcaaagacactctcattgagatggagtatgtggagtgcacatcatcggcattgcagggcctggctttgtttagaaagttatatccaaaacacagaagaaaggaagtcgatctctgtatttctaaagcaatccgttacattgaaaaaacacaaaatcctgatggatcatggctggtctagtggggaatttgctatacctatggtacattgttttctgtaaaagggttaacagactgtggaaaaaactaccgtaatagtcctgccttgcgtaaagcttgcaatttttgttgtcaaagcagcttcctaatggaggatggggtgagagttacttgtcaagccaaaacaaggtttacacaaatctaaaaggcaacagggcaaacttagttcaaacttcatgggctttgatgtccctcattgatgcagggcaggttgagatagatccaacacccgtagagcgtggaataaggttattaataaattctcaaatggaagatggagactttccacaacaggagatcactggagtattcatgaggaattgtacgctgaactattcttcatatcgaaacatttttctcatatgggctctgggagagtatcgtcgccgtgtctttacgcataaaagtcaaatacttagctccacctaactccaatccaactcattttgttgcctcaatgcacccattattatacttagcaactaagcgcagtgcaatttttgcggagccacccttcgcccttgtaaacacagcacatgttgcaagggtatctgccatgatgcttgttcactttagttcttatcattttttataggtcttatctcatgttacattatatttaaaaactttaatggtgaaactattcaaaaactaaaaatgtctctcataaaaagggcgcccgccgactagagagctc

SEQ ID NO: 53605 - DNA, 414 bp, Glycine max
  Clone ID: PAT_MRT3847_19418C.1
aagaggtagtcgtagtcgtcgtcggctctgtaacccgccattggtggagctttttttgctctgtttgtgttgtggtgttgttctggaaagaagggaagaaaagtagtggaaacaaggaaaggaagaaagaaaagaaacactagagtatgaaaacgctttaaaaagcgccactactaatgattttttatttttatttttattttcttctttgtattgatttgcacgtacatctgagactagtctggcactttggagtttggggactcagggttgaaatttatttttcattttttaccatattaagcatgaaacttaaagataaaaaatgtttttagtttttattttgctgaattttaattttagtatctgacctttaaaagtacatgcttttaatcctttgaaaaaaaaaaaaaa

SEQ ID NO: 53606 - DNA, 463 bp, Glycine max
  Clone ID: PAT_MRT3847_19419C.1
ggaaaaaactaccgtaatagtcctgccttgcgtaaagcttgcaaatttttgttgtcaaagcagcttcctaatggaggatggggtgagagttacttgtcaagccaaaacaaggtatatatattattgcttgaatagcacactagactctgaaaaaagaggtcagtgttaataaatttctatctacacaaatatatcggatgctttctttgccaaacaggtttacacaaatctaaaaggcaacagggcaaacttagttcaaacttcatgggctttgatgtccctcattgatgcagggcaggttagtaaacaaaaatcttcaagtattttagtacttatattgtatgagtttaattgtcattcactttatcaatcagaaataatatgtgatgattgttagagtagttattataaaaatcaacaaatttatctttcataacaaaatgatatgaagtattagattgat

SEQ ID NO: 53607 - DNA, 263 bp, Glycine max
  Clone ID: PAT_MRT3847_1941C.1
cccattcgccccacctgcagtgcacccttaccctggcggtcacttacacccacaccctggcccacaccctcaccctgaccctgcgtatgtgtaccactctcctgcaccagcttctaagaagccatactactaccattcttcaccacctgcagggcaccaccacccttacccccatgttgacccccacccacacgcatattctccaccacctcctaaggaagccatactactatgattctccaccacctgcaaggcacccccac

SEQ ID NO: 53608 - DNA, 445 bp, Glycine max
  Clone ID: PAT_MRT3847_19420C.1
gaattcggcacgagcgaaaatcccccgggcgagcaggaaagcgataataccaaaaaaggtaacaaaaaatgctaacgatttccgcggtaatttctatgatagtttagtcggaaacgatcataacttcaacctcggtgggcgaaataaaggtgatgaatagtttatttgtatatggtctagtactatgctatgcaggattaccaataatgaaagtgtgctctatatataaataaatataatggttttcgggtgttacctaaaacttactatctgtaaaatggcggagcctaaataagactcctctatttagtttcccttttctttgtgtcagatctcccccatagaaaaaaaaaaaaaaactttaaatgcctaatcccgtaatccgtttctcagtgtgtaagatctccattttttttcctgctataccgcgggtggtaattggctt

SEQ ID NO: 53609 - DNA, 439 bp, Glycine max
  Clone ID: PAT_MRT3847_19421C.1
ggaaaaaaaaattttccccggctttaaaaactttggttggccccggtgggccaaaaaatttggggaaccattttaaaaggaaaggccaattggggagcaaaaaccggaattggaaattttgccccccggggggaaaacccaaacccccccttttgggaaaaaaaactgggcttttaagttttccgcccagaggggtttttccccaaaggggggggggccctttgtccttttttaacacaaatcccaatctccaaaaactagggaagggggggcttatataaacccgtggtttttaaagggcccccccaccggaattttaaggaaggcttttttttcagcaaaaaaaaggggggggggggggcgaaaaaaccacaattggggttttaaaaccccaaaaaaggctaaaaaaaagggggtttaaaaaggtggccgcagtttt

SEQ ID NO: 53610 - DNA, 236 bp, Glycine max
  Clone ID: PAT_MRT3847_19422C.1
ttgggggggtttttttattctatggggtccttttattccccgctcagggacgcacaatactcgggaacaaaaaaaaaatccattccttacaaaaaaccccccccccatcacaaaaaaggaactttcttcccccaaaactaaacaatggtgattaaaggcccaaaacaacatcgccgtaccccttgggggaaaactgagaaaaacccctcgggaaccacctggctcccacccttgga

SEQ ID NO: 53611 - DNA, 478 bp, Glycine max
  Clone ID: PAT_MRT3847_19423C.1
attttgggtaactagcattgctgtttaagtctataaaaatggtgatgaggaggttgcaatgttgcttctgatggagttagcctacttatggagttattattacctaatttatttattttttgtttttgtatctattcttttgaagaaaatgtttaggaacatacttatgtaatgaaattagacttctcttcatcttactgcaaaggtgaacattctatctttcttgtgtttactgaatgaaaaatgtatttttatttctcacatctggaactatgctaagctcagtagcagatttacagtattcaaaagcttgttagttgtgtagtacccataaccctactatagttgttttttcttaatcatatccatgctatgtttttagtttaggtatgatggcatgtggggcaatcaatgtggtaaggggttcgaggtcatcaattgaagaactgctgcaaatatacaaccactcctgaagttg

SEQ ID NO: 53612 - DNA, 225 bp, Glycine max
  Clone ID: PAT_MRT3847_19424C.1
attacttagcacaccaaaatcatgcattgactggaattcacttctatagctcttcctgcccacacaaagtttattgactctatctaagcgggaagggaactacctcattttctctttacacccaaaatactcatactagcgcttacacatttaccaaaacaaccaatatacacactttataatcacactttctttttgtccagaaacattttaaagaagagcttc

SEQ ID NO: 53613 - DNA, 262 bp, Glycine max
  Clone ID: PAT_MRT3847_19425C.1
tgcacctgcattgagtgggcatcaacttgaagctcttgattgctgtgaacaacatgcccgctgcgcatatgaactctttgataaagaccgaaacacgcctattgtcattgaagatcttgcttcagaacttgtacttgatccctctatccctgttcatgtcgctcttcatgactgtatacaccatactgatgggaacataaatgttcttgggtttgccctattattacacaatatgcctattcaaaaccttgcgaagggtcaa

SEQ ID NO: 53614 - DNA, 521 bp, Glycine max
  Clone ID: PAT_MRT3847_19426C.1
ccacgctccgcgcacacatgcgtaagcgtatatggccatctcgctctttaaaaataacccaaagaaacgtatggcaatggaaatagagtagtacctaatagaaagcggcgctctcgcttaccatcgttacgtttcagacgccaagaagcgacgagtgacccactctactacaagccccaccattacaaatttactactacgggcaggggcacccaatgaatccgaacctaatccacgtgaagcacaacctgatcgacacactacttcctacaacgccgcatgcagatcatccgacccttcccggccttccccaccacacatccgacagattcactccaaccactacatcctacttacctcttctccaggtccaccctagaccctatcctattacaacttctttcgacacctcaagcgctacaacggcggacaagactgacccgaatacccactgtctcttcctcttttgtcaggcctccatcggaggctcccttggcgccgccgtcaaactcacaccgcgc

SEQ ID NO: 53615 - DNA, 325 bp, Glycine max
  unsure (1)..(325): unsure at all n locations
  Clone ID: PAT_MRT3847_19427C.1
nacangcangcgtngtaagctcggaattcggctngaggcactgaanncattgcngtaacttncanagcntagagtngngcngcnntggattgcgattacgatnnnangtnccgnacatgangcggnacggncnggcacgntgatgaacacagcnaacggcacnatgatctcaccgncgnnttcgtcnggaacggcggggcagtcgcngggnactgaagacctatttcaaaacncccnngggaaganataagcttcaatatgagangagtnanccttcnggtcttctncantangccnatggcaaaacngttatcgtaagctgngc

SEQ ID NO: 53616 - DNA, 437 bp, Glycine max
  Clone ID: PAT_MRT3847_19428C.1
tttccgttttgtttgatgatactttcagagttacttcgaatggtatatagatctctgactagctgtagaatagtactatttgcgccgttgatgtagcttgtttcgagagtattttggcaggcaactgctgatcgattaaagaggaatgcaagctagtagtcagatctggagaccctggtgctgacgctctagctttgatattggtctattgatctaatatatttcgtaggaattttctgtctttcgcacctgtgtgtaaactggctcgaatgtgcagaacactgacatttgatcactacaatctggctgtggtgatgatctcccagacgctgaaacgaatgataccatcaattatgctgaaccagctggagattttggtgctgataaaactgttggtgcatccgctaccactgttaacgaagatcctaaccatgact

SEQ ID NO: 53617 - DNA, 429 bp, Glycine max
  Clone ID: PAT_MRT3847_19429C.1
cacattatttttcactctttttatggaaaaacgaccaagtgaatgatattgtgcaaaaccatccaggtggagccatattcatgcttcgcattggggactggcaaattgcacctagaatactgcctgaacttctacaattcattgaattctatccactgatcaaataaaatagtgatgctggaagaaattttatcctaaataaaaggtagcatttaattgttccatttgcctaatcttcaacatgttacacacatttataaccttaactatgggttcacgaaagattagatttcaaattaatcacagggaatgtagaaataagatatttgaagagacacttacccatccaccatctggtgtaactggaccatgaccatttggtgcggtgtttatgacaaaatactgcggtattggtatcccaaggaacaa

SEQ ID NO: 53618 - DNA, 1396 bp, Glycine max
  unsure (1)..(1396): unsure at all n locations
  Clone ID: PAT_MRT3847_1942C.1
cctggnctcgcgcgcctgcaggtcgacactagtggatccaaagaattcggcacgagnnnattgccnatgtgctnantgnnnaacnccattccttggtnnnntcacncncctgctatncatctttaacctgaccnantcntacgcgctctatgnatnntacnctcncnggcttcaacttactccctctaactncaagtaatgcggntctggatncanatggngannancttnacgantnctttgntgnntgctgtggacactgnnaggntntgactactatntgggagacggcacctactgtgtnnangggngntnntactgnggcctcatttggngntgatgctcacccgtatttggatcacgaatgtggtattaggggatnnccaccnntaagannggnngcacntgannagccggntgancattaccanngangnnnacatgtcctcnaattgctgaatttgcacttacncatggnaangctctnttgaaggnnnccntngatnggaaagngacaagaggatctaagtncaangacaggatccagatctttgactannantagccctcttgngngnttgtgattgaaattgtnagatcagaacncccgagaacttttnggaattgtgggaacnctttttgacctctagnttgttggaccgtttgcnaaanatatttttcttncanaccnggtatggaacncctttccgagtaactttncaaaaggggtaaagctttaaaaccttgggnccaacaggttttacctggaananttccctganaaataancccgcnttantttgggccaagttttaaccattggttttacccngggaattnccccttttccaaaatttttnggggaaaccattgggctgggaccggcnttnaaattaaacccttnncctnnnnttnnctttccntttaaaaaggggggnccctggggaaaanttggntttaancncntttggtttgggaaaaaaaccttttnggnaactttnnnnaaactttttttttgggnaaancctttaaaaaatttnggggtcnatttcccccctaaaaggggacccccccttntttttgcaaaacnccccaaaaactttttttggggaataaaaccccttggnggncttnccgggnggaaaattccggaattgggttncccctttctttnnttgccccnttttnngnaaancccnggggttttttgggaaggaaccctccnntttttnncctnnnngttttanagttcncacttnnnngggtngggnncaatattttanggctgtactncccgantnngngatttcngnaattttgttnaagggggggttccagttnggggccttcccaaaagtttgnaatttttaaanatttgactgcaaatcaaatttta

SEQ ID NO: 53619 - DNA, 298 bp, Glycine max
  Clone ID: PAT_MRT3847_19430C.1
gcatccaatattttttggtttggggtttttttttataaaaaaacttgaaccatttattcaaggggtacattaaacaaaaaatacaaccttggaccttttgctaaatacacctgagaattttgaattaaaccgggtatctacaccacgtgcattcctagttaattagcacataaaagggtggcccttcgtacttttaaaaaattaaaaagggcttttatcaagtgggggcattaatttgaaattaagacaacctggggaagacttgcacaacattgccaacttgtgacacctcatacaa

SEQ ID NO: 53620 - DNA, 307 bp, Glycine max
  Clone ID: PAT_MRT3847_19431C.1
atcatggacagagtgcaattcagagaaaccaaatcccagacaccatacaacacaacacagcactttggtcgtgtttcgtttcatctttttctccgagaaagatccaccccacgtttcaaaatcactttttttctctgctttgggaaatgatgccattgttgtcccttgcgaagcaaaccccatcaccaccatcatcatgtaggagcgactcaacaactcgagtctcgcgttcctcttcctccccctctgggcacgtgagaattctccgattctgaaaccgaggcacgtgacgttagcgtgcgtgtgt

SEQ ID NO: 53621 - DNA, 1350 bp, Glycine max
  Clone ID: PAT_MRT3847_19432C.1
ttcgagaagacgacagaagggggctgagtgagtgagggggcattctgaacaaagttggggctgaaaaacagagtctccgacccagtaaggagaaatggactggtgggtgtcaatgccaaagatagaactgcatgctcacctcaatggatccattagagactctacacttctagaactcgctagagctttgggtgacaaaggtgtcatagatttctcccaagtcgaacatgttatccttaaaaatgatcgttcattaagtgaggtattcaagttgtttgacttaatccacgttgttactactgatcactcaagtattacgagaattaccaaagaagttgttgaagattttgcatttgagaatgttgtgtatctggagctgaggactacaccaaagaaaaatgattccctaggaatgagcaaacgctcttacatggaagctgtactggaaggtttaagagctgtccgttcagtagatgtggctttcattccttacagcgaggaacctagaaatctttcaagtccattactctcggacgcaagtgagaaatgtaatggaaacactagaaaaaaaatctttgttaggcttctatttagcattgaccgtagggagacaacagaagcggcaatggaaactgtcatgcttgcattggaaatgaggcattttggggttgttggaattgacctctctgggaatccagctgttggtgaatggattacatatttgccagcattgaaattcgctcgagaacaaggtctttatgtaactcttcactgtggagaggtatcaaattcaaatgagatacacaatatgcttgagtttcttcctcataggattggacatgcttgtttctttgaggaggaacactggagaaggctgaagtcctctaacattccggttgaaatctgtttgacgtcaaacctcaggacattgtctgttccaacaatagatgcacatcattttgtcgatttatataatgcaaaacatcctttagtgctgtgcaccgatgactccggtgtattttctacgagtctctccaacgaatacaaaattgcttcttcttcatttggccttggacagaaggaactgtttgagctatcaaagaatgctatcgagtttatgtttgcagacaatgtagtaaaggaggatttaagaaaaacttttaattcagcagcaaagaatctgtaattgtaggtagagtttcatcatggtagtaagtatttgaatcgattaacttctatgttttaccgggtacttgatggacacaacttatggttgttcctgttatattagagaatgagttgacaagtatataagttgatcaaattttgttctaaaaaagggtggaataa

SEQ ID NO: 53622 - DNA, 559 bp, Glycine max
  Clone ID: PAT_MRT3847_19433C.1
tgcttgcaggaaaacgactatcgatcgaccaatgaaacctggacgactcaagcgtcagcagcaggtgctcgccgatgatcgtgcagagatcccgctcatacctgaagaccaattagcagcgccgctagctgccgtgaaattggccgagagcggcgatttcccgcggcttttgatcgccttgaccctgcgtccgcgactcgccagagctactgacgcctctggtatgacagcactgcactgggtctgcagtaaatcgacagcaccgccgcgtgtcgtgcttaccgtggcccgcgcgcatccggcagccgccgccacgcgcaatttggcgggactcttgccactgcacttagcagtgaggaaaggccttgtcctggagaccattcaggcgctgctacacgtgtacccgaatgccattgagatgcgcacacctgatggtaagacatcgcttatgttggctaagaagagaccagtggcgtcgagtgcagtgcttacgctgctggaagtgctggaagctcacgcgaggacgggagcgctgccatcggtagtattaccgacgtcg

SEQ ID NO: 53623 - DNA, 475 bp, Glycine max
  Clone ID: PAT_MRT3847_19434C.1
cggctgcgagaagacgacagaaggggtatacatttgaaaataaataataattccatatttgatttatttttagcataataaaattcatttgaatatatgagttttcttcttaaaaattcaactagaaaatcatatagtatttaaattataataaggacctgaggctgttttattttttaaaaaataaatcaaactgtcattcatatttaatttgcaatgacaatatggggtttacttatgacttcctctcaaagtacttaaattccttctttattctataccgccgtggtttttttttttttttttgtcaacctagagccatcaattatgagaaatattctacttctagctgttagacgcgtttatcttccatgattagataattaatattttattttggcaaattttctgcactgagctgacaatgtttaatatgtagaatacaatcagtcgacttgacaagatccccgaacat

SEQ ID NO: 53624 - DNA, 373 bp, Glycine max
  unsure (1)..(373): unsure at all n locations
  Clone ID: PAT_MRT3847_19435C.1
cccactcgtccgaaaatcgctgtgggaagggacacacctggtgttgtcttgttggtcaagggtggagatatgttaaaaagatttttggagcgacatatgtgcaataccttgtggatttaccatcacagttattagcaatagtatctttagtgagacgctcatgagatatagctatgaacaattactgctccaggctaaagctccaagtatgttgctacaatccttcaaaaattatgtgtctttgtgtctgcattgagatggacactgtaattagccgtcatgtatatcatcaagacttactatacggngtgtctaaaatgaacagctacctagcttgtcatgacatcaccatatctgatcgtgttgacacaac

SEQ ID NO: 53625 - DNA, 220 bp, Glycine max
  Clone ID: PAT_MRT3847_19436C.1
agcacaaatactagtcccagatggcctctagcacaaccgatgaggcttcttggtcataatggagagatcaacaccatacagggcaacttgaattggatgcaatcacgagaaccatcattgaagtcacctgtatggcgaggtcctgaaaatgaaattcgtccatttggaaatcccaagggatcaaactcaacaaatcttgacagtgcttcagaattattga

SEQ ID NO: 53626 - DNA, 328 bp, Glycine max
  Clone ID: PAT_MRT3847_19437C.1
actacgcgtacattagtagtagaccgcttgcggtcgtccttttaaatggaatgggcggaaactatcatatcgataaggggaggttaagtgaaaattcacacaattatatttacacaatctgatggttatcaacctaatgacataactgcaagagaacactgtttttgacacatgcaaggcgcacaagaaattgcagcaacattttcaatacattttttattcataatttatattctaattcacaattcatttattggcaacttctatcattcttaactttatttattcattttaacaaacttcgctaaatccctttttcaatttctta

SEQ ID NO: 53627 - DNA, 315 bp, Glycine max
  Clone ID: PAT_MRT3847_19438C.1
ctagaatacgaggagtttgctccgtcgcacggttcctcccgaattctgtgattccttcgaatggctagctctccttcaggttccacatggagactttgtcgatgttcactttctaggaggtgaagatttgtactttgtaagtcacaagcaatggtgagggacactgcgtattatgacctacttaggcgccaattattgatgcctctagctgcacatatcaagaaagcctattatgcctaggctgaaattgatcacacctatgaaaatccctaggattctatgggccccgaaaactattagaaacctggtgaaggt

SEQ ID NO: 53628 - DNA, 748 bp, Glycine max
  Clone ID: PAT_MRT3847_19439C.1
ccacgcgtccgctacgaccgaagacccacaccaaagttttcttctagtttctatccttcttcatttcataaccatcacattcatcactctcctctttctttcatttctttcacacccttcttttgttttcttctgtttttaatttttttcccctgttcttctgtttctctcttctctttagggtttcaaagtctaccattccttcttcccttccaattaccataccaatttaaaccctcctttcattcgatttcctcacctcgattcccagttttctcgctctagatttctgatgccgcagcaatttcaatctgattgccgtctgcgagggctggaatcggttgtggacagcttagaatcacttttttttttcttattctttttcattttttgacgaaagaggaggtgcagttgtgggagtgtttcgtggttcagtagtgagtggcttctgaagattatgattatgatttagaagtaaccctaggtatctgtgtaggtttatggtatttggtgattgatttgggagtgtgattttgattccctatagtttttttttttttgctttggtttttttgggggagtgattactgattggagaagaaggggatggagaatggtcacgatgggaaattgactgagaaattctcgggcttgaatatcaaccagcacggtcagcaacacgagcatgatcaatctaacctctcttcttacaacaatgataacttgtatcaggtcatgaaagctgttg

SEQ ID NO: 53629 - DNA, 270 bp, Glycine max
  Clone ID: PAT_MRT3847_1943C.1
atcaggagcgaagttgggcgggacttcagagatccgcctcccttgcccttcccccgcccccggacggtcacagcacccaaaccgcaggccctgctctggcaggcaggcaaagctaggcagaagaggattcccaggatcctgggtctgttccctgccccagtgctgcagaacggacttgggagctctcctttgctgctcccgcgggtcacccagcgagtgctgagaccccattttctgtcgaggcgggccgagtcttcccttatccccaga

SEQ ID NO: 53630 - DNA, 209 bp, Glycine max
  Clone ID: PAT_MRT3847_19440C.1
gggtaacaacgacacaatagcatgcgtgattatgcttcaacgacataatctctgtgccacctaattgctcccagccttgggctctctgagaaatgaggaagaaaatgttcctcatggcgacaattacataattgtcataatgagctctcttttctttacctatgtctttgtgttgaagggctatcaaatgtaaaatccacaccgaaaca

SEQ ID NO: 53631 - DNA, 1378 bp, Glycine max
  Clone ID: PAT_MRT3847_19441C.1
agaacatacaccttttctcgtggcccgagcactgccgtacttatttgactagggtggctgcctgcaggatgaggcatccacaatggcaaaccaacactccagggaatgatatagctgatgaagagtctttcaatgactcactaaaggatgttcaggacatgtcccttaggctctcaattgatgctgacttagcaggtttaagttctggacccgacatgcaagaccaagtgaagcgtctcctaagcaggatgaagaagccagattctggtggttcaaatgacactgatggtgggaataagatgcctgacaatgtaactgggaaatatcctctactgtggagaagacgtcggttgattgttatcgcactagatttatatgacaacaatggagctcctgataagaagatgatccaaatagtgcaaaggatcattaaagcttctcaactagaccctcaaaatgcaagagtttcaggatttgctttgtcaacagctatgccaataagagaaaccatagagttcctcaaatcaggcaacattcaagtaaatgattttgatgttttgatttgcagtagtggtagtgaagtttactatcctggtacttacacggaagatggaaagcttttgcctgatccggattatgaagcgcatattgactatcgttggggttgtgaaggtcttaagaaaaccatttggaatcttatgaatactgctgaaggtgaagacaaaaaatcttccagccccattgtggaagattcgaaatctagcaatgctcattgcatctcatacaaaataaaggatctcagtaaggcaaagagagttgatgacttgagacagaagcttcggatgcgaggcctacgttgtcatcctatgtactgcaggggatcatctagtatgcaggttattccactccttgcatctagagcacaggcactcaggtatctctttgtccgttggggactgaatgttgcaaacatgtttgtctttcttggagaaactggggacactgattatgaagagttgatttctggaactcacaagaccataatattgaaggatgttgtgtctaatggttcagaaggaatacttagaggtccaggaagctaccatagagaggatgttgtacccaatgagagtcctcttgttgcaagcattagtgaaacaactgaggacaagattgccaatactttgaaggaactatcaaaatccggggcaatgtgaagtgctaaactactaggtcaattcttctttctttctttttttttctttctaaaatagtattaatccgtttacctttacaaatcacaaattgaaaaatgatgtaattgtatgctattgtgaagcatagaatctagcaaaaactatatatggcttattttgtc

SEQ ID NO: 53632 - DNA, 338 bp, Glycine max
  Clone ID: PAT_MRT3847_19442C.1
ccctcgctaccgcccacgcgtacggctctgcctaggggaaaattaacacacctctttgaagtgtcataatgatgtgtgaagtgtgtgttattttaaaaaaaaaaaaaaaaaaaaaaaaaaaaaaaaaaaaaaaaaaaattcaaaaaaaaaaaaaaaaaaaaaaaaaaaaaaaaaataaaaaaaaaagccatcctaaataataagatccatataaaaaaaaacatacaaaatcgtgataaaaaaaaactaaaaattaacttaaagcgggttcatttatagaaaaataagggtgacatgattggaaaaacccaggtgaaaacctaactaaatgtgcttcg

SEQ ID NO: 53633 - DNA, 247 bp, Glycine max
  Clone ID: PAT_MRT3847_19443C.1
ccttgaaccattagaccaaccaggaccccaacacaccactgtcaaattgtttgttgtcaatccacaaacaaagttagaaccagaaacaattacctcaaaggaaactccttctgtaacattactcaccgagaattgcccatttccaccccaacacacaaccgaaccattcgactctctaatcgcacaaccatgctcagcaccaagtgccaacccagaatactcaaaagccccaccttgaggaatatca

SEQ ID NO: 53634 - DNA, 340 bp, Glycine max
  Clone ID: PAT_MRT3847_19444C.1
ggctcgagcaagagtctaatatttcaatttgaaaaccaaagatgaaatatcgaaatgtaggcaaggggtcaaggttgacaccattgaacgctagctggatcctgcccttatggcaatccatcgcctcatgaataaagcccatgagtagtaacgcatcccagtcagttatccaacgcacctgctatggatgagatgcaccgaagacacagacgatatcattaatggaaagatgcgtgctcaaaaccacatcgattaccaagcttgtgctcagcgtgttgttggaacaagtcaatagactgcaatctactaaatggtgaatggcactctcatgagcatcgtt

SEQ ID NO: 53635 - DNA, 148 bp, Glycine max
  Clone ID: PAT_MRT3847_19445C.1
ttaaccctagtgatccatatcctttgatccatcggcctatcggtgatagcagtacacatctcaagctttcttgctcttatctgttatctctgataggattttagggatgggaactaagagatctcaccggcggatcgcttccggtctc

SEQ ID NO: 53636 - DNA, 716 bp, Glycine max
  unsure (1)..(716): unsure at all n locations
  Clone ID: PAT_MRT3847_19446C.1
ccacgcgtccggattggttgctgggctgaatgcacaactgcggttagttcggcgtggacgactaagagtaacatttcgacctgtcctcggatggcttgagactcatgccaatcctgcattgagtgtccatggtgtgcgcattgaccttgcctggtttcatgctacaagtagtggctattgccactatgggctaatggtttatgctcttgaggaaggttatccagccactggaggaagtactgacggagctttaagaactgaggaaagatcacgggtccagagtgttaataaggaacatttggggcttgcaataagcagagctcatttaagccctgatggaaggattgaggataattatatgaggcgacaaatgcatggagctgctttagatgtaaacaatttgcagatgcttgacaagaagagagatatcttttatcttctctcttttatacttcagaatacaaaacctgttgggcatcaggatcttgttggtttagtaatctcaatgctgcttctaggagattttagtttagtattacttaccttgcttcagttgtattcaatttctttggtggatgtcttccttgnggttgttatattacctttcggcattcttctcccatttcctgtcggattaatgctctctttagtcatggaccaaaggcgttctgcaggccttgcacgtctttatgctctgtggaatctacatccttcat

SEQ ID NO: 53637 - DNA, 1634 bp, Glycine max
  Clone ID: PAT_MRT3847_19447C.1
gggcatcaggatcttgttggtttagtaatctcaatgctgcccaacaggttttgtattctgaagtataaaagagagaagataaaagatatctctcttcttgtcaagcatctgcaaattgtttacatctaaagcagctccatgcatttgtcgcctcataatacaaaacctgttgggcatcaggatcttgttggtttagtaatctcaatgctgcttctaggagattttagtttagtattacttaccttgcttcagttgtattcaatttctttggcggatggcttccttgtgttgtttatattacctttcggcattcttctcccatttcctgtcggaattaatgctctctttagtcatggaccaaggcgttctgcaggccttgcacgtctttatgctctgtggaatcttacatccttcatgaatgttgttgttgcatttctttgtggatatatacattacaactctcaatcgtcttccagtaaaagacacccgagcattcagccgtggagtatcatggatgaaagtgaatggtggattttcccagctggattggttttgtgtaaattattccagtctcaactcattaattggcatgttgccaatctggaaattcaagacggtcttgtatagcaacgattttgagctgttctggcagtcatgagggtatgttcacagcttatattcaacattaactttttaccctttttccctcttctctcgacccatcacatgttctgagtacggtcatctagtataggtcaaagattgacatagagatggtagtaggataacttgaggtggggagaaatagaactatagaaatccaaagtagatgttgtagaggcattcattactgtaacacctaatgctcaatagttcttttttttaaaaaaaaaattaatcattttcaccttgaattttcctactgtgtaaatatcaagtaactaagcacaatttagaatatggtgtagttgttgaccactcttgactcatgcctgcctcatttattatcaactcatgacttaggcatgttgccaatctggaaattcaagaccgttcctttgtatagtaacgattttgagctgttctggcagtcatgatgttcaaagcatatattcaacattaactttttacccttttacccacctcttctctcgatccatcacatgttctgagtacggtcatctagaataggtcaaagattgacatagagatggtagtaggataactcgaggtggggagaaatagaactacagaaatccaaagtagaagttgtagaggcattcattactgtaacacctaatgttcaatagttctttttaaaaaaaattaaattattttcaccttgaattccaactgtgtaaatatcaagtaactaaagcacattttagaatatgttgtaggttttgactcatgactacctattttattatgtttatttggcgaacggcttcaaattgagtagaatcggcagagaatttgggtttcttgggataagaattgtgcttgattgaggcgttttattcccctcaccccccaaaacagttgtatttttttatggtatcaaaattagtaattgtttgttcgtgaaatgggtttatatcttgttgcaatcagactacgtgaaatccttttct

SEQ ID NO: 53638 - DNA, 1308 bp, Glycine max
  unsure (1)..(1308): unsure at all n locations
  Clone ID: PAT_MRT3847_19448C.1
agatgaccgtactcagaacatgtgatggatcgagagaagaggtgggtaaaagggtanaaagttaatgttgaatatatgctntgaacatcatgactgccagaacagctcaaaatcgttactatacaaggaacggtcttgaatttccagattggcaacatgccaataatgagttgagactggaataatttacacaaaaccaatccagctgggaaaatccaccattcactttcgtccatgatactccatggctgaatgctcgggtgtcttttactggaagacgattgagagttgtaatgtatatatccacaaagaaatgcaacaacaacatttatgaaggatgtaagattccacagagcataaagacgtgcaaggcctgcagaacgccttggtccatgactaaagagagcattaattccgacaggaaatgggagaagaatgccgaaaggtaatataaccaccacaaggaagacatccccccatagaaattgaatacaactgaagcagcgtaagtaatactaaactaaatctcctagaagcaacattgatattactagaccaacaagatccctaaccgcagttgtgctgccagccctgcaaccaatgttgcccaacaggttttgtattctgaagtataaaagagagaagataaaagatatccctcttctcgtcaagcatctgcaaattgattacctctaaagcagctccattcattagtcgcctcatactccatgcatcgtggtgataggcctatcctcctcttatccccgtcaatgcagccttccacatattctagcttcgtgtcagggctcgctgttcagtaattgtcttcaactcttccaccagggcttaaatgagctctgcttattgcaaaccccaaaggaagttcctttataacactcaggacccgtgatctttcctcagttcttaaagctccgtcagcacttcctccagtggctggataaccttcctcaagagcataaaccattagcccgtagtggcaatagccagtatttgtagcctgaaaccaggcaaggtcaatgcgcacaccgtggacactcaatgcaggattggcatgagtctcgagccatctgaggacaggtcgaaatgttactcttagtcgtccacgccgaccgcacttgtgcgttcagcccagcaaccaatctgtaccaggttgtaggttgcactgactgactcatgaggctggtaaggatattatcgttgtgaagggtgaatggagccatataacttccatcacctccaaaaggcaatgacaaagggaaccggacgctgggtcgagcctttaattcc

SEQ ID NO: 53639 - DNA, 2112 bp, Glycine max
  Clone ID: PAT_MRT3847_19449C.1
ctccacaaaaacaaacagaaccacaaagacaggttttgttgctcttctgtggttcttccagagagagagagagagggttgaagaggatgttctgagaggaccgctttatctgaaaaaagatcttggtttgcagaaagtcatctttcagagagagagagagagagagagaaagaggtgtaatagaaaaagagtgttgtcttttgtttgtttgtaactttacattgaattccattatttttttctctctctctcttgtgttactcgctacaagctatatgactataaccgactccatcttttaccgtggaagaaggaaatgaatatcacaagtggaagaagacacagaaggcgctaggagcatagctactttaagagagaacaaggagcaagagaagaaaacaacaaaaacaaaagcttttaggttgttctttctcttgtgtcatggcttcttcaaagaccaccaacccaacaacaactactacacaattggaaccactcccaccacctcaacaacgccatcctcctcctcctcatcatcagttgcaacaacaccaccaccaccaccatcatcatcaacaaattcatgaccatcatcaaatttcttttggaatgatgcaatcctcttcttcattttcctctatccccggaaactaccttataagcaaggattccggagcttatgacttgggtgaattggatcaagcctttttcctctaccttgatggacaagcagacccttctagtgttcaagaccaaagacaaaactcatcatcaggaatgaggcctccaactctcaacattttcccctctaagcctatgcatgtagagccatcatcatccaaggccaaggctaacatagagctagtttctccacaaacaagtggatcaaagaggccatcagagccgtcgatggagttggccaaccctcgaaacgaaactgcttctgcccctcagccacccaaacctgtcaagcgagagagcaaccgcaaaggtccaacgtcaagttctgaacatgaaggacctaaaacaccagatcctaagacactcagaagacttgctcagaatagagaggcagctaggaaaagcaggcttaggaaaaaggcatatgttcaacaactagagtcgagtaggattaggctgaatcagctggaacaagagctacaacgtgctagaactcagggcatgttcttgggtggaggcgcacttttgggtggagagcaaggccttcctgtcactatgaatactattagcacggaggctgcaatgtttgacgtagaatatgctagatggcaagaggagcaccaccgcatagtgtgtgagctaagagctgcagtgcaagagcaccttcctgaaaacgagcttagactgtttgtggacaattgtttggcgcattatgatcaagtgatgaacctcaagagcttagtggccaaaacagatgtgttccatcttgtttctggcacgtggaagaccccagctgaacgttgcttcatgtggatcggtggtttcaggccatctgaactcatcaagattattgtgcgtcaaattgagcctctcacggagcaacaaatattgggcatatgtggattgcaacaatctacacaagaagcagaagaggctctctcccaagggctcgaggctcttaatcaatctctctcagacactataacatcagattctcttagttatcctcccaatatggctaactatatgggacagatggctgtagccatgaacaagctctccactcttgaaggtttcgtgagacaggctgataatcagaggcaccaaaccattcaccgtctgcaccagatcctaacaacgcgtcaagcagcaaggtgttttctggccatagctgagtacttccatcgtcttcgagccctcagttctttgtggctggcacgccctcgccaagaataggctcagtactccctagctctagctagctatatatgcatgcccttaacttatatatatagcttcttaatttctctttaattataaattaaatgttatatctctcttcatcactcctctctcccactgcatcatgggctgtatagatacagtgatatatagacagatcattaatatagaatttaatgttaacaacta

SEQ ID NO: 53640 - DNA, 250 bp, Glycine max
  Clone ID: PAT_MRT3847_1944C.1
cctgccctttttttttttttttgtccatatctactgctattctgcttttattttgtttgctatgatctaaaaaatttttttttatgggtctcaatctacattgttacactctgaaaatttaacgagctacatggctgatactttacccttgttaacaacttgcaaccttctttgcatatggttattaaaaattcaggaggcattttggtattctttaaaaccatatttacccaacatttgaaaaatcatt

SEQ ID NO: 53641 - DNA, 667 bp, Glycine max
  Clone ID: PAT_MRT3847_19450C.1
ccatcttgtttctggcatgtggaagaccccagctgaacgttgcttcatgtggattggtggattcaggccatctgaactcattaagattattgtgagtcaaattgagcctctcaccgagcaacaaatattgggcatatgtggattgcaacaatctacacaagaagcagaagaggctctctcccaaggactcgaggctctcaatcaatctctctcggacactataacatcagattctcttagttatcctcccaatatggctaactatatgggacagatggctgtggccatgaacaaactctccactcttgaaggtttcgtgagacaggctgataatctgcggcaccaaaccattcaccgtcttcaccagattctaacaacgcgtcaagcagcaaggtgttttttggccatagctgagtactttcatcgtcttcgagccctcagttcattgtggttggcacgccctcgccaagaataggctcattactcccaagctagctatatatctagcaatatatgcccttaacttctcttaaatttataaattaaatgttatatctctcttcatcactcctctctccccctgcatatcatatcatatcatgggctgtatagatagagtgatagacagataattaatatagaatttaatgttaacaactattttttt

SEQ ID NO: 53642 - DNA, 375 bp, Glycine max
  Clone ID: PAT_MRT3847_19451C.1
tgttttttttttttttttttttttattattattattttgttttgttttgtttacttttttattctttcagatgcaccggtgcatttaaatcaaaagcagtttaagaactcaaagggctataggctgacatcagacacacaactctattgcaaataacagtgcttggaacaaaggttcccaacccattgcattcgacccaaacttgaacccccctcaattttgaaaagggcctatgatggcaagattacctattatcatcccctcccagaagagggcggacgccctcagggccttcatgctgtgcatgtcccacgctatgtcaaggcaccaggatctttcgcacagatcctggcccatcgtataatgctgctatga

SEQ ID NO: 53643 - DNA, 607 bp, Glycine max
  Clone ID: PAT_MRT3847_19452C.1
ggcttctgctactctctttgtagccaaaccaccccttcaggcaaatgggaaaggctgctctgaatactctggcctcctcagctcatcatgctgccttcccttttctagaaaatcttcagaggatgaccattctgtcattgccttccacacctatgcagctggaagcagcggaggatgcaacaagggtgtgacaaaagcaacactgaaggttgccatcatcggattaggaaggatgggaaggaacttcttgaggtgctggcacggccgcaaagactactctcttgatgacattgccatcaacgacaccggcggcgtgaaacaagcctctcaccttctcaagtacgactagatcctcctaacctcctatgctgatgacaagcctgctggcagcgacatcatctctgtcgatggaaaagaagtcatagttgtctctgaccgccaccctgccaaccttccttggaaggatgaggggatagactaggtgattgaaggaacgtgggtgttggttgacagataaggagctgcgaagcacattctaacaggagctaataaggtggtgattactgctgctggttaaggagacatcctcacatatgttggtggtgtc

SEQ ID NO: 53644 - DNA, 373 bp, Glycine max
  Clone ID: PAT_MRT3847_19453C.1
gcgacgcacgcgtgcattagctctggagacgatcgagctatggagattcgcatctacagtgtgcagcttgttactaggtttatctgatgctctgatttgaactcccattctataactaatagggtaacagggttcctaacccaccatacaagagcgattgtaccaacccctacaacatgctctccacgtgcgagaacgcaagcgaggacactgacacgaattgtgaccaaacactcacaattacgaatcacaccaaacccggtcggggatcaaacgatgtacatagacgtggtccacgctcattacgtaggaggacaccaagccatttattggatctattatcatcatggtgatgaaccttctaaacgacgtt

SEQ ID NO: 53645 - DNA, 284 bp, Glycine max
  Clone ID: PAT_MRT3847_19454C.1
cccaattcgaccacacgtacgaataataatcaagaatccacaatatccttacaattcaaatacaaaatcgtacaagacaacaactaaaagagcaactaataaaacaaccatacaacatatgataagatcattgcataccaatgatatctatctcctatcacgccataatattcgaaagcactacctttaaacttcctaaatccatagactacaatccttaatccctttatctttcaacaatctatctttctcttatatatctatatataatatatttctttcaa

SEQ ID NO: 53646 - DNA, 456 bp, Glycine max
  Clone ID: PAT_MRT3847_19455C.1
aggttcttttccaatgaatcaaaacaaagtttggattttaaggattccggtgagtcttcggaacccagttcaccaaaacctttatattccgatgaatcgaaaaaaagtatgaattttaacatcacacaaatgaaacgatgcaacatcttctctggagagtggattccgtacagtaaaggaccttactacgataatgagacttgcgatttgatgatagaccagcaaaactgcatgaagtttgggagacccgacagagagttcctcaaatggaggtggaaacccgatgaatgcgagcttccactctttgatgcaacccttttcttagagcttgtcagaggaaagtccatggcctttgttggagactcggtgggaagaaatcaaatgaattctttgttgtgcctcctaagtcatgtaagtaatcactaatcaatcaattgcaccagttcttattaaaaa

SEQ ID NO: 53647 - DNA, 489 bp, Glycine max
  Clone ID: PAT_MRT3847_19456C.1
acggctgcgagaagacgacagaagggctatatataataagagttaaaaaggctcaaacgcaaaaagaaagaggcaagactagcaagtatttggtttaagtcattgtttaattacttcaagacaaaagacacatcaatcttgatctttacatgatttcaaggaaatatccattagtttttttttaaaagatctttgatgatcgaaggaaatgaccatgtttttatttgtttttctttaatttagatttgaagactattgacggacattgccatgtctatttagatgatcttataggctaagggacaaattggaagacttaggagtacattgactttgcagttgcaggtagaatgaataaaattaaaaatatgatacctaacttaaggtttattaatatatggaatttcatatttgaatatttgaaacaatggcaaatattttaatattcgtagccttatcagttgttaccatatccagtcatcatatata

SEQ ID NO: 53648 - DNA, 290 bp, Glycine max
  unsure (1)..(290): unsure at all n locations
  Clone ID: PAT_MRT3847_19457C.1
aaaggaaagaaaaggagacatnataatggctcgntcgttttnatgcnggtctctgcttnntctngnnatcgtgtcnnnnagtatgtctagttgtgctttnnattgnaaaggagganncccaccaagttggggacggtcattggnattggtcttggaanaacntattcntgtgttgggtgtttacaagaaaggncatgttgaaatcatagccaatgattcaaggtaancgtatcaacccatcgtgggttgcnttnaccgacagtgngagactaattggagnngntgccaga

SEQ ID NO: 53649 - DNA, 202 bp, Glycine max
  Clone ID: PAT_MRT3847_19458C.1
atttctgcgtcaccattttcagatggcctcagaagtttgcaacgctgcttccataaccgcgacgtcctctctctcggcttccagcgcctcgaaaggacctgcggatgcagttgctacggtagtgtccttgaacttcaccatgcctcatgtccacagtctcaacggttccggcaatggctccgcgtcagcatcagcagcacca

SEQ ID NO: 53650 - DNA, 427 bp, Glycine max
  Clone ID: PAT_MRT3847_19459C.1
ctcactggttttcggccgccctttgtttttggggtttttttaacatgacactttctctgctctttttatacttaacgagtctttgtttgtttgtggagaagtgtttgttcccataaatttttagcctttgcctctcctcggccaccgagggggtggtctcgaagtaaatatggacaacccgagcaagattggggctccggcccacagggcgccctctctcgggcccatctagcggtccttagagagtgagcccgaggccttctaagaaaagcataactggtcattttcctccctggggacaaaacatggatgttatacctactggctctcacaaagtggccgtgtctacaggggtggcaagtcccacgtatgggtgcatgctgcaatctggcctgtgagcctaaaaacacttccaacatgctttctg

SEQ ID NO: 53651 - DNA, 229 bp, Glycine max
  Clone ID: PAT_MRT3847_1945C.1
tggacagattacttgaggccagacttaaagagaggtcttttatcagaatacgaagaaaaatggtcattgatcttcattgcttaaatttggaatagaaggtctaaaattggttctaatctccttggaagaattgtaattgggtaaaaattatttggaaataacaattaaagaaaaagttaaagaaaatggggatttgatccttggaaaaattaaacaatttccttaatgc

SEQ ID NO: 53652 - DNA, 188 bp, Glycine max
  Clone ID: PAT_MRT3847_19460C.1
gaccacctaagggtacctttactataccttgcatgcggggtttttggggggctatggatttcattggctatcatctccttcaaggatcttaaaacctcaataatcgatttctctaatccggattaatattgtgccataatctatatttacaatatcgtacttttgactgaacctatccaccaacatta

SEQ ID NO: 53653 - DNA, 673 bp, Glycine max
  Clone ID: PAT_MRT3847_19461C.1
gagaactaaaaacataattagtcatcattaatttgaacttgtttggaacacattagtttgtatttttttataatatctcaatacactaccattaatttgcatttttataattatattgtggagagaatgatggagaaatgaagcattcattgatttcttatgttgagataggacatgtcattccatgaccaaacacttgatctttttatgttggggcatgtggaacttgggttctctaggtatagggggatgcttcattgacctccttgggacaaatggtctgtcaaaataaggcattggttgagcttttggaatgagttccttcctcaacctcctgatttcttcttcttcttctaacttttgttgtctttccttttccaacttgagttgttctatgaagttcattttttctgccacctgttggtcaaattcagcacgatcaattgcccgaatatcactatgaagctttaggtcaataggccttgtgctttctttaactgtaggttttaacaagcactcaggttcatctgttgtccatggaagcccctgagcaattggtatcctcatcttctcttcttcagtcatcatctcttgtactttcttcacaaattcttcctctttcaactttcccctttgctctgttcttaacttaaatggtttttgccctcgagcc

SEQ ID NO: 53654 - DNA, 1677 bp, Glycine max
  Clone ID: PAT_MRT3847_19462C.1
ccacgcaaacagtttggaaccccccaaaaatgggtgcaacgacggccattgccgcactctctcttcactgcttctccaaatcccacacacacttttcaccctttcgcactctccctcgcctcacatgctccttctcttcctccatcaaattcaacatctccttcgctccccctaagcccaagcccaagcccgaacccgacgcctcaaacgagcccgacgggccgctcctcatcccgtggatcgtccggggcgaggacggcaacctcaggctccaatcagaacctcccccgagcctcctcaatgccatcgccaccgcccaaaccggaaccaaaaaggacaataagcaaaccaaaaccaccgccgccaccgccaccaacaccactaaacctcaaaaggctcgctccacagcgccgccgcagcattcgaaggcggcgcggcggttctataaccaaaacatcaaggaatcctccgccgcgcgcctcagcaaggttctcgccgcctccggagttgcgtccaggagaagctgcgaagagcttatcttcgaagggaaggttacggtgaatggtaccgtgtgtaatacgcctcagactaaagttgatcctgcgaaggatgttatctatgtgaacgggaacaggcttccgaagaggcagcctcagaaggtttatctggcattgaacaaacccaaagggtatatatgttcatctggggagaacgagtctaaatctgtgataagtttatttgatgattacttgaacagttggggtaaaaagcatccgggagtacccacaccacggttatttactgtagggcgccttgacgttgctaccactgggttaattattgtgactaatgatggagattttgctcaaaagctttcgcatccttcatcaaatttatcaaaagaatacattgcaacaattgatggtttagttcacaagaggcacttaatagccataagcgagggaactactgttgagggtgtcctttgtgtgcctgatgttgtggagttacttccacgtcagccagagatgcaaagaactcgaattcgcattgtggttcatgaaggtaggaaacatgaagttcgtgaactcgtcaaaagagctggacttgagattcattcattaaagcgagtacgcattggtgggtttagacttccaccagaccttgggttaggaaagtatattgagttaaataaaacgaatctcaacgcattggggtggaagagctaataaagttgcttcttaaattactggagctagaaacattcctcattcttattcatattagaacagctctgaagctattttcaaagtgttgttcagcacttgtttgatttgagctattgaattctgataccctggcagtgcacactactttccggagtgtttaacgtgaagccaatatcatgctcttgcaatcagcatatatgtatagtctagaagaactgggagaagattttaaactactgcttagaagagatatgactttttccgatggacgtgaaccaacccggcggattgctggtatctttattgaaattgttgtaaacggtgattacgtgcctgtatgtaaaatgatacaagtttaacctagagcgcctgttcaaattaagggactactcggactctaatttggaaaaaaataatagaaagaatggagatcgaaatttccggaaaa

SEQ ID NO: 53655 - DNA, 506 bp, Glycine max
  Clone ID: PAT_MRT3847_19463C.1
gtttcttaccgtctgtttgcaattccacgcttttcatttcccccaaattccgttccctcaggtaatcaatcacaatctcctcattttactccaatttgatgttattgcttttatctcatgaaaattggatgcacatgtttctttctctgcttcaattatttttcctattttgcattttattcgatttatacaagcaagataattgtgaattaatccaggaccatgcaattcatttcaattggaatagaatattatagtatacaatacacaaagaggggttgttgttgatttgttggttaaggccttaaaggggatagagataccactactagttctgtctgtagctttagtttccttgcaaattgcaactgtgacctgtttcttaatggatggcattgatgatgatgcaaggtatccccataacccatatggttattgttatcagaattctccatattcccccccagttgatactgaatatgcccatgatgataatgatgaaaatg

SEQ ID NO: 53656 - DNA, 706 bp, Glycine max
  unsure (1)..(706): unsure at all n locations
  Clone ID: PAT_MRT3847_19464C.1
atcttctaaaataaaacggtgcagtatttaataaagtaatcaaattattagtcaatttaacacttgaataaatagttagatattagtactgcaagtaaattatgatcttctatcaacaaataaaaattaatcgtcgtagaacttacgtgcctagctatctataaacacattctttccaattcattctcgtagaaacaaaaggctctgtgagtgggatggctgacaagaaatttttaagaaaaagaaatcagaaatatgatgaacgacattcaaaaatgaaattggggcaccaagcttcggaaacgcaccagtattaacataatttgttgttcgatcaatttatagacttggccatctgaataataaaaaaagaaagagattgcaaaaactcaataacaataggaaaatagaataaataacaaaaaaaaaaaaggaacaaatatgggtatatgtataaataatggatctgatgtggtgaaggtctaaaatttaagtttaaactggtcaataacttggtagctttaccaaatattgcaccattttactttaaaggatatctcaaatttttggattttttagtgggcctanattatgaantatttaaaataccatttaaaaatattataaatccttttataagtgtcaactgaaattttttaaacgattttataananatatatatatatatatatatatatatatata

SEQ ID NO: 53657 - DNA, 285 bp, Glycine max
  Clone ID: PAT_MRT3847_19465C.1
gggaaaggatagaaaagaacatattttggttctcgtgtgaacccctcagacaaaaaaaggtcctggaaagggggggcgggacactacaacatgggaactgcttcaagagttgaaggaaagtaaagaacacccttttacaccccttgtatgaacggatctttggtggaagaatcccaccttttacaaaaaaaaagaatggcgcataaaaagcaggcaatataccggggcaggccaaaaagatggaccgaaaacgagattccatttttggtccaagtctgcgggggg

SEQ ID NO: 53658 - DNA, 451 bp, Glycine max
  Clone ID: PAT_MRT3847_19466C.1
cccacgcgtccgcaagaagttgggtcaaatattgatgaagcttcaatattaaaagtgtagatggtaatatccctcttagttatattccctcctaggattgccttatctagaagcactccaaagatggtttactgttaaagcgggatatcatcaagctgtcgatgctaattgtagattcttagcttactctagccacacccctggagatttatggaagacactcaggaagatcaaaactttacagaagtgccagaaccttgcttggacagcctgtaaaaatatcctcacagtaatggtaaatctgaaatctagaggaacgaatgtggatgaaaatgatcgtgcttgacttccaatttcgagtttatgggggagaatttgtgaattagtctagaaatccgatcaaattcaatcttcaatctggaggaatgaaacttggcctctgagatgagct

SEQ ID NO: 53659 - DNA, 829 bp, Glycine max
  unsure (1)..(829): unsure at all n locations
  Clone ID: PAT_MRT3847_19467C.1
ccacgcgtccgaaaaaccgaggggtccgtgtgaggtggagtgaacccaaaacccaaacgaaacgagactttgtgttgacataaaaccgaatctctctcaagtctgaacattaacaatagaaggaaaagtgcaaggaaattacacagaacagttgcagttgaagttaagaatggaggatagtgttagtagcagcaacatgaatgccaccaatgtggcgcaagctatacataccgcccttgattgggcctctactcccaacgcgagacaaaacgccgtcgcttttctcgattccataaaaaacggcgatgtacgggtattagcaaacacatcattccttctggtgaaaaagagctggtcatctgaaatccggttacatgcctttaaaatgctgcagcatttggtgcgcttacgttgggaggaattaagacctgcagagcacaagaactttgcaaatctttctgttgatttgatgtctgagattgctgatccttgtgaaaattgggctctcaaaagccagacagctgcccttgttgctgaggtagttagaagagagggtcttaatttatggcaagaaatgcttccatctttggtttctctatccagcaagggtccaatagaagcggagttggttgcaatgatgctgcggtggcttcctgaagatattacagttcacaatgaagacttagaaggtgaccggcgaaggctacttttgcgtgggctaactcaatcattgncnntgaatntgcccctatatacactntactagaaggcacttacagctgcaatgatgaagctggtagaaacagatggtattgccaaacgcatgctg

SEQ ID NO: 53660 - DNA, 292 bp, Glycine max
  Clone ID: PAT_MRT3847_19468C.1
aacggggacgcgtgtgtctatgtctatcaaattctataacatccagagctcgggcaaaaagaagggcacgatgtcagagcgcgctccgactacactcgaacaggtcgtgtacatggcgaagctggctgagcatgccaagcgccacgaggagaaggtggagcatatggcgaatgactgcaactacagcgagagcgaggaactgacccgggaacaccacaaccgtgaatgggcctactacaagaacgtagtcctctctcaacgagcctacgagttcatcatgctctgaattgac

SEQ ID NO: 53661 - DNA, 316 bp, Glycine max
  Clone ID: PAT_MRT3847_19469C.1
tcctacttccggcgtgtggtacaccatcgaccctttcatcaatgactgagcctccggcatgctcgccatctgcataatccaacccgtcgatttgatcaacgtgatgattcaaatctatcgaagatcaattgctcgtgtcacggccaccatgcttgacaatgacggctatgctgcctacaataatggtctttgtaaatgaccactcaagaatgctacatacaccactgcccgtatggtgtcatttataatctctacctacaaaactattgacgctaatgatctcaacccactgcctctgtatcagacacctctatgt

SEQ ID NO: 53662 - DNA, 308 bp, Glycine max
  Clone ID: PAT_MRT3847_1946C.1
cccacgcgtccggagcatcaaagtatgaattaatgtgattagtaactgtacaaatatacagggtaaatttagagtattaatcgaattgctatgagcagcaaatttagggataaaatgtcacactaaattgctatgagcagtaaagaaaatttttttaattgcagaaaaccaacttgccttctttcccatactgccagaaaattgagggaccgcacgacacttaatttcttgtggatgatttcgataggtggtggactgatgaggaatctgcgaatgttctcttagaatccataagtcaagcatgacac

SEQ ID NO: 53663 - DNA, 1025 bp, Glycine max
  Clone ID: PAT_MRT3847_19470C.1
tctttttccttttattacaattgtcaatactgagtttgactgaaatcttctaacactgactaagtttctgatatattttcctttcttgattattttaacatagtcacattgctgtattcactatccaaaagtcttaacaaattccctgacataaaggacaatttgtccaagaacatatctgttctctaactatttcttggatccagtttgttgttggagctccaggtgctatgtgcctttgtgtaaggtttttcttcagttgtcaaaatctgtttatctaaaagaaactcacttatagcctgaaatttctactagaaacctggaggattaatatgtcactatgtcagacatgccatgttcagtacaactttttattggtaatttgcaaaacatactgagtaggattaagctatgtgaatacctgttccttctctgttccaaagggtgcaattcttaaataaagcaaagcataataggccaatgtttaatgcttggacaactaaattggaggatgcttacgtgaatgttacatagaagtaacataaatatggaactgtggatattataaatgtttgtccttaaaaggcaacgggatagacagcctgctgcctattatttaaggaatgaagtattaagttgaccaggtcttggggttagcttgaccaccgtatcaggtgtaagccaggctggtgatttggaattttcttatttttgttcaagttgaattatctatctattcccatattctgtcatttttttttgttaattatgaaggtactatgaattgggcccggatgatccaccttatgctgcaaagttctatgactgttgtggggctgaagaccctgaagcttctggctgcacaaccaattttcatgtctcttatgatgaagactgatgtaatatctcatcttactattagtattggacaatttaccatcatagttgtctcatttttacccttgtatatgtttccagattcttcatctgcaccttgttttgttatgcacaaactgagtttgatg

SEQ ID NO: 53664 - DNA, 589 bp, Glycine max
  Clone ID: PAT_MRT3847_19471C.1
ggggggttttttttttttttttttttttttttttttttttttttttttttttttttttttttttttttttttttttaaagggaaaaacccaaggccgaaattgattaaaaaccaaaaaattccctgtttccctggtgaacaaaaccttggatgggccggtaaaagggccaaaaaaaaaaaaattaaaaggccccccttttgtcccgcataaaaaacccaagggggggggggattggcccccccaaaaaagattggtcccgggcccccaacaaaaaggggggggccatttttcacaaattcccccaacccctttttaccggaatttttaaaaaaaacccaaattttgagttccccccccccctgaaaaccctgtttcttttccccccaacagaaaaaaaacccttatcccggggccgttcaaaaaccggaaagggccccccggtttttaaaccccccaaaaaaactttcccctctttgggggccgaaaggaaaagaaccccaaactggtcctcccctttgcccccccaaatcccagacgtttgaaaaaaaaactgaaaaaccggcccaaaggccctggtttacagggacc

SEQ ID NO: 53665 - DNA, 188 bp, Glycine max
  Clone ID: PAT_MRT3847_19472C.1
cctttattgaactttatgggagctacttctgactgttctatgctacattctgcaaagcagtgtctggaatttgggtcccttggtgcttctgcctgtcttttattattatgcatgcgaggagtctttcgaggatttaaagacaactgaactccttgatattccactgtggcaggagatggaacccacat

SEQ ID NO: 53666 - DNA, 294 bp, Glycine max
  unsure (1)..(294): unsure at all n locations
  Clone ID: PAT_MRT3847_19473C.1
ggctacaacttctacaattggaaaaggagtaactgaaaagcaggtnattggaatcatgtacttcgccacgcgctaaaaaaaaacaccaaaccaacattgatctttctattcccccattttaactcaaccatgtttacgagtaatattatcactatcattctttttacgatatttataatcaacacctttattatcattttatccattatttcaaccatattttaattcttcttcattattaattcccttcattctttctttttatttactttctctatatttttccctttttta

SEQ ID NO: 53667 - DNA, 587 bp, Glycine max
  Clone ID: PAT_MRT3847_19474C.1
ggtccggaattcccgcgtcgacccacgcgtccgctcaccacgtcatcgggtaagatttctctgtagcccgtgaacctactgggatttaccaatgggtgctgccagttgacaatatggtaaagatggtggctgcaatgatgttgatgttggtggtagattagcaaagggacaattccttgtataagtggatatctctagttgatgttttcattactattttacattaccatggatcagtgagaatcaactgatggactaaaggttcagggatatttttgttagatgttccagggtagtctggagatgaaatagtttttgagaatccaggtcttgatgttatccggtggtggattaatgtgatataactgctgagccattggagtcatatttctgatctatgatatcataatcataatcataataataatattgttaaagatagctaaagatacttggagttcacatttggtaataatggaagtagctgtttgccctcgagtgcaaaagccgaatttggagacaacaggtcggaagattttatgtactggatcttacaaggatctgtggggtgttttgtgagaaggatg

SEQ ID NO: 53668 - DNA, 473 bp, Glycine max
  Clone ID: PAT_MRT3847_19475C.1
acccgtacggaattccgagtcgacctacgcgtacgcgcacgtgcgggtacgcgaggacgacacattggggataagaaaggcacaattatacacattgcctgtgcatattgacacaccaaactgatccacacttaataatctcatagtaaggaatagcgcaccagaagtcactaacctatttactcatacagctcaataaccgtattggagcagggtgaaagtcaaatcatatgcaaccaatgccgatgaacatacatctagacatagatggattgacgcggattatattgactgagccatagggttcatcaactgaggtgcttctttatggaaggccgattattacttggtacaatcatccaatggaagaacacctttttatgagcacttatgcttacaagaaacagcatagatcaatcacaggaagaatatcaccttgcctagcacggttaggcgatctcaaatcacttgaa

SEQ ID NO: 53669 - DNA, 719 bp, Glycine max
  unsure (1)..(719): unsure at all n locations
  Clone ID: PAT_MRT3847_19476C.1
agatcatcttcactttaagcgnagtatcgcttccccaaaatcatcctgagaatgacgttcagattcacgtctccaaaccactgcttcatctccaccaacaaatcatctgacacgcctcttttgtccacccatgttctgtataattctttcaacgagatctgcatctcggagtctctgatacgttgaagaagttcaaagcgggcagtggaaagcaactctgaagcagctatcttgcgcatcacacgccagaagtctccgtaaggggtgaacccaaaattagcatagttgtatcccaagatttttgcagcggtgaattttggacgaacggaggcgagaagacgacagaaggggaaacactcttttgctaactcccaagagctcaccacaacagcatgatgcacaccaattctcatgctgaatattgggccatacttgtctgccaaggatcctaaggttatgtaaggtggctgagtggaaccacctaagaggtgaagatgaccgatcaaaggccagccaccgcctgctgccggtggcttgcgggcagaacctgctgtagcccttttgatgaagtaagaaactaagattatgccaataattgcggcaactgatgcctccaggtactgaatcgtgagacccatgacagtttgagaaattctatttagaaaaaatggtagatatgcagcccggtattgacttgcaggtccaggananaaaannna

SEQ ID NO: 53670 - DNA, 2209 bp, Glycine max
  Clone ID: PAT_MRT3847_19477C.1
ttcaatcaatttttgtccttcgtgaaagattttttgctttgggtcaagtggttcaaagagaatataaaattttgaatctgctggactttactagcaaaagaaagcgcatgtcagtcattgtgcgtgatgaggagggaaacatcattcttttctgcaaaggagctgacagtatcatatttgatcgactgtctaagaatggaaaaatgtgtttggaggctactactagacatttgaatgaatatggagaagctggtttgagaacgctagccctggcttacagaaagcttgatgaccaagagtactctgattggaacaacgagtttcagaaggccaagacagctgttgggtctgagagagaggcaatgcttgagcaggtttcagatattatggaaagagagttgattcttgttggggctactgcagtggaagataaactacagaaaggggtgcctcaatgcattgataaacttgctcaagctggtctaaagatctgggtattgactggggataagatggaaactgcaatcaacattggatttgcttgtagtttacttagacagggcatgaagcaaatctgtatcacaatgaattcagattctgtaactaatgatgggaaagaggttatcaaaggcaacatcttgaatcaaatcaccaatgcctcacaaatgataaagctggaaaaggatccacatgctgcgtttgcattaattattgacggaaaaactctaacatatgctttagaagatgatgtcaagcaccaatttttgggattggctgttggttgcgcatctgtcatttgctgtcgtgtgtctccaaagcaaaaagcattggtaacaaggttagtgaaagaaggaactgggaaaaccactttagccataggtgatggtgcaaatgatgttggaatgattcaagaagctgacattggtgttggaatcagtggggttgaaggtatgcaggcagtaatggctagtgactttgctattgcccagttccggtttttggagcggcttctggtagtccatggacactggtgctacaagagaattgcacaaatgatatgttatttcttctacaaaaatatagcatttggcctcacaatattatattttgaggcctttgcgggcttctctggacaatcggtttatgatgactggtacatgatattgttcaatgtttttcttacatcattgcctgtcatttctcttggagtttttgaacaagatgttccatcagaagtttgcttacagtttcctgcattgtatcagcaaggacccaaaaatttgttctttgactggtatagaatcttgggatggatggggaatggtctttattcctcccttgtcatcttcttccttgtgataataatcttctatgaccaagcattccgtgcaaatggccagaccacagacatggctgctgttgggaccacgatgttcacttgcatcatctgggctgtcaattgccagattgctctgacaatgagccatttcacatggattcaacacctctttgtgtggggcagcataaccacttggtacgtttttctcttgttatatggaatgcttccaccacaatattccaagtctgcctaccaactattggttgaggttcttgctcctgctcctatttattgggcagcaaccctattagtaacaatcgcatgcgttcttccttatcttgcccacatatccttccaaagatgttttaatcccatggatcatcacattatccaagaaatcaagtactacaagaaagacattgaagatcaacacatgtggaccagggagcggtctaaagcacggcacgaaacgaagattggattcacggcaagagtggaagcaaagattaggcagtttaaaggcaagctgcagaagaagcagcagtcttcactgggggctttctccccatcatgaccattacaaaataatttattagttttcagtccttttagggtttgcatttttttatttattttttggggctctagcctcatttaaattcttttcatgcttatgttgcttgcgtatgggggtgaatgaaagtcccatttagttaagagaaaaagcatgggagccgttgtagtatgtaacatatttaagtagaagagctcaccaaactagtaaattctgaatgatcaaagtgtaattctcacttagcagatggttaaattcaagtgatggtgaagaaatgaaagcagccaagtagtgtt

SEQ ID NO: 53671 - DNA, 810 bp, Glycine max
  Clone ID: PAT_MRT3847_19478C.1
ggccagatcgcagacatggctgctgttggtaccatgatgttcacctgtataatctgggctgtcaattgccagattgcactgacaatgagccatttcacatggattcaacacctcgttgtgtggggcagcataaccacttggtacatctttctgttgttgtatggcatgcttccaccacaatattccaagtctgcctaccaactattgattgaggttcttgctcctgctcctatttattggacagcaaccctattagtaacaatcgcatgcgttcttccttatcttgcccacatatccttccaaagatgttttaatcccatggatcatcacattatccaagaaatcaagtactacaagaaggacattgaagatcaacacatgtggaccagggagcggtttaaagcaaggcaggtaactaagattggattcacggcaagagtggaagcaaagattaggcattttaaaggcaagctgcagaagaagcaacagtcttcactgggggctttgtccccatcatgaacattacaaaataattttagttttcaatccttttagggtttgcatttttttaatttttttttggctctagcctcatttaaattcttttcatgcttatgttgtttgcttatgggggtgaattaaaatcccctttcattaagagaaaaagcatgggagccgttgtatgtaacatatttaagtagaagagctccccaaaatagtaaattttgaatgatcaaagtgtaattctcccttagcagattgttacaattcaaagtgatgttgaagagatgaaagcagccaagtagtgtt

SEQ ID NO: 53672 - DNA, 380 bp, Glycine max
  Clone ID: PAT_MRT3847_19479C.1
ttttttttttttttttttttttttttgttgggttttttttttttttttttttaaaaacacagtaagttgggggggtttaaagcaaataaaagtgtttaaccgtttaacaacttttttattttacaaaatgttttggcaagccttttaaatcccaaaaagggggttcacatttttttggtcatggaagttatcactcatttaaaatccaaatcaatagctcttaacccgtccattaactgaaaaggggaaccttttgtccaattttttttgcgacatgcgagagggcccaattttacaggagattttttttttaaaattttttttgggggggcggaagtttataaacctggggggtgcccttgttttaatttcatttgccc

SEQ ID NO: 53673 - DNA, 286 bp, Glycine max
  Clone ID: PAT_MRT3847_1947C.1
gctctctctttttttttttttttctttttttcaacatttatttttcaaaggaaaaccatacgtggggggggtgttgaaactgcgggtaacattaaaatcccttcaccactaacaattacatctttagccatagcagaacaagaaacactctataaatctgcctgtcataccagactataacacaattcatctccatttctgtccactctagaaatcgattccaaatcacaatgacccatcgtttaataactaattattttttctttctgcaggccccaaaaaacaa

SEQ ID NO: 53674 - DNA, 423 bp, Glycine max
  Clone ID: PAT_MRT3847_19480C.1
cccacgcgtccgctttttcctagttttgagttgaaataatgaaaactttgcgaatttgtccttacattgatacttttgttgctttcttggttgtggttacttgcctacttttaagttttatcacctcattcttaactttaagggattgtttagtgcttaggataagatgaagatggataaaataacaaattaggagaataataggaagggataagcacctactaagaaagcaagataagacttgagagtaggataagatactaacatgataagtgttgcactgcttcatcttttctccttttcttattgagcttgatagcttatgtaacctagtttaacatagtatttctatattaacattcatctccaaactccataactgacacaagctgttgattcagttcattgaagtgaatgctatat

SEQ ID NO: 53675 - DNA, 361 bp, Glycine max
  Clone ID: PAT_MRT3847_19481C.1
ggctcgaggaagaaagccacttattagatgaagaatgagttggagaagaacggtggttctgtatcggttggtgaggttggacagcgagttaaggttttatagattaactcaggggatgaaatgaggaggaagaagaagaagaacggtggcacgcttgctgcagatgaggttgttgaacacagcgtgaggattttatctattaactcagagaacgctaaacagaacaactggagattagggcaaatgaacaacggcttcggaacagctgcacatgggaaaaaagaggctgacaaaaccacaatcgagaacgagttgtatgagaaaaataacggtggattcgcaacggtgggggaagcggaac

SEQ ID NO: 53676 - DNA, 676 bp, Glycine max
  Clone ID: PAT_MRT3847_19482C.1
ccacgccgtccgattacatttcatcaaacttagccctagccagaattagccctgttgtgtcatcgatctcacaagagagcaatatcatgtggtctctagtaacggatctcattagagctcttgcagcaagagttatacaccaactcatccataaagatttccatgaagcagtggctaggatgacaataatagacgcttttctcttcatcgtgcaatcccttcttcatcttaattatcatttaaaataaaatgtttttaatctctatattttcgttaaatcttatgtttatattatcatttattacatgattaatttctaatgtgtttgtgcatgtgtattcatgtcctagctagtagaagtaattgatctaatgaatttatatacgatcatgattgcatgggtattattctaattcttccttccgttttttttcctttgcatgtggcatacgcagattgtacactccatagacaagttggggttatggcatcgtttgcctgttttctttggactattatacttgggcattcgtcgtcaccttcaacaacaatacaacctcttcaacgttggaacaacaccagtaggaattaggttcaacccttctgattttcatacagaacagatgatggaaaatataatgaccctttaacgaagttgctggcagccaagggtctt

SEQ ID NO: 53677 - DNA, 376 bp, Glycine max
  unsure (1)..(376): unsure at all n locations
  Clone ID: PAT_MRT3847_19483C.1
gaataatttaaccttttgataattgatctttaactgaataactttaattttatttaacccctcttgataactgaatggtattagtaaatttgtcaacgtaattggatttgttgatgattggatttttggttgtttaggaaaatgatcacctgactatcggctgcatctgtctttagttttttggatagaggatagaatgattaggaggttaatctggtatgcaccatatagacgagtttgaaggtttggccttgggagtcattttagaacaacctgcttggaagtcaaaattaagtttatcaagtgtgagattcanaatcattgaatcacgcaaaacccttaaaccatagatttgtacttgaattggaaaaattcc

SEQ ID NO: 53678 - DNA, 267 bp, Glycine max
  Clone ID: PAT_MRT3847_19484C.1
tcgtttatatatgaattaaaggtcttaaatgaatataacaactacctttggcaatgaagctcaatgaagaaacactccactgggccaatgttgtggatgatgcaccaccgaacaactgacattgaaaatcacttcaacttcgtgcaaggaattaaaagatggatgaggctgaggacatacaacctattgctgttgatagaggaactgcaatggtcatggctggtattacacgcgataatgctactaggggcagggaaaccatcacta

SEQ ID NO: 53679 - DNA, 261 bp, Glycine max
  unsure (1)..(261): unsure at all n locations
  Clone ID: PAT_MRT3847_19485C.1
agaaacaaaccaagacaacangaaacacaaaaagaccgngccagaaaaaggacncaacggnagaanaagcncacaacnngnagaagnnngaagaaagggngagaacccgcganngcaaaggcagcaacagccaaccacncanngangcngaggagcggacaaagnggaccggnnacagggcncggaaggcngagnncagggccacnnggcgccnccccaacacgaccgggcncacagngagagggnacaagcaccagacgg

SEQ ID NO: 53680 - DNA, 268 bp, Glycine max
  Clone ID: PAT_MRT3847_19486C.1
ttatcttttcatattcaacttttccattttcccacaacattaagtatttatagcatagattcaatataaaatcaaacatcccccatcctcacaatatcacacttattcttcaatttctactcctcctatattactacaaaaactaccaaccattccaacaatacattaataattactacatcaaaaacatctattcttacaattatatttattacaatataaaaacccacacaaattttcttttcttaaaccatcatcttttatcaaa

SEQ ID NO: 53681 - DNA, 333 bp, Glycine max
  Clone ID: PAT_MRT3847_19487C.1
tgttttttttttttgatgaaccaattaacgcgtgcgtgtaggaagggtaagtgtttagagggatgtgctcctactcgcaagtgaatggccaacccacgagagaagacaccagaccatcttctcaacactatatgtggccaaagaggcctcaaagggtatagcgcgacagactgtgattgacatggagttttgtttgacaaccaacactacacaaaaacaccggacgaggcatctgtagaagccgataaagcaggactagactaggattgtggaccagtatagagaatgcacactgatacagccatttaggaaagggcttatatcccaaaatga

SEQ ID NO: 53682 - DNA, 732 bp, Glycine max
  unsure (1)..(732): unsure at all n locations
  Clone ID: PAT_MRT3847_19488C.1
ccacgcgtccgggactaggaaagttttcaaagccaagcaaatacgagctttacccaattttcttgctgttgaattttcactgttcaatcttcaaaatcacatttttctcgatcttcaccttctgggttgctttttttttttcttcttcttcttcttcttcttttgttttcgctatggaatcgaaaaaccctgcgaggtttacgctggggaagcagtcgtcgcttgccccagaacgccataacaaagaagcagagctccaaaaagatggggaagctgttgatcagggtgtgaggttgatgtattcggcattcgaaggcgatgtggatggaattcgcgaggcgttggagtctggtgtgagtgtgaattacaaggatattgataatcgcactgctcttcatgttgcggcgtgtgagggcttcactgatgttgttgatttattgctccaaaaaggtgctgaagttgaccccaaagatcgatgggggagcacgccacttgcagatgctattttttataaaaagaaatgacgtgatcaaactattggagaagcatggagcaaagcctttgatggcccctatgcatgttaatcatgcgcgtgaagtcccagagtatgaaatcaatcctaaagagcttgattttaccaacagtgtggagataacgaaggggactttctgtagtgcattggggggcgtggaacaaagggtgcagtaaaaaagctggggnaggatgtaatta

SEQ ID NO: 53683 - DNA, 1802 bp, Glycine max
  unsure (1)..(1802): unsure at all n locations
  Clone ID: PAT_MRT3847_19489C.1
aaaaacactaacttcccccaaaggtcaaaaaccttccctcaaagggaggctgaataagtttgagaagattcaaagcagactaatccaagcttcaaaagactcggacattgatgaagtgagggagcttctcaaagagttttagttaagccgtgacgagagcaagcccgcaactgaattctaccttcacttggacagttagtcactctccgattccctcactcgcagtagtcaatacggatgccggcgccgccggcaaacgccggcctgggcgtcgccgccatgtcctacatcgccgtcgactacctccgccacctttctccggtgtggcactcgcgtctgcaaccggcactgtggtccctcctcgccctcgctgccgtggtccgcgtcccctcctaccggcactggtccgcggagttccggtcggcgattccgttcatcgcctccatgttctttatgctcgccgccctcctctacgaaatgatctccgtccgctccgtcaccgctgtgctcggcctcgactggcacctgaatacacctcctcttccagatacggggcaatggttgctcttggcgttaaatgagaaacttccttctccaattgttgagatattaagagctcgaatcattggactgcaccattacttgatgctgtttatgatgctggctttctctgtgctatttgattctgtgaaagctccaggcctcggattaggtgctaggtacatgtttaccatggcagttggtcgccttcttcgtgccataacttttgcatctacaattctgccatcagctcgcccttggtgtgctggttctcggttcagagttccgggatatcctcatcgttgggctcagaaatattatgttccctatgctacagatcatgatgctatcagccgggtgataaaggtcgatacagcttatgttgacattggaaaaccagttggtgactaccagccaaattggggttcgatgagctttctaattgattttatgcgacccactgtctccgaaggaccttcatggtacagtctgttaaagaaagctggaggtggctgcaatgacctcctatacagtggccacatgcttgtagccgtactcacagccatggcttggacggaagcatatggaggattcagttctgctcttgtatggcttcttgtgatgcacagtgcccaaagagaaatacgagaacgccatcattacactgtagactgcattgtggccatctatgtggggattctcttatggaagatgacaggttttatctggtcacgtgaagctacatctagtaataggaggctgaataagtttgagaagattcaaagcagactaatccaagcttcaaaagactcggacattgatgaagtgagggagcttctcaaagagtttgagttaagcagtgaagagagcaagaatcagattggaattaaatatgcacggttgtttcgaagtgccaccattgtctttgccctcaccattgttgttctggctttcacattgacaagtgatggatgatcttctggtgatccgaattttttagattgtcacgcatggttttaaacttgcaagttattttgaacgtattctggtgttgtcagtagtagttttggagtcttgcaattatgtacatcacgtaatgagcctatctgtaatgaatttaaaaaaaatgttattttttgttcgtgtctcttacatgttattagtgtgtgtcaaacaagaaattatgaattcttaattagtttgatcagaatgttttaaaatatgatttgtagtatttttcttaccagnannaaagtcagaaa

SEQ ID NO: 53684 - DNA, 707 bp, Glycine max
  Clone ID: PAT_MRT3847_1948C.1
ctcgagccgaatcggctcgagttaaaagtttgggcagcagcaacacttgttgttttttgctttttctgcctagtatacatcctacactctccaacccccgaagcctgctacacagttgcccaatttagagcatcatcatcttcaaataccaaattatttccagcatcattatcatcatcttgatccatctctcccacgagtcattcattgcacacatcaatatcattaagagaaattggatcaatttcatctcttgcattatatctttgcttcaattggtggttgtatttgacaaacaccaaatcatgcaactttttgtgctcaagcctatttctttttttggaatgaatctacaacataacaaataaatgttgatttcaatcccaaatatactccaaatataacttgatcatcaaaattaaataaaattaaaaagtatagttagagttttgtcacaattacttgctcaaacacactccaatttctttcacatcctgaagcactgcaagtcaaactcaaaatcttaatagccagcttctgcaaatttggagtttgtgacccaaacattcgccaccaatatgctgcaataccaattaccaaccaagagcataacttagaattctgaattctaacactaatacataaaaaaaatagtatgataaaagtttcttactaagagaatgggttttcctttgagccattgcaaa

SEQ ID NO: 53685 - DNA, 1295 bp, Glycine max
  Clone ID: PAT_MRT3847_19490C.1
tacggctgcgagcagacgacagaaggggggacacagtttacataatgatctacgtgtgctgaagcttgatcatgttagagtgattgacacttcttatatcttccaatccttggatggatctattcacaagagaccttctttgaatagcttatgtcaggctgtgttgcaccatgaagttagggaaaagggtgctccacataattgtctagatgatgccaaagcagctatggaccttgttcttgcgaagatcaaacatggagttgataaggaatttccaattgcattagttcaagagcatgttccagaaagtgagctggcaaagcttcttcttcacaagataccaaacactgtaaacattgaaacgttgcataaaattcttcctggcaatttcaaaattgaactgaagccttccaggaaaggtcaaggagcaaattattccgcctttgcaatttttagaagtccaccagaggcagatggggcctatgaaaatgtccaaggaagccaattaaaggatacatatggacatccccagaagcttgtaacattccgtctaagtacaggcttatctgtcaatctctttgttcggaaaatggtaactgaagaacccaatgaccagactccatctaagagggctttacaaattaatgaggcagttgatgtttcaaagaaagcaaagatggatccaaaaattgaagaggatgcctctgcaggctttggcaagggtgacactgatgcccattcgaaagaaattgaagcactcaatcaacaattgaagcaaagtgaaatggtgattgaatcattgaggaaacagttgacacaaaaagattttgaaatatccatgctgcataaaatgatatcctctaaaaagaaaaagaaacaaacagtgtagccgtggcatggaatggtggatggtcaaatgaattcgaaggcaaatatagttgtggtaatttcttataaagttatggtaatttcttaaaaaccggttgggggaaccccggacttgtgatacatccatatatagttgtcatgttaactgccgaggttccaaaacttaaaatctgaaattccaaatctggaattaaaattttgcccccaaatttgagtaagtggactgatgaatttttttgtccacaactagcgttttagtcattacttaaattatatgttctattgacattcgctcgtgtgaaactatgtcattgtttccaactacaatcaagaatcaaaggccgaaggtcggcctctgaacagatgagctcgtctatacaggtacttgtagtggtaagagttcggca

SEQ ID NO: 53686 - DNA, 3599 bp, Glycine max
  Clone ID: PAT_MRT3847_19491C.1
gccgaacaaaaacagccaaacatcgttcacaagtggcttgcttggtcggactaggaaagttttcaaagccaagcaaaaccgagctttacccaattttcttcctgttgaattttccacggttcagtcttcaaaatcacatttttctcgatcttcaccttctggggtgctttttttttcttttgtttttcgccatggaatcgaaaaaccctgcgaggtttacgctggggaagcagtcgtcgctggccccagaacgccataacaaagaagcagagctccaaaacgatggagaagttgttgatcagggtgtgagtttgaggtgttggggatttgcggggcttgtcccaggaagttgtgaggaagtagcagagggtgaaagtgtgaatgacactgatgttcagagtgtcaggttgatgtattcggcattcgaaggcgatgtggatggaattcgcgaggcgttggagcagaatggtaccgaagatgacccgaatgatcgatgggggagcacgcctcttgttgatgctattttttacatacagaatgacgtgatcaaactattggagaagcatggagcaaagcttctgatggcccctatgcatgttaatcatgcacgtgaagtcccagagtatgaaatcaatcctaaagagcttgattttaccaacagtgtggagataacaaaggggactttctgtattgcactgtgtcgtggaacagaggatgcagtaaaaaagctaggggaggatgtaattagtgatgaggagaaagttaaggctttcagagatgggacttttcttattgagaaaaggcgtggaacaaagtttgcagtaaaaaagcttggggaggatgtaattagtgatgaggagaaagtgaaggctttcagagatgagcttgctctggtccagaagatccggcatccaaatgtcgtccaatttctgggtgctgtgacccagagtagtccattgatgattgtgacagactatcttgccacgggagatctgcatgatttcatgaacaacatagaagctttgaaaccatcaacagctgtgagattgggttatttaaaatttatgaaattttatttttttaattatatagtaaataaattaatgtatatttatggattacccattgaagtccatgtttaattgggattctgggcacctaaaagttgcagactttggggttagcaagttgctggcagttaaagaagacaagcctctaacttgccaagatacttcctgccgctatgtggctcctgaagttttcagacaagaagaatatgacactaaagtggatgtattttcatttgcactaattctgcaagagatgattgaaggctgccctcctttttctgcaaagcaagacgatgaagttcccaaggtatatgctgcaaaagagcgtccacctttccaagcaccagccaagcgttactcccatggaattcgagaattgattgaagagtgctggaatgagaatccagcaaagcggccaacatttaggcaaataataacaaagctggagtccatctacaacacaattggtcacaaaagacattggaaggttaggccattgaaatgcttccaaaatctggaggccttgttgaagagagatcattcaaatggaagtagtcgtggcggttcatctcgctccacatcaagcagaatatgaaggagaacattggtcttatcctgtaactaaaatattggtataaagataaaagatagcaaccaaatttgacttcttgagttggagctttgcaacgttttctcgtgtgtattcattcacaggttcatggttgttttcgtctttcaagattctttatactcgatgatttatttccaattacatttatgtctggtgacagaattagtatttgtatgtaacatatacacgtattctaaggaatttgctccctgtcatgtacattattatgtaacatgagtaagctaacagtaatatattgcgggatgattctgggcacctaaaagttgcagactttggggttagcaagttgctggcagttaaagaagacaagcctctaacttgccacgatacttcctgccgctatgtggctcctgaagttttcagacaagaagaatatgacactaaagtggatgtattttcatttgcactaattctgcaagagatgattgaaggctgccctcctttttctgcaaagcaagacgatgaagttcccaaggtatatgctgcaaaagagcgtccacctttccaagcaccagccaagcgttactcccatggaattcgagaattgattgaagagtgctggaatgagaatccagcaaagcggccaacatttaggcaaataataacaaagctggagtccatctacaacacaattggtcacaaaagacattggaaggttgtcatctctcttacattcccccctcccctgcatcagatatttttgcttgcatatgcttgttcaaaattgtgtagactggactgaatgcttaatctctgtttataaatatttgaaacatgtctggtttaataaaacagaaaaataataaaatgatataacctaggagagagcttgtatgaaagaatagaatgacatgcggcaattagggttataacagagaactgtatgatctttttgaattttccagctcaggaattgtattcttgagaaacaaaagtgaaaactcaccactccacgggcaacactggtatacaagtaattggggagtaagtaattatgggatgacatctcttgaatctcaatgaaatgtaaacccttgcataaattgacatttttctgacacaggcttacatatgtgccagagaaatgctttatttctttggtttctgtactggcttctttggtagaaaatgcaatgtttctttggcttagcttttaatcagtttatctttggatattatacagacatttcatacttgacaaaaattataattgaagttagagttaaaaaatcataggcttacatcggccttttaataaaagccgttaaggttggttgtattcaaatataagcagttgtcattttttttccagcattaaacaataggtggcactatatttcatttatctgaacagatttggcttattacagaacatgtggtggaattgtaacattaacaatttttgctccttgctgtttgtaacgtgcaggttaggccattgaaatgcttccaaaatctggaggccttgttgaagagagatcattcaaatggaagtagtcgtggcggttcatctcgctccacatcaagcagaatatgaaggagaacattggtcttatcctgttactaaaatattggtataaggataaaaatagcaaccaaatttgacttcttgagttggagctttgcaacattttctcgtgtgtattcattcacaggttcgtgattgttttcgtctttcaagattctttatacttgtcgatgatttgtttccaattatattatgtctggtcataaaattagtatttgtatgtaacataaacacgtattctagggaatttgctccttctcatgttcattattatgcatgtgttaattgttatatttttgttgggtatatacttatcatgcaatatgacttcgctataaatttttagccg

SEQ ID NO: 53687 - DNA, 313 bp, Glycine max
  Clone ID: PAT_MRT3847_19492C.1
gctcttagctgaggaccttagttagttagttaggggtcagttagtggtgaagtgactgattatgtaaataagtttatgatacaatttctgaatgtgaagaatcttgctacttgctaaagtgaatttgggactttttttttggtgagggaaatttggacttatagtataaggaaaagtttactaaaaaatatttcttaataattaatccgaattgcaacaaccttctgttcatattttagttatttatccatgggtctttgctgttcttaatgtgcaacaataccactaatttttttgtatttattttcagact

SEQ ID NO: 53688 - DNA, 446 bp, Glycine max
  Clone ID: PAT_MRT3847_19493C.1
atcaattatctcagtatgtttttaaaaaccaatcagtcaaaggcatgtgtttagtcataccttctcaatgatttggcaaaatatgtttgtggggacttttgtttcatgttggaagttgaagaaacacaaaaatagatatggagtttctaaaaggtttcaggttttatataggccaggaaattacttatgtttctatcactaagtatgggtcctttggtatatatggattttggcatttgtcacgctcattgatatatggttgtcccccaagtttaagttcttacatgccttatctttggcgggttattggaatgtgactgagtatcctgacatgaaagttaatcttaatgttgaaatgatttggcaggagcatgcttataagtcataaccacacgtgtacaatttgtttatttggagctgtcctaaatttgtatcatttcccaaaa

SEQ ID NO: 53689 - DNA, 258 bp, Glycine max
  Clone ID: PAT_MRT3847_19494C.1
cccacgcgtccgcccacgcgtccgtggaaagaatgtttggccacattgatggaggaaacgggtcaaaaacttcagtgactgttgacagggaatgtgtatccccattgaattctttatgtgcagaatgtatacccaatgaggaaggaaagccttgtgcttttccttaccttaaagtgatcaaaattgttgctttcaggctgtaaccgcatattttgataaccattgttgattaaaaggcaagaaattcatgctttctct

SEQ ID NO: 53690 - DNA, 305 bp, Glycine max
  Clone ID: PAT_MRT3847_19495C.1
gggaagaaacagaccttagatttttacagaaatttatttttggcccgggcaagaaactatcataatttctttttaaatacccgaaatcattaacaatacctaggggcagtaatgaccaaaccagcagggttttccatgaccaaattcctcgtcataagaactggtgggaatcccccacaagagattagtcaaggggtttccatcatcaaatccatttaagctttttattttttggattggaccttcattgggataaataccctgcagaggatagacaaacccctttcattctttttcaacacctt

SEQ ID NO: 53691 - DNA, 366 bp, Glycine max
  Clone ID: PAT_MRT3847_19496C.1
tcttttctggccgaggtcctgaggtgcactgccggtgttcacaacacgaaagtggtagtgaactaaagaagcctctaccacgctaaaggctgctgaagctaggatgcttgtcaatctgggtggagcatgtgctgccaaccgcttatatggagcacacaaatcgagggagagccatcccaccattcctgttacgggaaaccggctgatgtatgctctgacataccgaggcgtcatggctattctgatgcacccacatgctcttgccgatgggcaagtcgggcctgacatgacttacccgtgtgagctcatgggtgccgcttccatcggaaaatcagatgagagctaacgcctggtctatgacactag

SEQ ID NO: 53692 - DNA, 439 bp, Glycine max
  Clone ID: PAT_MRT3847_19497C.1
ttgcctttctttttttttttttttttttttttttttgtttttcctccgtgaatttgttaaaataagggttgattcttacagtgaccaacagagagcgtcttttatagtacaaacatattcctgtgacttgcgtgtatgattatgcaacatgtattttcggcttttccatctgtgactagactcatgaacttttccccatccacagtttctttttctatgagaagacgagcctgcttgagaaggatcttaatgtgagtcgagataatccgggtggccctagaaggtgctctttttaacagttcttttactttcgtatccactacatccgtagctgccagggagtaatcctttcgcgatgacatctgttgaccgaagattggatttccacccggtcccccaatgtgaacttgtccaatttttttgatgaatccaaattttt

SEQ ID NO: 53693 - DNA, 246 bp, Glycine max
  Clone ID: PAT_MRT3847_19498C.1
ccttcttcacggttcctcttcctctcttcttctctgttagaaaccctagcaaacactgtatttcgctctcgtttttctgcctcgttccgtgatcactgactctgccatggctggtcctgtttcctcgctcggctacgtcaatacggaaaggaaattccttaagcatatccgtgacaacgttcacggcaacattttgctggagccgatattcttgagctttatggacacggaacaatttcaaagact

SEQ ID NO: 53694 - DNA, 187 bp, Glycine max
  unsure (1)..(187): unsure at all n locations
  Clone ID: PAT_MRT3847_19499C.1
actccacttcatcatgnattacatttncattaaatgncnnattcaatgatnagaacnaacttanctgccatnctancannggtnnnacagntgtnccatatncccattacttagaantcgcnaanattcttnctngaangggtnactttgttacttgcatnaacagccccaanannattaaccncat

SEQ ID NO: 53695 - DNA, 206 bp, Glycine max
  Clone ID: PAT_MRT3847_1949C.1
caagaatgcgcgcctccgcgagttggtaaacctcgttgtggtggccggtgacaggaggtaggtgtccacacacttgctagagaaggccctgatgatgaagattacggcctgatcctgacctatccggtgatcggccaatgcagatggatgtactctcaaatgaaccgtgtgcggaacagagagctctaccgagtcatctgagacac

SEQ ID NO: 53696 - DNA, 262 bp, Glycine max
  Clone ID: PAT_MRT3847_194C.1
gcatatctttgtcaagactttgacttgcaagaccatcacccttcgggtcttatcctctgacactctttataatgtcaaggccaatactccttactaggagggtatccctccacatcagcagaggttgttttttgcttgtatacaacgttgggattggagaacccttgctgatctcaatattctaaaagagtctccctcttcctttgtctctttgttaagtggtcgccttcagatcgttcttcataactttgccgggaatacc

SEQ ID NO: 53697 - DNA, 226 bp, Glycine max
  Clone ID: PAT_MRT3847_19500C.1
cctgacccctacccaattgatctcataaatgaatgtattactttaaactgccaaacgagaaacattactattagaatgtgggtggcctatattgtattgggaaatgcactattaggatattccggggaacttttttcttcacttatgctggcatgaatgcatataatatcatatcgaattaaaagtaccctctttgttctctaccgtatcattcttttggactgga

SEQ ID NO: 53698 - DNA, 371 bp, Glycine max
  Clone ID: PAT_MRT3847_19501C.1
ggtattcattaaggaagcagtgctgactttttatggataaacgacactgaaagttgtgggggggacattgatagggggggtcgtcatattgttgcaattacatatgctcaagcacttgttacattctgctgaggactgtatagccactgcaaacactggaataatactcatcacctaaacaccaactttcactactttttattgcaaacaagattggtaaaaaacactgctacactgtcgcatacattgacagtgaataactatggacaaatgtacgcattaaagaggaacaaagttgaacactctggactcgctagataccagcctgagcactatacatagacagttaagctgctaacgatgttaaaaat

SEQ ID NO: 53699 - DNA, 784 bp, Glycine max
  unsure (1)..(784): unsure at all n locations
  Clone ID: PAT_MRT3847_19502C.1
gttaactatgaaaagaatnggatatagtcctcataatgattcaggcacttcaagctatgtggattacttcattgaaaagttttccattcacctcaaatgtccgaagcaaccacttctgcatgtgaaaccggtctcaatttgcacaacctgttacacaacagaaagcgtgaggatgcagaaccacaggagctggacgaatacttaatttatttgcctcctgagctttgtgaactaaaagtaataggtttttcgaaggatattggcagttccatatctttgctgccctcaattatgcatcgtcttggaaacttgctggtggctattgaactaaagcacatgctatcttcttcctttccagaagcagctgaaattagtgccattagagttttagaggctctcaccactgagaagtgtcaggagcgcttttcccttgaaagacttgaagtgcatgcggatgcttttcttaaatttgctgttgcacgtcatttttttctcatgcatgacagccttcatgaaggagaccttacaaaaaggcgctccaacgctgtaaataattccaatctgtttaagttggctatcaagcgcaatttgcaggtctatatatgcgatcagacatttgatcccactcagttttatgcattaggccgtccttgcccaagactttgtagcaatgaaaccaaagaaagcatacacttctgtttaaattctgttaaggaacaaggaaaagtcactgaaacccaatgtaacaaaaatcatcattggttacataggaaaacaattgctg

SEQ ID NO: 53700 - DNA, 745 bp, Glycine max
  unsure (1)..(745): unsure at all n locations
  Clone ID: PAT_MRT3847_19503C.1
gcattacctagcaaacccctcacagtttctgctgtgaactcaaatgttaatcaagaaatacncgagaataatgctatcttgcctcaagtcactgagaaacaaatttctactacccctccacccaataaccaagtgatgatgccagaatcagtccactccaggaagaaatggaacactgatgaggacaattcaaaaccagcaaaaggatttcgtaagcttctattctttggaagaaagagctgaagcaaagccccctggtggattgattttgtgcaaattggttcataataatcttcaaaagtgttttgatcagctatcagttctcttttccatgcttttggtttttcaacatttcaaagagtttacttcttccattcttttgctcaacagaaagtgtttggcacattgaattatttcttgttttgaacacacatatggaagtcatgtggaagattgtagatagtttcctgcttgacacacgaaataacaaagccatgagatggggagttgcttgttacgttagagatccatgatgtaaattatctgaatatggtgtatcctaaggaaggctttcacaggtaataaattttccatgttggaactttttatacgaggcttaacttgtttaatgtcatatgatgccaaaaaaaaaaacctgtttccttgtattcatgaaagttgtaatgtttggttgtgtatgactttcatattatttcatgctgatattctattgcaaatattcgtt

SEQ ID NO: 53701 - DNA, 1422 bp, Glycine max
  unsure (1)..(1422): unsure at all n locations
  Clone ID: PAT_MRT3847_19504C.1
cggaattcccgggtcgacccacgcgtccgcgcgaaccccatcggagccaatgcaacttgttcactccgacgaacccgcgcccgagcgccgcgactcgccggagaaacccgacgaccctaacgccgacaccgattccctcgaccccggaaccgacgatggcgccgctctcgacgtcaccggaaaaagcgtcgaatttccggcggcggagaacgccggggactccgcggagagcctttacgtgtacaagaacgtttacagcttgattccgaagtcggtgtcgcggctcgcgcggttgcgaacgctgaagttcttcggaaacgagattaacctttttgcgccggaattcgggaacttgacggcgttggagtgcttgcagatgaagatttcctcgccggggattggaggcttgcagttgcacacgctcaagggtttgaaggaactcgaactctccaaaggacctcccagaccttcggcttttccgattttgaccgagatttcgggtctcaagtgtttgaccaagctttccatttgccatttctctattcgataccttcctccggaaattggatgcttgaagaaactggagtatcttgatctctcgttcaataaaatgaagacattgccggcggagattagttatttgaaaggcttgatatcgatgaaggttgcgaataataaattagtggaactgccggcagcgatgtcttctctgtcaaggttggagagattggacctgtcgaataataggttgacttcgttagggtcccttgaacttgcctcaatgcatagacttcaagagttaaatcttcagtacaacaagctgcttgggattttccaaattccttcatggatatgttgtaatatggatggaaatgataaagctagatgcaaagatgattgcagttcttctgttgaaatggatctctatgaaagcaactttcaggaaaatgatgaaaccctttctgacggccctcataatacctcatcaagcatgttaacaagctcctcgtctagcagcagatgttttgcttcccggaagtcaggcaaacggtggaaaaggcgacatcatttacagcagaaagctcgtcaagaacgcttgaacaatagtagaaagtggaaagctgtagatcatgatgaccagttgttgagcaagaagattcacagaatttctgaaccagaaaatcatgatagtcttgcttctgaaagttgtgcagaaattgtatcagagaatgggagcctggatgataataataaaagaatatcctctgaacgagcagtaaatgacaatgcaattgataatgataacaatgatgaagtaattactgaaaagcagttttctggagaagattgctgcactaccgaaagcaaagatgaaaaagaggaatccttgtgctccttagataagaggncaagtgaacagga

SEQ ID NO: 53702 - DNA, 540 bp, Glycine max
  unsure (1)..(540): unsure at all n locations
  Clone ID: PAT_MRT3847_19505C.1
gaaagctcaggtaatcgtaccacgctgggggtccccatatttggtttgggtcatattcatcctaatagggaatgttattgagtcactaaacctggatgggaactgtcctactccctcctagctatactcaccgtaaagtaactatacatgaatgtgacctattaacttgcctaatggcgtctgatatatgctgaatcaggggcaaaggacgcgtgacacatgagaagctgcctgttagntagctacatgtgtctctgtacatgcatcaagactgctagctaatcagaatacgatcatgaactctaatgatcgcagacctgactgatcatgcacaactctcccaagtgataatggcttgtggaaagctcaaccagatataacagcccctcggtgcacctagactaggaggatgccgtgcctgatgagcagaggctcgaaactgctctaacgtgaccagaggtcccactatggaccattggccagcccaaggatgattatcttattacaaaacctacattaggacatcgttgccttgtcact

SEQ ID NO: 53703 - DNA, 386 bp, Glycine max
  Clone ID: PAT_MRT3847_19506C.1
gttttggtttttttttttatacataatacaggtcatcactagtatgttattattcaccttcgcacaagaagtatgagggaagcctgtccatcaaccaatgatgaaaatcacaaaccatggcgagtgaaagtcgaacagtggtggggctgatgacaatcatggaggaaaagtttcaacagtgcctaagaaaactgcaacagatggaacgacttttatgcaggaaataatggcaagatttaagctacagggcattaagacagtaccagaaataataaaaacaaggcataaatgtatgagaaagttgcaactctaggtcgcaaagaaaattgtgaaactgtctttggctaaccttttgtaggggtttgatgagttgagggaatctgcca

SEQ ID NO: 53704 - DNA, 459 bp, Glycine max
  Clone ID: PAT_MRT3847_19507C.1
attccaattccttgcccccttcaaattaatttattttttaccgaccccggttggaaaaagaagaacctgggattcacctatcccgggacctttttaaggcaattttttttaaaccaagaccatggctaattattggattaccagcttgaggagatggccaaaaatttttcgtggaatttgggggtcaacccattggcagcaggccaggggccaccctgggggttaacggttcaacgcggcctttcacgcgtttaggcctaattccatggtctgccttatccctcctaccacagtaaactccacccgcggtcgttgcctttcattaaccgttagtagtacccttccggaggggcgaggatagaccaccaccaggaggtccccttatgatggaaactgctgggcctctttgtccgatttctaggagcccggttttgcaataaatagcaaagtcttcacagt

SEQ ID NO: 53705 - DNA, 377 bp, Glycine max
  Clone ID: PAT_MRT3847_19508C.1
aattcggctcgaggaactggataaaacgcttgctttgcccatgtggctttatgccgctcaccatgttgcattaacagctatggactagcataccgttgcattagcggattcatctaaattaaaatcctataccggggcttcccaatcaaaataccataatgaagtcgcaatccctcattttatcattcaccaatatcatacttgattgtgttaattgattgatacaacaccaccaagatgccaactgacacatcatgagagatcggcagcaatatcatgtgagtgaccgctgcctatggtttcatatgctttaggcttgtgaaacatgtcttagagaaaggctacactgagacatgaaccatgcgaaacccatatga

SEQ ID NO: 53706 - DNA, 2691 bp, Glycine max
  Clone ID: PAT_MRT3847_19509C.1
gttggggtttttgttcagttcaaataatgtggatgccactatgttcactttgtcttcttataggagccttagtttcaagcgtagtgcgattggtggcgtttttcaccagagggatattgaggaagttgaagattattgtggcaattgggctaattgtttgcatgattgtgggttttttgagtggggtgattttcttctcttataagattggtgttgaagggaaagatgcggtgatatcattgaaattgcatgtggaggagaacaattatgctgagaggattggtgtgaagaagtggatggacgagaatgatgttgctgggatggtggatagttacactacgaagatatatgagactgtgtctgatcagatagatgggttggctctgcagtataacatgactgaatttgtgactggcattaagcattttgtgatatccaatccggttaactattcagcacctgcgaaggtgttgatgactccctcaccgtatgctgagaagttcttgagcttgaaaacccgggttaggaaccgcgagtggagccagatttatacagaggctgactcgattttgcgcgagcttgtgatcactcggcgaggatttggttgagaaggcaaaagggtttgccttcaaaggaatggatgtgtctcagcggattttcactagtagtagaactgtgcttggaagcagtacaaagtttatgttctccattgcgaattccataatctctggagccgcggaggttttcaattttgtgtctcagtcgatggtgtttatttgggttttgtattacctcatcacatcagagagtggtggagtgacagaacaagtgatgtgcatgcttccaatttcgaactccactagggacagatgtgttgaggttttggataaagctatttcaggagtccttttggccactgctgagattgcattttttcaagggtgtcttacttggcttttgtttaggttgaacaaaatacatttcttgtacatgtcaactgtgcttgcattcataagtcctctcctgccaatatttccatcttggcttgcaacaatcccagcagccttgcaactagtgctggaaggcagatacataatggccattgtgttgtctattattcacctttttctcatggactatggtgcatcggagattctagaagacgtgccggggaatagtgcatatcttactgggttgagcatcattgggggaatgacattgttcccatctgctctggagggagcaattatggggccattaataactacagttatgattgcactgaaggatttgtatgctgaatttgttttgcaagaacctaaggacaagtccaagcagaaagccagctagctaagcttctactacctgtgtctataaaaactatttatttgcagttgaagtttggtgtaaccgcatgctctttgccattgttgaagtttgcctttagatttttgagttgcgcatatagttatacaatttcatttttatctgtatcattagattattataattgaaaaaaataggacccactttttacgtcattttattcattttattaggtgtcatcaaatattttctctcggtggcagtcaaaattgtacacagtttgtatttgtattttattcctgtaacaatttttcttattctttgtaccaaaagagaggagactcatgcaagcttttcagaaatatgatgtcaccttcattattggtggatttagtcaaaaaagacgtgccggggaatagtgcatatctcactgggttgagcatcattgggggaatgacattgttcccatctgctctggagggagcaattatggggccattaattaccacagttatgattgcactgaaggatttgtatgctgaatttgttttgcaagaacctaaggacaagtccaagcagaaagccagctagctaagcttctactacctgtgtctataaaaactacttatttgcagttgaagtttggtgtaactgcatgctctttgccattgttgatggagtttgcctttagatttttgagttgcccatatagttatacaatttcattttagggtcttgttgactagtgttcctagactattggttaaggaactaaaaggagaagtttttaatatgtaaatcataggaaagtataaaaaaaaatcatgaagaacgcaattttatgccttccaataaaaaaccttagttccttaacccgtgtcctcgggacacttgttagcatttgccttcattttatatgtatcattagattattataattgaaaaaaatagggcctactttttgacgtcattttattcattttattaggggtcatcaaatactttcacttggtggcagtgtttgtcaaaattgtacacaatttgtattttgttcctccaacaaattttcttattctttgtaccaaaagagaagagactcatgcaagcttttcagagatatgatgcgaccttcattattggtggatttagtcatgaagacgagtttttactagcatcagtatttgcattaattgtatgcattaattggcaacttagtgagcgtgcatttatatgtacactgatccccatatattttgtttcactttcgtgcatttatataacaagatttttgcatatactttgccatttgtaggcaaaagtttcataccaaaataaatactggaagtggtgcattttgattcccct

SEQ ID NO: 53707 - DNA, 468 bp, Glycine max
  Clone ID: PAT_MRT3847_1950C.1
caaaacaaataaatttctttcttccaatcccggaatcctcaggggaccacaaccgcaagggaacttagggctttataaaccccatttaatcacctgtataatatgcaaaaaaacaaaatgcccccacctttttttttaaaaacaaaatttttaccctttttaaaaaggaaaaatatccctttctagggctccattggggccccctgtggccatcccccatttacggtttccttccacaaggcaacatgggggttcccatcacccacaaccaatttttttcctggaaatgaccataaacccctccaaacgggggggtgaaaataattaaaaacctggccttcccactgacccccctttttcgccacggcccaaaaaatcactttaccgccctgggatcccctaccacgggtaaattaagggacccctaaatggggggcccaaccaacatttaaaacccaatccgggtgc

SEQ ID NO: 53708 - DNA, 309 bp, Glycine max
  Clone ID: PAT_MRT3847_19510C.1
agcttgcaaaatattttttctttttgttcactttttatctgttttttcatcacaaaagtttgaaccttttctttccttccattgaatttggaatggctggcggtggaggtggggacctgccgccgtggaaggaggcggcgccgtcacgacccaccatcactctgccgtcgcggtcgggttccatggagaaccctttttaatggagggttcagccctggtcccatgactctgctttctggcttttttgggtgaatgggggatgatggaaagtacttctctcagatcctctccggagctatggctttttcg

SEQ ID NO: 53709 - DNA, 1189 bp, Glycine max
  Clone ID: PAT_MRT3847_19511C.1
tcgctcacgcatttcctcgtttttttcttcccttttctctttctccggcgacgatctcagattccggccactcctctcgccggcgagcccttactcttccctcctccgtcgagccctctccgattcgaatcgttcccagcctcgcaccaccatgaatcccgaatacgattatttgttcaagcttttgctgattggagattctggtgtaggcaagtcatgtcttctcctgaggtttgctgatgattcataccttgacagctatatcagtaccattggagtggactttaaaatccgcactgtggagcaggatgggaagactattaaacttcaaatttgggacactgcgggtcaggaacgtttccgaacaatcactagcagctattatcgtggggctcatggcattattgttgtttatgatgtcactgaccaagagagctttaataatgttaagcagtggctgaatgaaattgaccgttatgcaagtgaaaatgttaacaagcttctagttggaaacaagtgcgatctcacggcaaataaagttgtgtcctatgagacagcaaaggcttttgcagatgaaattggaattcccttcatggaaactagtgctaaaaatgccaccaatgttgaacaggctttcatggccatggctgctgaaattaaaaacagaatggcaagccagccagtgaacaatgcgaggcctccaacagttcaaattcgaggacagccagtgaaccagaaggctggttgctgctcgacttagagagagacgaagtatttggggtcttagaagttcatgtgtctcagtggcatctaaaactagcttttcacattgctttcatatcaagattgttcgtcatgatttgttcctcttatcgttaagccgttgttaaaacttccattattttctatgtatttgattttaaaagaaaaaacatttgtacaaaattaggaatattggtgaatagcagtatttgccttgttctttgtccctcgaactttcatctcatttcaacagcttctacatctattctattgttcccgtgcctctccgtaggagtagaatcttgttcaattaaacctaactcttgttgttagtcgatgactgaactattttcggaaacaaaaaaaattatttaaaaaacaatacataggtcgtgccatacctgaaaaaaaaaaaaggggggccccc

SEQ ID NO: 53710 - DNA, 133 bp, Glycine max
  Clone ID: PAT_MRT3847_19512C.1
atgtgatggagccggaaggcgtgatcgatagatactggaatgagagtgatgacatcatctatgacatgaacctactacaactgcttctcagtggcatctacgcctatcgtttagacaagtcctatgacaaaca

SEQ ID NO: 53711 - DNA, 454 bp, Glycine max
  Clone ID: PAT_MRT3847_19513C.1
gggaaccacctttattttcattaatttttaaagaatttttttcttccgaggggggaggggcacccaccttagaggggtgggggccttaatgaaatggtgcctggttaagctttaaatggttcttttaccaaggttccttgggttttttcaattttttttcacccttttatttaacttaatttaatggtttaaaccaaccaaaaggtgaaatttttttattaaaattctttaagggggaattccaggtaagggatgggcctttttaggtggcaacccaagcaggggcttacaaggttaactttccttggattggcaaaaccattcacctttgaaaaaacttggggtactttctttcttgggttaaccctttgaggtgattaatgattcttcccccagaatttttggtcttttttatttggggcataattccaaaatttaataacttctttttaac

SEQ ID NO: 53712 - DNA, 687 bp, Glycine max
  Clone ID: PAT_MRT3847_19514C.1
ccacgcgtccgtgattttgttcatcccttgaaagtaagggagggcatgcattgagtttcctttatgatactaacttgaatactagtatatttaataatgtaatcccaatttgacttatgaatcctactatcataagtattacacaagcacatgacatgttgagttgtttgactttggttgtacggctttttcttttccttttcctgatgatctggtccaaaaaccacatcagtattttacaagggagactcttaacagtactggaagaatgtgatacttgttgcatcatgcatgtgatgtttgtttgctcatctaatttgtcagattcgagatactgagtactatatgactatatccagccctagcaaaatgtaatgaaattaaaatcccaaactggggtttcctttaaatggagatctacttggatgcaagtataactgtggtggttgagtcacttcactgataggaatttcagccctccttcaattcttttgcgttaaaaaatcaattctcaattttttttagtggaaaacattaccttccactttaatttgaatttatttttcaggtatttacaatataaaaagtatatatgcccattcaattacaacttatattaggtataaatttttaaaatatttattatttaaattaataaatttatcatatataataatatataattga

SEQ ID NO: 53713 - DNA, 783 bp, Glycine max
  Clone ID: PAT_MRT3847_19515C.1
ggtaaccccttagctgcacgcaaaaactccgaacataatggaaaacaaagagaacattaacgagtggcaacaaatcgaacaattccccgaactctccgaatggaacatggtagtgatcaacgaaaactaccttgttggtgaccaagcttcttccactaataacgaactctcattgttacaaatcgttccaacaacggtgacggacccggaagtcgacggaacttcgtcgccgttaacggtgtcgagttcggagggtgagacggcgccgttagattggagggtgagggtggttagcgaagccaagaaggtgttgaaggtgcgattggagggtgtgagagagcgcgttgttggggtggcttctaaggttggtaattgggcaatgtgtgcgggggcgttttggtcatttacgcaggttgccggagctgcggcggccgcggcggtgttgctgtcgcttgtttacgtggggattcgacggcggcggaggagggttggtcggcggaacgtggtggtggatccttgggtttatcttcttaaagagaaagatgagaagattagccaactcttatttcagattgcacaattaaacgaaatgttgtcatctcgtcgcaaggttctggtgcatcaaatcaactgatgccagttttgcagtatttacgtagtattgtaaattgtatatgagcttgtaactttacatttacgtataaaggtgagcagtataaaggtgctcactgctcaatatatatcttcataaataaatagttgtattcttataaaaaaaaaaaa

SEQ ID NO: 53714 - DNA, 194 bp, Glycine max
  unsure (1)..(194): unsure at all n locations
  Clone ID: PAT_MRT3847_19516C.1
nnntantttgcgagaagacgacagaagggggtagaacggtagaaaccactttggctacagagggggggttgtgtcttgcgaaagaggaaaaacgtataaagaagcaagcaagggaacgtgctacctgggtttgtttctgttgtgaattgcgatccttaaacctttctctcttactcactcaatcaaattcaaat

SEQ ID NO: 53715 - DNA, 294 bp, Glycine max
  Clone ID: PAT_MRT3847_19517C.1
tacggctgcgagaaaacaacaaaaggcaatatcatcatcatatactacctccatcacatactcaactttataaggaaatttgaagctacgccaatactaaacttacttttataaaactttatgctatccatatatctatcaaaattcctattccattgacttggcaataagcttaaaccatacattattaaaaatattcttgaaccacaatcctctattcctcttacttcacttttcctcacctggtccaccaaatagatccatggcaaacaaaccatcctaactgggcgagtt

SEQ ID NO: 53716 - DNA, 308 bp, Glycine max
  unsure (1)..(308): unsure at all n locations
  Clone ID: PAT_MRT3847_19518C.1
cccacgccaacaaccacacatacaaatcctttcttactttttatctaaccttcaaaaaccttcttaatttgacaaatcatttctccctaattccnactaacctatcaaatactatcttctacttattcctacttccttctcctatacacaattcaaaaacatcactcttaattcttctcttcttttcaccttttaccacattattattctcctaacaacttcttcattcaccactaccactcaaactactactttaacatttttataataccaatttccacacataattttcaattattactaacttc

SEQ ID NO: 53717 - DNA, 305 bp, Glycine max
  Clone ID: PAT_MRT3847_19519C.1
gtcaacaacgaaaaaacataagatggaaaatatgcagtaatggttgtaatctaatactatcaaccgtgggggtataaaaccagattacgggtgttgggtccaaaccctggtattcaacctaattccccgggaataaaggggggccaataatataagttgtttagctgatataaacgttttggaatccaatttgagcccttaaacacaaaaaccaattgggtgggcctttgtaggccttgctcccccttagggctgatccttataaaccttgcggtcgttttttgggaccgtccactcatttttgt

SEQ ID NO: 53718 - DNA, 949 bp, Glycine max
  Clone ID: PAT_MRT3847_1951C.1
ggctcgagcggggttctcgggtgcttgtgaaattttaccgggagaaggcaaaggtgaatgaacggctcgaggaagtacacagatagaattgagcaccctgtttgttattcaccacactatgtagatatcgacactgaacttaactcaattccaagaagttttgggaaccatatatccattaggagacagctacaactaatcgaagaggaagagcaggggcgatccctggaacttaagaagagaagtcttgcacagctgccgtttgcccaaaaatatttcttcagttcacctcattttggcttctccatggatgagtcaaggatttcagatgatcacttcaatttccagcctgcagaagaatctttcagttttccactgcatgccaaatccaggcatacagactccaattactctgatgaggacagcaatcaaggactcaatctcccggacagtccattcgcatttccactagatagtgggatgtaaacagtcatagtttcagatacatatacaagaaatatagagttcacaaacagaaccaggccaatggtagcagctttcttttgatacacaattcttctattgaaatatttctcaattagtgcagcaattttgtcaaaattccagctagtacatatgctgaagaacagacactggaagaatttcctcttgacaattggaattggtggcattaacaaaagtttaatgatacatgtaagaaggttatagcttttagttacagacaggtggcaaaaggtttgaattttagatcatatagttatgggttttattcatgaagccattggtggatgaaaagaactaggtatattattgtccagttttaattagattgaaggacctcttagaatccgtgtctattttttgaggaactaatttctccctgtgaaccgctttaataatgatttttagcaagtcccttatatgtgtg

SEQ ID NO: 53719 - DNA, 517 bp, Glycine max
  Clone ID: PAT_MRT3847_19520C.1
ttttaaaatacataacagttcatagcatagcaaagcaaagcatagtgtgttagttgttattgttgaaagatgatggagagttatttaaatgagaattttgaagtgaagtccaaaaattcatctgaagaggctcttcaacgatggaggagactatgcagggtcgtgaagaaccccaaaagacgctttcgtttcactgcaaatctctccaagaggggcgaagctgctgctatgcgtcgtaccaatcaggtatcttttttattcaccatatatttttccatgctccagtcatactttagataaaggatacacttcgctaaataaaaacaaaagaagttatttcctatcaattagtacactttttatcaacactttttttggataaagattattgatcaaaaccacgagagactaaaatttcaaataattaatgggcatcaagttatacttttttaccgttcttaattttgttttttaagtgtttaatacacgtgacattgcacacttaataattatctaa

SEQ ID NO: 53720 - DNA, 521 bp, Glycine max
  Clone ID: PAT_MRT3847_19521C.1
attcggctcgatgggaaagtatagtcattgtttgtgcttgttttggtcaaataataaaataaaattttttaaaaaaaaaataaattaaaaaaattgaaaaacgtccatcatattcgtcttttgttcgggaggcgcttgcttgccgggcctccgtgcgcgccatcttttccggtccggcccctccttgggtgctcgcttcccccgtggttttttttcttccctttcctttggggtttcccctttttctttttgtgggggctttttggcttcggctccattcttgacctttgtttttcctggggggaaatgttttccccttctgtttgcccccccctttgcgcccgcttacctttattgggtaccggctgggtcccctttttgggggctttcctccttttttctcgtttggctttttgccctttttttcctggggagaccctgtctttcccctttttttcttgaaaccgcctccctcctgttccgggccctttcctttttggtgcccccggtgtgtttttttt

SEQ ID NO: 53721 - DNA, 424 bp, Glycine max
  Clone ID: PAT_MRT3847_19522C.1
aaacaaaaaaaaacccccccttgaattttttcccgggggggcaaaaaatatttttcccaccctttttttgaccccgccttgttggcaccgcaaaaaaacaaaaaacttgggacctccccaaccaaattttaaaaaaaaaaacccccccccccttgggcccccaaaaataagggcaatcttttaatttattccccccttgctcaaccccatttgcccccaaggccatttttacccccctgggttggtttttgttcttggctaagttattgaacaaaaaaacttggcttttcctccttttaaacccttttgactcacaactttaatatggggattttgggggaaaaaactttggtaagctccttttaaaaaccccccaacacgggggcttcccgttgccacccaaccccatgggggggggaaaatt

SEQ ID NO: 53722 - DNA, 129 bp, Glycine max
  Clone ID: PAT_MRT3847_19523C.1
aaaaataaaccaccctagcgcttatgtgggaaggggaaccttacaattgatacgaagtgcgcctggatctcaccaacacgtacttattaggcaaatacaatcaatactcttgcatttgaagcctctcat

SEQ ID NO: 53723 - DNA, 475 bp, Glycine max
  Clone ID: PAT_MRT3847_19524C.1
ctcgaaagacgagaccagcgacacccccaccaaagaggaaacggagtcgccggcgtcggctccggctccggcgactgccccgtcggggcggcggctgagcgtgcaggaccggatcaacctcttcgagaacaagcagaaggagaattccggaggcagggcgccggagctccggcggctctcctccgacgtgctgcggcggtggagcagcgccagcgacatgagcatcgacgtcggcagcggtgataagaaggattccgacagccccttacccacgccagcatcctctgtttctcaaaccaagtccgttgtcgtttctgaagacaaggatcaaaacgacaacaaattggagaaatttgcgaaaaccgatcaagggtcttctcaggagacagggaaagtttcggtttttgatgaggcgaagaacggggggtttaaggatcaggtgggtagtggtggtggcttttctgagacgacattg

SEQ ID NO: 53724 - DNA, 393 bp, Glycine max
  Clone ID: PAT_MRT3847_19525C.1
aaaacccggcccagggttcccttggattaaccaaccttccaaagggaaatttttggtccagaaacttccacctggtccttttaacctggaacccaaccttggaaaaacccaaacccccaaggttcttttttttccttccttttttaaggaaccccattggtcccgctttgggaaaatattaaaccttaattatttttattggcatttttttgaccaacccacctgttggacagcaaataaacctgcctaagcaggcccgtgactaaaaacctggcacccgcctggtcttgggtcccctactcccaaatccttttaaggatccaaccaggcaaaatattctggcattcatgggcttagtcttcggcttttaaggaccaatcgccagttccttcc

SEQ ID NO: 53725 - DNA, 394 bp, Glycine max
  Clone ID: PAT_MRT3847_19526C.1
tcaattcaagtttttttgttgtttaaattacaaaaacaaacaccccccatttcggtactgttttactattatatgttatgaacggtcgtttgatcattgctcactgggagacgacctaggatcacttcctagatactgcattttaatgtttatttgattcctttgcttcttggaagatgaatggcactggaatggccaaggatgagagagaggagatgccacgtctaggagaagatgagtctagaagaaactcaccaccataggaagccatggataagagcttggaagaagaaggagatgaatgaagggagaggaggagaatagcacgaaattttgtgctctaaaagagatttaaaattggaagtttaattctcaaatgatcctcgagccgaat

SEQ ID NO: 53726 - DNA, 116 bp, Glycine max
  Clone ID: PAT_MRT3847_19527C.1
ccgcaccgacgcacgcatccgctcacgcacacggccttttaaaactaaggtttacaaaccaacaccattgacaaggatccagtccacatcacaagcgaaaaacgactaacccgaaa

SEQ ID NO: 53727 - DNA, 398 bp, Glycine max
  Clone ID: PAT_MRT3847_19528C.1
aaaaactgaaaaaaaaatttttggtaggcctttagcattttacattattggaaaaaaaagggcccaatcccggttttgggattgcgtgaaattcaatccttttttttacccctttttgggtaattttcccttaattttagggggatcatgtccccttggaaaaaccccaagccaaaagggagggtaaatttggtaatggctttttttggcctaccgtaaggtgggtcattcccctccttttgggattggcccccactaaacccccaaggggggtaagggcccatttcaaaacctccaaggggttggccggccccccttttttttacaaattgcttttaaaggggattttttggccatactttttaacacacattttcccaaacgctttccttgggggg

SEQ ID NO: 53728 - DNA, 441 bp, Glycine max
  Clone ID: PAT_MRT3847_19529C.1
tttttgcataatgtattcttttaatctcaattgaagatggaggattcaatgaaaccttagtttttacaagattgttatagcatttctgtcagatgaagtccaaaaagagccatataaaaatgtgtagtatgtacagataatatgaacaataacatattgctgttcactttgacaactatctcttatagtgtaagttgcaagtcaaacaaggaaaattttctcatccattttcttaaacaaaattgcgaggaaaacctactgtacagcaggtattttgtttgcttccatattatagtgccaaggccgagctcatactcaatgtcatctccttcttcaaatagcttccaaaaccgagcctgatcctgcttcctcttctcttttggcatacttgtatgcacccaacattccagaatcaatatagttgagcccaaaatacttagt

SEQ ID NO: 53729 - DNA, 399 bp, Glycine max
  Clone ID: PAT_MRT3847_1952C.1
gggtttttcttttttatatttttttttttttaccaaatccaatacgtaaagaagtcccattttccattatgcataatagcaaaccaaatggcacccgataatagggatcaaattaccatatgctgaacttgggggatctttaaagagttctctttacataaggaggtggcttccattacatcctaaagggaaaacaagacacccagttgggccagcatgatgataaatttaaatcacccaaagaatgcagggtcataccctttgctagggggggccaaaatgtataaagcaacaccttggccaatggagccccaggccaagacatcaacattgttgaacccaacagggtcattggatttgaggaggctgacatactcctggggacgggaataaccagcc

SEQ ID NO: 53730 - DNA, 270 bp, Glycine max
  Clone ID: PAT_MRT3847_19530C.1
atattcttctcttgttttcccaatttttcaaatgagtttttttcaagcaaaacccatttattaagttcctccttcttattaaaaaaacttttttttaacccccccaatcaaaaatcttaaaaaaaaaaaccattctaatatccccaccctttcttaacatattaatcctatggcaaaacacataaattgaattaggctttttctataaacctatcccatcaacgtataaataacttttaagactgttttaatctacctcctaaaaattat

SEQ ID NO: 53731 - DNA, 2022 bp, Glycine max
  Clone ID: PAT_MRT3847_19531C.1
cttaaaagaaacaaatgtttctctttctctctctctgtgcttgaagaacaaaacacacttcttctcaatttcttctttcttctgagagagaaagaaagtgagggacttggagagaatttctgtcataacagcacattgagtcaccaatcaaccatgtctctggggtatgccgagaagctttcctacatagaagatgtgggcaacgttggaatggtcgaatatttcgacccatcccatgttttgcgagagaaaatagatcaacttgctatcatgataaaaaagagtaagcatctagtggtgtttactggtgcaggaatatcaacttcttgtggtatacctgattttcgaggtcccaagggaatttggacacttcagcgtgaaggtaaagccctgcctgaagcatcactgccatttcatcgtgcagcgccaagcatgacacacatggctctggttgaattagaaaaggctggcatagccgaagttcgtcatcagtcataatgttgatggtctccatcttcgatctggaataccaagggagaaacttgctgaattgcacgggaattccttcatggagacatgcccttcttgagctttgaggtactttcgtgattttgaggtagaaactatcggtttaaaggagacatcaaggcgttgttcagttgccaaatgtgggacaagacttaaggatacagtccttgactgggaggatgcattgccttcaaaggagatgaatcctgctgagaagcattgcaaacaggcagatatagtgttatgcctgggtacaagtttacaaataactccagcatgcaacttgcctctgaaagcacttcgtggtgggggtaaagttgttattgtaaatctccagaaaactccaaaggacaaaaaagccagtttagtcatacatgggtttgtagataaggtaattgcgggtgtcatggaccagcttaatatgcagattcatccatttgtcaggattgatcttttccagattattctagtgcaagctttgagcaacgatgaaagatatgtgaactggactctccaggttgcaagtgttcatggacaaaaagcagcattgcctttcatcgagtctgttgagatctccttcttggacagggaagattacaaagcagccattctggataagcaaccatttcggcttaaaagattctcacaatagatgtaatggcttgcaccttcttccttacatatggttgactgatatctcaggagaacagcatataacaaagcatttgaaatggttctgaaactcaactttagcgatggttgtggttgctcatcccttgaaattgatgtccctgttgattttaaggtttcaactgactgctttgactttgataaggactacatattccaaaagctgagagacaaggcagttcttgaatcaagatgtggtcagaatgctgttattgagagaaaggccatcttgacgcctagaagtgatgtcactacctatgccattgtgaccaatgttgttcagtacagcaaaacatgtaaagcagcccttgattctcttagtaatggtgattttaaaaaaagaaaagctagtgtgactggtactggatcatctaggaagcgttcaaaagggtcctccaagtgtaaaagagaatgttaggggtcatatctaggttttgtacgtatgataacatcaagcattagaaactgacatagagactgagtgaattttgttagatgttacactcagtctcccctaaatggtgtccatgatactaaaggcttttgataccgtaattactaatatagtgggtattcttggtgtggcttttggaatgtttcttattgaaaattccagacaacttgacgttaattataggtgtagaaggaaatttagtttgaaaaatctgagtatatgcagagctcaactggtgtaaaaatgtttatttttttgtcctttacccggtgaagtgttatttttatcttgaatattttcaaattctcagagctcaacttggaatgttattttttttgtccaattgatct

SEQ ID NO: 53732 - DNA, 826 bp, Glycine max
  Clone ID: PAT_MRT3847_19532C.1
ggctcgagcagttacatcttatatctctatactgaagcattctgattttttgtgctataacagatgcaaatatggttggaatatttgaatattagcaatctcatatctctaaacagaagcatcacagttttgttgggtaacggggttcatatatagctggctcatttgaatattggcaccggaccggaacttttacaggatccattgaattttaataacaccatatacaactcatgccatctaatgtcagagtaatttcatattcaaaccaaaaggatttaagcattcaaacaaaattcaccaacccatatcgtctcagtggcactaaaacctcatgggaaatggtttaaatatagaaacttctcttaaatggataaaaatatatattgttagaatttggatttgaacttaattcaacctgatcaaattagattgtaaaattaggattttttatcacttatatattttatcttgacatatctctagtcgacgtggaatttaggtttttcccacctatatttcagccaaggtacaagacttctttttgcacaactgctgtcccctatccaatgtttcatatactgccaaacacattgaggtaacatactctaacattccttaggcatatctatgtcctagtatctcatctgtaaatatttggcagttttcattgataatgccacctctttcagctgttgtaaatgaaaatgagatttagctaatgctatgtactaatattaatatgttgtactgaaatgaatcgatattaacatcaacagcaatacaagatggatttgttgtttggctatttcaaatcacccagctg

SEQ ID NO: 53733 - DNA, 255 bp, Glycine max
  Clone ID: PAT_MRT3847_19533C.1
cgaaaacacttggttgatccaacactcctccgccttatcaagaaagttaatcaaaagaaaaagatgaaagtgaaagatcttcggcgttcccgcaaatgcttgaggaagagaaagttgaagggagaagaagagtggagattttgatggcactcatagacctcaaagtggtgtcaagggttttgagaatgagtgagttaagtgaggaacagttgcattggtgtgaagagaagatgagcaaagtgagggtattggacg

SEQ ID NO: 53734 - DNA, 1130 bp, Glycine max
  Clone ID: PAT_MRT3847_19534C.1
ccacgcgtccggccaaacaaaccaagcaacattataatagaaagaggacacaagagaaagaagggggagctatagccataaggagaaaaactttcaaagaagtgaaagcaaaaaagagttgttcttttcctttctgctgataagctgtgtgagtgagttcattgacaagcctgaaatgacaactatgctgacaaatgagcatggtctgagtttgaacctcaaggagactgagctttgcctcggtttgcctggcgggggctctgaagtggaaactccaagggccactgggaagagagggttctctgagaccgttgatctgaagcttaatcttcagaccaaggaagatctgaatgagaatctgaagaatgtctcaaaggagaagactctccttaaagatcctgctaagccgccggctaaggctcaagtggttggttggccaccagtgagatcatacaggaagaacatgatggcagtacagaaggttagcaatgaggaagtagctgagaagacaacaagcagcactattgctaattctggggcgtttgtccaggtttccatggatggagcaccttaccttcgcaaggtggacctcccaatgtacaaaagctacataagacttatctgatgccttggccaaaatgttcagctccttcaccatgggtacctatggggccctaggaatgatatattcatgaatgatagcaaattgatggatcttcctcccagctctgagtatgtgcccccccatcaaaatactgatggtgactggatgctcgtgggtgatgtcccatgggagatgtttgtggtggtcatgcaaccgcctggcgaaattatgaatggatcagaaacgattggtccttgcgtccaaaacattggaaaaatgcaaaagcagaaggggaagctggcccaatacaacgttctacgagagatcccgtacgccactggacctatggaacaaattatatcacccacttcagctacactatggagcggaatgttgttggttgaatgtgtctggtgtttggcgttttgttcgtataaagattgtgtagtgtaaaacaacggtgccttaacctatacggtctggcgtgtttaggatgtgatcgtccaggctgtccggatggtatttg

SEQ ID NO: 53735 - DNA, 219 bp, Glycine max
  Clone ID: PAT_MRT3847_19535C.1
ggctcgagcccaactcagttatttttttattccggcccaatttagcataagcccagcatggccaccgtaacagcagcagtcacctagtgcttgatggggacgcgccttctggaggcccactccggggcggggcgggtgcaggtccagttagaggtttcgaacgaagaaagccgtctcctcgaagaaggggttcagggggtccgggtctatcttcgatag

SEQ ID NO: 53736 - DNA, 213 bp, Glycine max
  Clone ID: PAT_MRT3847_19536C.1
ggctcgagctcctaagtgctgatgctcgcaaggctggactgccagggcgctgactggatgagcaagaacgggaactgcgctcccaatagtgctactcgcgggttcagatggcgcaccgtgctgcaagagggatcgacacttgccatttgatacgagaatataccatgaccgatggaggtagggatatctcccttatcatccattgaaggaggc

SEQ ID NO: 53737 - DNA, 306 bp, Glycine max
  Clone ID: PAT_MRT3847_19537C.1
tttcgggacacactagcatggagaaaccgtatatcagcaggatgaagagaagtgattagtaatgatgaccactgcaacttatgtggatcactccattctgtataaagattgtcgaggtgacaagagcgacttttgagactcggggcgtcatcttatacgcaaggagcttattgcttcaaggctctacaccatgttgcacgtattacttatcgtcgtaacggagatgaccatggcgtggatccacttcagcgctctacttcgtaaagaggtcgcccgcttgaggacacttgcaaggaacgtaagtag

SEQ ID NO: 53738 - DNA, 321 bp, Glycine max
  unsure (1)..(321): unsure at all n locations
  Clone ID: PAT_MRT3847_19538C.1
ggggggnggggctcgaggacctatctctatcttttacacaatccttatctctaaaccatatcaacctgggctgtctccaataattacgaccgtgaagaaggcatttgtgatgtacaagatatgaatgctgcgaccattaaaagagaacagccaggtgcggataagcagaataaagagatagctgtgaaaactgacgatgcgggtgaagactattctaatcctcgacataattatacaaacctaaatccaatcttgaacgcatatgaaacctctaatgtaccaaacaactctgtagggtcaatgcaaatacctgctgagcat

SEQ ID NO: 53739 - DNA, 753 bp, Glycine max
  Clone ID: PAT_MRT3847_19539C.1
tacggctgcgagaagacgcctccacgcgtccggcagaagcagcatcagcatcgagtatcctcttccttctccttcttccgcatcaactcgtcttattagagtttttactaatcaattatggcttacgagataaccgagataaagaattttttccttggcaggggttggcattttgcttggttggcgttccacgtgggcacttttcactaatagagccaactttaaggcactcttctctccttccctcttcattacaaaattgtctgcattaaaatcatagagcttgaattgaatgcagattgtggatctgttaaactagttagattgctttgcctgtcatgtagcagatgatagttttgtaaagtgatggtaacgaatatatacatgacaagaagcgtcttcagatacaacttaaaatatctgtcatcaaattctaaattatgttcagaataatcagagctttccttccagcactccaacaaaatgcatgtgctagttgtgatatatggagtatctcaaatttatttttgacatacataacccataaaatttccaagtttcctgatgcctcagtaatctgtcttactccaagtactaaccttgatgaattaaagatttatttgctttggatttccagcatctctttctgtaatgaaacattaagccccgcaaatgttctatttgaatggatgcctggtgtgttttatctttcgtcctttggtcttctactactacatcatgtcttaacgttag

SEQ ID NO: 53740 - DNA, 341 bp, Glycine max
  Clone ID: PAT_MRT3847_1953C.1
ggaaagaacaaatgagtgtgttttttggatggtgacactttttgaagtttttgtcgttttgaagccataacgattcggatattaaacaaaacctttgcaaaggcctggaaaccccaaaacgacattgttttttacccccagagaagatacaaatgcctccagctttttgccgttcaaagccgggcccataaaatagagaaaatgggtccattggccgttccaacaaccatttggctcacttgttgaaggtgttgggacacccttaggtgcgaaaaaaaagaaccaaatgtcaggaccgttgccctgatggcaatggggaatccattttgcccaagcctttt

SEQ ID NO: 53741 - DNA, 604 bp, Glycine max
  Clone ID: PAT_MRT3847_19540C.1
ccacgcgtccggtcttattagagtttttactaatcaattatggcttacgagataaccgagataaagagtaagtaagaagcattgcaatgccactgcattctcttttttgtttattctaatttaagtgtttgaacatcattgacactgtgtgtgtgcatgtttgaccttggatagagattggtataggcctaattggtttcggcttatttttcacatttcttggcataattcttttctttgaccgtggtttgcttgctctgggaaatattttttccttggcaggggttggcattttgcttggttggcgttccacgtgggcacttttcactaatagagccaactttaaggcactcttctctccttccctcttcattacaaaattgtctgcattaaaatcatagagcttgaattgaatgcagattggggatctgttaaactaggtagattgctttgcctgtcatgtagcagatgatagttttgtaaagtgatggtaacgaatatatacatgacaagaagcgtcttcagatacaacttaaaatatctgtcatcaaattctaaattatgttcagaataatcagagctttccttccagcactccaacaaa

SEQ ID NO: 53742 - DNA, 894 bp, Glycine max
  Clone ID: PAT_MRT3847_19541C.1
atcaattaaaaaagataaacagaggagaggagaggagaaggcgatgcaacccacatccggcggcggcgggctggcaaggttccgttcagctccggcgagctggttagaatcagttctgttgaaggaagaggaagaagaagaagaccccttaagcttcactcaactgctttccactatcgatgatgctccctctcattctcaacaccaactctatggtgccgctctctcaaacaaggataaaacacctgaaatcttcatgttagaagattccgttccttgcagagtgagggctaagcgtggctgtgctactcatcccaggagtattgctgaaagggttcgcaggactcgtatcagtgaccgcatcagaaagctgcaagaacttgtgccaaacatggataagcaaacaaatactgcagatatgttagatgaggctgtagcgtatgtcaagtttctacaaaagcaaattgaggaactgtcagagcaccaacggaggtgtaaatgcgtggttcaagagtaaattgctgattgttccatgcagtgcttggctttttacgatttacttatgaattattatcagaatttttttatgttctgatgaagatcaaccataccacactctggatgctaattaaatttaatatctcctgataacttaaaagatgcatatattatacatgttaggggtgacattgccaagttcgagacgaataaattacaaatagaattttaccctagagtgttataattgtgttgtagtgttgtacaactcttaagatacacaaatctgccaagttaatagctacttggacttaagatatatacataaccatatgtgttattttattaaataaaaaaaaaaaaaaaaaaaaaaaaaaaaaaaacccaaataaaaaa

SEQ ID NO: 53743 - DNA, 314 bp, Glycine max
  unsure (1)..(314): unsure at all n locations
  Clone ID: PAT_MRT3847_19542C.1
gttttcatcttgaaccactttcttnaaagcacaagacgaccatgacatgagagttgtggatttgaaaatacaaaccaaaacattgagcacttgtcaagacaggtttatcgagaaaatcaagagaaaatcgggatgttcacatcacatccttgacaacagaaagctaaaccccttatttttaaaacagaaaagacaaatactccactccatcacttaaaccaggatttccttgggggattccttgaccaactcattgagcacaaactttttcaacagttccaaaccggacgaaggctgatccattggaaccatat

SEQ ID NO: 53744 - DNA, 217 bp, Glycine max
  Clone ID: PAT_MRT3847_19543C.1
caacccgagcgactgtcgtataacaacatttttcaacccctcatgtggggatctacctaacatggccgatgtctttgtccacctcaaacttcacatcaacgtcaattaattcatccacatctacactttttcacttatcaagcacatccctctcgaaggactcttacgcttccaatcaacataaccccatcttaatgttcatatatacaacaacatc

SEQ ID NO: 53745 - DNA, 287 bp, Glycine max
  Clone ID: PAT_MRT3847_19544C.1
atcaccaccaagcacatgctacccacggttctgcgcatggctggggacccggttgccaatgtccgcttcaatgtggccaagtctctgcagaagatagggcccatcctggacaacagcaccttgcagagtgaagtcaagcccatcctagagaagctgacccaggaccaggatgtggacgtcaaatactttgcccaggaggctctgactgttctgtctctcgcctgatgctggaagaggagcaaacactggcctctggtgtccaccctccaacccccacaagtccctct

SEQ ID NO: 53746 - DNA, 646 bp, Glycine max
  Clone ID: PAT_MRT3847_19545C.1
cgcgtacataaaaagccacattctttcttcttcttcctccaccatacttcatttcattcatattcagaaaaagcaaaagtccaaggcacatgatcccacaatggaagaaacaacatcaaccatcatcatggctgcactctccaccctcacaccttcccaattctcagatctcactcgctccattatctccgccaccaaccaccaccatcgccgcctctcctccctcctctcctccccaacgctcttctctttaacccttcaccatctccacactctcacactcccccagaagaccctcctcatcgcccgccacctcctctcctccctccacctcctcaccgccacgtcgccgcctctgtccaccaccacacggcagcgcgacctcgacgccgcgctgctcctccttctcctctgcgaaacgcacaaccacaacccacatgccctcgaggcaccgttctccgaatggagaaaaaacttgagcaaagtgttctctgattcgctggtaactgtttctcgaaacacccctagcaaactctatgatgaccttcgttgagccggtgccccggcgcccctggcgtcggggtgcgctcccttccggcggagggaaggaggcggcttcggcggcgataatggtggcgctgccgtc

SEQ ID NO: 53747 - DNA, 319 bp, Glycine max
  Clone ID: PAT_MRT3847_19546C.1
atcttatctgctatattgatgctcgataccgagaatgcgagatctatgcaatcgcagagattgaaagtgttgactgattggaacactgatgagacatcaccttaccggaacacggttctatggcggggcggtggggacatgggagctctcttccctgatgaacctgttgcctccgctaagcagacgattgttcaggagagactgcaactggtagccctggcgttgttgcctttcacctactgtggtccatgattgagtcccctacacctacaatagccgttgttgctgacgtcactgtagctagctgaccctcgctgat

SEQ ID NO: 53748 - DNA, 733 bp, Glycine max
  Clone ID: PAT_MRT3847_19547C.1
gttgaaacatgatcagctcaagatggagctcacagagggacatgtattccaaggttggcatgaaggagctatagagtttccacctacatacaaataccgtctgaattctgtagactacctaggctgtgatcagcagcatgtgagcagaaagcggcgctccccagcatggtgcgatagaataatatggtttgggaagggaatgaagcaaatccaatacaacaggagcgagtcaaaactttctgatcataggcctgtacgagcaatgttcacagctgatatcagggttgcagggacttgtaaatgattaaaaaagttacaaaggcaatttgtccaagaaattttggttttaatggactaaatttagtcatggaccaaaaccagacacagacaccggacacctaaccaaacttagtcctgggctaaaccaagcatcggtccaccagtcaaacttagccatgtgaccatttctcagatgagaagttttaggatcctaggaagacattagacatgcatgtagtagctgaattctttgcccatcaggataagcatttggaatttatttcttgcctagagaaaacataggaagcctgacaaagagttgctctccatattttttggagggagaaaagggggggacatggtgatgcaaatcgtagaaatatggcatgtttgtactataaactcgtataagaaactggtattatgacttcaaaagggggggggggggggaggg

SEQ ID NO: 53749 - DNA, 439 bp, Glycine max
  Clone ID: PAT_MRT3847_19548C.1
aaatgccgattaaaaggttcaaactaaagcttttaacacttaaaaacataaaaaaataaaattttaaaaaaaatggttaaaaaaaaaggttttttttgcttggcccttccaaagggacggaaactgaaaagtggggaaataacaaaggggcagagacggccgcggaagggggcccccgaaaaggtttggggcagggtcttgggggtggggcctttctgggtggccaacgaggggggggtttccaaaggggggtccgaaagttggctttaacttatttttagatagattttgccccagggccttgggagcaggcctttcttggggccaaaaattgggcttaaaaaatgtgccttgaaaaaaaacggaccttagaagtggaagttttcttttaacccccctttgtaacgccctgttttggggccccaatgcctgtgccccc

SEQ ID NO: 53750 - DNA, 667 bp, Glycine max
  Clone ID: PAT_MRT3847_19549C.1
ctccttcatccctttggagtgacttatccatggattttattacgggtctttcggcttctcaaggatacaccaccatcatggtggttgtcgaccattactccaagggaacccacctcgggcccttactaacgcattacaccgctcataaggctgccgtattattcatggatactgtttgcaagcaccacaattttgcgcgtagtatcgtttctgacagggatcccattttcatcagtggtttgtggcatgagctctttcacataagtggtaccaagcttcgattcagcacggcttaccatccgcaaacagacggtcaaacagaggttatcaaccgcatcctcgaacaatatttgcgcgctttcgtacatgatcatcctcagcattggttcaaattcttgtctctcgctgaatagtgctacaatacctctgtccatagtggtatcggcttctcaccatttgagtgttatgtatggtaaaccaccaccggctcttcctttgtattctgccggaacttccactgttgaagctgtagatgctatattacattcgctggccaccattcatcataccctcacatgcaggctccaaaagtatcaggattcgatgaaacgtatagccgattcgcaccgtcgggacctcaccttcaacattggtgattgggtttatg

SEQ ID NO: 53751 - DNA, 362 bp, Glycine max
  Clone ID: PAT_MRT3847_1954C.1
ggcccaaaggggtttaaaaattaaatgcccaccccaccaaaagcctttttttggaataaccccaccaggtccaaccctgggattttgggccccccaccaaaaatgcacaaaaggggtaagctttttgaaatcgatggaaaaaaaaacccttttcgtattttttgcccggtgggaactttaaaaattttttggggggggggaaaaacaataaaaaattgcccccccccccaaacaaaaaacttttttttggcctaaaaaaacggtggccgcgtaccccgacaaattcccgaccccgggggtttgcagggggccccccgggaccaaaaaaccttcgaccccctggggaaaaaattttttttgcc

SEQ ID NO: 53752 - DNA, 900 bp, Glycine max
  Clone ID: PAT_MRT3847_19550C.1
ggctcgagctcgagccggttccaccataacctccctttccatttggataatctaccaaaatgttccacaaatattttttaaataagccttaagctcaatcaaatttcaaacaacaaattaacaaaggagctaagaggaagaggatgatagcgggttatgtttgattgatgtgttacagtgatcatcaatatgagaatgttgcctgtttgctcagccaccccaagttattccacatcttcccagattcccttgtttgggggattgcacccaattcgaaaggatcttgagagcagatgtgtggctgaagaaggtgtgcatttggcttcacaatatggagctcattcactgagaaattcatttgcagtgcaagctacaaagacagtattgggcagtttttcttctacaagtgaatcaggataccttacaagcacgtggggttattcaccagtgctgacagatggacatcattcactgagtaacggggaagtcagacacatggaaagttatcatttatctactgtgccagatgaacttgcggacttcgcagaacaggcaactgaaggatctaacacattagtgacaccagcacaaccagaaacactatcggctgcagatataatgcctgagaactttacatcaagtcctagttctattaatgtggacaatgaatcattagccagtacaaaagcaagtgttggagaccttgttgctggattcaatgaatcattcaatgcctcaatcaatgagggacaaaatgctttacgaagctcactggatacagccacttcttttgtagattctattgttaaaactgctactgatctgtagataatacttttagcaaggcattttcttctgttgatcaacagggggagttagcaataaaaattaaccagcttt

SEQ ID NO: 53753 - DNA, 450 bp, Glycine max
  Clone ID: PAT_MRT3847_19551C.1
acgaggaactagtctcgagttttttttttttttttttttttttatctcttatatttgcatttttcaggttatccttgtgttttgtctttgttagtatgtctgttaaaaatattggttatctaatgtttaacacctagttttttcataagtttattgtggactttcaaatcatttactgaagggtttttactgaaacttatgctttgattttgttgcataatgaattatgatgcctcctgcctttgtaaggaattgactaggttttaatttttaattgattgagatttgtatgttatcttcactagccatctcagcttgttattccttggtgccaataactatcacttgctaactaatgatcttagagtagcttttgatatatcctctatcactcactctatttatcatgttttaagaattaatatatatttttctcttaacccttggagt

SEQ ID NO: 53754 - DNA, 351 bp, Glycine max
  unsure (1)..(351): unsure at all n locations
  Clone ID: PAT_MRT3847_19552C.1
ttnttcttttttttcttttttctcctatttacccaatgtggaacaagggcttaaaatctattaaaacaccacaagaaacaacatggagggccttagggggctttacgtcatctccccacgtgacattaacggacattaccaaacctcccttatgcttctatcagaatagcgcaccttatcacaccttaatacgtacaaactggagctaactttatctaaaaggtgaagagacgacaaagtgctactcatgggattacaaggcattaagaacctgattgggcctgtttgggcctctaggggatccatccatagggctccaatgatctcaaaagatttgaacaattgtgtaaa

SEQ ID NO: 53755 - DNA, 522 bp, Glycine max
  Clone ID: PAT_MRT3847_19553C.1
aaactggcccttaagagaaaaaacaataatttcaaataatggcacacacacacgggttacagaacaaaggtagggacaacatccattctggtgagaacacatagacttaatacaaattaatctacaaatagagagcgacattctcgcttatatttaaaaaaatagcacaaagcgctcatagcctcttaaatagagcgacacacagacccgtggacttgcgaaaaatgagaaaatgtgtttcccacaggctgtgcaaagagaggagcactgtgaacacaccccatatgcggggggaaaagtgccgcaaacccacttttgtgagagaacaacagtcgagaaaatgagcagcagcatcataatccccggtgccaccatttttcttgtcgtgctgtttccccccgacgacgaggagcatatgccgtcagcctaacataatatgcagcaccttctattaatacaccacgaggagggggattaccattacattgtcgaacgaggaggaccttatggtgcaacaccccc

SEQ ID NO: 53756 - DNA, 436 bp, Glycine max
  unsure (1)..(436): unsure at all n locations
  Clone ID: PAT_MRT3847_19554C.1
atggatagtacttctccatcttttctcttgagccttgcttacacaccaatcttctacaccacttcacacaacctgaaatccgacccaaaaccagaagaaacacacacactcagaagcaccaagagaagggacttgcagtttattctgttctttacttttctctgccctgctctgccacaacttagtacttcacatccttagcttagatatcttctgcacatgttgcttttgttgcttgtctagcccttagagctgagtgacgatagattccctttcagtagcagaaagatgggtgggcggtagtttctatgactttcgatgacatgtatgtgcgagtgtgatagaaagntagaaccttcaacaactcatgtgttgattttaaagctggtcattgggcatgttttgcttcttcttcctagctaggtaattagatctc

SEQ ID NO: 53757 - DNA, 381 bp, Glycine max
  Clone ID: PAT_MRT3847_19555C.1
cgtcttcgcgggtttggaaaagattgcatacagagttcattgttggcgagagggaaaatgctgaccctgagttctggacgctgaggcgttcttgttctctggaagctgataggtgaactttgaaagaggcgccgcacttagaacagactgagcagtacgaaggtggacaacctgagtagactcttgctgatggaaagagctgccacgcactggattactgtagacgccatgaatcaagatacagagacacgcacgctgttaaccatataggtgaggcacattttgaataaaaggatcaatctgcaaggcgaaatggcattccaattattctacaatatatgaagtggtgcaaccagtaaataaccgtgctaggacatcacc

SEQ ID NO: 53758 - DNA, 136 bp, Glycine max
  Clone ID: PAT_MRT3847_19556C.1
ctatggtccgggcatgtcggagcacgacgagcctcccagccggcatgctatccccactatctagtctttggcagatgccatgaacgctttcagcggaggtgtccttatcgtttcccacgactaccgactcctccac

SEQ ID NO: 53759 - DNA, 162 bp, Glycine max
  unsure (1)..(162): unsure at all n locations
  Clone ID: PAT_MRT3847_19557C.1
ctcccgtcttgtgtanttccctttccggctcnggcgggtcccnggggcccngcctantcccctcaantcctcctccttctccttcancctcccggggtcancgagtccggttcccctggtanancctcttcttctttttctccctccggagcaacttcttct

SEQ ID NO: 53760 - DNA, 352 bp, Glycine max
  unsure (1)..(352): unsure at all n locations
  Clone ID: PAT_MRT3847_19558C.1
aaaacacacaatttcgctcactacagaactcgcacgtgcccttactttcctgtcacgtgtgcggtacgaggttctctttcccctgttttttcttgttttatttgctgtattctattttattttccctttttcctctattttttacttttttttgttttaataaattaattgaactatgccttttttttttgtggcatttactgtaaatttggtaaagtaacatttgattttttttagatgcggtttctgtgcagttatgatagttggtactctttgcgtgaatgtgaggcttttatcactatgtttgggtttgggtttagtnacacgntttnaatttttttaatattgggan

SEQ ID NO: 53761 - DNA, 447 bp, Glycine max
  Clone ID: PAT_MRT3847_19559C.1
gggccccaaaaaccccgaaattgaagggaaaaaggcaaatttttaaatggaatgggggggggggaaaaccccaatttaaaaatttccaatcaaaccccattttggaacaacaaaaaaaatttaaaaaaaaaaaaaagactttttttttttactttttttacccaaaacctaagcaaaatataaaaacaaaccacccttttttttaaactttttaaacccaaaagcgggacaaaaaaaaaaaaaaggggggtatttaaaaaagccccataaaaatttaaacgaccaaaagccgggttttccatggggggccttttaaaaaaaaaatttactcttaaaaagaaaggggcacaaacccacccaattggggggccttgaaaacaaaaaacaattggaggaaacgtttgttttcacggcgttaaaaaatggccacgggcttccaaaaaccaa

SEQ ID NO: 53762 - DNA, 159 bp, Glycine max
  unsure (1)..(159): unsure at all n locations
  Clone ID: PAT_MRT3847_1955C.1
taaacctcctggaacacatgaagttgttatgatcagagccataggaatcgaagacaacacaantctctcnagcatagatccttctgtgattctcacatacaatgcacaggataaaaagagcactgtgcaagaagatgctggatgtaagccacaatggaa

SEQ ID NO: 53763 - DNA, 427 bp, Glycine max
  Clone ID: PAT_MRT3847_19560C.1
tcgggcgattgaaatcttataatatggtctcaagctgagggaggcaacgttgggatagcaaagcctgattttgaagatgagaaccgccgactggcacagcttctgagagaagcagggaagacacgggacacagaagcaaaatctctggaagaccttattgatcctggctcacagagtacgaataaggagggggcaaagaggcggactgctttggggtttaaaatttaaccatagttgtattcatttaaatatgactatattgaatgcacattctgtaacataagatatcttgtataggacctgaatatgtaatgttggcacggagctttcctgtgtcttgatattagatcatgcatttggttctcagagtcaattgctttatcaattgagatgcgatctttgtagctacaaaaaacttatgaataat

SEQ ID NO: 53764 - DNA, 419 bp, Glycine max
  Clone ID: PAT_MRT3847_19561C.1
tttgggctgattgatgtgcttgtttatgtgcttgtttatgtgcttgtttatgtgcccccatggtcgtgagaagatgatacacggggaagagtaatttccaattatagtagataatactgccctacacacagcgagcgagagaactcattactaattacgctcgacaccgtcacgccggcagtagaagaacacgagaggaggataacgaaccccaagaaggtcagtgtcgcataagagaggaatccgaatgcggccctccgcgtcctcccgccggcctcgaaggagaagaccgaggcgtagaagaaggagtccgctaagcgggccccggaatttaaaatttaacccgtaaccgtcgtccccaattaagcctcccctcgtccgaataaatccaatcccgtcggccgtaacagccggtcgcc

SEQ ID NO: 53765 - DNA, 273 bp, Glycine max
  Clone ID: PAT_MRT3847_19562C.1
aacaaacctttcataacttcttttcttcctccttgttcttcgggttgctgttgtatacgcatcgcgcatggcagctgtccttcgactctggattccacgatggaagatattatcttgtccaccctgacttgatagcaaatctttcatgaaattgagaatagctgctgctaataaacaagcttccattgatatgggggagctcaccgcgagtggtgagtatgtgactatcggctaatttccttcatccaggacatattactcaagtaaagtttc

SEQ ID NO: 53766 - DNA, 335 bp, Glycine max
  Clone ID: PAT_MRT3847_19563C.1
gtgactgatccgcattgccggtcaaaggggtcttatttgaaaaacacttgggcgctggcgcaaatgtttgcttcgttaattttctctggagacaacaggtacactgagacatcagtttttaattgcagagatttggacatcttggttgtttattatacaatagcacctcagtttagaaaagccctaccgcattacattaggtggcatgcgcgttccttcggaggctacattctcccatcttttgtcactgctgatattatacgtaactctgcattacaggaactgccatagttccatcgtattttacgacggcagatacaaactctggactaaac

SEQ ID NO: 53767 - DNA, 348 bp, Glycine max
  Clone ID: PAT_MRT3847_19564C.1
ctataatggtaaactatgcgcttatggttactaacatcaaatctgaggcacatagctgaatacgctctacggggcaaaagcacccatggatcctgaagacgactctcaaacagctggtcacatgacgatcacctaacttttatgtcttgtcccggaaggtgatggtatcggtctttttaaccatgatcgtactgacatgacagacctggctaaccagacactgttatgcttcaaagctttggttgaactaactgcaacatcttaggacccttgccccgagaccgtgtcatagacggatcccgtaactgctgctgtcttggacgccactgttgagttcagtggggctca

SEQ ID NO: 53768 - DNA, 672 bp, Glycine max
  Clone ID: PAT_MRT3847_19565C.1
tcttcaacattattacctttggtctgatcccaccttgtgggataacgcttgattagtgttgatactatcagtttatcaccttgtgtctgaaagacttttttcttcaatgttgattcgttttgttcttgtggatctgtgaattagtgggattgctcaaattaactttgttccaattccttgcatttctgaatcaacctttcatgttgtttcccaaattatttttcttgtgtatgcttgcatctatacttgctaatatttgcaattttatgtttgcaaaaactgtgttcatgtgtgtagtttctgtctctgcaccacctgccgagaatgacaatcccaataaaaaaggaatgaatgtagcagttatcattttgctaagtattttgggctcaaccatattgattctgggaatgtcgggtacatacaagtattggcaaaagaggaagagggagcaggatcaggctcggtttttgaagctctttgaagaaggagatgatattgaggatgagctcggccttggcactataatatgacagcaaacaaaataccccctgtacagtaggttttcctcacaattttgttcaagaaaatggatgagaaaatatttttttatttgacatgcaacttacactataagagatagtcgtcaaagtggacagcaatatgttgttgttc

SEQ ID NO: 53769 - DNA, 2179 bp, Glycine max
  Clone ID: PAT_MRT3847_19566C.1
ctcgagccgattcggctcgaggccgccacctagaggtcgaagcagcggacggctgcgcaggtccagccatttagaggttgaagcagcggcttcttagtgagtgcttttctgagattcaatggcgttcattggtgcagtcaaattcttgctgcagtacttagttctattatgcctcctcaactatctacctctttctcaaggtaagcagaactggaatgaagggtacccatttataagaagagcaagttcattgggttataatgggaaaagtggagggtatgattatataatagtggggggtggaacagcagggtgtccattggctgcaaccctgtctcagaagttcaaagttctgctgcttgaaagaggaggagtccctttcaacaaccctaatgtgtcatttctgcacaactttcacattacattggcagacacttcaccaacttcggcttctcagtacttcatttcaacagatggagtcctcaatgcaaggggaagggttttgggtggtggcagttccattaacgctggcttctacactagagcagacccaagatttataaggaaggtggggtgggatacaaagctagtgaatgagtcatatccttgggttgagaagcagattgttcaccggccaaagttttcagattggcagagagcagttagggacgggcttctagcagctggtgtgtctcctttcaatggcttcacctatgatcacaagtacggaaccaaagttggtggaaccatttttgacagatttggccgtcgccacacagctgctgaattgcttgcttctgccaaccctcacaaacttactgttttgatccatgccactgtccaaaagattgtttttgatacaaaaggaaaaagaccaaaagctacaggggttattttcaaggatgaaaatgggaagcagcatgaggcatatctaggaaatgacaggcagagtgaggtgattgtgtccagtggggcacttgggactcctcaattgctattgctgagtggaattggcccaaaagcagagcttcagaaattgaacatccctgttgtgcttgataatcaatttgttgggaaaggcatggctgataaccccatgaacacaatttttgttccttccaagagaccagttcagcagtcactcatagaaactgttggtattaccaatttgggtgtctacattgagaccagcagtgggtttggccagtccaaagacagcattcactgccaccatggtatcttgtcagctgagattgggcagttgtccacaattccaccaaagcaaagatcacaagaagctgtaaaagcttatgtgaagagcaagagagacataccagttgaagcattcaggggagggttcatattgtcaaaagttgcgaacccttggtcaacaggtgagctcaagttgaaaaacaccaacgtggaggacaaccctgctgttaccttcaactacttcagccacccttatgatcttaggcgctgtgtggagggtattcgcttggcgataaaggttgtccagtcagaacacgtcacaaactacactttgtgtgagagagaaactgcagagaaaatgcttaacctcagtgtgaaggccaatatcaacctcattcccaagcgccccaatgacacaaagtcagtagaacagttttgtagagactccgtgatcactatttggcactaccatggtgggtgccatgtggggaaggtggttaactctgagcataaggttcttggtgttgatagactccgtgtggttgatggctcaacattttctgagtcaccaggaaccaaccctcaagctactgtgatgatgatgggcaggtacatgggactgaagattttaagggacaggttgggaaaattggctggtatttaaggatgtgtgtaatatgaaagttatctcaacaaaaatgaaaaaaaaaggtgtaattcgaagacatgaagaactatattagttatagcccgtgggactggaaattgatgtattttatttgttaattgtcagtgaagagtgattgttcaattatcaagtaagttttggtttttctaaacggaaaagttgttgcatctcctcaaggccgggtttaaacttaaacccatttctgtaaagacgagttttagcgtgccacagttaggtgttaaaaataatatattacttgttgttcgccttaaccaaaaa

SEQ ID NO: 53770 - DNA, 445 bp, Glycine max
  Clone ID: PAT_MRT3847_19567C.1
cacgcgtccgaccacgcgtacgctccacgacgcgtcgataaactgagctcctgtgagacatgtattcatctctgctaacgctaataatattactgatagttaccctttttatacccgctgactctgttcgtatatcacaagtcatcactagtctttactaatcatgtatcattcattcggacttttatctcttttgtcaaaatccgtattcacagactcgagccccatatactccgcgtctcatttctgagcaccacatagacaccttacacattagatgaactatctataagacttccagcttcaacaacattcgtgaacagaaaaaacggaggatggagccaccacacaacaccacgtaaaaaatcatcacaatgaggatatgatacagatcgtaagatactcatgacattcaggaactgttcacaagaaagctgcccaaatc

SEQ ID NO: 53771 - DNA, 185 bp, Glycine max
  Clone ID: PAT_MRT3847_19568C.1
gtcttcctctgtttctttttcttccccaattgcaaaacacacacatacacacactgactctgtctctctgtgacaaacacaaacacaatcaatggcgtagctcacagctgcacccccgcggtcgcaccgtaccccgcgtaggtcctcccgtactgaaccgagaatctgcgcgaggtctacactct

SEQ ID NO: 53772 - DNA, 1090 bp, Glycine max
  Clone ID: PAT_MRT3847_19569C.1
cccgcgtccgttttatcatttcctagtgttatctactatatattgatcggtcgtcgcatatttattaatagaatggcatcgcgtgggtatttctttgttcttctccatgcttttgtgtttgcggctcttgcaacctcagctttctcacaattgtcacctaactactatgatttctcgtgccccaaagctttgagcaccatcaaaagtgtcgttgaggccacggtgaagaaagagcatcgtatgggtgcatccttgctacgcttgcacttccatgattgttttgttaacggttgtgatggttcagttcttctagactccacatcctccattgacagcgaaaagaaagcaactcctaatttcaaatctgcaagaggatttgaagtgattgatgatatcaagaaggctgtggacgaagcatgtggaaaaccagttgtttcttgtgctgacatagtggctgttgccgctcgtgactccgtggttgcgttaggtggaccaacatggaaagttgaactaggaagaagagattccactacagcaagccgtaaagcagcaaatgcaaacattccagcaccaacttttaacctatctcaactaatcaccaacttcaagaaccatggtcttgatgaaaaggaccttgtgttctttctggaggccactccattggatttgcacgttgtgtttttttcaggaaccatatctacaatgactccaacaacatcgatcccaaatttgcaaaacgtctcaaacacatttgccctaaaaaaggtggtgactccaaccttgctcctttggacaaaaccggaccgaatcactttgaaattggctattactctaatttggttcaaaagaaagggcttcttcattctgatcaagaacttttcaatggtggctatactgatgcactggttagacagtacagctacggtcacgtagctttcttcgaggatttcgcgaattcgatgattaagatgggaaatactcggccccttactgggaatcaaggtgaaatccgtgttaactgcaggaaagtgaactagttcattacaaaaattatgtgatatatatacatatagaataatttcttgaggct

SEQ ID NO: 53773 - DNA, 329 bp, Glycine max
  Clone ID: PAT_MRT3847_1956C.1
gtaaaggtacatatatccagcagaatctcaatttttttatgtaaaggcttaaaataaaacaaaaaaatattaatttctatcaattggttcatttgtgtctagtactatgaagagatgggaaagccaacaccgaaggttgaagttatgagacatctcaagagcagacactacacggatgctaaggatttttcaggggaatgtgagtctgttgtcatgattgccataggacaaagtacaacaacattctcttgaccttttattttaatacgaaagtcaattaagcttctgctttgaaattcaactgttttatactaagtccctaaaatata

SEQ ID NO: 53774 - DNA, 340 bp, Glycine max
  Clone ID: PAT_MRT3847_19570C.1
gtcatcgactctatctcggtatctctctcattgtctctatgttgcattgcattgtcatcaggaggataaacccacggctgctatcacttatctctctttgtcagaaactacccattgctgagaaagacaaacgtaccatctccttcactcgtattctcgctctctcttcagaactctctgagtcacgaaccgataccacgacccactacgtggctctccgagcattcaattctgcgaataaaatggttgttcactgcatgtgtattgtcacatatatacctcccactgaacctgagacaaacttgaaattcctcaatgcttataatcgaccaatccctac

SEQ ID NO: 53775 - DNA, 363 bp, Glycine max
  Clone ID: PAT_MRT3847_19571C.1
cggctcgagtgtatctgaaacgttgtcttaaggtaagtagattcattgtagatgttcttttactgaaacaaagagaaaacgctgaaatcacctgaaactgaggctaatgaggctcgagatataaatgccctgtgttaaccaaaagaagggggcggatcacaagaagtgacaaaggctccattgaccaaatctcccgctcccgttattcgggcaagacagttcgcctctgagcctgttcaaactggactagttgttatcgactcaacgaaacgcctcggtcggtggcatggcggattaatccttggagccagactttcggcaggagctgtgccctacattacatctgaacttgattgacaggga

SEQ ID NO: 53776 - DNA, 663 bp, Glycine max
  Clone ID: PAT_MRT3847_19572C.1
agaatctttctcagaagccgaagaatatcactcattacatcttcactgattctgatatggcagtggttgatgatttagggcagattttccatgaccatcctaattttcatgtggctctgacctttaggaacaataaggctcaacctttgaattcaggattcattgcagtaaggggtaccccggaagcaattttaagggcaaagcttttcctgcaagaggtcttgaaagtttacaccacaaaatataaaaatgcttcccgcatgctgggtgatcagttagctcttgcttgggttgtgaagtcaaaacctcattttgacgccagcaggtttgccaaagcacctgctttctctgaagatattgggggtacttcagtattgttcttaccttgctctctgtacaattggactccgcctgagggtgctggtcaatttcatggcatgccattggatgttaaggttgttcattttaaaggatcaagaaaacgtctaatgctcgaatcttggaacttttattcctcatctcttgaggtttcagacatgttatgtctcattttgggaagtgggagaaccaaatatgacttttgagaattttaatcctgaaatggttcacttatcatatataagcagtagcttgtggcattaacggcttcacatgttagtacag

SEQ ID NO: 53777 - DNA, 447 bp, Glycine max
  Clone ID: PAT_MRT3847_19573C.1
ctccttttttttttttatacaaaaacatccaaactaatttggagcgtttttttaaaatatgcagtgcgttataacacaagaactgaacacatacaatgaacaattccaaccatacaaataaataatgggggtaccgaattcctaaacacacgcaaatgcaattttttttataaaaaaaatgcacataaaagcaaaacattgtgcaagatgcgacctcacaagaattttcttatgaatagaatatccaggtaacttcatgagatctatagtcgttggttatacctagcttccaggtgtacattctttttgcacatttcattagaaaggacacttggattgccaagaacccttaaacagcgagaacatgatcaaaatctgcatgagtagagggacgacttccaaaccaaattctgaaaatgcaacaccctttcaggaagataggtttta

SEQ ID NO: 53778 - DNA, 981 bp, Glycine max
  unsure (1)..(981): unsure at all n locations
  Clone ID: PAT_MRT3847_19574C.1
ccaatctgaacagatatggaagttgaaatctaatgggactctagttaatggtcattctggcatgtgtgcaacagtagaacatgtcctagctgaaggttatcctaatcggattcgatcttggattgcaactggaagaaaaggggagacctatgttgcatttttcaatctgagtaacgagaaaacaacaatatctgcaagcataatagacttggctatagtgcatccaggtagaagaaagtttatactttgttctggaaatgaaatgtggagtggaagaaccatacgaacaaataatatgttctcagcagaagtaccaggtcatggatgcgcattatttgttctccagtgcagttgaatttggcctaaaatcttgtttgaatatttattgttcatattgcaatgatgttttggtttgttttctgctaagtggtaaatccttttttaataaggaatttagtatagtaagagtggttactttacttgccattaaaagcactgtacgtgttaaaaaattactttatgacatgaaaatggatataaaggtgataaagaacaagtgtgatttgaaaacttccataaggatatatatatatatatatacttgattattgtggtagacttggctatggtgcatccaggtagaagaaagtttagactttgttctggaaatgaaatgtggagtggaagaaccatacaaacaaataatatgttctcagcagaagtacaaggtcatggatgcgcattatttgttctccagtgcagtagaatttgccctaaaatcttattcgaatatctattattcatatttcaagttgcagtgatgttttggtttgttttctgccaagtggtaaatccttttttaataaggaatcttttttttaaaggagtttagtatagtaagagtgattactttacatgccattaagcaatgtccgtgttaaaaaaattactttatgacatnnaaatgaatacaaaggtaga

SEQ ID NO: 53779 - DNA, 208 bp, Glycine max
  Clone ID: PAT_MRT3847_19575C.1
caatgtcttctgtgcaaatattttggccttggccaccattgatgtttttgcactgtatggtggaccttttcactcggctgaatcggtaacatttgatggtctagtgtccagagcttgctatgttaatgggaggcttacacatccaacaatcaatatgaactaggtaaactcactgtttgctgcaagcgggctgaccacaactgacatg

SEQ ID NO: 53780 - DNA, 200 bp, Glycine max
  Clone ID: PAT_MRT3847_19576C.1
gttgaggcgaatccgcctctagttctagtgcgtgttttatcgcgaactaaaagtggccctattcaggggcgtgcgggggtgcacactgtacattgaatcgtgagctgagtggagtgaacgagttaattcccctccaaatgtctaacaccttaactttcacagaggactaggctgcgtctgtcaatgacacttcatatgac

SEQ ID NO: 53781 - DNA, 719 bp, Glycine max
  Clone ID: PAT_MRT3847_19577C.1
catcattcttcgtttgtctaagatccgccttctctgaattgtaaaaatgtcgctcggagaaactgcttgttcatacgcagctctcatccttcatgaagatggaatcagtgtaactgtatccttttgtgtgcccttaggttttgcgttaacgaattgaggaacctgaagaagagagtgatgatgatatgggatttggcttgttcgattagggacattctcaatatgatttggttaaattttgtggttctttacctttaagtttactttatggatattgtaggttttatttttgtgctggttatttatatctgtatacgacttgattttgtagttttatgaacttcggaatgtgggtttatgtccatttgagaattcggatgggagaaattgtttactttatattctgtttcttcgttttgtttgtgtttaccattgtctcttgttgtctcacattagtatgtcttgatatggttgttgaaccgacatttgatagacaattctgatgctaaattacccccttggctggttgcatgctgtatttgatcgtagtagcaagatgatttagtcgaggttggatataccataaaccagtatcggtttctcactattattaaattaaatagattacattaggtgcttaatttggtttgagtcagtgagttggctcgatgtactgctgaaatatgctgggtacaaattaatcattgtccattgttatg

SEQ ID NO: 53782 - DNA, 490 bp, Glycine max
  Clone ID: PAT_MRT3847_19578C.1
gctgataacaaccacccttttgaaatatttttgatattcttgggtgatttagaatatgatccgagtaggataccaaatatttgatggagcatcttggttagaactcactttttttttttttttttggaagttaaatgcccgtatcacaatcaccatccaaagattacacacttttcagaatatctactgtctagaatttgaccttaagatagtatgaaatcaacctaactacaccggttgggtttgcacactacaccttcagggtttagctgatttttgcgtacccttactgatactggtggcttcaacactttcctgactccacctgagaagaaaagagccatgttgtggtcaatgatgacacctaggagtggatgagcccttcttatggctatctttaatgctccttggacttccctaagaagctacctcaaccacatttcctgccaccttcgagtggcacgtgtggaccagcgcctttttttcttcc

SEQ ID NO: 53783 - DNA, 685 bp, Glycine max
  Clone ID: PAT_MRT3847_19579C.1
gaattcacttgcggctgcagcagagaagcactcagcagtcgtcggttgtcgaagatccgccttctctgaattgtaaggatgtcgctcggagaaactgcttgttcatacgcagctctcatccttcatgacgatggcatcagtgtgactgccggacaaaatgagcaccttggttggaactgcaaaggttcaagtagatacctattgggcaagcttatttggtaaacttgctgagaagaaaaatcttggcgatttgatagccaatgcaccaagcggtggtgcaccagttgctgttgcagctgcccctgttgctgcctcaggtggtggtggtgctgctgctgccgccccagctgctgaggagaaaaagaaggtttcccgctagtgaatttgttgttcctccaattgtttttcaatcctgctttatgctagttaatgtgtatctaatatgaatctgtgtgtttctattctataggaggaacctgaagaagagagtgatgatgatatgggatttggcttgttcgattagggacattctcaatatgatttggttaaattttgtggttctttacctttaagtttactttatggatattgtaggttttatttttgtgctggttatttatatctgtataagacttgattttgtagttttatgaacttcggaatgtgggtttatgtccatttgagc

SEQ ID NO: 53784 - DNA, 240 bp, Glycine max
  Clone ID: PAT_MRT3847_1957C.1
ttttgggggttgatattaaaacacactacattgcacatagtaatgcgctttatttaagagaataaactgttacttactaattcacagacgctaaatgacacttgtacacccaaaatttgagactctgacagatctgattattttgggggagcatatgattagtggcgagagaactaaaaatttcattcttaacgccaaaaagaacacccaggaaagctaccggaaaaggatcaactctag

SEQ ID NO: 53785 - DNA, 1292 bp, Glycine max
  Clone ID: PAT_MRT3847_19580C.1
gacttgcggctgcagcagagaagcactcatcattcttcgtttgtctaagatccgccttctctgaattgtaaaaatgtcgctcggagaaactgcttgttcatacgcagctctcatccttcatgaagatggaatcagtgtaactgtatccttttgtgtgcccttaggttttgcgttaacgaattgtgagtgaatgttcgaaataatttaatttctttgttttgggttatgttttctagtgttagtttagatttaattcaattgaagaaccgagtaattggtattaaatcaaaactaaaaaaaagtttctgtgaagtaatttttattgaaaatgtggttccaatttaacctgtattttcttgttgagattcatttgtaaacaaattaaatactgagcaatgtggggttgcatttatttgtttcaggctttcggattatattttctattgatggattacatattgaatcaagtgtagtgctgggtaattgtggttaaaaaaagatgaaacgtgcatatttggtggaagtgggtgggatgattttgataacattttgtttgtaaaagtgggtctaagctaatacgtgttttttaactgggtttttttggttttcctgggagagaaatagtgggttttaaggtttagaataaatgaatttgtttggatatggcgagttgctccttaaattgtaaataggccgacaagatcagcaccttgttggaaactgcaaaggttcaagtagatacctattggccaaccttatttgctaaacttgctgagaagaaaaatcttggcgatttgatagccaatgcagcaggcggtggtgcaccagttgctgttgcagcagctgcccctgttgctgcctcaggtggtggtggtgctgctgctgccgccccagctgctgaggagaaaaagaaggaggaacctgaagaagagagtgatgatgatatgggatttggcttgttcgattagggacattctcaatatgatttggttaaattttgtggttctttacctttaagtttactttatggatattgtaggttttatttttgtgctggttatttatatctgtataagacttgattttgtagtgttatatgaacttcggaatgtgggttttatgtccatttgagaattcggatgggagaaattgtttactttatattctgtttcttcattttgtatctctttaccgttgtctcttattgtctcacattgttatggtttttttaaccgacattttatgctaaattaccacgttggcttgttggcatgtggtatttgatcgtaaaa

SEQ ID NO: 53786 - DNA, 181 bp, Glycine max
  Clone ID: PAT_MRT3847_19581C.1
aaaaagcccaaagctgtgacaccaaagggtcatctgattccaatttgagggtttttacatgttcaggatgttattattatgtttttttacaattattgcactgataccgcatttggcagacaacagccgggggacacaaacaacatcagggggacaattttgtgcctactgtatgttttct

SEQ ID NO: 53787 - DNA, 401 bp, Glycine max
  unsure (1)..(401): unsure at all n locations
  Clone ID: PAT_MRT3847_19582C.1
accagcaagcaaggagaccggaaagatttaagcggacccccccctgagcacgcacgcccacaccagcgccacacccaaacacgggagaggccacggaggcaaaccccccaaaaagcacaagccnggcaaaacaccaaagacacccacaggacccgnagccaagccaccagccacaaccccgcccagagagaagccaccagacacaaaccctcccaaggcgaagccaccagccacaaacccgcccacggagaacccaccagacacaaacccagccagggcaaagccaccagagacagacccacccgcagagcgnccaccaacagagaagcccccgggccaacaccctccaaagccaaacccaccaagnacaccaacaccgccgccggagaagggagggaaca

SEQ ID NO: 53788 - DNA, 242 bp, Glycine max
  unsure (1)..(242): unsure at all n locations
  Clone ID: PAT_MRT3847_19583C.1
gtgaganacaaaganagganataattgatctttgaaaatgcagggaggaaagananctggncagtcattcanggtaacagctgcnaacattggtgcttctgncaaggctggnatggagaanacnnagggcaagtccaggnganggcntanagaatnaacngnacgtgntccgatgcnaaaggngttggnaacccagnananagaggcaaagatgagccaggcagagctggacaagnaggcng

SEQ ID NO: 53789 - DNA, 1700 bp, Glycine max
  Clone ID: PAT_MRT3847_19584C.1
cccacgcgtccgtacggctgcgagaagacgacagaaggggaggtcgtgttgcagaggccacaacgtttttcattagaatttttcagttccaccgcattctctgaagaaacctcttgcactgtggacgcagcctccgccgcggggcattaccgccattgaagctgattcatgcttttttcaccgttcctcacaagaccaggtttgaagctattgccattggaaattaggacttcttttttgttactgaaaaattagagtagacaaaaaatgctcagacggaggctatctgttctctcaacatcaatcaccagaagctcaaattatagcaaacccagtctcggatacccatctatccaatctcatccctttcagctccctcactctcccagtgcttatcaaataattagtcctaatgcattcccggattttcaaggttttagagcttacagtcttctgagcttgaatgatctgagagataaggttcccagaaaacagccgacgaggaaggggcgtgggattgggtctggaaagggcaagactgcagggaggggtcacaagggtcagagagccagaaaaggtataaaattggggttcgaaggaggtcagacccctcttcgccgaagattacccaaacgtgggttcaagaacccatttagcctcacttttcagccaataggtttggggaaaattgcaaagtttattaatgctgggaagatagattcttctgaactgattacaatgaaaacactaaaggatgcaggggtactagggaagcaaatgaaagatggagtaagattgatggggcgtggttctgagcagatcaagtggccaattcatctagaggtatcaagggttactgttagggctaaggaagcagttgaagcagctggtgggtctgtgagaagggtgtattacaataagttgggcttgaaggcactggtgaagcctgagtggtttgaaaagaaaggaagattgctgcctaaagcagctagacctcctccaaagcaaaaggataaagttgatagcattggtcggttgcctgccccaacaaagccatttccatttttagttgaagcaagcaaggatcttccagttcagcatcttagttgaataactaacatttttggcaccagtttttaggattttgtaattctgtgtggtgcaaacgtctgactcacaagtttttcatgcagttcttgcaaatgctcaggtagttaattcaagaatgagataaatgaatttccttggggacaaatgaaagggagaatcttgtttattatttaatttcttttaaggatttgatcttcgtcactcagttgaaaagagagccttagtttcttgtgtatgtgtgcttggagtaggatcttagccccttcatgaagggaaaattgcaagaacagtctgcaatgtttaacttttctccggatatggatggtacttgtcaaatgacttggctgaattttaataaatggacgattgtttcaaaaaaaaaaaaaaaaaaaaaaaccaaaaacttgatttgaagtctatatccgtttggaggatcataatcatgctttttgattcttaacgtgttgaaaatgcttttctaacacttttaatcatcatttgtattttgctaaatagtttatgatttccttggatgtttggcttgaaagtctgctctctcctttctccattggcagcataagtgagaagaa

SEQ ID NO: 53790 - DNA, 321 bp, Glycine max
  Clone ID: PAT_MRT3847_19585C.1
ctcgagccaaatcatctctaggaagaacaagttgttgagaacgaagaaggtgaagcaaatggctgccttaatgatctctttcccagctgttaccactgtcaaccgtgccggtgccggcatggatgttccatttactggcctcaagtacatggatggttttccttccatgatgtccaacattgacattaccttcattgttagcaacggtggatgagtgcaatgtatgcttgataggtcaccatatggcaagaagaagtttgagactcttttccacctgccagaccttgatgatgcacaattggttaaagaagtattattcct

SEQ ID NO: 53791 - DNA, 259 bp, Glycine max
  Clone ID: PAT_MRT3847_19586C.1
accaaccaatttggtacaattgcaactgttgatcatcaatcataagaagttctgaactatcatcatgtttttgttcgagattttgtgcccagtgctctagcctttttgatgaatggtgaaccatatatagttatgaacttcttgttgaagacactatattttcactgttcttaaaaaagagtatatctgtttaagcttggtgaaagtgtaatgccatcttacttttatagttctttatgattctattaggaaacatata

SEQ ID NO: 53792 - DNA, 621 bp, Glycine max
  Clone ID: PAT_MRT3847_19588C.1
ctcaaaaataaactagccacttttattacaagtaatgggaaatgaaatagttatggtacaatcattgacaatgatgtaaggctgcaaaggtgattcaataatcagtatacaattctcaatttacagcgtgtttcaaaggatgtctgcagactttatcaaccaccaaaagtgcttccaacagcccaaaagacgcataaactacaacaactaacttatgaatgatgtgcaagcaaaggtgcacttaccaaaagagtagatcagttacgcggtaaaagttgaagatggtgaacacaaggacagcaaccccaactaaagtagaactgcttctccaagggtcacggaagtaaacccaccttaatgtacccattgcccacttccaatcattgttatagtgttcattgacagctttcataatttggtggtagcatgttgaatttgtcaccacatgtttgcaaagaccattaaccagagttgccaaatcttgatcacttcccagttcatggacaatagcttctttctcaaccagcaactctgcattatgtgttgtgtgaataagaaagtcaattagagaaacatatttgcaaacataaggctccttgggatagtggcactgctcaaagc

SEQ ID NO: 53793 - DNA, 880 bp, Glycine max
  Clone ID: PAT_MRT3847_19589C.1
gttctaagtgcatgtgttaacacaaatctctaatggcagaagcaccctgtcgttcttcttcgcgtaagggtaagagtaaggtcgtgaaggatcactgcttggtgataactgagtctgacgtggacgcggcacagaacctttcaggaagcaagaggagcagaagcatggatgaagaaaagggagaagaggttggtcagaggctaagtaatattataatggcgaaaatacaagagatttttgggaatgatatagatatagaggtttttccaacgaagaagcaaaggagatatcggtctcttgtgagtatttacatggtcactaggccggttaatgctggaaacgatagattaagggtgaaggcatgaaaagtgatgacaaagtaagggtaattaatatatactaatatatattaaaccctcaactatagttttaataatttttaactgggtcagtcccagatttttgttttgtagaaaagtttttctcgatcgcaacttcaacttcagttgtactctttctatatagagaaatgtttcaccagcagtagtgttgcgttttgtcgttaatccgttagatagtgcatgttgatttaatattatcgattgctgatgaagaatgatgccaaaaaaaaaaaaaaaaataaaaaaaaaaaaaaaaaaaaataataaaaaaaaaaaaaaaaaaaaataaaaaaaaaaaaaaaaaaaaccccggccgggccaaaatttgggttacctttcgccccaaaacccccatttaaactctccccttttttttttttttaaaaatttttgaaaaggggtttcaaaaaccccccccccccccgggggttttttttgggtccccaggggggcacgcccttttttggggaggccccttt

SEQ ID NO: 53794 - DNA, 697 bp, Glycine max
  Clone ID: PAT_MRT3847_1958C.1
ggaaccatctaatctcaagctctaagaagagcaactctacttttatattcacaacaaaaaagaaaaaagagagcataaaccaatggctacttcactttcagcaactgggtgtgttggttcttccttctatggaagttggggaacttcaattgttggtgaggactacaccatgctggccaagtcagtgccatcacaagttcgcatggggaagggaaagcccacgagattgcagcctatgatgaagaatgttaatgaagggaaaggtatatttgcacctcttgtggtgatcactcgcaacatcgttggcaagaagcgtttcaaccagcttagaggcaaagcaattgcattacactcccaggtgatcacggagttctgcaaatcaataggagcagatggaaaacagagacaagggctgatcaggttggccaagaagaatggagaatggcttggttttcttgcatgatagattaacatatgttcccccatattttgtaattaccatgtgagaaagtatcaagtttgaacttgatggttttcaaatgacagcagaatgtaaactctagttgtgatttttcattcttaagtaatgttctcttattttgttttgatacatgaaatattataaaccagagatgatctatatatcaacggtgatacaatgaacaaagcaatgttatttatacaccatatttttcac

SEQ ID NO: 53795 - DNA, 318 bp, Glycine max
  unsure (1)..(318): unsure at all n locations
  Clone ID: PAT_MRT3847_19590C.1
acacctcncacncnacgtcncgtcagcancncgtgcagaacccgcagcnacccnacgntctcgcattcattgntngcaanacgaanncagagttccgcccgatgacgacgtgaggggagagnantgggttcaagtagtgtcgtgggagcngagagctttgtatatnanaattttntgacgaaggaggaatgcgagtatgtaatngacntagnaaagcnaaatatgcataagtnatcagttgttgatagcgaaancggaaagagtncagacagcacagtagtacagttnnggaatttntggcaaagncgggntaaaatn

SEQ ID NO: 53796 - DNA, 600 bp, Glycine max
  unsure (1)..(600): unsure at all n locations
  Clone ID: PAT_MRT3847_19591C.1
ggctcgagtctctctctctccctctttctctgttgggtcactcacattattaaaaataaccaccctcacacttcccaacgcttccttaaccatgagccacgccggcctctggcttccgccgcagttcctcgccggagaccctgacacaaccctttcgaactccgatttcagcttcccttccgagttcccctacgagttcggattgtcttctccggagagcagcgacgacggcgaagaggacttcttcgccggcctcagtcgccgactcggtcagacctcgcttcacgaaactcgcaagcaactctcatccactgtttcggagattccaaggaaaactcagggtttggtcggttcccctcagtccacgctcgccggaataggaagctggtccggtcggagcgccgtttccggcgacggaagccccaacgggtactcgcgtgtcccttcgccctcgacgacgccgtttgacgaaaacaacgacccctgggaagtgatttacgcagccgcagttcaaatcgcaaggatgaagatgaacaacaacaaccaccgagttccagcacagtatgattttcacaataantagaaggttactcactcatc

SEQ ID NO: 53797 - DNA, 237 bp, Glycine max
  unsure (1)..(237): unsure at all n locations
  Clone ID: PAT_MRT3847_19592C.1
tcacccacccctggaacttgacttcttctttccgggggcgcttattcattgcccattaccccgcgaaaaagggttttgccgcccattccgattgggtgttcaaacgttaaaatggcccggctttcgcccctttcgccgccgccgaaaattgccaaggcttcttgcaatttnatgganattcggcccaaccgccgcggggggaagaaggccggttttggcgttattagggccgcctct

SEQ ID NO: 53798 - DNA, 408 bp, Glycine max
  Clone ID: PAT_MRT3847_19593C.1
tgacgttgacggagccaggaaggggaagtttaccttgtgttacgaggatgagtttgagagggaatgcgagacgacggtaacagaggagagagacggaagaggccgggagtggtgggagagttgggaaaccttgttgaaactgagacgaggagagaaccagaatggctggtacacttgccaggatttaacggcgcttaacggcagcgttgttaggttatgggatggtaccttcaccacacaacccagtgacaacacaagctgtgttcttgtatggtaaaatttggtaatactatagctagcagaaataatattagcttagattgtttccactgttggattactattgagagaatgtatatatggtagtaatttgctactagtcgttgtttggataaaaaaaaaaaaaaa

SEQ ID NO: 53799 - DNA, 228 bp, Glycine max
  Clone ID: PAT_MRT3847_19594C.1
aggaataactataagggctctgcttagaataaacaaggaaaaggggtcctgatattatgcttacaaaataacctgggctgaatctgatgccatgcactggtgcaagggtacggtaataataactaagtggtgtatgcgtgagggtgatgggtggcggatttacgggcgttaagctggttgggtgctggcggggggggtggggggtggtaaccggggggggtggggggg

SEQ ID NO: 53800 - DNA, 765 bp, Glycine max
  Clone ID: PAT_MRT3847_19595C.1
gctagaaggaggtcattttgggatcctgtcataaggaagttcgaggctaaactgagcaagtggaatcaaagacatatttctatggctggaaggatcacactcatcaatgctgtcttaacagcattacctcttttcttcttgtcttttttcagggccccatcagctataattcataggatttctaccatccaaagacaattcctttgggggggaaaaccagatggaaggaagattgcttggatgtcttggcgccagtgctgcactcctaagcatatgggaggattggggatcagagatatccaaagtcttaacaaggctttgctgttcaaatggaagtggatgatgttccaccaaccagaccagctttggactagaatcctgaactctaagtataatggctggaggggattagagcatggtcctagaaagcagtatttctctacttggtgggctgacttaagggccatctttcaacatcagaatgtgatcaatgctgataatcaaattaggtggaagctggggagaggcgacaaattcctgttttgggaggatccttggggagatgaaggagttcctctcagcgatcaattccctgaattattctctatttcttctcaaagggatttaacagtggcagaggtgggatcttggactgagaatgggtgggtctggaatatggtttggagaagacacttgtttgataatgaggtgcagatagcctctaaattcattgatcacatccatcaaatcagattaattaacaat

SEQ ID NO: 53801 - DNA, 423 bp, Glycine max
  Clone ID: PAT_MRT3847_19596C.1
cgcaaacaaaacaaaccacacgcgcatgaaaatagtaattaatactactaattcatttcctcaacataaaaaaaatagactttcgcggaatagccctccccctcccctctggtctggttaatttcgtttttccgtttcggagatggattcggaggatttccgatccattctggagagtgccggcgtcgacgtttgggccttcatggacgccgccatcgcggtggcctccgtcgaccaccccgacgagttaaagcgccggagagacagaatcgtggagcgcctttacgcgagttcggcgctgccgcagtgtcggaactgtgaccccggcgccggtgaaatcaggacgcagagcagtccctcggctgaggaggaaaaggacccttacggaggcttcatggacgaggagcagaagaagattctata

SEQ ID NO: 53802 - DNA, 275 bp, Glycine max
  Clone ID: PAT_MRT3847_19597C.1
cccacacgtccggttgataactaacacggataagcaaatggctaccgcaatgatcgcgtgggcagctgttacgactgccgaccgtgccgatccacgtatgcatgctccattcactggccttaagtcgatggctggctttaccaccagaaagaccaaccatgacatatcctccattgctaccaacgcagtacgagtgctctgcatgcacgagtggacaccagtactcatgaagaagtatgagactctttactaactgccagaccttgatgatccac

SEQ ID NO: 53803 - DNA, 267 bp, Glycine max
  Clone ID: PAT_MRT3847_19598C.1
ggggaaaaaaaaagcccccttttttttttttgggggcttagccttttaaaattttttagggggggggttcctttccaaaattttggttttaccctacccttttcccagggttccaaatttggcttacccttgggccccttgaaaatttttggttcaacccaaaaatttcccccccaattgcattaagggggcaaaaaactttccaaagccttttttttttttcaaagggttttccgggcctttttgggggcttccccacctcccctt

SEQ ID NO: 53804 - DNA, 495 bp, Glycine max
  Clone ID: PAT_MRT3847_19599C.1
cggttctcgtggtctcgccgtccacggcgtcaccaaattctccgatctaactccggccgagttccgccgccagttcctcggcctcaagccgctccgcttcccggcgcacgcccagaaggcgcccatcctccccaccaaggatctccccaaggatttcgattggcgagacaaaggagccgtcactaacgtcaaggaccaaggggcgtgtggttcgtgttggtctttcagtacgacgggagcgttggaaggagctcattatctggccactggtgagctcgtgagccttagcgagcaacatacttcagtctgggggagtacagaaagaaaaggactatccatacaccgggagagatggcacctgcaaatttgacaaaaccaaagttgcggctactgtatctaattacagtggggttccccttgatgaagaacaaattgctgcaaacctagtgaagaatggcccttttgcagttgctatcaatgcagtttttatgcaga

SEQ ID NO: 53805 - DNA, 538 bp, Glycine max
  Clone ID: PAT_MRT3847_1959C.1
gcatcagcaaatgtctgacgccaatcagcgggaacctatcatcactttcagttgtccccacagcccactcaaagtgatgataggttcccgctgcatcactttgggtgggctgtggggacaactgaaggaaaatgtgacattttggaatttgaaaatgttggattgaatggatgtgttggagccagtggcctggatcttggcggtttgagtgcatgttcatgttaccctccgagcttggagattagatggacgctgttctgaactttctgttaaagctcattcgttgaagggtcaacagtgtgtacattgcaggttaattgtaggagatggttatgttacaatcacaaaaggggaaagtatcagaaggttctttgagcatgctgaagaggccgaggaagaagaggatgatgattcagttgacaaggatggaaatgagcttgatggagaatgctcccgttcgcaaaagcatgcaaaaagccctgaacttgctcgagaatgtatgctagatgctgcaactgttattttcaaagaacaggtt

SEQ ID NO: 53806 - DNA, 616 bp, Glycine max
  unsure (1)..(616): unsure at all n locations
  Clone ID: PAT_MRT3847_195C.1
gtggagggtcttccgcgaaggggtgctccttaaaaagagagcagttgaggaggaaggggagcttctcccggggtgtgaggacgctgaggagagacaactctttgaagcgctgatgcttgagctagatagtgagatgggggtggaaatattgcgccactacgaggggatgtgctgagtgcatgagaagcgtgaggaagaggtggcggcgtggaatgagaaaattcaagactttttgagggggaagaaagggggggtgtggagactgagatgagttgggtgtgagaaggcgagcttacaaaataaaaaaagcgtaacaatgcccactacatgcggagaaacttcgagtgggaggccaaatatatcaacgatttcaagactctgtgggaccaagatgaaagaggtattcggcgtcttgtgagaaagagggaggaggcgatcactgaagattgccctcctcctccggagtgttatacactgcgtgcgaatgcagatgataatgaggatgaagaatttgatgaaaattatnatgatgactgggatggtgaacatgaggaggatggcaatgacggggatgatggcgaaaatgggttatttttggggatgacgacgatgacca

SEQ ID NO: 53807 - DNA, 1066 bp, Glycine max
  Clone ID: PAT_MRT3847_19600C.1
ggctcgagcatttccaacctctccaatccattcccccttttgacttccccatatggctcgctactccttcctcttggccctcctcctcctcctcttcgccgccgtgtccagcgccgccgacgacatcctgatccgtcaggtggtgccggatgccgtcggcgaagcggcggagaaggaggaggaccacctgctgaacgcggagcaccacttcgcgagcttcaaggcgaagttcgggaagaagtacgcgaccaaggaggagcacgaccgtcgcttcggcgtcttcaagtccaacctccgcagagcgaggctgcacgccaagctcgacccctccgccgtccacggcgtcaccaaattctccgatctcactccggccgagttccgccgccaattcctgggcttcaagccgctgcgcttgccggcgaacgctcagaaggcacccattctccccaccaaggatctcccaaaggatttcgattggcgagacaaaggagccgtcactaacgtcaaggaccaaggggcgtgtggttcgtgctggtctttcagtaccacgggagcgttggaaggagctcattatctggccactggtgagcttgtgagccttagtgagcaacagcttgtggattgcgaccacgtgtgtgatccagaagaatatggagcgtgtgactcgggctgtaatggtgggttgatgaacaatgcatttgagtacatacttcagtctgggggagtacagaaagaaaaggactatccatacacggggagagatggcacctgcaaatttgacaaaaccaaagttgcagctactgtatctaattacagtgtggtttcccttgatgaagatcaaattgctgcaaacctagtgaagaatggccctcttgcagttggtatcaatgcagtttttatgcagacatatataggtggcgtgtcgtgcccgtacatctgtgggaagcatttggatcatggtgttcttatagtgggttatggtgaaggtgcatatgctcccattcgttttaagaacaagccttactggatcattaagaattcttggcctcgagggccaaattcccta

SEQ ID NO: 53808 - DNA, 522 bp, Glycine max
  Clone ID: PAT_MRT3847_19601C.1
ggaaaaaggaacccctttttttaaaacttcaaaccccagctttaaaaaaaaaccaaccccccccccttttaaaaaacccttaaaacttttacctaaaaaagcttcccccaaaaaaaatcccccggggggcaaatttttcatccccctttagctaaattatcttcatgggcccccaaattattttttgccacatttttgaataaccccgggggggcccccccagggggggccccccccaaggggtttatcttcccaattcccccccccttgttattcgggttttcaaaggcggaaaggggccccccaagggcggccctcccaaagggaacaagggtgttaaaccaagcagctccccccccaaaagtttggggggggcaaaaagcaaaacttgcccccccagaaacagggaccctacctgagttctggggaaaaaaccccccaaaaaccattcggaaaaaaaacccccccttggttttggggggggggggggggaaaatgttcccaacattaaccatctttttt

SEQ ID NO: 53809 - DNA, 1895 bp, Glycine max
  Clone ID: PAT_MRT3847_19602C.1
cccacgcgttcgcccacgcgtccgctttttacttcccctatggctcgtcactccttgctcttagccctcctcctcttcgccgccgtggccaccgccgcgatggcggtggccgcgtccgacgccgacgacatcctgatccgtcaggtggtgccagatgttggcgaagccgaagaggaggacaacctgctgaacgccgagcaccacttcgcgagcttcaaggcccaagttcgccaagacctacgccaccaaggaggagcacgatcatcgcttcggcgtcttcaagtccaacctccgcagagccaggctgcacgccaagctcgacccctccgccgtccacggcgtcaccaaattctccgatctaactccggccgagttccgccgccagttcctcgggcctcaagccgctccgcttcccggcgcacgcccagaaggcgcccatcctccccaccaaggatctccccaaggatttcgattggcgagacaaaggagccgtcactaacgtcaaggaccaaggggcgtgtggttcgtgttggtctttcagtacgacgggagcgttggaaggagctcattatctggccactggtgagctcgtgagccttagcgagcaacagcttgtggattgcgatcacgtgtgtgatccagaagaatatggagcgtgtgactcaggctgtaatggtgggttgatgaacaacgcatttgagtacatacttcagtctgggggagtacagaaagaaaaggactatccatacaccgggagagatggcacctgcaaatttgacaaaaccaaagttgcggctactgtatctaattacagtgtggtttcccttgatgaagaacaaattgctgcaaacctagtaaagaatggccctcttgcagttgctatcaatgcagtttttatgcagacatatgttggtggcgtctcatgcccatacatctgtgggaagcatttggatcatggggttcttctagttggttatggtgaaggtgcatatgctcccattcgttttaagaacaaaccttactggatcattaagaattcatggggcgagagctggggagagaatggatattacaagatctgcagaggtcgaaatgtgtgtggagtagattccatggtctcaactgtagctgctatatatccatccagccattaaatacaaagatatgcctgattgtggttgtgatgtgatactggactaaggggagtttgtataaatatttatgttgtgaactttatcatttggtactggtaaaattatctccgtataggatcaggaaactgctaagaccatgttgtttatgtagtatgtaatttctgtatgtatgcttgacatatacaagtgggaaatccaaggaaatgtgtggtcctaaaaatggtgcaagataagcaactctctatggagattggcggggtggggttgtttcaaactgcaacaggggaatacttgccactgattatgtctcagttattgcataattaaactaatatacgtgccactgtcaatgttggttcttatggatgtggtagtgccatacccaaaaggataccaaaatgtttaagttgcttctgtacctttgattcgtttacctttgagtttgtgcatgtataaaaatttctatggacttaggacttcaaaatgccaaaattgcgggatccctaatttgagtgctcctctgcttagcctgtcctgttctgatagtggaatggatatatctgtttgcaagaatgtggacataaaatgtgttataagaacatgttaaaatagtagtaggaataataagagtcaatgcaaataggtctagcaagcaaaggttatctggtataggattttatcaggcttaaggaacatctgaaatgctatagtaatataagtagtccacctaagcaatgttcc

SEQ ID NO: 53810 - DNA, 251 bp, Glycine max
  Clone ID: PAT_MRT3847_19603C.1
gaaagggatttgaattttaattaccaccatacccatgacatggggaaaggggaaacagcttgacttgatctattccggggcaaaaaacatttgggaggtcaaacccctacttaaattattatgctagcaaaacccccctttaactgaacaaggccaaaggaaggaacaatcgaagttgaacaaatccaaaagatcaaagcagggggaacaaaacaaaccaagaaggaaaagtttaataaaagaaaaagagg

SEQ ID NO: 53811 - DNA, 227 bp, Glycine max
  Clone ID: PAT_MRT3847_19604C.1
tcttttgctttggatcttaatcctactgggaaacgtaggctctgctgaacttctttgttattgtgcacactgcgcatatgatgcaccctttctcggtttaagcaccatattggggacatcaatagtgacatcgatgtcttcatgtactaaacaaaatgccggcgctcagggctgcaccaaagagctatatcattccaacggccgtgatttaataatgattggacaga

SEQ ID NO: 53812 - DNA, 300 bp, Glycine max
  Clone ID: PAT_MRT3847_19605C.1
ctattatactcgatctagtaaaagcagaatgcgttcgaattacatactagtggtgaaggacgcatagcatgtgacagagcacggcgaagactgccgcgaaggactaccatgaccctcctcctgcacccgttgatcgacccaaacgaactcacaacgtggactggtacacagatcaacatatatgagctcatagcagcacatgctgtctgtttacgtacaccccgttgatccataataaggatacgacagacagagcgacaccactgatcacggagacaccggatgtcactggggcatgct

SEQ ID NO: 53813 - DNA, 361 bp, Glycine max
  Clone ID: PAT_MRT3847_19606C.1
aacacgcgtcattactgttaagccatactacatttatactgcattgacaatctcgtgtgctggtaatgagggcttgatgaacaatgctaccgcagccactgtgacagactgactactatacattcacatggcttatgcttttaaccacacattccacaatgaaccgagaagatatgtatatagctcagcaagttattagatatatgcataaaagcttatcatacatctgctattctgcatgtgaactaaccagaaggaatgtgcatctgttaaaatatgtcatcactttatggccacagcttacagctcatgacgctattggttccaataattgcttataatattaattgttgatatctta

SEQ ID NO: 53814 - DNA, 468 bp, Glycine max
  Clone ID: PAT_MRT3847_19607C.1
gttgaacgcgaactaacgcctcatgttgttggctctatctgactaggaacgatctgaattgggcttttcctctgacaatacttgtgctaaggtctaggcacacaaatactctagtgctcttgggaagagggaaagtactgtgaaaacaggtaaaatggtgcttcccaagcatgaacttgaaaccatgttcggtgaacaagaaattggattatgcataaaggaggtttgacaacaagaggcatacttgaccacttaatgagtactgaaccgtctgaagtacattaaagaaccagggaactctgtggctctccatgaaacttatctacatcgctgcaacgcagcatgatactatcaacgctataatgaggtaacacacacacaaaatatgaccaacgtatgatacactataactctggaaaaggagattatgaagaacatgaacgaatgccacagaaatactacaacaac

SEQ ID NO: 53815 - DNA, 460 bp, Glycine max
  Clone ID: PAT_MRT3847_19608C.1
aaccttgcaggcgttaataaatagaaagcaaaaaagcaaacataaaaagggtcacaatctcttccccgaaatttggccagttcaggaaaggaaattatttttgcaaaaaggaaacctgcccaaaaatcgaaacccagcccagcaccaaggggggggggggggggaaacaaattaaaagctttaaaacccccaaaaaggtgggggggaccccaaccttaaatatttattaacaaccccttttggaaaaggcacaggttctcgctctaccttaaactggggccaaaaaggtacaaaaagcttccccgattttacatcccttgaaggggttaacaagaaatagggcatcggggggaaccccatcatattttccaacaaggattttggggaagggggacccggaaatgggggaaaaaacctctgagtccaagggggccaccttggggcaggcctttacggggcc

SEQ ID NO: 53816 - DNA, 494 bp, Glycine max
  Clone ID: PAT_MRT3847_19609C.1
tggcttggaacctttgggctgatttatgtgctggattttgggctgatttatgtgcttgcatggtcgtgagaagatgatagaagggggttgaaaagcagcattaagacggtcctagccgcgcactcttctcccggtccttactctaccgccactacgctaagccttccatttgtaatcagcgaagcgcccgtaaaatagcacttacttatagaatttgcggaagaaaaatctatttaatcttatcctcacccttacaataatacaatgggggaatatttaatcgtcacgaaaatcgccccgttcttcaaggggcttacctacggccccggggtcatccatacgacggacgatttctcaatcgaaggattaagcttaatcctaaagtccgcgggaagactctagggaacacatgtcccggtcctataatacgagttcgggccgtctacggcgataaacccctctcctatcccgggtacccataacggtaagtattt

SEQ ID NO: 53817 - DNA, 179 bp, Glycine max
  Clone ID: PAT_MRT3847_1960C.1
tgcagattgagacattccaccatgcagacacagtcaccgtggaatattagattcttgatcttctcgtatggcttcatcgcttggctaccagaagtacggctgtcagtgatactcgcatagtatggcctgggaacaggtctcctgttgtgactgctttgcatggcacagatgagcaccta

SEQ ID NO: 53818 - DNA, 485 bp, Glycine max
  Clone ID: PAT_MRT3847_19610C.1
gcattcttgtgaaaccaaatctcctgtaacaaaaaaaatcctcaaagtttctgcagtttcccctctagaacaaacccacaaaccacccttaaatcaaaagattttgctttctccccaacaccaaccaacaagagcatgcataaatccactacccttgactcaaatgacacaaaagataaggctgaatttcccccagtagaaataggaaccagaggcacagttgcatcactcataatgcaagaaattgagtacttcagcagaattggttccaattcacaaaggaacaagtcccaaatcacagaggtgagttcatccattagtacaagttctacaaccacaattgtatctaaagtagaagaaagtacaaagaaaaagcgaggaagtagcaagcttttaccaagtatgtgttctatggtggatgtatcagacagtggtaggccaaatgggacctcagccttcagttacaggaacctgaagtctgacac

SEQ ID NO: 53819 - DNA, 1992 bp, Glycine max
  Clone ID: PAT_MRT3847_19611C.1
tagggtgcctctactctctgcagcttttaatttgtttgcaggcacacaaccatggctgctctctccaacgaggacgtgtaggctcacgcgtgcaaccgccagcgtctctacgacaacctcctttctctctatctctaactcggatgagtgccctctctaactccagtagtagccacggcaattccttcctcaagatgcccgccatcaagtttaccaagctcttcatcaatggagattttgttgattccatatcaggaaggacatttgagactatagaccccagaaaagaagaggtaattgcaagagttagtgagggagataaagaagacattgatattgctgttaaagcagcacgtcaggcatttgactcgggtccatggcctcgcttgccaggctctgaaagggcaaaaattatgatgaaatgggcagacctagttgatgaaaatatagaagaactagcagcattagataccattgatgctggaaagctatactatattaataaggtagcggaaattccttcagctacaaatgcgttacggtactatgcaggtgctgctgataaaattcacggtgacgtattaaaaatgaacggggatttccatgcttatacacttttggaaccaattggtgttgtgggacacataattccatggaatgcccccagcctctcatttttcatcaaggttagcccttccttagctgcaggctgtactatggtcctcaaacctgctgaacaaacacccctctctgctttgttttatgctcatctagctaagttggctggaatcccagatggtgtgcttaatatagtacctggatttggcccaactgctggcgcagcaataagctcacacatggacatagatgcggtcagttttactggttcaattgaagtagggcgtgaagtgttgcaggctgcagcttggagcaatttaaaaccggtttcacttgaattaggaggcaagtctcctctcattattttcaatgatgcggatatagacaaagcttccgagcttgctctctttggcatcatgtctaacaagggagaaatttgtgtggcaggttctcgtgtgtttgtccaggaagagatctatgatgaatttgagaagaaggttggtggagaaggcaaaatcttgggtcgttggggatccttttgatcccaaatcgcgtgcaagggcctcaggctgacaggaaccaattggagaaaatactttcatatattgagcacggaaagagagaaggagctacccttttgacaggaggtaatacagtgggcaacaaaggttactacatagaacctacaattttctccaatgtaaaggaggacatgctgatagcacgggatgaaatatttggccctgtactagcgctgatgaagtttaagaccatggaggaagcaattaaaagtgctaacaataccaagtatggcctagcagcaggaattgtaaccaagaatttggatactgcaaacactatgtcaaggtccattcgtgcaggcattgtttggatcaactgctattttaccgtagggagtgatgttccttttggagggtataagatgagcggatttggaagagatttgggattacaggcccttcacaagtacttacaagttaaatctgttgtaacacctattcataattctccttggctttgaatagttgaatgtctcctacgtgagcacaaatgtgagtcttttcatttggaataaattacactttaattccttataatgtgtgaattgtctcttgtattattatgattactttgttttattacaacgttgttaacttagatataatttttagagagaaacaacaaattatagctattaaaattcttcatcaaattaataagtgtttaagcccattggcgggcattggtgtcttgtgtgtgtgaatgttgtaaactatactatccaagacacgagtttctatcaatatcctttgtctaagcaaataaaattggggacatctttattttgcatgc

SEQ ID NO: 53820 - DNA, 589 bp, Glycine max
  Clone ID: PAT_MRT3847_19612C.1
tgtttttttttgaccaatcaattctgggattaatattgttcaccttcttgtaggcaaaacagaataaaataggggggcgcggtatgatcataccccccaaatgggttgcagcagctggtaactgctacaaccttaaagtttgatttgcaaagaatcaaaaggggggcttgctgtagcattgcaccaagtccatccttgatgagaccagatgaagaagctttttttgcgtgtgttggctgtgataagtttcgctctgtaggatcttcctcacatttggtctaggcaatccatccttggctcattgtaactttaggcaactcatccttggctcgatgtacctgtagtaatttgtctttctgcacaggaatgtctttggcatggtacaaactaatgacttgatatcctgatgcagaagacaactatgtttctgtctttgtgtgaaactgaaagcataaaactctagttacttgtgcttctaataatgtctaaacgtggtgttgtattttgtatttgtgactttgaggaacaatgtataatagaacctcgtcctgtggtctttgttagaaaaataaagccattggtgtgtttt

SEQ ID NO: 53821 - DNA, 1402 bp, Glycine max
  Clone ID: PAT_MRT3847_19613C.1
tacggctgcgagaagacgacagaaggggaagaaaaacaacatttgttttctttctgtccaagcaaattttccctcatttattctcctctcctcacaaatcacttcccttattcaataccaaatcaaattattccttctcaatcgattctcttcggccatgtttgcttacagggttttgtcccgttcctctgccaccctttctcgaagcttcacccttttctctgtttcacgaaattcccaacctttctccaccaacctctccaataacttcaattccctccttcacccatctcccaacaagctgattccagttcaaaccaattttctgaattcaatgaatccatcattgacttcgagattcggattttcttcaacggcctcacatgaacatgcaagtgaaggagcaaaggtatctgatcagtctgaacaagccgaagctgcggatcaaaccaaagaatcagatgtagagagtgaatgtgatctgtccagggatgatttgataaagcttgttgctgagaaggaacaacttttgaagttgaagcacaaggagattgagaaaatgcaggataaagttctgcgaacttatgcagagatggagaatgtcatggataggacaagacgtgaagcagagaattcgaaaaaatttgctatacagaattttgcaaagagtttactagacgttgctgataatttgggaagagcttcctcagttgtaaaggacaacttttcaaaaattgaatctcctgaagagtcttctgaagcagcacaactcctgaaaacacttctagaaggtgttgaaatgacagagaaacaacttgcagaggtactcaaaaagtttggtgtggaaaaatttgatcctacaaatgagccatttgatccacacatgcacaatgccatcttccaaatccctgatgcttcgaaggcccctggcactgttggagttgttctgaaggcaggatataagctctatgatcgtgttcttcgtccggcagaagttggtgtaactcaagaagtggaggataacaaagcagctgagtgatgatgatggtatgaagaaatgcctgagcagtggtgggttcttagtggatatcattcaatgtctttttgcaatatgcttctcctcaacattagttttgctggatggactgtattttgtcctgcacggaacggactattcttttctcctattattcggagttttcttttttcttttctttttctttttaataaaaaaattaccatatagtatgagctttattccttgggattttggtcattatagtaacatcttttgtagtgggacctctacatacccgcactcaattcaggagatctagtcccttacttcttgccaatcatatttttttaggctaaattataattatggtttttttagttttgt

SEQ ID NO: 53822 - DNA, 267 bp, Glycine max
  Clone ID: PAT_MRT3847_19614C.1
cttgaacttcttgagcagcatgaggcagggcaactgggcacaccaggccatgagtgattgatggtggtcctataatcactcgtccatttgttactgtcacttacaccaagtgggtcccactttccttcttaccctttaccaccacctcgtttccctcaacacccttcccttcctacatagtaactaacacacaccactctctctcacgtcacccatttgttccacagacgtacacactttctgcacaccacattcccagaaacgatc

SEQ ID NO: 53823 - DNA, 277 bp, Glycine max
  Clone ID: PAT_MRT3847_19615C.1
taaaacacgtgggaccacgaccacaccccgcgcacataggtactattatactctctaaaccaacaaccaaatcttctataattttctaatctttatgacacactgttcacatcctacagagcaaggtccatactttgtgaacgactacactgaaccaactacgctaatctttaccgacctagactttcacacactatataacatgtacagagccgccataacttaattcatagcaacactcctttttctttacatcaccgagttgaccattattggc

SEQ ID NO: 53824 - DNA, 654 bp, Glycine max
  Clone ID: PAT_MRT3847_19616C.1
gacccaaaaagataattgaaactgatgcttgaagtgaaaactaaagcaccaccctcctgttgcttctttctttcaggggtggaaaaggattaaggatagaggggcatatattgaagtgcccccaccatggaaaaataaaaataaaaattacagagtcaaagtagaaaagaaaagataaattttttttttttttgtgactttggaaagtggattgcttctcagctatgatatcatgcgttttcttcccgtgctgccttttctagctggtaggattctctccaacatctagctgggagtccattcagtggcaaggggaatgggccatactgaattccacacttggatcctaccacttcccacctaaacttggtgaccaaatgatggatcataatcagtgtctccagcttagcaagctcattgccggggcaggcatgcactccactaccaaatggcatgaaagtattgggctttggtgcgacctcgcaccctcaaaccttgaagggttgaacttcttaggctctggaaaatattctggattgtggtgaatatttctgaacagaggcatcgctttccacccttttggtattaggaatcccttgtattccacatcgcctctcgcttcgcggatggggtaatgcttgccattctcaaacc

SEQ ID NO: 53825 - DNA, 243 bp, Glycine max
  Clone ID: PAT_MRT3847_19617C.1
ggtttagagaaactcattttagcagatggctctcctgtcaccctttctcttgctgatggtttgaataaactttccatgttgcaatcaattgtattagatggctgccctgttacatctgaaggattacgggccattggaaatttgtgcatttcacttagggagcttagtctaagcaaatgtttgggagtgacagatgaggcactctcatttcttgtgtcaaaacacaaagatttaaggaaactt

SEQ ID NO: 53826 - DNA, 2281 bp, Glycine max
  Clone ID: PAT_MRT3847_19618C.1
cccacgcgtccgtacggctgcgagaagacgacagaagggtcatgtagcttggcaagggaattttgaagcatgggtacaggatcctttacatgtaagacctatagctcatgcaatttgggatcctcattttggtcaaccggctgtagaagcttttactcgaggaggtgctctaggcccagttaatatagcctattctggtgtttatcagtggtggtatacaatcggtttacgtactaatggggatctttatactggagctctttttctattatttctttctactatatctttaatagcgggttggttacacttgcaaccaaaatggaaaccaagcgtttcgtggtttaaaaatgccgaatcccgcctcaatcatcatttgtcaggattattcggagtcagttccttggcttggacagggcatttagtccatgtcgctattccgggatccaggggggaatacgttcgatggaataatttattaagtatattgcctcaccccgaaggattaggtccatttttcacaggtcagtggaatctttatgctcaaaaccccgattccaatagtcatatatttggtacccctcaaggagcaggaactgctattctaacacttctcgggggatttcatccgcaaactcaaagtttatggctgaccgatattgcacaccatcatttagctattgcatttctttttctagttgctggccatatgtatagaaccaacttcgggattggtcacagtataaaagatcttttagaagcacatactcctccggggggaagattggggcgtggacataagggtctttatgacacaatcaataattcaattcattttcaattaggtcttgctctagcctctttaggggttattacttccttggtatctcaacacatgtactctttacccgcttatgcatttatagcgcaagactttactactcaagctgcattatatactcatcatcaatatatagcgggcttcattatgacaggggcttgtgctcatggagctatattttttattagagattataatccagaacagaatgaagataatgtcttagcaagaatgttagaccataaagaagctatcatatcccacttaagttgggctagcctctttctggggttccatactctgggactttatgtccataatgatgtcatgcttgcttttggtactccggagaaacaaatcttgattgaacctatatttgcccaatggatacaatctgctcatggtaaaacttcctatgggttcgatatacttttatcttcaacgaacagtccggcgttcaatgcaggacgaagcatatggttgcctggttggttaaacgctgttaatgagaatagtaattctctattcttaacaatagggcctggagacttcttggttcatcatgctattgctcttggtttacatacaactacattgatcttagtaaagggtgctttggatgcgcgtggttctaagttaatgccagataaaaaagattttggttatagttttccttgcgatggcccgggacgaggcggtacttgcgatatttcggcttgggacgcattttatttggcagttttctggatgttaaataccattgggtgggttactttttattggcattggaaacacattacactatggcagggtaatgtttcacagtttaatgaatcttctacctatttgatgggatggttaagagattatctatggttgaactcttcacaacttatcaacggatataacccttttggtatgaatagtttatcagtctgggcatggatgttcttgtttggacatcttgtttgggctactggatttatgttcttaatttcctggcgcggatattggcaggaattgattgaaactttagcatgggctcatgaacgcacacctttggctaatttgattcgatggagagataaaccagtggctctttccattgtgcaagcaagattggttggactagcccacttttccgtaggttatatatttacttatgcagccttcttaattgcctcgacttcgggcaaatttggttaatttcattaattctttattattatatctggcatatcatttccttctatggggaaggaaggccatttatacatctaggatccgacttctatcattgatactaataggaaatgaaccactatggcaaggaaaagtgtgattcagagggagaagaagagacaaaaattggaacagaaatatcatttgattcgccgatccttaaaaaaagaaataagcaaagttccgtcgttaagtgat

SEQ ID NO: 53827 - DNA, 250 bp, Glycine max
  Clone ID: PAT_MRT3847_19619C.1
aaaaccaggaaaaccaatcctttggctcaaatctttgtctggacacagcagcagttaaatctgctagtcctagctctcaaggtagaattttaaagtccttagatgatagtgtagaaactgaaagctacctggagatcagggaaacattcaaatgcaccagaaatctgaaacaagctctggagaaaacatgacacctagcaaggaggaattccatctatggaacttgaaaggggagtccaatccacttttg

SEQ ID NO: 53828 - DNA, 198 bp, Glycine max
  Clone ID: PAT_MRT3847_1961C.1
aaaaaaatttcctttaattaacgacaacttttggggccggggttcaaaaaaccattgggaaagacatttgaagagagcgcattggcgaccccaaaaacaaacttgttgggcccatgatgatgctcgacccaaattccgagtttacttacccgtgcttgcaacgtaatagcttttttttaggggcacctaaattaaatt

SEQ ID NO: 53829 - DNA, 537 bp, Glycine max
  unsure (1)..(537): unsure at all n locations
  Clone ID: PAT_MRT3847_19620C.1
attgatgttcttgttcagaattctcaggntaggggagaatgttttgggaggataaccattgaagcaatggcatttcgcctgcctgtacttggaactgcagctgggggcacagtggagattgtggtgaataggacaactggtttactgcaccccgttggaaaagaaggtgtgacacctcttgcaaaaaacattgtgaatttggcaactcatgttgagaggaggctaactatgggaaagaaaggatatgagagagtgaaggagaggtttctggagccacacatggcacagagaatcgcattggttctgaaggaagtgttacggaagggtagccacaattaaaattaaccagcttaggcatttcgctgttttgaaattgtaaattctacagggcaaacataatgttttggtgagagtgaattgtataccaccatatcttatgtcatatgtaccgtatgctgtaagcaattggttgatatataggattttgatatgattatttttgaatttgagttaaaaaaaatgagtcatttcagtgat

SEQ ID NO: 53830 - DNA, 510 bp, Glycine max
  Clone ID: PAT_MRT3847_19621C.1
ggggctcgagctcgagccgaatcggctcgagcggagaaccaagactatggcattcatggggagcgtgttagaactgcatgctggggctacctctgtcaaagtggtggcatggaattgaaagaggtgcttcctaaactttcatctcaaacattacatgcattactgacttctaatgatctgtggatacccaatgaagagaaacggtttgaattggctttgcatacattcctggcaaaaagtgctaattgcaaggttgaacatcatgcgcatggaatttctggtactgagtctgcaaccagtgtccatgctgattctggtagctccaagggaaaaagtgtgactgatagctgcactagtaagaggttggaaactggcatggggaaaatgagtcttaaaactgatctagaggaccctagcacacctagtcttctagtcaagcttgcagatccatttgcagacttcaacgactgggtttctgtttccaatgaacggtttaacaagcttcatatg

SEQ ID NO: 53831 - DNA, 267 bp, Glycine max
  Clone ID: PAT_MRT3847_19622C.1
tccttccttaccatggcttctcaatctcacaacatcaaaatccacgaccactttagcgtttcccctccctcagcaacagcgacatccctctctctcaaattcttcgaccttttctggctcaggttccaccccgtggaacgcatctcttctacacgcttccaacaccccaatcagacccatccattttctattccaaaatcgttccaaagctcaaaacctctctctctcacaccctccaacactttccccctctcgccggcaagtggt

SEQ ID NO: 53832 - DNA, 270 bp, Glycine max
  Clone ID: PAT_MRT3847_19623C.1
ataatctcctggttacgatctgattataatattgcaattttcaaagcttatcagttagagtaacatcataagatgtcattgattccaagtatttacggtggagcaatgagcaactcgatcgatctaatatcaacgcgatatgagggatcacgttaaagagcttcatgtacatacgtcctctgaatgtgctgaaaagtctggaactgtgatggcacgtgtggattggaaggtgagacatgaggtacatgtggtcaaagctggtattccagg

SEQ ID NO: 53833 - DNA, 547 bp, Glycine max
  Clone ID: PAT_MRT3847_19624C.1
aaatgattggctctatcttcgcgaaggaacattcttgccaaagccccaatatcgaaagaaaaaggcttctcaatcatcagagttttctgttaggggaaacagtgtgagaggaaacacttctatggagccacctgcaatgcttatgccatgcttagctccttcaagatctgttaaagagaccattcaagaagtgaaaatggtgcaaatctggggaaatatgatgaggtactgtgagatgagaggcaaggaactattggatgctaatgtacttacagcttctgacctctatgaatggatgaagggaaagaataacaatgaagctgccatagttggtgttggcttgccttgttattcactcctacaaacacttgtcttctccatcaaagccaactcatgtggtgtattgctacttgatgactttgaaataacctacttaaacagaccaaagggataagtgttggattggttcttcaatcctgtgatggttctcaaggaacagataagggtcatcaaatttgggggaaagctgaaactgaaaatactttgg

SEQ ID NO: 53834 - DNA, 190 bp, Glycine max
  Clone ID: PAT_MRT3847_19625C.1
cggttaatattttaatttatacttgtaagaaatgattatacacaaaattatttcctgtttattgcaccattaaaaaatttggtggaaggttttcgcactttatgataatgcgggattcttgtacttggtccttaaatgatgggtaggtgccatttggtgaacccataagatgagttgcttatctgccgga

SEQ ID NO: 53835 - DNA, 650 bp, Glycine max
  Clone ID: PAT_MRT3847_19626C.1
tcttaccatactgcgattgctacgttcgacgccttgcaccaagccgatcgcgtcatcggaaccctactcggctccgtccttcccgatggaaccgtcgatatccgcaattcctatgctgttcctcacaacgaatctatcgaacaggtattcaaccggtcttggagtaacaggtggtagtgcattaattcacgagttttattctcgagaagtccccaatcccatacacttgacggttgatacaggatttacaaatggagcgggtactattaaagcatatgtgtctaacaatttatctcttggagaacggcaaattgctgcacagtttcaagaaattccattggatcttcgtatggtggaagctgagcgaattggatttgatatgctgaaggcaaccgcagttgacaaaattccctcagatttagaagggatggaagcatcaatgcaacatctgctagtcttgattgatgacatctacaaatatgttaacgatgttgtggaagggctagttgcaccagacaacaaaatcgggagatttatatcagatgctgtaggttcccttcccaaattgtccccatcagtttttgataagcttgcgaatgacagtttgccggatcacttgcttttgctgcatttatctagcattacaagaa

SEQ ID NO: 53836 - DNA, 233 bp, Glycine max
  Clone ID: PAT_MRT3847_19627C.1
atacaaagtttattttttcttttgtatgctatggaaattaggaatgaacttaaccggtaactttaatttatctttggacaggcacattattaaaaaaggcggcaccaaaagcatagtaagcttttcttgggggcgctcttgagaggggctcgaaatttcgaggcgcgtaaaacccctttgtgggggggatttgaaactgtgtcccaaacctaaaaaaaaaaaagttctttttt

SEQ ID NO: 53837 - DNA, 639 bp, Glycine max
  Clone ID: PAT_MRT3847_19628C.1
gtaaaaccctagttacagattaggcccgtgcttgtgttgtgttcggtgaagtgagtagtgaaggtgcaatcgaatcgaatctccgaagatggccgcgagcgatcgcacagtgttgcaattctcttcatcatcttcttcttcgcagagcttgtccgcgaaggtccaccctctggtcatcttcaacatctgcgattgctacgttcgacgccctgaccaagccgatcgtgtcatcggaaccctactcggctccgtccttcccgatggaaccgtcgatatccgcaattcctatgctgttcctcacaacgaatctatcgaacaggttgcgttggatatagagtaccaccacaatatgttaatatcccaccaaaaagtgaatccaaaggaaatcatagtaggatggtattcaaccggtcttggagtaacaggtggtagtgcattaattcacgagttttattctcgagaagtccccaatcccatacacttgacggttgatacaggatttacaaatggagcgggtactattaaagcatatgtgtctaacaatttatctcttggagaacggcaaattgctgcacagtttcaagaaatccattggatcttcgtatggtggaagctgagcgaattggatttgatatgctg

SEQ ID NO: 53838 - DNA, 1638 bp, Glycine max
  unsure (1)..(1638): unsure at all n locations
  Clone ID: PAT_MRT3847_19629C.1
acagattaggttgcccttgtttctgtttagggtgcttgtgttgtgttctgtgtagtgtgtagtgaaggtgcggtatcgcatcgaagcttcgaagatggccgcgagcgctcgagcggtggcgcaatgttcttcatcgtttgcacgccttgttcggtgaagtgagtagtgagtgctgaatcgaatcgaatcgattctccgaacatggcggcgagcgatcgcacagtgttgcaattctcttcatcatcttcttcttcttcgcagatcttgtccgcgaaggtccaccctctggtcatcttcaacatctgcgattgctatgttcgacgccctgaccaagccgaccgcgtcatcggaaccctactcggctccgtccttcccgacggaaccgtcgatatccgaaattcctatgctgttcctcacaacgagtctatcgaacaggttgcattggatatagagtaccaccacaatatgttaatatcccaccaaaaagtgaatccaaaggaaatcatagtaggatggtattcaaccggtcttggagtaactggtggtagtgcattaatccacgagttttattctcgagaagtgcccaatcccatacacttgactgttgatacaggatttacaaatggagcgggtacgattaaagcatacgtgtctaacaatttatctcttggagaacgtcaaattgctgcacagtttcaagaaattccattagatcttcgtatggtggaagctgagcgaattggatttgatatgctgaaggcaactgcagttgacaaaattccctcagatttagaagggatggaagcatcaatgcaacatctgctagtcttgattgatgacatctacaaatatgttgacgatgttgtggaaggacgagtggcaccagacaacaaaatcgggagatttatatcagaagctgtaggttcccttcccaaattgtccccatcagtttttgataagcttgtgaatgacagtttgcaggatcacttgcttttgctgtatttatctagtatcacaagaacgcagcttagcttggctgaaaaattgaacacagctgctcagattctgtgattcttccgcttgtttatcgccgaagtcaaatttttctgagtttcttttcttgtcttatttccagaaacgtggaatgtcagcgttttatacttcacttttacttcgcttatttttttatttatgttttgtgctggtctttgctaggtaagttcacttattgtccaaggtatgcagtgtagcgttcacttgttatttttcatgtaatctgtatttgaaagaaaatgagcaaaaagctttctctccattatctatttatttcttatttattgagataggatcgtttcagaaaaaaaaaaaaaaaaaaaaaaaaaaaagcaagattcatttaagggggtctactcatttgttacatttagtaagaaaacataattagagtattgaggaccaatgttattaatggtgggggggaacaagccaacaatggattatgggagaaacatgggagatatgaaaaaacttaggtgcaatatatggttcgtgtgactcagtaaggtctgtactctagggaatgctgaattgtattgagtattgaanatggcgcaaagaggatgagaaatttggggtgag

SEQ ID NO: 53839 - DNA, 338 bp, Glycine max
  Clone ID: PAT_MRT3847_1962C.1
tgacagaggacccaatgaacccctatcatatctctcatcatgtatatacctcaatatttggccatcacaccactctattattatcactatcatcccatccaaaattatctatcaccactaaatactccaactaacctaacctactatcccaactcttcactcatgtaaacacactgcgccaattaaccatagagtacaccagatactcataaacatatatttgcaggctcagaacatattttagaccgccctatgaatattaacgaacgagaccatcactatcgacccaaatatccacctgctcgatctcattatgcacatgtcattaaaacaatatt

SEQ ID NO: 53840 - DNA, 552 bp, Glycine max
  unsure (1)..(552): unsure at all n locations
  Clone ID: PAT_MRT3847_19630C.1
aaaaaaaccaaaatttggggcattaatttttttttgcaacctcaaagggttgggtcaaaatttttaaaaaaattttttttttttggaaaaaagcaactttaaagggccccccccttttaaaagacgggtttcccctttggcttaagcaaaagcttaaaaaaattttcttcccgaaattaaaaccggggccttgggggggcccggccttgggggcccccaagtggaaaccggggcttttgggggccccgcctttgggggcccccaagctgtaaaccgcgcccttgggggccccgcccttggggggcctgaaggggcaaccggggcccttgggtttgaaactttaaatgatgcccttgggggcccctgctttggggggccccaaattaaataggggcccttggcggcccgccctttgggggtcctaaaggggtaacggggggctccggtgtctaagctcaaattggggggctctgggaccaaaacccgaaatggggcccttgggggccctgtcttggggggccccaaaantaaaaatggagctcttgggggccc

SEQ ID NO: 53841 - DNA, 854 bp, Glycine max
  Clone ID: PAT_MRT3847_19631C.1
ggcagcaggagcaggatgtccatctctctacccgtttccatggcaaccacaatccattccttaccctattcacttctcaaactcaaaccaccctccctcaccccatctctatttcgccgcacgctctttcccaattcaactctcaacgccgcccctaaacgcaccgtttcgtccaccactttctcactgacgctcactaacggaacctgcaaaaccagacacgttgccgccaaatcatccgaagccgacaccggaaacacttccacctcgctaacccaaaccgtgtttggggtgcttcatttggcggtgtccctgggcctcattctcgcggtggacaagtttctgaagcaagcgtttgtggctgccgcgatcaagttcccgagcgcgttgtttgggatgttctgcatattctcggttctgattatcctcgactccaccgtgcccgccgccgccacggcgttcgtgagcttcttcgagcccgcgtttatgttcatacagagatggctccctctgttctatgttccctctctcgttgtcttgcctcttgctgtcaaagatattcccgctgcctctggagccaaaattggcctcattttagttggaggatggctggctacactctgtgttgctggttacacggctatcgcagttagaaaagctgtgaaaacagaattggtagatgctgagcctatgggaaagcctgctccattttcttctcttgaagtgtggacttggactgctgttctccttatatcatttgtatctgcattattttaccctacagcactgggtacaagtgccagaacatgccttccatttttgcttgcagccacagtgttaggctacaggttggc

SEQ ID NO: 53842 - DNA, 425 bp, Glycine max
  unsure (1)..(425): unsure at all n locations
  Clone ID: PAT_MRT3847_19632C.1
ccaattcttgtcatcaaattgtgatgctgtattttcccattttaggcccagattgatcaccttcaaattttgctatatgcaggctggtggttgaatttgacggatgcccttttgagattttggcctttctttcccttgtacacgttcaaaattggatttttatgtggaagggaaagagggcataattccaagccttaaacttttgtaatgcccttcatttatttgggtttttttttgttagtattggaattataaaaaatgagtaaggtttctggtgttatttcccgccaagttttgcctgcttgtggctctctttgtttcttctgcccttccctcagggcaaggtcaagacaacctgtcaagaggtataagaagctcattgctgtcattttccctcgtaacanggaggaagggccaaatgatag

SEQ ID NO: 53843 - DNA, 480 bp, Glycine max
  Clone ID: PAT_MRT3847_19633C.1
cctaactcaaccttgcaaaaccagcttgtaaggttagggttgcccccaaattatgtacactactttggccatatctttagtggatgagggactaaaccacatccctcgaggctccaattaaggcagccccctaagaggccacaactaatgtgggctaaggggacttccaacctggagcatggcacatgcaggtggcctaacaatagtctctaatatcattttagaatttacggtttgggtttaactcaatattatgaaactggcttataaggtgagggttgtcactcacttatttgcaatgtgggactaaaccacaaccctagaggctgcaattaaggcagcccccgaagaggccgctactaaggcaggctaggggagaccgcaattgaaaggcgccttttcaacagtttgcatctgcacacaagtgaatataaatggaaaatgtaaccatatgtttcaaggcttgtactccttttatgg

SEQ ID NO: 53844 - DNA, 296 bp, Glycine max
  unsure (1)..(296): unsure at all n locations
  Clone ID: PAT_MRT3847_19634C.1
aacatatcttgatagaagcgtgatgaccactcaacaaacaagaaaggcttagaaatagtagtgtatctgttgtattcttttangtgtgtnagcttttttcaagaattgttttaancttttagggtttttcccaagtctgtagtaaccttattgttgtacatttgtatcatatggtacggtagcagcttttggtttatgcaaagccagttaaaattattctgcccttcctttatcaaaacaaccagaaattaacgaataaaaatgggtttaacaaatttggtctaaaaaaaaaaaaa

SEQ ID NO: 53845 - DNA, 514 bp, Glycine max
  Clone ID: PAT_MRT3847_19635C.1
aaatatctttaacatgtcatcattaacttacttgtctttggaacataattctctctcaggatttcttccattacacattggcctagaaaacttacaagaactatacttgcttgaaaacaaactttgtggaaatattccaagtagcttatccaatgcttctaagcttaactatgtggatttgaagtttaataagttcgatggttgttttccttgttcacttgggaatttgagataccttcagtgtttggatgtggcattcaataatttaactactgatgcttccactattgaattaagcttccttagttctttgaattatcttcaaatatcagggaatccaatgcatggaagccttcccatatcaattggaaacatgtcgaatttggaacagttcatggcagatgagtgcaaaattgatggcaaaattccatcggaaattggaaatttaagcaacttgttcgcactaagtttgtaccacaatgatttgagcggaacaattccaactacaataagt

SEQ ID NO: 53846 - DNA, 640 bp, Glycine max
  unsure (1)..(640): unsure at all n locations
  Clone ID: PAT_MRT3847_19636C.1
aattcggctcgaggctttctctgcaacttccccttcgtttcctttcactgcacaacttcttccatagacttccctttctctctctctctcatctcactgttaccattttcagctcaaggagtattcttgcccaagtcctcgtttttctgatcggtaagcaatggttggtgcatcttggtttcgaactctatggaagattcgacggaaggatgatactaattctgagaaggcagtgattggagtgttagcatttgaagttgcgagcttgatgtccaagcttgttaatttgtggcagtctttaagtgataaacaggttgctaagttgagagaagagctaactaattctgtgggtatccgaaagcttgtttcagacgatgagaatttcattgtacgtttaatcagtctagagatgcttgagaatatggcacatgtggctgaatctgtggctaggctcgggaagaaatgcagtgatccaagtttgaaagattttgagaatgcctttgatgaattgatcacttttggtgttgatccatatcggtggngattcacttccaagaaaatggaaaaaaaggtaaaaaggatggaaaagtttatatcaactaacgcaactttgtatcaagagatggaactgctggctgat

SEQ ID NO: 53847 - DNA, 579 bp, Glycine max
  Clone ID: PAT_MRT3847_19637C.1
cttccatagacttccctttctctctctctctcatctcactgttaccattttcagctcaaggagtattcttgcccaagtcctcgtttttctgatcgagctatgaccaaggacttgtcttaaaaagcatcttttttaccattcttaggtaagcaatggttggtgcatcttggtttcgaactctatggaagattcgacggaaggatgatactaattctgagaaggcagtgattggagtgttagcatttgaagttgcgagcttgatgtccaagcttgttaatttgtggcagtctttaagtgataaacaggttgctaagttgagagaagagctaactaattctgtgggtatccgaaagcttgtttcagacgatgagaatttcattgtacgtttaatcagtctagagatgcttgagaatatggcacatgtggctgaatctgtggctaggctcgggaagaaatgcagtgatccaagtttgaaagattttgagaatgcctttgatgaattgatcacttttggtgttgatccatatcggtggggattcacttccaagaaatggaaaaaaggtaaaaaggatggaaaag

SEQ ID NO: 53848 - DNA, 619 bp, Glycine max
  Clone ID: PAT_MRT3847_19638C.1
tccctcgcgtccgcacagcttcttccgtatacttccctctctctcttcccactgttaccattttccactgtttgtttgttctcagctcaaggaggattcttgcccaagtcctcgtttttgtgatcgaactatgaccaagaacttgtcttaaagagcatttttttaccattcttaggtaagcaatggttggtgcatcttggtttcgaactctatggaagactcaacggaaggatgatactaattctgagaaggcagtgattggggtgttagcatttgaagttgcgagcttgatgtccaagcttgttaatttgtggcagtctttgagtgataaacaggttgctaagttgagagaagagataacaaattctctgggcatcagaaagcttgtttcagaggatgagaatttcattgtacgcttaatcagtctagagatgcttgagaatatggcacatgtggctgaatctgtggctaggtttggtaagaaatgcagtgatccagtttgaaagattttgagaatgcctttgatgattgattcacttttggtgttgatccatatccgtggggattcactttcaagaaatggaaaaaaaggtaaaaaggatggaaaagttatatcaac

SEQ ID NO: 53849 - DNA, 2383 bp, Glycine max
  Clone ID: PAT_MRT3847_19639C.1
ctcgctttctctgcaatttatccttttttgttttcctttcccttcacagcttcttccgtatacttccctctctctccccactgttaccatttctcactgtttgtttgttctcagctcaaggaggattcttgaccacttccttgtttttgcgatcggtaagcaatggttggtgcatctttgtttcgaactctatggaagactcaacggaaggatgatactaatactgagaagacagtgattggggtgtcagtatttgaagttgcgagcttgatgtccaagcttgttaatttgtggcagtctttgagtgataaacaggttgctaagttgagagaagagataacaaattctgtgggcatcagaaagcttgtttcagaggatgagaatttcattgtacgcttaatcagtctagagatgcttgagaatatggcacatgtggctgaatctgtggctaggtttggtaagaaatgcagtgatccaagtttgaaagattttgagaatgcctttgatgaattgatcacttttggtgttgatccatatcggtggggattcactttcaagaaaatggaaaaaaaggtaaaaaggatggaaaagtttatatcaactaacgcaactttgtatcaagagatggaactgctggcagatcttgagcaaactcttggaagaatgaaggcttacactgaatcagatggaccgaatttaattgactatcaaaagaaggttgcatggaaggggctggaggtgaagaacttaaaggctaattctctgtggaacagaacatatgattacacggtgcttgttttagcaagatctttatttacaatattcagtaggatcaacaatgtatttggcattcaagagattatagatattggcaaaaccaagaatcgaagtgctttgaattctgatcatgctaatggcagtcgatcggtttctgaattattgcaaccttcagtccaaccctccagcaaagttcgtgccaggttcgcttcaggacccctcggtgattttgctgctacatctcgtccaaatgctcaagtaaataaagctagcatgtttccttctgatggtgggggctcatccacaaagtcaggcctaatttcagcaaagaacagaagtctcaaatttttctcaggtcctcttggaaaaaattccaaaaagccagttccagacaatggaacaaataaaaatagcaagatttggaactttcatggtaactcaaccaccgcaaatgggaaggaaattcacacaaggcaaagtcgactgactcaagtagaacctttcaaaggatttgtgcctgcggacagttccttggttattgacagccactcaagcccaaatgatgttcatttagcaatacggaatcccaatgagcctaaagcaaaccttgttactcctggaaaagaggttcatcgccctcaatccactttcaattacctatgcaggttaaagcctccatctgaatcccttggtgctgcttctttagccctgcactatgcaaatgttatcatcatgatcgagaagttagcaacatctccatacttgattggtgttgatgcaagagatgatctgtacaacatgttaccgagacgtttgagatctgcacttaggaccaagctaaagccatattccaaggccatggctgcagcagtctacgatgcaggtctagcagatgaatggaccgaagcaatgacgggtatgttagaatggttagccccgcttgctcacaacatgctaagatggcaatccgagagaagctatgagcaacactgctttgtttccagggcaaatgttttgctggtgcaaaccctttattttgctagtcaagaaaaaacagaagcaataatcactgagcttcttgtgggtttgaattatgtgtggagatatgctaaggagctcaataaaaaagctctgctagactgtggcagtgatggagtagataatggatactctcaactgaatggataatcaattttcatgaagctcatgtgaggttcatttttcaacaaaagtgcagtccctgacaattgattgggatgaatcttttcagggacaccaaacttctggcttcttaaatctcaacgaatgtgaaacaagtgcagatggagcatgaaagaattacctacatacacttttatttagtgtcagaaatacattcttggtgagaaatgttctttttaaatatttagtattatttttctttgagaagatcctagctgatttaacttggatctctagtctcatctttgaaaagttgttttatgggtgtatatttttgaactttatatgtattaaattgtatagcttttatcaacctggatatttctatattgatatcttttgaatggtaagtcagatttaaaaatgctatatacttttggtatgt

SEQ ID NO: 53850 - DNA, 232 bp, Glycine max
  Clone ID: PAT_MRT3847_1963C.1
ggctcgagacgaaaccgtgacattgaaatccacttgtggtactatgtttatggttgctaccataaggtgcttattgtatgattgattcatcatttaccatatactatattcctaccattatttattatcattgtattgtttgagctgcgaaatcgatgagtgaggtttgaagacagaacagaggctctattatcaaagtatatgtgttgcgtgagtaaccctaactacgtgg

SEQ ID NO: 53851 - DNA, 527 bp, Glycine max
  Clone ID: PAT_MRT3847_19640C.1
caagcgtccgggctccagctctggatcattgtacctttcctctctctctgcatctgcattggcaaggcctgggcgaggtgcgacgtctctcatcttcaggcctccattatcacaccctccttccttcatcgctacctaattcaacactcttgatataccaatactgctcacctttcttctccagctcatcattcacctgctctctctcgcttctgccaacattctattcctgagtcttacatacctcaccaagctttatgctcagccagacttgctcattcacattattcctgacctgaccatccacatcattgtactatcagttctcacttcggcacttgatcctagactaagcgctgctcttcccgaataaactcttttctattgcaaggactactaccactgaattatagaagccctgctgctggtcttgacgggagcatgattagacttttcagtgactgtttctactctacttatcttggagctgctaaggatatgtgctaccacatcttccaatgatgatg

SEQ ID NO: 53852 - DNA, 346 bp, Glycine max
  Clone ID: PAT_MRT3847_19641C.1
tcattctattcagtcccattcgggggggccagtatacaattagatggaagtttctgttgcatcattttacatgctaatgtatgtacaaaaattaaaacaattattataatacagcacatcatatggtggttttgctcatttataaagtttcttctacagcttgaaaaggttttttcttacctaccacaatttaaaaaaaaaaatacttttcttgtttcacttcttaaatcattgaaaaaataatttcttttaatgacctttttcattaatccaattccttcttacataaacaagattctttcaatcatttatttcctaccttttcaaaactcggttttttttcttt

SEQ ID NO: 53853 - DNA, 361 bp, Glycine max
  Clone ID: PAT_MRT3847_19642C.1
gcgtcagtgatcaacattaacatgtgaatgcctaagccataagacgaacattcggaagcgtgtagtgaaggatgcgaaagaggctcagaaaccatctaatacgggtctgcttgatggactgaacaagggtcacgacgtcaccaagaaggaattgcctccacgcgcaggagaacaggaggggaaaacaggcgagagggagcactgtgtgagagagcagagagataggtaaagccagttagaggttaagagagcgtaaactgtctgcagaacttggaaggtacaagagaaaaaagttgcaaagagaaaactcggaacacacaaacgcgcaaagaagaagcgagaggaaaaggccagtgttctc

SEQ ID NO: 53854 - DNA, 843 bp, Glycine max
  Clone ID: PAT_MRT3847_19643C.1
ccgggaacagaccttctacttttgcgaacagctgttagacttgagttgagtcacagtcatcgtctgttcaggatcatattcacgccccctctctctctctctctctctctctctctcttactttgtgtctttctatctctctcttcaattccaaaaccctacccccatccaattccaattcaccctcaatcatgggttctgaaggttccactgtcgtcgttcctaggaacttcagattattggaagagcttgagagaggtgagaagggaattggagatggaactgttagctatggaatggatgatgctgatgatatctacatgcagtcctggactgggactattattggcccccctggtactgttcatgaagggcgtatataccagctgaaattattttgtggcaaggattatccagacaatccaccaactgttagatttcagactaggattaacatgacttgtgtcaaccaagaaactggagtggttgagccacatttgtttcctatgcttgctaattggcaaagagagtgtacaatggaagacattttgatgcaattgaagaaagaaatgatatctccacaaaatcggaagctagctcagccacctgaaggcaatgaagatggcaggattgaccaaaaggggcttgctctgagatgttgtgtcatgtaattcaggtgagaaccaaagaataataatgtaaatagttatattcaatagataatcccttttgtgggttaactcatttataaatgtaattatggaccattcgcttatgtaacatggagcaattaaagagcgactacgaatccttgaaaatttatagtcaatcgtgttgaagctg

SEQ ID NO: 53855 - DNA, 277 bp, Glycine max
  Clone ID: PAT_MRT3847_19644C.1
ctctggcgtacgattcttagggggaagagtctatcggagaatcaagttttggaccggtaacgcaaatgtcgtgtacgcatagtgatgactgtggtcccgatggggccattgacgaccgtgccctcgagagagccgtcgctgagaacggcgctactgctgtaaccataattataaacagtggcgatactggcatatccaggcgtgtcggtattgtgaccctcgactcggagcagaccctgaaagaagccttgagagcgaaaattgcaccgaccttggt

SEQ ID NO: 53856 - DNA, 416 bp, Glycine max
  Clone ID: PAT_MRT3847_19645C.1
ttggggggcaagagtgaagagcgaagagaatggctccgaagggtttaatctttttggctgcgttatgcttctcagcactggcactgagtcgttgtcttgcggatgataatggacttgttatgaacttgtacatggaatcatgccctcacgctgaagacataatcaaagaacacgtcaagcttatgtacaagcgccgcaagaacactgctttatcctggctcagaaacatcttccatgactgtgctgttcaaagatgtgatgcttaactggtgctggactccacaagaaggggcttgtctgataaggaaacatatagtatctctgggttgagaacattcaggtacattgagaccatctaagaagctttggaaaggggatgcccaggagtagtttccttggctgatattctcgttctc

SEQ ID NO: 53857 - DNA, 245 bp, Glycine max
  Clone ID: PAT_MRT3847_19646C.1
tttaattttatagaaaaggttgttggagggaaatttcaacgatttcgcacctgggactaccttttgagaacagacgatgaatactgtcatcaactttagagttattgatcttctcagaacaagagtgggtagacccgatcgaagcagggaatccgaaattatcgagagcgatcatgcctcatgataaacaattgctggataaagacagcctatacatcatcactgaatggggcgagaaaatattt

SEQ ID NO: 53858 - DNA, 423 bp, Glycine max
  Clone ID: PAT_MRT3847_19647C.1
gcacgaggcgaaatgaaattcaccacgaagaagctcctcctccttcaacaacattaaggaatttaacgtggttcataggtgccggcaatgataagcgcaaggcatgtcaggtcgacaacaacaacgacttggttctgctttgagccaacacagtacacgtgatcatggcactactagagggcacaggatttgccttcaacaacaatgttctttgagaacacatgattatgttttatggcctcgtggtggaaaaagcatgttctattttaggtgtattcaacatcaatgtgaggactgaggactaatacattaattgtgtcaccaccagtagtatccaagtgtatgaatgccattcaccccaaccaaatttttatgtgaaaaaaaaaaaaaaaaaaaaaaaaaaaaaaaaaaaaaaaaaaaaaa

SEQ ID NO: 53859 - DNA, 238 bp, Glycine max
  Clone ID: PAT_MRT3847_19648C.1
aaaattgatccgtctctatttgatgataaaattcaaagaatgcctcccaattatattccttcccttgcatgtgctgtaacatcaacatgacaccttgtcatacacacgtgatgatccatctggctccaactaaagacattcccgagaaggacttaccaaaggaaacttgtgaacttgaatagctcaaacacctgaacctaaaaactaaaaacctaaaaacttttttttgatttatttt

SEQ ID NO: 53860 - DNA, 352 bp, Glycine max
  Clone ID: PAT_MRT3847_19649C.1
atgcccattacgaactcttttaattgacattggactgatttccatgtgaataagaggcctggttctacccctcttctttgcctgaacccccacaagcgccacgcattaatactacaatgctcacaatagaactctgatgactgtcattcaatcttagttagcagaagctgctatccctatccattgctactaaggatttactcccatatgcccattaatgttcttccttgcatagaccctattggaggggtactataaatacagcggggcttacaccacatggaacaagagaagaatgaattatattcagtaacaggttcagggccatgttatcttgatataccgaaacaat

SEQ ID NO: 53861 - DNA, 428 bp, Glycine max
  Clone ID: PAT_MRT3847_1964C.1
atcgagcgattgagactagcaagcaacatagaaagtagaatccagtagcaacaatagagcaacaatggcgaccaagatattttccctccttatgctccttgctctttctgcatgtgttgctaacgcgacaattttccctcaatgctcacaagctcctatagcttcccttcttcccccataccttccatcaatgatagcttcagtatgtgaaaacccagctcttcaaccatataggcttcaacaagcaatcgcagcaagcaacatacctttatcgcccttgttgtttcaacaatcgccagccctatctttggtgcagtcattggtacaaaccatcagggcacagccgctgcagtagacacattctcatcacactgtaatacctggtattgaacaacatacatacgtgttgtattaagacatctcataca

SEQ ID NO: 53862 - DNA, 159 bp, Glycine max
  Clone ID: PAT_MRT3847_19650C.1
acacttctctcctccgtaccaacttcactgcatatcattttatagaaaactctctctacatcagattctatcatcacctccttacatctcatcaacttctctcttactccttcccttacactcaaattcacaatcatattctcttccaattttataatc

SEQ ID NO: 53863 - DNA, 632 bp, Glycine max
  unsure (1)..(632): unsure at all n locations
  Clone ID: PAT_MRT3847_19651C.1
accggnccgccttcccggtcgaccacgcgtccgattttatgcatcagtgatcacaatagaaatgatgataaggctcacagtgcatctgtggctcccatagtaattatacgaggcctaacatctgttaagggtttagaaggtgatgagcttctggatacactcgttacctatctttggcagattcatggtgtagattattatggcatgattgagactaatgaagctaagggctttaggcatgtgagaccggaagggacagcgcatgaagtagtagcaggtaaatcaggttctgaatgggaaaagaaacttgacttattttggcaaggaaggctgaatggtcaggatcccttggaagtaatgactgctaaggagaagatagatgctgcagcaatggaagtattggatccatatgttcgaaaaattagggatgaaaagtatggatggaagtatggttgtggagctatgggctgcacaaagctttttcatgctactgaatttgtgctcaaacatctgaagctcaaacacccagagcttgttgtggaacagacttccaaagtacgagaggatctctattttcaaaattacatgaatgataaagatgctcctggtggaatgcccatcatgcagcaacc

SEQ ID NO: 53864 - DNA, 567 bp, Glycine max
  unsure (1)..(567): unsure at all n locations
  Clone ID: PAT_MRT3847_19652C.1
ggctcgaggattaaaaggccggacttatggctgccatttactttcttggtagtagattgatgagctttttcgtgaaagtgtgttctgagccagcgtcactcactattttcatttttttaaaatattgtatgttacgtgcttgtacctttgagtcttcataatttccatgtttttttactttaggtttgaggtctctccaagttattagcatgtaatatctcctgccattgttgtttatcttatataaaaatcttttgcagatttatgttgttgcatgagaataattgatgaaacaaatcaccaaatcgccatggctgttaacatttttgaggaaaatgtagaaagacttccccgtgttgctgctgttggggatgtaattgtgctttgttgtgttgaggtatttctgatagtaacctctgtatgtagagatatgtttgtttgctgtggttttctggtcctttcttgactctcggtttttntttttttttatatatacatgtttctcataataaagacttaaaagagactttaacattgaccactcaatgtatatgcattcataggcag

SEQ ID NO: 53865 - DNA, 436 bp, Glycine max
  Clone ID: PAT_MRT3847_19653C.1
ggtcgacttaaataatgttcaaattttttttatttacttcacggttgttacatttaaagaaataagtgttacaatagccacaaatcacagtctatcgaatgttggcaaaactggaactatcaaaaactacaaattgcataacagagaggcccaaacaaagatcttaatagtctacatgaccttgaaaatctcttctcacacctatgctagattctgaaaccatccaaatcattgaaaatcgcaatttatggagcttccctaccctgatcggtcatcactgccttaaaccgacctatgacacatatactgtgtcaaataaccaaagaaagccaaagtaagaaccagcgaatgccaattaactctgataggggaattcattagtaggaggacacacgtgtgggatatggggtcatgcccgcatattgcaacacctttc

SEQ ID NO: 53866 - DNA, 387 bp, Glycine max
  Clone ID: PAT_MRT3847_19654C.1
acgtcagctttctgcagtcggcgcctcttcgctttctcttgaagcttacaatgtctgtgctgttgatgattcaggatggatagtgctgtgttggcatgtacgcatgtatcagttcttcccgtcagtcacgtgttggagaccttgacataccttgggaatcgagggcatgagctatgggatcctcttgtccttacttctgcctcattcttaagtcaattgcctgtagattcttcctctgtagactttgtgacattaagctggctgtcagtagactgtcctgtggatcaactgattcacgatcaacttagagtgtaaaaagtaaatggtacaactctgatgcgcaagtcatctcagtctgcagtgggtacatttaaggagatgatatct

SEQ ID NO: 53867 - DNA, 157 bp, Glycine max
  Clone ID: PAT_MRT3847_19655C.1
agtcggcggccgccctttttttttttttttacatgcaaagctaacttttgacgaaacagcccgtcctttaatgaaggaagggctactctgatcatacaacccaagaccaacatccaatttgtggcattcctatcaagttttccttccaatctttctg

SEQ ID NO: 53868 - DNA, 825 bp, Glycine max
  unsure (1)..(825): unsure at all n locations
  Clone ID: PAT_MRT3847_19656C.1
attttgttaacgtggtcccccaattttggttgttgtttgctgtcttgagctttcttcttgtacttaagattggaaagttaaagttttaaacacagtgaatcaatgaactgcttatacatacatggtttcaagtcaacattccccaaaagatggtcaaatgttcactactttcttgctaactatttatgaaggacgacgtaacctgtaactctagggcacaaataaataccatcacacattcacacatagtagagttcaattttctattttcttgtttcgtgcttcttatgagttgttttaatttttttcattgtctttatctgaaccaaattagaattaacactagaattgaacctgggttgaagcaggagattgttcttccccaagtcttgtatattcaggtttaatattttgattcagcctcatgctttctcttgtagctcaaaactgtttgatagtaattgagattttatgtgctgcatactatatcagttacaaatagtgagggcaaaggttttacaccttcatgacaaaaatctgacttacttaactactttatatcatataatctataacaatatataaaggggacatcccctttttgtgtacacatttttttatacgttnttccccctgaaatattctgcacccacctactgcaacggcaatttatgcatcaattaaaggataaaataggaaatgaaatgattaaatgggaaaaaagaacatgtacacanaaaagtaactgatgagaagaaactgctcactgtctttgtgcttcacagttttttcatcccgcanactgacacaatagttccatttttg

SEQ ID NO: 53869 - DNA, 227 bp, Glycine max
  Clone ID: PAT_MRT3847_19657C.1
aacatgggtaccttaaaccggttcaaaataaaaaggggctaaattttaaatggtgattttaccagaataccgggtccacaaaaattaattattgcgaattccgaaccggttttcatattcccaacaaacatttaaaaattagcccttttccacaccacggagaaataaaccaatttttttccaagcgcgcctttcattccaatgaaacactatggaatttttttttt

SEQ ID NO: 53870 - DNA, 1311 bp, Glycine max
  Clone ID: PAT_MRT3847_19658C.1
gtgacaaaatggtcgatgatcgtgagggggtcccaatttgcaattcaaagaagggttggttggtcccattccataggaagagatcaaagagaagagaaaagatgtttgagccgcagcagctatacactccgagcgaagacaggaggaagaagaaggttggttgattggtcccattgattccgaagagaaaagaaaagatgtttgagccacaacagctatacactcgcgcgaagaccgaggaattcgacctcgaatcaggagaaaccctctacccagggctgagcgtcggcgagaaccagctccgatggggtttcatccgcaaggtctacggcatcctctccgcgcagatcgtcctcaccaccctcgtctccgtcaccaccgttttctatactccaatcaatgacctcctcaagggcaattccaccctcctcctcatcctcctcttccttcccttcatctttttgattcccctgttgaagtaccagcagaagcatcctcataattacatcttgcttgcactcttcaccgtgtcgatcagttccaccatcggagtcacctgtgccaacaccgacgggaaaattgtgcttgaggctttgattttgacctccgctgtggtttcatctcttactggctatgccttttgggcgtccaagaagggcaaggattttagcttccttggcccaatattgttcacctccctcattactctcatcctcactggcatgatgcagatgttcttccctcttggacctactgcccatgctatctatggtgcaattggtgctatgatattctctggctacattgtgtatgacactgacaacctgatcaagcgtttcacttatgatgagtacattggagcctctgttactctttatcttgacatactcaacctcttcctttccatcttaaggatcctcagggaggcaaataattagtcatatcgaggttgagtaataccaaacaaattcaaaaagactatgttgcttctttatttttattttttgtgactatgttgcttctttatagtataccgtaggaagtattgtgaaacataataacaccgtgcttctcttgtactcccttacagcttatgatacttttgatgacatgaaatttaaagctttacaattgtatgtatgcgtgatataagaatctcccttgcgaaataaaaacagttgaaagcgggtgaagtgagttgtctatcaatttaatgctatgtatacagtagtatatggcatatcgtagcaccaccgagcattgtgtcaacaaaattgtttaggtacaatgtgtatgataactctgtaatgt

SEQ ID NO: 53871 - DNA, 301 bp, Glycine max
  Clone ID: PAT_MRT3847_19659C.1
ggagaaccagctgttggtgtcaataatagaaacggcaacaacaggagtgtcttcaagctgttggtgccaagcctaaacactcaaccaacatgggaggttcttgatgcatgagcagcaccggaaaacaaaactgttcaccttgctacccttatgaagaaaaacggtaaaattatagcataagagctgcaaataaaaatgattaaacgcttaaaagacactataaagctctctgacgcttataacatacaaattctcaaagattatttcttgaaccaaaaaccaaatgatcccttatattaca

SEQ ID NO: 53872 - DNA, 307 bp, Glycine max
  Clone ID: PAT_MRT3847_1965C.1
ttattttttttttttaattttccttttttttttttcttaaagaagggcggggctgaatttatcattttttgaaaaacgttccattggttccaaggaaaagaggacacaaccacaccctggggatttgactactataaggaaggaaagactcccacttttttaaagggaatggattctttttcttcttagggggaaaaaaagcgcctgtatagattccggacgtttccctgggctctccaatgattcttcttattcttatgaaccccttttttccccacttgaggccccttaaatttttaaccgggaa

SEQ ID NO: 53873 - DNA, 418 bp, Glycine max
  Clone ID: PAT_MRT3847_19660C.1
aaaaaaataaatattcattcatttccttttttaattgggcaaattaaagatatctatacaaattgatacataccaatacccattaacatcaaaatcttattataatgtgactataataataaagccatagccaaaagaattaatgagaaactctgataccccaagtacaacaacacatgactatgaccatggcacaaaatcgaaactagaagtctacaaaaaattagtccctgcacgaccatggtgcaacaaatagtgcgctatctgatctctggcttgctctgcagcattagagcgaacgttattctccgccaccatctcatcatcgaagatctcaaacttccagtgaggatccatttcctcatctctcatctcacaaatattatgcaaaacacagcacgccccaagaagcacgggc

SEQ ID NO: 53874 - DNA, 921 bp, Glycine max
  Clone ID: PAT_MRT3847_19661C.1
cggccgctcaagccggcgggcgggaagaatactcaagtagaatacctggcacgaattccaagatagacctgaggacgataagttccccaatacaaactctctttgtgctcaccttcaaactgcaacaacgccaaccaagtcattcttctttcttcacgtacgccaaaatcattaaattatcgaaaatggacagaaaaaaaaaaataacagcaatggaataccttgtgacaatggtgagggttagtgtgttgaatgatgctcttaagagcatgtacaatgctgagaaacgggggaagcgccaggtcatgattaggccatcctcaaaagtgattataaaattccttttggtgatgcaaaagcatgggtacattggagagtttgagtacgttgatgatcacagagctggaaaaattgttgttgaattgaatggtagactgaacaaatgtggggttattagtccgcgttttgatgttggtgtcaaagagattgaaggttggactgctaggctgctcccctcaagacagtttgggtatattgtgttgactacctcagctggcatcatggatcatgaagaagctaggagaaagaatgttggtgggaaagtgctgggtttcttttactagtttaattagtttcctttgaagattttgctctgatttcagttcttgaaactcaccggttgtaatgatcaatgtgttagacccgtagtttatcaagtatagcattagcaggagatgtttttctggtgtgctttgttttgtttgctaaaccaaattggtcgccataatttcaacggatttcttcatcgtggcagtattagctatggttgaatcagtcttgctattatggttgaataagtctaagtgggagataactcattccataaactatcattccataaactaacttatgggttgagtt

SEQ ID NO: 53875 - DNA, 200 bp, Glycine max
  Clone ID: PAT_MRT3847_19662C.1
gccaatggttcgctaaatgatcatttttctgagtgttccaaccgtctatctctccgtgtccaagatggtagctcgatgacacaatctaaatcatgggctggctagcgtatgaggacgatcacctttggcgtgacatccattgttaccaccggagtcacgactgctatgattgcccgtgacggcaccagttgggatcaaaa

SEQ ID NO: 53876 - DNA, 563 bp, Glycine max
  Clone ID: PAT_MRT3847_19663C.1
ggctcgagctcctccccacaccctcctccgaaccttcccccaaaaaaccaccccccaaaagaacctccaccaaagaccggcacacgaaggtcgacggtcgcggtcgtcgaattcgaatgccggctctctgcgccgctagggtgttccagctcacgcgtgagctgggacacaagtctgacggcgagaccatcgagtggctcctccaacaggcggagccatccgtcattgctgccaccggcaccggcactatccccgctaacttcacctccctcaacatctccctccgcagctccggctcatccatgtccgttccctcccaactacgatccagctacttccacaactcaaacttctccctccaacctagaagaagcctattcctagaaaacaccaacactccttccacaacaacaacactccttcatttccaatccaacaacaacaacgccatcttccaacccaagcacgaattgcgcgaatcttcatcactagacttgtcctcagagaacaacaacgaagagggttattttggaagaataagaagacccttggagcaagaccta

SEQ ID NO: 53877 - DNA, 154 bp, Glycine max
  Clone ID: PAT_MRT3847_19664C.1
tgttctgttgctgtttgagactgctcttctcacttgggggtgcagccttgacgagcccaacacttttggaaacaggatccacacaatgttgaaccttggactgagcattgaccaagatgcaggtgaacctgatgctcaaatgcccccaccggag

SEQ ID NO: 53878 - DNA, 470 bp, Glycine max
  Clone ID: PAT_MRT3847_19665C.1
gattccgttccaggaaggtttcccgtcatcactgtatgacgtcctcctcacttggggggggggggggggtataaagaacccgaaaagtaatgtactttcgtaggaataacacatagccaataagggtacgcggagatagagctataggaggggtgtcaaggaacagtagtagtataaaggaacggtttttataatggaggtagcttacaggggacaatactaaggtagagtatactgggcaacctcatggagattacttttatccggtagtacagagcgatggccgtatggctggtatatggaaagacggtgtgcggttttaggtgttgacggtatcattaaaattatgatcgggaatgttgttttagccactggcaagcaagtggccgagcgagtataagggagttagataaggttacttgcaagacttgggcagagctctgtctagtgggtgacagtggggcatggga

SEQ ID NO: 53879 - DNA, 465 bp, Glycine max
  Clone ID: PAT_MRT3847_19666C.1
tttttttttttttttttttttttttttttttttttttttttttatttttttttttttttttttttttttttttttttttttttttataaaaatattgtttttttttataaaaaaaaatatttaatatttgaccccaaaaaaaaaagagaaaaaaacttgaaaaaaaaaaaaaaacttatccccacctaaaaaaaagaaccccaccccccaaaaaaagggaggaggaggggccacttcgaaggggccccacaatacgtagagcttgggaggggagagaaataaaaattccggggagaaacactaatcccctccaaaaaggggggacggaaaacaccccctgagagaaaatcaaccaacccccaggagaagcaaagacaacaggcacattggggaaaaaaaaaaaccaaattggaaggaatgcacaaaccgctaacaaaaaagaaaaacacagggccccaaccctac

SEQ ID NO: 53880 - DNA, 389 bp, Glycine max
  Clone ID: PAT_MRT3847_19667C.1
acgcatgcgttcactcacgcatgagagctcatgctgatcatcatcctttcaacactactcgtgtccaggtcatttcatgactactcttccaacccttaaaaactacatatggaccatcttgtcacgatcctttcttaactgcatcaataacagcacccaaaaggggtcacaccatttgatctcatattcttcatctctcatggcgacgagcactgctaattccttcaactttgacaacacttctatgcgcgtgcaccgtcggacacgtgctccagcacgtgaggaacacgagcgtgctatactacgggaattcaacaatgatcaccgacatcggtgttaactactacgctctgagcttacccgagacgctgttagcattcgacagaatc

SEQ ID NO: 53881 - DNA, 351 bp, Glycine max
  Clone ID: PAT_MRT3847_19668C.1
cccacgcgtccgattacgcgtaattttacgctttcggcgagatacattacatggaggggtatcactaagcagctcaggataatggcgctgctgagtggatcaactttctgtactacattcctttctcacaagaactttgggtttacatactcagcaaaatcttcctttgttggctgtaaattgccgcttacaaagctgacattatcttcttgccatcgaactctaatgccggcatcatccattattcgctggctgcaagagtatactactggtacccttgtcacataaaaagacctgagcttcacgtgcatcgaaaccaaaccgcgattcaaacgcatggacatttgtaac

SEQ ID NO: 53882 - DNA, 629 bp, Glycine max
  Clone ID: PAT_MRT3847_19669C.1
atgctccgaaaatccaaacgttcaaaaaagagagtatctcatgcgatatcaaatttgatgcctcatgcttcttctcaagggcattccaaacccatggagctgccactacagccttcagagttagcacaaccatgtgctcctcctgtcgtccttgttccatcatcaattagtgtaactcaagatccagttttaccatcggatccatcatcaattcctgtaaatcaagatcctgttttaccatctgatccatcatcaattcctgttaatcaagatctggtttcaccatctgattcatcatcaattcctgcaaatcaagatccatcatcaattgctgtaaatcaagatccggtttcaccatctgattcatcatcaattcctgtaaatcaagatccagtttcaccatctgatccatcatcaagtcctatactcaagatctagtttcaccatttgatccatcattgcgcagtacattttttaatttatgatgtactaacatgatttttttagaatctttcattttcaagcatctaagtcaattgctaggcgttattgtttacttgccatgtcgagaaagtacagaaatgggaagcataagttgtggacgagtgcttttggcccttcattatcaa

SEQ ID NO: 53883 - DNA, 338 bp, Glycine max
  Clone ID: PAT_MRT3847_1966C.1
tttcgctcattacgtgcgggcgaaatcagtggagtcatgagccatatttgacgcgctggcgcacatgctggagcatcatgaaaagattctatagaaatttgcactggaagtattacaaacagaatgttttactgatgggccaactgaagcacctcctgcgacatgctgtgtgggcatatgggtgtgcatatgtgcatgatatggtagatgatacatcaccgggtagcattaccaattgatgttgagatggcagccatgtacacaaccattacctatgtgcgtgcatatgggcttaaatgtggtattttagggggtaccatttctgacactatttctca

SEQ ID NO: 53884 - DNA, 177 bp, Glycine max
  Clone ID: PAT_MRT3847_19670C.1
cccacgcatccgatattgtccaatcaatgcatcgtctatatgtaaccatttttcctttcagtaaatgtgctaaaatcataatccagtttgttaaccttgtcttctttaaatattttgttctattaaccctttttccatattaaacctgcattttctttcaaacctttttttaacttt

SEQ ID NO: 53885 - DNA, 390 bp, Glycine max
  Clone ID: PAT_MRT3847_19671C.1
atattaatcttttattagaagtgcaatgttcaaacatcattctccttcctaggtaactactttttacacttctaccttgaaagcactggagacttggaagttcttcatcctttaaatcactgtataggcaatgcattttacgattttatgctctggttaattgatgtcggttttggacattcttcaaagtaacattagaccttgattgacattttgtattttcaaaatagaaatttatgccatctgttgcatgttcagggcggctgaagtggatatcacgagaggaaactctggagatgtttccactgcagtaaggtcaaaagatgacgtaaagatgttgatgtcacagatgcatgatctctcctttatgcttgagaataatctttcaat

SEQ ID NO: 53886 - DNA, 124 bp, Glycine max
  Clone ID: PAT_MRT3847_19672C.1
tgcaatagtttacctgtactatagggacgcttgtagagctgaataaagccaatgaacttttctatctttctcataaactggtggatttatatcctagtaatcctgtatctaggtttgcagtggg

SEQ ID NO: 53887 - DNA, 987 bp, Glycine max
  Clone ID: PAT_MRT3847_19673C.1
gtttcacaagtcttgaattcaagtgttcatgtccattacgagagaaactaaaatagcagtctcattgaaattggcctggcctcgatattttgatttgttttcttttattgtttttccttgcatttctttgattcccttcacttcaccaatatatattacaccacgcgttagttactcacgtattctgcttctttctttctctcacccttggttgtttatgctttactacttgtccgtccattcattcaacttttcatattataatgaatactcgggaattcgcacacacactcactcactttgtttcttgttcttggtgtagttgaaatctgggtgatgattaatgggttttgttccccttttgtgaatttgggttgtgaatactcaatgggttccatcagagggatcaagaagaggaagaaagctgacaacaaagatggcccagatgcctctgcaacctcattcgattggtggcatcacttctccctcagaatctcaggacctttagctcgatctaaaaatatagagaaatttgagtctgttttcaagatctcaaggaagacgttcaactatatatgttctcttgtggaagaagacatgctggccagagcctcaaattttgttgatctaaatggcaatcgtttgtctttgaatgatcaagtagctgtagctctcagaaggcttagctctggtgagtcattgtcaaccattggtgaatcatttcggatgaatcagtcaactgtttcccaggtaacatggaaatttgtggaaacaatggaagaaagagggctccaccatcttagttgggcttcaactgaaatggaaatggaggagataaagtccaagtttgagaacatacggggcctttctaattgttgtggtgccgttgacagcacacacataatgatgactttgccctctgtggatgctttgaataagtgtgtgggcttgaccgtgagaagaattgtagcatggtcttgcaagcca

SEQ ID NO: 53888 - DNA, 349 bp, Glycine max
  Clone ID: PAT_MRT3847_19674C.1
tttttataaacaaagtcattagtgtacatacaatcatcattgatacaacttttcgagcttctagtggtcactcgctcttacattaaaatggaaaatttgaataaatatgaaaaagttcaacatggcattttcagatagaaaggatcgtttggaaacaatctcaacttgattcgttatcattctcatttcctgcaaaatattatagggcaagacaactttgatactttaaagagatggttgtcaaatgcttatcgtcatactattcctggcattccaaaccaaactttgttttccaattcttaaccaacaataacatcaacctcatttccaatttgttttaccttttttt

SEQ ID NO: 53889 - DNA, 824 bp, Glycine max
  Clone ID: PAT_MRT3847_19675C.1
cccacgcgtccgctaatcagaaaaaaaaaaccctagtaatgccgccgatggggaggaggcgaaaggtagcacccaaatcttctctatccaccgagccacctctcaagcagcaacaaccaaaacccgaaaatccccctcaagaatacgaagaagtcgaagaggaagttgaggaagaagaggtagagtgcgagaagacgacagaaggggaaaaggaagaggagagaaagatggagaagcaacaacaacaagcaccatctaaggaaacaaaggcacagagtgatgaatcagttaaagaaagcagcactgaagggcttccaatggaggatagtccctatgtgaaatacaaggatttggaggattataagcgtcagggttatggtacacaaggtcatcaagaaccaaagacaggtcgtggagctggagccactgaagcacccactctctctggtgctgcagtttcatctgatgcacaagtcgctgccactgatgccattaacagtaaaggagtcccttaattattcacacttcctagaatagatcgttcctttgctaataagaaatcgttttcttaatttggggtggcgttttttaaatgtgtgaacatctcagtaatttgtattattattacttacacgtttgaagtttgcatttagcatattgtactacttttaatttctatacaacacgttttggatgttgtcatattgtactactttttctatacaacacgttttggatgttgtcatgttttggtaagattatctcaggataggattctcttgtattttgtgatatataccatggatggaaatgatccctttttc

SEQ ID NO: 53890 - DNA, 318 bp, Glycine max
  Clone ID: PAT_MRT3847_19676C.1
ccaaaaaacacaaagggaacgggaaaaaatcgtaattacaaggccacccctcacacccacaaggctcctgggcaggggaaggtcatgctccaaaagttcaacaagaaaaagctgagagaatcatttcctagctgggccagtggaagaggaaaaagaagccgcacctaacatggaggcccccgaaaacaggcaggataatcccctcaacaaacgaagagaaaacccggcccagctgagccaccaaattcccatcccaaaaattgggggcgaatggcatattctcaaacttcgcatcaaaaaaaattagggcccggaggg

SEQ ID NO: 53891 - DNA, 245 bp, Glycine max
  Clone ID: PAT_MRT3847_19677C.1
cccctactgctctctctattcctctacctctatctccaaattctccctaattctcacgctccggggtaggttccgacggccgctactccctatccaccgatcatccatactactaccctcatctcccttttctcacaatacagacaagatcaaatatttatcctaaacactcactattatcgttctcaatcactgcatcatgcagcgctgttcatactaagattctattgcgaccaatcacaata

SEQ ID NO: 53892 - DNA, 250 bp, Glycine max
  Clone ID: PAT_MRT3847_19678C.1
cttatacactcttctcctctatctaacaacacccaacaaaaataaaagatagaaaagacttggttctcaatttgccgaaataaaaataggggcaaacattctagcgagagtgtgcacaaaatatggtcgtccatgatatgactctgtgcatcatcggcacctatggaggttcctcttcttctcgtttctccaatgcttatcccaaaaggggcttcatggaggggagacatagccgggattgatatgatga

SEQ ID NO: 53893 - DNA, 494 bp, Glycine max
  unsure (1)..(494): unsure at all n locations
  Clone ID: PAT_MRT3847_19679C.1
tcggaaattcaatctcagaagcaatcgagaactgagaacacaacaatctctcatctctctctccctctctctgtgacatattgatatggctgcttctgcttcaaactcaacccttcactcacccaccactcccaacaccaccttcgtccaagccgacccttccaacttccgcgccgtcgttcagaaactcaccggcgcctccgacgacccctccgcccctaaactccccctcactctcccctcgcgcctcgcggcggcgcagtcccaccaccgccccgccgtcggcggcgaggtgatcggcccaaagaagccgaacttcaagctccacgagcgtcgcaacgccgccgcgaagaagctggacctccccatcgacagagccatgagcatgatgatgatgacgagccctacgtcctcggtggttcgaaacagaacaccaacaacgttggagagcatgaacatgatgatgatgatgatggngctcgccgtttcccact

SEQ ID NO: 53894 - DNA, 327 bp, Glycine max
  Clone ID: PAT_MRT3847_1967C.1
cggatttttacttcgcacacacgtgcacatcactttcacatggatgtggtcatgcgtcctacggatcaaaacattaataccgcatctgctatatagcagggacgcgttttccgttgtccgcggccctcgtttattggtggggcttgtaccacactaagatgatggaaatggctggctacctggcctcacttggggcagcctgaccattggacatgcgggggggaaagtgtgcacagaaccggattcctctggaataaagtggttggcccgaactcgagtgcagtgctcaagcatggcctcatggggaagtcaacctgtgctggaaca

SEQ ID NO: 53895 - DNA, 194 bp, Glycine max
  unsure (1)..(194): unsure at all n locations
  Clone ID: PAT_MRT3847_19680C.1
ctcatcantcatctatggctanctntccctcccctccttcaccatacttctngttctnacaattncgntcttccangntnctanaatgttttactatgctggaagtgaagactactatncaggagccncacntcctccnagcttgttntctttgnagacnaccactaggcgnanatcgtgacatctnnangtac

SEQ ID NO: 53896 - DNA, 2247 bp, Glycine max
  Clone ID: PAT_MRT3847_19681C.1
ggctcgaggaaaagaataatttttaaggaatctggaattgcaggttacagaactaccactttggaaagaaatggattcaacccagataaaggacaacgccagggagctcagcagaatgaattatccttcatggctcaaggtaggaacatacatgattcacagagaatgtcagagaagaatattcaagttacaaataagaaggttcaagagattaaggatcaagttattttagccaaagcatacttgaaaattgcaccaccaagcagcaatttacgcttgagggatttggagcagctaacgagagagatggaattagcagttggagaagccacccaggattcggatctgtcaacgagtgctttgcagaaaatgagacacatggaggcttccctgtctaaagtctatcgtgctttccagactgctctgctgtgggtgctaagcttcatacaatgcttgcgtaggctgaaattcggctcgaggcaagtccgttctcagagacatcaagcaacatatcttgttcatcttgctgcaaggactgccccaaaaggcctacactgtctttctatgcggttgactgcagaatactttgccttgaggcctgaggagagaaagcttccaaatgaaaataaaatttactcatccaaacctttatcattatgctgtcttctctgacaatgttctggcatgtgctgcggttgttaattccactgtctctaatgccaagaaaaaggagaaacttgttttccatgtagtgaccaattcactcaactttcctgcaatctggatgtggttcttattaaaccctcctggcaaagccacagtccacatacaaagcatagagaactttgaatggttgcccatgtacaatacattcaacaaacataattctagtgatccaagatatacttctgagttgaactacctgcgtttctacctgccagatatcttccctactctaaataagattctgctctttgatcacgatgtggtggtgcaacaagatctcagtggactatggaatgccaatttgaaaggaaaagtaattgcagcagtgggcacctgtcagaaaggtggaacctcatttcataggagggatatgctcataaacttctcagatccattcattgcagagaggtttgatgccaatgcttgcacatgggcatttgggatgaacttgtttgatttacaacagtggaggagacataatttaaccgctctctatcacagatatttgcaaatgggttccaagaggccgttgtggaacattggaagtctgcctttaggctggctcactttctataacaagactaaggttttggacagacggtggcacattcttggccttggttatgactcaggtgtcgataaaaacgagattgaaggggctgccgttatacactacgatggaattaggaaaccatggttggacattgcaatgggaagatacagaagttattggaccaaatatatgaactttgacctccctattttgcaacgttgcaatctccaggcgtagcccaaaattcaaatattattactctacctggctggttttatttgattaatttgttggcacattaattgcctgcttcagtcgattctttattgttctttggcgattcttcttgtaaagcccttcatagatgcatagaatttcctacatatatctttttagaagcttagctaatttgtagtgacattcagatgaaataagactcgcataggtattttagctgcttggagaaaccattatttgttgtgtacataattcattcccgtgctctcttaggtcgtgctgcctctgattactatcaatttacaccaattgctagcggactggaaattaaagttgaatgtgatttaattgaactgttgtctatcagaattatttgcaaatgggtttgtggaacattggaagtctacctttaggctggctgactttctataacaagacagagttgttggatagacagtggcatgttcttggccttggttatagttcgaatgtcgatcgaaatgagattgagcaggctgccgttatacactatgatgggcttaggaagccgtggctggatattgcaatgggcagatataaaagttattggaccaaatttttgaattttgacaacatttttttgcaacagtgcaatctccaggcatagttcaaaattcaaagttccctctacctgacatgaccgggattctgcaattgtttaaagttctccatatctctgacctccccaaaat

SEQ ID NO: 53897 - DNA, 203 bp, Glycine max
  Clone ID: PAT_MRT3847_19682C.1
ccggctcgaccccgcgtccgagttttggtttttttttaaaaaaaatcgattatcaaaccgggaaaaagaaaaaggaatggttaaaattatggaagccgggccaattacatggcagagacatgacccggcatggaaacatgttcagatgtttaagaatggggacaaggagcagctgaagtgcatatattggctgaagatagttt

SEQ ID NO: 53898 - DNA, 240 bp, Glycine max
  Clone ID: PAT_MRT3847_19683C.1
agaaaacctaagcttagatttagaaacaaagaaatgaagaaaggaaagatttgatcgttgaaaatgcagggaggaaagaatgcgggagagtcaattaaggaaacagctacaaacattggtgcttctcccaaggctggcatggagaagaccaaggccatctgtccaagagacggcagaaagattgacagcacgtgatccggtgcaaacggagttggcaacccaaaagacataggcaaagat

SEQ ID NO: 53899 - DNA, 1131 bp, Glycine max
  Clone ID: PAT_MRT3847_19684C.1
tccgcatccgctagctcgcgcaggcaccagcaggtcagctccaagggtttcttttgttcttttctccttatccatccagatcccttaccaataatatcctattgttttgctttgttcggaaacaaaaccctaattttgggatccgtccgcacaggtgagtttgttgtgatttgaatggagggaagtggaggtggcggtgcggcggtggttcaccttctgcacctgtgaagcaatacttgcaggaattctcgaagctttttcagtactatctggataaatccactccccatgccccctacagatggattgggactttcgtgattgcatccatctacgttttgcgtgttgtttatgtgcaggggttttacattgtctcctacggcctcggaatctaccttctcaatctcttgattggctttctctcccctttggttgatccagaactcgatccctccaacgcccctatgcttcctaccaaaggctccgatgagttcaaacccttcattcgccgcctccctgagttcaagttctggtattctttcaccaaggctctctgcatagcgtttgtgatgacctttttttccatgtttgatgttcctgtcttttggcctatactactctgttactgggttgttctctttgtccttacaatgaggcgccaagttgcacacatgatgaaatacaaatatatccccttcaacttggggaagcagaagtatagcggtaagaagtcttctgcaagtagcagtggctctcgtgcagactgaaacttgattcttatgatttgaagatctactaagttaggttttgtgaacattcaggctagttaattttcccccttttttaatgaaagaaattgtattctgggcattatggatgccaatatgcactatacattatgcagttacagaaatacgtgctaatattggtagtgagtttcattgtcggtacacatgtattgattggatttccttgtaaatctcagcttgtattgtgcatttgtgatgctgtaatttttccatgcctggtggcttctacttcaatattaaggcaaagttcatcttataaaaaaaaaaaaataaaaaaatataaaaaaatatataataaatttattaggggcggccgttctaa

SEQ ID NO: 53900 - DNA, 815 bp, Glycine max
  Clone ID: PAT_MRT3847_19685C.1
aaacactttttttattgccacgtcacttatgataattattcacttcgttttgggaattaaaacgatggagtgagccaattggtctcaaaatctctcggcttttgcttcaattcagaccacacgtaaatgacacagaggggacaataatttattttttgttatttcttttttaattttaggttaatattagactcttaaagtctcataactgaacagttcaatgcagaaaacttctggaaatattataggccattttcttggaggtttatattattatctaagaagatgcatgtttgccattttatctgtgggtcctgtgccaagtcatattgctttcatcatggatgggaatcgaaggtatgcaaagaagagaaacatggaagaaggtgatggccataaggctggatttactgctctcatgtccatccttagatactgttatgaattgggagtgaagtatgtcactgtctatgcattcagcattgataacttcaaaaggaagcctaacgaggttcagtccttgatggaattgatgcgggaaaagattgaagagttacttcaacaagaaagtcttatcaatgaatacggtgttcgattacatttcattggagacttgcaactattgactgagcctgtcagggcttctgtggaaaaagcaatgagagttactgctcacaacaaccagagagttcttttgatttgcgtagcctatacttctcgtcacgagattgtgcatgccgttcaagaatgctgcaaggaaaaatggaatgaagttcaagcatcaaaagaagcaaagcttacaaatggtgcatttg

SEQ ID NO: 53901 - DNA, 1153 bp, Glycine max
  Clone ID: PAT_MRT3847_19686C.1
cccacgcgtccgcaagattattatgaaaaaaatatagttttcataagaaaaaagggctagcaatttatttggaggccatgagaaattttaacccaccatcacttaaaatctaattaattttgtttttagttttaatctagcctgggaagggtatagatggtgaggctgagctgaacgcagtaagcactaaggagtagcgagtattggctgatacttgcaccctcttaacaataacatgagacagagaaagggttgacggaaaggaaaaccaaatcaaacccaacccaccttgtccgatctgccaccaggtgtggttgttgtgatttgaatggaggcaagtggaggtggcggtggcggtgcttcaccgtctgcaccagtgaagcaatatctgcacgatttctcgaagctgtttcagtactatctggataaatccactccacattccacgtacagatggattgggacttttgtgatagcatccatctacgttttacgcgttgtttatgtgcaggggttttacattgtctcttatggcctcggaatctaccttctgaatctcttgattggttttctctcccctttggtcgatccagagctcgatccctccgattcccctttgcttcccaccaaaggctccgatgagttcaaacccttcattcgccgcctccccgagttcaagttctggtattctttcacgaaggctctctgcatagcatttgtgatgacttttttttccctgtttgatgttcctgtcttttggcctatattactctgttactggtttgttctctttgtccttacaatgagacgccaagttgcacacatgatgaaatacaaatatatccccttcaacttggggaagcagaagtatagcggtaagaaatcttctgcaagtagcagtggctctcgtgcagactgaaacttgcttctcacgattcaaagatctacttagttaggttttgtgaacattcagggtagttaattccccccctttctatgaaagaatttgtattcatggtattatggatgccagtatgcattatgcagttacagaaaatcttaatgtccactcgttttattatacatgaagaattggtgattgatagtgaatctcattgtcggtacacatgttattgattggatttttcttgta

SEQ ID NO: 53902 - DNA, 609 bp, Glycine max
  Clone ID: PAT_MRT3847_19687C.1
ggagcatgtattgtagattgtagatccatccgcatccgctagctcgcgcaggcaccagcaggtgaggttattgtgatttgaatggagggaagtggaggtggcggtgcttcaccgtctgcaccgttgaagcaatacttacaggaattctcgaagctgtttcagtactatctggataaatccactccccatcccccctacaggtggattgggactttcgtcattgcatccatctacgttttgcgtgttgtttatgtgcaggggttttacattgtctcttatggcctcggaatctacctcctcaatctcttgattggctttctctcccctttggttgatccagaactcgatccctccaacgcccctatgcttcctaccaaaggctccgatgagttcaaacccttcattcgccgtctccctgagttcaagttctggtattctttcaccaaggctctctgcatagcgtttgtgatgacctttttttccatgtttgatgttcctgtcttttggcctatactactctgttactgggttgttctctttgtccttacaatgaggcgccaagttgcacacatgatgaaatacaaatatatccccttcaacttggggaag

SEQ ID NO: 53903 - DNA, 296 bp, Glycine max
  Clone ID: PAT_MRT3847_19688C.1
ataagatttaaagttttgtgaggttcattatgaagaaaatggacaagcttaattgtgaagttggaatcaacccatactccatgtaatggactggttcggccactagagaacgtggtaaaggcaacgatgtcctgtgtggcgattatgctagattgatggtttgatgaccaatcagttatgagcagaatggcatatacgataaacatgcctttgtggtggcgatgaaaaaatgatgcatgagaggacacacacgctgacggcttgcctgtcaaggatggtagttagtaaaaaagatg

SEQ ID NO: 53904 - DNA, 1415 bp, Glycine max
  Clone ID: PAT_MRT3847_19689C.1
cgatccattcgtatccgctagctcgcgcaggcaccagtatccctcggaaaggtatcaggcgtgcctcatattattagagagcttccacttccaatagttccattccagctcttaacaattacatgagacagagaaagggttgacggacagagaacccaccttttgttgtattgcagatccatccgctccgataccctccctcgcacaggcatcaggtgagtttgttgtgatttgaatggagggaagtggaggtggcggtggcagtggcggtggttcaccttctgcacctgtgaagcaatacttgcaggaattctcgaagctttttcagtactatctggataaatccactccccatgccctctacagatggattgggactttcgtgattgcatccatctacgttctgcgtgttgtttatttgcaggggttttacattgtctcctacggcctcggaatctaccttctcaatctcttgattggctttctctcccctttggttgatccagagctcgatccctccaacgcccctatgcttccaaccaaaggctccgatgagttcaaacccttcattcgccgcctccctgagttcaagttctggtattctttcactaaggctctctgcatagcgtttgtgatgacctttttttccatgtttgatgttcctgtcttttggcctatattactctgttactgggttgttctctttgtccttacaatgaggcgtcaagttgcacacatgatgaaatacaaatatatccccttcaacttggggaagcagaagtatagtggtaagaaatcttctgcaagtagcagtggctctcgtgcagactgaaacttggttcttatgatttgaagatctactaagttaggttttgtgaacattcaggctagttaattttccccctttttttaatgaaagaatttgtattcttggtattatggatgccagtatgcagttacagaaaatcttaatggtccactgttcatgttatacatgaatacgtgctaatattggtagaatttcgttgtcggtacacgtattgattggatttttcttgtaaatcttagcttgtattgtgaatttgtgatgctgtaatttttccatgcctggtggcttctacctcaatattaaggcaaagttcatctagaaaataaaaatgacggaaaacttgtaaatgactgcaacgtcccatttccataactttgattccgaaccttgtaagggtgatggagtggttgaagatgagaagagaagggtggtgaaagcgtggagggtctgccttggcgaagaaggtgtgagaagagaaggcgcgtggaatagcgaaattggttggctttggtggatacgatggatgccattagaggaattctgtgaaaaccttaaccttaaaccttcacagacaaaggcggacgaa

SEQ ID NO: 53905 - DNA, 363 bp, Glycine max
  Clone ID: PAT_MRT3847_1968C.1
ggacaaagaaaagctcatccttgagttaaaaaatggcaagcaaataattacatggctctctaaatccccatacttggctggcaaggccagaaaagctgggcccttctgccggatccaggtttacgggcgcgcatgaggaacaccgtaacctttcaagtgtgctaccgaaagccaatggtacggcccagatcgaacaacgtactagggggcaaactctggcgagcccccatcctacctaactggtgagttaccccacttctaccggtgggacactgatggaataggcgcaaacccataaaccttccccaaaaaccccgaacttgaagggatacagtgcaggcccctcatgctcggaatcaaggg

SEQ ID NO: 53906 - DNA, 1072 bp, Glycine max
  Clone ID: PAT_MRT3847_19690C.1
ccacgcgtccgcaaacagaaacacacaacactcggtttcggttcatgctcgaagaggtcctctcgattcagatcatccacaacacatcacaacagaaacttcctctggcaaatctaccataacccacgtcaaatcctcacgaatctcaccgacccattccctattatcatccatctccaccgatcgctaccattaccaacagcagcttcatccattctccacgcacgcttcttccttttctttctcacaccgcgcgttcgtgttcttaatgcagaccctgattgcaacgaaatggacgtaaatttgggaggtgcaggcgcggtgacagcatagcatagcatgcagcagcagcagcagggagtgagcgtgcgaggagggaaggaggagcagcagcatgtcaaatcaggtggtgaaagtgcgaagggacacgattgcagcatgcatgacttgcccactctgcggcaagctcttcagagaagccacaaccatatccgaatgtctccacacgttttgcaggaagtgcatttatgataaaattacggatgaggagatagaatgttgtccaatatgcaacattgatttggggtgtgttccactcgagaaactgaggccagaccacagtttgcaagatgtaagggccaaagttttccccttaaaggggagaaaggtgaaggcacctgaagttgtcacctcagtaccattaccagctaggagaaaggagagatctctttcatcttttgtggtcagcactccaagggtatctacacaagcagctatgacaggaagaagaacaaaacctacaagaaaggctagtggtctgcgatccactagtttttccattgaaaagcccattaaaaaagaggaagatttgctggaagatcgtcctgatagttcaagttcgcctgacacttcatataagtttgctcagaattctggacagagtatctctccttgtgagggtagtcaatccataccatataaaggatcagagaatggtgccgaaccatgggatgcaaaattggatctttggaaaccttagaatttcttaatagaagttgcaagtaggagtaaa

SEQ ID NO: 53907 - DNA, 883 bp, Glycine max
  Clone ID: PAT_MRT3847_19691C.1
ggtacattgcaagcaacaacaacaacaaccactccatcatcatcaattcatcacaatggaacacaccaattacaatgatgttcattgtgaagaaactatagtaaacgttcctttctcatgggaacacaaacctggtctctctaaagtgactacacatggccaaactggcactagcatggtgcttcagcctcctccatgttcatcatcaggatctggaagtgatcatagatataaagtggaggaggagtctcagattcttcgagccgtgcaaacctcactcagaatcagctcttttcggatggagagtcagaaggaagaagacccttttgttgaagcttacaagaaatgcactcaaagcccctttatacatgaacagagtgatagggtccaaaagaacattagatcttggcctaccataaggaagtacgtgaatattttttcttgcaagcactctgatgatgtttgtggtaacaaagctgtccatacctataaaagttgagatgatatcttgaattgtttgtttgcaaaacaacaatgcttatctcggcaggtgaggtcggctacatggataacatgatgtcattttgttcggttaaaaattaaagtttcaaaaatattatttagtataagatctctttttgacaacttttttgcaaagtctttcttgatgccaattaggcttgaattgtttgtttattctttttttgttttgtttgggggatcttcatgtatgtatcatttgacaattgaagtgtcatagttcttttgtataggaaaaggattggtgaaaataaaacatgaaagaaagagcgtagtcctgactagtttataatttgctgcagccttacatataatacatgactcaaaacagattgtccccttt

SEQ ID NO: 53908 - DNA, 238 bp, Glycine max
  Clone ID: PAT_MRT3847_19692C.1
ggataaacgggggggttttccgagaccggtggggatcaataaagcgttggttttttacgctggaaaagcgcccaatggagagaaatctaactggattatgcacgagtgtggtcttgcagacgtggatctgtttcgtcgcaaaaagaacagctataggctgtattactgggtgctgtaccgattttacatcttgaaatgtgcaattgattagcaacatctgccatcaccgaatggggtc

SEQ ID NO: 53909 - DNA, 263 bp, Glycine max
  Clone ID: PAT_MRT3847_19693C.1
taattaattttggaaattgtattgctatagcaatttaaacccaatggattgatcaagactttagtctcgcactcagagtggcaccatcttttcctataatttctatggaccaaaaaataaattaaatttcaatttgaaaaaaaacaaagtttcaacattaaaatatcagaataaataataattttcaacaaacaaaatttaagatttcgcaagaccaatttgacatgccatctcttctccgccctctgtctactttctttttc

SEQ ID NO: 53910 - DNA, 503 bp, Glycine max
  Clone ID: PAT_MRT3847_19694C.1
ccacgcgtccgtgaacacagaatcgtattgtgcacgctgctgctgcgtggcaccttgtggacttaatgtacccttcagctggaatggttacaaggctgttgccgtcttagcaaatcttgcccaactcgcgaaggaagaaatgcgcttgccagactaatgtgagacttcctgctctggatgaggttgcggacttggattctgcgaaaggaaaggtaactgcatctgcagctcttctacatctttgcttacataatcccatattgtcactctgggtgcttcaacaaggctgctgcccgccattagttactttatccctttcaggcaccctttgggccgaataccatgcttacgctctactcactcaatgtaaaaggcaaagaccatagggatatctggcaggtgctgaccttgaatgcccagctcgtgtggtcttcatacgatatgaatgaactcctgtccttagtacaatctctgtattacatggcgcagatcatgtgtgtaca

SEQ ID NO: 53911 - DNA, 686 bp, Glycine max
  unsure (1)..(686): unsure at all n locations
  Clone ID: PAT_MRT3847_19695C.1
atatccagcagttggcaacagtgcatttctttaggaatttagaagagcgctgaagagttatttgacaagtacaaggaaacgtttttatttccaattcataaaatcaaacttcataaaacattttaaataagttattttaatcacaactgtatttccaatgttttaaaaaatcgatcccacaataagaaatgaaagcatccaaatacttttccactatggttttcctttcgtggattagcttggtaaccaggattcagtagttctagctcctttctccttcatacagctcctcatatannnatgccacacaacaggaccgtgtattatgtatttaagtttttctaattggtcgttctgtgctgatcactgaggtaggaaaacctgctggtaaaaagcaacaagtgccaaccattgcacaagaaactttaaccttacagcagctcnnntacaggaataaaatgaacataaaatgaagagtgaggaggtaaaagaagtaaatgtcaagaattggggaattggccaaagctacacttgaacaaaaatatctgttaattttaacaagagtccatcataaggccgggttttggtctaccttggcgtatactgaggggatgcctttcttggaacaatctcgttgatctgctcagctgacaacatnnnnntcccactttcataagttccatttt

SEQ ID NO: 53912 - DNA, 952 bp, Glycine max
  unsure (1)..(952): unsure at all n locations
  Clone ID: PAT_MRT3847_19696C.1
cgcgtcgctgctccgtaccagtttcactgcataaatttgagagaaaactctgcaaacatgttgttttatcaggacctccttacaggtgatgagcttctctcggactccttccgttacaatgaaattgagaatggaatgctgtgggaagttgaggggaagtgggttgttaanggagcagntggtggggagggcctcgtgccgctgtcggcacagtaaaacaaagttattaattacttaccaaaagagaccctcttttaagaaaacaatggcagtgaataaggtaacattggttgcttcagtgatggcttgcatgctcataacatgctcttatgctgaatcaaccttgtcatgtgaccaaatcactatatggctcactccatgcataccttatggagtgttaggagggaacgtgtcatccttgtgctgccaaggtgtttactctctcaatgctgcatataagagtgctgaggatcgaagaggtgcatgccaatgcattaaggatagggcggcatgcattcctggcattgactacacgcgtgtcaatcaagttggtccaagatgtggctctaagtgtcccttcaaagtgtacccttccactaactgctcagcggtgccgtaagcattcagcaaagggggtgcaatatcaagtctatgggtcactagtactagtagtggtgtggaaagattaattatactatgagaagtgaagaaatattatacttaattagaaggaaataaagtgtatggattgtgtgttacgatccaacgatcgaaagccttgaagtatatcaacaataaaagatatcccttcaattaatttatcattttctctgcaaggctgtagtgatatatgaaagtgaagtatgaacatctaatgagtataaatgcaaaaaatatataattaagcgtatgtatacacaatttttttaattgactttcgtctagattaaac

SEQ ID NO: 53913 - DNA, 438 bp, Glycine max
  Clone ID: PAT_MRT3847_19697C.1
tcttctcgttctgccgcagatccacttcgacaccactttcaacgacgattttcttaagcatatgcttttcaacctccctattttttaatggacccttgaccaaaccacaacccgattaataacgtctttttttccctaccacgtcgaacacgccaacttggtcttcaagtttcgctaaccaccagatcaccaccgacaacgacaaggtcttcgcttttatgctccaccaccaccttcttttatcctactccgtcgttgccgccaactcccaactacttcacatgccctttgacttcttcgtgccaaacgacgtggttgacgccccctcctttaaatctctcactaccaacggagagcctgctttccgtcaagctctctacaacggcttttctggatctcttcaacccaataatcaaactctaccattttaacaacacc

SEQ ID NO: 53914 - DNA, 341 bp, Glycine max
  Clone ID: PAT_MRT3847_19698C.1
gacactcgtaacactgattcaagaatgagctttgcacagctctttgggcgttgtagactggtcttgccattacagaccagctagtgactcaagtactaacctttcatttgacgctagcttacaacaaacatcatcgggcctatatagctttagtcatggccaagactatcgaccaacgcttttgggtttcttcttcgcttctactttaagagtcctacctgctattatctcactgccactgtcgttactgacatcgtgtctcattctaaactcactgataccggtcactaccatcttgaggctaaaagaggaaggtatggcgatcccgagcttttaaacta

SEQ ID NO: 53915 - DNA, 490 bp, Glycine max
  Clone ID: PAT_MRT3847_19699C.1
catgcatggagattatggactgaagagagggtgctggaactacttgatgaattgttaggagaacaatgtgcgcccttgatagtaatacgatgcatacaggtaggcttattgtgtgtgcaacaaagaccagaagataggccagacatgtcatcagtggttttaatgctgaatagtgatacatcattgccaaagccaaaggttccaggcttttatactgaaatagatgttacatctgatgcaaattcttcatcagcaaaccaaaaactgcactcagttaatgaactttccatcacaattttagatgcaaggtagaaaatgcaagcaagaaaatgttaaggcgtcaccttccaatgtgagatatatcagttatttgaacatacataattagtgaaattgctatttgagctcctgtgttaagcagaaaagcaaaaaaattagaatccttgacatgaaacaatttagatccctctcaacttctaccacacattac

SEQ ID NO: 53916 - DNA, 1030 bp, Glycine max
  Clone ID: PAT_MRT3847_1969C.1
cccacgcgtccgcccacgcgtccgctgcaaaacgagaagtatccaacaatgactaccacccgtgttgctatctgtctttgctttgcattcctttactacgcggctgaaggagccaaggttagtttcaataacaagtgctcatacacggtatggccaggaaccctaaccggtgaccaaaagccccaattatcaacaactggtttcgagttgggtccaggagcatccaactctgtggaccttccatctccatggtccggtcggttctgggcccgaacaggatgctccaacaacaacggaaggttcagctgcgccaccgccgattgcgcctccggtcaagtcgcatgcaacggtgccggtgcaatcccgccagctactttggtagaaatcacagttgcagcaaacggagggcaagatttctacgacgtgagcaacgtggatggcttcaacgtgcccatgtccgtaaccccacaaggtgggagtggcgattgcaaaacctcaagttgccctaagaacattaactctgtgtgccctgcggagcttcaagtcaaagggtccgatggcaacgtcatcgcttgcaagagtgcttgcgaggcttttaaggaagatagatattgctgcactggacctaacaacaccgcagaaacatgtccacctacgaactactctcagattttcgaggagcagtgtcccgatgcttattcctacgcttacgatgataagagcagcactttcacttgctccaacaggcctgattatgccatcacattctgcccttgaagtgctcaccagtggagagatcgacttaattggttatatatccctccgtttaaaataagtgaatacacaaatactattacccactcataggttatatagtatgaataataaatcacgtgatttcggtgattgtattgatgaattaccatccaattaataaagtttagcttttataattgattttctgtacgtgattaatttggactgggtggtttttttatatgtgccgctttaccttcgtttttaacttctt

SEQ ID NO: 53917 - DNA, 1183 bp, Glycine max
  unsure (1)..(1183): unsure at all n locations
  Clone ID: PAT_MRT3847_196C.1
cccgggtcgacccacgcgtccgggaaaaccttggtgagtgaagtgtagagtttcagcaataattgctgctcatttttgctgagtgtcaacccaagtacagttgttggatgctttcttccctttctttctttctttaaaggtcttgtgagtgaaggagagtagtgttgttgagaaattaaacgtctgcggaaagcaacaatgtcaggacctgagtgttgctcaaacccaccagttctgaaccccaatgcaggagctggccatgttgaaaaactcgctggtctcaattcctatctctccggttcccctaattccattgccattcttctcatctccgacatttatggctatgaagcaccaaatttgaggaatattgcagacaaggttgcagctgctggttattatgtggttgttcctgacttcttccatggtgatccatataatcctgagaatgctagcaggtctatccctgtttggttaaaagatcatggcacggacaaaggatctgaagctgcaaaatccataattgaagctttgaaaagtaaaggtgtgatggctattggggctgctggattttgttggggggctaaagtcgtggttgaacttgcaaaatccagactaatccaagctgccgtgctattacatccatcgtttgtctctgtggatgatatcaagggtgttgatactccaactgccgtgcttggagctgagattgacaaaatgtctcctccagagcttgtgaaacagtttgaacaagtcctaactgctaaacctggggttgattgttttgttaaaatatttcctaaagtttcacacggttggactgtgagattcaaccctaaagacgcagaaactgtgaaggctgcagcagaggaagcccatcaggacatgctaaactggtttgctaaacatcttaagtgagaaattttgttatgctaagaacataggacttctacgtggattattgtcattttctgcggtggaggatgtaaaacatctaatcattcagtgtagttgtagtttacaagaaaataagtgctgtatttttgcttattgggaatacatcacattactgaaagttttattgtactgctatacctccgtttatattgcagaaagggcattattgaacaatataatattatttcttttcttttattctcaaaaaaaanaaaaaaaaaaaaaa

SEQ ID NO: 53918 - DNA, 550 bp, Glycine max
  Clone ID: PAT_MRT3847_19700C.1
gattccattgacctatatttttcaagctcaatcttcagcttaccaatctcctcttctgataccctcaacttctcattcacaatccttagctcttgttcatatgcattaatcttgacacgaaaatcttcggcgttgttctcaattttcaattcatcattcttcacacgttcctcctcatgcttttctttcccctcatgtggtatctcaatatccaattccatcacccttctgtggatactattatgatcatttccattcccaaagaagcctgaaaaactgttcatggatgaagcatcatcataatcctcatcagtctctgtcaatgtagaagaaccatctccatccttttgacatgcatcaaaagtattcacattcccaccagaaccaagaaaaacatcaaaccccgcggcgcgatttgttgatatacgacaccccatcttcctaggagaaggagaaggcacgtaagagtttggctcagaaccataatctgaaacacctgaagcctgtgattgaagatcacacggtgtgttgatgtgatcaaaacgttcag

SEQ ID NO: 53919 - DNA, 307 bp, Glycine max
  Clone ID: PAT_MRT3847_19701C.1
tttttgggaggaatgggtgccacttttttggacactcttaacaagaagcaagcggcccccaatgtttctagagctatcagataactgcttctactcaatccaacgggctgggatgaattatattaacaaagataacgccgtcataccagccacctactatagtatcacccccagaataatcttacatgcccaacccctctggacttgaaatcggatcatactctgagagtgtcatgccaaatggcgccttttcattccttatgatggggcataatgatttagagtctggagagcactggcgcccacc

SEQ ID NO: 53920 - DNA, 597 bp, Glycine max
  unsure (1)..(597): unsure at all n locations
  Clone ID: PAT_MRT3847_19702C.1
tacggctgcgagaagacgacagaaggggatgacatgcaacttaatatctctatatcttctccaccagttatacaagtgacctaccaagacattggtgcaactatttttgtagatataacgattgatgttctggaagacggtgaagtcatgcctgttgcatgcatctcagtggaaattagtgcttcatgtgctgtggaaattgaaggaaacaatattgctggttggctcagattacaaacattttctgcatacttgaagtggagcaaaatagggaaactgcacgtgcgtctgatccagtcactaatgtcaagtgtcctcaaaactgttgtccttccatacctgaacttcaaattaaagagaggattcccattaccaattattgatggttatggctttcagaatgcaattatcttgtacaatcatccataatcagactagtattcatattttcaccttgcaacaatgtatgcattttttttttaattaaaacttggatgaaaccgaaccgcatgatcaaatgatttccacctagtttgaggaacattctangataggatagcaattcaatccattagtatttctgttttacatttgtat

SEQ ID NO: 53921 - DNA, 120 bp, Glycine max
  unsure (1)..(120): unsure at all n locations
  Clone ID: PAT_MRT3847_19703C.1
anggancttgacattgccgtngacttcacagtcacctccattaccnggtacgttacatgcacatattgagaggatgaccagactgccatctggaccatcaatttggccaacngtgttagg

SEQ ID NO: 53922 - DNA, 534 bp, Glycine max
  Clone ID: PAT_MRT3847_19704C.1
cgaatcctgtcaaaattcttaattgaaaaacaaaaatgttcataaatgaagtacaaacccccgtcctctctaacccctttaactcctcccacgtcctctcacatctcttggctcattgaatgtagacacaccaaatccacttcctctacgagagggggtggcacgtggtgacggaggtgatgactctggtagaggaatgagattgtgtcgaaagcacgtatttccttgaagttccagaacctcaccccactcggaagctctcccagctgcaactccgtggaaacaatgctccacgggaatgccgaatctgagtctcaggtgcaatcatataataatttaagaaactttgaatacgagtaagctgttggaggatgctatcttcctatgctggacatggctaaaaaacttggataaaggtttcgctacaccttttcatcaatggtacagtaatatgaaggaggcttttcgtgattagggaaggatatttttataagtgtctgtaacagtgggccaggtttactgtcagaaatatgg

SEQ ID NO: 53923 - DNA, 237 bp, Glycine max
  Clone ID: PAT_MRT3847_19705C.1
cgtgaccatagcagcaagttatctaaacccaagttgggttttaattacacaccggttgccagaaccactgggccatcttctttatcggccctggcattaaattttcctgttcttaaaaaccggacctttattaaatttgaaaagggtacttttcctgttactcgaatataaccaccgggtttatttcttttgtgtaaatatcaaatttttaaaaatctggctcgtgttattaatttc

SEQ ID NO: 53924 - DNA, 248 bp, Glycine max
  Clone ID: PAT_MRT3847_19706C.1
gctcggcattccgctcgccgtgccggtcgtagagccggcggagggtttggcggcggtggcggcgtacgattccgcggcggcggacgaccttgcggaggtccacggtttagaggaggacccgggctttcgcggtcgtcaccggtgcttggggcgaactctgaatacgtgtcgcagaagggtttgcatgtggcagtggcggtaaaactcggcggtggtgccgctcgatgatttgcagcacgaagtggacc

SEQ ID NO: 53925 - DNA, 478 bp, Glycine max
  Clone ID: PAT_MRT3847_19707C.1
ctaaataggctttgttgtgttgttgtgttgtgttgttttccaattgaaaatcgaaatcgaaatccccacaacacaaccccttcttcttcttcaattgcgttggagcagaatgtggccctcggcggagatgctatcaaacataaaggaagcaagtcaaagcgtggtgtcgacgcggcgcccctggcgcgtgttccttgacccctcctccctcagcctcccatcctccatctcggaaaccaccacgcgcctcgcccacaacctgacctacttcctcttcaactacgccctcctcctcctcctcgtcttcctcctcaccctcctccgccaccccttccccctcctcctcttcctcctcctctccgccgcctggtacttcctctacttctcccgcgacgacctccccatcgcaatcatccctctctccctcgtcaccctcgtcgctctctttgccaccggcgcctggctctacctcctcctc

SEQ ID NO: 53926 - DNA, 808 bp, Glycine max
  unsure (1)..(808): unsure at all n locations
  Clone ID: PAT_MRT3847_19708C.1
gctcgccaacaccaacgatgcctccttccccgcctcctccgacgacgactcctttgacggaaagcccccaccgcaccccaagtagcacttccaacagcagcaccaacttcctcaacgtcacgacaagaaggtcgaggccaagaagtgcaaataggagaaggaggagctcgtcaacattttctccctcattgcctccttcatctacctcctcgacttcttctccgagatttgttcttgttcttgattctcgttgttggtcattcaaatctgttcatgttcttgattcttgttcttggtcagatcttgttgttttgtggtgggggtgggtttgcgacggtggaggaaaagggggggttttgatttgaatttggatgtgtgggtgggatccgtgggtgtaagtgtttgtgatcttttggggttgtttttgtgttgggttggggggggaggtagagggggggtgaggtggttcaattcattcattttttattttttttccttgaaatttattgtggcttnnnnngnnaagnntnnnnntnnnnnnnnnnnnnnnttttnnnnnntnnnnntnntnnnnnnnntnnnnnnnnnnnnnnnnnnnnnnnnnnnnnnnnnnnnnnnnnnnnnnnnnnnnnnnnnnnnnnnnnntnnnnnnnnnnnnnnnnnnnnnnnnnnnnnnnnnnnnnnnnnnnnnnnnnnntnnnnnnnnnnnnnnnnnnnnnnnnnnnnnnnnnnntnnnnnnnnnnnnnnnnnnnnnnnnnnnnnnnnnnnnnnnnnnnnnnnnnnnnnnnnnnnnnnnnnnnnnnnnnn

SEQ ID NO: 53927 - DNA, 560 bp, Glycine max
  Clone ID: PAT_MRT3847_19709C.1
cacgccccaactgcacttcatccaagcccttatccacaaagcaacccctcaattttccgctgctaccttatgagttccgaaacccgcaacaactgcaaccaacagcgtcgttaatggcgacagtttcaagcgaattcctgtcgcattgcctcccacttggtaccaactcgaagcgcgcgtggcttccaaatccaagcaacaccgtgatcacctgcagaatcccacttctaaatgaagacaaccccagcaagcgaagactgaacaacaacaacaacaacaagggacacacgagggtcacttcctccgacacaagaccccaacaacaacattacgattttcgagacacccatcacatgaaagccctcaacaggctttgcaaaacgggcaagtacaccgaagccctctattttcttgagcaaatggtgaagaggggttacaagcccgatgtcattctctgcaccaaactcatcaagggcttgttcacttccaagagaacagagaaagcggtgcgggtcatggagattctgtaacagtacggtgaccctgattcttttgcttac

SEQ ID NO: 53928 - DNA, 493 bp, Glycine max
  Clone ID: PAT_MRT3847_1970C.1
acgagcccacccttctttccaactcaaaccaatcatgaaattccttctcctcctcaattccattcgctccgaaggagtctgtggtgtgatgtcacagcaaccaccaggtggtcgtagcatccaagagaaagatcgagagttgcgacaagaggagagagaagagtggggtttgctgcaacgggcatcggcggagtcgcgattcacagcggcgagggtaacagaaggggttgctacgacgcgatagcggaggaggaagagtagccacgttcggcgagctaatttccaccaccgcgtacggtgtggtccaagagatctgagtcgccatgaagaaaaccccccaatccaaaaccctgtactagatctaggctacaagtttagatgttgcatttcattgttttttaaggaaacaggaaagaatgtaagaaattgtgcctgtatttgatgaattgaaatcaaatgttctttgtttgcatgcctatgtatgcaattaatt

SEQ ID NO: 53929 - DNA, 444 bp, Glycine max
  Clone ID: PAT_MRT3847_19710C.1
cacacgggattttactaacaacgagccggggccgttgtaaatacccctgtggatgctaaaacatctccttaggaacaccaggacaagtatgaatgttagctttctgacgcatccagatatgccaagaaatagagcaaagttatctattaaactgaccactccgacagcaatgatatcaataatgattccaacgttgctctctacaatgatatttaaagcgctatcgccatcgtgggttgttaataggaatgaaaccagcgcatgctttactcttagcttgaacagtagaaccatgggtggcaaatgtaaaagacaacacttaggtctgacttcaagagacacagattgtgtttggaccattactactgggatgagactttgcctttacaactatgttccacaacatctttatggaagaattgatgctgattgctttagaaggac

SEQ ID NO: 53930 - DNA, 383 bp, Glycine max
  unsure (1)..(383): unsure at all n locations
  Clone ID: PAT_MRT3847_19711C.1
tttnnatttttttttttttttttttggggggattttttgttgtaatgtttaagatttttcccaacagagggggggggaaaacacttttttttcttgcgagccgggcggggtcattcaaaaacaaacatacagccacttatacccatcgcctcgtggttgttgtttgcttcaaaagccccatagattaggaaaccccccccacttttttagcggggttcctggggggcattggttagaaacatgtcctcttccaaaactgacccttggggcgagtgttttgaacctaaggtggcccaatcgggtttaacaaagggggatcatgggccctcagcgggatgaagcccaaaatatctgccggtccgatatcaacctttttgagggct

SEQ ID NO: 53931 - DNA, 678 bp, Glycine max
  Clone ID: PAT_MRT3847_19712C.1
ccgggaaacaaaaattgcgtgtatgtgagaatcacttgttcatatatattctttccttcctccattcaacactcataactcaaatcctcggagagaaaaaaagttagggttttgcattttggatcagtcagactcagacatgggaggaggcaatgcccagaagtcaaagatggctcgcgagaagaatctcgagaagcagaaagcagcggctaaggggagccagttggattcaaacaagaaagctatgtctattcagtgtaaggtgtgcatgcaaacatttatatgcaccacatcagaagtgaagtgtaaggagcatgctgaagccaaacaccccaaatctgatctctatgtttgttttcctcatcttaaaaagtgaaagagttcatgttgagacatgatatcaatatatggcctgttctacagtctctatccacatagatcttcaatttcttttaatataaaatatgtctgtgtgtttgtgtcttcaggggtagtgagagacgagaggggataattagtaagtttttccattgttcaagtgtgagaaactatgttaattttctctttttttgtcaaattgtaacttatgaatgatcattagtgtcaatattaagcttcttacagaatcatagattacatgaaaaaaaaaaaaaaaaaaactggagactagttcctggt

SEQ ID NO: 53932 - DNA, 898 bp, Glycine max
  unsure (1)..(898): unsure at all n locations
  Clone ID: PAT_MRT3847_19713C.1
gcctacacttacaccggtgtggaaaaactaggggcggaaaagagctctttaaaacccacatttaatgaaccaaacaattgcgcgtgagaatcacttgttgttcatagtcccccgtatatatccgttcttttttcttccttccttccttccttccttcaacgctcagcactcaaatcctctgagagaaaaaaaaattagggttttgcatttcgggtcagacagactcagacatgggaggaggcaatgcccagaagtcaaagatggctcgcgagaagaacctcgagaagcagagggctgccgctaagggaagccagttggattcaaacaagaaagccatgtctattcagtgcaaggtgtgcatgcaaacatttatatgcaccacatcagaagtgaagtgcaaggagcatgctgaagccaaacaccccaaatctgatctccatgtttgttttcctcatcttaaaaagtgaaagagtgcatgttgagacatgatatatcaatatatggcctgttatatagtctctatccacagagatcttcaatttcttttataacaaatatgtctgtgtgtttgtgtcttggggggtagggagagacgagaggggataattagtaagtttttccattgtttaagcgtgagaaactgtgttaattttctctttttttttgtctaattgtaacttatgaatgattgctagtgtcaatattaatcttcttacagaatcatagattacatgaaagtgtttaggaatgacaaatatgaaaataagggtctccgttcctaaaatttggggaaaatgtctattgaaatcttatttgcttccttctatttttcttagccccgaaagcaaatataatttgtgagtggacacattggtatcaaaaaaaaaaataatnaaaa

SEQ ID NO: 53933 - DNA, 183 bp, Glycine max
  unsure (1)..(183): unsure at all n locations
  Clone ID: PAT_MRT3847_19714C.1
gtggagcggtagttggttttggaattggatccttttttttttctggaataataacaatggatgggggaaaacaccaaattaaaaagattgggccttgtgaatagttgttgggtcccctcgatataaatctaaaaggccgttgtgggnagaaggaataataaatatcagtctttacatattatt

SEQ ID NO: 53934 - DNA, 310 bp, Glycine max
  Clone ID: PAT_MRT3847_19715C.1
tcacctccgaattcggctcgagcataatctgagagatgcgcattggacgactcctaatctttcatataatgatatcttactcagcgactctatgtgacgcttcagcccttataacataagccaatggtgacatggacgtgggtctcagttctcattccgtaaagctcatcatttaggtagtcattgacagaactgccttgaatagtagggctcgcactcaacacagcattgacagatgcagactgtgagactcacactatgctgaccactatccatatggacatacttaggttgcacccataatgtcata

SEQ ID NO: 53935 - DNA, 1470 bp, Glycine max
  Clone ID: PAT_MRT3847_19716C.1
ggcccacgtgcctatcttcttagagctcgcaatcaatctcttttaagtccctttttccgcttttgttgtgttatgttcagttcgttgcatgcaaaaacgattatgaagacgccaaaacgccactcgccgccgccaaattcttccctgcgagtggagtctgattccggcgaaatcgtcacgaggttcaagaacggtcgccggagaagaattaaaatcaagcgaatgaaatacacttgccagacgaagatccgcgtcaggaatgacgccggcgccggcggcgtgtctcaacttctggcggtggattctgaaggagagaagagagagattcacgagaacgtggagatatcgctgtcgctggcttcgtcgtcgtcggaagaggaagagcgattgtcgtcgaagcaaaacgacggcgttttgtcgtacgggtcggcatcggtgatagggagcaggaaggagatggaggacgcggtgagtgaggagatagggtttgctgcgaagtgcgacttcttcgcggtgtacgacggccacggcggagctcatgtggcggaggcgtgcaaggagaggctgtacaggctggtggcggaagagatggggagtagtgcgagtcacgtggaatgggacgggcgcggagtgatgcaaggagaggctgcacaggctggtggcggaggaactggtaatgcggctgtcaggacggtgggttccacggctgttgtcgccgtcgtcgcggcggcggaggttgtcgttgctaattgcggtgattgtagggccgtcctgggaagaggaggtgaggccgtggacttgtctagtgatcataagcccgacaggcccgatgagttgatacgaattgaagaggctggtggaagggtcattaactggaatggccagcgcgtgcttggtgttcttgccacttcacgatccataggagatcagtaccttcgaccttatgtaatatcaaaaccagaagtgacagtgacccagcgaagcagcaaggatgaatttctcatactagcaagtgatggattgtgggatgtgatgtcaagtgaagttgcgtgccaagttgtaaggaaatgcttccacgggcagattaggagagtgtgcgatggagttgggaatcatcaaaaccgtgctaccgaggctgcagacctcttggctgagatagcattggcaaagggaagtagagataacaccagtgtcattgtagttgagctaagaggaacagtaacaactgattgaggcctcgtttctgtcaaaacatgtatttttatttttattttcttctctaattcttgccttgctgcttttggactaatatctactcaggatgtgcctcttcaatgccacaagagattatatctacttgataataatgagtacttccttactcacattagtgctttttgtaaaataaaaaagacctccaattaattctttaaatatctacaaagactacaataagtcgatacattaaaa

SEQ ID NO: 53936 - DNA, 1088 bp, Glycine max
  Clone ID: PAT_MRT3847_19717C.1
attaactacccttcttgttcgacaaacacattaactacccttctttcttgttccacactttcactactaccccttccttccttctcatggaaaccacccaacttgactacaacactaaaaaaacaaaccccacttccccaacgcgcttgaagctcttcggtttcagcgtacaccacgaagacatcatggacgaagacgaggtggcgcatgatgacgtggcagactccaccaccaaggtcacttcttccacttccccttcttccccgtctgactcgccggactcctccgtcgccggtgccggaccaccttcctccgccgaccggaaatacgagtgccaatactgctgccgagagttcgcaaattcacaagcacttggcggacaccagaacgcgcacaagaaggagcgtcagcagctgaagcgggcgcagttacaggcctcccgaaacgccgccgtttcgttcgttcggaatccgatgatctccgccttcgcccctccgccgcaccttctggctccgccggggaccgtggtggtcccggcggcacctccctcgtgggtgtacgtgccaccacgtgccgcgcctcctcccttccacgtgtcagtgtcgcacggttgtgcgttcccgtcggcgcatggcaacagcaacaacaacggcttcagcagcagtagtagtaataatagtaataacgtgaccataacaacgggtgtgaaatctgcgggtgctgggatgtttccctatgttggcgttgtaggagattcttcgtcattagctttgtcaacggtgcaggttcaggcccgggcccaccacgctaggattgatgggccctctttgagtaggttttccaaaggtgacagtgggcccaaatttgatgatgcatggggcttggacttgcaccttagtcttgcgccggctgcgccctcatctctcggctcggcttgaaattctgtgactgtgagtctaatagtagtctctttgttcaggcttgacgcgccgtttaaaggcatatcatggctgtttcagcttcatatagtgtacattttcatattcacttcctattttttcaagcgaattatttatttcacttagtac

SEQ ID NO: 53937 - DNA, 391 bp, Glycine max
  Clone ID: PAT_MRT3847_19718C.1
cccccgcgtccatcacctcatcttcggctcccctcgaaaaaaagtatctaaaaaaaataactaatattctttaaaaaatcaaaaatactatcaaattccatcctttttacaaagaaaaagcacttaaaaaggagatttcaaatgcgagatctaaacacatatctttccgtggcaccagaagcaagtactctatgggtcggggctttggcccgtctctagaaaaagatcaatcgtttctttccaaatgcattgatattcccctttttttcattctaaatatcgccccccaaaggggtgaagaacatacccctcccattaagtcttaaagatatcaaaaaaagacgcaattaatctccccttctttatttccccctttatcccatctttcttt

SEQ ID NO: 53938 - DNA, 392 bp, Glycine max
  Clone ID: PAT_MRT3847_19719C.1
ccccccccccccttttttggaacagagggaccccgttcccaaaaggcccttcaggaaaaattcttcttttttaaatggttccggggcctaagttggggctaaaaccttcgtttggcaaagtttttggccccaaaccccttgggtggtaaccaagaggggccccccccgcaagaaaaccaggtggggcccccgcccaaatggccaacccggtcgtcccgccggggtaaacatccccggtgggaaaccacccctgggggccgtaaatgggcctgtacccttcgactttacccccgtttttgtctacaaacgggaaaaccccctttccttttcttttcctgccaaaggcataaactctttccctaaaggcctggccccctttaattccatagggc

SEQ ID NO: 53939 - DNA, 312 bp, Glycine max
  Clone ID: PAT_MRT3847_1971C.1
atggagaattatgtaaaagttcaagagacccttgacctcacccaaatgagcacattaatcaatccaagggtgttcctttcctcgttcacaatttgtaccgctaagtgtctcactagagcttttaagatgattctaaattcatattgttgtataccgctaagtgtctcagactttgaaggtggtataattgtgggcatagaaaacatgcgagaaaaagtcatacatgtaccacaaggctccaagtctccaacacaattgttagccatacgtacgctttactccacaaaggccattaagggattcattgattga

SEQ ID NO: 53940 - DNA, 554 bp, Glycine max
  Clone ID: PAT_MRT3847_19720C.1
tgtggatttgtctcgtaacaagcttgagggtgatgcgtctgtgttgtttgggtcggagaaacgcacggagatgatatatctggcacacaacttgtttgcttttgattttggaaaagtaagggtgccaaaggtcttggactcgttggatgttgggcacaatcgtttatatgggacactacctaagggacttacgtcgcttaagaatctgtaccggttcgatgtgagctacaataaactttgtggtgagattccacggggtggtaagttgcaagaaattgatgagtctttctatgctaataacaagtgcttgtgtggctctcctcttccaagctgcaaacgattctagagttccacggaacatagttcatttacgcttaccggaaaagggtataagaataagagaaatcttctgtgttcccataatgttgagcgaatttgctaagaatttaacacgtaagtcacgtaattgtatatgtgacagtgtaattgtatcccatttttaatttgttatcaatatatgttaaatattggataacaaaaaaaaaaaaaaaaaa

SEQ ID NO: 53941 - DNA, 736 bp, Glycine max
  Clone ID: PAT_MRT3847_19721C.1
tttttttttttctccagagcaaagggaagggaagaggttaaattgcatttcatttcaaacatcagttacaacagtatctgttaaaaacaccagacaatgagaacaagtatgttactaaaaaaaaagggtataaccgtataagtccacctcttcaccccatatacaaattccttatctataggccattcctaaaccctacctctcaaaacatcatcaaattggtcgcagtcccaacaatgaagggctccatgagcagccttgtcaaaaagtagaacagaacccccaatgcgatcgaaatcggaagggctggcagagccttccggcacatggacaacaaaatgagcgtgcagccaagccccgaaataatggcgaggtagcacgcatacacagtcatcaaatcatacatagccgctctacccacaagaacactgtagaaaacaaagtccccaagtccaaacttaatccctctttcaccaatcttcctcctcaccccttccccttcctcctcattttcccccacaccactcatctcaacaagtggcgacattccctcatcaacaacaacctcaccaaatctcattccaccaaccaacggcgatctttcccattcatcgttaatcccattctccccattatcattgttactactcaaattgttattattattactattaaccctagacactacctgaagctcaattctggaagtttcggaatccgaaaccccggcgacgat

SEQ ID NO: 53942 - DNA, 1490 bp, Glycine max
  Clone ID: PAT_MRT3847_19722C.1
gatacatgaagatgtttaaattcggaaatgcaccaggaaatacattcaacctcttatactagttccttaccttcattaagcttatgtccttgatcaaattctccaaattatgataagaagaaccattctctttgataccatgaagagcttttttagcaacatcatttgctgatctcatgagatcttcattctccattatatctctcaccatgttttctacaacgaatctatcacacgacccattcatattgagaccaatcttccactgttcactcacacacctactgttaaccgtttgatcagtaatcgacggccaacaaagcataggcactccttcggcaatagattccaatgtagagttccatccacaatgggttaaaaacccacccacagcagggttggccaaaacctcttcttgaggtgcccaatttaccaaaaaacccctttctttagtccctatctcaagctctataggtacatttttttggattattaactccttttggatgacccacaagaaaggcttcaaactgtttaccaaaccatgccaaaactccattaattgctcatatgataggttcaccacagtaccaaagctaacatacaaaactgactttgctttttggtggtccagccaagttatgcagcttctatcttcttttctcaaacgaccatctttgtggggtgatgaagtactattggttgtgatcatggtcttgcagagagtgtgaagaggaccaatagaatacactttgggaaatatagtagcaagcttagtgataatggagggttcaagttgctcaaaagtattgagtataatagctgaagcttgggtcatggctaaggtttcttcgaaaatgaagtccctagtcccggaatcgggtggaaggtcacagtttctcaataaattctctaatcctggaatgttggcggatgcacttttcaaattttctgcatcttgattactccgaagctgttgtgctccctccttggcaagtttgctcatgaagattgtgacccaagtgcaagtagcactgtaggttcggaaagcaatcactggaatcctaaactcttgtgcaactcccatgacaatcgttgacatgagtccatcaactatgatgcaagatggttgctgccactgatcaccatttttctcgagaagtcttgagaacaattctcggaactctttggcaactaaggatctggcgctaggagtgataagcattggaaggtagtttattagggcaccttttctaggattgtcagagggtatgccatcagtgatggatgcaaagaggaaatcgggaaattgagtgtggaatgagggtaaatctgtgaattggaggaggcgattgtggttgtgatgtgtgttcacgaaggtgattctgtggcttctatgggaaagaagtttggctaaattaaacatgggtttgatgtgtccttctgctggaaagggtatagctaatatgtgaggtgtatctgagtgatcc

SEQ ID NO: 53943 - DNA, 252 bp, Glycine max
  unsure (1)..(252): unsure at all n locations
  Clone ID: PAT_MRT3847_19723C.1
gnaagacaatcacccttnaggtggagagctctgacaccattganaatgttaangctaagatncangacanaganggtatnccancagaccancanaggctcanctttgctnganancagctagacagatggccnaaccttngntgnttacnacatccnctaagaatctaccctccacttggttctccgcctncgnggtgggtnaaaatctttgtcaagactctcactggnaagaccatcacccttgaggtgg

SEQ ID NO: 53944 - DNA, 250 bp, Glycine max
  unsure (1)..(250): unsure at all n locations
  Clone ID: PAT_MRT3847_19724C.1
gcctcatgctatatgccggcccgtgtttaaatgtttcaaagctttaggggactatattgaaacattaccacacgtngacgcttngaatggctgctactgctccatggtgccagaatgggaatattcatacattgattacaactgtctcaaagcacctctgaaaaacatttccaagtttagagagctaaacgagtcaccaccaatggcatccacatcgctaggtctccgaagagaagttaacactctatag

SEQ ID NO: 53945 - DNA, 438 bp, Glycine max
  Clone ID: PAT_MRT3847_19725C.1
cccatgcccccacctccagtgcacccttacccggacgcgttacccacacccacagcggtgagcccacaccctcaccctcaccctccctatgtctaccactctcctccaccacctcctaagaagccatactactaccattctccaccacctccagtccaccaccacccttacccccatcttcacccccacccacaccctaatcctccaccacctactaagaagccatactactatcattctccaccacctccagtccacccccacccttacccccatcctgacccccacccacacccttaccctcatccttatcctcagccacaatattattctccttacgcacaccactctggtcccccaccccctaacacgccctacaagagcccttcacccccaccgacagttggccctgcctacattccacactcaggttaccac

SEQ ID NO: 53946 - DNA, 528 bp, Glycine max
  Clone ID: PAT_MRT3847_19726C.1
attgtaggaagctggatccgaacgggattgttgttctgcaccaggccgatgtgggagagtacttgaggatggaggatgagctttgattgatgcattttcttgtaattggttttgatccatcttatgaaattacattatcttctatattatctgtacctcctttgaagttgcctatcttctatattatcttcgacttcgttctcgtttcatatatattagttcacagaatggatttggtttgttgattcgttctcacttggcttcgttcgctgctcctctcgcgtttttggatatgtaaatcaacttcttgttacgagtttttttggataacatagtttgttcttgtgagttgatttggttggtacacggaatcttcttcaactttgttggtttattccctaaatgttgctgtttaatttgggatttttgtacttactatgttcttttttcttttttttgccaagtttatgtaataattatttctttctttttgcatttctggaaatttctattattttttattaattt

SEQ ID NO: 53947 - DNA, 441 bp, Glycine max
  Clone ID: PAT_MRT3847_19727C.1
gagggatccatcgaaggataccgccctctcgcccagcaaacactgtttggatatacccatcccctacttggcttagttagtggatgtttccacaaggaagtccagttatacagcaacggtgtttaatgatgaacatctggtgggtagctgaccttattattccgttcagtccaaaatccatcttatttgattgattaaggacatactttatctctaatggaaacagtatcttgtccggttaacgggtgactccatatgtgatgtgatcccgatgggaaagccctcctcatgttaaagtggcaaccaagacttttggggccgtaccaattgactccataaatctgatacacgattgcataatgctacgaatggttgtatgtaacgtaagactgtctgagtgggaaaactacgtgcacactatctgaaccgcccatcaatgct

SEQ ID NO: 53948 - DNA, 189 bp, Glycine max
  Clone ID: PAT_MRT3847_19728C.1
ttcccggtcgacccctcgtccgcccactcgtccgcccactcgtccacccacgcgtccgcttccctcactaataaggggagtgattttccataatttcgctaaaaatctacttcatacgacttctaaatgtttaatcctatcatagaatacatattctgatcactctgaatacaatatttccttctcata

SEQ ID NO: 53949 - DNA, 604 bp, Glycine max
  Clone ID: PAT_MRT3847_19729C.1
accgacgcacgcccgcgaacgtaagattgttttttttagagcggccgtttttttttttttttttttattcaactgcagtcgtttgctgaccaattttcagctaatataaagtttcaatagctctttatgggagtcaagggtacattaattttccagtcaacacaagaagactgcaaatcagcagcgagacattgttttctgagtgaggagggggggagtctttttccctcccccttgtgtggaagatagaggggaaagtaaagtcgcgctatgaaggggatagaacagccctcgagcagaacactcagttatttagagggaagtttgtggcgatttgcagagcaagaagtcgtggagggtgacaacttcttatgctgctttcgcttgtcgattctatacctccgtcctggctttgatgaacgggtatgaggccactccagcaattgcaatggctgttccattaccagttgtgggtgctaattcttgataccaaagactatagttgaaaatccaatcacaaatacacgttttagagaagttcccaactgcgctgagtgagaaggagccactctcttccagtgtagttggtagcaacctggtttga

SEQ ID NO: 53950 - DNA, 212 bp, Glycine max
  Clone ID: PAT_MRT3847_1972C.1
gccaaataaatatatgtttttaacaaaactcctttcaaagcttgattaatgataataatctgatgatgaaaccagtaaatccatttcaggaaaagtcaatctcttttttttccacaaaggcacaaacttaaatttagtacattggacatcaataaaacagtggagacgcctgaattattttcttccaataggaagagcccctctactttttt

SEQ ID NO: 53951 - DNA, 216 bp, Glycine max
  Clone ID: PAT_MRT3847_19730C.1
caccatccgatcacaactatactattcaacaatacatatactccactaacatattctttttaatctacttgagtagcttgctgacatacggcggatctgtaccttattaacaacaggtttgaaaccactttccaacctgaagcatcatatatgcatcacacaccacataacaaccttgtaggaatagcgaggcactacaagtttgacgtggagcac

SEQ ID NO: 53952 - DNA, 304 bp, Glycine max
  Clone ID: PAT_MRT3847_19731C.1
tgaatggaaaaccaaacatcccttaggtttttaaggggaacacccagcctaatgggatccggagtaatctgacgggaggcaggagaaccgttaatgtaagcagaaggatgcgaacttctgaatgcccaggatcttccggaggagaagaaagtcagcgaggagggaaaccgattggcgaccaaggtggatgaaaacaatgacctacggcagggggcgtcagaaaaagatatggaagctatggaaaggacaaaaagcataacctagaatactggaagaaaaagtactaccaccgatgaaccgcgcc

SEQ ID NO: 53953 - DNA, 319 bp, Glycine max
  Clone ID: PAT_MRT3847_19732C.1
aacccaggcccaaactttggaacttggattttcttttttttttttttccccccattaaagaaagatttaccttggctcctaaaggggacggctaccaacatttttcaaatttttcccataacctggatttggttcatatctaatttagacaaaaagggcccaaatcctaagtgggcctccctccatggggccctatttgggcccttaaccccagggggggggcctagggtccccctttttaattttgggttcgggaaaattccggttttaaacctggcaggttcccggggggagaatttaacttgagaagcggggaacc

SEQ ID NO: 53954 - DNA, 286 bp, Glycine max
  unsure (1)..(286): unsure at all n locations
  Clone ID: PAT_MRT3847_19733C.1
atttattaggcttaaatatctttctccanntttacagcngaaggaaaagancgagaagtgnacagtgcnacagagantcgaaagtgaacggtgtgattagagcaagtaaagtagtactgtantgaagagtaacgacatanatggtgttagcangtnggactgataaaggtttggttttggttttggatnanaagannnngaattnacacgagttagttnactgagaacagacattgccttgtcatcntcaccagctctacattcttatcatccgtccaccagacac

SEQ ID NO: 53955 - DNA, 1106 bp, Glycine max
  unsure (1)..(1106): unsure at all n locations
  Clone ID: PAT_MRT3847_19734C.1
cttgattttttttatgggtatttcatctacatttgctgcttctttcaatctgtagtaatctgaaaattatttgattttttgtctaaggatttagccacttgtttaggtcttgttgaattatgagttgaatctggttgaatgtttgctntgtagtttaacagagttatctatgtggcaaatcttgtttgagactttgctatttttgttgcaagtggaggaagtatatgcaaagaaaatgaaaatattttccccaatttttcacttacatgaatcattgtatcattttatttgtatattggatatgttttgtcatcatttttaaaggatttacaatactttatatgataagatatgttgatcgttctagtgcttgacttttgtgttgtgtttctctgctatcactttatttgtatattgtaggttatctactgcacaagtttgaactggagttcggatggaagcactttgtttagtggctataccgatggcgtggtcagagtttggggtatgggtcgttattaggttaagctgtttagtgctttcagatgcgaatctgttttgagttttgggacaagttagttactgctttactgtagaattgatttttatgttgaagaccgtggcatgaggccttttatttatttttaaaacgttcgttttggttattacttgttacatggatatcttaacatcttggttttaaaaaaaaatacccctttcaccaactgaaataaaaaaaaaaaaggaccgaaccgatcgcccttacaaacaatatggacaacctgaaatggaaaatgaaacacgccctgtaacggggggggccccttttaaaggtccaatgtttactcccgggggtttgcaagaaaatagtttttttttgggggcccctattttaattttttgggccgtttttttaaaacgtggggaggggaaaaccccggggttacccaaatttaatggcctggaaaaaattccccttttccccggttggggaaaaacgaaaaggcccccccccgtacgcctttccaaaatttggcccaccctaatgggcaaaggggaccccccttttaccggcgatttaagcgcggggggtggggtgtttcccc

SEQ ID NO: 53956 - DNA, 2162 bp, Glycine max
  Clone ID: PAT_MRT3847_19735C.1
ctcgagccgattcggctcgaggtaatctgaaaattatttgattttttgtctaaggatttagccacttgtttaggtcttgttgaattatgagttgaatctggttgaatgtttgctttgtagtttaacagagttatctatgtggcaaatcttgtttgagactttgctatttttgttgcaagtggaggaagtatatgcaaagaaaatgaaaatattttccccaatgattcatgtaagtgaaaaattggggaaaatattttcacttacatgaatcattgtatcattttatttgtatattggatatgttttgtcatcatttttaaaggatttacaatactttatatgataagatatgttgatcgttctagtgcttgacttttgtgttgtgtttctctgctatcactttatttgtatattgtcccacgcgtccgcccacgcgtccgcccacgcgtccgcccacgcgtccgcccacgcgtccccgtccccaaaaccctaatcgaggttctctcctcctcactatatattgattcctgtcactctagttgaagttctctaaaccaaaaggctctctcacgcagtcgcagtgagtgaaaaggaaaaccctaacttgcagtcgcagaggaaaaccctagctagtagtctcagttcgtttgagagagaaaaaatggcagagggtctcgttctccgcggaaccatgcgcgcccacaccgacgtcgtgacggcgattgccactcccatcgacaactccgacatgatcgtgacggcgtcgcgcgacaaatccatcattctctggcacctcaccaaggaggacaagacctacggtgtcccccgccgccgcctcaccggacattctcacttcgtccaggacgtcgtcctctcatccgacggtcagttcgccctctccggctcctgggacggcgagctccgcctctgggacctcgcggctggcacctctgcccgccgcttcgttggccacaccaaggacgtgctctccgtggcgttctccatcgacaaccgtcagatcgtgtcggcctctcgtgaccgcacgatcaagctgtggaacaccctgggtgagtgcaagtacacaatccaagatggcgatgcgcattcggattgggtaagttgcgtccgtttcagccctagcactcttcagccaaccattgtttctgcttcatgggacaggaccgttaaggtttggaacctgaccaactgcaagctgaggaacacccttgctggacacaatgggtatgtgaatactgttgctgtttcccctgatggctctctctgtgccagtggtggcaaagatggggttattcttctgtgggatttggctgagggtaagcgtctttactctctcgatgctggctcaatcatccatgcactctgcttcagccccaacaggtactggctctgcgccgccaccgagcagagcatcaagatctgggatttggagagcaagagtatcgttgaggatttgaaggttgacctcaagactgaggctgatgccacctccggtggtggtaacgccaacaagaagaaggttatttattgcacaagtttgaactggagtgcggatggaagcactttgtttagtggctataccgatggtgtggtcagagtttgggctattggacgttattaggttaagctttttagtgttttcagatgcgaatctgtttttgagttttgggacaaagttagttactgctttactgtagaattgatttttatgttgaagaccgtggcactgaggccttttatttatttttaaaacgttcgttttggttatttacttgttacatggatatttcaacatctttgtttttctccggttaccaatattatctttacttcagaatatggttgagatataatctcaatttaaagagtagattatttatctattttaaggttgacatgacaaatttacccttcaaaaaaaataaaacttaaatcagtatttcattttattaggttaagctgtttagtgctttcagatgcgaatctgttttgagttttgggacaagttagttactgctttactgtagaattgatttttatgttgaagaccgtggcatgaggccttttatttttttttaaccaagatgttaagatatccatgtaacaagtaataaccaaaacgaacgttttaaaaataaataaaa

SEQ ID NO: 53957 - DNA, 292 bp, Glycine max
  Clone ID: PAT_MRT3847_19736C.1
gattaaatactttaacatttttagtaataacatcttaaaaatggggggagggtgggaattgaaataagatacattttttatttataaataaaatacatcaactcaattgaaaaaaaaccaagctaatctcaacccttggatttacaattcatgccccttccttctcccccacaaaaaataatattatcgataaacttagccaaaatccatatcatgaatattacacttattcacttcatccacttcaatttttacctacattaaactattcaaactcgtctaataagtttta

SEQ ID NO: 53958 - DNA, 520 bp, Glycine max
  Clone ID: PAT_MRT3847_19737C.1
attcggctcgagtgcccctcaacacccagtgatggtggcgctgtcgctgttggggaaaatccgaatccaaaagtggtagtagatgacgagaaaagcccaaggcggagaagcatcccagacgcaaacaaactcggacaatggttagaaacatgacacgcaagtactgcaaaaagtagaaggagagaagaagaagcgctctcgccgctttattcatttcatttttggaccttacggagacacccctctttcttgtcctctaccctttacttctctccacacagtatatatgttactttctgcttggtttcgtcttcctctccatctctctcgcacctcatgttgctcgatttcatcaccaccgctgcgtagaactctctttctttcttcgtctggttctttcttagaccatgtcgctcaagcgcccccccgatgatgggaaaactccagacgacaagcgtagaaagcctcctcctttctccagtgtggtgcgttgacgtgatgaagttacaagcactcgggc

SEQ ID NO: 53959 - DNA, 2909 bp, Glycine max
  Clone ID: PAT_MRT3847_19738C.1
gaaaagatccttactgttagagagtttctcacacttctaaattattacactgcgcagctttgctggatccagattgagaagtgtgagaaactctctaacagtaaggatccagcaaagctgcgcagtgtaataatttagagtttcttttacttgcaaattgttctgataaattgtcatttgaaggattttagtaaaaactttcattgggacagtttagttcactgtttgtgtcaactgtctaggcatttagattagctttgtcattatcaagtcagacacctcctaggtaatagatttatacattgattaggacatcccatattgttcgtgtcattggcatgattaggctctatgggagaatcattatataaaacatatacgatcttattctcatcctcgtataaatttatatcactcctgtgattaatcaaagttctgaatgataaacattctaataatgtctagaaatagctaagtactacctttctcttgggcaaatgtttaacttaattaaccaaactgctcgtctcgttccgcgtcgtcgtttcctccaatcatcacaacaacacagtgatggtggcgctgtcgctgttgggggaaaaaatccgaatccaaaggtggtagtagatgacgagaaaagccgaaggcggagaagcatcccagacgcaaacaaactcggacaatggttagaaacatgacacggaagtactgcaaaaagtagaaggagggaagaagaacgctctcatcactttattcatttcatttttggaccttacggagagcccctttcttgtcccttccctctctcgacaccactatttattcttactttctgctctctatctctctcgcgccgcatgttgctcgatttctatttccaacaacaccgcagcgtcgtagaattactactctctttctttcttcgtctctttgttccttcttcgaccatgtcgctcaagcgcccccccgatgatgggaagactccagacgacaagcgtagaaagcctcctcctttctccagtgtggtgcgtgacgtgatgaagttacaatcactcgggcatttgctggagccaattctagagcccttggtaaagaggttggaagtaactgtggtcgaacttgtgtacttgatacaacgaggcacgtgtacttcccttctaattctcaagaacctggtgtggtcttcaatgctgtgggacaagtgacaggactgctttctgaatgcgattatgtcacagtagataagctgactgaaacttaaaaggcattaataagtttagttgatgccctaacagggaaggttgttagtacaggaccttcgtcagaagatggaaattgtatccttgagggtgattttgaagaggaaagtgaaacttggatgcctgaagagttcaagagcaatattgtgagagagagggaaggaaaaaagcctcttcttacaggagatgtaattttatatcttaaagatgggattggtatggtgggtgaaatttcatatacagataattcaagctggacaaggagccgtaggttcagacttggagcaagagttgtggacaactttgatggtgttggaataagagacgcaaagacagaatcattcattgtcagggatcacagaggagaattgtacaagaagcaccatcctcctagtctgtctgatgaagtttggagattggaaaaaataggcaaggatggagctttccacaagcgcttgagtcgggaaaagatccttactgttagagagtttctcacacttctcaatctggatccagcaaagctgcgcagtatactgggcactggtatgtctgcaaagatgtgggaagtaactgtggagcatgctcgaacttgtgtacttgatacaacgaggcacgtgtacttcccttctaattctcaagaacctggtgtggtcttcaatgctgtgggacaagtgacaggactgctttctgaatgcgagtatgtcacagtagaaaagctgactgaaactgaaaaggctgatgctcaaaactcagttactgctgcattaagacaaggggagaaatacacaacttttgaagatgaagactctctcatggatgggtcttcacacttaactaatgtactctactccccaagctctcccaagactgagggatcaagtgccattttggctccccaaaagactggaggattcaattatccgcctgcaagtgcctcttccccagatatcatgtcatccatttattctgttggtggaactagtagcttggatgactattgcttgcctaattttgacagcatgggccttagatatgatcagaccctcagttttccagtccaagtttccaactctttgatctgtgacactgattcaatggctcatgcttttagtgatgaagatcatctgcaattttttgatactgatcttcaatctcatgttcaagcagatttacagggtgctattgatagcttcatgttggcacgtcctacggccaatggtggtgcacagaggagatggagaaaggtatgcaatgtcctaaaatggttcatggttaggaaacgaggaaatcaaatacaggtaaggttgtgaagaacatgaagtttcagttactattgtacattgtgcccatgaatgcagccaaaaaaatattctgttcctttatagagataagttatggtttctcttagttgtaaatacatctatgcatttgttcttatagcttgctagatatcatagaattgctctatccttttgttattaggatgtaaatacttgtattttacagtcaggagaggatttctggttgatggcagatgctttgtaatttcaagatccattgacctttattctaaatcatatttttgtaagcatgttttgtccaataaaatcagttttccccctgagaaaactgcttcaaggttaaaaaaaa

SEQ ID NO: 53960 - DNA, 448 bp, Glycine max
  Clone ID: PAT_MRT3847_19739C.1
ccttgttgaaaataacacatcctataaattgttatcaaccagttgaaatttcgggcataagaaagccacggtctaatcaaaagtttagagtgtaaatggatccatttatggctctaaaacctcctgcatcttcagacttatggaggatctacgtatgctaaccgaaatatcattgacagactttgatgttaaattgttgggaaaacgaccaattttaactccttacaacttgcatgggccagcactactgtgaatataaaaggctagctgattaggttcctgtagagaccctaaactactattatgcgtaagaactacagatgccatcgtaagactatctattggctcctcttgcacacaccaaaagccgatttggatgcgtataataaccttcttttggacgctgtgatcatctgaaggagagctccatcaactgcaaaggagcttg

SEQ ID NO: 53961 - DNA, 483 bp, Glycine max
  Clone ID: PAT_MRT3847_1973C.1
ccacgcgtccgcgttctcttgggttcgcaccaagttagcctttcatttgtttataattcgaaatcatggctgtgcaattgtgctagtgatatatagtaaataatacttaatactctctgccaatctggaattgtgttatttctgctaagagtcatcccgctgccagaattccatttacttatggtatgtccatgtacggtaacaacaaaaaagccttatcccactaggtgatcgactacatggatcacacgacatcattcagcatggctttcagaaatattattaagtctaagatctcctttgatgatattctccaacatccatgtatggcaatgaaataaaaattgataataacaatatgactctatgaccattttcatgtgtctggtcaaattgagttggtttattaggttaacggttgacatgtgtatttcttgtcatgaattaagattatattgctatttggctttaagcttgttaact

SEQ ID NO: 53962 - DNA, 1179 bp, Glycine max
  Clone ID: PAT_MRT3847_19740C.1
tcgtacggctgcgagaagacgacagaagggggagtccgcaacgagcagcagctcctggacgatgaacatagccaccaacacaaccttcataaacttccccttccaactctcaccactcgcatctcgcgcgtgccaccaacgcgccactctctccctctctttccctcctcttcctctctccaaacccgccatgtcctccgccgctccggtcaccgaactcagcgacgagtccgacttcgaatctctcctctctcccgacggccacatctccatctgcggcttcggctctctcctctccgagagaagcgcccgaagcactttccccgacttggccaacttccggaccgcacggttgaaccggttccgccgcgtcttcgcgcacgtcgctccggttttcttcgagcgcggcattgccaagccagaaaccatggagatttccagcttgagtgtggagccatgtgaaggagaaactcttgtggtgacagtctttgagattagaaaatcggagattccagattttatcaagagggaggttgagtttcggtttcttgctgttcttcctgaaacacttgatggcaaggcttttgattttccagcggtcctttgtgctcgttatagtgatgaggaatttttcgacaatagatgtaaaggaaacaaggaaatctattttcagcaatatgggcgatggaatatagataaaatttggagagatgatgtgttaccttgtcgggtttatcttcgacactgtgtactagcagcaaagaatcttggtgaaacagcctacaacaactttgtggatcacacttatcttgctgaccgtaaaacaaccattcgcgattacttggcaacaacgggctctggcatcatggaagagcagcctcctgaatccctcaagcaccgctatggcggttgatttccaacagacgatttttactgctatgaatatgtctatgactatgtaaagtgatggcagatgggctaaacggcttgattcttcaatatataaacagtacattatttaataacacattcatatttattgttccgatgtgtaagttgttaatatcaagcctaaaaacagcatcaacacaactgacctgagcatgggtgtaaacgaattatatattgcatgggtaccgttacatgccttgcttaagcacattagtctttcgctcccct

SEQ ID NO: 53963 - DNA, 244 bp, Glycine max
  Clone ID: PAT_MRT3847_19741C.1
gagttgtcagtctgtaatgttcagttaccagttgctggctgacgaagacgactgaaaggcaactatcgactgcctacggatctacatacatctcaccttgtcacgtaaaagagcacatctgactaaagtcagcttcgtgcaactcataaggttatccacgatgtcaggatgatgctttccaatagagggataccagacccagtttgacatagatagagcctttgcgactcttaccgatcctgaa

SEQ ID NO: 53964 - DNA, 671 bp, Glycine max
  Clone ID: PAT_MRT3847_19742C.1
tacggctcgagaagacgacagaagggtttgcatatattccaccaattgttttacaaaaaaaagaggtgttacctttcaaatatacttaaatgactttttatggtaatttttttttctaaatgctcattcatgactacttttatgttttgtgataattaaaaaaatttacagatcctctggaagagctatgcttcataagagagccaaagtagaatttcacccccttggtgttatcggtgccattgtgtcgtggaactatcctttccacaatatttttaaccctatgttggcagcagttttttctggaaatggcgttgtgattaagaaattcatgtgattctggttgtagatttcggaacatgctagttggtctggatgcttttacttcagaatcatccaatcagcccttgctgccataggagctccggaggaccttgttgaggtgataacagggtttgctgaaacaggagaagcactggtatcttctgctgacaaagtcatttttgttggatcccctggggttggcaagatgataatgagcaatgctgccgagacacttatcccagttacactagagcttggtggaaaagatgcatttattgtttgtgaagatgtagatgtggatcttgttgctcaaattgctgtcagggctgctcttcagtcaagtgggc

SEQ ID NO: 53965 - DNA, 770 bp, Glycine max
  Clone ID: PAT_MRT3847_19743C.1
cacatcaaacctaacaacattgttttggatgacaacatgaagccaaaactcacagattttggcattagcgtactaggaccacgttttatgtcaaaaccaaaaccaattaaagtagattctgttgtgggtacttttggctacctggctatggagcatctcacggacctcaccgtcacagataaaactgatgtttactcatttggtatggttctacttgaagttgtgtgtggaaggaaatatgtaacaacagaacttgagaagcctgttgaggagaaaattgatcctaatatcaaaggaaagattgccccagagtgttggcaagtcttcatagatatcacccgaaagtgcgtgaaatatgaagcacatgagcgaccaacaatgggtgaagtagaggtagaacttgagcatgctctgtcgttgcaggaacaagcagatatcacaaaccccattattggagaatataccttattgtccaaaaccattattaacctaatatagcgcttctttacacacacttaccaatatctaatcaaacaaaacaaattatgtatacttttttgcagtagttaagttaaattgacttatctgtagcttttgtccagaagaaagtgatacttaataaatgtatcttattcataggtgattaggtaatatcaaattcaggttagtattttgtgttaagagcagtgacaggaattaagatacttgcagcttttgttgtgatactgtttctagcattttgattttatgagaagctgtcattttaatcc

SEQ ID NO: 53966 - DNA, 430 bp, Glycine max
  Clone ID: PAT_MRT3847_19744C.1
cttcaattcaacacttcgagagatttgaattatctgagatgtggaagttgtaatcaagtggagagggcttttggagaattattatagatgaaaaatagatgaattttgattttggtcgctttgattggagaacaatactaaaagcacctacgggcatgagatggatcgggaagaatatttgcggaagtgttccaatatgaaatgccaaagagttcaggtggatgaatcatttgtacctgctcttcaagatgaagtaatggaagttgagcatttgcttgcagaacctagaaacgttcatgcttccctggatggtagtttggattctcatacaactttgaatgacaaggatgatttggaactggaggtccttgatggattgctggatgatgttgaaattgatgatcttgaaggaactggtggttttgctggt

SEQ ID NO: 53967 - DNA, 252 bp, Glycine max
  Clone ID: PAT_MRT3847_19745C.1
gttaacatatagaataaaactagccattcattctgagtggatcaacgccgagccagggactcctcatgtcatacaaaacattcattcaatggcacatgccgaaaagaaccacacttttggggaatggggcgaaatactggggatacacttgtgacgactcattccagcaagctcactcaacaacatgagcctaactctttgtgttgaaagggatgggtggcctgactatctggtgttccacagcacctaggg

SEQ ID NO: 53968 - DNA, 418 bp, Glycine max
  unsure (1)..(418): unsure at all n locations
  Clone ID: PAT_MRT3847_19746C.1
tttgagagccagttctgcacagaaaacctcgagagaggctgagcaaaatgacgagcttgccctgcgtcccttgccatttaatgtggtacatcgtgtgcgagaattggctaaaattcacccatacccaaggcaacgtgggtcaaagaggttgcgtgttagccaagctggctcttctatcattgctaaagattctcctccccttagtcttagcaaaagaaatgtacgtaggaagtttacttagaagtccatatgtaaaacaatccatggaaatctatagtcaaaagaatcttgttgaaatttaggtattacatttgcacaattttatatctacaaaggcacagaaattttgaattgtaaacatgaggaatcattagttgtcctacaatagtttgcgatgcttaatgccttnnnnnaaaaa

SEQ ID NO: 53969 - DNA, 2336 bp, Glycine max
  unsure (1)..(2336): unsure at all n locations
  Clone ID: PAT_MRT3847_19747C.1
ggttatatttgtgtactgctagagatttgaataatctgagatgtggaagttggaatcaagtcaagagggcttttggagaattattatagatgaaaaatggatgaattttgattttggtcgctttgattggagaacaatactaaaagcacctacggtactgtaccttaattttttctttccaatatatgtatatgtattttacaagtgaaaatcacatgtctatatatgtggatataaatgagaacaaaatgattaagctgatgcacattgaaattgttttacttggtcccttctggaacaatccatctcccgcattattcgtaaattctagaaaaaacaacacttttaatatattacatctgcatgaattagaaaacaactgtcatttcgctcctgcgtttcgtaacgcttttttggcggttttggcctttttcggtttcgaacattcggacgaatttctctctctctctcttcaattcaacacttggaggacatgagatggatcgggaagaatatttggggaagtgttccaatatgaaatgccaaagagttcaggtggatgaatcatatgtacatgctcttcaagatgaagtaatggaagttgagcatttgcttgcagaacctagaaatgatcatgcttccctggatggtagtttggattctcatacaactttgaatgacaaggatgatttggaactggaggtccttgatggattgctggatgatgttgaaatcgatgatcttgaaggaactggtggttttgctggtgcatgtgaagaatattttttggattttggatttgccgacaaatttgaggaggtactaggctcaggtccttttgaaggttcactcttgcaaatttcaagttctgaaagtcattcttccggattaagcggaagtagcattgttggtggggttttagaatcaaccaaagtacctattgcaaaatctgaatgcaaaaatgattctctagatgagacaataacctatgaagcacatggtgccttcaggaacaatccaagtcaaccatcaaaagtaaattgcagatacaacatttcacttgatatacaacatctgcaagagttggaaaacaatcgtcatttagctgctggtatattgacttgtaagaaggaaaagggtcctgttgaaaaaggccaacctgctgtacctagagagaagagattccgaaagcctactcagaggtacattgaagaattttcaaattcaaggtcaaaggaaaaggcaccaactgctgttacaaaaactgaatatttaagtgactcatcatgtgatgtacttcatataagaattaaagcattgaaaaagagtccaagtgaaaagtctagtaatgaaaatagagatgtgatgcttcctgagttgcaagttcacaaagggcgtccgaagaaagagaaacttgagtatgacatcgagtcatttcccttggaatctgaggatgaatggttgacatcaaaaagatctagaaggaaagatcgaagaaagcatcagaagatgtggactctccctgaagtgttgaagttggttgaaggcatatctgaatatggagttggtcgatggactgacataaagaggtttctgttttcttctacaagctaccgaactcccatagatctcagggacaagtggcgaaaccttttgagagccagttctgcacagaaaagcacgagagaggctgaacaaaatgacgagcttgccctgcgtcccttgccatttaatgtggtacatcgtgtgcaagaattggctaaaattcacccatacccaagggaacgtggatcaaagaggttgcgtgttagccaagctggctcttctgtcattgctaaagattctcctccccttagtcttagcaaaagaaatgtacgtaggaagtttacttagaagtccatatgtaaaacaatccatggaaatctatagtcaaaagaatcttgttgaaatttaggtaatcacatttgcacaattttatactgtgaattaattttatgtttacaaaggcacagaaattttgaattgtaattatgaggaatcattagttgtcctacaatagtttgcgatgcttaatacctgacacccttatggaattaatggtggcatggctttgagggatggaactgatgcatctggcaggaaaggaaagggaaagggtgtttaccagtttgtagacaaatacggtgctaatgtcgatggttacagttctatctacgacaccaaggactggtctccaaccggtgatgtctacgctggcggtacgactggcttggcttattccttaagggcggggtggaactgtgactctactnggctttagctggtggtgcactttt

SEQ ID NO: 53970 - DNA, 259 bp, Glycine max
  Clone ID: PAT_MRT3847_19748C.1
ggtaagcggaaagccgggccgcctgcgggcaccggtccggggttcgcgccacgacccacgttttcagtttcggtacggaaaccatgcatcaccgggctacaaaatgaggactgcgggaagacgcgtgacggaaacgaaggcgaccgtgtatcctgagcctttgcagatgccaggaccctgctatacccgttgtaccacgatgacaacgacgacgaccactacggctgggaggatgacactatggatgacttggaggatg

SEQ ID NO: 53971 - DNA, 411 bp, Glycine max
  Clone ID: PAT_MRT3847_19749C.1
cgcgtacagtctaactaggaatgcggcctcgagcatttttgggggacatggattacaaatggggaggcgcccccaccagctttatgggggcgatttattacgactctcaatggatcgcctccctgttcgatcccagaaacgactacgtggaggccttctccgaaccagatttccaaaaccaaaatgcttgtaactgcatttttatatcgtggagggggaacagatgatacccttggtccatcccaaaaactcactcgcatgcattccgaaattgctggaaggattagttttcagtcttccttttgcggcaacggagagagcccagcgcttactgtcaaaccacacgcgagagaaaaaaaagcattagggggggccgccactactggtggaacctgacgtgagccatctgta

SEQ ID NO: 53972 - DNA, 399 bp, Glycine max
  unsure (1)..(399): unsure at all n locations
  Clone ID: PAT_MRT3847_1974C.1
aacaccaaccgccaccaaaggagggattaaaaaagaaccaaccagaaaaaatcacccaaatcaganngaaagaacgacgaaaacggaggacaacaacggaaaacaaagacgccaagggacaaaacaccaaaagttggggcgggaagacaacaagaactaaacaacaatgaaacaacacagccgcaccacagacacaaaccacagacggacacaggagcgcagcgcggacaacaaccaagagcgccgtccacaacagagaaagcttgggaacgaaaacgagaagaccaagaggaacaacgaaccgacgagaaaaccaaatgagcacgagagagaaagcacggaccgggagaacgccatggcgaagaacgatgcgagaccggacacgaaccagagagaaag

SEQ ID NO: 53973 - DNA, 153 bp, Glycine max
  Clone ID: PAT_MRT3847_19750C.1
ccggaattcggatcgagcctcgagcgaagacatggcggaaatgcattctatgcaccagaggccgatatatgatggccaacatcttgaggatggagaaactccttgctgcactcaactactgagcacggcaaaatacctgtacaccatggacac

SEQ ID NO: 53974 - DNA, 204 bp, Glycine max
  Clone ID: PAT_MRT3847_19751C.1
tctcgagcctctcgagccgaatcggctcgagcgttcaagatagacatgtatgtgttcctctcatctgctctctctgatgttctcttgtccctctcttcttatccgctcttttcagggttgtctcaactcttcgattctgggcttaaactctcgcttccgattcagagtcggatttagggcttccgtggcttggttctgactccc

SEQ ID NO: 53975 - DNA, 410 bp, Glycine max
  Clone ID: PAT_MRT3847_19752C.1
gccggccgggccgggattggttattgtactagcagtgctcgacccatcaacttgctcctccattaatattatattggtggacaaatatttctcggtctcaagtgggggttttggagggagaggaactgctacttcattattgagatgatgatgaatttgttgttgttgttgttgtgtactactactacccttttggtttttgttcttcatggcccagcggctggttctaccacgtttgcgccgaggaggtagggtgatgatgcctttagaagttgttttcccatggaaagtgtaaatttttctgctcaaatgagagttccagtagttttttatctcgttgtctgttcttccaggtaaatgacttgctatcaacgaccagctgaacaagttaccaaactcgtcaactatac

SEQ ID NO: 53976 - DNA, 1393 bp, Glycine max
  Clone ID: PAT_MRT3847_19753C.1
ggtcttgaaccaacccattttgtatccttttccatagactacagtgggcagtgtctgtttctgctggcggtgctttctttccgtctctgggcttcacaacaatgaaaggcttccaatccgatttatcctccgccgttcgcctcaacattggaggcaagaaattttgcaccaccaccgatactctcactcagcgcgaacccgattcaatgcttgccgctatgttcagtggccgccacacgctgtgccaagatcctgacaaggggtatgtgtttgttgatagggatggtaaacactttcggcacattctcaattggttaagggatggtgtggtgcctactctcgaggagtctcagtactcagagctgttgagggaggctgagtactatcagctacttgggcttattgatggaatccattctgtccttaataagaagaatgaagacgatgagttccatacagagttgacacgaacagatatcatcaagtgtatacaatctgagaaagtaaggtttcgaggggttaatctttccggccttgacctctctaaactggatttatcttatgttgatttcagctatgcttgtcttaaaaacgtgtttttttcacgagcaaaccttcaatgtgcaaagtttcgagatgttgatgccgagggctccatctttcacaatgcaactttgcgtgaatgtgaatttactgcggcaaatcttcgtggtgctttattggctggtgcatgccttcagagtgcaaatctacaagatgcttgcttagtagactctagcttctgtggagcagatctgcgtactgcacatctacagaatgcagatcttaccaatgccaatctagagggagccgtcctagaaggagctaatttgaagggtgcaaaactgaacaaagcaaacctgaagggtgcaaaccttcaacgagcttatctttgtcgtgtcaatcttcgagatacagaattggaaggtgcgaggctcgatggtgcaaatttgcacggagcaattagataatgtttgtgctgacaatgaaaaaattgggaagttgcaatatgcttatagaatgtcaataccagatgagtggtgaacttgagaagttgaacgtcgaaagctatcttgtgtttgagagtaattattagtgctgctcgtgaagttgctcaattgggcgttgatattgtggttatgcctgctgatgatattctccaacatgctgttgatattgagaaaagccgtttaggctgttcttgctcatattttgtattcattgtggtttgttgcttttctaatgtatccagcgattgaaaattggaatattactatttatattatatgaatcttcttgtgtacagtgcatggttgataaaacttggtaataatcaagtgtgattagcatgtcc

SEQ ID NO: 53977 - DNA, 187 bp, Glycine max
  unsure (1)..(187): unsure at all n locations
  Clone ID: PAT_MRT3847_19754C.1
gcatctggtgttcacggaaggaacggtgatcctttctgagaggttctggagcacaaaggatcctggccataacgcattcactttttgaactgggggggctccgnactctggcccggggattaacgcgtgcttggccggcaaaatattgcagtcgctcggcgggggggctcttcggatccggcttatg

SEQ ID NO: 53978 - DNA, 523 bp, Glycine max
  Clone ID: PAT_MRT3847_19755C.1
gggatgaaacattctcccccaaaaaacccacccccaaaaagaaaccggacaaaaaaaaagaaccaaaaaaaaaaagtgccaagaaaaacggacaaggccaccgcgaaaaaacgcctgccccggggccaaaagccggcggccccaggccccaagccgtcaggcaaaaaaacaccaccatggggcccccagggcggaaaccaaaaaggggaaccggtaaggcaaaaccccccgggggaaaaaccccccgggaaaaacaaaagggcccttacaccccaaagcgaaaaaaaaaggaccggaaaaacaaggccaaaaaaaaaaacctttgaacattagggccaagccaaaagaggggaacacaaggggcggaaacaaggcccgccccaaaaaaacccccgggaagggcaccccccctggaacaacactaccaaggggaaggtctgtgtctgggaaaaaaaaccgaacagaaaaaaggggggtcccgaaaagctaaaactaacaaaccaaaggccccaaaggggccggg

SEQ ID NO: 53979 - DNA, 225 bp, Glycine max
  unsure (1)..(225): unsure at all n locations
  Clone ID: PAT_MRT3847_19756C.1
caccttccaccancaccancactncctctttttcaatggagtagtagcgttcacgnggcttccgccatcgccgaaaactcgaacaacctttcccatgtntcntctgtgggggaaggaagacactgaccttcgtggtntctcttcttaagcaanagcactanggcgaagatgacgcgggcgatgatgaaccaatncttcaggacatnaatacggtggcccaattca

SEQ ID NO: 53980 - DNA, 575 bp, Glycine max
  Clone ID: PAT_MRT3847_19757C.1
gtccaagaggctttgctatatattacatgactaatatcattgattcttttggaaggatgattgggtaacatacatcctgcccaaacgcatgctacataggaagacacctattacactgtgatgcctatgtgtgcaatatgcgcatgattactgctcattccaaaattgaaatttgtaacacggtaatttgatgaaaagattacatgtcttgcttcaccgggaagtcagtaatactgaacagcttcacaccctacgacgtgcttcgaacccttgtatcacattgttatgattcatgggacacggaagaccagaggtggtgctattctgtgatcatcaagctgaaactagcataccacgtaacatgctggatggccaccgcaacttaccatccatgttggtcagaggctgatctggcatcaattgcttcccgccgccaaacactaatgcactcatgcacaaaacactgcactggctcgtattctagtgtgcacacgcaaaccagtgcgtataagcatgcgagccatctcaaacaatagatactttggactgctaccatgaagaccgatgtgatagag

SEQ ID NO: 53981 - DNA, 509 bp, Glycine max
  Clone ID: PAT_MRT3847_19758C.1
ccacgcgtccgcgcaactgcaagcaaccactgatccagcccgttctatgtcccggcgaatggtgacgaaccaggacgcggaggcggcagcgccaggggcaggggcggcggtagatccgatgcggctagcatcgcggtggcggcgatcccggccagagtggaactgcgcgtcggcggagctggaggctgagccgtccgagctcaacaccgtcaacagctcgggactcttctccgtcgtctctaccgacaagttatcggtaaaatacctcggcagccatcaccacggccacgacgtcggtgtcgtgcaggccgaccgtcccgcgccgacgcgccgagccgtgtactacttcgagatgggcgtcaggaatgctggatacaaggggcagacatccattgggttcacgagcgagagcttcaagatgaggcgacaaccgggctgggagacaaacagttgtggataccatggtgacgacggccatctttatcggggtcaagggaaaggtgaatcat

SEQ ID NO: 53982 - DNA, 627 bp, Glycine max
  Clone ID: PAT_MRT3847_19759C.1
cccgcgtccgattgaacgttactcaaaaacgaaaaaaaaaaaaattcccattgcttctgattcttctgggaggggttagaaatcaccaatcacctcattctattcaacttgatacaaaaaaacttgtgattttttagaacaatgaagagggtgaagaagctatacccatttttggtcctacccaacaggcctaaacctcttcaaattttcatggctgtgatgttcctctacttgctcttcaccaccttcgaaatcgaaacctctcttggtttcagaacgaggtttgtgtcagtgtcctcattgttggggaatgaagatcaacaccaacgtacccattccagcaaagcctcaaactttccctcacaaggggtgttccaaggctcactgcatcgaaaagccttgcagggtttgcagaaagtttccaccttgagtttcatcgaggctttgaatgacaccactgtggaagaaaacatgttttctgaactccacaaggctgctaggcatgcttgggttgaagggaagaggctctgggaacaagttgagagtgtgaaagaaaccatgaatgtggcaaggttcaaggctgagaacctttctgattccggtcagcattcaatttcattatctggg

SEQ ID NO: 53983 - DNA, 387 bp, Glycine max
  Clone ID: PAT_MRT3847_1975C.1
ggccgcccttttttttttttttttttttttttttaaataacacttgcaacgttttgtttcaggtttatgattaggctaaaaaactacgagatatctgtttatattgactgaatattaccctgctatttgcatgccagaaagaaaatctgaattgttgggtaagacaaatgacgttcgggcataatagattcctccagcatattttatgaattgagtgatgggattttgagtaaaacggctgttaactggctaaaaattgggtagtgtaataacctgtgtccttgactgatggtgatgagctagaactctgcctattggatcatacagactcgtctcctctttcataagaaagtgattttgtttgtcagaccggattgtggccttttt

SEQ ID NO: 53984 - DNA, 1006 bp, Glycine max
  Clone ID: PAT_MRT3847_19760C.1
cggctcgaggcaagttcgaaacaggagctgatatagttggtggtaaagagcttattgaggagattgctagcggtaaaaataagcttaaagttgacaaatgcttctcaactcctggaatggcacctcatcttggaaagatagcacaatatcttagaaagcgaagactgatgccagataagaagctaggtactcttactagtgatattgctgggcagttgaaagagctaagacaaggccgtgtagagtttaaaatggaaagtaaatcaattttgcatgtgggacttggaaaggtaagctacaaagaggaggctttacgggagaatattagtgcgtttatgaatgctgtattgcttgcaaagcctgctggcttaaagaagacttccaaatatgctgggtatgtgctgtctgtccatgtaagcagcacgatgggcccaggattacctgtatcaatacaatcaatatccaaagcagcagataactacaagaaaatgcatgtggtatgaatcatgtggatatggcaaatgtgggcatttttctacatgaatccaagtttagatgaacatatgttgttgtcgtaggtttttgttcattgtcattgattatgtaagctttgtttagtgatatatgtggcaataagcgaaagttttgacatttttttgtgtaagcttgttgaattttctggtcaccttaatggtgtatcatgttcctcattgcaccacagaaaattatgccattactaagtttattattttaaagcaatagatactaaccttttgatatctggatttaatggtttattgtttactgatcacctgcaaactgattttatatgacaatgatcttttggggttgatgtgttaaaatgtatatgccaatgctctctggggttgcctctttgcgtatataacttgcagtggtcagtgcatgtgattttttaaacactcgtgaagttttattttttatttttaaataatttatggcccttctgtcgtcttctcgcagccgt

SEQ ID NO: 53985 - DNA, 288 bp, Glycine max
  Clone ID: PAT_MRT3847_19761C.1
accgggccgttttttcgtgagccgcttctatgagggcgggcccgtttgcgttttctccttaccctgaacggatactgtacgctagtgccggtacctaatccgccctatgacggggaaaatcctgggggctccctgcttaatcgtttagaaggacatgcctgttaaaaccctgggggtaccaacgtaaaggcccgtacagatcgtccttctttacactggtgcagtctgaatgaagagggcaaaacggaagcgcctttcctacgttaaaacacgcggaaaggttaaggg

SEQ ID NO: 53986 - DNA, 434 bp, Glycine max
  Clone ID: PAT_MRT3847_19762C.1
agggggaactgcgggtgtattatatatgaccacctcgtgttatataaccagatttctgagagaaaggaaagggtgtgtgaagagaatggagagttaagaggaagatgttaactgtcggagcaaacatgttctaagaaaggtatcctattggtacagcagcttatggtggtggtgacaaggtctacaaggaggcacccccagtttctttgtttgaacctgttgagctcaaattatggtacttttacatgagctggtatttgctaacattgtggcaacttttttggtccctttcattaccatcttaacttgtcttgggtgtcaacaaggtaatcctttcaagagtgccttttagttggtatatcaaggaacttgtttggggcctttaggtggcatgaatttttgtccctggttttcttgctcttgttgtaaatttt

SEQ ID NO: 53987 - DNA, 1877 bp, Glycine max
  Clone ID: PAT_MRT3847_19763C.1
ccctagcgtccgcccacgcgtccgaatttagtctctaatttctaaaactcgtcagtgcaatagtataatggacaacttcgaagatgctacagagccagtgagtcctagtggacgattcttcaacaccacggtgctatgtgcgtatgtttttggcttcttagaatcagaagttccaattgaattctctcaagccaagtatttgttcgaagatgtctttctacccgtcaatccacacttttcttccataatggtgagagatgaagaaggagaaatgaaatggaaaagggtagaggtgaagttcgaagatcacgtaaagattccaacgttccccgaaaacgagtcactagaattgtatgaccaatattttgatgactatgtgacaaagatattaatggaaaggacaccacaagataaaccactttgggaaattcatgtgatcaaataccctacaagcaatgctgctggcaccttaatattcaaacttcaccatgcacttggagatggttactccctagtgggtgctcttctctcttgtcttcagagagctgatgacccttctcttcctctttcgtttccctcccgaaaatcctcggcatcttcatctccttccaagaagggcttcttcaggttgttctcttcaactttgttctccttttttaactctatttcggattttggatggagcatagtgaaaagctcaattgttgaagatgatgagacacccataaggagtggtgaggaaggtgttgagtctctgccttgtgtgatatcaaacatatcctttgatcttgatcaagtgaagaaaatcaagtccaagctaggagtgacagtaaacgatgtaattactggggcaattttctatgggattaggctgtacatgcaagagattgacaataaggcaggcaaagcaaattccacaggattggtgatgcttagtactagaaacattggaagttaccaatcaatccaagaaatgatgaaggctgattccaaatctccttgggggaatcatatttctttcttgcacgtacccatacctaagctaagccaagccagcctatccaacccccttgaatttgtttggaaagcccaaaaaataatcaagaggaagagaaagtctttcactgtttttctcattgaatggcttttagatatggagctgaaattaagaggacacgaggccgtggctaaacatatctatgggacactaagaaactcaagtgttgtcgtatccaacttgattggaccaatagaacctatggctttggcaaatcatcctgtgaaaggcttgtatttcacaatgactggtggacccgagagtataaatattgcagttataagctacacaaaaacgttaagaattaccttaaaaacacagaaagggtttattgatgagaagaagttcaaattctgcgtggtgaaagcctttgaggtcatatccaaagcagcaatggagatacccaacaaaatcagaggttaaatgatctaagaataattaaagagataggggtcgtctaagggagactatatatgcttgggagtatgtccaagtcagtttaatttcatcaataagtagagatggtggattctaattttgtcaagtgttagaatgaaatttaaaaaatcggccactcaaggcaataataatagcatacatatcgtatgtccatgtaatttcttagaacagtgatatctcctccccgcaaaagaaatgaaggatcaatgttttccttctttagctttatttgatatatactaagtctagttgaattatggatttaatatcgcttttggtatattagattttaaaaaaaaacttctgggggggcccggtccccaattcccctttatatgggttggattacccccccttcatt

SEQ ID NO: 53988 - DNA, 275 bp, Glycine max
  Clone ID: PAT_MRT3847_19764C.1
ctcctattctcccaatatatatcattttccgttgtacatggatgcacaaatggggtggagcaccccgccagctcatggcggtgaatcactccaactaaaagcgactcgcctctcatgtctcgttactgcatagacaacttctagctcttcttcgactcctctttctataaccacgatgcaatagcatacatctttctcttgtggcagaatcacattatgatacccttgctggttcccaaaacctaattccaattcaatccaccatctctgtatca

SEQ ID NO: 53989 - DNA, 1160 bp, Glycine max
  Clone ID: PAT_MRT3847_19766C.1
ccacgcgtccattctggtatagttagatagctagctctctttcactacttctctgcctttaatcttccttcttatggaaccaaactttaacaacaacccaaagatgttacagaaaaagtggctttctactgctttgaatgtgagaagccaaggatcaggcagtgaaaccatagtctttgctcatggctatggaacagaccagtccatctgggagaagatcactccctcctttgctgaaaactaccgggttgtgctgtttgattggcccttttctggagctgtgaaggatccaagcctctatgaccctttgaagtatacctccttggaagcttttgcagatgagttgatcactcttatggatcagatggacctcaaagctgtcacctttgttggtcattccatgtctggcatgattggttgcttagcctccatcaagaggcctgaactctttaagaggcttattctccttggtgcttctcccaggtatattaatacagatgactatgaggggggctttactagctcagatattgagcagttattgaagaacatagagttcaattatgagaactgggtttctgccttctccttactagtagtggatccaaatgatgagccatccgttaacaaattcagagagtgcttgaaaaaaatgagagctgaagttccagcttccttggccaagactgtgttctatagtgactacagagatatacttgagaaagttgaaactccatgcaccatcattcagacttccagtgacattgttgttccacacaaagcagcggtttacatggagagcaaaattaaagggaaagttacattggaggttgtagacaccaaagggcactttcctcagctaactgcaagccttcagctagttgatgtgattaagggtgttcttggatgataattctcagtttcattccttttgtttagttttatacctgtttctcatttcatttataggttgatgtagttgtgtgatgattttatggttttcttgatgtggaaatagtgtggtatgtgttaattaattcattgtttgtacttgtgaaatagtgatgttaattagccttgtgggagtgtactttttttttgtatctcttctcttccgtttgttggttagtaaagtggagtggaaaatccttatttttttc

SEQ ID NO: 53990 - DNA, 564 bp, Glycine max
  Clone ID: PAT_MRT3847_19767C.1
gaccacatagacacacacataggaaacaagccggtcatcccgcacacccacttacacaaattgtataattagtaaacgaccacatagacacacacacaacgaccacacactaatatatatatatatactcaattacatttccacacctcacttaacgttcgatacaattctctaagagtgcgtttggatagagaattttaactgaagaaagtaatttatgaagaatttaaagttttggaattttattttctttataacctcattctcttccacctgaaagtttccaaaatctcattcttgaactctcgaccttccctcgcattgatgatcctcttcttcaagaaacaccgtcagagcttgtggagtgtcgatcgggtgcgagcgtgaggggacacgtagaactgtacctaccagtcaggcagggaagcagccgtcgatgccaatcacttgacggaggtgctccaaatgggttagctctatgagctaccctaacctagggctccaaatggcggagagagtcgtcaacatgacgaagagaactaagacagcctataggctctgata

SEQ ID NO: 53991 - DNA, 402 bp, Glycine max
  unsure (1)..(402): unsure at all n locations
  Clone ID: PAT_MRT3847_19768C.1
aaaaaaaacccccccttcccttttttttacaattcttaaaagagagggggggaattttttaaatagggagaactttttcaaacggggggcaggcctaatttctttttttgggtggaaaacaaacccctttgaaaagaaaaccctcccccccaattttgccaaaaatttttcttttttaaaaaatctggctttggcctggggaaaaaaaaaagctggcttttaagggtttccaccaattttaaagttttgggaaacccctaaaaaaacatcaaaaggggggggttgtttgggtttttcaccagggaaccttaattcccccgaagtttgtttacccctttcaaaacttcacttttnaaaaccttttttgggaccacccttttcttttggaaaaatcatttcccc

SEQ ID NO: 53992 - DNA, 968 bp, Glycine max
  Clone ID: PAT_MRT3847_19769C.1
aggttggctgattcagatatggcggctattttgtgggaaatggtgtttcgaggaacagacacagttgcaatactccttgaatgggtcatggccaggatggttttacaccaagacgtacaaaagaaagcccgcgaagaaatcgacacgtgcatcggccaaaacagtcacgtgcgagactcggatattgcaaatctcccatacctccaggctatagtaaaagaagttctccggctgcacccacccggcccactcctatcatgggcccgtcttgcagtccatgatgtccacgttgacaaagttcttgtgccagctggtacaacagcaatggttaacatgtgggccatatcacatgactcatccatctgggaagacccatgggctttcaagcccgagaggttcctcaaagaagatgtttctatcatgggatcggacttgaggcttgcacccttcggggctggacgtagggtgtgtccgggccgggccttgggtttggccacgacccatctctggctcgcgcaacttcttcgccacttcatatggcttcccgcgcaacccgtggatctttcggagtgtcttaggctttccatggaaatgaagacacctctgcgatgtctagttgttcgtagataaaaaatataataacgtaagccttttagctgaactatgtttgatgtgcaattatagaatgatcgagcttgtatctgatgtttgatgttaaagatggtactcaaatatttagtgaaatatttagagatgagtttatcgtataattatggaacttatctctaagctttatttcactttatttttaagggtatcaaattattaaaataaatatctagtgccaggactagaggtggatgtaagaaaagattggatcgattaagaaggttttatgtctctttaaatcgtaaaatgtaaattgctgtaatgtaatgaagttgcttccgtacgtatgcatgcaaaaa

SEQ ID NO: 53993 - DNA, 557 bp, Glycine max
  Clone ID: PAT_MRT3847_1976C.1
cctcgtgccgaattcggcacgaggcaaccattcccttctggttcattctttgaaaaaggtggaatgccttactgtcaatcttgcttccaaggaactttcagttcaaaatgcgctggatgtggaaatatggcgtctggtcaattgatcaacgctttaggtcaaaaatggcactcacaatgcttttgttgtagttattgtagaagaccattcaatggccttccttattttgaaaaagatggaaaaccatattgcgaacaacattatcacacttctgctggttccatttgtgcaggttgtagaactgcaatcgttggtagatgtgttgatgcattaggtcaaaaatggcaccctgaacactttgtgtgttcttattgtatgaacccactctctggcggtggttacactgaacaacatggtagcccttattgtcaagaatgctttgctaatctattttaaaattgataaattttggaatcgcttcagtaaggaaatattgttttattacagaattgtatcttaaataaattagtgtttcaaaccgaaaaaaaaaaaaaaaa

SEQ ID NO: 53994 - DNA, 327 bp, Glycine max
  unsure (1)..(327): unsure at all n locations
  Clone ID: PAT_MRT3847_19770C.1
cccagtcgtcgcgttcgaagaggaggagaaaacaaaaaagacgcgcgaaaagacacacccccagaccgcccgaagcccaagaacgggaaccagcaagaaggccgcacggagaagggaacgcagaacccccggcaggaggaaccggcccacagagagccagccacagcaccnggaaaagagacgccgaccagacacagcaacgacaaagcagcagacccagccaaccgcggcaagaccgaagngacaaaccaacaaaaacaccgcccctttgcgaggggacggcgaaagaaacagaacaagcggcacgaccaagaaaagccacaccca

SEQ ID NO: 53995 - DNA, 545 bp, Glycine max
  Clone ID: PAT_MRT3847_19771C.1
caaccccccattttgaaaaaagggaggggggaatacccaaaattgaaaaggattaaaccaggggggggaaacaaaaaaaaaaaacgggccttttcccaaaaaaggtccacagaaccccccaaaaaaaaaggttagggccggaccaattgggctggggggagggtaaaacctttaacccctttgaaaaaatttggagggggggaaaacttttaaggttaaggggggcccccttggaaacaggaaaaaaaaaccacccccttggaaaaccgccggcccaaaaaaaagaaaaaaggaagggcttaacaaaaaaaaaactggttggaaaagtaaatttttttgggggaagttccaacggcctggagaagggctaaaaaaaaagggggggggggacccggttgggggacagaaaaacaaaagggctggccccccggggttggggtaattaaaaggggggggggggaaatttcccaaccccttttattttttttttcctcgaaaaggcccggggggaaaatttaaaggaaaaatttgcggggaatcctttt

SEQ ID NO: 53996 - DNA, 155 bp, Glycine max
  Clone ID: PAT_MRT3847_19772C.1
gggggacaacaaaatttgcataacaagggggggggcataaatgccctttgtgaacattacttggggggtccaaggttttaacaaacattttgttgctttttttaccgcgccaaaagctttattcaaaagaccaagatgcttacacatgggttatt

SEQ ID NO: 53997 - DNA, 521 bp, Glycine max
  Clone ID: PAT_MRT3847_19773C.1
ggctcgagagcaaaatgaacagggcgaggtgtgggagaatcctgtctaccaaccacgtcttctatccaggggacacacattccatgagctaaggaccatacttcaatctttgtgtacccatggttgtattggcaacagggcctgctataagaggcggggtgctggacaagccaggtattgaaaatgtcacccctggccgtgagtgtgaatgtgatttacagaactcacggagctcggcaccgacctatcgcgtaatattgcacaacgacagactcaataaacgggaatactatgctccaagtgctgatgaaggtcatacgtggcatgacccttgataatgccgataatctcatgcaagaagcacactacattggatcgtcagtggtgatcatgtgcgaccaagcctatgctgaggatcactgcatgcatctaagatgcattggattgctcatgtcaattgaacctgcatatgggggtcgcagctgacaagtctaacttgaaatcacactggctctgatgct

SEQ ID NO: 53998 - DNA, 200 bp, Glycine max
  unsure (1)..(200): unsure at all n locations
  Clone ID: PAT_MRT3847_19774C.1
tcgagtngaccctcttcccatactaatcaaggctttattcaaacatgtagcctaaacagaggggttttacaacactaggtgcgctaataatattcgtgcggatgtttcaaggattgtagcaacacacaactcaagtgtgctcttctaattctattgatgctatgtagcaacctgcactctacatagattattaccggatc

SEQ ID NO: 53999 - DNA, 270 bp, Glycine max
  unsure (1)..(270): unsure at all n locations
  Clone ID: PAT_MRT3847_19775C.1
taagaagtcaacatacagattttgtatatggtggtccagtccagctacgatttccaaatgcgattggttccaaaacttctctttattcatgtccatttctttgcagttgtgagttgtatgtatcattcattggctttctatgctatgatgcngatatnncnacctanaccactctgatanggacacaattnnaggcctctanaggctcgntnggntncangggaannncccccaaaaaaaatnnngggntngcaaaattngagnnngggt

SEQ ID NO: 54000 - DNA, 400 bp, Glycine max
  unsure (1)..(400): unsure at all n locations
  Clone ID: PAT_MRT3847_19776C.1
cttctnnncccgggaagggggggggttttttaaccaaaaaaacctttttttcctttgagaaaaaaaaaaacaaaagggttttgaaaagggctttcaccaaaggttcctaaataaggaaaaaaaattttcttttttccattgggggggggaccctacaattgggaacccggaaataactcccccgggaaaaaaacttttccaaatggttcccattttgcctccgaaggggttcttccaataaaaccccccggggggcttttaaaattttttttttcctttttatttgggggggtgtgttttttttttttttgggggccaaacagagttttggcgggaacccccaaattttttaaaaaaggggtgttttgggcaacccccccaaagcctgcgcgggttaaaa

SEQ ID NO: 54001 - DNA, 232 bp, Glycine max
  Clone ID: PAT_MRT3847_19777C.1
ctcgatttgctaaatgagctacttttagtcctttggcggtatctttgtattactgtggcagatgctactatcctcaaatttgaaaaacttactaagtttctttaccttgtccataccctatagctaacaaccctaaaaatggtttcattttctgcatggtagtatatcttggagtttttaaagatggtcatagtagaaaaattgctttaggagaaattaatacatggatcag

SEQ ID NO: 54002 - DNA, 484 bp, Glycine max
  Clone ID: PAT_MRT3847_19778C.1
catcttctttgctctatttctgtttagtgccttcaccagcttatacctaccttcagccatcactgatgtcctgctccataatgaatgcaaccctcttcaaaatggtggtccatattatatcttgtcagacataacaacatttggcggtataagagcatccccaacagtaaatgaatgatgccctctcactgtggtgcaatctcgcaatgagctcgacaaagggattggaacacccatatcgtgcccatatcgaatccgttttatcgccgaaggtgatcctttgagtcttaagttcgattcatttgcagctataatgctgcgtgttggaattcctaccgagaggtctgctgttgacgatctaccagaaagacctgatgttcaaatctgtgagaacatacatgcaatgcatggctggtctagacttgagagagctcctgatgatgaatcctaaatctataagcgtgtgttgtgttcacagcaagcg

SEQ ID NO: 54003 - DNA, 467 bp, Glycine max
  Clone ID: PAT_MRT3847_19779C.1
tttttttttttttttttttttttttttttttttttttttttttttttttttttttttttatcagggtaagcaaaaataattcacctttcttgggaaactttccttttttgatagggaaccattgggaaaaccggaaaaaattacccgaatcttcccaaagattaacctaagggtcccccccccaccaaaagagaaccccccaaggaatcaaaaaatttccccccccccctgggtaaaaacctcccccaggtttgaaatttttcccttccccaccctggggggggggttaaaatttccccccaaacccaccccaaaaaggccataaaggggatgaaccctttttggccaaaaaatcccagccccccccttccaaaatttccaaccttccatagctcccaaaaaaaaattccttccccatagtagagactcaaggaacatgtcatctctaggcccccccctgggtctgg

SEQ ID NO: 54004 - DNA, 903 bp, Glycine max
  Clone ID: PAT_MRT3847_1977C.1
aattacaatggctgctgtttctttaaggctcctttgctttcttttttttctctgtttcacaataacatcacaagccgcgcagacatgtgataacgacacagggaactacacagtaaacagcacgtatcacaacaacctcaacaccctcttatccagtttctcttcccacaaagaaatcaattacggtttctacaatttctctcatggccaagacccagacagagtatacgccattgggctctgcagaggagaccaaaagcctgatgattgcctcaaatgcctcaacaattccagagtctctctcgcaaaggagtggcgaaaccagaaacatgcgattgattggggtatagagtgcatgttgcgctactccaaccgctccatatttagcctcatggaaactcaacctatggtggaactcgtgtacacgttggatgtaaagggttcagtggaacaattcaacgaggcgctgcagagcttgatgaggaatctaacacgcacagctgcatcaggtgactctcgtctcaagtatgctacggctagcacacctgctccgagttttcaaaccatatttggttatacgcagtgcacccctgatttgtcatcggaagattgcaccaagtgcttggaagaagctatttcaaaaattccagagtgttgtagtggcaaggctggtggcaatgttttaaaacccagttgtagaattagatttgacccctacgtcttctatggaccaacattaaaattagactcagatgcaccatcagtgtccaccaacaaaacttcttcttcaccaggaaagagcaacaacacatcaagaactatcatcgccatagcagtgccagttgccagtgttgttttagcgctcagtcttttctgcatctatctaacagtgaggaagccaag

SEQ ID NO: 54005 - DNA, 187 bp, Glycine max
  Clone ID: PAT_MRT3847_19780C.1
gcaacctcaactgttacgcttagtactccacgaacaatattcagtctgtaatgggtatgagagtgaatacactctttgactcttctctgggactgtccatagctgcagacacaccatacagtgcacagtcccaatccctcagtcctggagagaccatagtttccccaagaggactctcaggacgagg

SEQ ID NO: 54006 - DNA, 417 bp, Glycine max
  Clone ID: PAT_MRT3847_19781C.1
caatttaagctattcattcattttgtgacagtaataataatggctgcagaacatgttctgaggttgctagattcattctggtttgaggcttcaattctctccagcaaaatccctccaacaaatcctatctctcatgatcacaataaggtggtggaggaagtgcttcctcttgatgatgcaaagcttctactagttccaactcctacccttgaagttaggtcctatagtgaccaaaacttggactccacaacatgtcttttgtgtgattattccccatcaccaaattctgtgctcaccccacaaaggcttaggacaatcccttctgagagggaaatcagagaattctctagtggaaatcatggaaaagaaggtatgagcaataagagaaaacaaaaaggctttggtcatggaagaagg

SEQ ID NO: 54007 - DNA, 235 bp, Glycine max
  Clone ID: PAT_MRT3847_19782C.1
atcatgggggatcagtttgcaggtgatgcagatggcgtttatcatcggcggctactcgctcggcggcgcggacttgctgcgtcgcgcgatgggcaagaagaagcccgaggagatggccaagcatcgtgagatcttcgccgagggtgcggcgaagaacggcctcacgcgcgagaagtccgacgagatcttcgacttgatggagaagttcgcgggctacggcttcaacaagtcgcac

SEQ ID NO: 54008 - DNA, 463 bp, Glycine max
  Clone ID: PAT_MRT3847_19783C.1
agggaaaaaaaaacatgggcattggacataaagggccctcaacaatttaaaatccctcagcaaaccaaggaaacaaaaaacaaaagcctggggggaatcaattcatggacatttgaattcaaaaacttttttttcccctggagataaaaaaaacatcattaaacacttgggaggggttttgacccaataaactttttaagcaaagctttcttttaaaaaatttttcgcttctcctctggggcttttggtttgaccttcctttttttttccaaaatccacttcaagagttcacggtggtggttttttggaattggctctcgattgaacacgggatttgtaaaaaatggggaagacacaggagtctcaacaacatgagggggagcatccttagttgaaacaggagtagcattttgttcctcctcaccagaatcttttttttttggccccataaaacaaaaagctc

SEQ ID NO: 54009 - DNA, 495 bp, Glycine max
  Clone ID: PAT_MRT3847_19784C.1
atagaacattatgtgaggttgagatgtgtcatcgatatggtgccggctcctttcttgacgaatacgtatgatgtgctggagagatcacagtgactgaccaagcgataatcgtgtggagaaagtgataacaccttcttgatgcgtggaagcatgccgattttgcataatgattggcttgcgaagtatttcaggtcacaacatcttatcctattatggtcgacagcgtaaatccctatatgattcctagacattgtaccagacaaatgggaattctcgaacgagcatttctggcgagggctcaacgatcttctatccgagatcaaacgccagatgaccgagcctgactcttgctaacatcccacggaggcctgaaagtccggagagggctgcatctatcacgtgaactctggcagcgacgactagggctccaccttaacctggagctcgttctccggctccatgatccagggatcggaggaaacactcacaacggct

SEQ ID NO: 54010 - DNA, 429 bp, Glycine max
  Clone ID: PAT_MRT3847_19785C.1
cggacccctgggcggaccccggggaccccccgggaaacccgggccgggacccggaagggccccccctttccctataggggggcccattaaaccctggggggggccgggtaaaaactgggccccgggggaaaaaaaaatccccccccaataaaaaacaaaatcccccccggaaccccaaagggtaaagcccggggggccaaaggggggagcccgcgggccctaatgggggggccccccccgccccattgccggggggaaaacccgcggtgccaaggggaaaaacgaatcggcccacccccgggaaaaagcgggtcacccctcgggggcagggggggtttttctttgcccccggggggggggccatatttaaagggcctaccccccccggccctgaaaaatttcccccaaggcccccaaacgggtttgccc

SEQ ID NO: 54011 - DNA, 236 bp, Glycine max
  Clone ID: PAT_MRT3847_19786C.1
accacgcgtccgaccacgcgtgcgtacggctgcgagaagacgacagaaggggaaagaacagaagagaatataacgccctacctaaaaccctaatctctcaaaaccctacatatggcgtcagggaaagataattcgtctactccgcaccagtggaacactctcgggcatttccgactgcttgtccgggactcatgcggcgtggttttactcctccataggatgcggcgttgcatgga

SEQ ID NO: 54012 - DNA, 990 bp, Glycine max
  Clone ID: PAT_MRT3847_19787C.1
gagaatccaaaatcatgaccccatacggttaaccaagagagagaaagaccgcccttaaaaagaccgtttaatagacgcgttgcgttgcgctccgtttggttagaaaacccagttagatagagagaagaagaaagcgtttctggaattttcgtttcgctggtgtatcgtgtgcgtctgcgtgtggaggttcttttctttgcaactttccttcaaattctagattccttccctttcttttctttcccttataaccaccaacctctccctttccccctcgattttccatcatccttctccctaacggtatcgagaaaaaaaaatggcggaagaacacagatgtcaggcgccgcgcttctgcgccaacaattgcggtttctttggcagccctgccacgcataatatgtgttcaaagtgctaccgcgatttccagctcaaagagcagcaatcttccaacgcgaagatggttctgaatcagtctctcgttccgccaccgcctccgtcggtgatttctcagccgtcgtcttcttccgctccggcagcagatccggcttcggcggtggttgttgacgcgccacgcgcggcggaggagcttaaggcgccgcagcagaaccggtgcatgacttgcagacggcgcgtggggctcacggggtttaagtgccggtgcgggatgatgctttgcgggacccaccgttacccggagcagcacgcgtgcgagttcgactttacccacgcgtccggggagcagatcgcgaaggcgaatccggtggtgaagggcgagaagctcgagaagatctgagaggaatgaaagaacgaacgaacgaacgggaatccgggtcgggtcgttgttccgtgtggcgtgggtgttgcaaatggggcgccgtaaaaggcggtgggggtgggtgggtgggtcattgttatgttgttgcgttgtcatcgtaaattaaaaaatttagaaacgtttcaattgtcattcaccttctttctgggttg

SEQ ID NO: 54013 - DNA, 308 bp, Glycine max
  Clone ID: PAT_MRT3847_19788C.1
gctcgaacgactcctgcaaaaccgcgcccagtcatgtaactgtcatgcacttgcacgcatgacacggccttttcaaggggaagttcttcagaagagttgtcctcatgttactttgcttgctactgtgacctgttttatgatgaacgtcttgcagctgactctgttaggtgaactatgtatacggaggtacagccaaatagggatattgttgaacatacactggtacctttccttaagactctctctctatctatctatctcttagaatatgtctctcatttacttctatatctctgtcacacagtcac

SEQ ID NO: 54014 - DNA, 956 bp, Glycine max
  unsure (1)..(956): unsure at all n locations
  Clone ID: PAT_MRT3847_19789C.1
agaaaacccagttagatagagagaagaagaaagcgtttctggaattttcgtttcgctggtgtatcgtgtgcgtctgcgtgtggaggtatcgagaaaaaaaatggcggaggaacacagatgtcaggcgccgcgcttctgcgccaacaattgcggtttctttggcagccctgccacgcataatatgtgttcaaagtgctaccgcgatttccagctcaaagagcagcaatcttccaacgcgaagatgcccacgcgtccgcccacgcgtccgcccacgcgtccgcccacgcgtccgcataaccttagtcatcttcttctttcatctttctccctaacggtatcgagggaaaaatatggcggaagaacacagatgccaggcaccgcgcttctgcgccaacaattgcggtttctttggcagccctgccacgcagaatatgtgctccaagtgctaccgcgatttccagctcaaggagcagcaatcttccaacgccaagatggttctcaatcagtcgctggttccttcaccgccaccggcggtgatttctcagccgtcgtcttcttcttcggccgcggtagatccgtcatcggcggtggttgatgacgcgccacgcgaggcggaggaggttaaggcgccgcagcagaaccggtgtatgacgtgcaggcggcgcgtggggctcacagggttcaagtgtcggtgcgggatgatgctgtgcgggacccaccgttacccggagcagcacgcgtgcgagttcgacttcaaggggatggggagagagcagatcgcgaaggcgaatccggtggtgaagggcgagaagctcgacaagatctgaaacgaatgaacgaagggtgttatggtaatttcgtgtttatcaagttggtggtgatggataacggatgcgaaacgcgggtcggatcattgacccgtaaaagcggntggtgagtgggtgagtttggtgggt

SEQ ID NO: 54015 - DNA, 243 bp, Glycine max
  Clone ID: PAT_MRT3847_1978C.1
atcaaaaaaaaaaatgtcaattgaagaaccctgtcgaaaacatttttatgccataacaaacagacaataagtttactcgagttttacacgggaaaactttaaacaaatgtttccatgaaaaagttgttcattaaataaacaaataacgttctcggcggctaaatgacgatggaaaaataactttacgagacctgaaaatgcatcttgttccactgaactacatcaaacattgcaaaaactggg

SEQ ID NO: 54016 - DNA, 1274 bp, Glycine max
  Clone ID: PAT_MRT3847_19790C.1
ctttttatgtttttttgtttttttagattctttattgcgctccgttttggttacagaatacaaacaaacaaaaagaaaacccaaaataaccgagaaaagaaaattagatagagagaagaagaaagcgtatctgagaattttcgtttcgttggtgtgtcgtgtgcgtgtggaggttcttttctttgagactttccttcaaattctagattgcttccctttcttttctttcccttataaccaccaacctctccctttcccccttttcatttcttcctcgattttccatttccataaccttagtcatcttcttctttcatctttctccctaacggtatcgagggaaaaatatggcggaagaacacagatgccaggcaccgcgcttctgcgccaacaattgcggtttctttggcagccctgccacgcagaatatgtgctccaagtgctaccgcgatttccagctcaaggagcagcaatcttccaacgccaagatggttctcaatcagtcgctggttccttcaccgccaccggcggtgatttctcagccgtcgtcttcttcttcggccgcggtagatccgtcatcggcggtggttgatgacgcgccacgcgaggcggaggaggttaaggcgccgcagcagaaccggtgtatgacgtgcaggcggcgcgtggggctcacagggttcaagtgtcggtgcgggatgatgctgtgcgggacccaccgttacccggagcagcacgcgtgcgagttcgacttcaaggggatggggagagagcagatcgcgaaggcgaatccggtggtgaagggcgagaagctcgacaagatctgaaacgaatgaacgaagggtgttatggtaatttcgtgtttatcaagttggtggtgatggataacggatgcgaaacgcgggtcggatcattgacccgtaaatcagtgtgggtctttcggggtgattcttggttaccacctgtctttttctcatccctggccttattaaaaatcactgtgaacccctcagctgaggttggatcattgacatcccattcaccaaattttggaagtggccggcccttttccgacatcaatacgacgaggaaatgttttcagggaaaggaaaaggagcgagtaaactccaattaataaaaggaatcggagagaggagaaaattcagagagagagagagagagagattgagttagagagagaaagtgcgagaggatggggcacagacctccgtttcccctttcagagtactcgtatatggctcggcactttcaacact

SEQ ID NO: 54017 - DNA, 256 bp, Glycine max
  unsure (1)..(256): unsure at all n locations
  Clone ID: PAT_MRT3847_19791C.1
ctgaatccacgcgaatagatgctaggtgcaccaatgggaacaacgccctcccaattgatccccttccccccaactcttcaaataaaggctttgnatatgacaccatacaacaactcccaattccttcttccccaagaatttgggcaaccacaaaaaattgtggcactacactccaatgaccaggctcaacttgaaactctaatgcacacttcccactaaggcccaccctttcaatcttgccacttccctcaccaat

SEQ ID NO: 54018 - DNA, 185 bp, Glycine max
  Clone ID: PAT_MRT3847_19792C.1
acgcgtccgaatagggcaaatgtattaatgtaataggtgaaatttgtagcataaaaaaatatatattcaccacaggaaagtgatgttcgcccttttgagatattttgtttcaaaatatcagttttgttttttcagatgttataggaatattactctttcactttatgcaatatatataaatgata

SEQ ID NO: 54019 - DNA, 434 bp, Glycine max
  Clone ID: PAT_MRT3847_19793C.1
ttcggggtgtcgttgcagctcctcagttctcactctacctacctctctctgtctctcacaaattcactgatttgggatttggagtttccactcctgtacttcgatctcgattttgccatagacgaggacaccaagtgatttagcttggtgacattatatacaacaatttaatatcagggatagaattgtgtgttgtctaagggattagctgaagtttctgagaatattttgaattctattggagagacaaaaaaaaaagttaaaggatcaacttaccacctcctagactaaaaaaagttgatacatttttattgaacgaattcacttatttggtaattataccaaacatggacctaaaatattccttctggtcctttgtataagatacaaatgtatatatgttgttaaatttataatatatgaatgatttgcac

SEQ ID NO: 54020 - DNA, 258 bp, Glycine max
  Clone ID: PAT_MRT3847_19794C.1
agcaaagtcatttcattcaattcattttaaaatatcacagtagccacccaatacatagaattttgttatactttctacacgcacttgcttcttcgtatccatctcttacccaaccatttgaatacattacttaacccacctcaaatccaaattcaaattcaattctatctcaacctaatgtatgactcttcctattgccttcactaatctacaattctacacaaatttcccaaacgcgaaaaagaatatgcacactaa

SEQ ID NO: 54021 - DNA, 318 bp, Glycine max
  Clone ID: PAT_MRT3847_19795C.1
gcttcactaccctgtctaacgctagcagtaggggtgattttaggggcatgctgagaattccaaataatctagataatcatgcctcctgtgatcatgcttgtatacgcctttagtgttcaagctctagtgttctacttaaatggaatattaacttccagatggcaatatctctcgaattcgatcattatactactacgcactcacactataccatagcactaaatcttggaaccactactcaacacattacccttatatacatatatcagacacagtaccattagaaactacatactaatgcagatacacatatacata

SEQ ID NO: 54022 - DNA, 733 bp, Glycine max
  Clone ID: PAT_MRT3847_19796C.1
taaatattttgcactgaataacattttttcttaattttttttatcatttcttttatttctaatattaatattatttaaaaaattataaaacctgtctggacataaaaaagaaaataactgggctacacgtttatgacggcgatactaaagcgtgcgttttgtttgagcgcctattgcattttgtgtcgatggctggtgctgtcagtacggtttccggcgaactgaagccgtcgatcttggatcgtgtgcgagcagcaccgccgcctcctgattcctcccttcttttggctaccagacctcccagacaagcggtgtcctacttgacatgctcaaagctttgtgcaatttgttttgttgctggcgcgattttcggttactcgctcaggggacgagttaagcgttgggcttccaagattctcaagaagctcagctgaaactaacataattcaatgattctcattacaggtattcatttggttggaattcaccttcatagattaaatgtaaaagtataatactactatcaattttgtgaaattcttagaggctccgttattgtgcttcatacggattttggaatgagtttgatggtcacagattcaattacttatgtacacaacggcttgttaatttctgctcggtgttatggtttttaacttcatttaactcagtttgctattacttcatatgtgaattatgatcatcttcttgttctcaggcattcctggtcaag

SEQ ID NO: 54023 - DNA, 348 bp, Glycine max
  Clone ID: PAT_MRT3847_19797C.1
ggggggacggccccagaaccccgggtgtgacccacgcggttaaacccccgcgaggacacgacagaggggggggcagagaagaaggcaagcccggagcaccacgagagaaggaacaagcagccgacccgccggcccccacaagaacaaggggcacagagacaaaagccgagaacgaagaggggcccagaaaacgcccaagggagacaaaacgggacaaaacaacggcgcccgaaccagagacagaccgagaaccagccgactgagcacaacaaagacacacaaggggaggcacaaaccgaaaagggcagcgacaaaaaacggacaagggaccgacaggcccaacggcac

SEQ ID NO: 54024 - DNA, 380 bp, Glycine max
  unsure (1)..(380): unsure at all n locations
  Clone ID: PAT_MRT3847_19798C.1
ggggaagcaaaaaaacaaattttatagaatccattataaataaaggcgggtgtctcaaaactctaatggtaaaatttgaaaatgaaaattaagggcgcccattattatttgtcaaaaagtaatagccctgctggcttaccaaagattgaaaattaacccatcagagcngctcagccccttttgtttgcgactcctttacaggcacatttttaaacttttgaattataaacagcatttttgcatcatccaaagtctcatattttttgggaacccctttttttttttaaaccccccactttgttctatgccatgaaaaaattttttgaggtggggtgggaagtacatttgttttaaccaaaaaaactttttttttttttttt

SEQ ID NO: 54025 - DNA, 341 bp, Glycine max
  Clone ID: PAT_MRT3847_19799C.1
aaccatgacagctaatatacaaaattgagacgcggctgaacaaaaatgagagtgttgagggtcccttctgatgcacgagagtgggtcctccccactaactttgaagaggctaaggttcaccaactactgttacaccgacatggacgctaaaactgctaacgcacaacttgctcttgtgaaagaaagatattgacgagagatccatgtttttgaaacatcacctctttatcaatcttcaaaggctgggtgctccacactaacgacaagagaccgatgacttctatgactacactgctgaacattatcacagacttttcgctactcaaaacgaagataaattc

SEQ ID NO: 54026 - DNA, 279 bp, Glycine max
  Clone ID: PAT_MRT3847_1979C.1
gaaaaggtccaagatccaatcatattttggcaattcaatgttaggggttaggcacctatttacatttttgtgtgtgacattaaaagaattttacaaacaatggcacttttctacaaacctaagatacacgggttacaattttacacactcctatgtacaaaggggggtatttattattagtattattagtattattacccatgtccgtaccaaatttgtcacaggtttttaggcaaaggtctatccccggggccatgaacactaactgaaataggggct

SEQ ID NO: 54027 - DNA, 538 bp, Glycine max
  Clone ID: PAT_MRT3847_197C.1
cgaaaatatcataattttaactgttaaaaaagacaacaaattacaatgcgaagtatacaagattcacgcctctcccatgtactgttgtactaagatttacacttgatacctccaaaataggagctccacaaaagggaagcatctcagaaaataatagtagaaaaaaactatgaaataaataacaacagattgaagatatagaggtgccatcgggagaacaagcacacaaaattcccatgatgtattcatcatcacaaacatccgaagcattacagtgagatgtacggactatacaaagattctcttttttcacctttccagcttaagcaaggttatctgcctaaggaataagctagagtcacaggggttcttatattccagtttaggcaccagcatgttccaaaaaatttcacattcatatgttagtttgtaagagcttgcaacctcagccttcttgtgcatatgaaaccaatttttttctagcaagcatcatttgtctctgctttatttgcaaatatattggtcgtcagttttaggc

SEQ ID NO: 54028 - DNA, 607 bp, Glycine max
  Clone ID: PAT_MRT3847_19800C.1
ttttctcagccactatggaggatcatgttgttagaagatatcaagagctaatgaaagaaagttccaggatgccattgtttgatttaagaaagctgaatgcatctcttccagttccttcagtgccaaactgcccttttaaaattcttgtgttgggtgcaaaggatgacttcattgtggatgctgagggactcaaagaaacagttaagttttatggggtgcccccagtatgtgttgatgcaattgcccatgacatgatgttggatgtttcgtgggaaaaaggtgcagaagtaattttttcgtggctaaatggttcagagaagtaagaagcaagaaatagcagaggaagttcattatctcattttactaagagtacatgcaattagttgtcttgcttcaaatatttacaattgctgtaatgtaggtgttccaagcttcaaggtaggtaataatgttaggtccaagtagatatgtgattgagttgtaatacaatgattctaatatcctatctccaccattcatattaatatttgcacatctatgagcattccaatggacttgtttttaaaaaaaaaaaaaaaaaaaaaaaaaaaaaaaaaaaaaataaaaa

SEQ ID NO: 54029 - DNA, 160 bp, Glycine max
  Clone ID: PAT_MRT3847_19801C.1
ctatcgtatctatatgatggtttttttgtttatgacagcttcagggctccagcagaggagttcgtttgaatcttcactcacacctatagctgtctggagggaaacacatagtattccgaatagcttttagaattggagagttccttagcgcactttaatc

SEQ ID NO: 54030 - DNA, 346 bp, Glycine max
  Clone ID: PAT_MRT3847_19802C.1
acggctgcgagaagacgacagaaggggattgaatttgtagtatctgacaatcatctgctgaaaaagccgtctatcctctaagggtgacgacagtcgttagagaaaaaaaatgggaatgagagattttcatatcaagcttaaggcattccgggtgaaacgttttttctttggaagaaggagaaatagatggagtgcaaacaagccttcatggatgattccaatatcacatggtcatcatgtggtggagcatcatgtaatcaaaggtgggtctgatgactcgaacttcgattcagttgtgatacagagagagcaaatgggtcacacagaactgtggtactttggaatc

SEQ ID NO: 54031 - DNA, 196 bp, Glycine max
  Clone ID: PAT_MRT3847_19803C.1
gaaaacctgagcggactgtttaatgcagaaaggaatgcagaaagctctaaggactcactttaagctcacacctgctgcgctgcacggagacttaacacagcccatgaatatcgccgccaagcccgccacatacctttaatgcagatagatcccataatctgattgtacctttgcggcatcccgtcctcagtattgg

SEQ ID NO: 54032 - DNA, 240 bp, Glycine max
  Clone ID: PAT_MRT3847_19804C.1
taccgctgcttgatgactacagtcggggattcttctcacttgttgttacgttcattaacaacatgaatctgattacgccctttattttgcgttgttttctgtatggggtgatcctcatccctgttgtggtcgttgataagccaccgtacgatgaggaaaacggaacaactggaattcaccaattgtttaatgactgcgattacgtgcagggaaccctttctagcggattgaaattccaac

SEQ ID NO: 54033 - DNA, 148 bp, Glycine max
  Clone ID: PAT_MRT3847_19805C.1
gtggtttttttttttttatttttttttcttttgtaaccgatggattcacttattcacaaacgtctcattgaataattcttcattgggcggcagccacttggactaaattcgtccttaaaacacagcgggagcaaaggggtgacgccaa

SEQ ID NO: 54034 - DNA, 370 bp, Glycine max
  Clone ID: PAT_MRT3847_19806C.1
attgcagagaaggcaagatgcaaatgtgtagatcactgttgcatgaaatgataggaaatgggatttgtcctgacagtgtcacctgtcggcttatagttgaaggatttgctagggatggaaagctgctgtcagccttgaatacggttgtggagcttaagagatttagaattaagattcctgaagatttatatgattatcttatagttgcattgtgtattgaaggtcgaccatttgctgctagaagttttctgcttaggatatctcaagatggctatatgcctaaaataaacacttacaataaactggttgagtcactatgtaaattcaataatgtggaagaggcattaattttgaaatctgagatggtaaa

SEQ ID NO: 54035 - DNA, 419 bp, Glycine max
  Clone ID: PAT_MRT3847_19807C.1
aaaggggggggcaatgcttccattaggagcaagggaattatgctgatcaaaaatggaaaaattcatctttaagtttcaagatcccccatgatctaaaaaagggttttttcttcttttttatgggaaaatattgcaaaaaaatagaggggaatatatgctgctatggggggggcctaatttctacggggccaggttttacaaatgaaaattcaccttcactgctactggggggttctccctcactatgggggctatgttcttcttctgcttgtgggtgtgggacgccacggtccacttttacaatgaagctagttgtttgcgaccacccaggaaacaactcaacatcttcggattcatattcatgaccatgatcatgatcttgatcctcgaacgttgttgaggggccgcccacccattcg

SEQ ID NO: 54036 - DNA, 344 bp, Glycine max
  Clone ID: PAT_MRT3847_19808C.1
tgatacgcgagcgcaaactcgcagggtagagactgaggcttacgctgagcatacctctttgagtacaacatcaacggctagacgcctaactggcgtgtgccgatagtagagacctctgacgagggcctgacgctgggtattgtagccagtcgagcgaatcagatttcacatagcaaggaaagtgcatggagaacacacaaggacggacgctagaggaaccatgtcttaataggaaaaagatggtccgttaacaccactggacattgagatcagggagccggatacctatggaggcagaaaaagtccccttatcaccactgacagagattggagcaagggacccc

SEQ ID NO: 54037 - DNA, 463 bp, Glycine max
  Clone ID: PAT_MRT3847_19809C.1
acaaagcgaacaacaattgatcatcaacatataaaaaataatcagaagacactcaatggtacatggcacacattgcaacaccagatggtggatgctacataatacatattattgtcttaaaatatactactacttaccaacccattaaggttcttcgaaccctatttacaatcttatttctagcagcaacacctgttaattgaaactcacagttctcatccaagagaaatctgtacacctcccattcacgctctgaagttgaatgccgtcctacttcagccgagaaaacacaaattccaactgttttgagagcaaatgtgacatcataaaaaactcgaggtcttcccattccagatagctcaactggattagcgaccaacagttcagtatctggtcctcggtttgcaatgattactcgcaatggatgaagcatttcttgtttcaaacgagagcagagtgcact

SEQ ID NO: 54038 - DNA, 383 bp, Glycine max
  Clone ID: PAT_MRT3847_1980C.1
tcgcccactcgtccggggccgcccttttttttttgttttttttttttttagacaataaatatttttgctctcaagtcctatcttcaaaattcgagcaaagacaccaacaaaaagtgtggtcggatagtaagttattacaccgaaaagaaagaagacgatgaccataaagagaatgctacaaaaaaaaaataatttaataacgggaggcaagtttggtattaaaatactggctgggggggggctttttatgtacccaccttcgcttaagagggtacggaaaaaaacgttgtactttggtggtgctcggagcatgattacattgcccagcagtttacaaagcactggcagaccaagacgatgctatagcgaattataactgcttg

SEQ ID NO: 54039 - DNA, 261 bp, Glycine max
  unsure (1)..(261): unsure at all n locations
  Clone ID: PAT_MRT3847_19810C.1
aattcggctcgagggagaagggaaaaatgtcccaccaacaacatcatgaaaggtccttttataggaccagcactataaattttcctattagcttaactagattgaggtcaagaaagattttgtgcattgggaaaatctttatctgcctcactggtttcattttcattgcgcctttctagaaagtataatgtcagtcaatcaaataatgcaataattaatgccattgtctcttaannaaaaaaaaaaataaaaaatacaaaa

SEQ ID NO: 54040 - DNA, 914 bp, Glycine max
  Clone ID: PAT_MRT3847_19811C.1
ggtccaccacaacggtaactttttcattcacttttagagcataccaagaacaactttctgctcactttacgcgtttgttttttcttcttctaaaaagctttcccaaattgacacacagatcatataaaaaataaacgaatcaataaatagataatatttcttataaaaaaacaaaaaacaaaaacccaacccataaacaaaaaacgtgtcataaaatatgtgtttatcacataatctgatcagaaaaggatgggagtcgccggaagaagtttgcagggatagacggcatgtcgtcgcggaacctcgggtgacgcaggtaatagaacccagccaccagcacaacgcccctaaacggcactgcgtagaacagtaacgacatcaccaaacacagcaccgcgaatagccccgtggcacgcgggtcccgccagctaaacagcgcttccaaccgctccccctgcgccgccatgtcacccagcagcgtctgcgccctccccgcaagcgcgcgcaccctgtcgtacctgatccgcaccacctccgcgggacgcgtggtcggaaacccgtcgaactcctcgtccagctcatccaggctcaccatgtccacgtacgacatcctcggatccatgttctgtgggaccctctgccggtaacggaacctcagaagcaaaatcaagaaagcatacatgaagactgttgggagcactaggtatggacacaacacaatcgctgaaagcagcacgtgcaccagaaccgtcgtgggagggtgcacccacgtgcgaatcccatcgacccaacccagtagtgtcgccacacgtgacaggcatcccaccactctgaaccagtttgccttgctccgccgcatgctccacacgtgcgtgtcggagtccagcatgaactgcaccctcgtgccgaattcc

SEQ ID NO: 54041 - DNA, 108 bp, Glycine max
  Clone ID: PAT_MRT3847_19812C.1
gctcgctcactgtgatacagcaaattaacgggagcgggagccttatacagaggcttcgaatcctacctcgaaagaccaatcgtcgtatctcaggaatcgcaatcgcca

SEQ ID NO: 54042 - DNA, 752 bp, Glycine max
  unsure (1)..(752): unsure at all n locations
  Clone ID: PAT_MRT3847_19813C.1
ccacgcgtccgcaaacacgtacttctcacttttatcatcgagctttgtcctcttttcgtctggaacatgggtataggcaatgcttccaaacactttgaggtgagagatcttgggcttccttccactccgtgcttcttgtggtgtcttctcatgcacgcttcttgttggggaacagtttgttaggtaaactgcacatgccactgcttcagcccaaaactccttcggcatcttcttgctcttgagcatgcttcgcaccatgttaagtatggtccggttctttctctctgctactccattttgttgtggcgatcttggcactgtcagtgggcgacggattccatggtcttcacaatatttgttgaacttatttgaagtgaactctcctcgatcagatctcatggccttgatggaaagaccactttctttctccacgagggctttgaacttcctaaagttttcaaacacttctgatttctccttcaagaaataaacccaggtttttctggaataatcatcaataaagaggagaaagtacttattcttaccaaatgaattgggtttgattggtccacagacatcggtgtgtatgagctctagcggctntgttgctcttgttgttgattcctttggaaaacttttacgaaattgcttcccaattagacatccttcgcanagttggtctgggtggttgatgctaggcaaacctctcaccatctccttcttcgctaaatgttctagaccgtcgaagttga

SEQ ID NO: 54043 - DNA, 484 bp, Glycine max
  Clone ID: PAT_MRT3847_19814C.1
cccacgcgccgcccacgcgtccgggaaagttggcgaattggtggacgaaacgtgcaaaggcgcagccgcgcatagcggcggagtgttcgcgttgaattggcattcgggtggcataaaattggccaccgcttccggcgacaaaaccatcaaaatttgggatgtgcctggacgaaaactaattgggacggtgtccttcggctcggccatagaagaccaacaattggccgtggtttggcttaggaattggatcgtcagtgtctcattgagcggcttcatcaattacatttgccccgagacactgaaagtctgccgagtgctcagaggacataacaaatccatcaccgcgttgacgctgtccgaagatcgacgaatggcattcactgctgactttgagggacatataacccgttggaatgtctcggatggctcttctgaacgagtgactccccaagtgcacaagtcgcaggtgtccgggctgagtttg

SEQ ID NO: 54044 - DNA, 393 bp, Glycine max
  Clone ID: PAT_MRT3847_19815C.1
aaaccccccaaaaaaaagggttaaattaagaggaaagattttttcctcattaattaaattataggccccatccaaggggtacaaacaactttattttcctttactttggaggacaaagcattttttttgggtttccaaattacaacagatgccccccctaattaaaatctcaaaaggccaaatcaaaacacattcaaatcccctgaaatgacaatgaagcctaacaagaagtgggaaagagggggcttttttttgcaaaaagggggccttccctcccataaaaatctacctccccccattttttaatgaacaaaaatggaatccttttttttttaaaccatgataacacaaattgggaggaaagattatagccttttaaaagggggcaaggga

SEQ ID NO: 54045 - DNA, 569 bp, Glycine max
  Clone ID: PAT_MRT3847_19816C.1
gcgcgtgaactttctttctccatcggcaacttcttctccgatgacgacagcttcttcttctttctttcctagggcgggatcgttgttgagttgctcttcgaaaactctctccgctttctcctcgttcaacacgttctctgtttttgtcgccagcagtgagagcaaggcggcgatgacgagcgtgtggtgaaactgcatgaagaacacaaccacggcgatgaactccacctagatctgagatccgctcctccctgtgctttttttcaggtggatctcctccgccgacgtctccaacactatctacgggtggatcttcaagtttttgattttgtagatctggaggaactcaaatctataagtcttcgttttgtagatctacaaaaaatcaaatctacaaatttttgcaatgctccgatctcacaacgactttgaagacagatcttaaaaacccagttcttcgaagacacatcttcaaaacatattttttcagtataagcatgcggttatgcttttcagtttttttttttaaatgtcttatgtgtgctctataatataatggttttgtgaga

SEQ ID NO: 54046 - DNA, 405 bp, Glycine max
  Clone ID: PAT_MRT3847_19817C.1
cttccatcatccaccaaaccttagagctccttcatctccccttaccagaacatcttttgaacacagtcaacatgagtaccagccagtatgacgctccctctggcgatgttgtagacgacgattacaagtcccgcactggacagtccgagattcccgttcagagtgacagcgtagctgtcgaggcaaccgagtacgacaacggcggggattctgacaagcaactcgagaaggatgagaacgaagctattgacaggagcaacatcctggatgagcgcacccgtggtgccaccaagaaggctggcacctacaccgagcctggcgacgaggaggaagttgacaatctgacagcgggaggtaatgatggcacctcttctggtcgccagtaagactatagatacccacgta

SEQ ID NO: 54047 - DNA, 474 bp, Glycine max
  Clone ID: PAT_MRT3847_19818C.1
cggctgcgagaagacacagaaggggaaaaaagagaaaaataatagatattatagaaaaaaatagaataaaaatgaaaaataaatatatattttctcctttttgttttatgctcactgggagttcggtaggattattttgcgactccagagtcagaaaatgttattactatttactaacatattttcaagacaattttaaatacttttttattattagttatgtgttattaaaaattataaaattttgtgagtgatattcttaatagtttttacttttccacatcttatgacgtgtgaacgttctttcgtgacgtcagtgtctgtactgcgtctgcgtgtttagtgtttctcaaggtcaagtctaccaaataggcaataacaatataaatattttaaagaaaaagaaaagtaaatatgaaaatttatttatgatatcatcatgtatcatttttatgtggaaatttactaccaggt

SEQ ID NO: 54048 - DNA, 143 bp, Glycine max
  Clone ID: PAT_MRT3847_19819C.1
aaaaccccgagaagacgacagacggggcacggggtaaagatgagtgagaaaagagcgaggcggcccatggaccaccaaagaggaaagggagcccccgcaagaggcataagcacgacaaaaacgggacaacgaacctaaaggga

SEQ ID NO: 54049 - DNA, 276 bp, Glycine max
  Clone ID: PAT_MRT3847_1981C.1
cggctcgagcaattttttgcatagctttttcctcaacctctttatacccttgatcgatcgttcatgtattgatgacgaacgattgaaaccataaacccaatattattttaagttgccaaattaagaaggaataatataatccatggcaggaggaagcggatgaagaaacttggaagaaacgcctacatgggctgtcttcgctgtttgttttgttttgatcttaatctctataatcatcgagcacatcattcatcttataagaaagtgtttgaagaa

SEQ ID NO: 54050 - DNA, 394 bp, Glycine max
  unsure (1)..(394): unsure at all n locations
  Clone ID: PAT_MRT3847_19820C.1
ctcgagccgctgtttagaaggcttagtgcctgaagaatttggatattcttttacattcagctcatctgaacagggtctgcaagagtagaatgacactgtttagaaggcttagtgcctgaagaatttggatattcttttacattcagctcatctgagcatggagtactaaatgatgtagaaggtgcttgatgagcctaattttgtggaaaactatttcaagagctcacgactacattttataggaacctggcgaaatcggtatcgaaagcgttttcccaccttgtctactgngtttaacaatgaaagtgctaataatagtgcctctgatatttctcataattcagtcattatccatgttgacatggactgcttttttgtctcagtggttatcagg

SEQ ID NO: 54051 - DNA, 228 bp, Glycine max
  Clone ID: PAT_MRT3847_19821C.1
atcttctccgtctctctctctgagtcgcctcataccatgttcatctataaatggatccagtatcagtagcatctccagattcaatctcgtcatgatatgtttgcatcgtaggtgttccacttacaccaatgggtagatttcgattgcatctgacatctctatctgtcaccgagttatcgcctatggctattgaagctgctccttaaagggccaatgttgatccatccc

SEQ ID NO: 54052 - DNA, 415 bp, Glycine max
  unsure (1)..(415): unsure at all n locations
  Clone ID: PAT_MRT3847_19822C.1
gcgtaaaccctaacccctgcttctcttcattcttcactttngaaacaatcataatggggtgctntgataagggggggaatgtgttnagggggggggcgtgctcccgncacacatncgcctgtggcgtgcatgcgtaattacatcccctncgtgggttgcaagcaancttttcattgggggggctttcatatggggngtnaggagcantgctcttaagggggcgttttctnggtttngggaggtgnggnaggcgaaagttataactnaganagacagtggaaaagtcaagggagttngatttntgaacttctccaatgaggaggctncgangtcnnggctctctncgatggacgggaaggagctaaatgggggagncattcnnggatcctatgcgaatgagaaaccatctncgcct

SEQ ID NO: 54053 - DNA, 248 bp, Glycine max
  Clone ID: PAT_MRT3847_19823C.1
ctgctgcactgaggatgcccgctcgatccccccggcgcagacaaatgacctgctgaaccagccgggcttcgtaggcgccgacgcgcgcttctggcagcgctcctatgccccgactatgtcggcctcgcgctgttgatcatcggatacatcttcatccaattcctcgccgagcccttccaacgcatgttctacccatccgacctgcgcattgcctacccgcacgccctcgtcgagcgcgtctccgtcgc

SEQ ID NO: 54054 - DNA, 278 bp, Glycine max
  unsure (1)..(278): unsure at all n locations
  Clone ID: PAT_MRT3847_19824C.1
tggttggtttggtcccggcagcaaaatcatcatcacaactcgggacaaacaattgctaacatctcatgaagtttataaaaaatatgngcngaaggaattggatgagaaggatgctctacagctgcttacatgggaagcttttaaaaaggaaaaagcttgtccaacttacgtggaggtcttgcatcgtgtagtaacttatgcttctggacttccatggtgttgaaagtaataggttcccacttggttggaaaaagtatacaagaatgggaatctgcatc

SEQ ID NO: 54055 - DNA, 707 bp, Glycine max
  Clone ID: PAT_MRT3847_19825C.1
gtgtgtttttttttttttttttccagggaatacacgcatatattgatggggtcaaaaaaatatctcatctacaacaacatagggggacatctaatttgacaatctaatagagccaattcagacatcatactcagatagtcgtgcttaatgccaaataaaatataagtgactcatttaatcattccatataccacattgacaataaaaactcagctctaacttgaagcattgattattatgaaactaaaaatgttgttggcttgtagccactaaccaaagcatccattgaaatatataaataaataaaagaccattttgtattggatgttgtgaaaaaaagcagagaaagagttgaaagtgatcttgatttggcatgtcccgcagtttttacagcaacctacgaggagtccaacttgctcttgttctctcactctgaacctgcaaacatttgacccccacctcgtatttccatgagcttctttgaaatcccgtgaaggagtattatcctcggattataccagagctgccccttgcaaaaatttgttaagagaagacagatttaatttctggatgcatgtgctgaggatgtgaacgagaagatttggataccacatcccgccagagcttcatttttggtgggcatggaatcatctttgttcatacgtaaggactgaggaccttgaagacctggagaccagggagaaaag

SEQ ID NO: 54056 - DNA, 331 bp, Glycine max
  unsure (1)..(331): unsure at all n locations
  Clone ID: PAT_MRT3847_19826C.1
ttacaccatctccaaaacaaacccactaanatggctaaagttgtattcttactagagctggttcttccaacccttatcctcatgcctcaatatcttgctacttactacaaaccaattaataatccaccattgtacaatcctccattatacaatccaccattgtacaaaccacctgtttataaaccaaaaccacctttttacaaaccgaaaccacctatttacataccaccatataataatccaccatacaataaaccaccttattgaaaataccctccattataagacaacacccattcctaaagcaatcaatgaagtctattatctactt

SEQ ID NO: 54057 - DNA, 377 bp, Glycine max
  unsure (1)..(377): unsure at all n locations
  Clone ID: PAT_MRT3847_19827C.1
tcattcttgcctttctggttgttcatacttttatttttattgatacttacttnatatttctatccaatcatccatgggcgaggaaccccaaaccacagtctcctgtgaagaagtggtgtctgntcctggggacacgacaccatctccccantctgaanntgaanntgatgntgnnncatntagaganngtatcggagatgtggtgggggnangagagaagccccagngtggtgtagaagacaatatcccncactcgntcncgcacagggnggagcaccanngntggtggnccacctccccggggcagnagangaaaccccgtgatgatcatcaaggatgcttgcatcaaggaggncatcaacacancatgatgcttt

SEQ ID NO: 54058 - DNA, 654 bp, Glycine max
  Clone ID: PAT_MRT3847_19828C.1
ctgcactgtacgaggagatctagttaaaatgctgttggagctggttaggaaaaagcgagacaagtttgatcatattgttattgaaaccacaggtcttgcaaagccagctcctgttattgaaacattttgcagtgatgagctggtctctcagcatgtaaaactggatggagttgtaactttggttgattgcaagcatgccatgaaacatttaaatgaagtgaaaccaagatttgtggttaatgaggcagtagaacaagttgcatatgctgatcgtattattttgaacaagattgatttggttactgaatctgagttaaatatattgactaagaaaattaagcacatcaatggaatggcacaaattaagcaagctaaatttggatctgttgacatggactttgttctgggtgtgggaggatatgatcttgagagaattgaatctgaggtacctggagaatgtccctcttcttccagccatcaggatgattctggacatgaacacaaagggcatcatcatcatcatcatgaccatgtgcatgattcagctgtctccagtgtcagtatagtagcagagggaactcttgatcttgatgaggttgacgattggcttgagagagtgattgaagaaaaggagatgacccttacagatgaagg

SEQ ID NO: 54059 - DNA, 263 bp, Glycine max
  unsure (1)..(263): unsure at all n locations
  Clone ID: PAT_MRT3847_19829C.1
agtatctagtctagtacnaagtggagtncctgtgatagatttaggaagctccatggggaccagaagggtgacacatggcctattgcacgagctgtgaaaatgggtncttatggttngaaaccntgaattgcccacactgtggggagtgagcatgtcatctacttgagaaactgagaactctacactggtaccagagtgagacacgacctngtatgatggaagtctctcattganncacctacacatgatcacanncgnnttca

SEQ ID NO: 54060 - DNA, 467 bp, Glycine max
  Clone ID: PAT_MRT3847_1982C.1
gagggggacatcatgattgggaggggcacaaaccaccactggacaaggcgacaaatatggttgatgtacttgacgacaccattgagcccaaaccgccctctgacaaggacctgaggcttacccttaaggatggtgacaccattggaggtatcggaactgtggcagcagaacgtcatgagaccgacgtcttgaaccctggtatggaggcgactcttgcaccaactgaactgacaactgaagtgaggactgtggagatgcaccatgcatctcttacagaagcacatgctggggacaatgtgggattcaatggtaaaatgttgctgctaaagataaaaagcgtgcccttctcgacataactcagaggatgaccctgtacaggacgctgctaactatacagggcaagacatggtcatgaaccaccctggtccgactgtaaatggctatgccccggactggactgccacaca

SEQ ID NO: 54061 - DNA, 145 bp, Glycine max
  Clone ID: PAT_MRT3847_19830C.1
gtgtcggctgccacgtatttctttactgttcacaggaagagagtattagcaatcgcatgatataggaaccactctttaacaatgcacatgtctcactgtaaacattgttttattattctgttcagatataaaatgcttcaaggac

SEQ ID NO: 54062 - DNA, 167 bp, Glycine max
  Clone ID: PAT_MRT3847_19831C.1
agttgtatcatactaacttgtactctgcgttggtttcaaaactcctagctattttctaaatcctaccattggtagggagacatgtaggggcagctttccccgctaaatgcaacagccctaaaaagagtggcaaagcctggatagcgtgtcctttcagatccttgact

SEQ ID NO: 54063 - DNA, 378 bp, Glycine max
  Clone ID: PAT_MRT3847_19832C.1
ccacgcgtccgctaccttttttttttttttaattgctttttttcttgctgttacatttgaatttctgttgagtaaataatagtattattattatatttgtggcactgctggggtttcttttaagattgaaatgcgtgttatttggaaaataaaattgaattagggaaggtagaagaagtgttgagaagatttgaatttggacttgagatgtcggtgccatgactttctgcttagtgctttgaaatggtactttgcacgacgcgtgggcactgtggtccccttacttcacataagtaatgttatttctaaatttttattttacgtgtatcagtctatttatgtataaatggggaactagtagtatttactttctatttt

SEQ ID NO: 54064 - DNA, 624 bp, Glycine max
  Clone ID: PAT_MRT3847_19833C.1
aaaatccaaattactaatttataagcctagataaataaaatattacaattgaaatctaaaattacaatttcacttatataaatttatttggaaaagtcaaacacaatttctcatcaaaagcagaattcatttcttgtaatattcaaaacatcagtatgattcacatttattcatgtaatttttttaataataaagcaaacccaatccaattgtagttgaagtagactggaatcctaaaggaactttaggtgtaaagttaagagtgatccaaaccctataacagctacagtgtagtatctctaatccgaaggttgaataatgattaaaaaaaaaaagattctcataatcagacggctataaacggttgtccaagagctaaggagagagtcctagccgttgagtggcaaggtcacaggtggtttgagtgaagcccaccctagacttgagcaaatcgaactccatccacacgttctgctgatgatgatgcccaatcacatacgcttcaattcccaacaaatcagagttcccaaaagtgaagcaatacacccaatcactccctttactcaccctatacaacagcctctcccctgacaccctcatctccgcccccgagaacaccagcgt

SEQ ID NO: 54065 - DNA, 160 bp, Glycine max
  Clone ID: PAT_MRT3847_19834C.1
ggggcatccagctccccttttaaccaatccaaaggccacagaagtgccggaaccttagttgggcaattttccaattttcgaccaagaaagaaaaatattccagttaaaatattggctggctgggtttgttatccctttttgtggctttttcccaaccgaa

SEQ ID NO: 54066 - DNA, 761 bp, Glycine max
  Clone ID: PAT_MRT3847_19835C.1
ccacgcgtccggtcggagtcggagtcggagtcggagtgaggttggtggagtcagagtcggagtgaggctggatggacctgtgcccctaaacgacgacgttttggaaaaggaagtggttttcgagcagtgcgtgacgcggactctgtctccggcgttgacattggaggagggacttgagaaactgaaggaggctctccaaatcttgaattctccttccccttcttcccctactggattccttaggtttcaggtggcgctccctcccagtcctaaggccttcactttgttttgctcccaaccccactcctcctcggtctttcctctcatttatgtttccaagaacgacgccgactctaaatcactctatgtcaatggaacccgtggtgtttgtggcatcggtgctgctgtttcctttctccctccaactccaaaccaccgcactttcctcaacagatacatttcatctgattcaaccaatgtagtggcctatggtttcatggatgttaatttggatgatgatgggagtcaccaggaaaggtctttttgggttttcatccctcagattgagttagatgagctggaaagtgtttccattctgtcaatgacccttgcatgggatgaattttccttctctacttttcaagaagcccattattcgcttcaagtttctctagaccaggttatgtgtcatgtctggtctactattgacacatggaaatccaaatgcactagagctgccctcgaaaaactcaatttggtag

SEQ ID NO: 54067 - DNA, 515 bp, Glycine max
  Clone ID: PAT_MRT3847_19836C.1
tctggatagattgatgttgaatgatgccctacagaatggggatttatatacataccaagtttacaggggttgccttaaaatggatggtccaacaatgataaatctagaactttttgtcaataatgaggatggtggcaaatcaggttcattgtacaattgtcttgataagtgtgtaacttcatctggaaagcggcttcttaggaactggatctgctgtccattagtagatgctgaaataattaacaacaggcttgatatagtggatgatctaatggctaacccagagattgtgtcacatattgctcaacatcttcgcaggcttccagacttggaacatttgcttggccgaattaagtccagccttcaattatcaggccctctcttattgcccttcttgggaaagaaaatattgaagcagagggtgaaagtgtttggatcacttgtgaaaggccttcggactgctttgagcttgttgcttcttctacagaaagagcagcctctaatatcgtctttga

SEQ ID NO: 54068 - DNA, 530 bp, Glycine max
  Clone ID: PAT_MRT3847_19837C.1
cacgcgtccgcccacgcgtccgcaagaagtctgtttaagatggtaattggaggtctcaccttaaaccaaagggctgctactaatgcctagttactgagagatgcgtttctgtattttcccaagtagtagtatcaacttgatagtggaccagtacaagttaccagtttctaacacaaggttgatgacaactaatggcaagtcaaagcttgttaagttgccatggcaaatggatgcctacagataaatccatgtttttcaatgtgaagccctaaaaggtttagccttgtttcagtgtcactggtggctcaatgtgtgacattcccattgacattatctatcaaggaaggagtctctgattgctgccctgtaattttcctgctacaggttgtgaatctctgtagtttagtattggaggattatcagatgtttttgcctgtctgtaattgacaattgacttgctgtacattctgttcatatgtagtgcaacctactctaaccaaacatgacatcgccactgaatcaacgatatt

SEQ ID NO: 54069 - DNA, 1759 bp, Glycine max
  Clone ID: PAT_MRT3847_19838C.1
aaaaaaaatactcaattttaaaggaataaaaacctatttaacccttattattatttacacaatttgaactagacctatccatatacgattgataaaaaaaagacctatatgctttcatatttactcgggcaagcttaggaaaatttcactttccatttcctttttttctcattggactagcactttattaaagaaagagtatatgatttttatttctccatcttgtgatcatcatcaatcacgaaagagtggacctgagtcattccttggttgtaccatttgctgtaatgaggattggtgcaacctatccttttggacttagcaatggtgaagatattgagattcaaatgctccaagcttttctaggtgatggatgcagtggaggaaccatttgaaggggtccatgcataaatgagtaatcctatgatcagaatgatggcacctgcaacaaagcctgctggaagagaagaggcaacaccgatgtatggcaatggcagcgtgaacacatagattgctattgggactgaaaatgtggaggctagacaagagacaacggccgaagagatcttgaggagatgaagcaatgagatattgaagcccatgttgacaataacaaacaacaagggcagcaggggagctccatcacatcctcttgacagagtcccaacattcagaaagcaggcagcaccgtctttaagatagtttggtagttgtccaaaggggacgccccataattttgctcgagccggggaggagaaggcaaatgaatagtgcctggaatgcagatccgaaggaattgacaacaaacatatccaaagaacctcccttcagtttttgagttgcgtccaaaaagattacttccttcagaacagtatcagctgcttggaataaaaatgaaactatcattaaaagactccaaaatataccagcttccttcaatgaatgcccagcaccagatccacttactacagtaagaattacaccaattgccacaagagagcatccaactagttggttgactttatatcgcctcccaagaaaaaaatatgagaggagaatttgccacaccagaaaagcctgagacaaaattggaattgatgctccggatagcattgctcctgcagccattcctgtggcagcacccagagcctccaagagaccaacaactagaaatggagtttttggcactgataacatctcatcagtgacaatgcccgcacgataccgtatatacagaatagagaagtatacaattacgcggacgcgagctgagcaaggaagaacggatagttcttcagcggaaccaacgcgagcttgtacagaactctgtttccggcgcccatcaccaccgtcaccgcggcggcgagcaccacctccgccgaccgattcccgctttcccgaccactctccgccgcgagtctccccaccgcgcacggacgaggcgccgccaccgccgccttcttctcgcccgatctcttccacgcgccgccgcacttcactggcggaggcagtcgcagcgttattgtcggccacttaggcgagcagccgtagtggacctcgccaatcgcggcggtccttggagcgcaacggaggcggagttggccggtgccggcgactgggatgcgccggcagagtgacgtcatggttgcgtcacgcaatttgagaattggaagcgtagagagagagagaggagagagaatgggagtgagattgggagtcgcacaactcacatgagtcacgttggtgcgaaggtgaaaag

SEQ ID NO: 54070 - DNA, 425 bp, Glycine max
  Clone ID: PAT_MRT3847_19839C.1
aaaaagcaggcaaatttattaatggctttactttgacccgagcataataattcaaggaccatgaaaccggcccaagtttaacaaattccctccaacccgggggttaaaaaaaaatggggcaaattaataaaaaactatccctgaacacaaagggggggggctttacccacttccccaaaaaacacccttaagctttttaactaggggagggtaaaggaaaggggtctgggccaccaaaggaggggaaaaatggggggcaaaaagggcaaagccaaggattggaaggccagaaaaagccctggtgaaaacaggaaaaggaggggccttttttttaccaacagaaattgggaagggcaacacccctggggggaaaaccatgagccctcccttttttagcccctttggaaaaactatgttacccgaaa

SEQ ID NO: 54071 - DNA, 389 bp, Glycine max
  Clone ID: PAT_MRT3847_1983C.1
attctttctttagaggctcgaaatgcacaagtgctggagcttttcttagtaatgcccaacatgttagatacttggacctctaggtaacatatgcatcttaaatttgtatttgaacatattaagatcttgagctggcaaaatagaaagtcaatggcaagctgtataacaaatgatcaaacaagcacatagtatcttttatagccttaaccaaccaaataaaacaacaatgatagaaattatccttagtgtacaggtttgtaatgttgatcatttggtgccattactgcagtagtaactgacattgaaatgaagcatgccatttgtattcttttaagcaactatttaactgcataaatctagattcctgattacattttctggtcttgcgt

SEQ ID NO: 54072 - DNA, 246 bp, Glycine max
  Clone ID: PAT_MRT3847_19840C.1
tccgtaacggcctaccaccaacgttacatgctagcccgtataagaccacttgacgccctgcactatagatttatagccgaataatatgactggtctgacgatgattaaactgcccaccaataaccctgcatcatcattttgcgggtatgaagaatagccatcatcgccttctcacgcgctcacctgaatgaaaatgtacgcccctgatcaagcaatagcccgcgctgtgagaggtactcgcgtatg

SEQ ID NO: 54073 - DNA, 315 bp, Glycine max
  Clone ID: PAT_MRT3847_19841C.1
gttttattttcaaattatttcttcaattaatagaagaaatacgaatagtagggaatatatagggaattattttatcccattcggaaggatatcgtttcataattatctatgactgtttatgtctttagcatgactgactacttgattaaatgtggaggaaagtgggataaatggccgatattacagaaaggattccattccttaataaatacaaaaaaaaaaaaaactaaaagaaagaaaacaaaaaaagaccaaaacataaactaaattatagaaaaaaagaaacaccattccaagttagggggggggtctctt

SEQ ID NO: 54074 - DNA, 386 bp, Glycine max
  Clone ID: PAT_MRT3847_19842C.1
ctgtccttttttttttttttttttttttttttttttttttctttttttgttttatttttattaatgggaccaatttgaggggaacacacgcggctgttgcttagagcgggacattattacagaccccccaaacatcacaggactgcagatgatttgccaacgcattcaccgggacaccccgggcttaacccccgtcacggggacggaggacaatgcgaagggttgacaccttcgggatgttgaagaggccgaggcagcttgcgttctcgaactgctggccagcctgaatgggccaaggctggccccggggcacgccgaaattgacctgaaggatggggtggacattgccagggagccccaggctcttaccggcgagtgaaaacccc

SEQ ID NO: 54075 - DNA, 473 bp, Glycine max
  Clone ID: PAT_MRT3847_19843C.1
ttgcaacactccagtaaagtgttgctacctaacagtccttccttctccttgaataaactagtcaagtcttgtgcacaataggatcatggttcagaacctgatcaacttgagctaggcttactcagcaatgtcagcaattgaactcataattctaattttatgatttcttgtgagaattgtaaataattgattttgtgtgagtttatgcagtggaagctccatttggatgactaatgttgaacttatttagatttttaggctgaagaagagaagatttggaaatgctgttgaagggttcgctcaacgaaccagattggctaagtgaggctcattcgcttagcgacatcgcttagcgaggaagccagctcgctcagcaagagtggaaccctagagaatgtaaagtcagagagcagcccgctaagcgcgcagccagccccccagcgagacttttgtctcttctcgcgcttagcgcg

SEQ ID NO: 54076 - DNA, 685 bp, Glycine max
  Clone ID: PAT_MRT3847_19844C.1
gacaaacaaagataagagcttatgcacactgtgcaaagcaatcaaaaggaatcacagtactattgatcaacctggacagcaacacaacttgttgaagctgaagtgaccttcaacaacaacgctgagagtttgaggcacagaaagatgtctagtcattcaaaaaggatggaactgcctcttgcaagtgaaacagcaagagaggagtaccatctaactccacaggatggggatatacatagccaaacaatggtactaaatggaaaagctctgagtgtaaactcagatggtgacattcctcctttggagcctatatatgtgaactcatcagagccaataagggttgctgctttctctattgtatttgcccatttacctgatgctgttgtttcagcctgtggctaaactaggtggcactaggggagaccaaaattggtttcacttggtggttgagctaattacatggaaaacatgttacttttcattttattgtgaaggaagagaatgacaattatttaggttgagaactaggattttgatggcttttattgtatgcttttataccattaagtttcattgtggtcacaaattgcaaattgtaagttagtgaccaaattcaatctcttgtcatcactaaatgagtcatcccctcctgcttattaattattggttgctttttatccccgtt

SEQ ID NO: 54077 - DNA, 353 bp, Glycine max
  Clone ID: PAT_MRT3847_19845C.1
gtttttcttgtaaaaacacataaactgctgccacagcacagattgaaacagacaacagacaactgctgacaactacaaggtaagaaaaaacagctgaatcaatatcctattttcaagaaaacgcaaataactgatagggacggcttcgggttatatggatacgtttctatggtctaaccgaagctgaagaggagattatagagtatcaattcatttttctcacaaatggagcctcattctacgaaaggtgattataaggggaggacataatgggcccgattgttgaacatgtagcacgtactggcaattgggaaacttgctagcgcaagcactacgagactaattttcaaaag

SEQ ID NO: 54078 - DNA, 269 bp, Glycine max
  Clone ID: PAT_MRT3847_19846C.1
gttcactacgcatgctcgaaacgtcagccatttaagggataaggatgcagcacgttgctgtactgcttgatcgaccatagcttccacttggggaacgactttgcccgacagtactctcagtcacagcacacacagtcctcggcctccacctcaggaagtgcacttagtcaaagcaacgatgtcaagcatatcgctcatgatgcgattctgtgcgacccacaggtggattatggtcagatcatccctgtgaacccccatattgtggagat

SEQ ID NO: 54079 - DNA, 570 bp, Glycine max
  Clone ID: PAT_MRT3847_19847C.1
aacaaatctcatatatatataaagtaggttattaggttaaatcaaactttagaaacattaggtcaagtttataaatggcatataaccacatacgtatttattattttaggctagtttttcttttctcagtgtaacaacatacttatataaataaaatattatctttaacctatttccactccaatccaaattaattaaatgtgataaaattttattggacgagattgaattatgaagctaaatagttaaaaaatactgcatcaattaaatgatttggatgagatttattgaattgacctatatatcaataccataattaatgtcttatgatactgctcgacaaagagtgttaaatttggttatatataataaattgaagccaatcttctgtgatttcttatcagctgaaactctcactgttgctctagacaaccttgcctgcctgtagtgtgatttggagtactgcacgtggtatcgaaattcgtcatcatcgcttgcgcaggtgatatatctcagaagatcgaacaacaaaactaggaaatagaaatagaattagtatagaactaaaaa

SEQ ID NO: 54080 - DNA, 2223 bp, Glycine max
  Clone ID: PAT_MRT3847_19848C.1
ccacgcgtccgtttttatgcaaaagatttgtgaaattctccacacacatgtctttcttctaaaccgatactttgtgatggccacgattcacatataagaaaccaaatatgggggcttgcaatggacacacatttattcatgaactgcctttgcagaaaacttttgtaaagacaaccattttagcaaagaaaattggtgtaattaaattctcaatcttctttacattttcactgtcagaactgtagcacgtgactctttagtgaaaccttcactccatggtttcctcattgccctttgaagcttgaactcggataaagatcgtgactttggctgattctggaaatgggttctcggattcagcttctgcctatttgcttttggctgcacttgacatgcttcagcttcttttttggtagcatagtgagtgtgagaggagatgcaactgtgcaagggagtgttgccattgatggcaagggctgtgattggaaccattgatgaggattttgtgtgtgcaactttggattggtggcctcctgagaaatgtgactatgggagatgcagttggggccttgcttctcttctcaatctggacctcaacaacaagatttttttaaatgctgtgaaagcattttcaccgttgaaacttagattaggtggaagtttgcaagacaagctaatatatggcactgaagataatcaccaaccttgtactccttttgttaagaacccttctgagatgtttagtttcacgcaagggtgcctcccaatggatagatgggatgaacttaactacttttttgaaaaagcaggggctaagattatctttggattaaatgctcttgctggaaagtcaatacacggtggttctgcaaaaggaccttggaactacaccaatgccgagtcctttattcgatacactgttagaaatggctacaccatttatggatgggaacttggaaatgaattgagtgggaatggagttggaacaagcattacagcagagcaatatgctttggatgttgctgctttacacgatgtagtttacaatgcatacaaaaagattgagcctaagccactagtcattgcaccaggaggtttctatgatgcaaactggttcaacaaatttataagcaaatcaggaaaatctattgatgtggtcactcaccgcatttataaccttggaccaggagttgatgaacaccttgtggaaagaattctggacccttcctatcttgataaagaggttagcacattcagtggcctaaaaaatatacttgcaagtacaggaacctcagcaacagcatgggttggtgagtctggaggtgcctacaatagtggccatcatcttgtatccgatgcatttgtttacagtttctggtatttggatcagcttggcatgtcagctgcttatgacactaaaacatattgcagacagagtttgataggaggaaactatggtttactcaatactaccaattttctgctaaatccagattactatagtgctctactttggcaccgactcatgggaagacatgtcctctcaactaccttctctgggacaaacaagataagagcttatgcacactgtgcaaagcaatccaaaggaatcacagtactattgatcaacctggacagcaacacaactgttgaagcagaagtgaccttcaacaacgccgccaagagtttgaggcacagaaagatgtctactcattcaaaagtgatggaactacctcttgcaagtgaaacagcaagagaagagtaccatctaactccacaggatggggatatacatagccaaatcatggtactaaatggaaaccctctgagtgtaagctcagatggtgatattcctcctttggagcctataaatgtgaattcatcagagccaataagggttgctcctttctctattgtatttgctcatttacctgatgctgttgtttcagcttgcggctaagtactaagtggcactaggggagaccaaaaaaattggtttcactaggtggtttggcaaattacatggaaaataaaatgtgttagtttccataagagaatgccaattatttagtttgagaactaggatgttggtggttttattatatgcttttactagtgcatgttcccgtgcatcaggagcaaattatgtgtgaggagtattattttttctatttaaaactaaataaatttaaaacatcagaagaggaagtacgccgcggagtt

SEQ ID NO: 54081 - DNA, 566 bp, Glycine max
  Clone ID: PAT_MRT3847_19849C.1
atataaattctttgttttaaattttttatatattaaaatttttgttgagtctctatcattggttaattgatgatacgtcacattattgattttttttaacattattaatggttataataatatcactttatcactaaactgatgatatatactctgtatctctgctaggctttgtccttttttttttgtggtaatgactttctggttttacttttctccatttcattaactatttcctccctcttctcggccaaggtaaatttcaatcttcattttcatttttcttctttatggatgccaaaactctgttttgaaaattcaaggtaagtccttctttctttccttttcttatttgctatccagttacttagcacttgatgaaaaggctaaaagtaactaaatcatttctaaacaatatgcaggcaaggtcaacaatataactattgacaaatgcacaaagattggaggtgtatttgaggtttgtgatcggtcaatgcctacttatagagcaattttttttggttgtttttggacatacacttgtgtgtgtaggttttttttggagt

SEQ ID NO: 54082 - DNA, 951 bp, Glycine max
  Clone ID: PAT_MRT3847_1984C.1
atggatgcatctgaacaaggcttacaacatttagcagaatcactcctttctgaggggacaacatcttttttagcaacaacaatgacacagtcaacagtcaatattgagcgagcacttcaaactattgctaaatatactcaacaacaagatgttacaaatgctgccgaaattgtgggagtacatcttgaaggtccatttatttcagaacataaagtaggcgcacaacatcctcaattcgtacaacgtcctacggttgataaaataaagtcgtttcaggaagtagcgaatggactaattaagattattacgtacgctcctgaagttgatggagcaacagaaacgttaaagacaatgaaaaatgatatcattttttcaatcggacatacggtggcaacgtttgatcaagcgaatacagctgtgagtcatggtgccaaacacatcactcatttgtataatgcagcgaccggctttcaacatagagaaccgggtgtatttggtgcagcctggttaaatcaagggttgcatactgaaatgattgtggatggtgttcattcacatcctgcatccatcgcacttgcatatagacttaaggggaatcaaagctgttatttaattacagatgcgatgagagctaaaggaatgccagaaggacattatgatttaggtggtcaggatgtgattgtaaagggaagtgaagcacgcctgtcttctggggctttagctggaagtatactcaaaatgaacgaaggacttaaaaatttaatacaatttacaggtgacacgattgagcatttatggagagtaacaagtttaaatcaagcgataacattaggcatagacgacataaaaggtagtattaaaatcgggaaagatgcagatattgttatcatagatgatgcatgtaatgttgaaacgacgattaaaaatggaaaatatcatgctttcaaatga

SEQ ID NO: 54083 - DNA, 268 bp, Glycine max
  unsure (1)..(268): unsure at all n locations
  Clone ID: PAT_MRT3847_19850C.1
cttcnttttttttttttttnnnnttttgcccaaaaaagggattcatggttaattggtaaatggaacacctgtacaggaaaattttcggcttatggaaaaggttaaacccttttacttccgatttgttcatttaacaaacaaccgttataaaaatttttaccgtaacttggacctccgatggctttggatggggtaggaggggtaacgaataaaaacagaaccccacttcattaataactctaaaacagtcccctgatgtcactactgt

SEQ ID NO: 54084 - DNA, 415 bp, Glycine max
  unsure (1)..(415): unsure at all n locations
  Clone ID: PAT_MRT3847_19851C.1
aaagaacaagggagaacctctagtagaatagaagattctgccatcgcttaatcaagcgctactgcttcattgacttgtgccgtctgagtcagaaaatctggtcttttatgcagcggagtcctctgtctaccggccttcttttcttctatcatcagcctagggataagagatcatagatagtccagcataagcccagagatcggggatagaatctatccgtcaagctatttcaagcaagcgagttggatacacctgtaggcactctgaagtcaagtaatttagtaaaattagtattcaaggcacaatctttctagcgtttgtctgcttcttagcctttctgagattctcaataccttcgtcgacattttcatctaaccttccgcttagtagtaacgacntctctatctctactcta

SEQ ID NO: 54085 - DNA, 114 bp, Glycine max
  Clone ID: PAT_MRT3847_19852C.1
caagaatctgtaatatgtatatattccatgcagcatatacagtaacatggagttgacagctggcgttatagatccatagccatgtccatgggatcaacatggtctcatatgggg

SEQ ID NO: 54086 - DNA, 189 bp, Glycine max
  Clone ID: PAT_MRT3847_19853C.1
ctagttctagatcgcgagcggcgccctttttttttttttttgaaacaaggcttgggaggcgagagctttcaacgttacaaggggtaaaattcccatttggccctttttttatacaaaaacttgaaactctctctaggcttcatattcagatatctccataaataggcagggcttccagtgacgggtttt

SEQ ID NO: 54087 - DNA, 401 bp, Glycine max
  Clone ID: PAT_MRT3847_19854C.1
tttttcgcgttaaagaacgtatgaatgcatcgagaatgatctattggcttctttcaatcttggcctacattgtattgctccatacatgtcaaagggcattgagagggcatcacaactttcagtctgttggaacaaaagtcaataatactgctgtgacagaagaacttgatcgaccatttgtatcaggtagcacagaggatagaggatgctctactcgttagcgtgctataaaagagggtcttggaggaggaggtttttttgatctaaacttgccactacagttcgtagccagagattgactttgcaagacaccataataaacgtacaggcgtactgggctaacaacataaaaatgctgaggtgcctttggaaggaaggaattattttttttggatttcaca

SEQ ID NO: 54088 - DNA, 410 bp, Glycine max
  Clone ID: PAT_MRT3847_19855C.1
ggggccgaaacctattcttatgggactttgatacccttccttacctgggtcccaaagagaagttaggcgggaaaggtttcaaggggttattttaaaacttcttccggcttaatttacagaattaggttttattattattggccttttttttaacggtggaattattggccaatttttacttttccacgggccaatttggggtttttttaaggggtttttttttactttttggtggaaattcattatttcccttacctggattttttgaatttccattatttctggccggtttttctggaagtcttgggtcttcttttttaacctaaccacctttggtttttatttcctgggtttaggccggttggcaagcccggaactgggcagtggcctttttatccttaacaatcctt

SEQ ID NO: 54089 - DNA, 154 bp, Glycine max
  Clone ID: PAT_MRT3847_19856C.1
gcaaaatcgattgtggaataatgacgtttccaatgttgttgtgccatgggtcacccaagtgagcatccaatttttccaaatgttcagtgccgggataagctgtttgttgaacacagaatcccacataagccaacatattttgacgtcccttttt

SEQ ID NO: 54090 - DNA, 467 bp, Glycine max
  Clone ID: PAT_MRT3847_19857C.1
gagaattactccataaaactaatcacacaaaaggggggaaatttttaaaaaacatattcatatcataaccatttatacaataatataacagcacccatataaatatatttaaaccgactaatatttttaatactaatccaatattacaaacactccatttttaaaccctaatgattattcgcgtaaaaacgatactcataactttacatactgcatacgttgctccaccacatattataagctattactttaaagactcactttttttttcttttaatacatgcaaagaaataacattcaaatctaacaaaatccttttacactactacaaaaaatatatttaacacacatttattaatatcccactttgacacaaccaattttaacaaaaatttggacgcattgtttcaaatattatacacaaataacttcctttttttataaaacccaatctatttttcactttt

SEQ ID NO: 54091 - DNA, 678 bp, Glycine max
  Clone ID: PAT_MRT3847_19858C.1
aatagaacgagggaaatatattgtgaaagtggttaaggatgctatcgacaagacgaagggcttctatggtcttgaggaaattcttgatccaactattgaactggggacagcactgagcggttttgagaagttcgtggaccttgcaatgcagtgtgttgaagagtcaagttctgacagacctacaatgaattatgtggtgaaagaaattgaaaacatgttgcagttggctggttcaagccccattttatcagcatcagcatccacttcatctagttataataatgcaactaaggggagttccctgcatccttacaataatgaatactttgattgaattttggtactttcacgtgcataaattgagcctatgtagtagaaattattgcatgatctagtaccatactcgaccaatctctacgtacgtaacatgtaacgtacataggagatcttaaccaagatcacataatcacaaaccatgtaataatttctcactatgtaggcctattacacctcaaatgtcacttgtgcaaataatgtaaaaagcagataaaagggggggggggggggggagggggaggacatgttaatagtgtattatgtgttagcttaagattgaacatgaatattgaagctgaagtttgataagtcccaatggaaatttttaattggttgcttttt

SEQ ID NO: 54092 - DNA, 237 bp, Glycine max
  Clone ID: PAT_MRT3847_19859C.1
aaggaatcaaaacaaagagggagacagtgagaaggtgagagaggatcctcatcggaaatatgccggaaaaaggtgcgggcaaggacaaagctacaatagagttaattggaggaatcggaaaaacataacatcgttttacttcacttgattccctgatgacgcgtcggagaaagacccatggcatcatttcaaattgttcggtgttgtaagggagatcttcatttctaagaataggaa

SEQ ID NO: 54093 - DNA, 302 bp, Glycine max
  unsure (1)..(302): unsure at all n locations
  Clone ID: PAT_MRT3847_1985C.1
tcgcangcncgcntacgtaagctcggaattcggctcgaganatannctngcangnnnatctngnncgntcngncacnaacanannnntgnnncatttngatttctcggctgacattgccattganattgccgtttcaattgcnagtaanangaagagcanaangggnnnnantggnaatnagnatggatgcangtattcgagtgatcggcnncaagttgggtatgatgagccanttcgngtccnacggagaagtcntaccnntcactntcntnggtntcaaagaaggcannatcgtcacccn

SEQ ID NO: 54094 - DNA, 541 bp, Glycine max
  Clone ID: PAT_MRT3847_19860C.1
gggataaggggcccccaaaatatttttaaaaacagccttcaagatggggaaagaattttaaaaaacatatagttttttcaaaaaaaaaaattttttttttttttttttcattaaaaaagctgggggggggactaattttccttggaaaaaattttaataggaaaaggggggttaaaaaaaacaattcgaattaaagttagggaaaaggggagggggggccgtcatataacaaagcccctaattagtaggggaggatttgttcgggggggggagaaaacataaatcggcattaaacagggttattttccttttggggtgggatgggttagattaaaaaagggagaaaatttccttggttattttttaaaatttttaaaatttcttagagatttttaagggatttttgaaaagggttacatattaacgaaaggctttctttaaggtattttaaaaatgggaaaaaaaaatattttcccccaattttaaaaattaaggaaaaaattcttggggaatccccccattaattctggggaaatttttt

SEQ ID NO: 54095 - DNA, 201 bp, Glycine max
  unsure (1)..(201): unsure at all n locations
  Clone ID: PAT_MRT3847_19861C.1
acgaaaacacagaaacccnncagngaaanaaccaaaaaagaaaaagcccacacagcgacncagaggaacccagaggggggacagnngggaggaaaagcccgaagacagaggaaaggaaaaacngaaaacaagccggaaaacacccccccgccnaacaggaaangcgacgagcacnggaggggcaagcncgggcaaaaggcc

SEQ ID NO: 54096 - DNA, 355 bp, Glycine max
  Clone ID: PAT_MRT3847_19862C.1
gggaccattaaaaagagaacttttatttaaagctaattaacttagccccggaaggggcccttccgacttcaaaagggcggataaattaaggggttattccgggctcttttaaaacaatttttgaagtgtcatttggactcggggcccctattttaacccaaattatgcttccgctaaaaattaagtgcaattgagcggggttttgggctggttacttatagggaaaaagagccccccaaatttttcaaaccctgggtggtgtttggttttcataaaacacggacaacaccataatttcaaggggggccccccgccctttggggggtccttgtttttcattacgaaccaaattggg

SEQ ID NO: 54097 - DNA, 377 bp, Glycine max
  Clone ID: PAT_MRT3847_19863C.1
caaaaagccaatcaggagcagtatgcagaggggaagatgagaggggctgccccaggaaagaagacatctggtctgcaacagaaaaatgttgaagtgaaaacgaaaaagaacaaacagaaaacacctggaaatggagatggtggcagtaccagtgagacccctcagcctcctcggaagaaaagggcccgggtagatcctactgttgaaaatgaggaaacattcatgaacagagttgaagttaaagtaaagatcctgaagagctaaaaccgtggcttgttgatgactgggacttaattaccaggcaaaaacagctcttttatcttcctgccaagaagaatgtggattccattcttgaggattatgcaaattacaagaaa

SEQ ID NO: 54098 - DNA, 531 bp, Glycine max
  Clone ID: PAT_MRT3847_19864C.1
attgcttccatttttcaagcctacatatacaacactactttcagttttttctgtctctgaatctcaaactcttcggaaagattaacattaatggctccaagggatatcaatagatccaacgttgttgttgttgccggagtatccaacccgacccataaagagatccgttaccgcggcgtgaggaagcggccgtggggccgctacgccgccgagatccgcgacccaggcaagaagacacgcgtgtggctaggaacgtttgacacggcggaggaggcggcgcgtgcgtatgacacggcggcgcgtgagttccgcggcacgaaggcgaagaccaatttccccacccacgcggcggcggcgcgtagtcccagccagagcagcacgctggactcctcgtctgcgccgccgctggaccttactcttgccggcccactcaccgccgcgggcgcgttggttttctccggtggcgcgtcccgtggtgttcttcgacgcttttgcgcgtgccgaggtgcgcgcgtcgttcgatcttgccgt

SEQ ID NO: 54099 - DNA, 392 bp, Glycine max
  Clone ID: PAT_MRT3847_19865C.1
acaaaaaactactactggtacataggatattctgatatagtattattgtggtaaaagtaaagtacaagtccaaataaaacatcgtagttgtaagcagggagttccaatgattaatgatcatcttttgagacttacaaacagaaggttaagaagggagtgcccaaaatgtagtcatggaagattatcttgcttaactgctcctccaacaaacctcccccaaaaccagtgtttgccccatatggtgtacattgactccaatggaattcctttcgtctcgggcaagaaaaacataataaagagagtcatcactgcaatccaaacagtatagaacaagaaggcgccgaacttgaagtggcacagcattgtcaaaaatgtctgggataacgcaaata

SEQ ID NO: 54100 - DNA, 233 bp, Glycine max
  unsure (1)..(233): unsure at all n locations
  Clone ID: PAT_MRT3847_19866C.1
ggagaaaatcacagagnaanaataaagacacagcttccaacagatcagttntccgnntcagtggttcagagatgctacgaccaatcaatagtcatcntcttcaganaaaaaaaccacctttttttttctaaaaggcnaaaaaattccgagctcacgagctacccaaagcgttttgatcgcgggctttcattctgnatnaatcttcntcttcgaggaaattaggtnnccctcng

SEQ ID NO: 54101 - DNA, 633 bp, Glycine max
  Clone ID: PAT_MRT3847_19867C.1
cccacgcgtccgcccacgcgttcgataaaaaaaaaaaaaaaaaaaaaaaaaaaaaaaaaaaaaaaaaaaaaaaaaataaaaaaaaaaaaaaaaaaaaatataaaaaaaataaaaaaaaaataaaaaataaaaaaaaaaataaaaaaaaaaaaaaaaaaaaaataaatgggggggccttttttaaaaaatcaatttttatttcccgttttttgaaaataataattttttttttggtgcaccaaaattaaaatttttggggcgtttttttaaaacttggtttttgaaaaaaccttggttttacaaaatttaatttttttaaaaaaattccctttttaaaaatttgtgttattaaaaaaaagccctaacattttttctttttaaaaaatttgccaactttaattggaaaatggaacccccctttaactggcattttaaccgggggggttgtgtggtttaccccaaggggaacgtttatttttttaaggccttaaaccccggttttttttattttttccctttttttttttaaaaattttggggtttttccccttaaagttttaaatgggggcttttttttaggtttccattttaaggttttaaaggaatttttttttccaaaaaaattttttttgg

SEQ ID NO: 54102 - DNA, 323 bp, Glycine max
  Clone ID: PAT_MRT3847_19868C.1
ggctcgaggaattggtataacgatcagaacgggtttggattcataacccatgacgatggcatggaggaactgttcgttcaccaatctcagatcaaatctgacggctttcgaatcctagctgaacgagagtacgttcagttctctattgaatctgaatctgactgacgcgccacggctgtagatgtcactggacccgaccgagccagagtccagggcaccagacactgcggcgatggtcgccgaagctatggcggtggacgaggaggtgctgtaagtggatatcgctgttgcatcgtctactgtgattgcgttggatctggtgg

SEQ ID NO: 54103 - DNA, 1430 bp, Glycine max
  Clone ID: PAT_MRT3847_19869C.1
gaaagacttagtgtatttaactgatcccattgtttttatcttctcacaacttctctctctctctctattcccacttctcttctgtgtttcttagaagaattaagatggctaccttgactgtacccccagttcctccttcccccagagatgatgccatgcagctttaccgtgcttttaagggatttgggtgtgatacaagtgctgttatcaatatacttgctcatcgagatgctacacagcgtgcctacatccagcaagaatacaaagcaatgtattctgaggaactttccaagcgcttagcttcggagcttagtggaaagttagagactgcagttctgctctggttgcatgaccctgcaggacgtgatgcaacaatcattaggaagtctctaacagcagacaacaaaacccttgaaggtgctactgaagttatatgttcacgcactccatcgcagctacaatatttaaaacagatctatcattctatgtttggtgtttatcttgagcatgatattcaaacaaacaccagccccggcgatcatcaaaagctcttgcttgcatatataagcacacctcgtcatgagggccccgaggttaatagagaaattgctcagaaggatgcaaagggtctttacaaagcaggggagaagaaactgggaactgatgaaaagacttttatccacatattcagtgaacggagtgcggcgcatttggctgccgtcagttcttattaccatgacatgtatggtcattcactgaagaaggcagtaaagaatgaaacatctggggcctttgaacatgcacttttgacaataatccaatgtgctgttaatccaggaaagtattttgcaaaggtgttgcataaggcgatgaaaggcttggggactgatgattccacactcattagggtcgttgtgacaaggactgaggttgatatgcagtatatcaaagctgcatatttaaagaaacacaagaagactctgaacgatgaagtacactcagaaacatccagtcactacaggacttttcttctctcacttttgggccctaatcactagccaagatgttcaatgatgtaagtggaataaattcacccttgatgtgtaaatttgactgtttttagtgctttgtgatcaatgtagccgacaacttgtagaataaggcctttgttgttgttgttgttgttgtagtgctttgtgagtgttaatttatcagcctatagcacagatgaagatttgttgtgtattatttaagtatgcttaactattttcatttcttgtttcaacaaatcaaacattgacaatcaaatagaggttagagaagctactattttccattcaaccttacatagatgattgatattagttttacttaaaattaagcttgattgtctatgcaagattgaggggtaaacattagtttattttaac

SEQ ID NO: 54104 - DNA, 207 bp, Glycine max
  Clone ID: PAT_MRT3847_1986C.1
aacctttggtctgatttatgtgcatgcatggtcgtgagcagatgatagacccggaccatcataaacagcacgacctcctagcatcgggtattcctatcctatatatgagtacccttcattattgttcctatgtcctttagtctccgtatttagacacctctctcgatgacgaagatcccataaaacttcgcgattacgatctaataa

SEQ ID NO: 54105 - DNA, 272 bp, Glycine max
  unsure (1)..(272): unsure at all n locations
  Clone ID: PAT_MRT3847_19870C.1
cggtattcggctcgagattcatctcacattctccgntccatatttcgtacaatacctgtacacttctgtgagcctgacagtttccagcttctctacaatgcgatgtttggtgcaacaaaatgggatcctttatgttcaaaaacatcagatggatcgtagatatctacagtcacatgaaacatcttgaccaaaaggcaagtgctctatctgttgtatctgctctaggagctgaactacagcaggcacgtacacgaattcaggaacttgagact

SEQ ID NO: 54106 - DNA, 164 bp, Glycine max
  Clone ID: PAT_MRT3847_19871C.1
acggctgcgagaagacgacagaagggagaccattatttccacctgaagcattgctttcatttaaagtaaaatggctttccattttcctgtccaaccggagtcacattgttttttgaattaattggggacattcttgaatcatcattgaaggttccactcctttt

SEQ ID NO: 54107 - DNA, 1415 bp, Glycine max
  Clone ID: PAT_MRT3847_19872C.1
gtatagagagataaaagataacaccaatacctcaactcaaacgcttgtttcgcctaaccaaaggaaactccactgcggtttccctttcttctctgtcttcactactctcttttctcaataggaacaagaaaaatggaagttgcggcggcgaaagcgctgaaaccaagcttgcggacagagtttattttccctcaagcaatttacgacgagattttatgttttaacgcgaacaacgttgttgccgatgaagatttctccatggacgacttacttgacttttccaacggggaattccaagttggaaaagacttcgatgattacgaggaagaggaagacgaggaaaaaaacagcacctccggttccttgcagtcgcaggacagagccgaagacgacaacaattctaattccaccgctggaggcggcggccacgactatgttttcgccggcgagttatttttgccggcagatgatgtggcagacttggaatgggtttctcactttgtggatgattctctcccggagttatctatattgtaccccattcattgttccaagaaaacaagagtatgggccgaaccggaatccagattgagcccggcccaaaccgtttcaaaagtcccgagaaagtcgagaactgaaaagcctagaaagcccaacactcgtgtctggtcctcttttacggtgtttgctggctccgttgggttcggcgagttggtgactaagaagcagaagaaaaaggttgaggcccaaagcggtggggcccagtctctgcgacgttgtagccactgccaggtgcagaaaacaccgcaatggaggatcggtccactagggcccaaaacactttgcaacgcttgcggggttcgattcaagtctggtcggctttttccagagtatagaccggcctgtagcccgaccttttgtggccacattcactctaacaaccatcgtagagtgttggagatgagatggaaaaaacagatagcagaatccgttactggttcagaccggaaacaattgatcccaaattattaaattttgttagacaaaatttacaatggagtagagtgctagtattattttttcgttagaattaaagttttacctcttatatgcatataaaagtttgcattattgagataaaattttaattctaactaggctatccaaggaaactatgtttaagtagtttttttagagtccaataggctatagattaggaataggtcaacgaaccggtctgagccggtttgatatttgtaccacggttagtgagtagtgatttaaattagtgctagtgagctagggaggaactaagtggtagtaatggacattaggaaggcattgattgcatgtatcccattttcctagatcaattgagtataataaaatcgagaaagagaaaatttaattaaaaa

SEQ ID NO: 54108 - DNA, 332 bp, Glycine max
  Clone ID: PAT_MRT3847_19873C.1
aggaaaaattcatatatcccgaaaatgctcaatttaatattactgtacacagagcaacaactgcgataaaattagggctttctgggaggtaatcactgcttcatccataatcacactttcttaaaaataatcaacggtacaacatctctgatgatacctgacaacatgttctatctttcagttgctgtacccgctataatattccatcatatgaaccataacgtgcttcgcctgttataatacatgatttatacgagcatatgttcacgatgcagagaacgtattattataattacaacttccactcttatctatgttatccacaatctcac

SEQ ID NO: 54109 - DNA, 813 bp, Glycine max
  Clone ID: PAT_MRT3847_19874C.1
gtttatttgtaaagaaagtgacatttagaagaagcaaaaagaagtttattgagattcagaaatggaggtttcagcgctgagtaaaacctaaaaaaaagaaaaaaaatagtgaaaatggaatcgagcgttctggaatgtctgggcatggagataatcggcgtgatgagcccagtctcgatctgcatgttccttgtggtcctgttagtgtattctctctcctcgccgtccaccaccaccactatcgccaccgccgccaacctcgtctacgccgagaacccctccgacaccaccgcccagaagctcgagggcgccgtcctcaacgccgtggtcttcgtcgtcctcatcgcgctcgtcaccttcctcctcgtcctcctctactactacaactgcaccgccttcctcctccactacacccgcttctccgccttcttcgtcctcgccgccatgggcggatccatcctcctctccctcctccagcgcttctccctccccctcgacgccgtcacctccttcctcctcctcttcaacttctccgtcgtcggagtcctctccgtcttcgcctccggcggcctcccgatcctcctccgccagtgctacaccgtctgcctcggcatcatcgtcgccgcgtggttcaccaagctccccgagtggaccacctggacgctcctcgtcgccctcgcgctctacgatctggtcgccgtcctcgcccccggcggcccgctcaagctcctcgtggaattggcgtcgagccgcgacgaggagctcccggcgctcgtctacgaggcacggccgacggtcaatacgcgaaaccac

SEQ ID NO: 54110 - DNA, 181 bp, Glycine max
  Clone ID: PAT_MRT3847_19875C.1
tgtggcctaccatgagtccacagccttgctgtgtggggtgtgggtcttgggtcatgccgagagcttggtggtggtgactatgggtacacgcggcaccggctctgttgtgttgggtgaatatgttgccagcggggacctagtgatgacgaaggagcaggtttttgattttacttgtgtggcg

SEQ ID NO: 54111 - DNA, 374 bp, Glycine max
  Clone ID: PAT_MRT3847_19876C.1
aaaaaaaaaaaaaaaaaaaaaaaaaaaaaaaaaaaaaaaaaaaaaaaaaaaaaaaaaaaaaaaaaataggaagattccgtacacaagactatgcaactaacatagcgtgttctatgcaagagacctaactttttttttactggcccgtagatttacattcgctggccttgggattaaccctggcggtgcctagctatagccgtgtcgcaccccaatctcccttttcgtcggggcgcagtcctcctttcgctggccgggacgcgatcggcattcgccccagacccgccgcctttccggtcaatggcacgccccctgtggcgaatgattcgccgccgggggcgtggcgttatacccccacggggaccgggcctctg

SEQ ID NO: 54112 - DNA, 312 bp, Glycine max
  Clone ID: PAT_MRT3847_19877C.1
tttttagaatcaggagtgactcatgcaaaaattcccgtatcatgttctgagcaaatcaaatctcgagagtttttgttttttttttccttcccctatcacattgcgtttcggcaaatacaagttctcatatgactcaaaattttagaactcaagcagcaaatgttgcctcaactctattctcctgctcgctgagaactaatactgcctccttttcacatgcatgcccagttaatcatagctcatcgtgaccttcaaattgctcagtaaccgtctctttgcttgtgccttctgaactgttggcagatgaatcac

SEQ ID NO: 54113 - DNA, 256 bp, Glycine max
  Clone ID: PAT_MRT3847_19878C.1
tggagttttcagagctgcagtacatatttttggagtacctcttttgctgctccggaaactctaaaaaaacaacctagacatggagtctggagttatttactcaccactgccagtcttccactggttataagaaaaccatttaaatctggaacaaagctgctccacccgagttttgaagtggagcagagccatgccgaacacgcccttaatttattctgtgccacgtttaacttgtggttgtgcttatttacgatgg

SEQ ID NO: 54114 - DNA, 386 bp, Glycine max
  Clone ID: PAT_MRT3847_19879C.1
gcgtacgctttcgaaagaaacgggtggtggctgcttcgaaagcttaataatatgtttatatccagatcgtgatggtttcctcagcagcaaactaacaaattactcatatcatataataagatcgaccgttctctctcataagccaaacgtctagatgaacttgtttctcaatctatctccctaatttccgatcatcgactaggttactcaacgacatccgatgtatctgtaatacttgcattggctaatacaatgctaaagaatccaatcctatgaagtgtataagataagccatatacaacaaatggttaaaaagcctacataacttatttggacctaaacctcttgacaaggtactatttgcccatttaccacaccccaaaaat

SEQ ID NO: 54115 - DNA, 235 bp, Glycine max
  Clone ID: PAT_MRT3847_1987C.1
ggtggctttaatgcccaaggacagaggaataaatccgttttagtttaaactcaacttttgagggctttttgattaaaaacacagattagtcttagctaacaggtatatgagaatgcttaaagtattaatggtctgtgggagggctgtggaacctgtgctcattgtcaccacaacagtcccatgttcatccacagattgtatttaggcatgtgtgggtggaagatgtaattgggtt

SEQ ID NO: 54116 - DNA, 245 bp, Glycine max
  unsure (1)..(245): unsure at all n locations
  Clone ID: PAT_MRT3847_19880C.1
ggtgccttctttattacaccaaaacattttagtagaaaaagttattcttgaccatgaatttaacccccggatcacagatgccggccctcctggggggctgggagatgatgttgttttctaaaactataaagggagtggtggggtggggtatntagccccccaatacattaccggtgggggctcccctcacaaaaggggggggggggcctccccgcttattggtgctaaacctctatcccggaagg

SEQ ID NO: 54117 - DNA, 134 bp, Glycine max
  Clone ID: PAT_MRT3847_19881C.1
acgcatataacatccaataccaacaaggggggcttaacaagagtatattattaagacattttttaagtgcgtacttatttaattttatccaactaacctacattaaaactaggtaatgaatagattcctttatg

SEQ ID NO: 54118 - DNA, 369 bp, Glycine max
  Clone ID: PAT_MRT3847_19882C.1
tgttaaattttgatttgacagaagaggaaatgatggatgtgattacaaataaaggcatccctgctgatgttcttgcaaagcaagctaatgaatctcttaaccatgtcgctcatgaaggagccatggatcaaattcctgctgttgacaagttgtttactactgacgttaataaggcaggaaaaattatgaaccttacacatagtgttgttggagagcttaaacttcttactgctgggaagttgtctgagggtacgcgtatatctgtatctaacattatagctggggaaaatcatgtagggcaaatacccgtaatggcaaccgaggaaattctggcttctaatgcaagtgattccacatctgcaatggcga

SEQ ID NO: 54119 - DNA, 383 bp, Glycine max
  Clone ID: PAT_MRT3847_19883C.1
atcttccgttttggcgctctggcaattttccctcaaaaggtttttcatacaaggaaagagtattttggtactcaaagcatcaagaatagatggcggtcaaagatgaggcttatccattactcgggttacataacaggagagatcaattcctaaaatatgcaatataaattctacattttctgtgagatacagtaacggaagcgtgggcactggacccttatacacctgatacaggtccaattgacggttcagaactgcatgaccaatgcaggcatgtttctagccgaaattgggatggacaggacagtcgggccctaagatgtgatgaaacaaacttcaaagcttgagcagtgcacattcacttatgaacagagggtgttggt

SEQ ID NO: 54120 - DNA, 271 bp, Glycine max
  Clone ID: PAT_MRT3847_19884C.1
tcggaggcatgtgtatagttccatcatataaagcgactgtagatacatggaatgaactataatccagtagaaccttgctttcacatagcaaaaagagatagatgtgatgcaaaatagaggcattactggttatgacaggggagagacagctgatgtaattggatatcatgttgctgatgcaagatataaggatgaaatagctgctacagacaagtgtgattgtagtatagataactagcttgagggccaatggaccattacatagtggagc

SEQ ID NO: 54121 - DNA, 130 bp, Glycine max
  Clone ID: PAT_MRT3847_19885C.1
tggaacagttgttcaggacccttaactaggacaggttatttaacttcaaggtgatcataggaagaatgttcttaccttcctagttcaggctggcttcgtgaagaatgagcatatcaagattcatggtttt

SEQ ID NO: 54122 - DNA, 452 bp, Glycine max
  Clone ID: PAT_MRT3847_19886C.1
cgattcattgttgttgtattgaagcgtgcgccgcctccccctcaacctgaaccaactccggaaccaaaaaaagaagaagctgcagctaatacttcatcaagtttagctcccacacctcccaaagaagctgctgacatccctgcgactccggccaatcgtgctccacctatttcgacacctcaagcacccattcgaaacaacattgctccgttgtcagaagaaaatcaagaaaagcttaacaccatcgtcgcaatggggtaccctgaaagccaagccttgccagccctccgcgctgctttttttgatgccgaacgtgctgttgaatatttaatcaatggtgtacctgatactgtccgcgccgaaggtggttacgatgttgctatggaaggtggagatgatgacgaaggtgaacatgttggtcttgaattcctccaagataacgaacaatttca

SEQ ID NO: 54123 - DNA, 268 bp, Glycine max
  Clone ID: PAT_MRT3847_19887C.1
atgggtatatctatttttctaccacgtctagatgacactgcaatatatgcaacttggtaacacaatatcccaagcacagtttacatgtcactatttccaattttctgatgctaagcattcatatgaagtcctcagacccggtcacagcgccactcctactttgtatgctcatagtttaaatttttgtaggaaactttcaattgttttactttttgtataacgaacaaatgctgtctccttttttactaataaataattttgtattact

SEQ ID NO: 54124 - DNA, 386 bp, Glycine max
  unsure (1)..(386): unsure at all n locations
  Clone ID: PAT_MRT3847_19888C.1
cgaaaggcggtttttttttttttttttnnttattttcctttcgcacccgagtatcggagcaggtaaatttttggagcctccccaccctactttgacccttttaagaatatttttttcttcaaatttttttctttattttatgcatttaactttaaaatatactccatatttatcagtcttaaaaatttcgtggggccaccgctacccccctttttttaatactacaccccaaggctcacactttttccaatttctttagacacaaatttttagatcaattattcttcaaataattaaaaaaagggccgatcaattaattattaatgtggctttcctcattaaaaaaattatccctcttaatgttaaatagatttaaaatagacttt

SEQ ID NO: 54125 - DNA, 434 bp, Glycine max
  Clone ID: PAT_MRT3847_19889C.1
caaaaaagttcatttaggcttaaaatgtttttgctttttagcaaaaaaccctttaatttacataagctaacaaaattttgaaaccggggagaattaataaaactttaaccttgggataaatttgcaaaagagaaaaaaaaaggaataaattctttatagtagtaggaaagtagtttttggccggccaaaatttaaaaattagggatttgggaaggttcgggcccaaaaattgaaaccccttagcaggattttggagcaatctttggggggaattccctttaatttaccccaattttttaaaactacttggttaacaaacttgatggaattctgaaaagggttttgaacagaggaagtgccaccccttttttcagggtcccaaagggtggggcttttaaaagcaaaacttgaaatttgaattgggggagtgattg

SEQ ID NO: 54126 - DNA, 465 bp, Glycine max
  unsure (1)..(465): unsure at all n locations
  Clone ID: PAT_MRT3847_1988C.1
cgaaattccgggtccgcccacacccttccggagggcttaccaattaccaaaaccccacctttatctaccaccaaaccaaagaaagggaagggaaggcttgggttacctgggggggcgaagggggaataaaacccaaccccaccctgaagcaaagtcgaccggcccaaactaaacgaaccccttaactgaggccccagggttgaacggccccggggaggttccccggcccttgaacacaaccgatttgattttcgggttgggctccggggccgcctccaacgccagggtaacgctggccggctatggccccgcttccgaagacctaaagccctgccgttgggggatcctccccgccgtccagtccaacgcccccaagttccgggtggttttttgtttttgttaccaaactttttttttttttttggccgttggtgggatcaaattnaatcaacttttttttttttt

SEQ ID NO: 54127 - DNA, 201 bp, Glycine max
  Clone ID: PAT_MRT3847_19890C.1
ttgtgtcgtggctggaaattttgataaccagggtttagggttatgtctaaattccaatccctaaaaaggctaaaggaatgtttagatggccccacagtggggatggcccaatatgcagggtacttattggaatgccctttgaatagttgtaccagggggcgagccaagggttatattttcaccgtccacttccaagggtga

SEQ ID NO: 54128 - DNA, 345 bp, Glycine max
  Clone ID: PAT_MRT3847_19891C.1
gggcccacgagggggaatggtaatgggtgtggccccttgtctcgcaccacaggcaccaattagatcctattatggccctaatcaagctgagattttcagatcgtttagcccaacgatggctacactgccaaactctgagacttaagtttttccatagacatagcacccagatgagacaagagctatggacaagcctctaaaatctcaagaaagtaatgttcatagctcgggagcactactatctgatagggggacggatcagcttggcctattgagtaaaccatacggattatacttgaaaactggtgataatgctgtttagatgacgaccaatgccctcaaaga

SEQ ID NO: 54129 - DNA, 317 bp, Glycine max
  Clone ID: PAT_MRT3847_19892C.1
tgtcgagatgacgacaggacggaggtaagggcgcgcagcgtcgttacatgcttggagtaggatcagtgatattgctggtgtggtggcttcctgtgctgacacgccagctcagggtggctggtgtggtgctggtgctcacacacattagagcactacgtcgatgagacatgatagtggccataaggtaatcaatttcgacagtgaaaacttcgggaacagacacggtgagcacattgctacttagagagaaggcaacgagcatcatttgagaaggcgccaggaagacgctgacatcaacaccttcttaaggggagttg

SEQ ID NO: 54130 - DNA, 1878 bp, Glycine max
  Clone ID: PAT_MRT3847_19893C.1
gcgtgtctgtttcccgccatatatccaataagctttaaccatgtctgcctttgttggaaagtacgcaggtagtatctcatatctcctcctcttctcttaatattactcactcttacatctctcacccacacgtaaacaagaacatttcttcattgaatgaagtacaagcttgtcaaacattccactttaatgcactgattaacaagaaacgagtagccgagaaatgcatcatcatattctcattagttattggaacataatctcaaattataaaagattcattcatgtctaagaagctccttcgaagtcttttatatgtttacaactcttagactttggtttccaaatgggatgtatgttataacttacatcaattccagatgagcttatcaagaatgccaagtacatagccacacctgggaagggcatcttggcagcagatgagagcactggcaccattgggaagcgcctatcgagcattaacgttgagaacattgaggccaaccgccaagctcttcgcgagcttctcttcaccgctccagatgccctccaatacctctctggtgtcatcctctttgaggaaactctttaccagaaaacctccgatgggaagccttttgttgaggtccttcaagagaacaatgtcatcccaggcatcaaagtggacaagggtgttgttgagttggctggcacaaatggtgaaaccaccactcagggattcgactctctcggagctcggtgccaacagtactacaaggctggtgcacgcttcgccaagtggcgtgcagtcctcaaaattggcccaactgagccctctgagctttccatccagcaaaatgcacagggcttggcacgctatgccatcatttgccaggagaatggccttgtgcccattgttgagcctgagattttgactgatggggctcatgacatcgccaaatgtgctgctgttactgaaactgtgcttgcagctgtttacaaggcactcaatgagcagcatgtccttcttgaaggaactcttctcaagcccaacatggttactcccggctctgatagcccaaaggtaccaccagaggtgattgctgagtacacagttcaagcactccgcaggactgtcccagctgcggtgccaggggttgtgtttctgtctggtgggcaaagtgaagaagaagctaccctcaacctgaatgcaatgaacaagttggaggtgttgaagccatggactctctcattctcattcgggcgagcactgcaacaaagcacactcaagacatggggtggaaagaaggagaatgtcgccaaagctcaagaggcatttctggcaagatgcaaggccaattctgatgctactctgggaaagtatgttggtggaagcggaagtggcttgacttctgagagtttgtatgtcaagaactacaagtattaaacttctaaagagtgtgtttgtttctccttttgaaaacgtcaatccatgcttttggttcagtcacgttgaggtctataagaaagtatgacaatggagaaacaagcatactctaaatggacttggggactgattcggggtggtctggcatatgtatgatacagcctaagaagcatttgcttctgattaacatgcttatttttgggttacatatttttacaaacatcagttattatgttataggagccaattttaatgtcaaatggtgatggtgcgtaccactaaaaaataattgttggagtgaggctggtatatattgtcagaaacagtaatattatactttataaaatgtgcaattacttaacacaggatgatggaaagcagtcaattattagtccatgtaataatggcccaatacttttacccgccaatgggatgtttttactttttcgaat

SEQ ID NO: 54131 - DNA, 279 bp, Glycine max
  Clone ID: PAT_MRT3847_19894C.1
tgccgttgcgataccactaaacaacggtaccgctgctaaataccacagaaagggtccgccaatttccgtagctactgttcttgcgcgttcacaggcgcaaagtgatccaaaaacataaggtaaccattaccttgtcaaccaaggatgactcttccgtaagcgctcctacaactatgtaaatacatagtttagtcaaacaccacggctcacatagacacgattggcacatcacatcaaagcgatgcacatatacactatatcaactcctcgacctctcat

SEQ ID NO: 54132 - DNA, 110 bp, Glycine max
  Clone ID: PAT_MRT3847_19895C.1
tcctctccggctcggcgagttccgccccacgcgtgcgctacaacccttcaattctcactttcccgcttatcatattgttatgtacatcctcgagggttgatgcatatcct

SEQ ID NO: 54133 - DNA, 720 bp, Glycine max
  unsure (1)..(720): unsure at all n locations
  Clone ID: PAT_MRT3847_19896C.1
cccacgcgtncgcccacgcgtncgtacggctgcgagaagacgacagaagggggggatcacaggattcagatggtggactaaaatcagcaacatacatattcgagactcctcctcctaagtcctaaccctaatcatcctcttccgcaccttcgccttcttacccctccttcctctctcagcttccttctttctacgagggagagtgtcgctagcattcctccttaagcgtttatgtttaatgtttctttgtgacttggtgtttggtttctgtgatggcagatactcggagagtttgcatgcatttctgtgttttggaggaatgtatcacttcgtgtctggtggaaatgtgcgagttctaatggcgtgctgaatgctggctacttctgttttcagactatggcatcgggcttatcatgctgtgtttcacaaaatcgtgttgctgttagtttcttcactatttcttacttcctacattgtgtaattacttactccctctggtctcgaatataaggaaagataaactaacttacattgtcttatgcttatattcgagactggagggagtataagtgtttgtccttgggtcctgtgcggataaaattcaccattagcacttcggtaagaagaaaaactgaatttgggtacttcatttttatagaagctctctcatctaacttcttcagagaagctaagatgcataaggtaattttaatttttaat

SEQ ID NO: 54134 - DNA, 136 bp, Glycine max
  Clone ID: PAT_MRT3847_19897C.1
cccattcttactcggacgccgcgcgggccccctgggggggacacctttaaatccgaactgacgggagctcgcacacactcatgaaaaaatgcaccggctaaggaagccgcaacaacaacccaataggagctgctgc

SEQ ID NO: 54135 - DNA, 280 bp, Glycine max
  unsure (1)..(280): unsure at all n locations
  Clone ID: PAT_MRT3847_19898C.1
ggcagcgtcactacaagcagcagctactttcatgcaacccaccaagttgagcnggancaacactttgcagcncaagtctactcagtccatttccaaggctttggttnggaacctgttggagcnaaaaaggtcacatgctcccttcaggctgatctnaangacttggctcacaagtgtgttgatgctaccaaaattgnaggattcgcccttgccanctctgncctcgttgtctctggggcaagtgctgaaggtgttccagagangctaaccttcgacgaga

SEQ ID NO: 54136 - DNA, 1257 bp, Glycine max
  Clone ID: PAT_MRT3847_19899C.1
cggtcatcaattccaagacaccttaactttattgagcacaccagtgatattggctggaaggaagatcagagagccaagcctgttatcattgatccagctctttatagtgtcaataaatctgatttattttgggtgacagagaaaagaaatgttcccacagcatataagctgtttacaggttctgcctggatgatgctctctcgccaatttgttgaatatttgttatggggatgggataacttgcctagaattgtcttgatgtattatgccaattttctatcctcccctgaagggtattttcacacagtcatctgcaatgctgaggagttccgaaacaccactgtgaaccatgacctccacttcatatcatgggacaaccctccaaaacaacatccacatttccttacaattgataactaccagaaaatggttgacagcaacactccctttgctcgaaaatttggcaggaatgaaccactcttggataagattgatactgaactcttgggacgaaatgaacatggttatgtgcctggcaggtggtttgaccaagcaaatccaaacatcaccgaatcatattctgccataagaaatatcactgaacttaagcctggccctggggcagaaaggcttaaacgccttatcaatggtttgttatcatcagaagattttcacactaagcagtgttcttgacacccaggtttaatcaccttgctatgctcattgctgtttttccatcactcaacagcaacaagcaaacaattatgatgtccagttgacatccaaggttgtttcgagaccaaaaacatgaaatatgagaagacagatcagaaaacatacggaacaatttcttcaaaagtacgtcttcccttcaacttctatttttactcgaattttaacgtgaccacacatttgtagtcaatacgtatccattgattcacatgatatattaaattttatggatgacaaggacttgtcatcaatgcaattgttgtactccttagaatgtctttatagcaaataagagattcaatgatataacacacgggtagagtgcctggtacggttaggctggaagtgcacaagcccgtgaaaagtactcttcctagtcttttatacaaggacatgctcaagtagatgccacttattttgctttttttttttctctcccttttcttgagttattaccctcatgaattgaggtacgtttgatttttctttcatgaatgaacatttgttatgccgttaggctcttgc

SEQ ID NO: 54137 - DNA, 289 bp, Glycine max
  Clone ID: PAT_MRT3847_1989C.1
tctacgcgtccgaaaaaaaaaaaaaaaaaaaaaaaaaaaaaaaaaaaaaaaaaaaaaaaaaaaaaaaaaaaaaaaaaaaaaagaaaaaaactcaatgatgaagaaaaaaaaaaattaaactaacgttaatatgaaaagaaaatggggggacctctttaagaggagccatgtttgtgaccgtgaacttcttactaattggattttgtataagggcccttatataaaattaattgagtgttttttcaaaagatatttatttgaaaaaactcggcttaacaaaatttgatga

SEQ ID NO: 54138 - DNA, 508 bp, Glycine max
  unsure (1)..(508): unsure at all n locations
  Clone ID: PAT_MRT3847_198C.1
aacgtcgttcatacacttcttctgcaaacaaaaaaaattcccgcattagggtttcctttctccgacgtcgatctctccctcctcgaagccatcgagaagtcgcagaacgcggtcgaagccctcgatctccgagccctaaagaagcacgtgctctccttcgagcgtcgcctgaaggataacatcgaagcgcgccttaaataccctaaccaaccggaccgcttcgccgattccgaagtagaactccacgaagagcttcagaagctgaaggtcctcgccggcgcgccggagctctacccggacctcgtcaacctcaacgtggttccctccatcgtcgacctcctcaaccacgacaacaccgacatcgccatcgacgtcgtgcaattgctccaggacctcaccgacgaggacgttctcgacgacaacgacgactccgctagggttttggtcgacgcngctgtcgacaacagcgcgctcgagctcctcgtgcagaacctgcaccgcttgaacg

SEQ ID NO: 54139 - DNA, 322 bp, Glycine max
  Clone ID: PAT_MRT3847_19900C.1
catgatccgtacgatcacatataaagtccttgatatctacatagatccccaataggtggtttcacagatgagtgggttcggcatgtctcctatccttagtgaatatcttcggtgcgggtctatgagtgattcatcgcttaccctcaggacccacagagctcaagccttcgctgtaggcctccccaaatggctcgaagttggctcacaattaagtctgatcatatgaatgctcaggtgtacaatctagttctaaagcattcaaacgctatcagcctgattagttatcatcaatatgagggttgttctactcagatcgcttcac

SEQ ID NO: 54140 - DNA, 427 bp, Glycine max
  Clone ID: PAT_MRT3847_19901C.1
actctgagtgagggtaaaatttctttgttaaacatgacatacttgtgtgcaaagataaaagcaatgagttcttttaaagagaaactgatgaagagataaggaaggcacacgagctcacaaagtggtccttctacagagccctcatcactgagtttacagcaacccttctcttccttttatgtcatggtgctaacctttatcgggttaaaatcaaactaattattgatatagtggtgcggtatattacaaggaagtcatgtcaattaccaaccctgtgatttcttatccaccccaaccaggaagtgttcctcttaaccagcagtggaaccagccgcctagctttctctctcctgatgtatacataaaaattgaatgtttatgcttcagctacagaaaacttcgatcagtttggtgagataactgaaac

SEQ ID NO: 54141 - DNA, 410 bp, Glycine max
  Clone ID: PAT_MRT3847_19902C.1
ggtgtggttgtgccttataatgtgacatttgaccattctcaagctgctaaacaagtatatgagaggttccaagcttgtttgggcacaatcctgacatctgggttgcctcaagccaatttgtcacctgctcagcttgaagaccttcctcttttctctattggtcatagcaatggggcacttcttcaagtactcacaggaagcttattttctgagaaaatacctaaggctaatgccataatcgcatacaacaacaggccagcaacggaggcagtcccttactttgaacagttgggtcctgcagtcagccaaatgatgccagttgtggaggcaactcctttttactcgatagctagaaatgcatcaggagatgtgtggaagatgatgttggatgctgttagatcaactctaca

SEQ ID NO: 54142 - DNA, 479 bp, Glycine max
  Clone ID: PAT_MRT3847_19903C.1
aattcggctcgagtaaacattgacttgaaactgatcagatcaattaacacacagagagagagagagagagaagcatagcaaacatgggaagagctccttgttgtgacaaagctaatgtcaagagaggtccatggtcacctgaagaagacaccaaactcaaatcttatattgaagagcatggaactggtggcaactggatagccttgcctcagaaaataggcctcaagaggtgtgggaaaagctgtcgtctcaggtggctgaattatcttcgtccaaacatcaaacacggaggtttctcagaagaagaagataacataatttgcagcctctatgttaccattggaagcaggtggtctattatagcagcacaattaccagggcgcactgataatgacataaagaactattggaacactaagctgaagaagaagctactaaggaagcaaaagaaggagcaacaggctcaagctcgcaaagtt

SEQ ID NO: 54143 - DNA, 1981 bp, Glycine max
  Clone ID: PAT_MRT3847_19904C.1
gctgcaattgaggttcagtcccttgtcagataaaagtaaggtcaagtctgaataattacatagactttcaaataataatgtatgtggtgtttagtggactggtaagtaagggaaggtagaaattgaggagattgaattgcaatagcaatgagtgtgtcttcaaattctaaggaatcgatggaattatgcatatttgatttgcggagaggccaacacgaaggccaagagctcgataagattctcttcttcttccccgccggtttgcccttttcaaagcaactctccgtcattggcctcagcgaaggactcatcactttcactagaatcttctcgccagaggctgcctgcgacgtcatcgaagcagaaagacattctcatgttttctacgaggccgaacccgatatctggatagtcatggttgccgacaaaagcaatgattcagaacctatatggagagttgatgcattaagaaaagttctcaaggaaattcactcactttttgtcatgtttcatggatctattagagcaatgctggagaaagaacccggcggaggactaacaagacggcatttgtatacctttatcatggattatctgagggattttcttgcggggaaaaagctccttttaccttcattccgtgattgcttaaaggaacgtggaactgttcagatgctgacaataggtcgtgaggctgcaattgaggttcagtcccttgtcagggtgcttgaatcttcttctggaaacactccctgctactctttgggagtcggtgaagagtgctagtaaactggagtctatcaattgatgacaccataaagagattcgcatatgctgtgctaaggttgactccccatgctctatcttctcaagagggaacgagctccaaatggttctacggaagttctgcatccaatgttgccactgagtctaacatggcccatccaagctctttgtctgaaagtttttatggctcatctgatatgtcctctggtgaagataaccactatcatgttgtgaggcccctacagagtgacaaatggtctaaaggaaaagatggttatcttgtcactgatttatggggtgcagaagttggtacgtgggtgtttgcctctccaacagtttggcttcaacatacaggagagaaaatgtatctttgtgtttatcagcatagaagccttactttgatgcttctgattcctgtatcatccattcctaacggggagcaaggtgtgtcggcagtgaggcagcaagttgttgaaaatgcatcacttaaaatattgaaagttgaagagaaactatcgaaaggatggggtggagataatgcttatcacgttagtgggtaccgctacttacttgtagatggtgatagaaatgtatccagggcttctccagcaacaaaagttacaactttaacaaaggagtccttacttgctatgaataagcttaggcaagaggtggagtcggagaagagtagagcaaaactggatagccgtaattgtgaaaaagatttagagatgtgcattagagcaaaaaataatgcatgggttatttctcgagtcacaagagggaaggagctttacatggttctagagaaagctaatgaaacccttctatatgcttcagatgctgctgagaagtttagcgacaggtattgcaatggaacattttctctggactaaagaaaaccaagcatgtgcgaccgaggaatagcacgttaggtcttctaactgtttacccagtaaagtcgggaagttttccactgttgatttttctcaccgggaaattcaagaatggaagaaagaatgctactctgtgtatatctctctgtatattaagtgtaatttgtttatacttgttaaagggtgctttatcaaatcttgtcaccggtaactttctttttaatccgaaattgggtcagttccgagagaaattgttttccaaaaagtttcatttatttcacaatagactttgaattcct

SEQ ID NO: 54144 - DNA, 507 bp, Glycine max
  Clone ID: PAT_MRT3847_19905C.1
ctaaggcgagccattcggtgtgtgtgacagtgtgcctgagactcgagagactgttgccgccggtattaattcttcttcttcttcttcttcttcttcttcccccaaaccctaatttcttcaattcacgaaatcacattcatggctgaacacaacgacccaccccaagaacccacattgccctcctccaagcgcaagtccgatctcgacctccaagacctcccttccaaaatccccaagctcgacctcaaagaaaacgacgacaaagacctccaaaacgaccatgaaggagagaacgacgaaagggaagaggaccgaaaggggaaggggattatgcgtgacgacaagggcaaaggggaaatgatactagaagaagaagaagacgacgacgacgatgacgattcagatgatggtggtgatagtgatgacgacgggagcgatttctccgacgacccactcatggaggtcgatttgaataacattctgccgtccaggactcgcggccggacg

SEQ ID NO: 54145 - DNA, 445 bp, Glycine max
  Clone ID: PAT_MRT3847_19906C.1
cccgcggactgttactggatgatggctcttggtttattatgcagttattctcaactgtgcaataggagcttgggcgtcttcatccaatatgggctattctaataataggcgtcagcccataatggatcaagagtgattacatggggggagcttaccttcttgcgcaagcaagccctctgctgagaattgcagttcgcgagcaggtgatccccacttcgaaaatggggtcttctttattatctggtatgggacatgctgagccatttaacctcatatgtcgctgctgggaatgaacattgccgaaaaaagaatcatggaggaaactacctgggattctatagggcaataaaaagtgcttatgcacatatgcaaattatctcaaactgtgatggttcttctcgacctttagatgatggcagctgatgtgcatgattatcatgtttat

SEQ ID NO: 54146 - DNA, 253 bp, Glycine max
  Clone ID: PAT_MRT3847_19907C.1
ggctcgagagaacactcaccacacaagacattcagacaggcatagacaaacatggtaaccagtggccaccgatatgtctgtgctgtccaagagctaatggatctggaagtcgatgacacactagcacgatcagccgaagccgagacactcgacgaggctggtaccgatgaagccagcaaggctgccgttaagaacgcgaacgaactggagacggacaaggcatacgcatctggctagcgatgctcaagactag

SEQ ID NO: 54147 - DNA, 260 bp, Glycine max
  Clone ID: PAT_MRT3847_19908C.1
gcaaaaacagaatcactctgttctctctgttcaaacagagtttgcataatactcagtgacagcacttttcttcctttcttcaacttcattacaaaactcttactcttatttcatgcttccaaatataaaaacctttttactattattttctataccaacactttctttctttatttacaaagttaatttctccttttagttagtcacacaaaacaaaacactttatttgtttcttcatctaccctttcacaaattgactt

SEQ ID NO: 54148 - DNA, 260 bp, Glycine max
  Clone ID: PAT_MRT3847_19909C.1
ctcgaaccttgctctatactacacagtacacacactataagaataatggcttccatcctccactactttttagccctctctctttcttgctcttttcttttcttcttatccgactcagtcacccctacaaaaccaataaaccttgttgttctacccgttcaaaatgatggttccacagggctccattgacacatcctccaaaaaaggacccctctaatgctagtgccagtcattgtggacatcgatgtggatcacttgtt

SEQ ID NO: 54149 - DNA, 217 bp, Glycine max
  Clone ID: PAT_MRT3847_1990C.1
tggagaccgagcttttgctgagaagcactatgctgatttgtctgccaagcctttctttagtggtttggtggattacattatctatggccctgttgttgccaaaatctgacacgtcaacactgtggttacaactggcctaaagatgatcaggaccacaaacccacctcaatctgaacctggaactttccgcgatgatagtgtgcttgtcatggaacga

SEQ ID NO: 54150 - DNA, 291 bp, Glycine max
  Clone ID: PAT_MRT3847_19910C.1
aaccactcctccacacaagcgtccgtggcgcagctaaatttgtagatcaaggggcacctctttcgcgttttgtcaaagtctgccgttgaacacgtctgtgctttggtatcagcattagggtaattggacgttgacaatgggtgccaactccgatgtaacactgatgaaggcgtccgtacacgttcagttttctggacatcatatgggcgtgttttagcaacacacagcatccatggcattgccaacaatctcaaaaactgagatgtatcaacaaccgtttgtcaccagtgt

SEQ ID NO: 54151 - DNA, 1132 bp, Glycine max
  Clone ID: PAT_MRT3847_19911C.1
cgtggagccgcgtgggctgttgagtctgcgcctgttacttctccccctgtggggcctgggagcttcgtgtctgcctccccctaagggggctcccccttctcacctcaatgctgtcagggccgtcgcgatctagaactagaaagaacatggagacagcctatcggcaaaagattgctgctttgtcccgtgttaaccataagaactttaccaaccttattgggtactgtgacgaagaagaaccattcacaaggatgatggtgtttgagtatgctccgaatggaaacttatttgagcatctgcatgttaaggaagttgaacctcttgactggagcgcaaggatgagggttattatgggcacggcttattgtcttcagtatatgcaccatgatctaaatccaccagtagctcattccaacctcaattcatcgccttcatcttctacttctccacctgtgaatcaagcaagtcaacaaaattcacctaatggtgcatctggaaaattatggaagtatatcattataatcgcaggtgttgctgtcttggtcattgttcttgtgatcatgctttgcatttggcgaaaacgagcagcaaaagtaataaagccctggaagacaggaataagtggacagttgcagaaagcatttataacaggggtccccaagttgaatcggggagagctggaaacagcctgtgaagatttcagcaatattattaatagttttgatgaatgcaccgtatacaaaggaacactatccagtggagtcgagattgctgtcgattcaactattgttgcttctgccaatgattggtcaaagaacatggagacagcctatcgcaaaaagattgctgcattgtcccgtgttaaccataagaactttaccaatcttattgggtattgtgacgaagaagaaccattcacaaggatgatggtgtttgagtatgctccgaatggaaacttatttgagcatctgcatggtaacaacttccatctctctctaaagaggctcaagttattaccttgcgcgtagcaaatcccactaaagggttaagttctctttgcaaaaaacaaaatgctgaatttgtgtatatttgctctcttcagttaaggaagttgaacctcttgactggagcg

SEQ ID NO: 54152 - DNA, 146 bp, Glycine max
  Clone ID: PAT_MRT3847_19912C.1
gaaacctgcagtgcatcatctatttatcgatgaacggtgtgttggaatttaagttgacatgtttcaaagtctgcaaggacgaacaccaacaaagttatgagcaagaatggatgatatgataaacagtcctttgaggtggtgaagag

SEQ ID NO: 54153 - DNA, 288 bp, Glycine max
  unsure (1)..(288): unsure at all n locations
  Clone ID: PAT_MRT3847_19913C.1
gtcgcacgcacgcgtacgncnagctcggaattcggctcgagataccctanatcggagtntcngtntcaccccncnntncncanctctaacancanagncctcngaggctnntcgtcctattatcannaacantgtctgacagtcaagaatctnacaagaacattganntanggaagatcnaganattnatcaaggcnctggaagctgnncgaggtaatggtnncagcatgattgactcngataatgcctccacgcgatcaaatnncncgggtcactaagatgttcggn

SEQ ID NO: 54154 - DNA, 355 bp, Glycine max
  Clone ID: PAT_MRT3847_19914C.1
aaccagcaatgcaaggccaaccaaactctttcggtttctagggtggaaagatcaaggggaactgttacagcaacatttgtgaataaaaataaaattgaaaacacatgactttatctaaacgccacagtcagatcaaatgaaagattattcccgctatggcgggctctgctgaggaaaaccaaattgtgcacgcaattcgggaaaacacttgcttcaccaacatgttgtgaagctttcatctttcacctcactagatgaatcatttccttctaaatgtcctgatattgatgggggtgcagaaccactattcttatcatgggaaggtttaccaagcaggcttttttccatagaaagc

SEQ ID NO: 54155 - DNA, 346 bp, Glycine max
  Clone ID: PAT_MRT3847_19915C.1
aaataactaggacaattgtgaaactttctgtgcaacgaaactgctaatgcaaaccaaatctcatgacaaaacacctgtgacacacaacaatacatataacactccagctttatggccatgtagtggccgattcagatgaacttcattacaaatcaaggggatagaccaatgttatatggatcacagacatgcgatgctgtaataaggactcgtgcgcgtaaacatatgctgcatttcaacttgcctacggatgttacacgagtgaactttggtcatacgcataaaccgtctactaacacgcttatctcgacgacatccactgcaagtcgaacgtgctctgtgcctt

SEQ ID NO: 54156 - DNA, 270 bp, Glycine max
  unsure (1)..(270): unsure at all n locations
  Clone ID: PAT_MRT3847_19916C.1
gnttgantcattgtatctctatntcttctcctatanaagcatatganaaagtttgtcgtaattaggccaatanattttatggtcaaggcctcttaatcgttttcntcaaatgtntagtatganttggacataaaatctanttgncagtaactanaatnnttctcacctttataagggtgccaattaaatgtattcaatagaaagatgggtgaatnctgtgacttcatcnttnnnaatatttatngtngtaacatanngggtnacttcatt

SEQ ID NO: 54157 - DNA, 915 bp, Glycine max
  Clone ID: PAT_MRT3847_19917C.1
gcggcaaattataaactataatttcatttgacgaacaatgattagatttccaattcattcattgcttaaaagtagccgagagagagaagcgaattataaaaaacaataatcaaccaaacctagggcgcaatttatcaaagtagtgattaacacatttgcaagccacgaagcaacatactcaactttcaaaaatctgacaataatgcagtcaactaaaattctgttctaacacatcaagaaatgcaagagttctgatattaacttgaagagcatcaaaaggccaccattctctttggcatcgaaagtaaaatatagcaactccagtcgtataccatacgaagtttaaagtcttctaccccttctaccactctttctacgtgtactatccgaaggaatgggagtaacatcctctatacgaccaattttcattcctgaacgtgcaagggctcgaagagctgattgagcaccaggaccaggtgttttggtcttgtttccaccagtggcacggagcctgatatgaagagcagttatgcccagttccttacatctggcagcaacatcctgtgctgcaagcatagcagcatatggagatgattcatctctgtcagctttaactttcatcccaccagtgatgcgaacaagggtttccctcccagacaaatcagtgacatggatgaaggtgtcgttgaaggaggcaaagatgcgagccacgccgaaaacatgttcaccgtctctaacggctggaccaagagtgacattttcctcctttggctccctaacctttctcctcgacatggttgctgaagggcttcggagttcggagattgatgaagcttattagggtttcaaagccagcgtttttgtttttatacagatctggagtagggttttgctggatgccctccaccttttttc

SEQ ID NO: 54158 - DNA, 898 bp, Glycine max
  Clone ID: PAT_MRT3847_19918C.1
gagaactagtctgagttttttttttttttttttgacgaacaacgaatagatttataattcattcatgcttaagagtagccgaaagggagaaccgaattataaaaaacaataatcaaccaaacctaggaagcaacatgctcaactttaaaaaatctctgacaacaatgattaaatgtgtactcaactaaaattctgttcaacacctcaagaaatgcaatagaagttctgatattaacttaaaaaacatcaaaaggccacaattctctttggcattaaaagtaaaatatagcaactccagaataggaagtttaaagtcttctaccccttctaccactctttctacgtgtgctatccgaaggaatgggagtaacatcctctatacgaccaattttcattcctgaacgagcaagggctcgaagagctgattgagcaccaggaccaggtgttttggtcttgtttccaccagtagcacggagcttgatatgaagagcagttatgcccagttccttgcatctggcagcaacatcctgagctgcaagcatagcagcataaggagatgattcatctctgtcagctttaactttcataccaccagtgattcggacaagggtttccctgccagacaaatcagtgacatggatgaaggtgtcgttgaaggaggcaaagatgcgagcaacgccaaaaacgtgttcaccatctctaacagctggacccagagtcacattttcctcctttggctctctaacctttctcctcgacatggttcggtgaagggcttcggatgaaccgggtttcaaagctgctagtgcaaagcgataacgaattcggcagcgtttgcttcgttacaaataagaagaagccccttctgtcgtcttctcgcagccgtcggacgcgtggg

SEQ ID NO: 54159 - DNA, 1185 bp, Glycine max
  Clone ID: PAT_MRT3847_19919C.1
gagccaaaactgttagagtcgcatacatagagactggagtggaaggatggcatgaacaaaatttaaattgatcgaattacgcgatgatattgacatgattaccacacccaaaaagaaaaggaaaatatggacatgattaggcttccacgcgtccgcccacgcgtctgatttttgggcatggcctaaggtgttttagaagtgcgatagagcaagttgttattttactgaaagtgatttttgtggtaatagaaatacaatagagggatgcaatgcaatgcaacaaggaagaagaaagttgcaatccaatcgcaatcgcacttggtttggtacggtgatttaatttgagtttggttaagagtctcatcgtagtgtagtcttctcatttgcattgcaccgaagaatcaaatcaaatcggtggccgtaaacctaagttggttcagatccgatggaggcaatcgaagaattggttcagctctccgattccatgcgccaagccgccgccgtcctcgccgacgaagatgtcgacaactacaagcgcccttccactttcctcaatgtcgttgcgctcggcaatgttggtgctggaaaatctgcttccttgaatagcctcattggacatcctgttttgccaactggtgagaatggtgctaccagggctcccattagcattgaattgaatagagacacctccttaagcagcaagtcaatcatcctgcaaattgacaataaaactcaacatgtttctgcaagtgcccttcgacattctctacaggatagactaagcaaaggttcatctggtaggagccgtgatgaaatatatctcaaactacgtaccagtactgcgcctccattgaaattgattgacttgcctggattggaccagcggatagtggatgacaaaatgatcagtgaatatgttgagcacaatgatgctattttgctggtagtagtcccagctgctcaggcaccagaaatttcaacatcacgagcccttagagttgctaaggagtatgatgcagaatccaccagaactgttggcattatcagtaaaattgatcaagcttcttcggaacccaaagcccttgcagcagtgcaggctctcctattgaaccagggaccccctaaaacctctgatattccttgggttgctttgatagggcaatctgtttctatagcttctgcaca

SEQ ID NO: 54160 - DNA, 152 bp, Glycine max
  Clone ID: PAT_MRT3847_1991C.1
ctaaagataggggctaatcgcggagcacttagaagggatgtcttactttgctaataccgttaatcagccccaggagaccgctttgtggcagggaaatttttccttagatagtaaatctcgttctagattgaaaacagtttcctctacaaaag

SEQ ID NO: 54161 - DNA, 446 bp, Glycine max
  Clone ID: PAT_MRT3847_19920C.1
ctatttctaagatcgcgagcgttccgcccttttgtttttttttttaatactcaatcgcgctgatataaaccgttataataaacaaggataacgatacatgatatttaccaacactagcgatccagggttgatgagtctatcagttattggaagttgcagggaatgcaactaccacttgtaatctctccacacctatgaatatcagcaatgacacacttttgatggttcgaactggagtgcacatgaaatatgtagccgcaacagagtatagcaattatgcatgggggtaagaagccagcactgctatgccacacaggccttctttagcagcatcatctgtttgcatcctaatgaatcctttagcaccccactgtactcccgatgaattcgaagccaaccaagacttatttacattatcgcttgctacattccctacggcagcgaca

SEQ ID NO: 54162 - DNA, 124 bp, Glycine max
  Clone ID: PAT_MRT3847_19921C.1
atcgattactgttatttccatgatcagatcacatctgcgagcacaatattgcggagtttatggagggatgctcacttttggtccgggccgggcatggtatactctccagcactgaagtgctgac

SEQ ID NO: 54163 - DNA, 285 bp, Glycine max
  Clone ID: PAT_MRT3847_19922C.1
tgcacgcgacgtactcgaattcggtcgggctcgcgcccatgaagcaaattactatatgtgcagacctagctacgagatgtaacaggtatgagagggtgatataactggtggcctctgacaaatctggggctctaatcatggatgcagaacaggtttttacagttatgagttatccggcttctgacaggactggattatgacggcgagaaaatactatatagtaatactggccagtaaggaagtctggtgtatgtcaaagaactcttacaccacatctacaaagga

SEQ ID NO: 54164 - DNA, 180 bp, Glycine max
  Clone ID: PAT_MRT3847_19923C.1
ggaattacccgccatcgacccacgcggtccgccaagcttttctgttaagaaaaaattagggcggctgaagggccaaagcttaaaaagttgaagctgtttttgttgaggtgaaagtgaaatggttggcaaggataatctgagggctgaggacttgaacttgagctttaagaagctatgatg

SEQ ID NO: 54165 - DNA, 383 bp, Glycine max
  Clone ID: PAT_MRT3847_19924C.1
gagagacggagcagaagaaggatccacaccgttctcttcctctcttcttctccttcttcattaccaaacctaaaaggtatgtatgtattcatatcatatgcatgtcctctctctatctttatatacatacactaatgtttctttttttagtttttacgttttggattatataaaaaattactaatagatggaaaaacgatggttagaaatggaaatggtggttgtggtgtggttatgtgattgtgagatattagaaaatatgaatttgaaatgaatgcatttatatttttgggtaaagtttggtgtcgggtgaagaaagaattaataaatgcaaccacggattcaacccatgacattaattaattaatatacgatcctccttt

SEQ ID NO: 54166 - DNA, 363 bp, Glycine max
  Clone ID: PAT_MRT3847_19925C.1
ggctcgagagtcctcataaatccatctcatttttctcttgaaaagggaatgaagatttcactgccttcttatgagtcagggggatctttcttaccaacacaactggatgcagcttcttcttttgttgtcaacacgatattgttgtacaagcatattacacggtcaagacacatatcaccccatatattttcacataaacatgtcaattctctgcatttgcatgagcgatattcgcattgtgcaaataagacaccaaaaattattttaataatctcctatctccaaatatttctaccaacttattttcctactttattcaatcctctttatgatcgccaaggcagttaatcattacacctcttt

SEQ ID NO: 54167 - DNA, 1684 bp, Glycine max
  Clone ID: PAT_MRT3847_19926C.1
aacttgggcgtcaagcattggccggtatcaaccctctaagcataaaaagacttgagactttcccacccgtcagtgatctggatccttccatatacggtgcccaaaagtctgccctaaaagaagaacacataataagccatttggatggaatgcctgtacaacaggcaatggcagaaaagaagctattcatgttggattatcatgatgcctatctcccatttctgaatggcatcaatgctcgtgaagataggaaagcttatgcaactcgcaccatcttgtatttgacaagactaggtactttgaagcctattgccatcgagttgagtcttccagaatcgaaacaggtccttacccctccattggatgccacctctcattggttgtggcaaattgccaaagcccatgtttgctccaatgacgctggtgttcaccaacttgtccatcattggttgagaacccacgcatgcatggagccattcatcatagctgctcatcgccaactaagtgcaatgcacccggttttcaaacttctaaagcctcatttgaaacacacgttgcaaataaatgcattggctcgtgaggctctcatcaacgaaggaggcatcattgagactgatttttcttctggcaatacagcactgagattatctcagctgcttataaagattggtggcgttttgacatggaagcccttcctgctgatctcattagaaggggactagcagaacctgatccaacacatccccatggactaagactactgattgaagactacccttttgcaaatgatggacttcttatatggtttgctttggagaacttggttaggacttatgtgaactactattaccgtgataggatcatggttcgatctgatagtgagcttcaatcatggtatagtgaggtcaccaatgttggccacgctgatcatgcaaatgcaagttggtggcccacactctccactcctagtgatcttacttcaatactcaccacactcatatgggttgcttcagttcagcattcagctgtgaattttgggcaataccctcttggtgggtatgtcccaatgcgttccccacacatgaagaagttgttgcccaaagaggatgatttagagtacaaagaatttttggaggacccagaaggatacttgctgtcttgcttgccaaatatgtttgaaaccaccaagtttctagcagtggttaacatactttctcagcattcgcctgatgaagagtacatggggcagaggaaggacttgtcagattggactggcgaccctgaaatcataaaggcattttatgagttttccctggatataaagagaatagaaaaggggattgccaagagaaataaagcccccccccgtagaaataaatgtggtgctggaattcccccatatgagttgctcgtagcctcctcggctcctggagttacaggtagaggagtgcccaatagcataagtatatagaagtcatgtaaagatacaaatactttcgctcctaattccaaacaatacgttaccagtagatcccattaggtgaaacttttggtgttagcaatgttaaaggtagccctgatcccgtctcggccaatagtcattgaattaggtaaaagtcaatagtcatagagtaatgatacccttttaaaagaattttatacccttttataattttcccctctt

SEQ ID NO: 54168 - DNA, 228 bp, Glycine max
  Clone ID: PAT_MRT3847_19927C.1
aaggaaccctaaatacttgggggaggggcagtcacaccctattggaatggtgatttttaatactttaaaagcaattgggatggcaagacactactattgggtttcaaggtttttgtaattaaaaaagggggttagatgcaattcccatccctgccagtggaacacaaacgagactatgtgctctctgaactgggaggggcagctttcttttttaagctaacttttggc

SEQ ID NO: 54169 - DNA, 438 bp, Glycine max
  unsure (1)..(438): unsure at all n locations
  Clone ID: PAT_MRT3847_19928C.1
ttgcccgcccgaaaagagagctggaatcaggtcgtgagatcctggaatgaattggccgcgacgtatctaacacacgaggctctcagtagttggagcgccgccgagaagctccgaggcctgagggcgatttcaagcaccagcgttcctgttgctgggcttgggtcgcctcatcgaggcgctgcttaattctggtaaagccgcaattcccctgtgctgcggngcgagcgtctgcatgcacctgtcggatccatggcggccacgctagccgcttaaaagcatgacagcgcattgaaactgaccgtcagggccaccggaggatatctccacccgaccggcggcccacttgcgaaaacaggaagaaaatttaaaaagatcaagaaaacaaggaaaaatgataataaaaataaaataataccgaaaaaagaataaaaataaaag

SEQ ID NO: 54170 - DNA, 310 bp, Glycine max
  unsure (1)..(310): unsure at all n locations
  Clone ID: PAT_MRT3847_19929C.1
acgaggagggggggnngatgatctgaagaaggcgggagggaaaggcgggggggagaatcacggggacaagggcggtgatcccgagaagggcaaagagctggcacaagcagatgaggttcggagggaccctgagaagcgtgagatatatgatcaggatggggaagatgcgctgaaggaacgaaagggaggcggaggtggtttttttgcggaggagatcggtgcagtcggctttggaggtgggagccccttcggagcgggggggagtaggcgaggtaggaggcagaggcgcggagaacatgtgggaaacccg

SEQ ID NO: 54171 - DNA, 1735 bp, Glycine max
  Clone ID: PAT_MRT3847_1992C.1
ccacgcgtatccgtctctggttgaaagccatgagcatgattttgtctcccctgtttctggttgaagtgtttgtgcagcatggccatggtaggcggaaccatgatggctgcgtatttgcgtgtatccatgcccacttccccacagtcccccaccactacgaggaggagatgcagaaatctgaaaacttcttgctccgttaacagacccaaaattccaatgccccctctcaaccctaaagacccctttctctccaagctcgcttccgtcgctgcttcttcccctgaaacgctcctcaacactcccaaaaactccgacacccttccttatctcgacatcttcgactcccccaaactcatggcaactcccgctcaagttgaaaggtctgtttcatacaacgaacaccggcccagaaggccaccacctgacctgccttcgctgcttctccatggtagaattgtttacattggcatgcctttggtgccagctgtcacggagcttgtcgttgcagaattgatgtacttgcagtatatggatcctaaagagccaatctatatttacataaattccactgggactacgcgagatgatggtgaaacggtaggcatggagacagaaggttttgccatttatgatgcaatgatgcagttgaaaaatgagatacacacagtggcggttggatctgctataggtcaagcctgtttgctactttcagcagggtctccgggtaaacgctttatgatgccacatgctaaagccatgattcagcagcctcgtattccttcctctgggttgatgcctgcaagtgatgttcttattcgtgcaaaggaggtgataattaacagggacaatctggttaaactactggccaaacacacgggaaattcagaggaaacagttgctaatgtgatgaagagaccatattatatggatgcaacaagggctaaggaatttggggtcattgatagaattctttggcgtggtcaggaaaaggttatggcagatgttgcttctccagatgactgggacaagggtgctggtatcaaaattgtagatggattctagttcctcttttgtggatacgtttcttgtttcttgtcaatgtcacatgtttcggtaggatttgttttcatggtctacgggtccagaaatgttccacagctattcttcatagaacactgaccccgtagttacccaagtgcccaggagacagaggagttgatggacgttttactaagaatgtcccgaaaaaagaaaagaaaagaaaaagaaatagtgattgttcatccatgtaatcatatacagtgattggttctgactattagttagtcattggctgcctacccgaattttacacagggactgtgattggcgtttatcattacacaattaaatagagtacataatttgtaatctttttgtttctatatcattcgatcagagatgaaccaaaagaaacatcttagagctgtcaactgggtttcggcccgtgggccagcccggtccagtgcgggttagagatgaagttaatggtgatgttgaaaaagaagaggaatgactcatgtttaatttcaatagtttaaaagtttatttttgatgatatttaaattttaattatcttaatgttgaatgtttattttgaagacttcaatccctttaatattgaatgtttattttgaagacttcaatccctttaatattgaatgtttgaatttgatttaatttgatttttttattg

SEQ ID NO: 54172 - DNA, 272 bp, Glycine max
  Clone ID: PAT_MRT3847_19930C.1
agcagcacataacatttcaaattgcccggttacttacaaaatcacccatcatgatacaaaaaagatagattgagctctcccttagtgtatttaattaattaaaatttttgacctgctccagaagaatgatgctatcaagggtggggcatcatagaggtcatcatagggcatcatagggtaggtcgcattctaccaattgaatatgcttgcctaatgaacacgtcatagtaccatgccaaaaactcagttcagctgcgcattcccaagtggat

SEQ ID NO: 54173 - DNA, 449 bp, Glycine max
  Clone ID: PAT_MRT3847_19931C.1
atgcaaattattgctcaccagctttacaggggcttgctaagaggtaggacaatgggtaggtggttgaaagatcaaaaggagaggaaaaagcaggaaattagaacccacaatgctcatttacacgctgcagtatctgtggctggtgttgctgctgctattgctgcagttgcagcttcaacagcatcacctgaaatgccttatgcaaacccaaagaaccctccccccgcttcttctgcaattgcatctgcagcagctttagtagcctcacactgcattgagattgcagaagatatgggagctgagcatgaccaaatacagatcctacaatgttgcgaccatcgaagagctccattgggtggatgggaagcaaagttggtgatgcatgaattcccaatactacagtcaatccccaaccctcatgagcagacaagaaggcatccctaagaacg

SEQ ID NO: 54174 - DNA, 284 bp, Glycine max
  Clone ID: PAT_MRT3847_19932C.1
gtttgatctaaaaaaaaattctgaatattattaattatggatctgagaacaaagtcatttcatgcataattctagttattccataccattcttgttatttaggagtctgaaactacttcacgcaaacaagttcaatacaaagaaaacggacgcgtgggttattattcatgaactagtaatttgagcacattctttttcataaaaaacaaacaaaacttgacgcaaaactgaagcaccaaaaaaaaattgaaaaaacgcacccaggccaaagctaaaggggctgc

SEQ ID NO: 54175 - DNA, 1263 bp, Glycine max
  Clone ID: PAT_MRT3847_19933C.1
tgctttaccgttcctcttaaggattcatattattctttctcagactctttcactctgtgttattgtttctgttggaaaacatgaagttctgcaaaaagtaccaggaatacatgcaaggccaggagaagaagcttccatgcgtaggattcaagaagctcaaaaagatattgaagaagtgcaggagaaactcttcatcccagaaaccccttcatgcatcccttgccgccaaaacctgccccgaccattgcccagtgtgcgatgggaccttcttcccttcccttctcaatgaaatgtcagatatagtggggtgctttaatcagcgtgctcagaaattgttggagctacatctcgcttctggggtcagaaagtacttcttgtggatcaggggcaaattacaagggaaccatacggctctgattcaagaaggcaaagatcttgttacttatgcactcataaatgccattgcaattcgaaaaatactgaaaaaatacgataagattcattattccaagcaagggcaattgttcaagtcgcagatccagagtatgcacaaggagattcttcaaagtccctggctttgtgagcttatggccttccatatcaatttaagggaaactaaggtcaagtcaaggaaggcacatgctttgttcgatggatgttctctcacattcaaggatgggaaaccggcacttacttgtgagctctttgattctatcaaagttgacattgacttgacttgttctatatgcttggacaccgtgtttgatccagtttctctgacttgcggccatatattctgctatatttgtgcatgctcagctgcatcagtatctattgttaacggacttaagtctgcagatcctaaaatgaagtgtcctctatgtcgtgagggagcagtttatgaaggtgctgtgcacttggaagaattaaatattctgttaagccgaagctgtcaggaatactgggagcagaggattcagacagaaagggtggagagggttaagcaaataaaggaacactgggattcacagtgtagggcattcgtgggcgtctaagtacagcatgcaattttcttagtttcttttgtagagtttaaggtttgtagttttggctgaaatgtgaatatgcatctgtttaatagtttttgtgtatataatattctgaataaggcaaagccgcttttaaactctttggaagttttctagtgacaatgttattacttctttcctgatttatgaagggattctaattctattttagact

SEQ ID NO: 54176 - DNA, 352 bp, Glycine max
  Clone ID: PAT_MRT3847_19934C.1
tttttggggttttttttttgttttttgggtgttttttccccggaacactacaaatagaaagtgggcttttaataaaccaaagcaacacaacgcagtaaaggcctggaactcgatgggcttaacagaagtgtaaacaggggtggcgtcaaacaccccacattaaaacccagatcaatgaaagcaaatttgccaccgttgatcaagaacccagttttgggaacaacagttgcgagaagaaggcggagacttcaaactttgtccgaaaaacaagctccctagaaaagaagacacaagagggcagaaaagaaaccagggtttattgggaccaacaaaccctgacgaaccagcccgc

SEQ ID NO: 54177 - DNA, 488 bp, Glycine max
  Clone ID: PAT_MRT3847_19935C.1
tttttttttttttttttttttttttttttttttttttttttttttttttttttttaaaaggcccctttttttggaaaacaacaaaaaattcttttcacatgattttttttttggaacccttttataacggaaaaaacccctttggaaaagggaaaaaaaaaaaccctttatttttgcccctgtttagttaaaaagcaaagtttttttttacttgcctaaaaggggaggggggaaaaccctcctatttttttaacaattttttaaataaaattttggaaaatataatccgggaaagccaatccaatttttccaagctttgttttttctccccagggaggggccttacccacttaatccacactttttataaggggttggctcccccacaaacccaaaggattttggggggtgactttcctattcacggacccggagggtattctctcgaaaagggaggggcgggagattcctccccccccgggcttttt

SEQ ID NO: 54178 - DNA, 254 bp, Glycine max
  Clone ID: PAT_MRT3847_19936C.1
ttcctaccaaaactactcttaatgtgcctaattccccgaatatctttcttaatccctcaacaatgaaattagttgaactgcatgattaatggagatgcatcaacaggctacacaacttcgcactatccctatcactgaagcatttagatgctctttctagttctaagggataaaagacatttcccaacgcctaaaccctaaacatagcatatatatgggtgatcagaccaaatacatgggaataagcacaaaaa

SEQ ID NO: 54179 - DNA, 891 bp, Glycine max
  Clone ID: PAT_MRT3847_19937C.1
tttttttggggaaatgatactcagacttccgaggtttattacttaagagcgatttggtgcacttgccaaagtctcaacatttgataatccgtaaggatgacaattggatctatttatcccataactttctaattcatccataaataaatccagccaaaatatccaattacaaaagaaaataatggattgcatagattgagtcaatactattattggatcgttagtgaaccatccaacatatttcttaaaccattggataaatgggagcaactccaataggtgtggagagtcaaccttgcttcatccgtaaaccaccctaggaaaacgcaggggttctagtaagaattatagtataacatcatctgaaatgtagcttgataggttttctagaacctctttgagaatggtgtatgtaataattgacctgttgtactgtcaattgttgaagcaagtatagctctaaacgggaggaattcaatgttgtgatgttggcataaatctggaaacttggagaagcgctttgattgaaaaagaacaaaaccaagaaaatgattaagaaaaaaaaactgggtagcaaaagaataacgcttctgaggtcaagattggactcttaggggttgatgttgtatagaaaacatttactatctcgatggagaagggctcaaactgaaaaagaacaaaatcaagaaaatgattaagaaaaaaaggaatgggtagtagaatattcggtgttgttgatgttgatgaaatgaaaatcacaaactcaaagagcaacaatgaatgttgtagagaccctaaactcaaaaagcaacagcgaaacaaaatccagacaaaaacttattaaaattactcatttacatagatttaaaccatgaaaccctaacagaaacc

SEQ ID NO: 54180 - DNA, 445 bp, Glycine max
  Clone ID: PAT_MRT3847_19938C.1
cccacgcgtacttagacttttgttcggacgcgtgggggattttcgcagttcccgcctttgggagccttctcctaatggtctttttcttctctcctcaaataagagggagaggcttttgtttccgtctttttccccgagagctccagaaataatttaattcgcgccagatcatccacctatgaccaaccttcattgttgctaaaaaaaccgggggctgctgtgccattcttgctgggttttgctcctccttaaacccttccagctgccagctcatccaatttaaaggatgttctgattcctacccctattaagaggcctggggctgcctttgccgctggaactaaatggaatcaatggttttggaaatattttccggcgtaatccatttgtcggcattttattttggagcccacttttaaaaaatgctggacattaaactttccaa

SEQ ID NO: 54181 - DNA, 228 bp, Glycine max
  Clone ID: PAT_MRT3847_19939C.1
gacagcataacttgtttatcggaatgttacttgaagagtcatcggcatgatagcgatgggtaagtcactatctatctagcaatcgatatctctgagttcaggcgaaccaaactccgaagctatggcatttctggagtgagagttgaacgtgttaaggtcacgagatctggtgggttggtattgacgatagctttggcgccgacgctcgacaagaagacagtggtagtg

SEQ ID NO: 54182 - DNA, 698 bp, Glycine max
  unsure (1)..(698): unsure at all n locations
  Clone ID: PAT_MRT3847_1993C.1
gttgaaagccatgagcatgatggctgcgtatttgcgtgtacccacatccacgcccattactccgcaatctcccacagctacgaggaccaaatgcagaaatctgaaaacctcttgctccgttaatgccgccaaaattccaatgccccctctaaaccctaaagaccccttcctctccaagctcgcttccatcgctgcctcttcccctgcacgctcctcaacactcccaaaacctccgacacccctccttttctcgacatcttccactcccccaaactcatggccactcccgctcaagttgaaagatctgtttcatacaacgaacaccgacccagaaggccaccgcctgacctgccttcgctgcttctccatggtagaattgtttacattggcatgcctgtaagtgttcaattgtgtattgctttatgtgttattgcatttcgtgccgattctgctgtttgtgagagttaatactttgctgttgtaatttgtacaacctgctatgactgtttttgaatctcagttggtgccagctgtcacggagcttgttgttgcagaattgatgtacttgcagtatatggatcctaaagagccgatttttatttacataaattccactgngactacgcgagatgatggtgaaacggtaggcatggagactgaaggttttgccatttatgatgcaatgatgcagttgaaaa

SEQ ID NO: 54183 - DNA, 481 bp, Glycine max
  Clone ID: PAT_MRT3847_19940C.1
cccactcgtccgcccacgcgtccgcccacgcgtccgcccacgcgtccggatgctgcaggttgcccaaagcttaagagttttccaccgttgaagttgacctctcttgaaaggtttgaattttcggattgttacaatctcaagagttttcctgaaatattaggaaagatggaaaatatgacacaactttcctggactggttgtgccataacaaaactcccaccttcatttcgaaatcttactcggcttcaaaagttgattctgagagaaggacgtcgtgagttaatggactttgatgctgccaccctcgtttcgaacatctgcatgatgccagaactgtattatatttcagctagcagtttgcaatggaggctattgcctgacgatgttctgaaattgacctcagctgtgtgtccaagcattgaatttgttactctctcttactgcgagctgtcagatgagcttcttccgctatttctgtcat

SEQ ID NO: 54184 - DNA, 695 bp, Glycine max
  Clone ID: PAT_MRT3847_19941C.1
gggccatactaaatacttctattattggatatttcttgtatacaatttgacacaaagggtaattactaaagagtaaaaagtcactcaactcacgcactactctatcatccattatcatcatcagtgtctacataaacatatcctcaacaaggaaacaaacgtaaaaatcaagtcaaatacaaaacaaattaataatatgaacatttgattgatgcacgtaacgacacacatttaattttcaatgtgaaagcattgacaaaaataaaaaccatactgttgcaattaacatttgcccttgtctatgctcgctaattcttatgacaacactctgaagaaaatcaatgacctttgattaagtttgatggagatgcagcacttcacacacttccaacaagaatggaccctccctccggtcttcttcgtaacgttgaaattttgtatttatttccctcttatgtaaattgtaaacaagccccacatatttatagcatcttccaatcagaacattggtgaatccgaaggggaagaataattcatcaaattaagaatgttattccaataattcttgttctcttggtacaagtcaccgttgttaccactaccagcgtcactactaccagcattattgtgacaataattagactctccaccgtcctcgggtgacaaactcaggtggccgccagagttagtattca

SEQ ID NO: 54185 - DNA, 313 bp, Glycine max
  Clone ID: PAT_MRT3847_19942C.1
gaatgattagtatattgggcaaacgatagcagcagcaattgataaggtgggacctgatagtgttttgttcattgactcttccgcttcgttttaaaccacgatgaacgcggtagaaggaatgctgattgacataggcttttctttgcctgattgacgaacgaaccatgagaatgttatgtgcgattttgagaatgctagagtgtagatcacggatcaaagaattccctcaatcttgaatattatctccctgttggagaatgccgattgctagacatctctttcgcttatcattgctgaggatgtcgcagctgag

SEQ ID NO: 54186 - DNA, 638 bp, Glycine max
  Clone ID: PAT_MRT3847_19943C.1
cgcggacggaaggaaggatccagagcggccggcggcctttttttttttttttattggaattttttatttccttaaaaaatgaaaggggcggggggaatataagatgctaagagctttttttttttttttggggatttttatatatgttggtttatcctacatgaaaattaaagagggataactttataaaaaaaaaatttgttttaaaaaaattattttataaaggttttttttataaaaacagaaattttttttatggggtttttaaatttgtaaaaaaatggggttttttttgtaggaaaggaagttatcgtaccaaaaagagggggtaaaggaatttattatgattcatatttttggagttttggtgaaagtttttcaattggggggatataatgtaaacacctgggttttttttttttggaaaatatgtggaatcctaaaatattttttttggaagagcttggaatttttattttataaaaacaaaaattttcttttgttttaaaaaaaaaaattatttggctttaataaataaattttaaaaaaaatttaaaagagccccctttgttgtttattaaaaaaatttttttaaagctcttttttttatttatacctggaaaaaaaaatattttttt

SEQ ID NO: 54187 - DNA, 178 bp, Glycine max
  Clone ID: PAT_MRT3847_19944C.1
attacttcgcttttgttggccatgtctatattccgtgaaacgagtacgaatccacgaggggggccagaacctacagacctttcgattatagttaatcttcataaacgagatagatctactctttatgcgcagctattgacttattcaaagtatctggatactcaataccaactctaat

SEQ ID NO: 54188 - DNA, 934 bp, Glycine max
  Clone ID: PAT_MRT3847_19945C.1
ggcagcttggtctgggttccagaatacgtatggtttccactcctcatcttgttccttgcattgattcctcttattatgttaaagatagatctgctacactggctcgaggaaacatgggttcagagggacagacttttagaattcctggaagttacataaagagaattgcttgtggaggtcgacatagtgcagtaattacagatgctggagccttgcttacttttggttggggactttatggacagtgtgggcaaggaattaccgatgatgaactaagcccaacttgtgtatcttccctattgggtatccacatagagggaattgctgcaggactgtggcatacagtctgtacatctgctgatggtgatgtgtatgcatttggtgggaatcagtttgggcagttgggaactggtgctgatcaagccgagactctaccaagactagtggattcaccgagtttgaaaaatttgcatgctaagaatatatcttgcggtgctcgccacactgctttagtaacagagggcggaaaagttttctgctggggatggaacaaatatggacagctgggccttggggacgtgattgaccgtaacattccttctgaagtcaccattgaaggttgtgtccctaaaaatgttgcttgtggttggtggcatactcttcttctggccgagtcccacacttgatgccatggtgctcctgacccaattttgttagttagcggttcttttggaaggcaatgtatatgtgtacatacagtagtggtatacaaatacatacttgtttgtattgtttcatggtgtgtgaatgaccatgactagctctagtatttaacaccacagaagagcgatatttggcttggaaggaagtattggttcctttccacatatgtatacattcttaaccattatgtatattttattttatataaaaa

SEQ ID NO: 54189 - DNA, 1529 bp, Glycine max
  Clone ID: PAT_MRT3847_19946C.1
ccacgcgtccgcacagagcaagtgagccctcgttctcaaggctcaagatctactggaggtactgcctccagtaacagtggagaagaaagtacaaagcgaaggagagtgtcttcagcaaagcaaacagctgaaagctcgtcatccagtgatgatagtctgacagcattcccgtgtctagtcacactaaatccagggataaggatagctagtgttgctgctggtggacgtcatacgctagcgttatcagatacaggactggtgtgggcttggggctatggaggtgaagggcagcttggtttgggttccagaatacgcatggtttccactcctcatcttgttccttgtattgattcctcttattatagtaaagatagatctgctacactggctcgaggaaacatgggttcagagggacaaacttttagagttcctggaagttatataaagagaattgcttgcggaggtcgacatagtgcagtaattacagatgctggagccttgcttacttttggttggggactctatggacagtgtgggcaaggaattaccgatgatgaactaagcccaacttgtgtatcttccatattgggtatccacatagagagagttgctgcaggactgtggcatacagtctgtacatctgctgatggtgatgtgtatgcatttggtgagaatcagtttgggcagttgggaactggtgctgatcaagctgaggtatgctgtaattagtgtcatcccatatattcactactcagttgtgccttggtgacttgttggtcatgggttcgaatccggaaacagcctctttgcatatgcaaggactctaccaagactactggattctccgagtttggataatttgcgtgcaaagaatatatcttgcggtgctcgccacactgctttagtaacagagggtggaaaagttttctgctggggatggaacaaatatggacagctgggcctcggtgacgtaattgaccgaaacattccttctgaagtcatcattgaaggttgtgcccctaaaaatgttgcttgtggttggtggcatactcttcttctggccgagtcccccacttgatgtcatggtttatcagaggctcttgacccaattgttagatagtggttctgcaatgtatatgaacatacggcagtggtatacataacataggcttcatacatgtttgcattgtttcatggcgtgtgaataaccgtgactagctccagtatttaacaccacagaagactagaagagtgatatctggcgtggaaggaagtattttccacctatgtaacattcttaaccattatgtatattttattttattgtataaactgtccagtaaagttatatgcaccggaagttagtatgctggcatgtaatagttgggtaggtataaatgtaatcctttaaattagtatctgcaaccatattttacccaattcaccgtgtgtttggatgagggttggtaaaatttattgtggttaaaattgattttgaagtaatatgatttatgtttggatgttttatt

SEQ ID NO: 54190 - DNA, 533 bp, Glycine max
  Clone ID: PAT_MRT3847_19947C.1
agctaagcccatgagttctatcactttggggctatgaagaaattatcactaatcttcaataaccaggggaggaaccgacataatttaatcttgggcggatatgggggggagggtactttttttccccaaaatctacagcctttatcaccaggggttcggggcttccatcatgctcttgaaccgcaccaaacacaatctcatttggctcgcagttctggtcataaaaaccttgggggggggaaaaaaaacgggggggaacctggggctgatgttggagcttgacccggtgttggggctgttgatgttgcaacttgggaagcccttgttgaagttgctgaagaagttgttgaaattgttgaagttgttcttgaaaacaccaccctcccaccttttcaaggaacccctacttggcttgaagggctggggtttttcaagccctttgggcatgaaaggatatgtttccctagggggggggggtttagtttctaaagaaggaggaggttcatcttcatctggaatgacaaaactctctt

SEQ ID NO: 54191 - DNA, 418 bp, Glycine max
  Clone ID: PAT_MRT3847_19948C.1
tttgggagagaccaaaaacatacttggatccattgttatcaaaaaaggtaatttggatttcagaaacatagtacctcacaattcacatgcagtgagtccttctagcagttgaatccagcaataacaaaaggagcagcaaaacgagtcgtttagataatataaaagcaagaactaaattgcaaacgaagcacgtcttcactcagaagaactaactaactttgaacacttggtacagacacacgctaagaatgaagggatattcgcatgcattggttaaagaagaggcgattgggaacttgtcgtgagatggtggtggcgcgtggaacgtgaccaatgcggaggaggctcatggcatccatggcattcgcatgcattggctgtgtgagagacagtgttcgtgttaattttttgctacaag

SEQ ID NO: 54192 - DNA, 403 bp, Glycine max
  Clone ID: PAT_MRT3847_19949C.1
attattaattttatttttatttttttggggttttttttttttttttgttttttttttttggaaaagggggggcccctttaaattatttttaagcggggggccccccccttccccgggttttttttttaaaaaaaaaaaaacccctccaaaaaattctttggaaattttttttttttgggccccaaaatagaccatccccccggggggaataaactgtgcccccttccccaacacataaaaggtccccttcccccggttttaattccccgcatcaatttacctcttagccacgggggcgtaatttaaaaaaatattctaaagccgcccgggggggggggaaaattcgcaatccccccttctttttataacacaaaaaccccccctggtggggataatatttttt

SEQ ID NO: 54193 - DNA, 280 bp, Glycine max
  Clone ID: PAT_MRT3847_1994C.1
cttattagtattattacactctctctccgcgttaacaaaactatctctgaactttcctagttattacaatttattacacaacccatctctctttctggtttcgcttagatttagaaacacagacttttccaaagtgctcgttcgtttacctcaaacctcaaagaaaagaaaaaaacattgcgttatcacttgttttcttttttgggaagacaaaaacattgagttcagcttctcacttccatggctgaggccagactctacgtgcccccctctcacttgg

SEQ ID NO: 54194 - DNA, 193 bp, Glycine max
  Clone ID: PAT_MRT3847_19950C.1
cggcagagcaagaacacaacacaagacatcgaagcagaagaagacatggggttgcagtggctgattctccctacgtggtcgagcgaagctgcggtggcattctgctacccttccagccaactcctgagaccgtttgcttctcgttccccatctcacccggtttcatgtacctgcaggtcactctaattatatg

SEQ ID NO: 54195 - DNA, 587 bp, Glycine max
  unsure (1)..(587): unsure at all n locations
  Clone ID: PAT_MRT3847_19951C.1
agtttccgtcatcactgtatgacgtcctccttctttggggggggggggggggcaacaatttttaggggggcgtgcagaatataaaatagggataaaggtaatgacgaacccagaacatcatgaaaagcctatgtaaatctaaaccggcgagaaagtataaagtagaagaaaatatatgccaataactaaactggcgtaaaaccgctaagacaaggggagcttataatggccaaaaggcacacgggcgccattagaatgatttaacggcattagtttataaatgacnagaggggttagagcacgaatgaacgtggtacccgcgtgcgtgtttattacaacgttgatgaggggagagaagtaggggacggcctatcgtggggcaatatagtaacatttagtgtacgaccagtacgggtggctaatgtgatggcaaggttagttactgtttgtggcaagtgcgtgggccagtggctagaaagtagtggctgttgtatttggcagcgcngtacccgattatgtaaggaaaaaaaggtgctggggacccataggtttggacgtacagatgaaaagagaaatctagaatctat

SEQ ID NO: 54196 - DNA, 282 bp, Glycine max
  Clone ID: PAT_MRT3847_19952C.1
gaggcatgagatgtcagcttgataacgatgtctacacgacccctcaagtctccacctccatacttgagccatacagcatgtgggacgtgacaatctcacgtgaagtacaccgatgtcgccgtcagattgagagacgaagcgcacaatgacgatcagttggcgcacaccagacatagcacttcctagcgtgaacgaacctcgctggatctagtggctgcatgtgaggatcctcttagacagcatcccagatgtgtgctgaggactacaatgatgaagtcattg

SEQ ID NO: 54197 - DNA, 637 bp, Glycine max
  Clone ID: PAT_MRT3847_19953C.1
aagtatggccagaaagtggtgaagggaacccttcatccaaggagttattacaaatgcactagtgctggatgcaacgtgcgtaagcatgttgagagagcttcgacggaccccaaagctgtcataaccacgtatgagggtaaacataatcatgatgtacctgctgctagaaacagcagccccaacacagctagtagcaattcaatgccattaaaaccgcataatgtcgtgccagagaagcatcctttgcttaaagataaggattttggaggtaatgaccaaagacctgtacatttgcgcttaaaagaagagcaaattatagtataaaattctggtgccacgctcacttattccacgtccaagtacagaatgaagagaatgaagttgcctagaagatgaaatggatatgaaggtgtagtcactactcatagttggcaatgtctattgttttctagtttttgtatgtaacaccttttgtacatctaaattatggaattggttgtataagatgttgtttacaggtatgaatatcatttcaactaatgtacgaacattactattatataatttataaaataatccttgtaagttgcaaaaaaaaaaaaaaaaaaaaaaaaaaaaaagcggccgctctagagga

SEQ ID NO: 54198 - DNA, 531 bp, Glycine max
  Clone ID: PAT_MRT3847_19954C.1
tgaggccgtagcgagactagtgtttaacgaaggagatgcaaacagttgaacttgtgggcgtcaatgaccttcaacagatgctgaatcaggaagaggaacccttggaagagcaaaggtacagagctgaattgtctgaagacgatgtattcgtaataccagctgctaatacatttgctgtgaaagctacctcagacctgagttacgtagcccatgggatcactgctgagaacaaccacgaggaacttcattgtgtgcgagatatacattgtggaaaggcaaatataaagacgagtgcaggagctggcgatccctgggtctgcacatgatgttgaaaggctattagacaagcagagggaatcctactgtgaccatgctcagcctcatcagaacgaggaggggagtaagggaagaaaggcgccgtttccttcgatcatatgagctctctactggataacgacgtaaatgtatgactgtacgagctcactgtgagcatcgaatgtctctggccatgtgactatagatacttgagct

SEQ ID NO: 54199 - DNA, 327 bp, Glycine max
  Clone ID: PAT_MRT3847_19955C.1
tcctctagagcggccgcttttttttttttttttttttttttttttttgcagaacaaaaagtctggtgaatacataacaaccctcatttcaccttgtggaactttgcaaaaatgactaaggacaattcatttcattacggacatccttttcaggctataataccctccttgggctcggcttggcacaaacctgatcctcacaagtcaattgactttattattatatcactgttttttttggacttcattattaattgctggttaagcctgactttgggaactgttccttgcttaacagggtctggaggcttgccgtgtgaaatatgcc

SEQ ID NO: 54200 - DNA, 2076 bp, Glycine max
  Clone ID: PAT_MRT3847_19956C.1
cggttgcgaaaagagacagaggggagagtgttgaagataacacgaaacgaaactcatcatttagttgccatccatcttcttttttttttttcttccaccatctcccaccgatgtccactcccaacaccgattccggcacggcgccgccaccgcgccccaccatcacgctccctccgcgcccctccgccgaggccttcttctccgccgccgccggcgccagccccggccccatgaccctcgtctccagcttcttcggctccgacgccgccgccgactgccgctccttctctcagctcctcgctggtgccatggcctccccgatggccttctccgccgctgccgcagccgccgacaactccggcaaggacgacgatgggccccacaaggggttcaagcagagcagacccatgaatttggtcattgctcgttcccctgtcttcactgtgccacccgggttgagcccttctgggtttcttaactcccctggcttcttttcccctcagagcccctttgggatgtcccaccaacaggctttagcgcaggttacagctcaagctgtcctagctcaatcccatatgcacatgcaagctgattatcagatgcctgcggtaacagctccaaccgaaccacctgtacggcagctgtcttttgctctaaatgaagcttcggagcagcaagtggtatcatgtgtatcatctgtatcagaacctagaaatgctcaactcgaagcaccggaactctcacaggctgataagaaatatcaaccatcatcccaggccattgacaaacctgcagatgatggctacaactggcgtaagtatgggcagaagcaggttaagggtagtgagtatccacgaagctattacaagtgcacacatctgaattgtgttgtgaagaaaaaagttgagcgtgcccctgatggtcacataactgaaattatctataaaggccagcataaccatgaaaagcctcaggcaaataggcgtgccaaagataatagtgattcaaatggaaatgtaactgttcagcccaaatctgagtcaaactcacaaggttgggttggacaattaaacaagtttagtgaaaaaattcctgattcttcagttgctaaaagtgaccagacctccaatcaaggggctcctcctaggcaactactacctgggtcaagtgagagtgaggaagtgggtgatgtagataatagggaagaggcagatgatggcgagccaaaccctaagagaaggaatactgatgttggggtttctgaagtacctctgtctcagaagactgtcacagaacccaaaatcatcgtgcaaacaagaagtgaagttgatcttttggatgatggctacaggtggcgaaaatatggtcagaaagtggtaaagggaaaccctcatccaaggagttattacaaatgcactagtgcaggatgcaacgtgcgcaagcatgttgagagagcttcaatggaccccaaagctgtcataaccacgtatgagggtaaacataatcatgatgtgcctgctgctagaaacagcagccacaacacagctagtagcaattcaatgccattaaaaccacataatgtggtgccggagaaacatcctttgctcaaggatatggattttggaagtactgaccaaagacctgtacatttgcgtttgaaagaagagcaaatcatagtataaaagtctggtgccaagctcacttattccacgtcctagtacagaatgaagttgtctagaagatgaaatggataatataatatgaaggtgtagtcactagtcatagttggcaatgtctattgttttctagtttcttttgtatgtaacaccttctttttgtacatctaaattatggaattggttgtataagatgttgtttacaggtatgaatatcatttcaactaatgtacgaacattattatataatataatttataaatactccttgtaagttgtaagggcaattctagattacaaataaaattgaagagctggcatcctacgattgaactccttttgtatgttatggaattttaaagaatgactttggtaatattaatcaattatggatttatct

SEQ ID NO: 54201 - DNA, 425 bp, Glycine max
  Clone ID: PAT_MRT3847_19957C.1
ggctcgaggctgacacctgccacctaccttcatactaacctatctaccatatactatccaccacagccttttttgtatctgtcatggtctaaaaggccatagatcgccaacacattactaattacctattactcagtgaactagggacactcagacttgcattgctaatcaatttattactcatgtcctcataacacagtctactccataacgcatgcaggggagttgcctgcaagacaagctctcaaccccacttggctatcttctacgcagaaataacgaccaatgacggctgtgacttcaataacaatgtgcgtgtcaactgattgaacagctggtacgtcgcaaatgatgtgcgactggatgcctacagctgcgatgtccacttgaacaatgagcagcaaacccctgatattgctcatggt

SEQ ID NO: 54202 - DNA, 293 bp, Glycine max
  Clone ID: PAT_MRT3847_19958C.1
cgaccttttgcatttttgttttagtatgtaatattgtattcacttaaataaagcgcattactatgcgcaatgagcgtgtttaaaaaaatatataaaaaaaattactacattattggcgtgccattttttaagggaaagaaaatcactctctgtgctggccacagacttcgagaatcatttgctttctacactctaatttaatgggctgaacactctactatttgatataggacatctcggcagatactaacgttacttgtttttctccttattctccgtttaaacttaggctt

SEQ ID NO: 54203 - DNA, 282 bp, Glycine max
  unsure (1)..(282): unsure at all n locations
  Clone ID: PAT_MRT3847_19959C.1
ttcattttttattcanaaagaacaaaacaatcgggcggggttaaataaaaggccgccctaccaaactaaccaattcttttttacctcttaaacacaatcataaatcaataagcatacccccacctccctaaaacctacctataaccccccaaactataatacccccccccaaatgcttttatataaacaataacgctccccattaaaccccaaacaaatttgataaaccatcacattcaaactcactttcttcctccacaccctctacgaagccattttctt

SEQ ID NO: 54204 - DNA, 184 bp, Glycine max
  Clone ID: PAT_MRT3847_1995C.1
tcctagtgattgggctcaggtttacttgtcttgtctccttattcaaattgctaaaggatgtgcttgtacagtgatttgtctagtttcacaattttaagatgaattaattctttttaggttgacaaattaagaacatattttaaatttcaggaaagttatcataaacatctagattgtggaagag

SEQ ID NO: 54205 - DNA, 884 bp, Glycine max
  Clone ID: PAT_MRT3847_19960C.1
gccacatcactaactgatcctcaaaggcttgctcgttctgcctccaatcttgaaaatgaattgaggcattggcgaaacacctttgagtcttggatcacttctcaaagatcctatattcatgctctaactggctggcttctaagatgtgtgagatgtgagcatgatccatcaaagttagcatgctctcctcgtaggtccagtggtactcatccattatttggactttgtgttcagtggtcaagacgtctagacgccctccaagaaacagcagtgcttgatggcatagacttttttgcagctggcatagggtccctctatgcacaacaattaagagaagagactcgacgaaatccagatggatcaaaagaacatggtgagattatggaaatgctggaagttggtcaggttgaagaggtaatgaatactgagaaattggctgaagttgctattaaggtgctttgtgctggtatgtcaactgctatgaggtcaatggcagagtttgctgttgattatgctgagggatacaatgaacttgctaagagatgggagaatgtgaacctgcagcagatttcttgtggggctggaacatagatatagatggcatacatttttttgttcatttaataatgggtgtcagtgaaagtaattattaagggtaggtttagatgaaaggaagatggaggaaaaagagagagaagggtgagagattggcaaggacaacaaccatattcgattatgccgtaaccttatttgatcatggtaaatcaattataatgaggggagggaaatgaggaattttcatgtaatgctcaagatcaacccgacccttataagttttttgtgaacattttgaagttctctaattttgggatcttaaatacata

SEQ ID NO: 54206 - DNA, 776 bp, Glycine max
  unsure (1)..(776): unsure at all n locations
  Clone ID: PAT_MRT3847_19961C.1
gctttatcggcctgtgttctatttcacttggtctgcagtttgcaactcattcactttgatgattacgggaaactcttgcaaagggaaaatgatgtgttggtttttatggaggagcacattcggttgcgattccatctgtccaagataagccatagattcagaatttacttgcttctacagttcttggttgtcacagctagccaatttgtgactctattacaggtcactggatttggtggagcactgactttcataagtggtggagattttgctgtttccacacttgttcaagtggttggaattattattgttctgcatgcagcagcaaagatttcacatagagctcaaggcattgtttcacttgcaagcagatggcatgcgctagtaacatgcacttctgattcatctaaactgagatattgtgctagtacagggagcttggaggctgcaaaacatttaaactcaatgtttttggattactcagaaagtgatctagagtcatcagattacattggtgtgccttcacatacccagttagcttcttatatgtcctcgcataacaagagacaagcctttggtacgtaatacaaccttcagtctttgtgctgttgaaattttgatgtcaagctcgtgattattaactagtgatgggaagacttgcttagaagaagcattgattcatttaattctttaattgcagctcatacantaaattttttttttgtattcattgaccatgtagagatttacaatgataactgattttcttttggcct

SEQ ID NO: 54207 - DNA, 374 bp, Glycine max
  Clone ID: PAT_MRT3847_19962C.1
aaaaaaaaaaataatagataagcatatatttctactagtaattgatagtgcaaaagaagacgagcctaaattaatttgacaagggcgacaacccaagattgctaattttgatggtatatacagtagtgatgcagggcgaaagaataaaagaaagaaaaggaagtggaaggttacgttgtggaggtaggtatgtaagtatgtatgtatgtaaataaattcagcggaatcctcttcctcttgattgatagagttcgagcctgctcttggcctctggtaagagtggttggatggaggggttcctcgatgagatgtgcctgcttggtgcaccattcgagaacaatgagcacctcttcttgcgccagagtctcgctttt

SEQ ID NO: 54208 - DNA, 192 bp, Glycine max
  unsure (1)..(192): unsure at all n locations
  Clone ID: PAT_MRT3847_19963C.1
cgtacgcgtgggctttcacgtagagagtatgatggaaagttagcagatgtatgatcctcttggacnnnaaatgntaatttctnngannanaattatataaaggaaagaaaataattatttgtgctgggcacagacttcgtgaattattttcttttccagtcttaacttatatgctgaacacctctcctatat

SEQ ID NO: 54209 - DNA, 893 bp, Glycine max
  Clone ID: PAT_MRT3847_19964C.1
aactccccttaaagcttaaaccccctcatgttcttttttctctttttggtctaagcaaaccaccccaccatggcagcaagagcaacagcaatctttaacactccctcctcctcctccttcttcacattcacactctttctctctctctctctcctcctccaactttctctctcctccccctctccctccatccacgaccttctccgctccaaaggcttgccccccggcctcctcccagaggaggtgaaatcctacagcttctccgaaaccggccacttggaagtcttccttgacgcgccgtgcctgaccaaatacgagaacagagtcctcttcgagcaagtcgtcaccgccaacctcacctatggaagcctcataggagtggagggtctccagcaagaggagctcttcgtgtggctacccgtcaaggacataatcgtaaatgacccctcctccgggttgatactgtttgacattggcctcgcccacaaacagctctcgctgtccctctttgaagatccgcctcactgcaaaaatcaaggtgggttgaggaatcatgtgaggaaggaaaaaggtttcgaggccctgaggtagaaaaagatgccaccttatttttttcaggcttcacttgttgtctttttctttggtcatgtttatataaattttagccttgcaatattattgcaactatatagtagtcatatgaattaatggaagtaggtgcttgtagcgtagaggttgagcattgtaaaaatgtgaggagagagagaggagaacaaaagaagaaaaaaaactatggaatctgataatgtcgtaatcaaatttaacttttgtccattgtgttgttctgttttgagataaaaagatatgataattgcctttgttcaaaaaaaaaa

SEQ ID NO: 54210 - DNA, 306 bp, Glycine max
  Clone ID: PAT_MRT3847_19965C.1
gggacaaaaataaatccatatttttataattaaaagtagtagattacacgcgatgccactggagaaacatattaaggggactaattctccctggtcaagcaagaaaaaaaccagctttgacccaaggtggagagagattattcccagaatactagtaattaactaaaactggctttgcaattgccaaaaactccattggaggagcagccccctgggaagacactaagacctaaactagaccctccataatgaagattaatacccttacattacaacttagggccctaagaaaacacggcttcccag

SEQ ID NO: 54211 - DNA, 976 bp, Glycine max
  Clone ID: PAT_MRT3847_19966C.1
tgacgccccacgcgtccgtacggctgcgagaagacgacagaagggcgtcacaagaaaaaaagaaaactccccttaaacccccccccttcatgttcttttcttttctctttttgctctaagcaaaaaccaccactccgcaccacaccaccaccatggcagcaagagcaaaaactccccttaacactctctcctctttcacattcacactctttctctcattctctctcctccaactttctctctcctcccccaccaccatccacgaccttctccgctccaaaggcttaccaccggggctcctcccggaggaggtgaaatcctacaccttctctgaaactgggcacttggaagtgttcctggacgcaccatgcctcacaaaatacgagaacagagtcctcttcgaacaagtcgtcactgctaacctcacctacggaagcctcataggagtggagggtctccagcaagaagagctcttcgtgtggctacctgtcaaggacataatcgtaaatgacccctcctcggggttgatactgtttgacattggcctcgcccacaaacagctctcgctctccctctttgaagatccgcctcactgcaaacatgaaggtgggttgaggaatcatgtgaggaaggaaaaaggtttcgaggccctgaggtagaaaaagatgccaccctgttttttacatgcttcacttgttgtctttttctttggtcatgtttatataaattttagccttgcaatattattgcaactatatagtagtcatatgaattaatgaaagtaggtgcttgtagcgtagaggttgagcattgtaaaaatgtgaggagagagagggaaaaaaaaaaggaaaaaaactatggaatctgatgatgtcgtaatcaaatttacaagttgtaatcttctaacttttgttcattatgttgtttctgttttgagataaaaagatataataagtgtcaaagcaaaggatcaaaa

SEQ ID NO: 54212 - DNA, 277 bp, Glycine max
  Clone ID: PAT_MRT3847_19967C.1
gagcgtccgcccttttttttttttttaaataaaacacattggctacccatttataaccgcaatttcacatcaaagcgtcacaaagtttttaacaagactttacatgctaaaaagccctatagctagaatggggtttaccattcagtgatgaagcggataaattccccccatattgaaggggctacaaaaacctaaccatgacataaccctactactccctgtggctatatgagaggaaatttcatctacttaatcacttggggcagccacttgtttt

SEQ ID NO: 54213 - DNA, 217 bp, Glycine max
  unsure (1)..(217): unsure at all n locations
  Clone ID: PAT_MRT3847_19968C.1
cggccgctcgagggcggcgggccgggactacgattagcttgcgtgatatntcattttatctctcaaggttgaatctncagagaaaaagaaacatcgacaagcatgtctggaagaggaaagggaggcaagggtctcggaaagggaggagccaaacgacaccgtaaggnttctgagggataacatttcaggggaatcaccaagccccgcgatcgccgtc

SEQ ID NO: 54214 - DNA, 439 bp, Glycine max
  Clone ID: PAT_MRT3847_19969C.1
gagtttgagactgggtaatcaatactgtgactataatccatagatcttgtaacggaagaaaggaaagaaatagaaaaagttcaatgacacagtgattagaagaccattgaaatagaaccttcacatgaggttagaaaggtaattagcgactttattatgcatgggcaatatccgacgttagatattaaaatctataggcacaaactttcacaggtttgaagtatttttccgttttctgcttgatctaatcaccctcctccctgtttcttctaaattggctgtggacatctgatgttttgaaatgatgctttagtttatttcatgcttgttattcatcagtaatttatttcagtcattgagcacaatcactattttgaaggcaagtgtggtatgcatttgttttattgtgtagtggaaatgttttgggctgacgatggat

SEQ ID NO: 54215 - DNA, 238 bp, Glycine max
  Clone ID: PAT_MRT3847_1996C.1
gcggccgcacctccatgcttgagccaaggcgtccgttttgagctcatttccaacaatcccgagccaaggaaaccgcttcattgctcccaacatcgacaacgccaaggtgatcactcacagggactactccgtacccaatgggcggaatatttgtcgggccctgctttaacccgttcaattccagactggtgcctagtacgtcacctcatttccctttaaagggtgccattaaagctgg

SEQ ID NO: 54216 - DNA, 595 bp, Glycine max
  Clone ID: PAT_MRT3847_19970C.1
ttttttatttattatttatttatttcttttatggtgttttatttattttattttatttttattttctttttctttttttttctttccacaacccaaacagattttttaaaaagaccaaaacaaacaacagtttttaaaaggccacttttgcccatggaaacaattaaacaagagtaaacctttcaggaacattaaaaaaaaaaacccaaagattttgggaacttccacatgcttaaacttaaaaacacctacaaaacattctaaaatttttaaaaccccccacgaaaacccaacacagggggaaaaggaaactttttctaaatggtgaaacaaaaaaaagcccttccatcctcaaatggcttccaaaaaaaaataaaccttgggggggcgggggggaaaccccccttggccgggattttggctttgacattatcgatgggggcggagctttcaacttccaaggaaaaagtcttgcctgtaaaagtcttaaaaaaaatctgcaaaccccccctgaaacaaaggacaaggggaaggggggactcttttgggatgttgaagccggccagggaacgcccattttaaagctgttttccag

SEQ ID NO: 54217 - DNA, 369 bp, Glycine max
  Clone ID: PAT_MRT3847_19971C.1
cccacgcgtccgcggacgcatccccatagaactatctcgcttcatcatgaatcggtaattcacgcacatatcatcctactacggctcaacaccgcatccatttcaaccaacttaaaaacagaagattctctatgatcaccatgatgatgcatacaaaagtcaatatgattgaacaaagtaccttccaattttgtaccaataaaatgacgtctaaccaattaccaataattagtataaaaaagtcatatgttctaatcacaaaaaaaaactcggccttatgactctttacatatcattaactaccaaattgattgaaatcaattaatacgacaatattactcatatgaatcatctcacattgacattcat

SEQ ID NO: 54218 - DNA, 537 bp, Glycine max
  Clone ID: PAT_MRT3847_19972C.1
aatcccaaccaaatgactattgtgaaggagaagatacccccactcggcctgggctaagatgaatacatgataagctaccttcattgttgaaaaggacaacaacacatggcaatgacacctagctaaggaatacacgataagctcctctttattgctgtaaacaacgcaaagcgatacctactcactcatggcaagaatgagaacaattgttagcacatcatcaaaagactgactactgtttactcgctcgaaggcacagcctccgctggaacactttccccttcttctcctgaaggagcatatggagacttccggcaacgtgaacagctgctgcgccgagtggaatttatgccaaacagcttaaaaggccccttaggcttgtctccgacatgatttgcaagcgcccaattcacagaatcaaagtaagcacgctcatgctccttatataagcagggccagtttttgatcagcaatcctccatactttttctttacagcctgcttctgcttttgccatgacgacaagatagctgactta

SEQ ID NO: 54219 - DNA, 430 bp, Glycine max
  Clone ID: PAT_MRT3847_19973C.1
gaagcacggaaccccgcaccaggcccaacagacccaccataaaacccaaaaacgagccggaggagagcggggccaattaaaggggacaggcggaaaccccccgaaaaggaaccgccgccacacttccacaccacgagccagccgaacgcaaaaacgggcagcccggcgacacccacgagcggaacccacccacacgaagacacccgcgccgacccacggaaggccaaccgcgaaacccgccgagccagcccgacgaaggacgccgaccacgcgcgggaagacacccagcgcgacaagggcgccccggccgacgcccaagccacacgcgagacccgaacacaacggacagcccaccaccgccctggcccggacaaaccggcaccaccgcagcacacaacggcgaaacccaccaggccaagatacagaacga

SEQ ID NO: 54220 - DNA, 328 bp, Glycine max
  Clone ID: PAT_MRT3847_19974C.1
gacagacaaccaaacggtttatcaccaatgcttgtcaccgtttggtggttacaatttcgccagtacaaggttcgctcgctactcacgaagctgtgagcatggtgaataatctacaaactacaggcagtatacatgcgccatgtatggtgatgagttctgaggagcttgccgtgggggtgatgaagatattattgggccatagaattgtggtgcgacgattttgcaacggtgttaattgtaccaccccacagtatggcccccatgattaacggggggcacatgttgctatcactactacatttcctacgaatccttttcactacatttt

SEQ ID NO: 54221 - DNA, 370 bp, Glycine max
  Clone ID: PAT_MRT3847_19975C.1
gaagggacaatcttcggcccccaaacttcctgcagaaaaacacagaataaaaagaagaagtactaggagacatcctgacacctacaacagaggggatgcaaccctaagaataagaccgggacaaaacatagggggaaccggcatagccgaactacaggagacttgcaacgtcttgcccatcaaaaacccgggtcaaaaataggggcctgggagatgctcaccggacacgcacgactaagaacggagaactatcatttgtagaatggaaagaagaccagctaagaatttttgggctggggcaatagttttttactatggggttacgacaccgcagagcgcgtttactgaccaccagaacgccgaagacaaa

SEQ ID NO: 54222 - DNA, 124 bp, Glycine max
  Clone ID: PAT_MRT3847_19976C.1
cgtacacttgggcttcaagtcaatctacctgatgatggcttgccatcgcggacgacctactcattagctcgcaaatagtggcatacttgttcatgtcacgggccgtctttacacaaccaacagt

SEQ ID NO: 54223 - DNA, 174 bp, Glycine max
  Clone ID: PAT_MRT3847_19977C.1
cagagaaaagagcctggtatgtgctttcgtctcgcttccttctcctctatctaccgatgtcctcctcctaggcctggggtactgctctctctctctcttcaccccaatgaatgatcgcgtctctatctcttgctcttgtgcctgcttacttggcataattcgagcaccaacata

SEQ ID NO: 54224 - DNA, 172 bp, Glycine max
  Clone ID: PAT_MRT3847_19978C.1
gtgatcactcaatttcatgggcagtggaatatcattactctctactacaactacaagcacttctcaactacccatgtactataattcctcttgctatcttattcatcaaggttccctcctttcaccacgtttatatataaatcacatttcccaattcccacgcacacaaacc

SEQ ID NO: 54225 - DNA, 407 bp, Glycine max
  Clone ID: PAT_MRT3847_19979C.1
ggctcgagagaaacacttcgagtcagggagaagggaattggaacttatacggcttcttgaggatggcccaggaaccttgatccaaatggtctacagaagaccacgatcatatgccagagggcgagatgcgcggtgtatctctatgtgaggggaagatggggaagactctggtgagaagctatgggccctaacaactactcctgactctgattgaagagctcgcaccgcccgtgaatgtgatgctgacaattcaccgctctacttatgcaaagggggagcataccaactctgtaattgcgtcttctttcggagtggcagcttcagctctatgtcctgatgtgaaagacatcactgtggatgacgacctcaagcagatacgtctaaggtgcagaggctagcttataagc

SEQ ID NO: 54226 - DNA, 314 bp, Glycine max
  unsure (1)..(314): unsure at all n locations
  Clone ID: PAT_MRT3847_1997C.1
tttttgtgtttttggggtttttttttttttgggtgaaaacaatttatataaaagtgttcttagtgccacaaggtacgggtgggaattaattagatgaaaaaagagaggctgaagtttcttcaaacataacatcctcaaaacatcctaggncgagaacacaatatggggggcgggggtgacgactgcgcttttagcgagacttagaggaagccaagttccttggggttggtacggaggcactgcgtgcgagagataagggcatacttcctgagcaggccagggggagtcgcacacacgcggggagggcgggaacc

SEQ ID NO: 54227 - DNA, 178 bp, Glycine max
  Clone ID: PAT_MRT3847_19980C.1
ggaccggccggaatttctttcttcttacgccccgttgaccaccgggataagcttggttggctaacacacttgtaattcttgatggaaattttcagggattcttggataccaatttttggaattgtctttatcctgaaggcaattaccttcagaagctgtcggtgaaatgctacatgtg

SEQ ID NO: 54228 - DNA, 557 bp, Glycine max
  Clone ID: PAT_MRT3847_19981C.1
ggaaaaaagggaatcccaagggggggaaaaaaaaagttaagggaaaaagggggaccccaattttccgggaaaaaaaattagggggggggaaaaaaaccctaaccttaaaaaagttttttaaccccttgaggaaaaaaaccaacagggcaggtttaaaaaaactgggaaccctaagacaaaatggggaccccaaaattcccaggacaaccccaaaaaccgggtaaaattttgggagcgggacaaaaaacccttttttccaaacttaattttcccttaatccaaaaagacaacccgcttccttttttgggaaaatttcaaagcccttggaaacccattcgggccaacacaaaatggggcagttgttcaaccccccagtttttccaagctctaaatttttttcgctctttttataaccaaaggccccccaaaaaaaggggggcttaaaagggctttgagggcattttggcccccccgcggagaaacaaaccctacaaaagcaaaccctttatggttcccaaacttcatgggcaaccttaacctctaaatcgggccgaagg

SEQ ID NO: 54229 - DNA, 2472 bp, Glycine max
  Clone ID: PAT_MRT3847_19982C.1
agtgatcccgttcaatcatgtcatgagaaagtgaaaggctgcttgagccgcagagtacaatccacataatgtatttagcttgaccccggaagaaagattatagatacagagcaggagcaggtttgcaaaaaaatgaaagctgatctcacaagcaacacaactccttcagcattgcatctttactttacctttctaagagtggtcctgttgatatctggttgtccatatttttgaccatgctgcacacaaatggaacaatgcagtgcttggtaaatgaacattcccgtaggagcggtattgcaatggcccaacattcaagccagtgggtgtggttccgcaagctttttgtaaccttgtccagttatacctatatgaacactcttagaaaggtaaagtaaagatgcaaagctgatctcacaagcaacacaactccttcagcattgatatttatgtacctttttaagagtgagtatatatataaaatcattgccgccatcacttcttctccatactcttgtctcactctaacagccaaagcatggcttctctctcttgctccgccaacgaccttgccccactcttcaacgacaccgccgccgccaactacctctgcgcccaattcgattccatttctagaaagctcaacgtaacaacctacgccgtcgacaacacctaccttctgttttcagcgtatcttgtcttcgccatgcagctcggcttcgccatgctctgcgccggctccgtcagagccaaaaacaccatgaacatcatgctcaccaacgtcctcgacgccgccgccggcggtctctcctactacctattcggctttgcattcgccttcggcggcccctccaacggcttcatcggccgccacttcttcggcctacgagattacccaatgggctcctctccctccggcgactacagcttcttcctctaccagtgggccttcgccatcgccgccgcaggaatcaccagcgggctccatcgccgagagaacacagttcgtggcttaccttatctactcttctttcttaaccggtttcgtttaccccatcgtttcgcattggttctggtcctcagacggttgggccagcgcgactcgtagccacggaaatgttttattcgggtctggagtcatcgacttcgcgggctcaggcgttgttcacatggttggcgggatagcggtcctgtggggggctttaattgaaggcccgagaatcggccggttcgaccgttcgggccggtcggttgctttacgtggccacagcgcgtctttagttgtgcttggttcgtttttgttatggttcggctggtacggcttcaaccctggttcgtttctgacaatagccaaggggtatggaagtggagggtattatggtcaatggagcgctatagggaggacagctgtcacgacgacattggctgggagcactgcggctctgacgacgttgttcagcaagcggttattggctggccactggaacgtgattgacgtgtgtaacggcctgcttggcgggttcgctgccattacatcgggctgtgccgttgtggaaccgtgggccgcgattgtgtgtgggtttgtggcggcgtgggttttgattgggcttaataagcttgccgcgaaggtagagtacgatgatccgttggaggcggcgcagcttcacggcgggtgcggagcgtggggggttttcttcacgggattgtttgcgaagaaagtgtacgtggaggagatttacggtgttggaaggccgttcggggctttgatgggtggcggagggaggctgctggcggcgcaggtgattcagatattggtggtgtgcgggtgggttacggcgaccatggcgccgttgttctatgggcttcataagatgaaactgttgagaatttcgagggatgatgagactgcggggatggatttgacgaggcatggtgggtttgcttatgcataccatgatgatgaagatggttcaagcaggggagtagggttcatgctgcgtagaattgagcctgctgctagtaccactccctctccccccgctgcaccacaagtttaatcaaaatgtggtttatgattttcaagcgttttttagtttcgtacctgcacatagctatgggcaaagctagccttgtcaaaaccatatacaagcaagacacgagggatgcatatatgaagtataaaaattaatgcgtgggggtcaacatttaggaaatgtcttctagagttactgtacattttaaaatgtttgttggcttggtttattattttcatctttgaattccaagactagtttggtcgactgttgtcacgttagtttgtatcctgctgcagaataacttgcttgtaattgtatactgattagttggtatatagtgatatattatatatactaaatgcattaatgcaggttatgattttgctaatcttgtgatattagtgtttcaatatacatttttttcttttgataaaaa

SEQ ID NO: 54230 - DNA, 837 bp, Glycine max
  Clone ID: PAT_MRT3847_19983C.1
ctgttgcacttcctctctttctgcttccttcctttatcctctctctctatctctctctcaaaagcttttatttgtttccgtcgtacgttgtatgcttgggagcacaacacaatgaaagaaaacgtaggaaaccctctgcacctaaagtctgtgaaccatatctctctcatctgtacctccgtgaaagaatctatcaacttctaccagaaccttctcggattttttcccatcaggaggccgggatcatttgattttgacggggcatggctattcggatacggaattggaattcacttgctgcaagccgaggaccccgacaacgttccaagaaagacgaaaattaatccaaaagataaccatatatcattccagtgtgaaagcatgggggcagtggagaagaagcttggggagatggagattgaatacgtgcatgcaacggtagaggaaggagggattaaagtggatcagttgttttttcatgacccagatgggttcatgattgagatatgcaattgtgatagccttcccgtgatccccttagcagcgagtggcaataacaatggcatggtcagatcatgctccagactcaaccttcaaattcttcaacagatacaccaatttctcaaccaatagctagccactagtcagatcatgatgatgatcatttcctcctttttcatgctgtttagattattccttattttatcattctgtctagttcctttgcagtaataaattattccatatatattcgcttcttattaaaataaaaaaaagagaagtatggtttaatttgtgccagtggtttttccgaaatgagatttgctttcttgcatc

SEQ ID NO: 54231 - DNA, 1479 bp, Glycine max
  Clone ID: PAT_MRT3847_19984C.1
cgccgtaccgtaaggcttcggaaattcggactcgagcacaagacgaacttcctagttcgtgtgtgtgtgatagatatataataataagttaataacaacaacatcaggaaggaagaagatgggtggcgtgacatcttcaatggctgcgaagttggcgttcttcccgcctcacccagcatcgtacaaggtggtgaaggacgaggtgacggggcttctgctcctgagtcccttccctcaccgcgagaacgtggaaattctgaagcttccgacgcgccgcggcaccgagatagtgagcatgtacgttcgccaccccatggcagcttccactgttctctactctcacggcaacgccaccgatcttggccagatgtacgagctcttcatccagctcagcatccacctgcgcgttaatctcatcgggtatgactactctgggtatggccaatcatcagggaagccaagtgagcagaatacatatgcagatattgaagctgtgtataagtgtctagaagaaagctatggtaccaagcaagaggatataatcttgtatggccaatctgttggaagtggccctactttggatcttgcagctagattacctcaattgagagctgttgttcttcacagtcccatactttcaggcttaagggtcatgtatccagtaaaacgtagttactggtttgacatatataagaatatcgacaaaattccactcgttaattgccctattctcataattcatggaacttcagatgaagttgtagattgctcccacggaaaacaactgtgggaactgtgtaaagagaagtatgagccactatggctcaaaggaggaaaccactgtgatttagagcaatttcctgagtatatcaggcatctgaagaagttcatagccactgttgagaagtctacatcccaaagatacagcttcagaagaagcatggaacagtttgagcagccacgaaagagcactgatgtatttgaagttagtagaaagagcactgatcgcagggaaaaaccacggctgagcacagaccggcctcaaaaactgaaaaatttgtccaataatgccgataagttagagaaactgagagtaacttttgatcatatggacaggtcaaggagaagtgtggattgtcttgaaaagtctagaaaaagccttgatcatcaacttgaaaaggcgaggaaaagtgttgacatgctggaaagaataaggacctgagattcttggattaatcaagttatgtattcatgaatggattggctttgagatttttttccttctttaaattgacctacctggtattgtactatggcttatgacagcagatatgatgataaatattgggcatcaagggaagggtttggtttttacattggaattcagttttccctatgatgctaccccctcttgttccctccatatgtgtttgatttgtataaattccttatctaagaaatgctactaaaactttttgg

SEQ ID NO: 54232 - DNA, 506 bp, Glycine max
  Clone ID: PAT_MRT3847_19985C.1
ttttgtacaacacaaacggctccgttcttctcccacaaacacacaacaaatgcatcgatccctcatcactatacaaacttcatagtttgtgtgtgtgatgcaataacaacaacatcaatgggaggaatgacatcatcgatggctgcgaagttggcgttcttcccgcctcacccagcatcgtacaaggtggtgaaggacgaggtgacgagtcttctgctcctcagtcccttccctcaccgcgagaacgtggaaattctgaagcttccgacgcggcgcggcgccgagatagtgagcatgtacgttcgccaccccatggcagcttccactgttctctactctcacggcaacgccaccgatcttggccagatgtacgagctcttcatccagctcagcatccacctgcgcgttaatctcatcgggtatgactactctgggtatggccaatcatcagggaagccaagtgagcagaatacatacgcagatattgaagctgtgtataagtgtct

SEQ ID NO: 54233 - DNA, 256 bp, Glycine max
  unsure (1)..(256): unsure at all n locations
  Clone ID: PAT_MRT3847_19986C.1
gtttanaaatattttttaaaaacccnnactnaaattcccgcgcccgcctttttataacacattggtcacctcaaaaacctcctncaacaattttttcctctaataatttcccatatttctatactattccccattatccttcacatactacaattccacttgattttatcattactcttaatcctacacaccattaacaatatatatccatatactctcaatccttctatttcatcttctcatcctttcttcacca

SEQ ID NO: 54234 - DNA, 712 bp, Glycine max
  Clone ID: PAT_MRT3847_19987C.1
cgcccacgcgtccgcccacgcgtccgcccacgcgtccggccttggccgacaggtccgggtaatctttgaaatttcatcgtgatggccggaccaatcttgcattcatcacttgtgtcttcgactgattctcaccctgctaaaaagacatcaacatcaagggcaagtaaaggaaaacttgcgcctgctggtggtggaaggctgggtaagattgatgaagaaaaagctttcagtggaaatccactgaaatcaacatctgaaaacactgagcctcgtagatccattcgcaggattcagccaacgtcaagactattagaaggattgcagagctctttaattatctcaaagattccttctgcttcacatgaaaagggtcacaaaaaccagaatcggaaaacttctagggggtaaaaccaaggttgaacgaggaattacagtgtgcgcggttctgttcagttgaaagaccaacacacttggcatagatgtgtatatttatttataattttataatagggaacataggaatggaaattcttgtttccttcggtttaggcagactagtccagtagatgttaatattgattttatgttgtttacaatatgatttaatttaatcctgtaggctgtatatggaatttatccatgttgacttgtttatagaaaggtttgttgatatgatcaaatggtaaagtcatgttcctcttcgttggaaaaa

SEQ ID NO: 54235 - DNA, 158 bp, Glycine max
  Clone ID: PAT_MRT3847_19988C.1
ccttggtgctcgcgggcgcgtgcgtcaccatcccccgctatttctgaacgtaaacaatttatacagttcgtgtcagcgaaggaagtcctaattgcgcctatgactgaaaacgctgactcaggaatagagcaaccttgaaagtttcaaaagagggcata

SEQ ID NO: 54236 - DNA, 656 bp, Glycine max
  Clone ID: PAT_MRT3847_19989C.1
ggaccatattaacatacctttctataaacaagtcaacatggataaattccatatacagcctacaggattaaattaaatcatattgtaaacaacataaaatcaatattaacatctactggactagtctgcctaaaccgaaggaaacaagaatttccattcctatgttccctattataaaattataaataaatatacacatctatgccaagtgtgttggtctttcaactgaacagaaccgcgcacactgtaattcctcgttcaaccttggttttaccccctagaagttttccgattctggtttttgtgacccttttcatgtgaagcagaaggaatctttgagataattaaagagctctgcaatccttctaatagctgccaaccaaaagttaaccacatcagactcaacagaagacaacgatatgaaaacatttttttatacagataagacagtggaaatggcttattatacttgagacaaaataatattagacgcaacttagaacaacaaatttcagttgaaggcaggcatgttcttactcttgacgttggctgaatcctgcgaatggatctacgaggctcaatgttttcagatgttgatttcagtggatttccactgaaaagctttttcttcatcaatcttacccagcctttcacca

SEQ ID NO: 54237 - DNA, 101 bp, Glycine max
  Clone ID: PAT_MRT3847_1998C.1
gtttatatactttgtttgtaatgcattgtacaactaaagtatatagacttatacggtgattgtctcacaatttactacggggcctctgagatgaggtatcg

SEQ ID NO: 54238 - DNA, 130 bp, Glycine max
  Clone ID: PAT_MRT3847_19990C.1
aacactcttccgcttggttttgcagcattatttgttctttgtatgaacaactgttattcggatgctatcaattgattccaggaaactgtaattcccatttatgaagcggatcctcttcttctgtttttca

SEQ ID NO: 54239 - DNA, 495 bp, Glycine max
  Clone ID: PAT_MRT3847_19991C.1
gtacacttctggatcaacgggcacgccaaagggtgtgctgatcaagcaccgcaatatcgttgcagccatcgctggtgtcgatgtcattgtcggcaagtacctcggacccggtgacgttctcctcgcctacctccccgctgcccacatcctcgaattcgtcttcgaaaacgcgaccctgttctggggtggcacgctcggctacggcaccatccgcaccctctccgatgcctccgtccgcaactgcgctggtgacattcgcgagctgaagccaactgtccttgttggtgtgccgcaggtgtgggagactgtgaagaagggcatcatgtccaaggtccaggctggcggcgccgtcaagagcaacatgttctggggcgcattcgcagccaagaacttcttgctaggctctggcctgcccggcagcggtatcctcgatgccattgtcttcaacaaggtcaaggaagccacgggcggtaagctgagaaatctgcttgagcg

SEQ ID NO: 54240 - DNA, 301 bp, Glycine max
  unsure (1)..(301): unsure at all n locations
  Clone ID: PAT_MRT3847_19992C.1
agtcgcngcacgcgtacgtnagctcggaattcggctcgagnatctctctgttctcttcnacntcncangtntttgangtntnncgntggcagagacattcnnatttaccttcagantcagtgtangagggacagcctggcaagctctgngaccaaatctctgatgctgtccncgacgcttnnctcgaacnggacccanacngcaaggttgcctnngaaacatgcagnannaccaacnnggtcatggtcntcggagnaatcangaccnaggccnatgttgactacgagangatagtgcgtga

SEQ ID NO: 54241 - DNA, 296 bp, Glycine max
  Clone ID: PAT_MRT3847_19993C.1
aaacgggcaagggcagaggccactctaatttatcgaaaaaaagcgaagctaccgtagggccccgaaccaaacccaaatcaaacattccggtaaaaacccctcttctaatgggggggggcggaaaaactaaagaaaatttttcttttaaaggagaaccccccacccacaggatgccccaaaggggccgaaaatggggccgcaaaaaaaaaaaactcccagaccgaggttcccaaaacccggcctaaaaaaaaactttccccctgcaaggattcccgaacaagctttagggccccccc

SEQ ID NO: 54242 - DNA, 644 bp, Glycine max
  Clone ID: PAT_MRT3847_19994C.1
accagcactgataataaaataattccatcactcgtggggattgtactattcctgagttcattcggaccaagaaaagctaattaaaagggggttgagcccctgtttacctgccagaattgccatctcttatgcaatgtatcaaacctactatttttatttgtgtcacacgaccaagtttcccatttacttgtctttctagagctcacttgatccaccagcgtgggcaaacttcccttggttgaaaaacgctcatctacacccgcaggaaatgaaaatttccaacactatcttattgatcatttggcagaaggaacacaacgaaatattcaaacactatgctcaattattgcatggattttagatacctacccatattctttgacgaacattctgttctggccagaactccaattgctcttgaacaagtagagggaacatgtagccttcataaaatgtatcatgggtcttgctcttgaaactccacttacccaatttaccctcaacagtgcctcgtacccctgcttccttcatggtttctcgcaaagctgcctcctttttggattcgtccaattcccacccttcctattgtttggtcaaaacgataacacaaaaatggggtgaataaaaatgtaaataaaccaaaa

SEQ ID NO: 54243 - DNA, 273 bp, Glycine max
  Clone ID: PAT_MRT3847_19995C.1
gctccagagcaggaacagaatagtcattgtatggattttttataatttatatacaaggagatcaggtaacattggataatttaagggcagcggggataacttaaatgaaattctataatactttatatgcacaactttaataatagataattgcatcttctttaacaaccaattaaacaatgtctattataaatagtctttaagaatagaaagcatctttgcatattgtatcctttcattatcaaaaaattattgaagaacaatcttagtatt

SEQ ID NO: 54244 - DNA, 348 bp, Glycine max
  Clone ID: PAT_MRT3847_19996C.1
gttggtatcatggaagaaaatcatgagaaccagaacgagttatgacgaatttgagagcagtatgctgattatagctgaattggctaaactgggcatctcatatatccatccatttgcaatcacgggtgttgttggcttcatagggactggacttcctccttctgttgcattaagagctgacatggatgctcttcctatgcatgaaattgtggactgggatcacaatagtacagtacctgaaaagatgcatgcatgcagtcattatgctcatgttgccatgcttcatgatgctgcaaagatcctcaaagagcatgataatgagatccgacgaactgttgtacctgtttt

SEQ ID NO: 54245 - DNA, 181 bp, Glycine max
  Clone ID: PAT_MRT3847_19997C.1
aggccacgcgtcacgcttccatacgacgacaaaacgacacaaggtgatatacgacgacagatgggtacgggggcaaaaagacgaccggagggaactgactcacgacatggacgacaatcttggcttaacaatctgatacatgcatgaagacgctgaatgttgaccatggagaaaatgcact

SEQ ID NO: 54246 - DNA, 229 bp, Glycine max
  Clone ID: PAT_MRT3847_19998C.1
tacgggtgcgagaagacgacagaaggggattgaaattaacttttgaaagaagatggggggggaggaagtgaagctgttgagcttttcagcgagtccatttggtaaaaggcttgagtggtctttgaaactgcagggtgtggagtatgagcatataggagatgatttttttcacaaccatatctttcttgttataggatgggccccgtcaccaagggttggcaaccttttt

SEQ ID NO: 54247 - DNA, 355 bp, Glycine max
  Clone ID: PAT_MRT3847_19999C.1
gcacgtgccggcccggaatgacccacttgaccttcggatcttttgacccccaaagccctagagtgactccttggcgttttctaaccacaatgtctaccgacacctccttccaggaccacaagatctgcggttacctctgggcggttcttacactcactccccgcgatgacacggacaccgacatatccttcgacgagcgatgcgaaaccttcagataaaggggcgatgtcaggctccggacccaaaacggtgtattttttgtacccagtgctcgatttcttgcaatgcaagcacgcggcttcaacaagacgaagaggtagaacaagattgggatggctgaacaggagcatgagcg

SEQ ID NO: 54248 - DNA, 180 bp, Glycine max
  Clone ID: PAT_MRT3847_1999C.1
agatgccacatttgaaggcatttacatgggggggaaaaaattttatttccctttttatgatggccccaaggttaaccctaaggcacaaaaattttacctccggtaccccttaaatactttttggggcctttaatttttggccccaggtcctacttattatttaaagccatccccttaatt

SEQ ID NO: 54249 - DNA, 306 bp, Glycine max
  Clone ID: PAT_MRT3847_199C.1
gaacgcaagtttacgctaagccctatgcctcacagcacacagacttacgctttcggtgagttctctccgccgtcacagtagcactcacgtctccgataagttgaatggcaatgtcagttaatgatgatacactggttgcggctgaaactgacgatcagacagaagaaatgtcatcatctgaatcagaacaggatcaagatgtgaaattaactgaaccatctatcaatgcactgtacaacacagatgctctaccagagaaacttggagacatcagttgtccacagaatgtgcaatggatacatcgac

SEQ ID NO: 54250 - DNA, 262 bp, Glycine max
  unsure (1)..(262): unsure at all n locations
  Clone ID: PAT_MRT3847_19C.1
ccacaaccttntttctcttctccccttttcttctggcctggttttgggtgtgttttgcggaacaattccataatacggacttatcnttactaattgttttcgcctatgcctatacatcttaatcaaaatcacacccaccccgtctttattacaagccattaagcctcttcttcgactgctcatctatcctacactatgctctgcaacccggatcatcaacgtcaaggaagatcttcctgccactgagaatcaaactacttac

SEQ ID NO: 54251 - DNA, 586 bp, Glycine max
  Clone ID: PAT_MRT3847_1C.1
ggctcgagatcacgcgcccccactttaaacgatttatttggatcatatatttgcaattggctcggggtttttgcaacccctacattcttgtgtacgtcaagggctaaggtgcaggtgtacgtgaaagctccattcgtgggcaattgatgtattctagtacttgattttcgtctgccttagggctgcttttcctcgtttaagtaagtttattaatcatgactgacatcatgtccgcacctgttgacccacccatgaaacttggtcatgaaattgaatattccgaggatgaaaggaagaaaaagcttggatcgttcaagaaggtggcaatcagcgcctcatctaagtacaagcattcctttgctaagagggggaggaatcacagcagggttatgtctctttctatcgaggatgatcttgatgcagaagagttgcaagcagttgatgcttttcttcaagtactcatcttggaagagctgttgccctcaaacatgatgatcatcatatgatgcctagattcttgagaagaaggaagtttgacatttagaaaacaaaacaatgtggacagatatgctaagtggaggcagga

SEQ ID NO: 54252 - DNA, 376 bp, Glycine max
  Clone ID: PAT_MRT3847_20000C.1
aaaaaaaaaaaaaaaaaaaaatataaaaaaaaaaaaaaaaaaaaaaaaaaaaaaaaaaaagggcggaaaaaaaaaaaaagaagaaggatagggaaaaaagaaaaaaaaaaaaaaaagggcaggaggtttctgagggggaaatttaaactgttggggatgggtacaaaaaaggctcggttaaggggagccgagagcatagttacctgggggcttgtctacacctttttcaccggaaaagatcctgaaaagaccgctaggaactctcatgttccagtgccaatacgactctccaattgaattagcaaaaagcaccggccaaatggctacacccaaatggactggaaccggaaggaacaatgcaaggagccttggacca

SEQ ID NO: 54253 - DNA, 259 bp, Glycine max
  Clone ID: PAT_MRT3847_20001C.1
cctcttccgcccccgccctttttttttttccttatatcacacctgcaactgccagcggggcctttttatatgctgccaagaataatcaaatgttacaccacaattaaaaccaaagtggtttcccacaccgggcgtgcctgtgcacatatattctacacaatcccttacaaataaatttcacagtatcatatcacactctcctaccaaatttcctatatttctatatacccacacacaaatctatccttcacatcacata

SEQ ID NO: 54254 - DNA, 387 bp, Glycine max
  unsure (1)..(387): unsure at all n locations
  Clone ID: PAT_MRT3847_20002C.1
ttttctcctcnanannnagcnncccatcagacactatcnannagcnanaactacanctncnacngacaanacatctcctacatcancaaccncnctanntncngcacagcaagnnnaacanaannnncnccncagtatnngngnnanttanacancnntcngancnagacnagcnatnnanncactnacagcacanacccaanncacananagcnntgnnannnacnacancnactcnnngngcancacgnncnnncacaannngnnngnacaancccaacnctnacnnnanngcncaccncgtnncnaanatnaaacgtccgctnnagnannnananacancanactcctnnnaacnancnancattnnnacnancaaaagaacct

SEQ ID NO: 54255 - DNA, 450 bp, Glycine max
  Clone ID: PAT_MRT3847_20003C.1
gctagttactgcttagcttctgtggtgtgtgtgggtgagaggaagaagaagaagcaaatggagtttcaacgcagcgattcatcatcgtccccgcccacacccaacaacgccgatccgaagaaaaacacttgttctgacccaatgcattcatggtgggaatcagtctcaaaagcccgttcccgaatccacgccctcgccgccatcctcccctcctcctcctccgactctctctcctctttagcggactccgaccgccccgctttgtcgttactttcctcccccgccgcctactccgccgtctcctcctccctctccggttcccactttgatcccctctgccactggctctacgacaccttcctctcctctgacccccaccttcgcctggtagtcctctccttcgtccccctcctcgccggcctctacctctcccgcattcactccccggag

SEQ ID NO: 54256 - DNA, 268 bp, Glycine max
  Clone ID: PAT_MRT3847_20004C.1
acgcaagctctgatagacagtacgatcttactctgcttggtcttacaacggatgccggatcttgctctagattttctctcgatccgtgggagaacgattcgtaaagcaaaaaaatggtaaaagaacatactagcacattctatcgatcgaaccagtcacagaggaaggcgagcgatacctctacatctagtgacgataccgaagaaattcatctcgtggactaatcgccaagtgtgatgagcacctatctagatcatgaagagattta

SEQ ID NO: 54257 - DNA, 528 bp, Glycine max
  Clone ID: PAT_MRT3847_20005C.1
tataaacctgattataacagattactgcatgccaggaatgactggctatgatctgctgagaaaaatcaaggaatctaaatctcttaaaaacataccagttgtgattatgtcctcagagaatgtaccatcaaggatcaacagatgcttggaagagggagcagaagagttctttctgaaaccagttcaacaggcagatgtgaacaagctgaagccacatttgatgaaatcaagagcaaaggaagagcaagaccaacccttcaataacaaaaggaaggacatggaagaaatccattccccaaataaaaccagaataaaatgtagcagttaaaattggtttcaaattaaaaataaaaaaattgatgaaacataggtagtgcctataacattttcctcttctctcgcttgcttggtagtgaaaagttaggcagtcaataatcatgcaaaagggataaagagtacaagtcatttatgtaaatagcctgagaaagaattccattcaattttggtcatcaaatatcatttcatttt

SEQ ID NO: 54258 - DNA, 393 bp, Glycine max
  Clone ID: PAT_MRT3847_20006C.1
ctcatgctgagctgtttgttagacatgatatagcatctcgtcctgagcataaggcctaatcttcaatggtgttatcgtcctgacacggatcgagagacttgctcacgggcccagagcacgaaagggatgtgagtaccgaccactagcacacatctcttcctttgattgcattactacagagtagacccgtaacttcatacatgccacttgttctgccaaccatgcaaatgccgactgtttgtttacctcttccgactattgatcttttggaggtggacgaattattcgcagactgcactgtactgacggcacctactggggtagacgactcccaagctacttgaaagtgattaggggcgctacttctaagtgtgcgtggtcccggagaataca

SEQ ID NO: 54259 - DNA, 396 bp, Glycine max
  Clone ID: PAT_MRT3847_20007C.1
ccatatcatacacatataccttgcaattttctcttaaagaaactcagacccttatcatattgtgtgagggacaccccaggttaattatactaagtagcttgagatggaaatggctaatgaaaacggtttccaacttagtgtgaagctaagtgaaccaactctagttcctcctgctgaagaaacaaagaagggtttgtatttcctatctaaccttgaccagaacattgccgtgattgtgagaaccgtttactgcttcaaaactgctgagagggggaatgagaaggctggggaagtgatcaagaatgcattgaagaaggttcttgtctattattaccctcttgccgggaggcttacaataagctcagagggtaaactcattgtggactgcacagggga

SEQ ID NO: 54260 - DNA, 271 bp, Glycine max
  unsure (1)..(271): unsure at all n locations
  Clone ID: PAT_MRT3847_20008C.1
atgatccaattgttgaaactacttttaaagctaagggagttgaaatagccactgttagtcatcaggaagctcaaggtgctctacctctacatgatgatctgtctgcttatcttgatctctcacagaagttgctggcaatatggggtctccaactgacaacaagatgggaactaatgtgatatcaaagttgcttgtgggttgtcaaagagattttcataatctctttggctgcatgaatntnnnnctgccctctgaaataacaagagatttt

SEQ ID NO: 54261 - DNA, 373 bp, Glycine max
  Clone ID: PAT_MRT3847_20009C.1
acatctatacttctaacggctacgggatatctatctgaggcaagacacatatcacatcggacatttatgacagaagatcactggtccattaacattatctgcatgttacctatatatactttttaaatttaccataccttttatagttcgataatgttttgatgtctcaaatactttattaactgatacaattgattatcgataaacccatttttttattaaataaaggtctgtttctttataatattcaaacttactttctttttcatactacgttataacttttttatattgttacctaaattaaatttatttttcatcttattttaatgtcatttctttttattatttttttcttttttttttatttatt

SEQ ID NO: 54262 - DNA, 730 bp, Glycine max
  Clone ID: PAT_MRT3847_2000C.1
gttggccaaagaaaatcacatcttcaaagaatggaagccaaagtttatacgggtagagatatgatgacattgtgcaagaaagatagttgtgattttagaaagttggacaaagagagctatgaagttaccagatgctgatcttgcagtacatcattcataactctcagtgtttggatccaagtgtcatatagttgtccagaaactatgggacggcaggggtagggatgattattattctcctgagcgatcaagatcttattctaggtctctctctcccagtggtgggaaggactacaggaagtcccctcgtcttagggagaatggtcggagtcctaatgacaagaaggatcagacacccagcagatccgagagtcctaggggcaatgatcgtagtccttcaaggtctcgttcacggtcatacagtccacgctgatttgtgagcaggcagagattggaatgtggaatgtggaatgtggttaattcggtctttcctgtgaccacatactgtagctaaaactcagacattttgaaagatacaaaaattgtagctaagcaaagtctgtgatgttaatattagtattccgtaggtgacagacacccccatcagaaggtagtttgacttggtgtgtcattttggatgactcagattagactttttcatcagtttacaaattttcggatacttgttcatggattatttctatatttatttatatggttggttcatcgt

SEQ ID NO: 54263 - DNA, 642 bp, Glycine max
  Clone ID: PAT_MRT3847_20010C.1
cacgcgtccggtcaattgaccttcttcctcagcatagtatagatcacacagatcctccttctgtcaaagaaatggatttcttctcaacttcatcggcacctgatcctaaaaataacactagtaccagtgataccaatgatgattatcagaagcgtgatgatcaacatgacactcatgatcgccatggaagcatcaccgccgatggatcaccaacacgcgccactgaccaccatgtaaacactggactgaatttaacttgtgcaagtgctggaatgacaaaatcagacaatagtgaaaatcctgaaactgagctgagttctcttgaaaaccaattggggaaactacaagaagagaatagcaagttaagatagtgtgctggaccagataaccaaaaactatgcccaactacaagctcagttgttcaacgccttgcaaaaacaaaagcttcctaagaatgtggaaacaaaaattgtggacccaggagcaagcacgaaattagaacgtggtcaataatgcaatcggtttcggatgaaaagactgatcaagaatgtaatcggtttaatcgttcaaacaacgcggagggtaatgtcaaaaacacatgaatcgtgatgacgacccctcaattgactaaacttgaatctt

SEQ ID NO: 54264 - DNA, 168 bp, Glycine max
  unsure (1)..(168): unsure at all n locations
  Clone ID: PAT_MRT3847_20011C.1
antacacagtananannntagaagaatnatggntnccatgnctaccactacttttnagcccnnctctctttcttgntgnggctctttagttcttatccgactcagtcacccctanaaaacgaataaaccttgttgttctacccgttcaaaatgatggttccacagggc

SEQ ID NO: 54265 - DNA, 506 bp, Glycine max
  unsure (1)..(506): unsure at all n locations
  Clone ID: PAT_MRT3847_20012C.1
gagaaaatggctttatcatctccctctctagtgttcaccgtacagaggtgtcaaccggagctggtggctcctgctaaacccactcctcgcgaagttaaacccctctccgacatagatgaccaacagggcttgcgtttccaaattccattcatactattctatggtaatgaaccatcaatggcagggaaagaccctgctaaggtcattagagagatccacctcacatcacatgcaaccatcgtgaatacgagcaaatcccaaacaacatggaagggatcatcccttcatacgagaacaagatggatcttcgatctttcttctttggagcctccgacatagctgccctacgtcgcttggttccccactaccatagaaaatgcaccagtttcgatctcatcacggcatgcttctggcgctgtcgcacanaagcattggagatagatgcagacgaggatgttcgcatgatggtcatagtcaacgcacgtgctaggtttaatcctccatta

SEQ ID NO: 54266 - DNA, 397 bp, Glycine max
  Clone ID: PAT_MRT3847_20013C.1
gcagaatcagacttgcattggccagcacatatacctaaaccaatcaccgtttcaagcggattaggcattaaagcaaggaagaaaccaattaatctcagaccaacaaagagcctagaagccaggagcatgatcccatcattaatccccattcccgtgccatcaaggaaacaaccaaccctagttactccagcaagaaagactcctgggtctattgatgtaaagagaaggattgggaatgccaagtgagaatgctcttccaaggctttcctgattttcttgcttcactgccttcgataacatttttacccggctaaatcaacattagtgacaatggttgtgtgtccgtatttgtattatattatattatattttgtataaattaaaaagaaaaaaacat

SEQ ID NO: 54267 - DNA, 1853 bp, Glycine max
  Clone ID: PAT_MRT3847_20014C.1
gacttcactcggctcgctcttccgttccttctttctttatcatcaccagtgttccatatttcagagaaaatggctttatcatctccctctctagtgttcaccgtacagaggtgtcaaccggagctggtggctcctgctaaacccactcctcgcgaagttaaacccctctccgacatagatgaccaacagggcttgcgtttccaaattccattcatactattctatggtaatgaaccatcaatggcagggaaagaccctgctaaggtcattagagaggcacttgcgcaaactcttgttttttactacccttttgcgggtaggattagggagggacctggtagaaaattggtggtggattgtactggagagggtgtcatgttcattgaggctgatgcagatgcaacacttgatcaattgggtgacacacttcaacctccattcccatgcttcgaacaactcctttatgatgttccaggctcggagggagttattgactgtcccctaatgctctttcaggtgacacgtttcaagtgtggtggttttgccctagccgttcgcttgaaccacactatgagcgacggagccggcatagcactattcatgaacacattagctgaaatggctcagggagcaactgaaccttccgttccacctgtgtggcgccgggagcttctacaggcaagagatccacctcacatcacatgcaaccatcgtgaatacgagcaaatcccaaacaacatggaagggatcatcccttcatacgagaacaagatggttcttcgatctttcttctttggagcctccgacatagctgccctacgtcgcttggttccccactaccatagaaaatgcaccagtttcgatctcatcacggcatgcttctggcgctgtcgcacaaaagcattggagatagatgcagacgaggatgttcgcatgatggtcatagtcaacgcacgtgctaggtttaatcctccattacctgctggttactacggcaatgcctttgcataccccgcggcagttaccaccgcagggaagctttgtgaaaatccatttgggtatgcagtggagttaataaataaactgaaaggtgaggtgacagaagaatacatgcattctgtggcagatctaatggtgactaatggaagatgcttgtttaccaccgtgagatcttttattgtgtcagatttgagacattttggtttcaaacaaattgattttgggtggggtagggcattatatggtggagtggccaaaggtggggctggaccctttcctgcagtattctatctgatggcacataagaatgcaaaaggagaagaaggcatattattaccaatttggttgcccgccaaagctatggacaagtttgcaaacgagttagatcacatgctaattgggaaccaaaaccaacctacggatccacatccaattttttacgcgtctaccttggaaaatattaagtggacacccaaaaagttgattggcacccagtgagagagatacaagagagaaaaaaaaaaatataagtattataaataatataatataattaataagaaggagagaaatggtgagtgtttgaaaaaattgagattcaatatcataacttgtctacctttgtagtttgtagaatgtctgtgttttctaagtatttgaaggactttaagttttcttacgtgtatcttctgtttatataataattattgatattcaaatagttggggtgatagaagtgtacatacctgcgatgctattaatttgaaattaatagtgcatatgctcatcatgaacttattattcaatcgaattaatgccaattacttgggaaagcaaaagtaataagcaccttt

SEQ ID NO: 54268 - DNA, 278 bp, Glycine max
  Clone ID: PAT_MRT3847_20015C.1
ccccgggacaacccccatttaaaataaaggtttattacccaaaaacccgcgaccttttttttgcagggccccccaaaaaaaattgcacttgaattgtttccaaaaaaaatagagggggcccctccccaggggtagaaaaaaaaaaggggggtaaaaactaaaagggtttttttttagccaatccccagggaaggaatccccccaaatttggaaattcaaaggggaaaaaaaaatttttgctacaaggggggcgtcccccaaagggcggggaattggaa

SEQ ID NO: 54269 - DNA, 1233 bp, Glycine max
  Clone ID: PAT_MRT3847_20016C.1
ccgcactccctgggctgactggcgcctactcctagcctcccaacaaacactacacaaacacacccttcaaaagccaccaaaacacacacttccgatcgaagagacaccgcgtcaattaagctactgacttctgagtaatgcatggacggcagagataggaattgttttggctattaaattactttcttttgaggtttatgactgtgttgggttttcactatgagtggtgttcctaagagatctcatgaggattctgttcatcagtcttcaaagcatccacatcaagattcaggattcccgggtggcaaagacagtccgtactgaacctcgtgatgcagatagaagatctcatcttcatacagtgtaccggatgccattatcttcaaatgattctcatgcagatcatcccattggacctgagagcaggacagaatctagggattttaaggagagtagagaaccccggtttgagaatcgtgatacgaagacagagaagaaggaattgcatggtgaagccagaagggattctcagattgcaaagagtgagaaggatgtgcgagttgatggcagaggagatgataacaaggatattagatatgaatgggatggccataatgattcgaaaggtgacattaagacagacaaggatggctatggtatggtaagcagcagcagccacttgaattggaaagaatcaaaagagtataggggtaagagattttctgatgcccctggtgggagtttggattcctggcatacatcacgtggaaatacaccaaccgaagttggaaaggacagttcaatggcagaagaaagagactatttggaaacacatgaggctgttggggaaaacaaaattgattctaaaagtgaagatagatttaaagaaagaaaaagaaaggatgtcaagcatcgggattggggggatagagaaaaggagagaagtgatcgcagaagcactacgccagttaacaataatagtggtgacaacaaagaatctgccaaggaagatagagatgtagaaaaatgggagaaggagaggaaagatcttccgaaagagaaagaaagttcaaaagagaaggaaaaggataatagcaagagggaatccttgaacggaatggagaaagatggtttgaatgatgggaaggaacttggtgatggatcagcacaaaatactgagcaagaaaatgtgttgaaacagaaagatgttgatggctggaaaaatgttgttgt

SEQ ID NO: 54270 - DNA, 401 bp, Glycine max
  Clone ID: PAT_MRT3847_20017C.1
atttctgtgagctccccgcacctgtgcaaatcagggggggtgccttaaatttgataaggggccctccaaaaaccctgtattattgaagatgattctcaccgggaaaacaccgccagcaaggccagtattaaaagttctcactagagaaggaaaggctatcggctaagccaaaccacaaggtctactgactccttacaccttctcgaaaggctcaattattagggtcggaagctgtcaatattgctattccaattgcgatgtcgagatactgagacctgacgacatcctccttcaactgggcaactagcacagttgcaattttttttgcttgctatgatcgacacttaactcgggaacctaactatgaaccaatggtggacaaaacttggtgttctgcctgc

SEQ ID NO: 54271 - DNA, 469 bp, Glycine max
  Clone ID: PAT_MRT3847_20018C.1
cggatattgcctatgtttcatttcttgaaaggttccaaattgtcttctctgaaatttttaagcacgacatcacagcaggaagacccaaactagccacatggattcaggaggggaataagatcgatggttataagcagacaaaagttgacagggaggaatatctggaagctttcaagaaaaagtttttggcttgggcctgatgagtggcagtgggctggcttgttgctgtgggctggcttgctgttgtgggctacttttctgatagaatgctttttcagtttaaaaatgatgtgttctatttgcttgttactttgacttctcattaatgcttttgtatgggaacatccaaatgtatagtcccgcaatctataataaataagttgaagacaagtttgacttggaaaaaaaaaaaaaaaaaaaaaaaaaaaaaaaaaaaaaaaaaaaaaaaaaaaaggaggaaaggaaaact

SEQ ID NO: 54272 - DNA, 489 bp, Glycine max
  Clone ID: PAT_MRT3847_20019C.1
tagagatccatataggcatagccgcataggccaagtcacacaaataacacaacacaaacacaaaccttcaaaagccacaaaacacacacttccgatcgaagagacaccgcgtcaattaagctactgacttctgagtaatgcatggacggcagagataggaattgttttggctattaaattactttcttttgaggtttatgactgtgttgggttttcactatgagtggtgttcctaagagatctcatgaggattctgttcatcagtcttcaaagcatccacatcaagattcaggtacatattccaagttgatgccatcagtttcaaatgaccaccatattccttatgatatgagtcaggattcccgggtggcaaagacagtccgtactgaacctcgtgatgcagatagaagatctcatcttcatacagtgtatcggatgccattatcttcaaatgattctcatgcagatcatcccattggacctgagagc

SEQ ID NO: 54273 - DNA, 187 bp, Glycine max
  Clone ID: PAT_MRT3847_2001C.1
cagaaaggggaagatgtgctgtctcttcataaacgatcttgatgcaggagctggccgacttggtggaaccactcattacactgccgaaaaccgcatgctgaatgccacccccatgaacattgctgaaacccccacaactgaccagcttactgccatctccaaccaagcacacaactcgcccgcccct

SEQ ID NO: 54274 - DNA, 1366 bp, Glycine max
  Clone ID: PAT_MRT3847_20020C.1
cggctcgagcccaactcatttccggttcagaaggcttgatgcacaacagccccaaaaggcgaagctagttgggataaaaaggtaatttgaagaaaaagaaaacagaggcttaggcaactaagaaagaaagatgaagctgaaggtatatgcggaccgcatgtcccagccatcccgtgcggttctcatattttgcaaagtgaatggaatagattttgaggagatcaaagtcgatttatccaaacgtcagcagttatctcccgaattccgagcggttaaccctttaaggaaagtccctgctattgttgatggaaggttcaagctatttgagagtcatgctattctcatatatcttgcttctgcatttccaggagttgcagaccattggtacccggctgatctttccaggagagcaagaattcactcggtgttagattggcatcaccagaatttgcgtcgtggagcagcttcatttgttctaaatactgtactagctccactattgggcctacgagcaaaccaacaagcagctgctgaagccgagaaaattttgatttcatctttgtcaacaattgagaacatttggcttaaggggaatggacagtacttgcttggtggcttgcggccatccatagcagatctcagtctggtttgtgaaattatgcaattagagcttttagatgagaaggaccgtgatcgtattcttggccctcacaagaaggttcagcagtggattgagagcacaagaaatgcaacgaggcctcattttgatgaagttcatacaatcctctataagctcaaaacgaggctttctgagcagcaatctaatcaggcagatggcgtgatgcaatctaggattagaacccctctaagttcaaagatgtgaacaaacaaccatgccagtaacgtgcctgtgacaacttatatgtgtgtgtgtgtgtgtgttggctgcaagtatcactgtatcaggtttgaaacatcaaagatgaagtttatgtctgtattgagaccccttaatctaagtaagttgggcaggtaataaatgtgatttccacatgaagatacaatcgtctcctcctatgagcagatttggcggcaataatgttagtctgtcctttatatttgccacgcacaatattttctaggagctggtaaattgctgtagtatagacctatgtttttttgttgaacccggatctccctcgatccaagagccaatgactaattccccaaggccatgatttgtacaatataaatttgtatgcattatccaatggcaatgacgtgggaacattatgcagcatttgtatcaaaatttgattgaaataaattaatcctagtatattaaaattttaaaaaaaggcggccg

SEQ ID NO: 54275 - DNA, 408 bp, Glycine max
  Clone ID: PAT_MRT3847_20021C.1
ccaccatccctaaatggcgagctctttggaactgatccaattatggtcaacgaatagaaaaaagcctatctaggtgcaaggttacaactcatacacgtggtgtgcagatcaagatcttatatttgacaaaaacacatacttccaacaggtaataatgagcctcttgggtgtacatcctaaacgcaacgatgaatggtccagagcctatcttgataccccacccacgcttgtgttcaccgccaaggctaagaccagaaatcatgtttttaccaatatagaaatcgcctacagtaaaataccttccctagcacagtagccatgcattggccaccaagagcccctacctccactacaccattgctttatcttgcctctttataacgttgacctgaaaggagagaccaaaaa

SEQ ID NO: 54276 - DNA, 366 bp, Glycine max
  Clone ID: PAT_MRT3847_20022C.1
ctcgatccctaaactccccagattctgacaagatttcgtacggggctcggcagcactgattgattaccatacggcgcctacaagttaaatacaccgctctactctatacctagagagggcttggttagcatcaccagctgtgtttgaactatataggactcattttaatgttaaggagcatatcttgtatgctacacaaaaaagctaacagcgtccgtcacctactgagctagaaaaactactacataaatagcagcctacacttgactggcgaaccagatctccggtgagacgtttttagacaactaatcctacacagggttatatcgtttgctctggacgagcttatgatatgctcacgatcac

SEQ ID NO: 54277 - DNA, 698 bp, Glycine max
  Clone ID: PAT_MRT3847_20023C.1
gctgcgagcgggcgcctcacgcgtgaggtgcagagtgttgggaaattctcaagattatagggtttaaattgcaaaacgcgaagagagagagagagtgagagggcgaaacgatgtcgtacgacgatgtggagatcgaggatatggagtggaacgaggagttgcaggcctacacgtacccgtgcccgtgcggggacctgttccagatcacgaaggaagaccttatgctcggcgaagaaatcgctcgatgccctagctgctctctctacatcaccgtcatctacaacctcgaagatttcctcgccgattccgatcaaaatcgacgaaacaagggcctccaaccttccaagcagcaacccctcaccgttgcttgaatttcagatgtcctgacatggagagcgcaataggttttgtcacggctttgatttatcatagcatcacatatattgttttgcagataggaattttggtttttttatttttttttatggaaaatggtaattaataatatgctagattatattacagcaagaatactaatcttgtcactcaactccattgaactttggtatgatatcatgtcaattatctagccttgtgaaacatatcgttgtaatagttagacttcataatacctttttcagaattatagcagctacttgtgtgatgagggggcggccgccaggtgggggggagatgcg

SEQ ID NO: 54278 - DNA, 647 bp, Glycine max
  Clone ID: PAT_MRT3847_20024C.1
acgagggtggatgaccgctgacaaccacgaagagaagccataaaaaggaagagagcagaaactggagaagagaagccataaaaaaatcacagatctaaccaaactccgatttcgattccgattccgggaatagactaccaacaagagcaaacctaaggagaaggaatgtgcagctagatgactaccattgtccattttgttcgtgtcatgaggaggaagcgtcccacatattttttggttgccaaagaataatgcctttatggtgggagagccttgcatggacagaggttgtaactgtgttccttgcatcacctagggatccagagagctccatttgcggtgcacgccgttctggaagtcttcgattagggtttcccactcctgagttgtaagaggcttcgacggtagtggtgccgccgctttctgcgccatgccgttcacgcggcgttaatgctcttcactgacttcaagaagagcctaacacacgcacgcacgcaaaatacaacacgtgtttcactcaccagtgccggtccggctctttgctcccgaccctgcttgctggccccgtactttctgatgtccccaagaacccaacttttgcagatgttgacactctcatcaaccttgaattgggtagtgccatgcgc

SEQ ID NO: 54279 - DNA, 329 bp, Glycine max
  Clone ID: PAT_MRT3847_20025C.1
aaacggggagggaccaaggcgattttttttttagaattacatcaaaaaatattcaagtctaaacatcatgggcaaaaaaaaaattggtaaaaaatccaaggcccttcaggggggaaatttacatataccagagattacatttaccacggcccattacactatgggggaaaacatatataaaattcaacgcaaatggagaccctaccacatcacggttttcacgagcagttgggggcaaaacttacaaggcccaacaactgggggacttccaaacgaggattattctcaaaggttttcaatgggaaatgcccccaagggccggggggggg

SEQ ID NO: 54280 - DNA, 455 bp, Glycine max
  Clone ID: PAT_MRT3847_20026C.1
gggttgggttttttttttttttttttttttttcttttctttttgggcaaaaaaaattccccgggcccggtttttttttttttcacatggttttccccaatcccccaaccttttaagggggggcggttatcgaaccccctgggggggccccccaaaaagcccccccacaaggttttgggggcggcttaccataaaaaaacccccggttccgtcctaaaattggggccaaaaagagggcccccaaaaaccaaaaattttttggggaaaaaacccccggggcccaaatggggtgtatcccacctagaaaaaagccccctattttcctcccgttttttggggccccaaccccccaaaggttcccttttggggggcccgggttttcaacccctttaggccccttcctttttctttttttctttgaagggaaacccagggcccccccgaaaaacccttttt

SEQ ID NO: 54281 - DNA, 474 bp, Glycine max
  Clone ID: PAT_MRT3847_20027C.1
ttctacaccgatatgttctcactgtcactacacagacctaaatgaaagcacgcaatacacatctctcgtctactgttgtgctgtcacatgcggtgattttctctatatgcgtggctgatgcgataagaataatcatcccacaaccatacgaaaggaacgctaacgataaaaaaaaaaacaataatatgataaagcgtgagagaaccacaatacctgcttcccttttgttatgcataatccatttcgagaagttactgacaacacttctcttccacctactagctgcatagacttgataccccttggtgagtttctactgcaatcacaaaactctgtgagtgagccaagtgaactcaattgtcttcttcctcgcgcgcaaagattagcttaccatttttttaccgaaaaccttcgactccttactcttacacttgttcatccctttgcttcatcaaccgaatgttaatgcctcac

SEQ ID NO: 54282 - DNA, 401 bp, Glycine max
  Clone ID: PAT_MRT3847_20028C.1
acattattagccaaacctccaggcctgctatattgtaatgcttccaagtatcccaacatcagaactgcaggatgcttagagtctcagatctctttgtccgtggtcatgagggagaatactgataagctgttcggttttgccactcatcaaacacagaatggcatattgctgaattcctgccatgatgccgaatggctactggtgtctgcctgtgacatgatgacatgtcttacactattgctcataggggcctatgtcttttccattttcctatctcagggttctaggggtgagcaggataaaggcctgtttactgcatacgggccagcctgcaaagttgaaaaggaccgagccattgtccaatcaggtgttccggcgtttggggtactggttttcttctc

SEQ ID NO: 54283 - DNA, 266 bp, Glycine max
  Clone ID: PAT_MRT3847_20029C.1
aaaaaacaacgggtggttttcattccggggggacaacactattttacataccataccaagtctaacacaaaaaggcactacaaaccaaatcaaactatttaaataaaaactccactcatacaactcctatcttctgcaacaattaataaacataataaatcatcatcatgttactcaaagcctgattattaatttatcctaaacccagtctagaaaaaacaatctttaacaaatctatcccatacaaaaaacattctaaccaaaaa

SEQ ID NO: 54284 - DNA, 504 bp, Glycine max
  Clone ID: PAT_MRT3847_2002C.1
ttgatccatagcatttgcaccttgattttgtttaaaagaacacacccttgagcaagtgtaagctagaatacgacgccagtacatgtttaaagcatataacggatattgctaggagcagcaaaaagctactatgtacatacctgacgcatatcttcagtcaagttttcttcaaactgtactttgacctaacgcgcgaaagccgagaaaatgttgcagtgaccactatcagcaaggagttccatcaaattgacaatgggtccttcccctgtataatggctcgcaaccagaacccaccaaaggccacccttgcaagacttccattcttgatctccttgggcataaaaacaataagtgggtaaggcgaccctttgccacacatcattgggtcaaaccaaagcccaccagggttctttttattggaactttgggttcgcgacttgtgttattttgggctcaatgaaaacactccctgggttaacaatgacggcccatcttttacccttc

SEQ ID NO: 54285 - DNA, 376 bp, Glycine max
  Clone ID: PAT_MRT3847_20030C.1
cccttgagttagcgagatatatatctttttcaacaaggggaagaacaacccactatatttttccttttaataaaaacaaaacaacttgcttattcaaatctaacaatccgactcttctccttacatatgccacttcatccccaaacatggccaatttctttggtcctttatttactcaaccaacattacctgtccacattttagattttcaaccacttgttaaaataagactacacatactttgttgcctatccagttttcatagggagaaacaactacccaagaagtaatttccttagttcaaggttaagactatccttttctcccacttcatgacatatccaaatcctggctgcagttcataaaatgcactccc

SEQ ID NO: 54286 - DNA, 161 bp, Glycine max
  Clone ID: PAT_MRT3847_20031C.1
ggggggtggttgggaaaaagtggaatggcttccattttattccggaattaacaagcgtaccaaaccattttattttcctaagaattaaccagaaaggccttccaattgttgaacaaggccccaggcttttgattgttgcttttattggattcaaaacttta

SEQ ID NO: 54287 - DNA, 480 bp, Glycine max
  Clone ID: PAT_MRT3847_20032C.1
tacggctgcgagaagacgacagaagggatattgcaaaaataaagagagaaggaaaaaaatttgaatcccacggtgcattttattttcttgctcaactggcaggattttctacattaatacatttttcacctaaaataattattttttcataattattatcaatcattttttacattgaagacaattaacataaagtttgataatcgatttttttaacgaagaatcgattgttttaaaaattacgacaagtgccagttagagcttcaaaaacttgttaaatgctagctagttggtaattttatcatgtgctgataataattaatctatctgaaacaagattacctgatttatgtgaagaaaaaaaacaagaaaaaataaatgagagatcaggctgagatttcccatttttctagcttgtctcgttaatgataaaggaaaattatttctttttattcttcattacagctgccattaattgac

SEQ ID NO: 54288 - DNA, 373 bp, Glycine max
  unsure (1)..(373): unsure at all n locations
  Clone ID: PAT_MRT3847_20033C.1
agaaaaaaaaatcatcattttatttatcatcacaagatgtaataacaattttgtgcatttttgcctgtacgtattttccagtcctccccaacgcgaaaaccaacaacactataccccaagaaggttttcaaaaacagtccacgatcgcaatttttaagaaaccacaattcaaaaccttgctctaccgaaaatcaaatatcttctctaacagactaactctcctcagcagcacctccatgagttgatgaagaatcatcatcatttgaatcaccagcaacagcttgagcttgatcaagatcttggcctctcctactactcctattaaaaggaaaactaacccaaacttcagcancaccaccacttctcctctctc

SEQ ID NO: 54289 - DNA, 303 bp, Glycine max
  unsure (1)..(303): unsure at all n locations
  Clone ID: PAT_MRT3847_20034C.1
ttgtggagaggccttgngaccaagctttcgaaatgagcagccatgggaggacttttacgnncccaaaatgcaaaactccctttagaaaaaaaaaaaaaaaaacattctttggnacaccttaaacgcaattaattattgacccagaccaaataccttccgttgccgggcccaaaagttcgtttattaggttannngcccttcagaccaaactttggaaatgaacaggcatacaattccttcaaaaggatgaagatgccttttttaggnnnnccattcctttcctactcggcaattcattccaaa

SEQ ID NO: 54290 - DNA, 337 bp, Glycine max
  Clone ID: PAT_MRT3847_20035C.1
aaaaaaaaaaaaaaaaaaaaaataaaaataataaaaataaaaaaattaaaaaaaaaaaagagttaaaatacaaaaagaaaaaaaatacacatacaaaaaaaaaggtacaccaatctattgggtccagctttacatccacatccttactcctgtttagatttcttctcatgtagcttaaatgcaatctgctgatcctatgctttaaagcttcttaactggcaaatccctttcattactcatctaatcctcctatttgaatatcccactttataaagcttgcttaactctcataatgcccttacaaatatcctttctaaacttttgcatatcttgactg

SEQ ID NO: 54291 - DNA, 285 bp, Glycine max
  Clone ID: PAT_MRT3847_20036C.1
agtactgtccgcattcccggctctctctctctctctctcgaagtgttggaattcgttttcaactttcctactcaacaagaacgcagactttgatggatggtcgcacctctgtatgcgggctcatgaatctacatagcttagtcctaaccgcttcgaaagttaccacacttcgctctctttcccaaaatttcacccacactcattcaattactcactcttccttgttacggatccaaacctctatttttcggtaccaggaccgtcgcactgcctgggaagatacaa

SEQ ID NO: 54292 - DNA, 354 bp, Glycine max
  Clone ID: PAT_MRT3847_20037C.1
gtgatatttaaaagtcctccggtgcttcaagaagttggatatagcgatgatgatgtttttataaagcgtgtggttgcaaaggcaggtgatattgtggaggtaagatctctggataagagcattcatactcttgtttcgtgatgctggcttttcattgtttgttcaattccttgatgaacaaattttattgtgcattgttctatctcatggctagtgactacaactaattgttacattttcattcgtggtcctgttcttgtcttttgcttgtccctggatttgttttaccacttgcttgttttcttgtttttagagggaagtttattcttttctagttcaaaagtttggttaact

SEQ ID NO: 54293 - DNA, 263 bp, Glycine max
  unsure (1)..(263): unsure at all n locations
  Clone ID: PAT_MRT3847_20038C.1
gtgcatctgtctgtataagatttccgataaaacattttaggcaaagctgctagattaaatcattcattatgcttaatgaatagctagttatctggcagagaaatgatcaaagggcagtggataactcaaattatatactttttaaaattatctgatctccatttctaacaaataaaggagtggatganacagagatctttcgatcctttttcatccttttattccctctccatttacctccttagccttttgcaagctttgtg

SEQ ID NO: 54294 - DNA, 864 bp, Glycine max
  unsure (1)..(864): unsure at all n locations
  Clone ID: PAT_MRT3847_20039C.1
catgaaaaacaaagtggtctaattacaaaacctattgaaagtttcacttctagaatgagttgacttgtgacatgcccaatgcactagaaagaatatgctcacaagtcaattttgcctatcatagttaaatttttacatagggaagtaaggcataaagcgatgcttctaattgaatcatactaaatatttgaatatttgatgctgccaacaagatggctgataactcccaaagtaactctctctaggcacttggaaatcagaaaagagctgcagtgccatagttgacacgattcatgaacatgtgcccaatttctcccttggtaaaaatacaatttccatgttttaagtatattcatcttagaattatactattgcatagaagcatctagaaacagtattatctagttacataaactacttagaaccactgcaagatggagatttacgaacttcataaatcttattgaactatatagcataaactaaactcaatacagtgtacctagctccttgtgtaagtttcataaaccaattgtgctgcaagcatatctacaacagcagaaccaacagacttgaacacagttatctgctcagaactgattctcccaactttttcacctctcacaagctccaccaaactccctccaatctcatctttcttgatgacccctctctcaaaagcccccaccagctcccctgcttcaacaagcgcagtctcattgtccacaaaaacctttcccctccttatggcctgattatgacactccatcatgggattgttggaggaacccaccaaatgcaaatgaggcccacccttggacctgtggcggttggcannnnnnnnnnnnnnnnnnnnnnnnnnnn

SEQ ID NO: 54295 - DNA, 431 bp, Glycine max
  unsure (1)..(431): unsure at all n locations
  Clone ID: PAT_MRT3847_2003C.1
cgaaagcgaacaaaaaaaaaacgaggggggngggaggcacacgcacaaacgcagagncagaagcnccaancngcaagcggggacaaagccggccggaacgaacgaaggacagaagggagcnacgaaaaangnggcggngcaggggggggggggaacgaaaactttttttttccagatccacctccggtcactcacttggatctggnctttgtagatacccccccaccggggcgggctgctggggccggtggggggggcgtggtggtgggggggggggggggagggnccgggggccgccccgtggccggggtggggtggggcgtggncgggcgggggcggccggggcggggggtgggggcggggcggggggccggcctccggggggttgggcngggggggggggggggcgggggggggcggggggtggggcg

SEQ ID NO: 54296 - DNA, 525 bp, Glycine max
  unsure (1)..(525): unsure at all n locations
  Clone ID: PAT_MRT3847_20040C.1
gaaatttctaaatttgactcaaaatcatctttttatatataaaaactaaatctaaactgaaatgatcagtttcatcattactttaagaagatttagatttgatatcgattatttatttctcaggcagtccaagcatttaacaatattttctcataatgctcatattttttcgagaaaattattcttcctgtatctnttctatataacataactctgagttcaaataattattttgtaattacttgagacttattttcatgtttgtaggaaaaattgttaatttcatataattgtagttttaatagttatttcagaattatcacctgaaagaaatattaaaattgtcaattattcataaagtgaaaaatactaattacaatcatgtaatttaatattttgtctcttatttagcttatcacaattaaatatagcaattagagatggcgattttcagcattgtttttactcttaacagcactataactataagcctttccttgacagatgggtnttatacaactagga

SEQ ID NO: 54297 - DNA, 627 bp, Glycine max
  unsure (1)..(627): unsure at all n locations
  Clone ID: PAT_MRT3847_20041C.1
ttttttttttttttttttttttttttttttttnntaaataaagcagacccttccaactcgatcatgtatttctttttattatcattaataattgctgtactgaatcttgtattttagagttgaatctatgtttcagccaagctatatacatgatacatcaataagaagctaagagcccgaaaggaccttgtacaaggtactttgtagcgatgacacagaatcaatagcagattttgtaagccagctaatccccactttaagcctatgttcatccgttggtaacctgatcaaataagctatcttcctcgcagtatgaccaatggaaccttctaaggtcagcccatcaataaaactcggagaaatggcagcatcgtttcttcccagggtcatcatctcacctagattctgaaacctaaatggtaaaagtggacgcccattgattgcagcccacaaattccaaccagtgaagtctgcttgctgaaatgcaacctgtgcagtggctggaagaatccttccatttgaatcccttaacgcagaaaagtcaccaagggcaaatatccgggggtgacccttgacacgaagtgtttcatctgtttcagcttgtcctcgggcattaagtggaattac

SEQ ID NO: 54298 - DNA, 775 bp, Glycine max
  unsure (1)..(775): unsure at all n locations
  Clone ID: PAT_MRT3847_20042C.1
tcgagcctcgaagccgcctcgaagccgttgaaaacttgcacgactcaactacaantctctccttatgaaccacactctcaatttgaaaccctactaactaaaacaaaatatatatacaaaactcttataaccacccttntaacgaaaatatccatacttanaagaataaacccatttgaattggcgcttcccttcacttccattcctctgccctttaagccacccaacacttcacacttcttcccttcccccaataaaccccaaaacccccaataaaaggttaaaccccccttttcccctttttccctcgaaaccccgaaatttcaaccaattttttaaaccgaaaaccaaaaccgcgaccccaagnaagccagaaagaaaccttcttcccttaacccaccttgccaaccgccgttgcccggcgcccaccccttcaaaccggttgaaagcccgaatcgatntattcccccagaaggcccgaaaaataaccaaaccttgaagaaagagtttaagcgaacaagaactcttccttcttaaattcaactttggaaggatcaactggtaccccttgtctcgttaattgaaaatctgaaccctttcttgcccacaccgtttcagcttctgngtcgtgaaaatcgtgctctggtacgacaagtccatttcccaatgggttgcttttgatgacaaatgcccncatcgtcttgcccctttatctgaagggaggatagatgaaaatgggnaagttgcagtgttcttatcatngggtggtcttttg

SEQ ID NO: 54299 - DNA, 253 bp, Glycine max
  Clone ID: PAT_MRT3847_20043C.1
cgattaggctgagcctgcagcgacaatcttgcttgtagagaggaggttgacgactatgacgactacgatgatgtctaccatctctcccgcgtggtcaatttgcttatatattccttttggatggtccaattatcttaatatgtccttaccaccaggggaactacaagcttcggaagcactgcgacaacaacgaggtcctgaaagctctctggggccgaagctggctggatcttttatggagatggcacaactt

SEQ ID NO: 54300 - DNA, 2347 bp, Glycine max
  Clone ID: PAT_MRT3847_20046C.1
cggaattcccggctcgacccacgcgtccgctcacacacagatctatctgtccatcgttcgttcattgtcgttttgatctcaaacgccatggcgttttggagatccctcgcgttctctgccctccttctctcgctcttcgtccatggcgctctctgcttctacctccccggcgtcgctccacaggacttccagaagggagatccgttgcaagtaaaagtaaacaaattgacttcaacaaagacccagcttccttatacatattattctcttccttattgtccaccaaataaaatagtggatagtgctgaaaatcttggagaagtgcttcgtggtgatcgcattgaaaattctcgttatgtgtttaaaatgcgtgaaccacaaatgtgcaatattgtgtgtaagcttaaacttgatgccaaaactgcaaaagcgttcaaagagaagattgatgatgagtatcgagtgaacatgatccttgataaccttcctctggttgttcccataaaacggatggatgcagactctactgtttatcaacttggtttccatgttggactcaaagggcagtatagtgggagcaaggaggagaagtattttattcacaaccatttggcttttactgtcaagtatcatagagatacacttactgaatctgctagaattgtgggctttgaagttaaggcattcagtgttaaacatgaatttgaagggaagtgggatgaaaagaccacccgtttgacaacctgtgaccctcatgctaaacacacagttgtcaattccaacagtcctcaagaggttgaagagaaccaggaaattatcttcacatatgatgttgatttccaggagagtgatgtgaagtgggcttcaagatgggatgcctatttgctgatgagtgatgaccaaattcactggttctcaattgtgaactcattgatgattgttctcttcctctcaggaatggtagcaatgataatgctgcgtacactttaccgtgatatttcaaagtacaatgagttagagacccaagaagaagcccaagaagagactggttggaagcttgtccatggtgatgtttttaggccaccaaataactcagatttgctgtgtgtttatgttggaactggtgttcatttttttgggatgattctagtaacaatgctgtttgctgtcctggggttcctttctccttcaaaccgaggcgggctaatgacagccatgctcttgctttttgttttcatggggatttttgctggttatgcctctgcccgcatatataaaatgttcaaaggaacagagtggaagagtattgccctcagaactgcaatcatgttccccgcaatcgtttctgccattttctttgtattaaatgctctcatatggggacaaaaatcatctggagctgtgccatttggaacaatgtttgccctgatctttttatggtttgggatctcggttccacttgttttcgttggtgcctatgttggttttaagaagcctgcaattgagaatcctgtgaagacaaacaaaattccaaggcagatccctgagcaggcatggtacatgaatccagtcttttcagttctgataggaggaatccttccatttggagctgttttcatcgagcttttctttatccttacttcaatctggttgaatcagttttactacatcttcggtttcctcttcttggtcttcgtcatcctcatcgtcacttgtgctgaaatcaccattgtgctttgctacttccagttgtgcagtgaggattacttgtggtggtggcgatcatacctcacatctggctcttctgccctatacctttttctttacgcaacattctacttcttcaccaagcttgaaatcacaaagttggtatctgggttactatactttggttacatgctcatagcatcctacgccttctttgtcgtaaccggaaccattggattttatgcgtgcttttggttcacaaggctcatctactcttcagtcaagattgattagttatagcaaccagtggttttggattaatctactacacttcttgaaggacgaaggaccggtttgtgtaaggattttgaagttcaggtactgtcatgttcagaatcagatgtaacctattcgtatacaattttgaattgtgacgacactgttattcttttgtttcaatatctttttacttgcctgagttatcgaagtataggtttttaaggtgtacccttcggtctaacttggctgttgttgtttcccgtgttactactgtcggagaattacaagttggctccttgtcagatgattttttattattaccggtgtaataaatatgatatttcaacaacgtagttcgcac

SEQ ID NO: 54301 - DNA, 694 bp, Glycine max
  unsure (1)..(694): unsure at all n locations
  Clone ID: PAT_MRT3847_20047C.1
acggaggaaaaaaattctataagaaattttaacctttctttaaacatatcactacacgtgggcagtgcaatttgttgctgtcatgtaatcctatacataattcagtgttagtcctactatgtactataaacctgtatgaacacttaactctagtctagtgaacaaaaggaggggactactgtcgccaaagatatcaaatcaagagagctgaagtcagaagttagaatggttcagaagtccatcaatggccacaatgtttggtcgagcaccccttttgtagatgttggattaatcccactcctatgatccttgtgtcattggtctcttccaaacctcgatttacgaagacattgtcgcatactatgttcattccaatgcaacatctcatcatttttatctgatgggattatttttggctccacaggctcaccatgttttctgtggccctgagtatctatcaaagcatccattttatctgtgaaatcaaagtccatgtaataatttgagttgtatgtatcagctacatcaaatgatttttgttgaacacgaggagccaggtacttttttgatacatagttgggagtcacatcctgatggtttgngttgtaactatgtttcctttctgaaacttctatcccatgttctgttaaacatatgtgccttttgcaaagggttgatccagagcactgacttt

SEQ ID NO: 54302 - DNA, 279 bp, Glycine max
  Clone ID: PAT_MRT3847_20048C.1
aatggtttgattgtgttgatcaggaggacccccttacatgaagttccattacctgcaccacttaacacacttgaggctagggactatcatataaagaatacggctttccacatctcatggtactcctccattgcttccacccagaaattccgatatctgcagattccgatatcgctattccattcataaatatatgccatcgcatccaggatccaatagttacataacatactacatgctaatatctcaactcgatatatatatttgctacttacctaa

SEQ ID NO: 54303 - DNA, 338 bp, Glycine max
  Clone ID: PAT_MRT3847_20049C.1
ggccgcttttcttttttttttttttttttttttttttggacaaaaggggatcaaaaaccttaatttgtgcctttggaattgagccctaaacttatttttgggggaagactacaaaaaccaaaatgggcaagtcctttaattttttaccttgctgaaggacaaaattgcctttttaaaaagataatgaaatacacttttttgatttgcttaaccagtgatataactgcccatataaacgtttcctgcctagaaactttaagaaaggaacctcaaggggagcactcttaaaaaacttgacgcaacaagaaattttaaagtacattaatgcatcgacaagg

SEQ ID NO: 54304 - DNA, 227 bp, Glycine max
  Clone ID: PAT_MRT3847_2004C.1
caagaccgatgatatttacatttaccaaagaatactttggacttatatttatatcgtaaaaaaataaatatagataataaaaatttaaacttttataaatattgttcgtacaagcagattggtattttgttgagccgacgagatgaaatctaatacgtctcagggggtcgtggttacctattaataagctatgatggtcgaaaagtttgaattagcgatgcgtgatt

SEQ ID NO: 54305 - DNA, 186 bp, Glycine max
  unsure (1)..(186): unsure at all n locations
  Clone ID: PAT_MRT3847_20050C.1
tgtcttnctcgatccatggctagttgtatggnttangcntgttacatttatattgtctgggaatattagtgttnaaaggngagangtcacgtggttctttgtgttgggttccnggaatggaaatatttgcataagtggaagtctctagatatccacgagncatgcgtcnagcnaactatangnant

SEQ ID NO: 54306 - DNA, 513 bp, Glycine max
  Clone ID: PAT_MRT3847_20051C.1
accaactatccttacacgcgcgcgacatggattattcttgttttcgtgtcgctgctgctgacgatcatgctgctcaacctaaactgaacgccacgcactttcttggaaccagtttgtgaatcggacttcgagagtctatgcctacatatgaaagtaactcgacgaacacttgactcattgctacgactcctctgtcttgcaaagtggttgatgggccctttaagactaatactgaattacgatcgaatcagatactggcgctcatcgttaactgccctgaagcgggcctgggaacactcaaactaacgctggcaagaagaccgcggttattcatggagatcaatatccaaaccgggtcgcatgctttatcgtgagcaacattctactttactgctagacaagcctggataaacacgcgacatgctatgtagtgtacgcaatgattgctaggaacgcattctgcgatgctcattcaatgcgcatcacgacttaactatctaggaccgcaggccg

SEQ ID NO: 54307 - DNA, 250 bp, Glycine max
  Clone ID: PAT_MRT3847_20052C.1
atcgcaaaatgtggtgtcattcatcattcacttaaataaatgactcactacgagcgagtcatcatcttcttgaactcttcaaaattgacgttgccgtcaccgccggcatccacgtttccgatcattctccggcagtcgctgagggagcatttttcccgcaacctccgcttgacggagtgcggctccttaaccgagatcagcccgtccttgatcagatcgtacagattgaacgccttcccagtcgggaaac

SEQ ID NO: 54308 - DNA, 270 bp, Glycine max
  Clone ID: PAT_MRT3847_20053C.1
cgcacgcaaacacaactcttctctagatccatatcctcgttgcggccagcgaacaaagagagaaactggagcgagaaagagaaacaaagagagagagagcatcgcaccgttgtcgtcgtggccgagaggttcgtcgcaatggtggacctgtacgtgctcggatggatcatatgcgccgtgctcagcctcgctgcgcttcgtaatttcgctttcacgcggaagaattgttgcgcttcgtcggagaccggtgccactcgccgcgcggtaaat

SEQ ID NO: 54309 - DNA, 309 bp, Glycine max
  Clone ID: PAT_MRT3847_20054C.1
gagactctctctttctatctcccacagtgcacatcttgaagttgcaaagcgataatggatcgagaggtgtctttatctcctctttctcttcccatctttacttacttggcatcattctgcttccttgctatacaagactcacattcacctactacacttattgataccacaactactaagatacagcatcttcacaatgcatctgctctacttgatagttaccgatctgatactctgaacttgtaatggtaagaactcaccgcacatcttgatattcttgcaaaatacttgcataggcgcttccacgaa

SEQ ID NO: 54310 - DNA, 186 bp, Glycine max
  Clone ID: PAT_MRT3847_20055C.1
gctaatgcactgcatgtgggctctatcgaaattatctttgatagtttcgcaagtactagatataacatacttggtgctatactttacgttactacatatcagagcagtactgacaatgcacgacgtagtatacctacagcgcctttacgcggaggacggcccattcgggtggttcactttccgaat

SEQ ID NO: 54311 - DNA, 239 bp, Glycine max
  Clone ID: PAT_MRT3847_20056C.1
tcttcagttctcgttgttgtgctgcgctgtccttgaactaggggttttcaatttcggttcagtcgttgataattaaatatgtttttgagggcacctgagaagagcgagaatacgagttactactagatcctcggcgtctcgaagaacgctgcgcatgatgatctgaagaatgcttactagatagccgccatcaagaatcaccctgacaatgtcggtgatcccgagaagtttaaagagct

SEQ ID NO: 54312 - DNA, 214 bp, Glycine max
  Clone ID: PAT_MRT3847_20057C.1
tgattataagttaacaaatattaattagggaaggtccaaatacactcttccatccttctatcaatgtttattttgacccggaaagagagcttctatgagcacatgaccacaacgtgtagtagagctcctagctacattctattttcaatagcgtggggcatgcctctacgactagggacagggcaacaaacatgcacctactggagacgacaga

SEQ ID NO: 54313 - DNA, 382 bp, Glycine max
  Clone ID: PAT_MRT3847_20058C.1
tctttgtgtttttttttggggggtctcttttgttgacacatcatcacttcccttaaaagaggtgcggaaattttaaaacaggctgaccatactcaacaagagggtcatgcctaatttccttgattgtattggacaaagcgaacaagctttagaaaacacaaattcttgatcatgcagaggattccgcattttcagaagatttggcagtcgcctgtggaacagaaaaagctggcataagagtattaccagcaatttcaaaatgttgagaaatgcccaagagaattatatacactgtatacttgtcgggttcgtcaataagaaaacctaaatgcccttaagtcagatttgcccactcagaactccacattttaaaacccttttt

SEQ ID NO: 54314 - DNA, 352 bp, Glycine max
  Clone ID: PAT_MRT3847_20059C.1
gatgggcaacataaaagaacattcttatgtgattatgaaactcgatgactcgaaaagcatgctcacacccattatgaaaatatataatatgttgttcatctggaaatcgcatctgctacctttgaaatgtcatgaaaagcagcattccatcccagattgggcctataataataactcttagccgaagattaacattgtattgaagcacttcgcacacgtattaggtgcctcaaatcctatgaggccttttatggtaaaaacgttgagaattcatgagaggaataccctgctccatcttgaaaaaagcttgggggtcaaactctgtcctaatttgtgccaatctcctaaaggt

SEQ ID NO: 54315 - DNA, 402 bp, Glycine max
  Clone ID: PAT_MRT3847_2005C.1
atactaaagcaaactttgaacatactaatactatccaaattttcataacgagaggacacatctttgcgttgtgtgtttaccttgacgaccttgtttacacaattttctaaggaggagtgcgacatacaagttccttgccaaaacacaagagttgcgtctgtcttccctaaggattatcaaggcgcacactgactaaatagattaaattaaggtactgaatttcaatctggtgggtgcatatgtaaacacatggcttggtggtcgcaacataacaagggcattaagagtactttatacgtcaaatttaaagtttcaggggcatttagctcctcctctatttgtcttccacatggtggaacaagggcaaactggtttgttgacaaaagtttcatgaggctcaca

SEQ ID NO: 54316 - DNA, 279 bp, Glycine max
  Clone ID: PAT_MRT3847_20060C.1
ggagatatatgctttaaataatatcttatagaagctagtgttttgtgctgataaaaaagaaatgggtaaaaaataagtaaagaaaaaaaaaaataataaaaaaaataaaaaaaaaaaaaaaaaacaaacaaaataaaaaaaaaaaaaatatgtaccttaacaaaataatccaaaattaattaatagttcattcaaaattaaatctaacggataattgcactaaaatcaattcataagacaatacattcaaatactagattctgtaaaaaaagatactta

SEQ ID NO: 54317 - DNA, 421 bp, Glycine max
  Clone ID: PAT_MRT3847_20061C.1
aaaaagccaagcattttcttttataaataacagtaagcacatgggactactctctcactactacgggggagaccaccgacggggaagagcacgggaggaaggctctcttgaactaatccgaggtgaggcaacacgcctcccacaatgagtagctcaggaccccatgaacattcagagtaactacgccccaacaatggggggaagtacgcctcttaattttctttatctacatctccggaagaattactacgtgtacctgtcataaggacattctacatcattgttagcgaccttagagtgctcaggacgtggaccagagcaatgcatatggcacatcttacaagatgagcgctcaggattcctgacccagcgggccgtgttgaatagagggcaagacacgcgtacagcttgaagcttatca

SEQ ID NO: 54318 - DNA, 339 bp, Glycine max
  Clone ID: PAT_MRT3847_20062C.1
aaaaaaaaaggacaccgctggttttttaacaaagtacccaaacgggcaagagaacggcagtggggcaattctcaaaaaaccaaaggaggccccacaggattagcggggcccactgtgttttgggggccaaacccgccggaccaggggggcccacccatatccggggggggcgaacacaggggaaaatgcctgggagctgggccttcttttgcctgaaaaaaaaacccctgccttcaatccctaattacgggcacccctgggtgctgggtgaaaccaacatccattggcgttggcacagaaaaacgatccttatgcacaatttgaaaagccttttttgcc

SEQ ID NO: 54319 - DNA, 639 bp, Glycine max
  Clone ID: PAT_MRT3847_20063C.1
cggtcgcgtgggaaagaatcaacttctacaaggtttttcccctgatgatgcatatccatcaggacctccattatttatggagacgccaagaccatgttctcctcttgctcagattgagttcccaaattttgatgagataatgtgggcggatgatttgatggaggaagagactggacctgaacatagtggaagtcagtcagatcacaaaacatcactgtcaaccaactaccccgatgttctaaatgttaatcaactcttggattcggttttggaaactgcacggcaagttgcaagtttctccacttcctcaactcctttaccttatgatcaaatgaagaaccagtgtgaggcacttgtaacagggaaacaacagaagatgtcagtcattcacagtttcaagcatcaacaggagagtaaggccataattctttcaagtgaaaatgaagtaaaagtttcccctctacctgctaaggttagtattttctacagaagtcaatttttcagtaagaaatgtatatcatgaaaaaaatgaattcttcaggatctatttggcagtcaatgattataatgttttggatgtttggagtattgactgtcatggtcgagtattttaggtagggtttgaactaattatcctaa

SEQ ID NO: 54320 - DNA, 470 bp, Glycine max
  Clone ID: PAT_MRT3847_20064C.1
gccggaattaccggctcgaccccgcgtccgagcttgtgctgtgagggcacttgattgcccggcttcgggaggtcaaaccctatgaactcttaacgcataactcactgaatcctacgaatcacttcccaacgccaccgatgagaatccaatggtccttaacaacggaggccttcatggagctaccctgaccctcttgaaccaactaagcttcaactttagtggaaagttttccgttcttgctgttagccaccataaccctgacgcttgggatattccgcgctacctttcacagctgatggctcaattgcagcataccttactatgggactgctctactggcttatgatgctgacacttactcactccgagcgaaggataatactcctaacgaggcgatccctttgtggagtgcactactacttgctgtggctaaaaaccggcaaacgtaccttgttgtggttaacatgatt

SEQ ID NO: 54321 - DNA, 178 bp, Glycine max
  Clone ID: PAT_MRT3847_20065C.1
cgctgacgcagatgaatccattggaagacagttaaccatggcttctctatagcgagacaaagatgaatttgtgacaaaacatggaggtggaaaggctcgcacaccccccgccatattttttaacaaggaaattgggccaaaacaaaaggaacatatgcagtaccgagtagatcatccc

SEQ ID NO: 54322 - DNA, 2868 bp, Glycine max
  Clone ID: PAT_MRT3847_20066C.1
catgttactagtgcctttcatttccctcctcttctcaacgcattatatatttattcaccgacctcggttttcgtgctgcgttttctgcttttcataaaaccccatttcttttctctctatctctaagccaaagctcgaagcttttcaccatttgagatctggggttggagctttttcccttttctgggttgcttgcagcattttcgccgttagagttaagagacaccaaaatatgggaagcaagtggaagaaagccaaggtggcgctcggtctcaacctctgcatgttcgttcccagaaccttagacgacgattcgccgccgcacacggtggtttccgagcgcctctccgacgccactctcctctctccggccaactggagcaccagctcttcccgcccaaccacaccggtttcctcttttcacggtttgaaactctccaaaagtagcagcaaatcatccaagcaaacctgctcaatatgcttaaccaaaatgaagcaaggatctggccatgctatattcactgcagaatgttcacattcattccatttccagtgcattgcttcaaatgtgaaacatggaaaccaaatatgtccagtgtgcagagcaaagtggaaagaaatacccttgtcaggtcccagtttggatcctatccagggaagagtttcacctagtccagtaaattggccccaaaatgatgctttgatggcagtggtccaccgtgtgcctctacctctacctcatcctcaccgagatttgaataggaggcatgttgtgccactttatcaggcttctgagccaggcatatttgacgatgatgaatccttaaatcatcaacatgcattttctgagagaagcacttgtaataagagtactgaagatactgatgctgctagagcaatggagattaaaacgttcccggaagtatctgctgctccaggatccaagacttattctaacttcacggttttggttcatctcaaagctactgctgccgccgcagcagctgcagcaaaaagacaaaaccttagtagaaaccagactaacttggcgcagatttctcagactccacgtgcccctgtcgacttggtcacagtgcttgatgtcagtggtagcatggctggaactaagcttgcactactaaaaagagctatgggatttgtcatacagaacctaggttctaatgaccggctctctgttattgctttttcttccacagctcgccgcctctttcccttgtgcagaatgactgattctgggcggcagaaggcattacaagctgttaattctttggttgcaaatggtggtaccaatatcgcggaagggctgagaaaatgtgccaagataatggaagatcgaaaggaaaagaatccagttgccagtattatactgttgtccgatggtcaagataattacactgtcaatggctctggaaccagccaaccccaaccaaattaccagtttcttctgcccacttctatcagtggtggtgataattcaggatttcaaattcctgtgcatgcttttggattcggtgccgatcatgatgcttcactaatgcactcaatttcagagacttctggtggcacattttctttcattgagactgaagctgtattacaggatgcgtttgcacaatgcattggaggacttctgagtgttgttgttcaggagctgcaagtgggaattgagtgcacacacccaaatctcaatcttgtctcactcaaagcaggaagttaccctagccatttgatggccgatggatgcaaaggattgattgatgttggagacctgtatgctgatgaagagagggattttctagtttcagttaatgtcccagctacatccggtaatgaaacatcattgataaaggtcaaaaatgtgtacagggatccctgtacacaggaaacagcaacattggaaagtgagggagttaagattgagcggactgaaaatgtggggcaggttgtaatgtcacttgaagtggatagacagcgcagcaggctccaagcggctgaggcaatggcccaggcaagcagtgcagctgaacagggagacctaagcagagcagtacttatccttgagaactgtagaaagatgctttcagagactgtttcggccaaatctcacgaccgcctttgtgttgcattggatctgaactcaaggaaatgcaagagcggatggcaagtaggcatgtgtatgaagcatctgggagagcatatattctttctggattgagttcacactcatggcaaagagcaacagcaagaggtgattccactgataggtcaagtcttgttcaggcatatcaaacaccatcgatggctgagatgcttactcgatctcaggccatgttactaggtagtccatcagggcagaggcttctccagccactggtgtcatacagaccacaaccaagcccaaggtgatccaacagagattttgtgaaaaccatctaaaaattaagcccttccactgatttgcctttttggcttataaaatatgtgggggagggtggtagtaaacgggagtcataaacagaagatttctttgagctttgattttgttgtttaatgtgtaaaaatgaataagaagtcgaggaaagggtggagggttacttaaaaccaatggagggcagtagataggaatttaccacattatgtttcttctattttgtggggtttaaggtttttcttttggcttcacttttctttcctctaattatgccgtttttttgggggggtggtgtacatacagaagaatgcctttgttttttttctgggacacctgggtataaagtttgtagctgcgcaaatgattggttgggattatctcatcagtaatatatatatgttttcaattaagaaaaa

SEQ ID NO: 54323 - DNA, 280 bp, Glycine max
  Clone ID: PAT_MRT3847_20067C.1
gatctatgctgttcgttggcagtcaagagcgctgaatagagttaaggacacgtgccgcaagaaccgctatcccagaacacacgctgatgattaaaccagaatccacattcgtgcagatgctgtatgactgcagattaccgtacacgaggcaatacgaggactgctgggagaggggactcccaaggaggtagagtcaactgcgaccgagggggcgcacgagactgtctcactggatttacaacgctatagcagtgaggacgaggcaaggtctccaatgaca

SEQ ID NO: 54324 - DNA, 574 bp, Glycine max
  Clone ID: PAT_MRT3847_20068C.1
atttatatctttttttggcttttataaagtccgggaaatttatttcctgacgtcatgacacaggaagtcaactcctagccgctgtggagctctggtgtgaaggtcagagcgctgactacatgctgggtggaccaggaagctggagtctgtgatcacgaaatgctcgattaccttgcttagtgtttcacacaggggcctgcctgtcccagagcacagcctcatgagcagaccctgagcctgctgggtgcttaccaggcctggagaagctgccacacagggccagcccaccaggctttgctgcgagacctcggggaggggaaagagcatcaacaatttacgagggtccagctgctgggtcagattgagacaaaccattgtgtggttgggtttgcgcagcaggctggaaaggtttctttttgatcattatcgcttggggtatagaacattccactgtcacttgagcttccagatcctcactgatttcctgaatgcgtttcttggctgcctccacacagtccttggcacccttgagagtgactttatcactctgcgtgccagattgtgcgaagctgac

SEQ ID NO: 54325 - DNA, 420 bp, Glycine max
  Clone ID: PAT_MRT3847_20069C.1
ttcaggcgtcctttctttcgaccacgcgtccggcaacaactatgctggctgatggatgtacatatttgcacgctattgtgcatgatagtacagcgtctacaataccaggtgattttgtcataggtgttaagctgacaaccataaacaatctgtgtgtatatggcctcaatcctggaatttcaggttctcctcatttggtcaccattcctcaatctatcagacatgtaaactgtttggaatcaaatggcaacattgagaacaccattgaattctgagtcttgcacgcagagctgttcagcattgtctattgaccttctagatggaagaattttagtggacaaaactggagattgattcacactgatacaaaattttccacataataacttgatgtgagtctctgtttgacagaaacgctcc

SEQ ID NO: 54326 - DNA, 313 bp, Glycine max
  Clone ID: PAT_MRT3847_2006C.1
cctccaaatgaagatcaagatatacccttgaagttttatgccagattgagacatattatagatcctcaatacaatgaggttcatgctcagatggaaacaagataagcttcatatagtcgttttgaagatgatgaaactcctaaaggttccatgttggatcttaaaatctctcaaactaaaatggcactttccaaaaacacagatggaggaacctttctgcgtagtgatctattggcaaagtttttgacagatgacaactttagagcacgccatgatttgcagcgcactcatcgaattaaaggaatgattaaaa

SEQ ID NO: 54327 - DNA, 840 bp, Glycine max
  Clone ID: PAT_MRT3847_20070C.1
gggcgtgcgtacggctgcgagaagacgacagaaggggactccaataacaaatatttcactagctactactcttcttagtttctctgttgtatcatttttattgctatatcctaatcaaacttcactctcaaaatgagtgatcccacactagcacaacagcatctagtcaaagtccacacaacaacacacgaaacagttgttaccacacacaatcataaccaaacaccctcaataaatgcctcaggtgaaaagaagaagattgtgggggtgttctacaaagggaatgaatatgctaaattgaatccaaattttgttggatgtgttgaaggtgcattgggaatacgtgagtggctggaatcacagggtcatcagtacattgtcactgatgacaaagaaggacctgattctgaacttgagaaacacattccagatgcacatgtcatcatatctactccattccaccccgcctatgtcaccgcagaaagaattaagaaagccaaaaatttggagctgcttttgactgctggcattggttctgatcatgttgatctcaaagctgcagctgctgctggtttaactgtggcagaggtcacaggaagcaacgttgtgtcggttgcggaggacgaactcatgagaatcctcattctaatgaggaatttcttgccagggtaccatcaggctgttaatggggaatggaatgttgctggcattgcacatagagcttatgatcttgaaggaaagacagtaggaaccgttggcgcgggtcgaattggtaagctgttgctccagaagttgaaaccttttagctgtaatcttttgtattctgatcgacttaggatc

SEQ ID NO: 54328 - DNA, 1460 bp, Glycine max
  Clone ID: PAT_MRT3847_20071C.1
aattcggctcgagctctattctctaacatcacaatttcaattgttttttttttacataatcatggccatgaaacgtgctgttcaatcccttcttgcctcatcttccaccctcaccaggaaccttcatgcctcaggagaaaaaaagaagattgtaggggtgttctacaaagggaatgagtatgcttcgaatcccaattttgtgggatgtgttgaaagagcattgggtatacgtgagtggttggaatcacagggtcaccagtacatagtcactgatgacaaagaaggacccgattcagaactagagaaacacattcctgatgccaatgtcatcatatctactccatttcaccctgcctatatcaccgcagaaagaattaagaaagccaaaaatttggagctgcttttgactgctggcattggttctgatcacgttgatctcaaggcagcagctgctgctggtttaactgtggcagagatcacaggaagcaacgtagtctcggtcgcggaggatgaactcctcagaatccttgttctggtgaggaatttcttgccagggtaccatcaggctgttaatggggaatggaatgttgctggcattgcacatagagcttatgatcttgaaggaaagacagtaggaaccgttggcgcgggtcgaattgggaagcttttgctccagaggctgaagccttttaactgtaatcttctgtactatgatagacttaggatgaatactgatttggagaaagagattggagcaaagtttgaggaggaccttgatgcaatgcttccaaagtgtgatgtaattgttatcaacatgcctcttactgaacagacaagaggattgtttgacaaaaacagcaattgctaagtgcaagaaaggtgtggtgattgttaacaatgctcgaggggcaattatggacacccaagcaattgctgatgcttgctctagtggccacgttgcaggctatggtggtgatgtttggcccatacaaccagctccaaaggaccatccatggcgctacatgccaaaccatgccatgactcctcatatttctggcaccaccattgatgcacagttacgttatgctgctggtgtcaaagacatgcttgataggcacttcaagggtgaagactttccagaacaaaactacattgtgaaggagggtcaacttgcaagccagtatcgttgaagtgatgcttttgttgaatttgaatcttccattttaaagttccccggattagcaaataaagatctatatagagggcactctaattatataatgtacttgctttgttgaatttgaactcgtttaattgatgtcagaaataaaattgtaaggaacactttccatgttccatggattgatcttgtgtttttcgaatttgaatgtaaaacctgtcatgtgaggaatgaaaattaacgaacaatatgtctatcaagactatgaaggaagggttgg

SEQ ID NO: 54329 - DNA, 839 bp, Glycine max
  Clone ID: PAT_MRT3847_20072C.1
tacggctgcgagaagacgacagaaggggactccaataacaaatccttcacttgttgctcgtcttagtttctgtgttgtgtcatttttattgctatatcctaattaaacttcaccctcaaaatgagtgatcccacactagcacaaccacacctagtcgaagtccacacaacactcgaaaccgttgttaccacacacaaccataaccatagaccctcaataaatgcctcaggtgaaaagaagaaaattgtgggggtgttctacaaagggaatgagtatgctaaattgaaccccaatttcgtggggtgtgttgaaggagcattgggtatacgtgagtggctggaatcacagggtcatcagtacattgtcactgatgacaaagaaggaccagattctgaacttgagaaacacattccagatgcccatgtcatcatatctactccatttcaccccgcctatgtcaccgcggaaagaataaagaaagcgcaaaaattggagctgcttttgactgctggcattggttctgatcacgttgatctcaaagctgcagctgctgctggtttaactgtggcagaggtcacgggaagcaatgtcgtgtcggttgcggaggatgaactcatgagaatcctcattctaatgaggaatttcttgcctgggtaccatcaggctgttaagggtgaatggaatgttgctggcattgcacatagagcttatgatcttgaaggcaagacagtaggaacccgttggcgcgggacgaattgggaagctttttactccagaagttgaaaccttttaactgtaatcttctgtattttgatcgacttaagatcgatcctgaattg

SEQ ID NO: 54330 - DNA, 1625 bp, Glycine max
  Clone ID: PAT_MRT3847_20073C.1
tacggctgcgagaagacgacagaagggtacggctgcgagaagacgacagaagggtacggctgcgagaagacgacagaagggggacacaactgcgacttagttcatcccttctcaagccaccgaagcctcactttttgaaattacttgcatagatagataatcatggctatgatgaaacgtgctgcttcctctgcgcttcgctctcttattgcctcatcctccaccttcaccagaaaccttcatgcctcaggtgaaaagaagaagattgtgggggtgttctacaaagggaatgaatatgctaaattgaatccaaattttgttggatgtgttgaaggtgcattgggaatacgtgagtggctggaatcacagggtcatcagtacattgtcactgatgacaaagaaggacctgattctgaacttgagaaacacattccagatgcacatgtcatcatatctactccattccaccccgcctatgtcaccgcagaaagaattaagaaagccaaaaatttggagctgcttttgactgctggcattggttctgatcatgttgatctcaaagctgcagctgctgctggtttaactgtggcagaggtcacaggaagcaacgttgtgtcggttgcggaggacgaactcatgagaatcctcattctaatgaggaatttcttgccagggtaccatcaggctgttaatggggaatggaatgttgctggcattgcacatagagcttatgatcttgaaggaaagacagtaggaaccgttggcgcgggtcgaattgggaagcttttgctccagaggttgaaaccttttagctgtaatcttctttattttgatcgacttaggatagatcctgaattggagaaagagattggagcaaaatttgaggaggaccttgatgcaatgcttccaaagtgtgatgtgattgttatcaacacccctctcactgagcagacaaggggattgtttgacaaaaatagaattgctaagtgcaagaaaggtgtcttgattgttaacaatgctcgaggggcaattgcggacactcaagcaattgctgatgcttgctccagtggccacgttgcaggttatagtggtgatgtttggttcccacaaccagctccaaaggatcatccatggcgctacatgccaaaccatgccatgactcctcatatttctggtaccaccattgatgcacagttacgttatgctgctggtgtcaaagacatgcttgataggcacttcaagggtgaagactttccagaacaaaactacattgtgaaggagggtcaacttgctagccaataccgatgaagtggtgtgtgtcaatgtggcctttgaatcttccaattttaaggccaatgaatatgagcaaataaagatctagaaggcactctaattatgtaatgcacttgctttgttgaatttgaactcgtttaattgatctcagaaataaaagtttaaggaacactccattttccatgtattgttctttcgtttttcgaatttgaatgtacatttacttgtagtgcaaagaaataagtaggcacggttaacaaataggtgatagaaaattgacgaataaattgtctagcaaaccatgcatataaatatataatcaagtattcctc

SEQ ID NO: 54331 - DNA, 264 bp, Glycine max
  Clone ID: PAT_MRT3847_20074C.1
gcgccgaacctcgaattcggctcaggtcaatgtatctccgtgaagaggtttctttaggcacggctaactgctacactgggcttggtcttcaccatacaaattggctggtatacaccataatctcttataatctacactttacgcctggggaggatttggtgctctttccattggtcatcggagtagaagggcttatttactcagccgcggtcactccatacccgctcttaccttaacacgaggaagacgcctgtaacttatggg

SEQ ID NO: 54332 - DNA, 1495 bp, Glycine max
  Clone ID: PAT_MRT3847_20075C.1
taagaattgaaaggcacatgagtataatactaacagtggacaaattgaaaaagcaacacacacagaacagacacaactgcgaattagttcatcctttcccaagccagccaagcgaggcatgctctcaatttttgaaattacttgcatagatagagcatcatggccatgatgaaacgtgctgcttcctcttcggttcgctcgctactttcctcatcctccaccttcaccagaaaccttcatgcctcaggtgaaaagaagaaaattgtgggggtgttctacaaagggaatgagtatgctaaattgaaccccaatttcgtggggtgtgttgaaggagcattgggtatacgtgagtggctggaatcacagggtcatcagtacattgtcactgatgacaaagaaggaccagattctgaacttgagaaacacattccagatgcccatgtcatcatatctactccatttcaccccgcctatgtcaccgcggaaagaataaagaaagcgcaaaaattggagctgcttttgactgctggcattggttctgatcacgttgatctcaaagctgcagctgctgctggtttaactgtggcagaggtcacgggaagcaatgtcgtgtcggttgcggaggatgaactcatgagaatcctcattctaatgaggaatttcttgcctgggtaccatcaggctgttaagggtgaatggaatgttgctggcattgcacatagagcttatgatcttgaaggcaagacagtaggaaccgttggcgcgggacgaattgggaagcttttactccagaggttgaaaccttttaactgtaatcttctgtattttgatcgacttaggatcgatcctgaattggagaaagagattggagcaaaatttgaggaggaccttgatgcaatgcttccaaagtgtgatgtaattgttatcaacacccctctcactgagcagacaaggggattgtttgacaaaaatagaattgcgaagtgcaagaaaggtgtcttgattgttaacaatgctcgaggggcaattgcggacacccaagcaattgcagatgcttgctccagtggccacgttgcaggttatagtggtgatgtttggttcccacagccagctccaaaggatcatccatggcgttacatgccaaaccatgccatgactcctcatatttctggcaccaccatagatgcacagttacgttatgctgctggggtcaaagacatgcttgataggcacttcaagggtgaagactttccagaacaaaactacattgtcaaggagggtcaacttgcaagccaataccggtgaagtagtgtgtgtcaatgtggcctttgaatcttccatttttaaggccaatcgatgagcaaataaatatctagaaggcactttaattatgtaatgtacttgctttgttgtgtctgaactcgtttaattgatctcagaaataaaattttaaggaacactctccatgttccatgtattgttcttgtggtttttg

SEQ ID NO: 54333 - DNA, 447 bp, Glycine max
  Clone ID: PAT_MRT3847_20076C.1
cccacgcgtccgcttctccgataatgatgaccgttccaaaaccgcattcgcctccgacgacggtcccgtggacttcaccgtccgttccatggcggcgcgtgtggccacaatcgacgacgcgctgctgctcaaaacctctcccttaagagaaggatggagcgactggttcgacaagaagagtgtgtttttaagaaaggatagaatgttcagatccaacttcgacgtgcttaaccctctcaacaaccccttgcttcaagatcccgacgccggcgccgccaccaccggactcaccaggggggacagaattgtccagaagtggtggatccatgagttcaagaaagttccattccctggtatcaagaagaaggctcctcttaatgtcaatgtcaacactctcaccaaagttggcatagaacgcagaactttgaatcataaccacaacaacaa

SEQ ID NO: 54334 - DNA, 227 bp, Glycine max
  Clone ID: PAT_MRT3847_20077C.1
gttccaccacgcgggccgcggcactagccgggaccctagcaccctatgcgtcttcgtacaacgcttcctttctcacattgaccaccgtgtatagacgccatgccgtacgctattgtcccactttagggatgctatttagcgattggaggcgcgccccccccatgccactttaccctggcgcgggaataggtagcgtcccattaacctattagacagcgcgcggcccg

SEQ ID NO: 54335 - DNA, 133 bp, Glycine max
  Clone ID: PAT_MRT3847_20078C.1
attctgttttccgctgcttgagtgtgcctgcgtagttacaaagtaaaaagagggaggactagggtcagaagtttatggcagtcatcaattctatctctttgttgaatgagataagggacggtgttttggatta

SEQ ID NO: 54336 - DNA, 468 bp, Glycine max
  Clone ID: PAT_MRT3847_20079C.1
ggctcgagattttgcttcatcgcttgcttccaagtcctgtctcgtttatatttgagactcaagctagtggaaaaaaaggtcaattaatttctccatatctttcttttggaagtagaagacagaaatttgttgcagtggtaattgagttaattcctcatttattgttttagattatcaaagtttttatagaagctagcaaatatggaaggtggtttttttacaccttggaagaatgagccttggcaggagttagcttcagaggacgtgaaggaaagtgagcaattgatatcgttgccacccttggctgagccaccgacaccccgtgaacctatggagttcttatctaggtcatggagtctctctgcctccgaaatctcaaaggctctctcagagaaacaaaagcaaactttcctcgataacaaggccccagacacattgcccgaacctatttccgctcctcaattagca

SEQ ID NO: 54337 - DNA, 306 bp, Glycine max
  Clone ID: PAT_MRT3847_2007C.1
ggtgttggtggtatgcctattgggggaggtggacctggtgttggtgcccctggtggcggaagaggatatggtggtgggcctcgtgtttaagaactattttggaagacataaagtagagttattttggagtacataaagtagatgcttatttgaatacaaaatagtggaagagtgtgcaccttggattttacttaaataataatgattttttttaaaaacgaagggatagaacaaactgactagtggaacgaagatcgtaatcgatcacctgttattgatgaactttctctaaaaaaaaaacgggcc

SEQ ID NO: 54338 - DNA, 409 bp, Glycine max
  unsure (1)..(409): unsure at all n locations
  Clone ID: PAT_MRT3847_20080C.1
tcctctcttcaatttcattgcactggggcctaatatcatccaaatccatccaccaaaccaaaagaattgggcaatccccaattaaaacattaaaaaacaaaaatcggtgataatcgttaaaactcaaataacaatggacctcaaaagtattaaacctgtcactcattttcatcaaatccttgcatttattctttcatatcattgcttcctatgcataatacattcttaatcttatatccttccaaacttatccaaaatatgtcaacaaatgcaaaaattaataaatgaataaatatacacacatgtacatagaagtgcataaaactcttcacagttcgtaattntctagtataacatgaaaatatgtacatttatccttttctattacctttgcacttttgtaatattg

SEQ ID NO: 54339 - DNA, 558 bp, Glycine max
  Clone ID: PAT_MRT3847_20081C.1
cttgaaaaaactgatgtattattatacatgccaatctgctcaaaccaaatgtccctgcccatggaaaaaccaattaaactccagtaactgcactaattctgcaacataattagaacgatactggcgaacacagagccaaatcttatgccttggttcgcaaagcaattgacatgtattggccccactgttcttaaagctgccaatggctcctccataacttttcttttcgaagatacttcaacatcactggacacacgagcttgggatgcgacatcatgaaggtccgactttacttgagttactcttttaactgaggggggaacattaagaaaatctcggactgttagctggatttccaaggacttaaattgtgataaaaactactgctcgtttatagctgaaaacttctcccccatatatgtcataacaaatatctagataagctgtagcttcagcactgacatccataagtgtctgaacatctccaaagactatctgactttgcctggctcacattgaatcattaccacccttcaaactttcaaacacagccttttg

SEQ ID NO: 54340 - DNA, 380 bp, Glycine max
  Clone ID: PAT_MRT3847_20082C.1
tttatctgcttgtttatgtgcttggataagatgatcccagtccatagtagagatagccaacataggcgatcgggaataatactacggatacttggaaggcgtgcacgccgacctccccttccacttacttccatagatcgcattctactgaatctgactcctcctaatcgtcactacctacactaccacctcgaccacgaccacctaaaattacgtcgagactctcgtacgcgtatatctcttacgttcctctaatgtatccactattacaccaattacaaccatcctaatctacatcgtaaaaatcgcacgagtatacctctataatctcgatagatcgcatgaccctatcttactcatcctcatcataatttccctca

SEQ ID NO: 54341 - DNA, 360 bp, Glycine max
  Clone ID: PAT_MRT3847_20083C.1
aggggaacacaacaaaatcaaaggacaagcctaaaaaactggcaagcccaaccaaaatcccccaaaactttcaaccatgaactgaacaacaacaacaacaaccacaagggcaaccctacaaaaccaactccaaagagattaattttaataacaaatttcccaattcacaagaaaaaaccttgtgggcaactcctcaaaaatgtcaagcttccccaacacagtggccgaaagccccacgtcccgcaaagcacccgaaaaatccaccttttctcacacatgcagactcttgagccaatttcctaaagagaaacgtgcttctgctgagtccacccttggaatttgtggaaaaatggaacctaa

SEQ ID NO: 54342 - DNA, 242 bp, Glycine max
  Clone ID: PAT_MRT3847_20084C.1
ctgctgcgagaagactacagtaaggggagtgaatacaagccaaaagaacatcatggacattgatctatctcctcagtttcccaataaagtttactgtgccaattgtggctcctactacgcatggtccccctccgagcttcccatgctccaccaaagctacatttgtgccgccaagcttgctctcaacataaacgcctttagcccttcctcgttactcggactcgtcaaagtcgcttatgttc

SEQ ID NO: 54343 - DNA, 624 bp, Glycine max
  Clone ID: PAT_MRT3847_20085C.1
aatcgaagaacgccatcattacactgtagactgcgttgtagccatctatgtggggatcctcttatggaagatgacaggttttatctggtcacatgaagctacatctagtaataggaggctgactaaatttgagaagattcaaagcagactaatccaagcttccaaagactcggacattgatgaagtgagggagcttctcaaagagattgagttaagcaatgaagagagcaagaatcagactggaattaaatattcacggttgtttcgtagtgccaccattgtctttgcacttgtcattgttgttctggctttcacactgacaagtgatggatgatcttctggcgatccgaaatttttagattgtcacacatggttttgtccttgcaaattatgttgcgcgaatgctggtgttctcagttttggaatcttgcaaatgtatatcacgtaatgaggctatctgcaaataccccaaaaggcaggatatagtgttcggtattatgactgttctttgatcattgtcatcgtcttgtaccactagacatgtaagatatcttgtgtgaatgaattgcatcattataaagaatagacaacttaccatggatgaaagtcagaaattgcaacatt

SEQ ID NO: 54344 - DNA, 275 bp, Glycine max
  Clone ID: PAT_MRT3847_20086C.1
gctcgagcggctcgagcgagaagacgacagaagggctcgaaggtggagggatctggcagctcaagtagcgcccccaataacagataaagagattatcacaatgatagtagacacattaccggtattctactatgaaaaatggtgggttacacaccttcaagttttacaaatttagtcttcgccagcgaaatgatcgaactgggtctgaaaagaggcaaatttagtcatcctgcttggacgactgataaaactggggcaaatgaagaggatgagat

SEQ ID NO: 54345 - DNA, 454 bp, Glycine max
  Clone ID: PAT_MRT3847_20087C.1
ttggtttaatgatctattggtttttgtaggcggtactttcccttctttgctttgcgaatgcttttgggattattactatagcaaatttggaatatttagttacttggaaaagcttaaaaaaactcaactcttggtatgggtaagtaagtaaaggaactgagtattttccttgcactataagctcccttctctagcagaaacctatattattctcttctcttggttgggtcatttttcggtatgcttgcattgaataattttgccgcataaatgtgattaacagaaagggaaaaggtccatttttttcaaccattccttttttcttttcttttttccaatttggggtggaagaagaaatgagacttccatgttttgtctttccacttggcgttgataactcgcaattctttgtaaaggggaaggggtttgctccattcatcatacacacttggca

SEQ ID NO: 54346 - DNA, 425 bp, Glycine max
  Clone ID: PAT_MRT3847_20088C.1
gcatgaaaccaatttaattgatgtgatttgagtatcacatttgagtcaatccgaacggcccctaccctgaacagttcggaagaaaaaaatacccatactaacgtgacatggcacatagggtgaattccatggccctaacattagggatgagggttcagaagacaccacacgaccccagtgtcatggtttggcaagcatgtccctagcaagaccttcccctcttggacattgatggccaaggagagggaaggaagagagccttattttcaatctgccatgagaattccaactatccaaaataaaatttccagatttcccctctttctatattataagttgctatttcgtgtgattattgttttaaaattgtggtatactgtataagccctctcactaagccagataaaatggtcctatcagctcat

SEQ ID NO: 54347 - DNA, 183 bp, Glycine max
  Clone ID: PAT_MRT3847_20089C.1
actggaaacttttttgtcttaaacatggaagaggggttaattgttacttatccaacagtaacaaacgcgaggggacacgcgtggggaaaccagggaagactgggggaaacaatctcggtgaccaaaagtgtaccctgtggggccctttagggcctgcccgaaatttgcgaggacaaacccatt

SEQ ID NO: 54348 - DNA, 185 bp, Glycine max
  Clone ID: PAT_MRT3847_2008C.1
acgctaaatgtacgctcaaccgctcgcatcacacacactctcacgatcatcgctatatacaccgacgcagtgcaaatatcatgagtacacggtaaaccacacacatacctctaattagaattaccacatatctgcgagacctaccactatatgcacatcaaatgctgatggtctggatcaaaatc

SEQ ID NO: 54349 - DNA, 132 bp, Glycine max
  Clone ID: PAT_MRT3847_20090C.1
ggctcgagctcaaactctgcctgcaattgttaattttgttttcgatacgaaacaaattcaacgggagcttgggggacaccgctgcatcaataaaaccctagcgccaaacattcccttggtactagactgggc

SEQ ID NO: 54350 - DNA, 1551 bp, Glycine max
  Clone ID: PAT_MRT3847_20091C.1
ggaagcaaactagtgattgttacattcgcacctgaatttaacattcatggattctctgcttgactttagcatttgacttgtgaggtaatataatccaaacaagtttcaacagcattctttctgctcaagaagtctttactgcttcaaccagtgaccttcaactttctgtgtcctctccttttaattcagcacctaacagtctgctgaaagtcattgttgatgtccttaatgggtgatccagctgatgaaaatcttgaaactaggaaagagatggacgtgagaaatttgtcatcttcacatggtcaggaaccatatgtccacaaggttggaattcctccaagacaaaaccttttcaaggaattccaatccactgtaaaagaaacacttttcgcggatgatcctctacggtccttcaaggatcaatctaagtcccgaaagcttgtcctcggaattgaagccattttccccataattggctgggggagaacttataatctcacaaaacttagaggggatcttattgctggtctaactatcgcaagtctctgcattcctcaggacattggatatgcaaagcttgcaaatttagatccacagtatggattgtactccagctttattccaccactgatttatgctgtcatgggtagttctcgtgacattgcaataggaccggtggcagtggtttctctcttgttggggactttacttcagagcgagattgatcccattgcaaatccagtagactatcgacgacttgcatttactgccactttctttgctgggattactcaagcaacgctaggggttttaaggttaggatttttgattgatttcctatctcatgctgcaattgtcggttttatggggggagctgccatcacaattgcccttcaacagctcaagggcttccttgggattgcaaagttttcaaagaaaactgatgttatctctgtgatgcattcagtgctgtcatcagcccatcatggatggaattggcaaactatagtaattggagcttcctttctgggttttcttctgtatgctaagtatattggaaagaagaacccgaaattcttttgggtgccagcaattgccccattgatatctgttattctctctaccctttttgtattcttaatccgtgcagacaagcatggtgttgcaattgtaaaacatatagacaaagggctcaatccttcatctgtcaaggaaatttattttactggtgattaccttgggaaaggtttcagaattggcatcgtggctggcatgatagcattgactgaagccacagcaattggaataaaatttgcttctatgaaggattatcaactggatggaaacaaagaaatggtgggcattaggagctatgaatgtggtagaagtaacatgaaaaggttgtgcactccaaattacagtggtttgttttcaatgatcttcttatcaaaacccaaccgtctctttctctcgctaattgaaaattctcttcttgttttgtaaaataagggccagttccccccttggagatggtctgtttttccctaaccc

SEQ ID NO: 54351 - DNA, 264 bp, Glycine max
  unsure (1)..(264): unsure at all n locations
  Clone ID: PAT_MRT3847_20092C.1
gggcgtgtggcagaatgaccgcgtggagatcattgccaacgatcanggcaaccgcacgacgccgtcgtatgtggcattcacggactcggagcggctcatcggcgatgcggccaagaaccaggtcgccatgaacgcgcacaacacggtgttcgacgccaagcgtcttatcggccgcaagttttcggatccgatcgttcaagccgacatcaagcactggccgttcaaggtgacgtctggtgccggtgacaagccgcagatcacggt

SEQ ID NO: 54352 - DNA, 152 bp, Glycine max
  Clone ID: PAT_MRT3847_20093C.1
ggcaagtagactacaactgttcatatatgaattgtttttcaagtatctttcattgttttgtgaaagctggagaaaggaggacgtaaatgaattgacctattcatcaattattccaattcaactttactaatgtttcaatcttgcttgttaag

SEQ ID NO: 54353 - DNA, 765 bp, Glycine max
  Clone ID: PAT_MRT3847_20094C.1
ttttttttttttttttttttttttttttttcgtcaacaagattttatatattatctagagtggaaaacaatcagatgatatggttatgaaatagtattgacatgtaaacttgataatcacaaacaagacagacacacagactactcatatatgtggtcacaaatattagactagacttgtattagctcgctttgcatctttcaaaggagctgagagatatgacactacacatgaaatccaaagtccatactgaacttgtttaagttgatttcaagttgtcactcaaaagaacttgacgaaccatattatcataattaagaaatgaagagccctctttgagaatggtggcatcttctgccagtttcttccattccaaggctttcatggtcaactctttccccttctgcccctccatcaactccctcacaagcctctcaactctatccctcgtaacatcaccttctatctgcatcccaacaccccattccttgcaacagaatcgacaattagtcggttgctccgcaaagaaaggccaacatatcattggcactccattgcacaaactctcaattgttgaattccaaccactgtgtgtcaagaaccctccaattgcagggtgtgctagcacttcctcttggggacaccaacctgacaattgacctctatctttagtctccaacacaaactcgtaaggaagaatcgtgttttcgtccacaagatcaggcctaatgacccacagaaaggttttgccctcgtgccgaattc

SEQ ID NO: 54354 - DNA, 565 bp, Glycine max
  Clone ID: PAT_MRT3847_20095C.1
ctttttttttttttttttttttttttttttttttttttttttttttttttttttttttttttttttttttttttttttttttttttttttccccccaaaagaaaatatttcttttttaaaatgggcaataaaaacctaaaaacaacgggggggccccacccccggccttggaaaaggggggcccctttaaaccaaaactattttcaagggaaaaagggggggggccccccctttaaacaaaggggggggggaggttttcggcaaaaaaaggctcccaaaaaaccatatagaggggggttttggaagtttggtttttaaaattcacaggttgggcgggaacccagaaaatggagcccggcccggggggccccaaacccgggaaaatttggccccaaagacaggggggggcccccccccccgggggggggaccccttaggctttttaaggagggggaacccaggcccaaaacccgggttttggccctaaacccccggaaaaggggggggggccaaaacctttttccccttaagggggggggatttcctaaaacggggttttacctcc

SEQ ID NO: 54355 - DNA, 963 bp, Glycine max
  Clone ID: PAT_MRT3847_20096C.1
tacggctgcgagaagacgacagaagggggccgagcgtgtctctccgcagcagccttcttcgccgtttcagctcaagagccaccagcaggtaagatatggttaagcataacaacgttatccccaatgggcacttcaagaaacacggggataactatgttatgactttaaccatcttacctgcacggaagaccagaaggcgtttagctcggcagaagaaggctgtcaagattttcccaaggcctactgctggacctctcaggccaattgttcatggccagactctgaaatacaacatgaaagtcagatctgggagaggattttctctcgaagagttgaaggctgtgggaattcccaagaaacttggtccaactattgggatttctgttgatcaccggagaaagaatcgttctttggagagtctgcaggccaatgtgcagaggctcaaaacctacaaggctaagttggttgtgttcccaagaagggcacacaaggtcaaggctggtgattctacccctgaagagctggctaatgccactcaagttcagggttcattcttgcccattgtgagggaaaagccaactgttgcccttgttaaggtaacagatgaaatgaaggcattcaaagcttattataagcttcgttttgaacgcaccaacaaacgccactacggtgcgcgcctaaaaaaggccccagaaccaaaaaaaaaggccaaaaaatgaggtccttgaaaagacagtttgtaattcatattaaagttgtgagaaaattttgtttgatgttctgcccccttagctttccggcgaccataagttttaaaaccccgctattgcaattgtttttttgaattgaagtctgttaattttattcgccccctggtttgttttgataatttctttgattttgcccttaaaaaaaaaaaaaacccccaaaaaaaaaaaaaaaaaaaaaccaccccaacccaag

SEQ ID NO: 54356 - DNA, 516 bp, Glycine max
  Clone ID: PAT_MRT3847_20097C.1
aggtgtgtgaactccaatgcattgattgctgctgctgctgctgctttgtttgaatgtttggatgttaatgctaggaaggcaactcccctaaggctcgctactttgcggcttttgttcctctcgtcaatggcttgaggcttttggtcaatggtctctcactggcttctgatgagggactcatcaaatccgtcaccagagaaggagatccactagaattgctaaggggtcccctttattatgttctgatactgattttatctgctcttgtgttctggcgtgagtctccaattggtgtgatctccttggcaatgatgtgtgcaggggatggcatagctgatatcattggtagaagatatgggtccatgaagattccctacaatgaacataagagtttagccggtagcatgtctatgcttgtctttggattcttggtttcaatagggtgtgttacaatcttatccaacttttcaacacaactttccgttttttacacataaggaaattggcttattgatc

SEQ ID NO: 54357 - DNA, 1376 bp, Glycine max
  Clone ID: PAT_MRT3847_20098C.1
gagtgagacattatagtattgaggtttggctcagtgatgaacatatatgattcatttcacactaatgaagaaactgaatttcactctttgagctaaggtaggtggtctgtgaatacacacacgcatgtctggccagggcttgaagaaagtaaaaaagggaaggatcctgggaaaagtaaaagcatgattgtagcagctgaaggattatcattaatatagccactggggaatctcatacaacaaaaaggaatggaccactctctctctctctctctctatctctatctctctctgctttcaattggcttgtaggtaatatggtatacggtcaaagcaggtcaaaagcttacaaaaggacatcattggtcaggctattgcatgtgggaccacccacagcctaacaccctcctggggaaatcaattctgggattttgtgtttttctcttcttcttccccctcaacaacatttcactgcacttaattgcaatctttttttattactactataaccattgcaatcaacccaatattttctttctaaatgtttaaaaataaagtataatttcatttcgtataattaacttttaattggcattttcctttctcatgtgaacaattcatacaagtaatatgtaaaaggatctttgttaattataagtatcttagaacactaattagttaacattaaccttaatttccttaaccaattagaaaagcttgggcaattaattaaggtaggaactgcaaaataaactgcacttatattggagaaagctcgagccgaatcggctcgagcagagaataaaattattagagtaatcatatgatgtaaggtgctggctaggcccgcttcctcagtgtttgatgcctctgctggggtgtactcttcaagtctgagaaagtagattctatactattcctgtctcactttcgccatgggaatatcatttgcttttttcttatgtccaaggatgaataataatgaatttcactttacatcttcctttctctatgattcttctcagtttaataagttttcctagctacctggccttaagaatttgtaatttttttgttcatatttttttatatcatcgatcatgccccatgtcaggttcaaccattcaaatgaatgatgcacaacaaagtgtggacaagaatgagtaatttttttgttcacattttaatttcttaccttctagttttaattaagagagagatttcagtttcacgttgaagttcatttatatatggacaagaatgatgcacaacaaagtatgttgtgttttagttttaaatttaatttcatgtaagttttttcttcatgaagtctttattcttatcactaaagggaaagcagtttagtttgccgaagc

SEQ ID NO: 54358 - DNA, 315 bp, Glycine max
  Clone ID: PAT_MRT3847_20099C.1
ttgcgttttgactttctctatctatctttagtggtcgtgggacacacacacgctaatcattcgactaggccgcatgtgagtgatagagaagaatctctcactgatccacacacaatccagtgcaaaaccaagcacagtacagcgcgcgctcttgttgtgatttgcgtaacaagcaaccaacctcactcacacacagcccttccataataaaaataaatttcatgctctcttcttcaccccaaccaaaacaaacagggttgcatattcttaactggagccacaatctgaaggtgatttcatcccaataaaactaat

SEQ ID NO: 54359 - DNA, 307 bp, Glycine max
  Clone ID: PAT_MRT3847_2009C.1
aaaaaaactaaaaaacaaaagaaaaaaaaataaaagtacaagaaaaaaaaaaaaaaaaaagggatggcaacactggctaaggagagcatactatctagctccatctaccgacgaacactgggctctcctgccctctcgttcccctgttttctgcccccgtcttgcgacgtccttccttcccgctcgccgtctttatcttccactccctgcccgctgggtgcccatggtgggtcttgggaattccttggtggtccccaatttttttccctttcggaatttcctcttcttgtcccttgcttttatccct

SEQ ID NO: 54360 - DNA, 623 bp, Glycine max
  Clone ID: PAT_MRT3847_200C.1
aaaaatgttcagttataaaatgagatgaaaatgtaaaaccaaaacccagctctctcaagacctgagtttcaagatcatatacatagattgctgatctcaagaatcctttgttagtttgtattagaagtaaaaaagtgactcaggagaagccaaataaataaataaataaatcttatgaccatgatttatgaactctaaaaaataggacatgtattaactctacattttaacaaaataaacaagaaaaacctatgatcgctgatgttaagacaccagacaatttcatgccccctgtatcttactcagctggggaacatcttgaatccaaatcactactagaatcagtttgtcaactgtcattctggaactgttcttccattttaatactgcttgggccatcatgctgagctcgtgctgttgtcaccggctacccaatactgcttgacagcaaacaacaccttctctgaaaccagcggaccgtcctcatgatccaccattttggtattccatctcattcctttcacaattcctttcacttgcattagcacatcagcttgatctcggaatattactgctccttctggccgtaagatacggtccatctccaatagaatgtcttcgac

SEQ ID NO: 54361 - DNA, 413 bp, Glycine max
  Clone ID: PAT_MRT3847_20100C.1
tttcagtatcacataggaagaggtcatattggagcaactatgaaagcaaaactttatcacttgctggagcatagagcttcagaatggtattcatttttatcaatattgatactatgaatttgtgctattctagatttccagttctcagcattctttctttatccttgcagccgatattttgtcattcctttatggaggggaagtggatacacgacaatgtttgttcaaggtttgacaaaaatcactctcttatttatgtgtaaaaaatcaataattgttttgacttttaaatcaaaactgtgttacacctgattgctaatttgtatttgggaagaccaaaagagaaatatatatttccccattttatgtaggtattattatgatattatctattacttggatgggcgtatatg

SEQ ID NO: 54362 - DNA, 144 bp, Glycine max
  unsure (1)..(144): unsure at all n locations
  Clone ID: PAT_MRT3847_20101C.1
tctcaaannggtgtttagtcttattttattaacttttcacgcccccaaacaaaggccttcaaattcctttgtttgaaggcaactgtgtgttcctgcttacattcaatgacattgacagtgcggttccttattctaattgcgtaa

SEQ ID NO: 54363 - DNA, 246 bp, Glycine max
  Clone ID: PAT_MRT3847_20102C.1
cgattgggacacaaggtaattacgttgtctagataactagaggcagggtcatgaatatgaacgtcctggatctgttaattgctacaaaacttgtagcatgttaatgccttgcgtacaatatgttcactcttccaatgatcactgactatagtgcccgtacttccaaagtgaaatacacaagatacatgcttgctgtagaaccgcgcaacatctatgacttatagaccattcatgatcagtgcgttg

SEQ ID NO: 54364 - DNA, 996 bp, Glycine max
  unsure (1)..(996): unsure at all n locations
  Clone ID: PAT_MRT3847_20103C.1
atttgggggcccccatngaaaaaaaaataatttttnnattaaaaccnatnaataannnnanantaaggaaaccccntncncanaanannatattngncatcntaaaataaaannaantantggtangnatgattacnaaatgnancatttttttttttttcnnacataaatcncanntncnctnannnantacttcnaagnaatacaaantanacnntaaatttnatnntanatcttntcncataataataaaanatnttanatnaaantanntaataataatatananctcangtgtnanatattatttatttaatnaaaattatatanaatactatcattaaattatnnnncaaaaaaaannccnntagnatanatnataacatcactnaactnncnaaacanatnttttttttttattttttataanttcnatacgnaacnanatacangnaattgantncttatnnnagtaataacatccacatnnttcacattanataccncntaatgntnnnactcntaatnncacataccccanntannanntntaatttnnaantanataattnctannaanaaaaaanataantnancatattaanntaaantatnaataataatattcaaaatatatttaaaaaacaacatctaatactcatatnatntaatncanntttataaagnaaagatnccntntaatanatttatatcntaanttnnanattnatntaanaaaatanatntnttnncaatcaattncaaaacnanngantaanttntaatntctttncnannnganctantaaaatnngttantgataatatattananntctatcananatntntanancantattgnagataacnaattantaatanctnnatattatttcacatntanactannntnnaanaatnattnannntanatatatctttattatntttaanattnttaataacaaaatcatctcattntattaaatctaa

SEQ ID NO: 54365 - DNA, 783 bp, Glycine max
  Clone ID: PAT_MRT3847_20104C.1
ccagcgttcccgcagcatgtctgtcagtcctgatcgtgttcgtgtgaggggcagatctccagcctttaatgcactagcagctaattttgagagctcaaatgctaggaacctttcaactccacctccgatgattagaaaactgtacccaaaatctgtggcacaggatacagcacaactggcaactaaatcttcagccatagctcatcttacttctagttttgaactaacatcagcacgagaaaatttgattcctcggtcacaaaaagcgagttcagttacccccaaatcaaaccctgagacaagtgatgaggagggttctttgagcagcaggatagaatctcttaccatacaggaggatgcgaaagagggtgaagctgaagacgatgaaggtctcccagtttacccgcatgaacgcgttaacacagcttctacagatcctgtagaagatattgacgtgactaaacgagaggcttatctgtcatctgcagagtttcaagagaaatttgggatggcgaagaatgaattttacaagttgccaaaatggaaacagaacaaactcaaaatggcagttcagttgttctgagttaaatcagtaagaaactgaatatatggaagtgaaaggggacagcatgagcgtttttttttccttcttttaacatagctgcttctactccgaagaagctccttttgaggaagaaaataaataaagaattcttccttggagtggtttgatatttataggttctttctttgttgagagctgcttggtgttaattttatagg

SEQ ID NO: 54366 - DNA, 401 bp, Glycine max
  Clone ID: PAT_MRT3847_20105C.1
gtgcttttttacccttctcatgattttatttttctcaattcaacaagtttgatttgatgcttaaattgtttcagtggattgcaccctggtctttgtttttcagtatagggtccattgttcgttgattattcaataatgattcttggagagagatttaatcgccattggaatttctgaaaatttccactggaacgatttagccaatggttttatattagaatttgctgaagaggttctgggaattgaagatgtcaaaacaaaattcacactgattgtctagcggtgttgtatagagctttataataaagcatgaatgtcttgttctgaatgcaattttgtttttatttacacagtttctaggatttttttcccttaattaaatggttactgatttagttatt

SEQ ID NO: 54367 - DNA, 146 bp, Glycine max
  Clone ID: PAT_MRT3847_20106C.1
ctcataagtattatttctcatggatgcgagaagaataccctaaggggggaccactattatgctggagctcttcaccatccaaatactatcattgcgttctcttatacctacaaacttcaagcctaaataacacacactaacgcttc

SEQ ID NO: 54368 - DNA, 1344 bp, Glycine max
  Clone ID: PAT_MRT3847_20107C.1
ggctcgaaacattatatcttgaacaaacaaaattgattttggttatcaagtcaaagttgtgacctagacattgttagtgcagtgaagaatcacataaaccaaaccaactggacatggctccacattgcaaagaaacataacatgtccagcttccccctccaactttggttaatttgatccataaagaattagaccatggaacacttagacatggtgagtgaagtgaagcaccaaagaatcaaaaccaacgggatatggatacacgtggcagagaaagggacaggtccactagttctgcttcttcatggcttcccagaaacatggtatgcctggcggtcccagatcaatttcttggcccagcatggctatcatgtgtttgcacctgatcttagagtatatggtgactctgattctgctattgatcccactaggttcactatgcaccaccttgtagttgaaatcatgatcttccatgattattttggtcgataatagatatttgttaattgatgtggttaggaaggtatcactgtttggcatctgagtctatttaggcatgacagagtcaaaggatttgttgccctaagtgttccttactaccctaggtctccaactgctaaaacggttgaaactatcaggaaattaattggagatgagagtcatgtctgccagttccaggaaccaggaagagcagagagagcttttgctagatatgattatttgacagtgatgaagaagtttttgctgataacacggacagatattctagcatctccaccgggcatggaacttgttgatttcttgccaacgccttcggttgtgccatcatggataaccgaggaagaactcatggtctttgcagataaattccaagagtctggtttcactggtccactcaattattaccgtgcaatggacttaaactgggagcttcttgcaccatggcaaggatcaaagataacagttccaacgaagttcataggaggagacaaagacatcggttttgaaacagcgggtacaaagacttttgtggaaagtgatattttcaagagccttgttcccaaccttgaagtagttatactagacgcccaccattttattcatcaagaaaaagcccaacaagtttcacatgaaatcctttccttcatccgtaaattatcccccaatgcttccatataatattagctatttatagagaattgttgattgttaatgtaaacccctttgtctaggttgtgacaaggcagtgtagtttttacttactagtctgattttcacaaattatttaaattagtgattcttcatttgcttttattgatattataatttaaagattcaatgaac

SEQ ID NO: 54369 - DNA, 790 bp, Glycine max
  Clone ID: PAT_MRT3847_20108C.1
ggctcgagattttgagacaccaaggacttgttaagccaaaaatcatggatagaattaagtccaagagtgagatgtctctttgcgagaaatcgatgcaggttgtagtaaatgtcattaggttttcctctttctctattgctcagaagactcttggagctaccagtacaacaaaggctggtccagggtctgatatggaccctgatgaggaaccactggttgctgttcctgatcagttcccagcagcaagcaaaaggtcacaacagccacagagccgcgccaaccccacatatgtgatcaagtcagctggtagcatcggatcaaccgaacatttgatttatcaagagagagtccctggtgatgttaatccaaagaaagagcagtgtgttgatggattggcttctgactatatcagtaagatacgtaacaagctcgggcgtggtgtataaggagaaatcattacatgtttcaggaccatgtggtcctggacattctctgcgtgacatgtaactacatattttaattcacgaaaataatatgtcacatggagattgactgagaccaacatagtcttggaccatataataatttcttgtgtataagaagagacttgaaattaaaagtcttggcttatgtgctcctagtaaaactattgtcttcatagatttatgtgttccatgtattatagtactacttacataagcagccattttggtttgcattaaccagctgtaataaacttagtagttgttgggatctctagctaaaagaaatgatgtggctgtttctgatg

SEQ ID NO: 54370 - DNA, 804 bp, Glycine max
  Clone ID: PAT_MRT3847_20109C.1
cataagtacaatccttccgaaagaatcaatatgcatgccaaaaggttgtgcctatataaagaacataagcccttgcaaattagtagtcatgcaaccatgacaacaaattaagaaccaaagctttgtatatagctagattttttaaggagagctagatgaacagtaataaagtatatttataagaggagaaatagtgttgaagaaagtgctctcaaactacctgggaggtcccaaggttcacacttgttgagatcaacaactgctatagctttggatgtgaagctagaatcataaaccttccttgtaagataacatgtgatgagctcttcatctgtagggtggaacctaaatccgggaggcagattttcctccatcagattgatgaaaccaaccagcagattttgatacccccttgaattgaagaagtttagtttaccaaaaactgaagagggagcaccacaaatatatgagaagtaccaatgagttgtcctcacagtaagctcaatacatcaccaataagagcttttaaaggcctctttactttatggttttataactcacccttcaacaagaagcatttcatagatagccttcttcatgtttttgttaaatatacagctaaccctttgacaaacatggtatcatatcttaattaaactttttttttcctttttaaatattactatgtagcttcagctataaagggtatagatttcccaaattgatgcttggatttacttatatttactggacaaaccaagaattaggttgcgaccttgactctactggaaaaaaaaaacaaaa

SEQ ID NO: 54371 - DNA, 424 bp, Glycine max
  Clone ID: PAT_MRT3847_2010C.1
ctctttgtttcctctatgactaacttcctacccactattgatcgggtcgtcaattgggatcgtgttccattaaagctttctagcggcgctgattattttactagacgaaaacttcactgggctctaaatttagcggcatgagtatcacttaagttgaaaattacgcccttctcattgattgggggtcaagctttctccactgccttaaacacaccaagggtcttggtttaaacaggtttctaagctttctatacaatcttcatgacaccatgattgccgtccctactgagccgccgcccctgatcagatgattaacgtcccagatcaactgtagctccgcctgatgcctgctgctggggctgtgggcgtaccagagacaactattgccgttgtacccttgcctcggacgaatatttctgctgtt

SEQ ID NO: 54372 - DNA, 835 bp, Glycine max
  Clone ID: PAT_MRT3847_20110C.1
taataatggaaactggatgtggctttcttgttcatctttcttttatctcgtggcgacctgtttgttcattgggaaaaaggacgagatgtcttcgagaggcttctgattgattcagattgggcaattaataatggaaactggatgtggctttcttgttcatctttcttttatcagtataatcgtatttattctccaactacatttggtaagaagtatgaccctaatggcgactatattaggcattttctcccagtcttaaaagatatgcccagggagtacatttatgaaccctggacggctcctaaaagcattcagaccaaagcaaattgcataattggcaaagactacccaatgccagtggtttctcatgattctgcgagtaaagagtgcagaaggaaaatgggcgaggcatatgcattgaataaagaattaaatggtttggttagtgaagatgatctgaaaaatttgaggaggaaattagatgagagtgaagggcaagaggctggagctaaaagatataagcaacagctgattggctgacccaaaattttactcgttttttcaactgccgtgctttgagttgcagtttatacgtgttagggatattttattttatgcattatcaagacatttgtatgacacatgtatgtatgtaacatatttcgtagacatagacgccaaattggaagcagtatggcacattatattttgcatatatactaaattatttagttcatgtaacccaaaaaggctttagtgaaacttacatcaaaagacatcgaaaaaatgtgtccttgaggtcattataataatcgcccccgccattattctttcc

SEQ ID NO: 54373 - DNA, 722 bp, Glycine max
  unsure (1)..(722): unsure at all n locations
  Clone ID: PAT_MRT3847_20111C.1
gcttgatcctctgagcggccgcccttttttttttttttttgatccgcacagataatatatatatatatntatatgatatatatatatatatatatatatatagtgagtaccagaggtacaaaccagcacttgtacttagattgccagcagcatggctccaagctcaaactaagctcaccctcgcatggaaccaatagctgggtacaacaatgatctcctgctcccacttcctatgatgtctacccccctgaataagcaaaccctgatgcgatgcaatcttttcttaccttaaggaaatccacaaaaactaattgtgatttatatccaattggattcaatttctctagcacacaagaatgggttaattaaacacaaattcttgatctaagatgagctgcttgtcgaaaatgttttttttttcctttaaaagtataaaaaatccaaaatgtgtctaatacctttatagcaatgcaaaattttgcaatatgcaaaggaaaaggatagcattatgagtatgcaccaattaaatacacaatgccactcattaaaagaaaagcttaggtcaggatctatgactttgcgaatgagaatcagaacatgtacgaaaaacacaaactccatgccatagtaaagattgaggaagaactccttatccctgaaatgaccctccgctatatgatgcatctttttttctcatagagccccaaaggccttataaaatt

SEQ ID NO: 54374 - DNA, 424 bp, Glycine max
  Clone ID: PAT_MRT3847_20112C.1
aggaatttcaattcaaaaatcatatgtagatccctccatcaactatccaaggaattttcgaagagcactaatggtctcatggtcccatcttatgctttgtagaatcaaaaaaaaaaataaaaaaaaaaaaaaaaaataaaaaataaaaaaaaaaaaaaaaaaaaaaaataaaaaaaaaaaataaaaaaaaaaaaattataaaaaaaaaaaaaataattcaaaaaaaaaaaagattatcaagtaaaaaaaaaaaaaggtcagaaatatgggtgcaattcgtaattaggcttagcacatttgacagagcatcttttcattattatgtgcagtcacacattcaattttaatgaatatcgtgaacgtataatcatgccttctgcatcaaacaagcaggggagacctattatcacttgtataaaagttt

SEQ ID NO: 54375 - DNA, 240 bp, Glycine max
  Clone ID: PAT_MRT3847_20113C.1
aaataactagcatagaaatgactagctattatcaatcccgaggcaatgtatagccctggaaggtttagggtgcttccatgcattttagctagcattttacatatatcacatattaaaggcatatatagtatgtcctacttatgtttgctagaatgttacgttgatcacatttaaggtattatttatttttacacttatagatctttacgattttgccctttaaaatatgtctcagtaaat

SEQ ID NO: 54376 - DNA, 581 bp, Glycine max
  unsure (1)..(581): unsure at all n locations
  Clone ID: PAT_MRT3847_20114C.1
gctatgaccgtcgcatgccacgcgtaccgtaagcctcagtgaattcggcttcgagtactatacctatgcatgtagaagtgcgagttgtccttttgttaggtagttgcttagggaactaggttttcctaggccattcagtttgtagtcttcatctaaagggtgaagagacggatgacgaagtaacccgtttctacccttgatgaagctctaacccagcttccaaacctcttctttgagaacccaaaacgagtgcgcattcgtcgtccttccagaagattcagaccaaaccgctttccccgacaacttggagaaccccttcgagaactacccggattagtcccaaagtttcagtcatgaaacccaacaccaagtccttcttcccccaaccatgccctgacgccgatttccttcctctttggtccttatgcgggatgagcncanntacttaccttaggtgaaccaacgaccgacatgagaccctcctacaacnncttcaccctgggcgattgcccanngagaatcccagcttggaacccacttnactatnttggggttaaccctcacgacccaccaggaatctc

SEQ ID NO: 54377 - DNA, 429 bp, Glycine max
  Clone ID: PAT_MRT3847_20115C.1
ttccaggaaggtttcccgtcatcactgtatgacgtcctccttctttgggggggggggggggggggggggggggggggggggggttataaaaagattggcccagagataggtgagagcacctacagaaagataggtagagggtacacccttagggttataggtttgttttggcccgtaaagatacgggaaaagagataaagaggtggcgcgcccaatttaaaaaaaaaaaaacctaggaaataagggtttttatacccggaataagagatgttatagccggcctagccgaaggaaagttcacctgtggaaaaaatgggtgtgactggaaaatgaaaaaacctagtatggtttagaagagttaatagagcccctaaaaatgtaggttagcccgaaatccctttccaaccttattaagcaatatacgtaggt

SEQ ID NO: 54378 - DNA, 355 bp, Glycine max
  Clone ID: PAT_MRT3847_20116C.1
gaaatagatccccaaaaacattcttctcactcctgttttggtacaagtttctttttcattatacagcaatctgtatgggagtgagtcttgtaccatatgcaatttgttgacaactttctcattgtgaaccttggcggaaaggagaggcacattgactggtatacatcatatgacaagaatgatatcctgtttttccttgaagcagtacttgaatatgtctgaaattgagctaaggaagccattctggttactagtcaaaagattagggtttcacattacccacaaatctgcaaatgggcaagcagtttagcatactgcactctagctttgcatgttgagtctataagtggaaaag

SEQ ID NO: 54379 - DNA, 404 bp, Glycine max
  Clone ID: PAT_MRT3847_20117C.1
aattaaagagagagattgtaaataaacagcatatatattcaaattaaaaatgacgttactaggttctttgtggctcatcctagttgcagccttgttgggttatgcatttctattagggcttcttaggagagtgaatgaatggtactatgtttctaggcttcagggaaagttgcaacaccctctcccaccaggtcatctgggttggcctttattggggaacatgcccaccttcctcagagcttttaagtctaaccctgattccttcatctatgaccttgtttccagatatggcaggacgggtatgtacagaacgtacttgtttgggagccccagcatcatagtttgcaccccagagacgtgccgtaaggttctcacagatgatgaaaatctcaagcttggatacc

SEQ ID NO: 54380 - DNA, 495 bp, Glycine max
  unsure (1)..(495): unsure at all n locations
  Clone ID: PAT_MRT3847_20118C.1
ggctcgagaagaatgcccatcttctctgcaacgttgggctccttcacttccatctcctcctccttcctctcacagtcacacctttctcctttcgtgaagacaccttgccaatggcagcatcactatcacactgctaaagtcttggtctctgcctctggcaatacccaaattgaccaaaatcccgactctggacttcttcaacgccctactcctccagacccactcgatgacgctcgtcaggctcggtagagatcgtcagattggaaggctgcaaagacatatcaagatagtaaagtcatttataatggtagggttgaaggttttaattctggaggcctgctggttcggttttattctgttatgggctttctcccattcccacaattgagtccagtgcatgcttctaaagaaccagagaaatctatccaagaaattgcacaaggcttaattggttcaatcatgtcggtgaanggtattctagcagatgaggataac

SEQ ID NO: 54381 - DNA, 450 bp, Glycine max
  Clone ID: PAT_MRT3847_20119C.1
aaaaaagaaaccggaacctttttgggttaacaacaaaaaaaggattgggaaaggggaaaaaacccacccccaaaaaagacgaatttaaagaaaaaccccccccccaactaattacaaagggggcaaaattgggggccaaaaaaacacttttttttttatcaggaaaaaaaagcctccaattccccaacgaatcaacgaattggaagattaccaaataaacgggaacaacttaaaaaggaacaaggcatgggcccttttgggggtttctgggcaccacaaaaaaaaaactggaaaggggcaggggcaatccttaaaggccttatccggggggaccttcccactcctaaaagggacaaaagggccatttttcccctaaacaaaaggttaatacttcaagaaaaagggggggggcaaaactccccactccaaaacaaaaaacaaaaggggggg

SEQ ID NO: 54382 - DNA, 918 bp, Glycine max
  Clone ID: PAT_MRT3847_2011C.1
cccacgcgtccgggcaattattcaccgagatattaaagcatctaatatccttcttgatttgagagtttgaacccaaggtttctgactttggcttggcaaaaatcttccctaacaacgatcgttgcattagtcacctcaccactcgagtgatgggaacctttgggtatctagctccggagtatgcatcaagtggtaaattgacagataaatcagatgtatattcctatggcatcatgcttttagaacttataaccggacatccaccaatcactacagcaggatcaagaaatgagagcctcgtcgactgggctaggccattgcttgctcaagcactacaagatggtgacttcgacaatcttgttgatccaaggttgcagaaaagttacgaagctgatgagatggaaagaatgattacctgcgcagctgcttgtgtgcgccattcagccaggcttcgacctcgaatgagccaaatagttggagccttagaaggagtggtttctctaaccgatcttgttggggatgttacaacagggcttaccacagacacggtatacaattggtcaaatattttagattatgatgctggccattaccagcaggacatgagaaatttcaatttggcattatcatgtcataaatacagctccagcgggtatagtgaaaccactagtgcttatgggcttcactcatcaggctcaagtagtgaggctcagcaatcatttcgagacatagtataaaagaggtcaaagatagtggaatgtattgtgaattctgaactatggtaattatgttctgctcaagatgtaaagctcgtactgtccagagacttgagtgactagatgttcaaattcttaatcagttttcaattttttttaacttattattaaaagcttcctcggcgtactgaattagaggttt

SEQ ID NO: 54383 - DNA, 668 bp, Glycine max
  unsure (1)..(668): unsure at all n locations
  Clone ID: PAT_MRT3847_20120C.1
tacaataatacacttgatgtcccaggagacaaaagtctcctatagagaatatgctctgtccacaagctgcaaataactacacacttcataattacgcagcctataatcagatacattctaatacataactggcagcagttgtttcctatacattactggccatcatgcaatttttaatatagaactgctttctatataaaattgctaatacagaatcagctattttctatcacatgtactcctaataattaactacctccaatccattaatggatcctttcctaactaacatgaatcttagttcccatcatcaccgcttgctgaaaaatcagccttgtccctaaggttgaacgtaggaaatgagttcttccccgttatatttatccacttcaattgcttttccatcatcatttagggcttcattttctcccagaactagaatttagaaatcacaattgtttctcttctccacactaaagaataaaaacccttggttttcctttttatcaattcttggtatgttacatggcacaggcaaatgcttttcatgccaaaattacacctatctccatacatattttgcccagangnnnctgaacttcgannnanttttttgttatgtgcatttctggataacccagttcaaatttctgaattttttcctccat

SEQ ID NO: 54384 - DNA, 482 bp, Glycine max
  Clone ID: PAT_MRT3847_20121C.1
ttccaggaaggtttcccgtcatcactgtatgacgtcctccttctttgggggggggggggggggggggggggggggtaaaactaggttgtttattagaggaacatgagcgatggaataagggtaacaagcgctttaacggtaaaaacaacataacgggcagatttaaaatagaaagaaaataaataaaagacgtccaaatagaaatgacaaatgagaccctagagtggggtaggcaaagggtaaaactcgtccaagtagaaaatggaggtaaatttttaggccggggtttgatcaatggttgttgtggttgtaccccgcaacgtaggtggcagcggcaagcgtgcgtaaagggttgtaccacgtgggtttgcaagtagcgtcatgatgcgtgcctacgaaccgttaaaccatgtggcagcggtaacgacgggctacttcaagcacagtcaacacacgccttgcagtaatcggcatcaaagtta

SEQ ID NO: 54385 - DNA, 169 bp, Glycine max
  Clone ID: PAT_MRT3847_20122C.1
accaggtttaataacactcgccatacccgttaacaagcctggtagatttgagagtttcttcctatctagcactgactctcggcggtcctacttgccaggattcaccaggaacattttagaggcctcctacgataccacattcgaggagataaacaaggttctgattacc

SEQ ID NO: 54386 - DNA, 2290 bp, Glycine max
  Clone ID: PAT_MRT3847_20123C.1
ctggtaccgcctgcatgcgagaagatgacagaagggccccacatccgccccctaaccaccacgagtttctctatctgctttcttcacaaagagtaactcagtcttctaaaaactttctcaaaaccattattattctctaatctttcgtttcttcaattaattaattggtttcttgctatggctgtggactctgcgatttcgtccccattgggtcccccggcctgtgagaaggacgcaaaggcgttgcggttcatcgaagaaatgactcgcaacgccgacgccgtccaggagagagtcctggaggagattctcacacgcaacgcccagacagagtaccttaaacgcttcgaactcgacggcgccgccgaccgccaagccttcaagtccaagattcccgtcataacctacgaggacgtccagccggagattcagcgcatcgccaatggcgaccgctcccccatcctgtccgctcaccccatctccgagtttctcaccagttctgggacttcagctggggaaagaaaactaatgcccacaatcaaggaagagctggatcgtcgccaacttctatacagcctcctcatgccagttatgaacctttatgtgccccggcttggacaagggaaagggcctatactttttgttcgtgaagtccgaaacaaggaccccgggtgggttactggcccgtccggttctcacaagctactacaaaagtgaccatttcaagacccgaccctatgacccgtacaatgtttacacaagtccaaatgaagccattctttgctcggactcattccaaagcatgtatactcaaatgctatgtggcctcattgagcgccaccatgtcctccgcctcggcgccgtcttcgcctccgggctcctccgtgcaatccggttcctccaactcaattggcccgaacttgcccatgatatccaaaccggaaccttaaattctcggatcaccgacccggcaattaggagttacatggacaaggtgctaaaatccgacccggaattggcccaatttgtgacacaacaatgttccaaggacaattgggaaggaatcatcacaaggatttggcccaacacaaaatacttggacgtcatcgtaacgggtgccatggcccaatacattcccactcttaactactacagcggaggagggttgccacttgcatgcaccatgtacgcttcatcagagtgttactttggactcaaccttaatccgatgtgcaagccctctgaggtttcatacaccattatgccaaacatggcatatttcgaattccttccccacgatcctaagcctggctccaccagttcaaaactagtggagttggcggacgttgaagtggggaaggaatacgaactggtgatcacaacctatgcgggactctatcggtaccgtgtgggcgacatcctccgagtcaccggtttccacaactcggcaccacaattccacttcgtgcgcaggaagaacgtgttgctgagcattgactcagacaaaacagacgagtcagagttgcaaaaggggattgagaatgcctcaaagcttttatcagagttcaatacaagcgttgtggagtacacgagttatgcagacacaacaacgattccgggtcactacgtgatttattgggaattgttgaccaaggactcgacgaactcacccagtcacgaggtgttgaatcggtgttgtttggagatggaggagtgcttgaactcggtgtatagacaatgtcgtgttgctgatcattccattggcccattggaaattcgtgttgtgaggaatgggacctttgaggagcttatggattatgcaatctcaagaggtgcgtccataaatcaatataaggtgccaagatgtgtgaatttcacacccataatggagttattggactctagggttgtgtctgtgcattttagccaggaattaccacattggacccctgaaaggaggaggtgaggttcttcgtatgtggcttattgggcttgagtcaaacatgtagatgtagattttatttgttgttttttttgctaaggttttgtattttttgggtagtgtgtaggactcatggtgagtctacatggagatgttgaattaggatgtctcttggttggattaattatgtatttcggttcgattaacttgtgtaaaagatgtgactttttttttttttttttccttttagcaaagttatatgttgtatgtattggtctttccatgtagaagtgaagaaatgtaattgagcagaggatattttcttttggcaagtaaaaaaaaaaaaaa

SEQ ID NO: 54387 - DNA, 1224 bp, Glycine max
  Clone ID: PAT_MRT3847_20124C.1
ttacggctgcgagaagacgacagaaggggactctcatcatagtcactgacacagttacgctctaaccggttattcaactccgcatccaattcaatgcaatgttgagaaataaaactcaccactagcttcttcaaccaccatcaacaatgaggtattattcccaattcaaacacttatcccatttcctcaaaaccctaacccgacgaccccaaaaccctaccttcgcttctgcacggatctcacagaaccttccaccgcgtccctcccacgcgcgtgactactgcagcagcggcggcgcgtcgctgtcgcagggttcggagaaggtggcggcgatcgtggacgaggtgatggggctgacgctgctggaagtgatggacctggtggaggtcatgcgcgagaagcgcggcgtcaacgagcttccgatcgcgatgctcatggtgcccggaatgggcgtgccgaggggcattccgaggggagccgcgaagggcggaggcgctgccaccggaggagcggaggtgaaggcggcggaaaagacggcgttcgatgtgaagctcgagggttttgacgcggcggcgaagatcaaggtgatcaaggaggtgaggacgtttacgagcttggggttgaaggaggccaaggatttggtggagaaggtccccgcggtgttgaagaaaggggtcacgaaagaagaggctgagagtatcattgccaagatgaaggaggttggcgctaaggtttccatggaataataaggaaaagacaggatgacaaacaaaacatggcgtagagttttttcttctttgatcaagtgtagcagcttattcctcacactcaagttatctgcaggtgatggaactcaaggaatgccttgccataattcaaagctgttaacctttcttgtatttgaaaactttgctgagcacactatgaaattattgttatttctcccttacataaggctctttttgccttgaattttcttgatcatttcttaaccaatgttgtaaaattggtttttgatggtggaatcatttttgaactaacatacacatgttactagctgctaaagttctagatccaattggttgtccactgaactactatgaccacacaatcatgtgccatggacaactagaattgaagttaagccccaaatactgctcctcactttatcttctcttggatgtgtacagtttgtgttattgacttcattttcttaaaaaaaaa

SEQ ID NO: 54388 - DNA, 304 bp, Glycine max
  Clone ID: PAT_MRT3847_20125C.1
accaaaaaaggggattatttcccctatcccaaaaaaaaacaaggccacaattttttttttataccccacccaaggggcggccgccccaatttccctaaaaaaaacccgccacccggcttgaaaacattaaaagggcttattcttgaacctcttttaaaagaagaaaccccccttcaaaaaaaagccggagcagcaaatacctgcttggctttggggaggtggaactcccccttttttgcccccacaaccttatccccgatcttgcccttttttaaaaaaagaaaggggggcctggcccccaagg

SEQ ID NO: 54389 - DNA, 486 bp, Glycine max
  Clone ID: PAT_MRT3847_20126C.1
aaagaaaaacgtcttttcatgcatggcgcaaccaccatttatatgcctttcatgtccaaccaaaagggaaggctaatacttataattcaacgttctatatctaaacccgggtagagatacttacacatgacatctcccctaagctgtatagatcttattaaaacggaaaagcgcgcccaaaatacctcttaattccagatagacggccaactgccgcgaatcccatacccagactgacggggctccaagcaaacaacgtggttgacaggcaggaacaacaccaagagcgcaaagatcataaccaccctgtgtacactgaccatggtaaccctatctagcccgtgggtgatccactccaaaagcaggcccacaacggtggacatgaagcccacagggaacccctttgcacaaagctgcatgcccgaaccctggggaataaacaccagcttgtaacggtccttgcggtccactaggaacatggccatc

SEQ ID NO: 54390 - DNA, 396 bp, Glycine max
  Clone ID: PAT_MRT3847_20127C.1
gggggttccaagtttcagtgttcaattttaaatgcctgacagaaagatcactggtctagatacactaacaaacaataaatagtggaacataattttgtaaattgaaatccgtaacacagggctgtttcaactgccaaaagggaagctttatatgtacagataaaagtgcagccttattgagtttgatattttttcctaacaagtaaacaccttactctatttctctaaatttatttttacattaccaattaaattcattacttttagattcataaaaaaaattgtcatactttaaaaatttaaatgttgtttttgtacctgcattgcgggtgcctcttctagtctagttaaaaggaaaaagattgatctatttttcaaagtgatgcacaaaattta

SEQ ID NO: 54391 - DNA, 391 bp, Glycine max
  unsure (1)..(391): unsure at all n locations
  Clone ID: PAT_MRT3847_20128C.1
ggagaaagcgccattaatataataataccatttagggggacatagaggagagatccaatggggtaataaagggaaacaagcatacaagatgaattatgggtcaggggcgatgggggcaaaaggggaggaaatatttaccttttttgcaaggaacaatgcgggtgggggcatcataggcgtaggaggagggcttggggcatgcggtcttaaaaatcttggaataaacgggggggttgcggggctgtggggttccataggagcgcgggcaacantacttgggggaggtgaaaggngancaagggctttttcaggcaaccacgcgcttgtgtggnggggagcgaacttggaggcgcacgggggacatggggggtaggggggtcacccaggccgg

SEQ ID NO: 54392 - DNA, 1234 bp, Glycine max
  Clone ID: PAT_MRT3847_20129C.1
cggaacacgtagtgggaagcatctaagtgagatacacagtagttaggtagcaagcataagtgtctaaccttagaaacatatctgctacatatcgtgtgcattttggaattgtgccactaaagttgtgaaagcagagaagtgagatacactaagttatcctcataaatacactctaattaggtggcaagataagtgtctaaccttagtaacattgccacatattgtgttcattttggaattgtgccactaaaattctattcaattcatctatggctgcctcttcttatgctatgcaatcaatcctggcaaaccctttgatccgcatttccagcgggtctagggtgaaccaatttggcgttcctgctttgcacatgagaaggaatgttggcctgagagttaggtccatggctaaggaagaacaaccaagtgagcctgcaaccccagttacaccgccaccatcagtagaacccaagccacagccagtctctgctccttcaccaaaggtgagcactaagttttctgatgtgttggcattcagtgggccagcacctgagaggatcaatggaaggttggccatgattgggtttgtggctgcaatggcagtggaagtagccaaagggcaaggtgtgttagaacaaatatccaatggtggcatcccatggttcttggggacaagtgtggtccttacccttgcttccttgattccactcttccaaggtgtcagcgtggagtctaagtccaaagggttcatgtcctcagatgcagaactgtggaatgggagatttgctatgttgggtttgattgctctggcttttactgagtatgttaagggtagtactttggtataattcagtcatgaaggcacaccacaatggacttaatctcctttgtgattagagagaccaatgtttatttgtacttcgtgtgtttatttaatctacatatcaaaattatttcgttaatcatgttcatgtcctcagatgcagaactgtggaatgggagatttgctatgttgggtttgattgctctggcttttactgagtatgttaagggtagtactttggtataattcagtcatgaaggcacaccacaatggacttaatctcctttgtgattagagagaccaatgtttatttgtacttcgtgtgtttatttaatctacatatcaaaattatttcgttaatcataaccaaacttcttcacattgaattgctgtttgcctcgtgttattaat

SEQ ID NO: 54393 - DNA, 425 bp, Glycine max
  Clone ID: PAT_MRT3847_2012C.1
ccacgcgtccggggagggaggacaaaatagactaagagcgaacggcggaagctagatgagacgaagtggtagagattaggatgacttgcaagacaggagaaatataactgagataaagagaggtatttggcgcggagagacgtgatcagtgcacagactgaatctgatattcatattcaaaatttcaattgaatatacgagggagctgagccctgccctgaccttaaaaaaatgtaactgaatatgaaaaccctaacccaagcattggcaaaaaccgcggagcgtgatcgacaagacagtgcaaacgaaggagcaggaggtgacggtcccgaatgcacttaatgactaccagctgatcgaccagattctgtccgcggagaaccggtctcaactggagactatattcgatgcggactcgtgatacc

SEQ ID NO: 54394 - DNA, 158 bp, Glycine max
  Clone ID: PAT_MRT3847_20130C.1
ggtaaaatatacttttttttatctaaacttgaaggtaagaaacaggggtaatttgtcaaaatagagagagaaacctcccacaggaaagtgcatagagactctttacctatatatgtgaaataagcaggggccattgaatttgaactggctggtgaaaa

SEQ ID NO: 54395 - DNA, 587 bp, Glycine max
  Clone ID: PAT_MRT3847_20131C.1
ggccaaaacaatgttttttttttaatccataatgtacataagatggcaaaatccatgaagcatgcctatcaacattttgtggaatacgagtcatttaagttcctctcaagagactaagtacaacaacccgtggagaaaatgctaatttaccgaaaaaagggaaaaaagaaacaagggaaattgatccactttttgttaattaacatacaggtagtgcttccctaaatccaactctaaaactagtgctaccctttcgaaccctcttacccaaatctgcattgcctttctgcatcatagcaacaaattcattgtagtctattcgtccatcattatcttgatcagcttctcggatcatttcctccaagcgaacatctccaatgccaaattcttcacaagcttgctgaagctcatcttgagtgatgtagccacttccatctttatcaaaataagcaaatgctgcaactaaatgatcttctctttcaaccttgtttagatgcaatgttgcagctatgaattctccatagtcaattgtgccactgttatcaacatctgctgattgcataaggtcgtaaatttcagattcattg

SEQ ID NO: 54396 - DNA, 371 bp, Glycine max
  Clone ID: PAT_MRT3847_20132C.1
cggaatggggacaggggacattgtctattgtgttatctgaaaccttccacgtaacacaaaacacaggtcacatgttacataaagtagcaagtagccactagggatatgagctttggtcttggcctttgtcgtatatcgcctaaggcctcagtcaccatttaccgatttaagactaatcgcacatcgcacagcgcatggtggagaaaggcgtaacgcatacccctggctcctgtattcaaatattaaaaccttcaaccgttccgtggctagtggcgatgggtgctgtgtggtgacgggcaacaaccattagcaggtcgcgggtcctgtttgttggctgctggactcggaacttgtttctaatctcaaaatta

SEQ ID NO: 54397 - DNA, 182 bp, Glycine max
  Clone ID: PAT_MRT3847_20133C.1
agcatcgaagaaggtgttctatgacgctgggatgataggactaggtgcactgaagattctgccgggagtttgctgcagcaacgtgcaaactgtgcgctccatctgggaactttatgggaacaagcgatgagtgcccttgctacagagacatgaagaactccaagggcaaggccaaatgccct

SEQ ID NO: 54398 - DNA, 426 bp, Glycine max
  Clone ID: PAT_MRT3847_20134C.1
tcccgggcccccccaaccctccggaaaggttggcctttccggggggggggagggggggaaaaaatttggtttttttttggggggggcccaagggttaaaccggaaatccaaagaagggggtgggaaaaaaaaattgcatttttttttgggggggggttttgaaactttgatcttgggaaaacccaaaagggaaaccttcggtgccccttggtagataaattagaggggatttttgttggtgggtttttctgggaacccgtgttggggaaatgaccggtggtattgaggtctgggcacttccggcaagtccaccgaagccgttgaagtggaaattttcgcaggttttcggggaccgtccggcggggagagaagttcaggaaggggttttaatttctgttttggaatttgccaggtttggtgatcatt

SEQ ID NO: 54399 - DNA, 309 bp, Glycine max
  Clone ID: PAT_MRT3847_20135C.1
ccaaaacaacgccttttctcttctgcttcgactccattctttgcgttagggctttggctgaaagaaggcattcacagggtctttccttgctacatactaatctatgtatctacccaaaactgaacgacctaatggagtctagccgtgataaacagaagtctagttgttataatggtgaaccaattctacacgaaactgccctcagatccaggattgaaaacgtttgaccactctgtggaatcaagaaattcacatctgctgcttactctaaacgaactcgcaaaccatcctgatacacatatccattga

SEQ ID NO: 54400 - DNA, 1441 bp, Glycine max
  Clone ID: PAT_MRT3847_20136C.1
tacaaaacttagattaaaaaacctgcaacacagcatcagcaagtgagcgtcaagtatcctcttccttcttctgcatcaactcatcttattagagtttttgactaatcaattatggcctatgagataactgagataaagaagattggcataggcctaattggtttcggcatatttttcgcatttcttggcataattcttttctttgaccgtggtttgcttgctctgggaaatattttttccttggcaggggtagccattttgcttggttggcgttccacgtgggcactcttcacatatagagcaaactttaagggttctgcatcatttctactaggtctctttttcatttgtgtgaggtggccaattgttggtataatacttgaaatatacagttgtgtttttctcttcagtggattttggtcatctatcaaagtgttcctctatcatatccctgttgttggatggattatacagtttatctctcctccttgattgtcacagaagggatttaactgatgccttagtatatggctaatcatgggtttcgattgtattggtaatttttccaatgacttgtgcatgaatgcaatgttaagctagtttttccaagagtttgcatcaggcagattagcttcctttagtgagaagtatcgcagcatgttatttatgtagaatagttggtacttgggagccatattttgatgctttaaattttaccaagaatacaagctggttatgctgttcagttgtctgatagcatgagggcttgctactgatgtcagactgaacatatattaaccttcggttttatgcgccttgtcattgtcaagacctcgccaaaggatgttgaaattctttttgtatgtttttggtttatgaaagattcacgggttattagtgttagtgttggaattaaactttatgctataaaaaaaatgtggagaaatgacttgggtttttatgtctccaagttttcatgaatggagcctttctattttaattattgatccataaaaagatttaaaaaatgtgaatcacattttccaacaaagattcagaccgtagaggcttagacccgaccacgctatttaacatggtatttgtgctttgggctgagacaaccgcaagagggattggttatactagattttctggtttgacggcgtgcggggggttcatctccaaccatcatggggtttgcaagatcccttcaagttgataatatcttcaagagtgagttgtgggctctcatctatggtctgcgtaggctttagtaatgtaatcatggaatccgattctgattcttttgcaaagtttggtctatctattgaccatgattttgtattcttttttattacccttcaagttttatggaggacatgctgatttgtaatgcctctatggctctaaatcaaatgtaattctgttgttttccggcgtt

SEQ ID NO: 54401 - DNA, 685 bp, Glycine max
  unsure (1)..(685): unsure at all n locations
  Clone ID: PAT_MRT3847_20137C.1
aacactaataacccgtgaatctttcataaaccaaaaatatacaaaaagaatttcaacatcctttggcgaggtcttgacaatgacaaggcgcataaagccaaaagtaaacatatgttcagtctgacatcagtagcgagcctgaacagcataaccagcttgtatatatgagccttgaaacaacaaaattagcctaccaagtaccaactcttttacataaattgcatgctgcgatacttctcactaaaggaagctaatttgcctgatgcaaactcttggaaaaactagccaagacattgcattcatacacaagtcattggaaaaattaccaagacaatcgaaacccatgattagccatatactaagaggctatccgttaaatcccttctgtgacaatcaaggaggagagataaactgtataatccatccaacaacagggatatggtagaggaacactttgatagatgaccaaaatccactgcaaccaaaagcatcaataataaagtgtagaataagttttgtagtctcatagagttcaagaaggatgtgatcaactaacctgaagagaaaacacaaccgtatatttcaagtattataccaacaattggccacctcacaaagatgaaaaagagacctagaagaaatgatgcagaaccctgcaaaaatggcaatgncaagctagttgtct

SEQ ID NO: 54402 - DNA, 339 bp, Glycine max
  unsure (1)..(339): unsure at all n locations
  Clone ID: PAT_MRT3847_20138C.1
ggcacgcctccntacggcttctaaattactacacaaggggatcatcaacaaccagttgggtatcctagtacaccgcattaaaaaatttaatatatactatgatcacagcgcggttcccattactgttgctgggagttgttttcctggcatcaaattctgtctcatttggcattgcgtattgggaaaagcagaaccccattcacaacaagtgcctcctaagttgcaatatcgagaaagactcctacaagaaccaatcatgccacgctcgttgcaacctccttaaggtggaggaagaagaacaatgcgaaaaatgtcaaattccacgaccacgaccacaac

SEQ ID NO: 54403 - DNA, 379 bp, Glycine max
  Clone ID: PAT_MRT3847_20139C.1
cctctatgcctctgcaccactccacctcctgccttctaacacgcaagaaagcttctctgtcagggccttgcaatcagaaacccaaacctatcaagtgatataaccattctacggtgatcccttcattgcaactcatgaaaccacagtaacatccaccccctagattgcatggtacttatcaaacctccccgcatacacgaccgcagggagcccactactaagacggatctaggtgggcctgacccatcactacctactcgtgggatcatccgtgaaagacagacctttgatgaacaccgagatcgcatcgcaagcgagctctatcgccagtggtgcgctggaggtgattctcagcactgtgctcacaatctatgggatt

SEQ ID NO: 54404 - DNA, 370 bp, Glycine max
  Clone ID: PAT_MRT3847_2013C.1
gagacaggcattgacctttcgagatgttccaactgaattgaattatgacgctgtagacacagctactggaaatttcagcatccggtatctaattgggacagggggctttgggtcaacgtacaatgtagagctgtccccaggttttcttgttgccataaagaggttgtccataggtagatttcatggcattcaacagtttgaaacagaaataaggacattaggcagaattcgacactaaaatcttgtgactcttgatggctattacgtacgaaaggctgaaatgttcttaatttacaactacctttctggtgggaaccttgaagccttcatacatgacaggtcaaggaaaaatgtgcagtggccagttata

SEQ ID NO: 54405 - DNA, 196 bp, Glycine max
  Clone ID: PAT_MRT3847_20140C.1
ccctaatttaaatgtccgttattgacaacgacatgtggcgatcattactgtggccattttggacgccaatgagcacttatcaatacaaaacagatgcttatttagaggttccagcaattaccaacagtttatcgttcggatatttcaacatgcaaagagatttactttaaccttgcactgtttatttataaaccta

SEQ ID NO: 54406 - DNA, 265 bp, Glycine max
  Clone ID: PAT_MRT3847_20141C.1
ggaaaagcatttcttctgaagataaacctttcaacttgagaagccgcgaccccatctattccaacaagcttggcaagttgtttgagattaccccagagaaaaaccctcagcttcgggactggatgcctcctcaatggtgtggatatgaacgaaggagctctttttctgcaaacttcaattcaaaggcatagtggtactcatgataatgaaggaggagaaacattgaattgttggcattaagaaaacaacagggcagcaacagaag

SEQ ID NO: 54407 - DNA, 484 bp, Glycine max
  unsure (1)..(484): unsure at all n locations
  Clone ID: PAT_MRT3847_20142C.1
cgactntagataaatnagatgtgaatagataaatcaattaaattttttaataaatataaattagttaattatgtcttataatttgggacgagaatggtataattttgtgtttaccttatgtagtattgtaggaatatttttaagcaatcctagttgctctgacttgtaagttctaattaattatatcataccattgtgcgcgggttaacatatcaataatttatttgttataaacatttttttcgcttaattctttattttaattttcaaaagatacttactaatgttttatttactttcataaaggaatatattttcgctgtaccaaaaaaaaaagaggactatattttcttcggcttagtttaatggattattgctaagaagagtgtgaataataatttcatgaagtaacaaaaatacttaaaaaggtcaatctttaatatattttcttttgaagaatagacaaagccaatatgaccactcc

SEQ ID NO: 54408 - DNA, 414 bp, Glycine max
  Clone ID: PAT_MRT3847_20143C.1
aagggggggaaggctctttatattttttatactgtgaattctgaatatcatcacatacatcctcgaggggtagtattttagatcaatcaatctgatctgcgtccaaaacatgacaatgattgcccttcattcacacatcatggactctgggtatttgcactcaaacctccattccggtaacaataagcgccgccaaaggacacagcaaaactcctttgttctcactacctccgggacttccctaaccgaccagcgcctgtactcctccaagctccaccactcgctccgacgaaacaggaaccctaccggcggcctcgagagtcgtgcctacactgaccgtgtgctcgacgacactgacaaaggccgaactggctggagccgcgccattatttaaatccgatctgtcggtggaag

SEQ ID NO: 54409 - DNA, 486 bp, Glycine max
  Clone ID: PAT_MRT3847_20144C.1
accccgttgaggggattcaatctattgatattttgatttacacaggaaaaccccctgaaagcttttcatgattcatttacttaaaaaacaatggatatttaattgccaaacccagtttgcctaaaactaaatcctattttacatgtcataaactggaaagagagctccagaggtaaaaatgaatggaaggcaaaccccaaaaaacagcctacttttaacaaaaaatgaatccagcccttgatgtaatatgcaaaacttttgtctatgttcaaatctcctctcaaacttggttgatagaaaaagaggggagggtgttggaaagaggaacaaggaaagtgtgttgttatgctgatgaaaaggccaaaaaattcgttccggataacatggagcaggatgcgcaataaatgtaggaatctcatctccaggctttaaaactgaaacaccattggcatatacactcatctgcaaaagttagaaaaaaaaata

SEQ ID NO: 54410 - DNA, 255 bp, Glycine max
  Clone ID: PAT_MRT3847_20145C.1
aaaaaaaaacagcttccaagatgatcagatttcaaatttttgatccaataacaaagcaccctcaaacaaaattgaagggttgttcaatttggtttaaggggcataaaaaatttcaaaccctaacaaaaacttcttattttttaacaggggcaagaactttaggttgggaaccgagctttttttaagcaaccttttaagttttcacccttaatttggtgagttgcttttttttttggaaaaccaccggtgcctttt

SEQ ID NO: 54411 - DNA, 373 bp, Glycine max
  unsure (1)..(373): unsure at all n locations
  Clone ID: PAT_MRT3847_20146C.1
ggggccggnccggaacacccgggacgattcactcgaccgacttcctttctttcccgggaaaaaaaaaagagaagaaggggctgatcgcaggagaacgggcctatctcaactcggattatgtacatgtctcaaaagcacataccattgtccagccgtcggtcgactatgctagttgcatgtcgaattcgaagaactgctattgaccaaaaagggggccggcatgtgtatgcgatcttatacatggcacggggtgccatacagaaacgactgaaggagggaaagttatacgaaatcgaaggtcttgcggagtggaaacccttcacattgcctggaatatagttaagcataaaattgttcaaagtaagggaagacc

SEQ ID NO: 54412 - DNA, 341 bp, Glycine max
  Clone ID: PAT_MRT3847_20147C.1
gcccccttagaaggggaatgaataggagctaaggtgagctcaactatggcacagcgtcagaaaaacaattgcctatttaatgttaactgcaggtaatccgatctcgacgctgaaacacaaaatctacactaaaagctcacatgtcctacatacgtttggtatgacacatccttaaataaatccaggacaagcaattttccatccgttgccgaagcaccagcttcctgatttttagggcgcacaattagactttggcacagactggaggacgcatatggagggggatgaagggtgtcccccacctgggggaccgtgtcttggggaaccccatggttggggag

SEQ ID NO: 54413 - DNA, 405 bp, Glycine max
  Clone ID: PAT_MRT3847_20148C.1
cggacgcgtgggatggtgaataagtggttatcatacttctacccaacatcaatggggggggtatcctgctgcatgctcatactgataaatcgatacggaatctgacgatcgagaagcttgcagattcaaaatcatggccaactgcatggagacatacaccattggggagaagcagcagcaagaagaaggagaagaagaaagaggaggatttgtgaagaatggtctaagcatgaaggttgtgctgacaaaggaggaactaaagtggctgatactcgaactgaacgacaaaggaggagtgaggctggaacaaatgctggaagagatagaaagaggcagaagagaacaaaaggttgaggatgagatggggtggaagccttctttggagagcatattggaggctcctga

SEQ ID NO: 54414 - DNA, 497 bp, Glycine max
  Clone ID: PAT_MRT3847_20149C.1
tttacttttcccttatctctactcgttcttcaattcaaatcatctctctgctttgaatcgttcagtaaacagggttatcaaagaatgtgaaaagcaacacgtgagcaagaaaaacaaattgaagaaaaccaagcatagcaccaaagtatggttgtgaaatgaaaataatgggccatatcggtcatattattaataggcatggttttgattgggagtcataaccaatttgttgatagtgtgtgttcaattgtggtcaagggtcactggggcaatctgttgaaggtgaagaatgcctctgctctcacttcctctaccattcacaaggttctattacagctctcactctatggttatgggctctctcattccttcccattcttcaaatggcttgactccatcccacattatagccattccttgcaatgttcatgggccatgattcacatcctcaccgaacataagcatttcaaaactgcacaacacgtgcttgaaaaaat

SEQ ID NO: 54415 - DNA, 1046 bp, Glycine max
  unsure (1)..(1046): unsure at all n locations
  Clone ID: PAT_MRT3847_2014C.1
agttgaggttgaagtgtgaagaagacgaaggattattggcggtgaggaagaatgagtcagtctacacagagtcaaccgacacagcagcgcctctatgatttcgccaaaatggctctcatcaacatcttcgctcacccctacgccacggtgtgcgacttgtactgtggagatgccgacgctgataaatgggcccacgcacaaattggccactatattggaattgatgcgccttcgtctgggatagaccaaatgcgagaaacttgggagactcacaggaaatcctacactgccgagttctttgagcttgacccttgcacggagaatatagaaacgcatttggaggagaagaccaacatgactgatgttgtctgctgtttgcagcatttgcagttgtgttttgagactgaagagaaagcacggaaactgctgcataatgtgtcttctctgctgaaacctgggggttattttcttggtattactcctgactcatctaccatatggtatgagagttctcagaggcctattattcttgcatgcagtctctctctgttgtattcttttttatttgctctattgatggaagaaaattcatttgatttatagtgccaaattaatttttttgtagatttaattaagggtttacccatttggaaccacttttttgttccagttcgaattaaccattttgatgatgatgtcacagagttatttcttcacattaaaaaatggaaggatttaccctgatttgtgggctcttagatgtcactgccagcaaaaatatatgttattctgaaaacagtgccctgggatgcttaaagatgtgcatgtacattgcccctctttttcagcttcatctcttgaactgttcctcttaactggataatactgcttctactgacattgtgattcttttctaggtgtgagttttctgaaatatgtcttttagttaggttatgctttttgtttctgtgagattacatgagattatgnctattattcttgatattgtatttaataagtttaaatatgtttaagatcgaattttg

SEQ ID NO: 54416 - DNA, 963 bp, Glycine max
  Clone ID: PAT_MRT3847_20150C.1
gcagacgcacacttatcgttctctttctctgtttcgaaactctcttcgaactctcttctcttctcttagcccaatggaagacgacgacgagttcggagatttatacaccgacgttctccgccccttcgcttcttcgccctcattatcctctgcgccgcagccccaccaaccttcccctgcgcccccctccctcgatctcagtcccaatccggacgatgcacagatcccctgcgatgcgccccacgctaattcccctgcaccaaccaatcccctccctgagccagacccacgcgaagcgcccacggagccgcctataattccggacgccaagcctacgacggattcaaacctcgccgccgccgccgttgccgttgatccgatggacagggaggtgaaattcgacatcgaggaggacgaagaagacggcggagagccggttattccggggcttacaggcgagttggcagcgccgactgagggcgagggcgatgattgggacagcgatagtgaggatgatttgaagatagtgttgaatgagaacaaccacatggccatggaaagaggagggatggcggatggtgatgaggaggaggaggatggggatgaggagcttgtgattgtggctggcggcgatccgaatcagggcgcggaggagccggagtggggcgagaatgccaccctggccgctggagacggcgagaggaaggatgccgccggggagttggccaaggccggcggtgcggctgtgcccccgaagattgggtatagcaatcaaggatatcacccctttcattcgccttttaagtatcagtatgttaggcctggtgcagcactaatgcctggagctgctgcttctgctccaggagggcctcctggtcagattcgtcctcttgctaacatggctggtcgaggcagaggggactggagaccgcctggaataaaaggtggtgctgctatgcaaaa

SEQ ID NO: 54417 - DNA, 270 bp, Glycine max
  unsure (1)..(270): unsure at all n locations
  Clone ID: PAT_MRT3847_20151C.1
gcacaatcaggtcngttgccnagtaganatccggaaggaagtttggtggcctnngggttctccaangcatacngtgtgaatgangacnccacttacaaatatnttgaggtcattcttgtggatgttgcccacactgctgtnagaaatgatccaagaatcaantggctcngnaatccagtccataaacacagggaactgcgtggcctcnnttctnctggnaanagcnataggggtttacgttgngaggacatctctaccacaaaaatcgnc

SEQ ID NO: 54418 - DNA, 290 bp, Glycine max
  Clone ID: PAT_MRT3847_20152C.1
gtctcgagtttttttttttttttttttgctgtggcctgtggcatcactactaatcttatttttagttgagatcccttaatcagtaaacctcactgtctcataccttggttactaacgacactaaaacgatgaaaatcttccttgggtatatacctaactatttaaggttagattggttatttgctataaataacatagttgccttaggatttcttcagataaatttctccataagcatttataggagaaggaagaaaatgagaaaagaataaaataaaatgcatttctct

SEQ ID NO: 54419 - DNA, 1136 bp, Glycine max
  Clone ID: PAT_MRT3847_20153C.1
gtttactctttctctctctctctctctctcattccaccatcctcgttttcagaagtgaatcccaatgccttcctcactcacccattgaggcacattccattaatatccatcaatttcaaccatgggcacaatgttggtgccaccatggcttgagccactcctaaacacatccttcttcaatgtgtgtcggattcacggagatgccgcgaggagcgaatgtaacatgttttgtctcgactgcaatgagaatgcgttttgcttctattgccgttcctcaaaacacaaggatcaccaagtcattcagatacggagatcttcgtatcacgatgtagtgagggtggcggaaattcagaaagtgttggacattagtggagttcaaacatatgtgatcaacagtgccagagttttgtttctgaatgagaggcctcaaccaaagtctggaaaaggagtagctcacatttgtgagatttgtggaagaagcctcttggacccatttcgcttctgttctttggggtgtaagcttgtaggaataaagagaaatggggatgcaagttttactttggatgctaaaaatgaggcatcaacaatggagggtatgtcaaggagatcggtttcttcaagacatcatcaagaagaagaattgcgtgaaggctcacaacaagacatgtacccggccacaccttctccacctgcttcaaacgcaaggagaagaaaagggattcctcatagggcaccttttggctcctaatcatttttttttcttttttaccctaaaaaattggtggtacatatactcaatattcaacccccgtttaccatttcttcttcttcttttgaatcaattaacccctctttgggggggaatctggtcggttgtataatctattttttttttcagtaaagagaaaaagaaaaatggtaggctttggtggagggtgtcatttgtccaatgtccatgaagtggtaaaagcaaaaaagaggaaaagggtatataggaaagttccttcttttggggtttgggtcccaaaacaacaaattatcccttgtgaagaatcaataatgcatgtttgtttaatatttaatactttcgagtgtacatgtcattaagaaattaaaaagcaagactttgtggagtc

SEQ ID NO: 54420 - DNA, 463 bp, Glycine max
  unsure (1)..(463): unsure at all n locations
  Clone ID: PAT_MRT3847_20154C.1
ggggttgacaagggtgttgcccttgctcctacgtatgctcaagtgtgctgaggaattcagacctacgtacttctttaagtctgaaagtttgtgtgttaaattgattttatgttttttttaaaggattgattttaattgcgaacaaaaagtcatttatggcgttggaccttgaaacgatgttttaaatttaaaaagcggagagaatcgttaaggcgttggacattgaaatgatcttttaaatttgaaaagcaaagaaagtcattaaggcattggaccttgaaatgatctcgagtgatatttgataaaaagatgtttcgtgcttttgttgaaactcaacataatgttgttatcaagtgttttagatgtgatctaggtggngaatatacctctaataaattctttgaattacctgtgtctaatggaattgttcatcaaacctcttttactgatactcctgaacaaa

SEQ ID NO: 54421 - DNA, 268 bp, Glycine max
  Clone ID: PAT_MRT3847_20155C.1
gttgcttttcacttatagttaacaacttttatcactaccattacgtgcattacagatccatcattcatcccaagttggtggaaggcgttggcttcgatctttttgatatggatttagagtttgaatatcaagaagtaattaactcctcccttttctttcaacaatacactcctctctctctctctctctctctctctctctctatatatatatatatatatatatatatatatatatatatattcttctgggtatgggaacatatata

SEQ ID NO: 54422 - DNA, 326 bp, Glycine max
  Clone ID: PAT_MRT3847_20156C.1
gtataaaaagaaacccaaaagggggtcttttaaaaggaggagtggggggttcaaatttcccattttgaggggagccccccaaacactgggcgccccttctttaaaaacccgaaaaaaaaatcccaaaaaatttgaatttgcaaaatccggccggtgtccctttttaaaaaccaacccgctgttttttaattgggggggaaaaataaaaaaaaaggttttttggtcaaggggaataaaatctggccctcttttaagcttcatggggactaggggctattttttcaacaagggggaccccctgtttttgtggtgatacaacctttttt

SEQ ID NO: 54423 - DNA, 160 bp, Glycine max
  unsure (1)..(160): unsure at all n locations
  Clone ID: PAT_MRT3847_20157C.1
gggcctccaaccgggtattatcacactccttactgatacncctttcaccttttttgtcnttctgtgtcacatctataggttgtntcgtttattttttactacgacatngtgtttggctggtttcaaatgatgtcatcttattcttganatctgcacatta

SEQ ID NO: 54424 - DNA, 544 bp, Glycine max
  unsure (1)..(544): unsure at all n locations
  Clone ID: PAT_MRT3847_20158C.1
ggctcgaggtcgaatagaaacacctcaccttccatccctccgtttcgtgacgcttttttggcggttttggcctttttcggtttcgaacattcgcacgaatttctctctcactctctctgtcttcaattcaacacttcgaggttccatcttcgacctagttctcactacttctctccctgctttctgctgcagattagatcttaatattctctgtgttcgtttttttttacttaattcagttctctctgtcactgtttaatttctgagcttagcatcgtatagttcggatcgatgaatgaacgaggttcgggttttcaattttcacggctcatttcttaatctctattttctcggttacttcgctcacgttgtcttaagtagctcgattttactgttaaaaaaaactaaagcagaagattgcgggcgagaataattggattgcgtttattccgcagcttactatatctnttaattggtttttctttggcttttaatcggaaccttaatcttggttttatttatttattattcatttgagaaggac

SEQ ID NO: 54425 - DNA, 323 bp, Glycine max
  unsure (1)..(323): unsure at all n locations
  Clone ID: PAT_MRT3847_20159C.1
tcncncgnacgcgnacagtangctcnnaattcgnctcgcaggnnactatcanntggnanctcatncccaaatctgtcatgagacgaattggntnancactcatncatngngcctaaattatgtggtnatncntgnnngtcttggcntncgtaacancgcctncnnntntcaccnntcggnttcngtagctacccgngngattnanatncnangtctacanatgacaagnttncaatnaagccaattcacntggttngcnctgcacngaattttcnnttatcngngtcgaggcntannntnttagagtttccactggantnnan

SEQ ID NO: 54426 - DNA, 1894 bp, Glycine max
  Clone ID: PAT_MRT3847_2015C.1
gcgagaaaatcaacatttaaattgagccatgaaatcgaatacaagatatgcataaacaaactttaagaggttaaattagcacgggatgtttttttttttttttttttttagagaaataaactggatcaagatgcttggattcaatatcgcggatcacaaatatattaaattcaagttttcaatctccaatatccagtaatctttcaacaatttatccttgaaggagggtttttaaccagtcacaacagaaaattctaaacacaacaggcacaattaagcgttcaacacaaccaaccaaaaagaacccaatttcaatttcaaatgtgcaatctgaaacagcttgctataggcaaacttcttctatggcctttccggtcatatgacatcttcatgcatagtttaaacggaatatgtcattcaacacataatagcttccctgaggtgttggtatcaaatggaacatctggctgaacttgagagtgtgctgttcgccggcgagctgaaggtttccgctgacgaagacgagcatgccggcgttgacgccggagggctggcagtcgacggtggagattgagtggtggcactgctgaaaagggagggaggtgagcttggcaacgatgttggaagcgccttggatcttctgcccttcgaaagtgagcatggaaccctcctggtagagattcgctaagccgttcctgttggtgtcgaaggtgctgtagtagtgctccacgaatgcctttgccaacgcgtctggatccatctctcttctctacatctcccttctcgcttctctcttcatcccaccctctctctctcttttctctctcttcctcgcggtcgtttcatctctgcccaaaaccctcacagtgacgccgtcatggtgccacactgccactttcactgattattcgtcgacggttccaactcaacaatttgttatctctctgcgacttctacttacaagtaacaagttgttggaacttcttacgagttaagagccatttattctgcatcctgtttttgcttcaataaaatggagacaaaatcatccagttcctctacaaacttggtagaccaatcagtgtgtcctggagatgtgattcttgatctgtctaacatgacaaaccagacaattaaacttggtggtggtctacgacaggactgtgatgcgatttctgtaatgaaggctggcagactaaggttctcaaagcctaataaatactgggttgaaaattctcagaagaggtatgtgccacatgcagaggattctgttcttggaattgttgtagactccagatcagataactttcttgttgacataaaagggccagctttagcatttttaccagtgcttgcatttgaaggaggaactagaagaaatatacctatttgagataggtactttgatttacgcacgggtcgtaaaagcaaaccctggaatgaatccaggtggcatgtactgatgccagtgaaagcacaaagctgctgcagaggatccattgatcattccatttttgattggccattcagatagtccctggtgatttcaatttcatagcagaatacttgttttgcaattgtcatcttatgccatccaattttgaagtgcgtactttttatgtgctaccaaataccaatgcttctgcagggtgagcactctccactagactagccccactacctatagggcacaaaggattatcaacacctccatgtttatatcaacaccttcatgtttaatttttgtcgagaaagaatcaagaacctcagtttaattttttaattttatgaccgagatgcatttggttggaatgtattttttgggccattcaatatcattatttttacaaaccatgaattattttaatttaaaatatatatctaaatttatttt

SEQ ID NO: 54427 - DNA, 286 bp, Glycine max
  Clone ID: PAT_MRT3847_20160C.1
cgatacgacaacagacaggtagggatgcgagaagacaacactgcggtcctgctgctagattatcatcatctggtattgctgctataatattactcacgggtatggctgctagaagaccatacatggggatgttggtcttgatgctaacaggtgtcatgtgttggtcaccattgtgcacgcatccccagctttccttcagtgtgtgctcggccactttcacctctcgccctgatgatgttcgtgctcagtaccatggtcacatgtttgggtaagtcagctatgatcc

SEQ ID NO: 54428 - DNA, 249 bp, Glycine max
  unsure (1)..(249): unsure at all n locations
  Clone ID: PAT_MRT3847_20161C.1
cttcatttttcaatcacacatggccatgccaaaacacaaacaccatgttcacaacactcccaacacattcaaatctaccaccaatcaacaacaacaaaaacaacaatatcaacaacttcaagctcatcaacaacaacaacaacaacaacacactcagcttcctctaaacctaccattcttcttctacccaacaataccatcaacctttnttntatctnatnctcttnaaccctattttcccatcatata

SEQ ID NO: 54429 - DNA, 290 bp, Glycine max
  Clone ID: PAT_MRT3847_20162C.1
ggagccaagtatcttaattcttaataaattcaatattataataattttcacctaactccataagtcaacatattgatctttaaacatcaaccacaaaaaaatattatcaatgatatttgagagtttcaacttcaattatatggaagcagaatccgatattttttgtgtaattttattttattttataaatatcacttgataacgatgatggacagaaagcaacaacagggcaagtcattttgctcgtatctgacgtttgggaatcacaaattaaggtgtcactttcatca

SEQ ID NO: 54430 - DNA, 790 bp, Glycine max
  Clone ID: PAT_MRT3847_20163C.1
ccacgcgtcgatacggctgcgagaagacgacagaaggggaatctagtggaagagtgaataagagatatcaatatattatgataatggagggatacaataagaaggttatgattgtggggatggtgttgggcatggccatgattgggatggccaatggccaatactcgttttgtcgcatgcccagcgatgggttggcggcatgcaagccgagtgtgagtggggactatcctgctgatccctccactgcttgttgctcagccattgccaaggctgatcttaaatgcttctgccgcttcaaggattcgggccttctctctatgtatggtgttgatcccaacaagtgcatggaactccctgttaagtgcaaggttgtcgactctttccactgctagattcattagagggggcactaatcaatataaactacacaagggcacttaattaactatgtactctcgttgattgccattgttaattttctagcttgtgcccctgctgtttatgtttcttattttccaacgtgcttgttgctaatgtaatggatcgtggcgtgcttgtttttgtttgttgttgttgttgtaacttgtaatagtgtgatttgtttgtttctctactttagttttggctaatattcctgttacgtacgtacatctttaattttggtttgttgtgaatcaatgttcttgtcaatttcttttcttggaaagctcctttcattttaatggaaagcaacttcaaccagaaaaaaaaaaaaaaaaaaaaaaaaaaagcggccgctctagaggatcca

SEQ ID NO: 54431 - DNA, 268 bp, Glycine max
  Clone ID: PAT_MRT3847_20164C.1
ggacatgggtgctcccccgggaaatagaaaaaacggtgcctattgcgatcatcaacccctccctaaaaaaaaaagggaacccctggggtgcccaaagaaataaaaaactggccagaaagagttgaagctccctgccttttttaaccggggtaaacctggcattacatttttaaaaaaaaaggggcctccgtgagataaaaaaagttaaaaaatacaccccgggagggttgcttattttttaaggggaaaaggcgggggggtttttttt

SEQ ID NO: 54432 - DNA, 532 bp, Glycine max
  Clone ID: PAT_MRT3847_20165C.1
ccacgcgtccgggaagagctaggactgtaagttggaaattacgagcagaggcgaccatctctaagaaggtgaacccaacactacggttcagtccaggcctcttgcttcgcctacttatttagcttgccctgtaccactacatagtcgctcattccctattgactctagcgttctttactttgaccatgcaaagagtggattagatctggaatgctacggggccactaccacagtgcaccatggctgacgcgaacacactctcactggctcattgcacaaactactacattgggtaggaccctgcctcctaatctaccgtgaaccactgcgcagctaacatcattgtccttgggtgtaatcaataccctatcgacagatacctttggactacttatagaaagacaacatcattatccatatgcagtagacagttgaaacacttacacaatacattggaggagggactctacacacttgacatatttgaccaactagagaacaatgtagtgacctattgaccagatcaggagac

SEQ ID NO: 54433 - DNA, 262 bp, Glycine max
  Clone ID: PAT_MRT3847_20166C.1
gcacgcctgcggaatctgggaattgggctctaggttcataactatggatttcctgtttacatcgatagactcgggaaaggttatctttacaaacttattcacgttactaccatggatagatatgtaaaataccatgtacaggattttgataaagcttttaatataaattttcctgctttcactatttcctccaaaaggcacattcattcaagcaccactatactagatgttcaaagcattttccttaataactttacaaaat

SEQ ID NO: 54434 - DNA, 508 bp, Glycine max
  Clone ID: PAT_MRT3847_20167C.1
acctttcctttttcttttaacaaggataatttaacaagaatgatgacaataaactaggacgacctgcgatgatcaattgaaacgggaaatgtaaagagccaaaggccacattctacctcatcataacacactttaaccgttattatacggcgaaatttcacagcaaaacattcctttctgcgactatttgattttcatgttgcattgcaaggtgccaatgggattctcaaaagtccatattgtatcataatgcagactcaaaccctttaattgagaacagaggatgaacaaagagtacacactcttgatcctcctgactagtccctgtgaaatgcacaagctaactgccttgcagcggtttcttccataaaatgtgtcgacatgatgtgcagccatgcaaacaagggaaacagccattgatgactaactatattcaataattgtcatgacaaccagtggatgctacaagagtacgtgctgaaagcaccagcttctttatccagattat

SEQ ID NO: 54435 - DNA, 177 bp, Glycine max
  Clone ID: PAT_MRT3847_20168C.1
tactctcccaactattttacccgtactaaccaaacgctgcactttcggcggcactctacgatataggtttgtatgtatctcggtgtatcctccttaagcctcgtttgcctttaatgagagcggttattaatatcaatatatcaactataaaacttattgctagcagaaactggctac

SEQ ID NO: 54436 - DNA, 360 bp, Glycine max
  Clone ID: PAT_MRT3847_20169C.1
caagaaatgaaagggcattttcattttggagaatttaaaatttggcattaccactggatggtgccccttggaaaaccaaccaaacttggtaaaattcttttggccccatttggggggggaaaaaaaattatatttttccccattaattggaaaccaaattggcccggattcttttaatcgttattttattcaccccccaggggaacccatttttaatttcaccttaggcgccttgacctacttaacttgcaggccaaagaaaaacctttgggtttttgaccaattccattgattgggggcccactttttttggcttttttggatttaccttataaaggttttaaaggaggatttcaccca

SEQ ID NO: 54437 - DNA, 861 bp, Glycine max
  Clone ID: PAT_MRT3847_2016C.1
ggaaagtgaaagcaacatttaaatttgacaatagaatcaaatacaacaaaaaatataagacatgcataaacaaactttcacgggattttggaagcaaatatataaaagttttgaccctccaatttgcataaatcttttaacaatttatccttgaaagcgttttgaccaatcgcaacagaaaattctaaactgaagaggcacaattatgcgttcaacacgaaccaagatggattcattctcaaatgcaaaagtctgaagcaaaacagctgtaggcaaagcgaatatggccttttcatgtcaacatactcaaaggtctgtctttcatgcatagtttaaacggaatatgtcattcaacacataatagcttccctgaggtgttggtatcaaatggaacatcaaattgaactcagattcaggccaggtggcaacttggaaggcgggaattatgaataaccctagattctcgatcacaaattggcaatcaattgccaattcatttgaaaatcttcccaattcatccttctctccgtgatagattcccacgccaatagcattaataacaatctggctgaacttgagagtgtgctgttcgccggcgagctgaaggtttccgctgacgaagacgagcatgccggcgttgacgccggagggctggcagtcgacggtggagattgagtggtggcactgctgaaaagggagggaggtgagcttggcaacgatgttggaagcgccttggatcttctgcccttcgaaagtgagcatggaaccctcctggtagagattcgctaagccgttcctgttggtgtcgaaggtgctgtagtagtgctccacgaatgcctttgccaacgcgtctggatccat

SEQ ID NO: 54438 - DNA, 331 bp, Glycine max
  Clone ID: PAT_MRT3847_20170C.1
atatgagactacactgagcatcgtctagctatgtcgatcgaactgtccaaggtcctgtcacctaccggggtactaccagaacgacgtggacgtgggttggccggtagaacgttggcaaccgggggcagctgcgggggtgctatgggggcaattgggggattgggcggggctagtgcccgcggcggggccaatgagtgtttatgcggcctagcgcacggggggggatagcgcgccaggggacagaggccgtgaagccgtgtgtcagtgtgtgcaaagcagagggccgccacaccaggttgcggagtggcagcctggggggatggcaacagtg

SEQ ID NO: 54439 - DNA, 295 bp, Glycine max
  Clone ID: PAT_MRT3847_20171C.1
ttgaaacataaaagcggccttgatttctaaatccaaaaggggagactcctgctccacaaccgcgtaggctaaagcccaacagctttcaacatatggaccggcacaacatccatgcctctattatgctttatactctagccatgaatatgaaaacactcacattccaggcatacagtgataaatccgctatatactatactatagccatgtgctatatcctggccgtacctatgcagcagatatagttccagacaccgatattatatatctactatatgcgagcatgcacgaggca

SEQ ID NO: 54440 - DNA, 186 bp, Glycine max
  Clone ID: PAT_MRT3847_20172C.1
gttatgataagaaaacaatgcatatttattaggccaatgggtgatctacctacttacgacacaaaccgagccaaaatcttacctatcaagtgagcgcacggactgacttcatacaaaccagtggaaataaaatactagcaccattccagcattttgtcgaataacatgactgagcttaaaaatata

SEQ ID NO: 54441 - DNA, 204 bp, Glycine max
  Clone ID: PAT_MRT3847_20173C.1
tagatagtgtctatgaaggctgcccaagaacttgaccattagggaaacatggctgtttctgtggattaactagtcaagcccatacaggaagagtgaggtcagctcccaggtggggcaggatgtagtggacgcttggaagaatttgggacaacacacgaattgctaccatggtgagccagtgaaacttgaggaaggcaggactgg

SEQ ID NO: 54442 - DNA, 277 bp, Glycine max
  Clone ID: PAT_MRT3847_20174C.1
gttatctcgcctcgctcttccagaatatctcttgctttcttctaatttttggctgtcaaagctattatttgtaaatgtttaatgtctgctagaaattagaagtgaagcttctcttgctaagagttctcgtgcaaatttatttctttttacatttaagttgattgtattcgagtaattgttagtgaacactgaacaaagtaactcactattatgagtgtgtttggattgacaaaattgattttaattaaaattgattttaaagtgatataatttaaaa

SEQ ID NO: 54443 - DNA, 517 bp, Glycine max
  Clone ID: PAT_MRT3847_20175C.1
aagcacgggagacggcgcgagtaaaccactatcataacaacggaaatatttttctctgatgttcttcaaagtaaagactatgttttggggctgttgtgggacagatgctaaaactgatattcgtgatgttgataatgttattaacgtagacttatatcataaagccagagttgatactcatctcaaaacagaacatgataccgaaatgcaaaacaattatctgactacttcagagggtcatgatgaaactaacactaaacctcctaaacttcgattagtagtcttagaaggagatgttctacagactggaaaagaatatgtacttaacggaagaggaaatgaatttggaggacgtgaaaaaatggatagttttacatatataggaaggattagagaagctaaaggtacaaactcagttataaatgatatagtaatgaatgatcctactgtaggagaaagacattgcatgattaagtataatcaaaatctaagaaaatactttataagagatcaaggg

SEQ ID NO: 54444 - DNA, 427 bp, Glycine max
  Clone ID: PAT_MRT3847_20176C.1
gtgccgcgtcgtaatccgaccatcttgagttcccaaggttgcctgaccctgcctgtcatctactgtgttgatgggtgcaatatcaacggtgcattcacagcgtcctcattgctggaagagccctcgcctattgctcaagagatgaccggagctgattgccttgcccgattagttcctttgtggctcaaagttgcggaaggagaaccccggatcatcatgcttcatcatccgttgggtccgacatattgtctacacaacaatcgcattggagagcgtgacaactcgtcgtggactaataacattcgacatattgatggcatggagtggtggacccattcgtcttcacacatatctggggtgtactgtccacacttggattatgcgccatcttccccattcgaagatttgagctagaatcttgaacctt

SEQ ID NO: 54445 - DNA, 259 bp, Glycine max
  unsure (1)..(259): unsure at all n locations
  Clone ID: PAT_MRT3847_20177C.1
tatataaagacataatacgaggctttatataattaaattgacttaacaaataaaatggtaaacaatggtttttggttaaacagggaaaaattaataattgggttgtaagaaaaaaaagggggggngttttaaagaaaaataaatgntnaaggtggggaaatttaaataggttttgaaaattaaaaaatggagatnataattggtgaagtaaaataaaattttttgggtttaaataaaaaattttttaatttttgttttt

SEQ ID NO: 54446 - DNA, 165 bp, Glycine max
  Clone ID: PAT_MRT3847_20178C.1
aaaaaaaaaaaaacctttattcgcatttccattggataaatgaaggggcgaaattttcaaacaaggcttcccgcttgaaaactatgttggaggctgcccccttccattgggggaaaccaacaataaacggtacaatatacaccaatgcctattaaatttacaatt

SEQ ID NO: 54447 - DNA, 126 bp, Glycine max
  Clone ID: PAT_MRT3847_20179C.1
tgggatagtggcatgttggagaatgttttctcaatgtcatttctctactgttaataaaagttcggaagtgctagattgctaagaaagcaggtgagccttttataggccagcaaatccttcacagta

SEQ ID NO: 54448 - DNA, 356 bp, Glycine max
  Clone ID: PAT_MRT3847_2017C.1
gaagtttttaaagatttcactggaacgatacgttgtgaagacccaaaccccaatctttacacgtttgttggaaacttagagtacgagcgccagatttatcctcttgatcctagtcaaattcttctccgagattctaagctcaggaacactgattacatctatggggtggccattttcactggtcatgacagcaaagtcatgcagaattccacaaaatctccttcaaaaagaagcacaatagaaaagaagatggattatatcatatacaccctcttcactgtccttattttgatatctgttattagttccataggatttatcttcaagactaagtaccaagccccaaagtggtggta

SEQ ID NO: 54449 - DNA, 376 bp, Glycine max
  Clone ID: PAT_MRT3847_20180C.1
ggggagctgtgctactgatctgagtcttaaagccacagatttgatgtcgggattaccctgatgcgatgaacctcatgacatacgttcatgcatctgtggatctgttgttcgaaacatcttgagatcttcaccataacccagagtgcaagagcccatctgctggtctaatggatcttaccattataccagctcatgagatcatcatgatcacagcggccaacgtgcaaaggtacaagtggtggggtggtcaccattttgatattatcagactagcactatgcaacaacgtagaacggtggagcaactgggtgatggcagtggaacgtattagcatgtgagcatgactgtagcaccttactagaggactataggtctg

SEQ ID NO: 54450 - DNA, 1336 bp, Glycine max
  Clone ID: PAT_MRT3847_20181C.1
ctaacttctcatgtttcagattgaaatcatatatgatatgttgggttgggtgcgaaccacaacactgcacaaagattagggtttacatttgggaggaagcaagaaagagatgggtgaggcgtgcattccaacagttgatctctctcctttcctgagagaggatgaagatggaaaaaagagagccatagaagcaatcacccaagcctgttctgaatatggcttcttccaaattgtgaaccatggagtttcccttgatttggttaaagaggccatgcagcaatctaagacctttttttgattactctgatgaagaaaagagcaagagtagtccttcctctgatgcaccacttcctgctggctacagtaggcagcctctgcactccccagacaagaatgaatactttctgtttttttccccaggttccagcttcaatgtcatccctcagatccctcccaagttcagggatgtacttgaagaaatgtttgtgcaaatgagcaagatgggtgtgctgttggagagcattataaacgagtgtttgggtctccctaccaacttcttgaaggaattcaatcatgatagaagttgggatttccttgtggccttgcgttactttccagcttctaacaatgagaataatggaatcacagagcatgaagatggcaacatagttacctttgttgtccaggatggagtgggaggcctgcaagtccttaagaatggagattgggtccctgttgttcctgcagagggaactattgtggtcaatgttggtgatgttatacaggtcttgagtaacaacaaattcaagagtgcaactcaccgagttgtgagagcagaaggacgaagccgatactcttacgtgttctttcataacttaagaggagacaagtgggttgaaccactgccacaatttacctcagacattggggagccacccaagtatagaggattcctatataaggagtatcaggaactgagaatgaggaacaagagccatccaccttctcggcctgaggatgagatccacattactcattatgccattgataactagactcttgtgtagatccattactgccaacaaaaataatcaattaatcatgcctagttctagtttcgtagtaggggttgcttggacctatttttggttcattgttgctcccatgttggcttaagggatatggaagaggtcttgatcaaaatttaaatatcagagatttagttgtattctgcaagtgacatgtgtaggaactaacactgtgctgatcttgaagattatgggcatgaaagggctccaaattcacaatacattataataactattgttcagaacct

SEQ ID NO: 54451 - DNA, 584 bp, Glycine max
  Clone ID: PAT_MRT3847_20182C.1
tatatccttcatagccagaacagaaaggaaaaagcttgtgttgttgagtttgtttcgtgctttgttgtcccttgatgttctatcagttgtgttccatcagagtacaacacactccccaatggttagtgcacttgaaacctctcacttcaataacacttgcccggattaccattcagctgtgaacccaggtggatgggattgcataaagtgcctaaaggtttctccagattgtggcttttgtgcttctggagccaataagaaaccaaaggacttccaatggaagaagtggagaagatgttggaaggaagagatctcaatttcaagttttggcagagaagttctcgccatgcagaagaagtagccacacagaagactcaatcaacttaagtctattgtgttgtatcatttgtaatattggagtgtaactagggaagtatatataggtgcggacaaaggtaataaaatcgtagaatgtagctattagatcataagtatatatatatatatatatataccttgtttgtgtgaatgatacaaattgttatttgagactcttttgaaggaccaaagaattttcttttaag

SEQ ID NO: 54452 - DNA, 616 bp, Glycine max
  Clone ID: PAT_MRT3847_20183C.1
caacagaaatatctgttgcaggaactggaatgggcaacacattcagatatgaacgtgaatcatcaattgtaaaactagtaaagcgtaatgctggtggcaggtcttcaagcttcccctcagtagaatcaacaagatcagtcaacgcattgtcatcaatatcaatgttaaactgacccagatcctcagctgtgttgccatatataaccaaacttagactgcgatagctgccccttacaactagatgactagtaacaacagcctctacttctagtacatttgacgaagagtgtgaatagagaaagggctgacaaagtcttctaaacctcgtctctccctcacagtgagcaaacacctctatcgcaaatgatggaggtgaagttgccccaacaagtgtcactgcttgagcaactgatgacgcactctgttccagaaactcacacgcggtgataacaatgggctccgaaaacataacctcgtcgacgtactcgtcgagatgcgggtgaacgaagttttgggcgaagaggacgcatggctcgggtcgacccatgaggacattgggatcgagagaaagaggaacatgcaaatttgaaattctagggtttatgttggcgcctct

SEQ ID NO: 54453 - DNA, 463 bp, Glycine max
  Clone ID: PAT_MRT3847_20184C.1
tattcttttttttgatttttttattttattttttttggcctcggagggttgggaggaacttggagaccgggacctgaaggtgtacgctttcctcctttccctagacggagaaaacccgggggtagccctggacatagccgtagccggtgcgagagggaaatcggtttccggttccaaacaacaaaaaaataggaggcagaaaaataaaagccaaaggcgcctgaggaaaaaaataaatcacactaaatgtaaaggcctaactgcccgagacccctttggaaaaccaaaccgggcggctccattagaaaaaaggacaccccccggggggagggggagggggtctcggtcccgagggggattttggttttcccctcgccagagagaaaggcaaaacgcccttgaccgccaggccttgaaacagtggaaagagggggaccccgttaatttgtgcaagccggcaaaa

SEQ ID NO: 54454 - DNA, 520 bp, Glycine max
  Clone ID: PAT_MRT3847_20185C.1
ccccggcatatttagttccggaatacgaagctaaatctggaagggatggagcatggtatgatgtggctacctttctatcacacagatatttagaaacaagtgatccggtaattcaatgctaagattatttctgtttttaagttttgtgaagaaattaatgaggcttttttatatggttttcaatttccctttctcactagaatatttccttggcaatcctatgattttattgctttctattcctgcacgcatgtcctcatggatgctaagactaactactaaagtattgtagtaaaatgttcttagtggttgaaagttgttagaatatataggagctattagtcttactgttagtgggcttttacttgcactaacattaatagtttttttatacaactactaatgctaattattatagatcatataccctttatttctggtccctactattggagatcccacatcgactagtgatgaggccaaaatagtatatatatgtggggggcaaccctcaccttac

SEQ ID NO: 54455 - DNA, 236 bp, Glycine max
  unsure (1)..(236): unsure at all n locations
  Clone ID: PAT_MRT3847_20186C.1
cgannccacacgaccnnancncaaaacnnacgacagcaagcacangnnnngcnacnntacacagtagangnngnanaggncncncagnannagcnnccaacaacagccaccacnagntcntnagcagnctannatcngaactcacnncanaaatgannannngccacgnnncancaccancncacanancacgncnggcnacgcaacanatggngcagnaggngccanngnagaca

SEQ ID NO: 54456 - DNA, 441 bp, Glycine max
  Clone ID: PAT_MRT3847_20187C.1
aattaactctggaaattaaaagtagttgcaactggtacatgtttacattaaaataacaccaaaaatgcaaggcaaacacaactttaattctaaccaactaaactcaacaaagactgtacatatgttacactaacagactgtaacccatgtcatcatcagataattaagatagtttgttacttcttttcgtttttcttggatgctgcaggagcactaaacatgactgaaggaacagcatcacccgcgacagatattttactcaaatcacttcaaatactccttgaccttgtctgcctaagggaaagaataatatagttaaaccgcatcagcaagaacatacttgtaggcatcaacaaacatgtgtggtgcaccacccagagtcgtgtatgagattgctaaagagaatgacagtgccataaggacgccatcagcaaaatactc

SEQ ID NO: 54457 - DNA, 332 bp, Glycine max
  Clone ID: PAT_MRT3847_20188C.1
aaccagaaccacattcccgggaattaatcttgccaatagaggcatgtcttgctcctaatggcatctaaatgtggagttctaaccgggcaaatcaaactacatggcatcagagaagccctattgacaacacccaacagcctacaccgttccgataccctctcgacaatctctcacgatcgcgaaactgctggatatactcttatgccacctttttctgatccacatgctactgccagatcttatgcaaatgctgaatcctctgactgatctcgagcccaggctatctttcgatcgttcgctcgatttattccataaaggacaattcgcatgac

SEQ ID NO: 54458 - DNA, 446 bp, Glycine max
  Clone ID: PAT_MRT3847_20189C.1
ttttgtcttttattttttttttttttttatcattaccctttctttttacatcatcttacaaattccaattccttttttggggctcctcatataaaagagcccgtctagagaatcctgcccgctcttggccctgtgaccctctgcgtgcgcaggatccgaaccgggaggaaaactctccgagctctcgggggggggagttaggggaaaaataaaaatatggcccgatggctgacccccgattggaggggacccagaaggcggatctacatatgttttcttttgggatcgggcctacccagaaaaacgtggggccctctgtccctgtgggctgggcgtgggacctaaaaaaaggggccccccaagcggggggggcttatttcattccgaaccgaaaagctgccgccggtataagggtaagagatcccaaaactcctgcgccgaacccc

SEQ ID NO: 54459 - DNA, 410 bp, Glycine max
  Clone ID: PAT_MRT3847_2018C.1
agggggaaaaattgcaaaaatttggcctttaatttcttggtaaaaaaagggccgaaacttatttaaaaaaatatatttttttgggctggaggggtcatgctataatagcttccaaaatctaaaggggaaaaaggcaagggggcccaattttttttaaaaaaaagccctatttgaaaaatacccttgaggggggggagggtctattttctttataaccattaatattttcattttgaaaaaggcaggggggggggaacatcaattggatgggggacaaaaattcttggtggatgctctcaatgctcaaatgccaaaactattgggagaaaacaaccaggagttgtatgaaaaaattaaacggttaaaaaatcctgaacctctttaggaaaaaaggaaaggaggaaatgggg

SEQ ID NO: 54460 - DNA, 587 bp, Glycine max
  Clone ID: PAT_MRT3847_20190C.1
ccgggaatttgcctgctacatcgttagtagtaccacctgcttggggggggggggggggggggcttagcagcaagccttagtaactaaggctaggagagcgattataagtggtatgggtagcgaagcagttggagcaacggtacaagggtgtctgtatggagaattcgatgctgtcaactgagaggaatggaaacctggggaaacatgatatacgttagtgaagggagcggctggattgtgctaaacatggcgatactattatacgtatagagggcctgataaattcggcacggcgattaacgctaattatgcaaccctgatttgggttgggtgctagcgaaacagcaggcactatgatagctgcaccgtgccagcgaacaccggccatggttagagggcggcatccaatcggaacaactcgtagggcgaaagagccaccaattaagcctcctgttgggctagaagtggtacaatgaacggctaacggcggagactgacacgtgccgcaggcacaacggtaaaatgacaaagctggttaagcgtggtaccaatagaagttgctagcgtttaaaatcggcgactaggtt

SEQ ID NO: 54461 - DNA, 166 bp, Glycine max
  Clone ID: PAT_MRT3847_20191C.1
gtgagatcggttcagagaatcaacgcgctgttgaatgtaatgcacgtattatattgtcgtacagcatttgactgtctacgagctcctactcgtagcgctcaaatgtgcattgaccatgccttaaaatactcaagtcgctacccatcatgcattgtcgtgggacaca

SEQ ID NO: 54462 - DNA, 228 bp, Glycine max
  Clone ID: PAT_MRT3847_20192C.1
caaaaaaccacccgtcgggggcccatttaaaaaaaacaaatccccgaaattgagggtttcaacttggggggaaccacccaaattgaggaactggaattttacggaaaccccacttagaattcatcaaaaacggcattcaacaagaaaccttggccttccttatccggcctccaaggaaaggtaattcccttaaaggggtcccttgccccataacaaagttttaacaaa

SEQ ID NO: 54463 - DNA, 308 bp, Glycine max
  unsure (1)..(308): unsure at all n locations
  Clone ID: PAT_MRT3847_20193C.1
ccggccgacccacgcgtcagattattattcttccatttccattaaaaagaaaatatcataaatgggtattttcacattcgaggacgaaatcacctcncctgtggctcctgctactctttacanacctcaatttacaaatgcgaacaaaatcatccaaaaggctcttgattccttcaaaattgttaaaaactttaaggaaaatgttggccctgaaacattcagaaaaataccttcctttaaggatgaaaaaaccaatttggtacggcacagaataaaaccatttaataaggcaaccttggaataaacca

SEQ ID NO: 54464 - DNA, 348 bp, Glycine max
  Clone ID: PAT_MRT3847_20194C.1
ggcccgaaaaaccgggtcgaaccaacccgtccgaccggttgcaaaaaaacaacaaagggggattttgcgttagaactttaaacacccaaaggtgattctgtcttcgaagggcttcaccggattgcaaccatatctgggggaaaggtgagagagccaaaggaggaaaacgcgactctgtgcccacatgttatagatggtgaacacgtttttggagtcgctcgcatatatggctcaccaaatgacaccttcattcatgtgactgatatgtctgagagggaaacacttgtcctcctcactagcgggatgaagagttaagctgccagatatgaataatcatcatattctgct

SEQ ID NO: 54465 - DNA, 401 bp, Glycine max
  Clone ID: PAT_MRT3847_20195C.1
ccggaaggcccggggcgacccacgcgcccgtaataaccacagcggagaggcacgcgacggcggggacaaaccgaacaagacccccgaggcccacacgaacaaagccaagacagccgcccgcacacaaagagcgacaccgacgcgagcgcagcagccgcacacgcacacgggcgagacagggcagagccccaccaaggggccgccagaaaagccagaacgggacgcccacccaccacaaggagcccaagcgagagacagcccgaggaagggaccagcggacccgaccccccagagaggcaaagacacgcaaccccaacgaaggcaaggccgaccacaccccccccggcaagagaaaaggggcaaggacccccggggccagagcaaaagccaccccacaccgg

SEQ ID NO: 54466 - DNA, 449 bp, Glycine max
  Clone ID: PAT_MRT3847_20196C.1
gccataaatcagtagcatcaagttttgcaaaaagttcactaactgatgtttcaatgaaaataaagccacccatcattaaggggtcattattaccggatttgaataatctgataattgaattgaaactacaattggagtgaaacacgaataagaaacagatacctggattttttttttaatgtgtggctcacatgctctctttctacctctctttcgcttatcgtatacccctccgcacgtgatcactacccccttccttcttgtttatgttttttcttatgcacaatttttctcttccttgaagagagaaaagaaacgaaacgaaacaaaaaacaaccaactccagaattcaggtgccggctttgtcggcgttcttcaccggccgtgtaatcggtccctcccgtgaccggaaccctacaataactgcgtcgttcacgcatggatgaaaa

SEQ ID NO: 54467 - DNA, 1494 bp, Glycine max
  Clone ID: PAT_MRT3847_20197C.1
cccatttgtacataaaggggcgtaaacccctttgaacctgttaaccacgcaaagtccaaaatctgcacaagaactcgccggagaaaaaaaaaaagaatgatcgacagagggaaaacgtcggtcgccgtcgtgtactccgacggaaaccgcgagatcaatgtcggcacggtcgtggtggaccccacgctcaactttaagagcctcgtcacgctcctcagccagcagatcgggatctcgccgcaccagttatccgtctacctcgcctccgtcggcaccgaccgcaagattccggtcacgtccaagctcaacctcgccgccgtgcgccgcgacggcgccgcgcactacttcttcgtgaagcgctccaagcgcaacaagaaggcgaacggaagcggaaacggaaaggacgccatgaagaagaattaccctcgtcctccgccggagaaggtcatgctcctccgccgtgccgatgccggagctccgcctttcatgccgccggttctgaatcgggcgcagtacgagcgaaggctgatgaatctgcacatcgagagacagtcttatctgatgaatatgagcctcggagtcaacggcggaagagaatcaccgaataactccgccgccgtcaccgccgccttccccgccgtgtgcgatgaatgtttaaaggcaaaagtcagcggaaataaccgcgattttcatccatgcgtgaacgacgcagttattgtagggttccggtcacgggagggaccgattacacggccggtgaagaacgccgacaaagccggcacctgaattctggagttggttgttttttgtttcgtttcgtttcttttctctcttcaaggaagagaaaaattgtgcataagaaaaaaacataaacaagaaggaagggggtagtgatcacgtgcggaggggtatacgataagcgaaagagaggtatacctttacagttatgtgtttgacatttgattaattagttcttaggtgactataagcaattacgcataataatatatagacgatcttgccctaaggggaagaaggggcttttaattattgagcttttgtagagagggttgttttggaaatttcacttatcagttggattgctttggtccaacgtcaaaattggggtgcattgtattgtgtaggaccttaacaagagaggttgaagtgtttgctcatgcaataaatgcttcctcttcttttggcattgcataatgcatgttcattttgtagtacctcgtaaaagaatgcaaatttatataattggtatgttatgctagaagcttcgtatttaagagagcatgtgagccacacattaaaaaaaaaatccaggtatctgtttcttattcgtgtttcactccaattgtagtttcaattcaattatcagattattcaaatccggtaataatgaccccttaatgatgggtggctttattttcattgaaacatcagctagtgaactttttgcagaacttgatgctactgatttatggc

SEQ ID NO: 54468 - DNA, 260 bp, Glycine max
  Clone ID: PAT_MRT3847_20198C.1
ggataccatccataaggccttcctggattaccataaatggtgggtgcattatcggctagtcgttgagcgggttgatgataaacatccttgtacagctacaaagggggattttaaggggaattaaaacacaggctgacaccacgctatttcaccttgctataaaacacaattgttttcaaatcttgggattgtatttggctgaacagtatactactcatttccggatttacagagttgacccggatactctttagtgccat

SEQ ID NO: 54469 - DNA, 466 bp, Glycine max
  Clone ID: PAT_MRT3847_20199C.1
ctcgagccgttcaaagaatggtttgtttttttctgtagagttttatacatgagctctagtcctgttcaatccaattgatttcctactatattttttgtacaaaggtttggaatatgaatttaatttatatgcactatgtaaattttttttacacatgcatccaataagaattcaccctatcaccacatcatcctattctttgatataatgtggtggaattcctgttaaatgtctgtaaaataatttacactgaccatgatataaataaactcttgaaatatattaccattaattccaactagtctttccttgagttggtcatacctttactttcccaaaacacaaatttcgttactcttattttaagcttaaagtattctggctatttgttttttacgcctaaagcttaattttgcagcatgcataattttgaatttgctgatgcaggtttaactggcctcactga

SEQ ID NO: 54470 - DNA, 297 bp, Glycine max
  Clone ID: PAT_MRT3847_2019C.1
tgctgcattaaactacagatttacaggttttcatcctatggactcaaacatcatattttgtaagttttataaggtgatctccaatgagatgaataccactccttcaagaatattccttttataactaatgacattcaatttaataatgttttgacaaactttctttaaatttacttcacaacttacaattttatatttttttctactaaaatttcaatactttaattaaatcttatttttattttatatcctcttataatttatacatttttaaatttctctttatttacttttact

SEQ ID NO: 54471 - DNA, 684 bp, Glycine max
  Clone ID: PAT_MRT3847_201C.1
ctaattttcactcctaaacgacatcgtcgttcaaacaaacacttcttctgcaaacaaaaacgtccgcgcgttaaagctttccttctccggcgacaacagcgaacgcgcgaaaccccgccacgaagcgaaagtcgtcgacgtcgatctctccctcctcgaagccattgagaaatcgcagagcgccgtcgaagccctcgacctccgagccctaaagaagcacgttctctccttcgagcgtcgcctgaaagaaaacatcgaagcgcgcctcaaataccctaaccaaccggaccgcttcgccgattccgaagtcgaactccacgaagagcttcagaagctaaaggtcctcgctagcgcgccagagttctacccggacctcgtgagcctcaacgttgttccctccatcgtcgacctcctcaaccacgacaacaccgacatcgccatcgatgtcgtgcaattgctccaggacctcaccaacgaggacgttctggacgacaacgacgactccgctagggttttggtcgacgcgcttgtcgagaatagcgcactcgagctcctcgtgcagaacctgcaccggttgaacgactccgatcccgacaagaacgccgccgtgtacggcactctcgccacggtggacaatatgcttcggagatttttggcgatttttcatgggtaagattcctgtag

SEQ ID NO: 54472 - DNA, 396 bp, Glycine max
  unsure (1)..(396): unsure at all n locations
  Clone ID: PAT_MRT3847_20200C.1
gtttcccagccttgtnggtcgncctcgnnccactggtgtgctggttggcctgggccccccnggcgcctctgttggngnngaggctcattctnngaggggnnttttgcctctcgggccccccnttgnccntggnnttgcgcgcccttgggctgctctggnnnngctttggcctcattccttctcttctgngcttccngttgcccctgnnngacctcccnctctcttnnctgnngcccctcttcnccccnnngcttntcgngngnngttgccccnntcctgtnngagaccttcncccccctgctctgtccgtnnccctccnttcttttctttttctttttttangnnggtcctcccctgcntttgtgtcggnttctgctgcttgcgcccgcccccctt

SEQ ID NO: 54473 - DNA, 253 bp, Glycine max
  Clone ID: PAT_MRT3847_20201C.1
aattaagccaaagcaagattgctttgcttacttttgtatgttcaaaatagggaataaaaggggaacttactattatttgaaacctataaataaaaaaaagatttgataacatatgcattgcttgtgtgagtctaagttctgctagaagtttgacaatgacgaggagtggtattgttagtttaaaatctaatttacagactgcggggtccaaaatcacagactgacaaaaccttggcgttaacaaggacactct

SEQ ID NO: 54474 - DNA, 338 bp, Glycine max
  Clone ID: PAT_MRT3847_20202C.1
tgcaatcaatcaattaagtcagctcgtattgtttgatccacaatatgcatacacatcttttacctggtggtagatcttggttgtatttatgctctctatagctctagcggcgtaacatcttaaaacaacttacactaactaaactagcttgttttgcctttgcaatttgcaggtttctttcttttggtgaaatggtctatagtaattataggtctgccaatgaatctcattggttaatcctgattatacctttcccgaaatgcaattagcgtcaaatggtgacaaggaagaatgttcagaaagcgaacccatcttgaatcatcaccatcttcatttgc

SEQ ID NO: 54475 - DNA, 337 bp, Glycine max
  unsure (1)..(337): unsure at all n locations
  Clone ID: PAT_MRT3847_20203C.1
gtcgcangcncgcntacgtnanctcggaatnngctcgagctcgagccgttttttagaaaacnnaanatatnncncatttnanataaaatatagcacatttaagataaaggntaanatatngtnctctatttagaaaatatctaaacattgctattgtaaaagttgnaaatgcttataaacaccctaatattattgcagaatttatagctggncaattaaagaatagagtttcctttcgtaaagcaatgaaanaagctatngaattaactgancaggcgggtncnaaaggagttcaagtacaaattgcaggacgtatcgacgganaaganattncacg

SEQ ID NO: 54476 - DNA, 339 bp, Glycine max
  unsure (1)..(339): unsure at all n locations
  Clone ID: PAT_MRT3847_20204C.1
gtttcgttgtttctggtggttntntgggnnngtggcggntcttggnntctttggggngggtggcctttctttggggggtttcgttcgngngnccnnnnnnntgcngtccgtgttggtgncnggtggngttgtgngtggncttgggnnnggggtcnctgcnngcngtnttggngtgctccttcnggcttgcggctttcgggttccttctttcnngnttggtccctttctgnncnctgntgcngggncnntgtccccttttgngcctggggnngtgtttgttttngntggtggcggtgnggttgnccttgntcttggnnnctntgnncgtttcttggncct

SEQ ID NO: 54477 - DNA, 465 bp, Glycine max
  Clone ID: PAT_MRT3847_20205C.1
atgcattgcatcaacagagagccttaagtggcgaactgggtttagcgcttgatgtgaccaatactactcgctactatgctgaatgagattggacatatagatgggattggtcatgtgatgattatatgcacaggacgagatgctggacctgatgatgaatactgtgaactcttttgtgataagatatgtattttaggatctcgatttttgctcccgcttaacttgcatcaaaagatatatacgtgtgcattgcacacatggacttaatcgcacaggttatatgatggctcactgtcttgtgcgcacggaatctctttctgtgactgaggcgataaattaatatgcttgtgcacgtcacccaggattttacaggcatgactacatcgatgctctttacatgtgatatgatgaatagatgcctggagatcttgttggtgctataactcctgaatgggatagattttg

SEQ ID NO: 54478 - DNA, 1175 bp, Glycine max
  Clone ID: PAT_MRT3847_20206C.1
agttccatgcatatactttacttgaacccgttggtgttgtgggacatatcattccttggaatttccctagcatcatgtttgtctccaaggttagcccttgcttggctgctggttgcacaatggtcctcaagcctgctgaacaaacacctctttcagctttgttttatgctcatctagctaaactggctggaattccagatggagtgctcaatgtagtccccggatttggcgcaactgcaggtgctgcaatatgctcagacatggacattgataaggtcagttttacaggttcaacagaagtagggcgtgaagtaatgcgtgctgcagctaacagtaatttgaaaccagtttcacttgaactaggaggcaagtcaccattcataatttttgatgatgcaggtctagataaagcggttgagcttgctctcatggccgtagtatataacaagggagaagtttgtgctgcaggctcccgcgtatttgttcaggaagggatctatgatgaatttgagaagaggttggtggagaaggcaaaagcttgggttgttggggatccctttgatcctaatgttcagcaagggcctcaggttgacaaaaagcaatttgaaaaaattctttcctacatcgagcatggaaaaagagaaggggccacccttttgacagggggcaaaagagtgggtaacaagggttactacattgagccaacaattttttttaatgttaaggaggacatgcttatagcacaagatgaaatattcggtcccgtgatagccctgatgaagtttaagacaattgaggaagcaattaaaagtgctaacaacagcagatatggcctagtagcaggtgttgtgaccaagagcttggacacagcaaacacaatgtcaaggtcaattcgtgcaggggttgtttggatcaactgttattttgccttcgaaaatgacattccttatggaggatgtaaaatgagtggatttggaaaagattttggattggaagccctacacaagtacctacatgttaaatccgttgtaacacccatttacaattctccttggctttgaattcctgtgtcttgtgtgtgtgaatgttgtaaactatactatccaagacacgagtttctatcaatatcctttgtctaagcaaataaaattggggacatctttattttgcatgag

SEQ ID NO: 54479 - DNA, 266 bp, Glycine max
  Clone ID: PAT_MRT3847_20207C.1
gttccctttttcaattccttactgggaaaaccaatatttctggggatcagaatgacaaaggatgatattaaagtgaatgcaactgtggatgaaaagccagtggacactcttccttatgcagccaagtggtaccacgctgaatcttctaaacgtgctcaaagctttccttgacacgctcaacgagtaagattcaaaggcgtcatctcaccacactgaacctgcacctgccaaatctgttgtcattgatggagaagaagattatgatc

SEQ ID NO: 54480 - DNA, 193 bp, Glycine max
  Clone ID: PAT_MRT3847_20208C.1
ctcaagtcctcttcctttcactttaatccaacaataataattattcgcaaaaaaaaaaaaaacacgttggacaggtaccatcatcattcatcttcattcccacatcatcagaatttcaagacttaatttttgacttactaaggaaggagccaaacaatttctcgggttcctggtcaaggtgattcctttgata

SEQ ID NO: 54481 - DNA, 553 bp, Glycine max
  Clone ID: PAT_MRT3847_20209C.1
ggaaaaaattggggaaaaagccccggcttacatattaaaaaaggacccttataaaatggattacctgggggatcaaacaggaacaaattgggaaaaaaaaacaaaaagcaaggctttaaatttagggaaaaaagaaaaaaaatttaaaaaacccctttgaagcccgggggggggggcaaaacccggtttttatttggaaacatctttcttaattctttcgaaaaaacccatcaggggcttaaagcccttaaaatcaaatctggggatggggggccccggggggggggaaacaccacgggttcaacacaggattctaggggttcacccccatcctggggaaaaaaaacgggcccccctttaaaggggggggggggaccgctaagggaaaaaaaatgcctggcccctccggggaggggacctaaactttgcccccccaactattattaggaatttcactttgggaaccttggggagggccccccccttttccggaaaacccgggggggcacccgaaaatatgggcccccgggggaaaccaaaaaccccatcaaaa

SEQ ID NO: 54482 - DNA, 480 bp, Glycine max
  unsure (1)..(480): unsure at all n locations
  Clone ID: PAT_MRT3847_2020C.1
gtcaccctcacccagatgaagatctacaccaacgtcattcgtctgtatggaatcactcgatgcggacacgggctttatatgggcgcgttggcgaagaaactgggaatgcaactgttgatcggagtcgagaacggtccggatcatcccgacaacaataattgatacggatgggagaaggtcacccttacccagataccgtcaagtacgtcatcgagaagatcaacgacttccgggcgctcgatcgatccctcggatacgccaatatccccgttggaaccgtcgaacctccaggcaccatgaccggaaatcccaccgtcatcgacgcatctgatgtggtcatcatcaacacatttggattctggggagggatcgcctacgatggatcatccaacgataccaccgtcatgaccgacgaattcaattcctactacaacagcatctncttcatgaagtcgagatatggaggcacgatgcgaaaca

SEQ ID NO: 54483 - DNA, 544 bp, Glycine max
  Clone ID: PAT_MRT3847_20210C.1
tacgaattcgagctctgtacccggggatcctctagagtcgacctgcagaaatgcattgagtctttagcagtcttagatatttcaggtaccgatagagttcaactattaaacaatcctgctaagttggaatgatttctaatcaaatctgttggatactaattgaccaacgactccttgctattccacgttcgacagtcctgggtacggcgtcataccttcacacgtagacttgctcgaggagagtggcagcgaccctacacaaatctctgtcagtacaaagctactaggacgagggtgttcacttgtatcataatacaagcctccacctgttgacttgtggtgttcaaattacagaagatatatctcaactgacttgccactgcagcgtccttcttctaacaatgtgatctgttgcgttaattcatgccatccataaacacgtcatatgggacttgatcaaaacctcacacatgtctggtgcaaaagtgataaagctctatccattgtgacaaaagaattggcctgcttcctatacaagatggag

SEQ ID NO: 54484 - DNA, 155 bp, Glycine max
  Clone ID: PAT_MRT3847_20211C.1
tttggaaatattgttaacgctacgataaaatttgtggttctggtggaccaacgggtgcaagttggaaagattaaggaaaaattagctttgaaatgttcacatgtggaactctactcagccgggtcaacgcatgtgcgatttggatcatcaattgt

SEQ ID NO: 54485 - DNA, 382 bp, Glycine max
  Clone ID: PAT_MRT3847_20212C.1
cgtctcgagaaggtattagtgctgttgttcaggttgtctcaagccggttctatattcatccacctggccttgtgcaccgtcttaattcaaacctgcgctgtgagataaggatctttgactacaaacgtttgacagcttattttaatgccacaaagtttcgcaaccggaggaggtatgtctatctcattcccgtgtttgctctcgatccaagctgtcatcttaatatagagactctcatgactactttgatatctggaattgatcttgttaagcagcttgatgtgtctagaggcgccgaatggttatagtgatagtttggcatcgtaagcagcatctggaactacgaactgcccatcccaggcctcatatttactaaactgaa

SEQ ID NO: 54486 - DNA, 429 bp, Glycine max
  Clone ID: PAT_MRT3847_20213C.1
tacgaccatgcatgcacgcctactctagctgctaattccgctcaatgccaactcctcatcctcaagaactcactatctacaatgggacacagatcaattataatatcttgtcactatatcatacccactatgaaccatatgcaaacctgatttgaaaaccacgctggaactgctattcattatcccatattgaactctattaaattgcttatcatccaatatctgacatatgatcagaatcacattaatttcaacactacacgcaaaatcacactaatttcctttagataaacagctcaagctatcaactcatccaaatctgatgcttcttcagataacactccacatggctcatttcagaaaaagccttttcaaactcctactttttctaatgtattttaagctttcgtatttaaagtctttgattat

SEQ ID NO: 54487 - DNA, 295 bp, Glycine max
  Clone ID: PAT_MRT3847_20214C.1
atggtccttgccataccatatcaagtacttgggcccattctctgtctagcccccgtcctacctcactgtcgacttcccaggtcactacggctgggacactgctgggctttcggtcgacccagataccttcgccagaaaccgtgagctcgaactgatccactccacgtgggccatgctcgtggccttgggctgcgtcttcccctaactgttgtccgccaaccgggtcaagttgggatatgctgagtggttcaaggtcaggtcccacatcttcaactacggtgggctggactacttg

SEQ ID NO: 54488 - DNA, 365 bp, Glycine max
  Clone ID: PAT_MRT3847_20215C.1
cggatacactaggatgactcctctatgtgtctcattgctaacattctttgactacactcacaatcctctgatagacaagtacacacacctttgcatctacgatcatgatatacacaattcgttgcattatggactgtttgagacatcttttcatcaaatattgattcagcattgtacatcgctcacgactatgatagattttcgctgaaccattgcatcacctttaccgatactattcgtaatgctttcctgattgccactctgacgattcttaattcttcagaatcttcacctgtgctcctgctaaaacaaaagcaaaactgatgaaggggctactaactagcttctacaacctcgaatgaatt

SEQ ID NO: 54489 - DNA, 419 bp, Glycine max
  Clone ID: PAT_MRT3847_20216C.1
gggggactagaaagtagaaacacaaagagaagacgagtcctcgagattcctaaaccaactttgcaatcgcacctcgaatcaatcgacactcagcggaaaccctagaaagtaataataataataataacaatagaatgcgaatttattagagattgcaaaaggtgggaagaggaatggcgaagcattcggtggcaatggcgaagaagcggtggctgataatgttggcggcattcctgtccgtctcaacagtgacggtgctcttaatgagatccaacaactccgattcctgcaacaccaaccattttactattgcacaagataataaccagattcgttcccctgtccaactcactaatgccgctttcagcccccttaatttcatgaagtccaagctagttctcatgggttcgcacgagctt

SEQ ID NO: 54490 - DNA, 431 bp, Glycine max
  Clone ID: PAT_MRT3847_20217C.1
ttgacgcgtgggtaaatttctgccactgcgaactctcgatcccgcgtttttcacatcaacaacatcaatcgccatttcgaccgatcggctaccgcgttcgaacccgtattgattcatccccaaatttttgatacttttatcttacgactttttttacgcgatcatctcgacaatgcctggtggaaagggaaagtcttctggcggaaagagctccggcggcaagacgagcgctgctgagggcaccaagaagcagcagagtcactctgctcgtgctggtcttcagttcccttgcggtcgtgtcaagcgttttctcaagcagaacacccagcagaagatgcgtgtgggagccaaggctgccgtgtacgttacagctggtctggagtacctgactgcccaagtcctcgagttggcaggcaacgctgcaaaggatc

SEQ ID NO: 54491 - DNA, 3054 bp, Glycine max
  Clone ID: PAT_MRT3847_20218C.1
gttctgcggaaccgaaccttacttttaaaattttagggcttaagagcgtttccccgtaaaacccttttttcttgcgcggagcttcttcgttcagctcgagagtccgccagggcgaacgaagagttgggtagttggactgatctgctacattcttctaccaagcttctcgaacaagctgctccttctgctcagttccctccacttcagaggaacttagatcaactggaagcattatccaagaagcttaaatccaagacagtaaggactgaagcaccttctcaatctattgctgcaacaaggctccttgctcgtgaggggataaatgcagagcagcttgcaagggatctgaagtcatttgaactgaagacaacttttgaggatgtttttcctgttgaagcaacaagcgttgaagagtatctgcagcaggttcatgaaatggcaatggtctctgctgtccaggaagctcagaaggataatctcaggagtttcaatgattatatgatgaaagtattagaggaggattggcaaaaagaaaaacgtgatttccttcagagtttaagtcgaatttcaacattacctaggacaaacattgctgctaacagcaacgtgggtaccctcccgggtcagcttgcatttgtgtcttctacttcacaagtctcttctggtatgcctagcatggagattgttcctctgactggcagacctattgtggagaaaaaggcatctgtctatgctgaggtagtgaaaaaactgaatcaagcaagggagtctgggtcaccatttaaacctgctgcagctttcaaaggtgcatatgaaaatttgggcattgatgctagtggtggaaagtcagtaacgatgcgaaagatatggcaccttgttcagatgctgatgggtgaggaatcagccgtgcaacgtgtttcaaaaaggatgtcattgattattggtgcaagacgccaccttgaatggggacatgagaaatacatcatggataccatacaaagtcatcctgcacaagctgctcttggtggtggtgttgggaatttgcaaagaatccgtgccttccttcggattcggttgagggattatggtgtactggattttgatgctggcgatgctcggcggcagcctcctgttgataccacatggcagcagatatatttttgcctgaggtctggttattacgatgaagcaagaaatgttgcccaatcttcacgtgcttcacatcaatttgctcctttgctgacagagtggattaataaaggagggatggtaccagaagagattgcagctgctgcatctgaagaatgtgaaagaatgttgataactggtgaccggataggtcgaactgcatatgacaagaaaaagttacttctatatgccatcatatcagggtctcgaaggcatatcgatcgcctgcttagagatcagccaagtctctttagtacaatagaggatttcttgtggttcaaattgtcagctgtgcgggattgccctagtggaccttcatccattgttctaagtgatggtctgattccatacagtttggatgatttgcaaagttacctgaataaatttgagccctcatactatacaaaaaatggaaaagatcctttggtatatccctatatcttgctgttaagcattcaattgcttccagctgtattatacttgtctaaggaagcaggagatgaaggatataacattgatgctgcccacctttcaattgtgctagctgatcatggggtcctttctgaaggtgctggttctgggcaaaagttgggagtgatggatgcttatgcggaagtgtccaccattatcaggcagtatggatctatgtatttgcgtcttggtgatctccaaatggccctagaatactacgcacaagctgctgctgcagtgggtggggggcaattgtcgtggactggtagaggtaacgttgatcaacaaaggcagagaaatttgatgctgaagcagcttctaactgaactattgttaagggatggaggcatatatcttctacttggtgcaagaggtgcgggtgaagaaggtgaattgggacgttttgtgactgatccgaaagcaggcaactatttttaattgaagctgcatgccactgtcaggaggctggaatgtatgacaagtctatagaaattcaggagagtgggttccttctcaacggcactggataccatcaataagtgcctgtctgaagctatttgtgcccttttccgtggaagattagatggcgagagccggactgctggcctcatccattctggcaatgagattttggagacatacacttattacccagatgccagtcttcaagagagagaacatgttttggaacagcaaactgtgttacgacaacttgagtcaatattgtctattcacaaattagtaaggcttggacattatgttgatgcattaagggaggttgctaaacttccatttattcctttagacccccgaggccctgacattgctgttgatgtgcttgaaaatttatctcctcatgtccaagcttgtattccagatcttttgaaggctgctctcacttgtctggacaatgtgacagactctgacggatctcttcgtgccttgagggctaagattgcaagtttcattgcaaataatttaaagaggaattggcctcgtgatttgtatgaaagcgttgcgcagaggctgtgaaattaaatcatgtgatgttatggtaattacgtttgaatgacaacagaatgtttggttaaaggttttcagtagtagcatatgtaaagtagtcttaatgacgtgcctgctgcaccctatgcccggaaatatattagaggaaatagaaaaaggaaatacgctgcttctgaatattctcttcactttttctctttttgttttagctattggtaatggtaatgtactgttcattttgtatcaataagaacattactttaagttttaaccgctccgcatatggtataacaaatcagcaaacagcatgtttttttttatctttaaaaaaaaagggggggggaggggggggggggggggggggggggaggg

SEQ ID NO: 54492 - DNA, 556 bp, Glycine max
  Clone ID: PAT_MRT3847_20219C.1
tctattcaaaattaagcagatatccctgccatgctttgcttttcagttttcattttagtggtctcattactcttagcttgttttctaatttttgtagtcagtattttaacctcttctggattcatacttcagttttttaaaaatcaacaagcttgaccaagctagataggctatacacttgcattttggaatttttataccaatgtcacatcaaagttattgttatatacttgcccttattatccacttgcttgactactaaggctctactggctgtttcatccctagagaagatttcaattcaaactttgtatgttttttcgttcttttactctttactcggtatgaacttccggctaaattgctcatattcttatttttcatatttatgagccaaattgatcatatttattctgatttcagctgttgtcatttgactctcgtggatgcttttttagtgtagaccgttattgacatggacaaaattaactaaatgtttgatcattggacatattgagtggcagaatcacagttattgagctgtagaatctagatt

SEQ ID NO: 54493 - DNA, 247 bp, Glycine max
  Clone ID: PAT_MRT3847_2021C.1
atgaaatctttcggagcggataagaagcgatgagtgtttccttatacgacgaagggaagttgtgaaacgacacaagcaagctatgaacagaagcagtgtctgttcaacgctatagaactcgatcaacacagtgaaaggagagagaaagtgtgaagaagaggaatcatctgcatcatcgtcataatcatgtcttgttgtttatcttgctgcgcgtctttgacctgtggtctctgcacctccactgcat

SEQ ID NO: 54494 - DNA, 391 bp, Glycine max
  Clone ID: PAT_MRT3847_20220C.1
tctggtaattttcacaccagttacaggctatagaagccaaagctgtgaacagtcgaaaggcactctgacaggcatggcactaatcaagtttgatactgataccccaattttttttggaatgattgatactcttccatagcaccttcttcaatcatttgcaccttctgctttagcggggaaatctttgttaagaggacctctgtctttttggggaaatcgaagccttttgcattgacataggacccaggatttggaagaaggcggatcctgagatattccttatgacccttggctataacacaaccatgagcattacttccaccttgctaggtcatcaaatatacacagccatatcgactcaacacctagcttaatgccttcatgcctaccc

SEQ ID NO: 54495 - DNA, 316 bp, Glycine max
  unsure (1)..(316): unsure at all n locations
  Clone ID: PAT_MRT3847_20221C.1
gccttaactccaccacccctctctcctcttctctttccctcttcttcttcttaccctattccacttcaattaatcaatatgcaatcatagatagctagtcttctntctnntcttttctcttcatcatccatatgtcatagacatatctctctatcttcctcctatgacataaaaatatacaaatataacacacataattagcaagaagaaaacaaaaacttgcatatgggtggtagtagtagtagtggtagtagtagttctttccctccaagtttctttanagcacttcttgtggtggggcttgtttgtcttcttg

SEQ ID NO: 54496 - DNA, 496 bp, Glycine max
  Clone ID: PAT_MRT3847_20222C.1
aggtttccgagaactccactaaaccgcggtgatttctggttctagttctcttccgctgtttgtattcttacttgttctgttgctgctgttcgtttcatctagttcttggcgctgtttgatttgttgctgaaaaacgtggttttatttttcttaaaattcttttgcacatgcgaatattctgagtctgtgatgaagatttatctgtgccggaggcgagtgatatgttttgctcgtcgatgacggcgcaattcctctaagaagttctgagctcaacattcaacctttgattggtatttgtagtgttttgtaaattatctatgtttgtttttgattttctgttaatttggagattctcaaatttgttgagaataatttaaatgttaattgggtttggttaagagggaaaagttaagcgaggtgatgatagcaattcatttgtctgtcaatccgctgatttcgtgtgatgtactaatgaatcccgacaggttctgatcgc

SEQ ID NO: 54497 - DNA, 236 bp, Glycine max
  Clone ID: PAT_MRT3847_20223C.1
gaagaagtggacaagaaaaatactctaatttagttcagtctgtcttgtcatccagaggcgtcgcccagaccccgggatcggtggaggaagatgctttgctctgtggacccgtgagcaagcataagctgccaaaccaagacgtctttttacaagggaaacggttcaacgaagccttggaaagactattttaaccccgggaacccttaaaaagggaggttgaaaattcccctaagttc

SEQ ID NO: 54498 - DNA, 1302 bp, Glycine max
  Clone ID: PAT_MRT3847_20224C.1
aggacgcatcggctcgaggggaaggacaagaatagaacccgtccaaggctccgggaagggaagagagaattttgaatattgaatcgaaccgcagcaaataagcttcaccgtaacttcgtggaatcaaagctattaagttcccaacaccacaatttaaaaagcaaggccttcgcagttgttttcaccacaacaaattctaacccaattccaaagaaaaacaccatgaggctattgaaggttgccacatctaatctgaaccaatgggcgatggacttcgattgcaacgccaagcaaatcaaagagtccatagcgaaggccaaagaagccggcgctgccattaggctcggacccgaactcgagattcctggttatggctgcgaagaccacttcttagagctcgacacagttaaccattcatgggagtgcctgaaagatttactgcttggagattggactgatggcattgtgtgtagctttggcatgcccgttatcaaaggctccgagcgctacaattgtcaggttttctgtctcaatcgaaagattattatgatacgacccaagatgtctcttgccaatgatggtaattatagagaactgagatggttcactgcttggaagcagagggatcaactcgtcgattttcagttgccacctgaattttccaaggcaataggccaaaattctgttccattcggttatggcttcattaagtttcaagacacagctattgcggctgaagtttgtgaagagctttttactccaactccccctcattctgaacttgcattgaatggggttgaagtgtttatgaatgcaagtggaagtcaccaccaacttagaaagctcgatgttcgtcttcgtgcttttataggtgccactcatactcgtggaggggtttacatctatagtaatcaccaaggctgtgatggcagtcgcctttactatgatggctgtgctagtgttgtggtaaatggagatgttgtcgctcagggttcacaattttctttaaaagatgttgaggttgtggttgctcaaatagatctagacgtggttgcaagccttagaggatctttaagtagcttccaagagcaagcaagttgtaaaacaaaggttccttcagtggaagtaccttacagactctgtcttccttttaaccttaacacgcgcctttctcttccacttaagataaagtaccacactcctgaggaggatatagcattaggacctggttgctggttatgggactacttaagacgaattgggtgcatctgatttctgcttactacttctggtggagcagac

SEQ ID NO: 54499 - DNA, 1976 bp, Glycine max
  Clone ID: PAT_MRT3847_20225C.1
ccggtccggattcccgggtcgacccacgcgtccgcccacacactccggttttttacataaacaactctcattatgactctttctctttccctgccactgaactctcacaactcaatactcatctccccaaaacttaaataaattaacaaacaatcgatctcacttaacataacgccattttcgtgcttttatggacttgcctcgccaagagcttttgtgattgtcaagttgcgaagcgcgttgcggatctgtaatcggaaatactggatcgttccaatggctgggagtaacgagcttaaccccaacgattctaagatggtggttccgctgaatatgtgggttctgatctcaaatttcaagttggcatacaatcttcttcgtcgcccggacggtactttcaaccgggacttagcagagttccttgatcggaaggttcccgcaaatgccaaccctgtggacagagtgttctcctttgatgttgttgttgaccgtgaaacgaatcttctgactcgaatctatcgtcctactgagggagaagaacgttcggtgaacattcttgaccttgagaagcctgtgagctctgaggttgttcctgtcatcatatttttccatggtggaagttttgcgcattcttcagccaatagtgctatatatgacaccctttgtcgtcgcctagtgggtatctgtaaggctgttgtggtgtctgtgaactataggctcgaacctgagaataggtatccctgtgcatatgatgatgggtggacagctcttaagtgggttagttctacatcttggcttcagagtaggaaggataagaaagttcatatctacatggctggggatagctcgggtgggaacattgtgcaccatgttgccctcaaagccatggagtcgggaattgaagtgtttgggaatatactgctcaacccattgtttggcgggcaagaaagaacagagtccgagaagcgtttagatgggaggtattttgttggagttaaggatcgagactggtattggagggcttttcttcctgaaggggaagatagagaccaccatgcatgcaacccgtttggccccaagggcaaaagccttgaagggataacctttcccaagagccttgtggtggttgctggtttagaccttgttcaggactggcagttgggttatgcaaaagggcttgagaaggctggccaagaagtgaaattgctattcctggagcaagcaaccattgggttttatttgctgccaaacaatgagcacttctctcctgttatggatgagataaaatatatttgtcagctctgactgtttgataggcttaacttttgctataatacacgacaagtcgacgttagaaaattgtgtaggaaataggtatgtatcttctaaacctttttttcctttttttgctttttgggttctttactgtaggactctgctcccgctattaggtacttgtatgctactaaatgtgtcgtgagatttggtgtaatcagcatatagctgtatgatgcttttccggagcacataatgaggaaattgggtgctgcggataggtgaaagctttttaggacaaaaaggagaggaaggtgttattctatttctgggcgtgaccttgatgccaatcaggtggggcttgtcgttgtctgacaagtgttatatatatatatatatatataactaattttggaactcggataggaaaatatcaataatatgttggtgctgttaggttatatacgtctgtgctatctccatgagtgtttgttttaagactgtttactttttttctctatatagctaatttgacattcctatgtcttgggttgggtttgtccttgttggatgatggacactccttgcaaatgtaaatggatggatgtcttttccgcagcaatgtttaaggcttgtattatgtttgcttctgtatatatagatatttttcagctttttcttatgcataaaaaaaaaagctc

SEQ ID NO: 54500 - DNA, 149 bp, Glycine max
  Clone ID: PAT_MRT3847_20226C.1
ggtgtggttccgccaggactgcgatgcaaggcaggtgccagtgcatgtcatgtgaccaagttggagggcgcctttggcgaacaacgttgtcagtggttgaaggaactagaagggataaaatatcactgcctataagatcatggaatgtt

SEQ ID NO: 54501 - DNA, 711 bp, Glycine max
  unsure (1)..(711): unsure at all n locations
  Clone ID: PAT_MRT3847_20227C.1
agctgcaaaatatctatatatacagaagcaaacataatacaaaccctaagcattgctgcggaaaagacatccatttacatttgcaaggagtctccatcgtcaaacaaggacaaacccaacccaagacatgggaatgtaaaattagctatatagagaaagagtgaacagtcttaaaacactcatatgaagatagcacagacgtatataacctaacagcaccaacatatcattgatattttcctatcctagttccaaaattagttatatatatatatatatatataacactagccagacaacgacaagccccacctgattggcatcaaggtcacgcccagaaatagaataaggccttcctctcctttttggctagaagtcagagtgggtaatcacaactttggtggttcccataaacatgacctgagctccctttgtcctaaaaagctttcacctatccgcagcacccaatttcctcattatgtgctcaggaaaaacatcacacagctatatgctgattacaccaaatctcacgacacatttagtagcatgtaagtacctatttcctacacaatcttctaacgcccacttgtcgtgtattatagcanaagttaagcctatcaacagtcagagccgacaaaatattttatctcatccataacaggagagaagtgctcattgttttgcagcaaataaaacccacggttgcttgct

SEQ ID NO: 54502 - DNA, 1993 bp, Glycine max
  Clone ID: PAT_MRT3847_20228C.1
ccacgcgtccgctttttagcattttctacagtgcgcacggcttcttatccttcaccatcccattcctcttctctttccctgccactgaacccaaacaaacaagcgctgtcgttggatctcacacaacccgattctcgtgcttttatggatttgcgtcgccaagagagtttgtgattttcatcttgcgaagcgccttgcggatctgtgatcggaatacaggatcgtttcaatggctgggagtaacgagcttaaccccaacgattctaagatggtggttccgctgaatatgtgggttctgatctcaaatttcaagttggcatacaatcttctccgtcgccctgatggtactttcaaccgggacttagcagagttccttgatcggaaagttccagccaatgcgaaccctgtggacggagtgttctcatttgatgtcattgttgaccgtgaaaccaatcttctgactcgaatctatcgtcttgctgagggagaagaacgttccgtgaacattcttgaccttgagaagcccgtgaactctgaggttgttcctgtcatcatattcttccatggtggaagttttgcgcattcttcagccaatagtgctatatatgacacactgtgtcgtcgcctggtgggtatctgtaaggctgttgtggtgtctgtgaactataggcgtgcacctgagaataggtatccctgtgcatatgatgatgggtggacagctcttaagtgggttagttctacatcttggcttcagagtaggaaggataagaaagttcatatctacatggctggggatagctcgggtgggaacattgtgcaccatgttgccctcaaagccatggagtcgggaattgaagtgtttgggaatatactgctcaacccattgtttggcgggcaagaaagaacagagtccgagaagcgtttagatgggaggtattttgttggagttaaggatcgagactggtattggagggcttttcttcctgaaggggaagatagagaccaccatgcatgcaacccgtttggccccaagggcaaaagccttgaagggataacctttcccaagagccttgtggtggttgctggtttagaccttgttcaggactggcagttgggttatgcaaaagggcttgagaaggctggccaagaagtgaaattgctattcctggagcaagcaaccgttgggttttatttgctgccaaacaatgagcacttctctcctgttatggatgagataaaatattttgtcggctctgactgttgataggcttaacttttgctataatacacaacaagtgggcgttagaagattgtgtaggaaataggtatgttactacttaaccttttttttttgtttgctttttgggttctttactgtaggactttgctcccgctattaggtacttacatgctactaaatgtgtcgtgagatttggtgtaatcagcatatagctgtgtgatgtttttcctgagcacataatgaggaaattgggtgctgcggataggtgaaagctttttaggacaaagggagctcaggtcatgtttatgggaaccaccaaagttgtgattacccactctgacttctagccaaaaaggagaggaaggccttattctatttctgggcgtgaccttgatgccaatcaggtggggcttgtcgttgtctggctagtgttatatatatatatatatataaaactaattttggaactaggataggaaaatatcaatgatatgttggtgctgttaggttatatacgtctgtgctatcttcatatgagtgttttaagactgttcactctttctctatatagctaattttacattcccatgtcttgggttgggtttgtccttgtttgacgatggagactccttgcaaatgtaaatggatgtcttttccgcagcaatgcttagggtttgtattatgtttgcttctgtatatatagatattttgcagctttttcttatgcattattatgggttaaatttctgcttc

SEQ ID NO: 54503 - DNA, 1199 bp, Glycine max
  Clone ID: PAT_MRT3847_20229C.1
cttattgctaataggtgtggagtggcgaattgcagagagggggagagggagtaggaaaaggggaacgagagcaccttcagataggacccagaacatgtcctctcaaaagaccccaagatgtgattttcatctttctccactgcactaacgcattcttttctttcacctcttcttgtgtcttatttctacctattccaatttccagccaccatgtctggcgaaatgcataccgattccgcgtcctcgtcacgagccgccgccgcctctgatcagcgtcatcagcagccggcggcggcccctctgagccggtacgaatcgcagaaacggcgagactggaacacctttggccagtacttgaagaaccagacacccccagtttcgctttcacagtgcaacttcaaccacgtgcttgagttccttcgctaccttgaccaatttgggaagaccaaggtccacttgcacggttgtatctttttcgggcagcctgacccgcccgcgccctgcacctgtcctctcagacaggcttgggggagtctcgatgcgctcatcggacggctcagggctgcctacgaagagcacggaggctcccccgagactaatccctttggaagcggagctattcgcgtgtaccttcgagaagtcaaggagtgtcaagcaaaggccagagggatcccatacatcaagaaaaagaagaagaagaaccaacttaagggccctcatgatgctccaaagtccttcaagcaattggccacttgagatcgatggatggatggatggactgaaagaacgacttacttggattggggatttaatttgccaaagtgaacgagtatgtcctaaaagtatcatctctactgctgcttcaactaaaaattatcaaagaaaaatattaatatcccacataattaatacgtacgtagttctgaacatcagaataatccttttggagcaagtttgtaggccgtcttaaatatatgttcaagttcaaccttgtaagttcttatcacatattagacctcatcgccaaaatagaaacagtcagatcgaatggctagatttatagacgtttactacttcaataaccactgctatatattactctctcaagtctcacacacacacacacaaatggcaatcacgcatgatccaaatatccaataattaaaatctatctctttttgttaaaaaaaaaaaaaaaa

SEQ ID NO: 54504 - DNA, 1294 bp, Glycine max
  Clone ID: PAT_MRT3847_2022C.1
tacggctgcgaggacgacagaagggtacggctgcggaagacgacagaagggtacggctgcgagaagacgacagaaggggacaaacaatttactttactacaagctatctcagcttgttagcactttctttttcttcatttcattatttttctcaaaatgtcaactttcatgttgaaaatcttccttctaatttccatctttcaaatctctttcgccactaggaggttgaatgagttagttcaggaccaaactcagcttcttcgttaccacaatggccctcttctctctggcaaaatctccattaacctcatttggtacggccacttcaaaccttcccagaaggcaatagtctccgatttcatcacctcgctgtcaccctcatcccctcacagcacccaaccatccgtcgccacgtggtggaaaaccacagaaaaatactaccaccacctcagtaatactaaaaaaacctcccctctttcaattccactcaataaacagattctcgacgaaaactactcgctcggcaaatccctcacgagcaagcacctcattcagctagcttcaaagggtgaccacaaaaacgccatcaacgttgtgttaacttccgctgacgtggcagttgaaggtttctgcacgagccgatgtgggacccacggttcttcctcagcgggccatgcaaagaacaagaactacaagttcgcatacatatgggttgggaattcagaggcccaatgcccgggccaatgcgcgtggccgtttcaccagcccatatatgggcctcaaagcccacctcttgttgcgccgaacaacgacgtgggcattgacggaatggtaataaacctggcgagcctcttggctgggaccgttacgaacccgtttggcaacgggttctatcagggcccagccgaggctccactcgaagcggctacggcttgccctggggtttatggcaaaggggcttaccctggctacgctgggaatttgaacgtggactcttccactggtgctagctataatgcgcacggtgctaatggaaggaagtacttgcttcctgctttgtatgaccctgccacgtcatcgtgctccaccctagtgtgagtgatgagtgctaatagtttagggagtataagcattattatgtagggattattgattattcatttattcatttgtttattactactactgctactgtatgttttgattatttggattaattaataacgtggaagcaaatttataaaggtttgctttttaaagaaaaaaaaaaaaaaaaagaggaaaaaggaaccgc

SEQ ID NO: 54505 - DNA, 372 bp, Glycine max
  Clone ID: PAT_MRT3847_20230C.1
cttgggaggaactcaatcaaagaaccacatcaaaaattattaaaacaattaggaatagacaaaaattacctatacgaacttagatcaactagtatgctcccatagaggaaagttttgcatatcaaagaccagactttaggtcaaccccttatttacaccgttaaaaaaaacaaaaaaatagacgcaaatttcaaaagggaaagatgattacccattgggacctttatagtcgggcccggggcattaaaaccgaatttcaccatgatttccagaattaacaccaaccctttctaaaatactaaccgatttcacaaaagctttttgaaaagcttctttattcgatgcaaataaaatgcctgggggctttgaacc

SEQ ID NO: 54506 - DNA, 376 bp, Glycine max
  Clone ID: PAT_MRT3847_20231C.1
cacggaaacctgcctcagtgtaacagcgtaaaagcctgccaatataagaacaaacagatgggggccgaataacattgttaccaaactccagtgccactaacccagtattttttccattctccacaccaagctcatgaaagttttatcccgcaaaccggacatacactattggtaattacaatctttttcaggtgggagagcggagcaaacacacttacgcatgacatagcataagtaagacacaggcgtgtttcaaatgcagcctcttgacatgtggtctggttcaacatcatcgtgctcctggagctcatactgcccatcatcctgggcagggggatcctggcactggtggcactgtgaaacaaggtcgttcatg

SEQ ID NO: 54507 - DNA, 113 bp, Glycine max
  unsure (1)..(113): unsure at all n locations
  Clone ID: PAT_MRT3847_20232C.1
cacgccgtctcgtacggtctgctggaagaacgactataaggggtgactttttcttggcaccttatgangaaatcaaagagctttgggttctcggggggtagtatcggtcgcac

SEQ ID NO: 54508 - DNA, 749 bp, Glycine max
  Clone ID: PAT_MRT3847_20233C.1
cccacgcgtccggaacgaaccaacgcaacgcacagcacacaccatttaaagggaaaacaacggaacaacagtgaaggaagagagtggtgtacgacactgctgcttcgcactcgatccgttacccctgcccgaacatagcagaaccaaacgacgcccaggtttcggaattgtgttctaggtttttgagtttcgattccgatcgaccgacgatgctggccaatcatttccaaaacggcatcgaaacggcgaggctcgtttggtcgcggattcctaattcggaagaatcgcagctcctcgacgacgccgttggcatccttaagaagaacgacggaggcggtgtcgagagccttgactatgaagtcattgagaattttgcttatcgtgaggaacaggcgcagagagggaagctgtatgtgagctatttgctggtggtgaaatggttctttgccttgctcattggcatttgtacaggacttgctgctgttttcatcaatattgctgttgaaaattttgctggctggaagttctcagtgacatttaatataattcagaaatcatatattgctggatttgttgtatatgtcctgatcaacttggctttggtgttttcctctgtatatattatcacacaatttgcaccagcagctgctggatctggtattcctgaaatcaagggttacttaaatggagttgatattcatggcatccttcttttcagaactttaattggaaagatatttggaagcatt

SEQ ID NO: 54509 - DNA, 1395 bp, Glycine max
  Clone ID: PAT_MRT3847_20234C.1
gccaatccaatcccagccgtggtacattctcttggggccagaaaaaccatgaacacgccgtggcgtcggaattgaatgcgcgcgtgcgcacgtgtcgaacgctacaacaattttcttctccaattcaatactagtactataacatagacgattagacggtggagtctgatgatggttcagctgtagtagccacatctggtgaatctgtgacagaggttctgaaaattaaggagtgggaggtgggaatgttccaaaatgaggttgcagctagccagggtataagaataaggagaaggcctccatctggaccccctttgcattatgtaggaccatttcaattcaggttgcagaatgagggcaatacgccccggaacattttggaagagattgtgtggaataaggacacagaagtctcacagcttaaagaaagaaaaccccttggcgtgctgaagaaagctcttgaaaatgcacctcctgctagggattttattggtgctctaaaggcagccaacgaacgaactggacttccagggttgattgctgaagtgaagaaggcatcaccaagtagaggtatcttgagagaagactttgacccagttgaaattgctaaggcttatgagaaaggtggagcagcatgtctaagtgttttgacagatgaaaagtattttaagggaagctttgaaaatcttgaggcaataagaaaggctggcataaagtgccctttgttgtgcaaagaattcatcatagatgcatggcaactctactatgctcgaactaaaggtgcagatgcagtccttttaattgctgctgttttgcctgatcttgacatcaaatacatgattaagatatgcaaattactcggattgactgcgcttgttgaggttcatgatgagagggaatttgatcgtgttcttgcaatagaggggattgagcttattggcattaacaaccgcaatcttgaaacatttgagttggatatcagcatcacaaagaaacttcttgaaggagagcgaggcaaaataatccacgagagaggcataattatggttggggaatctggtctctttaccccggacgatattgcctatgttcaggaagctggtgttaaagctatattggttggagagtctattgtaaaacaaagtgatcctggaaagggaatcagcaatctctttggcaaagatatctctttgggttgaagtgagctatatttcttgagatataagcttttgagatgacagattttgctcaggttaatgatttgataccttcgacctttgcttgtaccaaattatcaaaatcttaccagtagcaaatatgtaccaaaataaactcttattgtttaataatactttgcaactaaatgatatcattttgagataatagtttggcgac

SEQ ID NO: 54510 - DNA, 456 bp, Glycine max
  Clone ID: PAT_MRT3847_20235C.1
ggctcgagccaatcccagccgtggtacattctcttggggccagaaaaaccatgaacacgccgtggcgtcggaattgaatgcgcgcgtgcgcacgtgtcgaacgctacaacaattttcttctccaattcaatactagtactataacatagacgattagacggtttggcttccctcaaggctccctttccggccaccccatttctctcttccagacccagaacctctattcttccatcccaagccagttttcgtaaaagaagctcctttttatccttttctgttcatgcccaggtggagtctgatgatggttcagctgtagtagccacatctggtgaatctgtgacagaggttctgaaaattaaggagtgggaggtgggaatgttccaaaatgaggttgcagctagccagggtataagaataaggagaaggcctccatctggaccccctttgcattat

SEQ ID NO: 54511 - DNA, 996 bp, Glycine max
  Clone ID: PAT_MRT3847_20236C.1
ataaaatttaacagtaatgcccttcaattttaattttgtgccatttttagctcttcacaagtgccaatccaatcccagccggtgcagaaaaaccatgaacacgccgtggcgtcggaattgaatgcgcgcgtgcgcacgtgtcaaacgcgacgacagttttcttctccaattcaatactactactactactattactataacatagacggcgtgttcttctttcaaaacccggttcatctttcttttttgttgctgccatattcctcccattttttttccttccttcaatctgctgcttcaatggaaggtttggcttctctcagggttccctttcagaccacccaattccactcttccagacccagaacctctattcttccatcccaagccatttttttccacaaaagaagctccttttcatccttttctgctagtgcccaggtggagtctaatgatggttcagctacagtagccacacctggtgaatctgtgacagaggctctgaaaactaaggagtgggaggtgggaatgttccaaaacgaggttgcagctagccaaggtataagaataaggagaagaccaccatctggaccccctttgcattatgtaggaccctttcaattcaggttgcagaatgagggaaatactccccggaacattttggaagagattgtgtggaacaaagacacagaagtctcgcatcttaaagaaagaaaacccctcggtgtgctgaagaaagctctcgaaaatgcacctcctgctagggattttattggtgctctaaaggcagccaacgaacgaactggactgccagggttgattgctgaagtgaagatagcgtcaccaagtagaggtatcttgagagatgactatgatccagttgaaattgctgaagcttatgagaaatgtggagcagcatgtttaagagtgttgacagatgaaaagtatgataacgggagcttttgaaatcgtgacgcaatgagtatggctggctta

SEQ ID NO: 54512 - DNA, 1102 bp, Glycine max
  Clone ID: PAT_MRT3847_20237C.1
tttttacatgtgccaatccaatcccagccgtggtacattctcttggggccagaaaaaccatgaacacgccgtggcgtcggaattgaatgcgcgcgtgcgcacgtgtcgaacgctacaacaattttcttctccaattcaatactagtactataacatagacgattagacggtgtgttcttcttttaaacccttgtttcactttccgtttcatctttcttttttgttgctcagcaatccctcccattttttttccttcaatctgcttcaatggaaggtttggcttccctcaaggctccctttccggccaccccatttctctcttccagacccagaacctctattcttccatcccaagccagttttcgtaaaagaagctcctttttatccttttctgttcatgcccaggtggagtctgatgatggttcagctgtagtagccacatctggtgaatctgtgacagaggttctgaaaattaaggagtgggaggtgggaatgttccaaaatgaggttgcagctagccagggtataagaataaggagaaggcctccatctggaccccctttgcattatgtaggaccatttcaattcaggttgcagaatgagggcaatacgccccggaacattttggaagagattgtgtggaataaggacacagaagtctcacagcttaaagaaagaaaaccccttggcgtgctgaagaaagctcttgaaaatgcacctcctgctagggattttattggtgctctaaaggcagccaacgaacgaactggacttccagggttgattgctgaagtgaagaaggcatcaccaagtagaggtatcttgagagaagactttgacccaagttagcctatacaattttatttcattttaggactgttagggggtttgaggggggattgtgtgttggtgaatagaatgtagaagctgttgatgttggaggttgtttggagtgaagatgttgttgttgttcaccgaggtgggagaattatctgtcatgaagatgcattggttgttgggaggtttccatgggatgagtgtttaaaaaaaaaacaaaaggcttaaatatttggatggctggtgtggaaagatggaaattggt

SEQ ID NO: 54513 - DNA, 493 bp, Glycine max
  Clone ID: PAT_MRT3847_20238C.1
cgagccgattaggttcgagtgttgatcagttcaaacagcatttcccggagggtaaagcccgtgtagaaacactttacattatcctcgctttttactcgaacggatgcaccccttccaaggtgaacaatggatctttccttggaaaaccctcttgttagaaaactttctttgaaaaatgaataatccttttgaccacaggagtgtgtggtttgaattccagggatgcactcagttctgcgcgaacggctatttggtaactgaaaccattgttacaagggatgggccagagaaagctgatttttttgggggaggcaataacgcatgcattattaatagtctaacacaaagcacccccggagactgctacttctgcaataggagaaaccttttttttttcttaccaaggtttgttccgcgtggccgaaccatttgaaacaaagactttttttagaagaacctggtcttgctttaatgaaaaggtccctacttttta

SEQ ID NO: 54514 - DNA, 139 bp, Glycine max
  unsure (1)..(139): unsure at all n locations
  Clone ID: PAT_MRT3847_20239C.1
catgccacgcccgtacgtnnaagctcggannnattcggcttcgaggggnnaagccagcnnngctggactngnngtcgctggnngtcacattaaccnnngcaatgtagctagnnnttgtcannttcatggcgcnnatgaa

SEQ ID NO: 54515 - DNA, 268 bp, Glycine max
  Clone ID: PAT_MRT3847_2023C.1
gggcccgcccgcaataccgggccgaaaacgcgggcggaaaacgcggccgccaaagttttggagcttgttgagaacgctcaaacggacaacaagaggacgaggaagggaccaaggcacaaacaagtggcggataggaaccaccaggaggcgagcaaactgatgggagcagggaccatagccaaacggtggcggggcgcctaacattgaccaaaattcgccgcccaacaagggcgctggcaacgggaagaccgacatcggaacggctacc

SEQ ID NO: 54516 - DNA, 334 bp, Glycine max
  Clone ID: PAT_MRT3847_20240C.1
ggcttgaggttcgagaacgaagaattaactcgtgtggataagattcaagacttacaattgctgactgaataagccagtggtgattctttgctaagctcatagatcgtaccatggtactgaaagacatctgaacgctttatcatctgaatcatgagacccgcgctgacagacaccgagatgtcgtgaatccgtcggcggagcaggacatggaaacgcggtagagcctgaaagagcaaacgagccgctttactatgacaaggaagatcacagatccgtggaagaagcagcgcatttggctgtgggacgttcgattccgccgagagatgcacgtgcg

SEQ ID NO: 54517 - DNA, 318 bp, Glycine max
  unsure (1)..(318): unsure at all n locations
  Clone ID: PAT_MRT3847_20241C.1
nncaaannctncnnccacaggagngnacaggccccacngacagnggnannngntnacanngangtncantnnaccacncnnannagngagnnnncacgnaggcacagacancgngagagaananncngacacaggnnnccnnatacggnngtangnnagtngaggannaanngccannacagacgaannancncnnacnagcaacannagancanannannaagcntnctcccannngatcaggncncanaggacngagnncanaagaccaagaggagnnnnnaagagacggcngagngcnnnanaagangtgnantt

SEQ ID NO: 54518 - DNA, 387 bp, Glycine max
  unsure (1)..(387): unsure at all n locations
  Clone ID: PAT_MRT3847_20242C.1
ttcctcgggntcgactccacgccgnntccgcccacgctnngtccgcccacgcccgtctcgttttcaatatgcccgtcaggtcagggaagcctaaatatatnagggagataggagatgnaagggttnnngaatcggcttagacctcggnngtatctgtatctccagcacatttgactgtgggtggacattttatcacgttgcgaccttgataataatcgatcccacggtttatagaaaacagtgtgggagagtagcagtgtaacctaagtgtacctatagttactgtaaaaatcagggctttgaaaaacgtcccttttaaaagggagaatgtctcaaagggacgaccaatatgatagggaaagaaaatgtaattttcacggtcaaaaa

SEQ ID NO: 54519 - DNA, 480 bp, Glycine max
  Clone ID: PAT_MRT3847_20243C.1
caattcctacttttaaggaatatttcaaattcttttacacttattgggtttttaagtcatttttccttcagtttttttcccctttaaaaatagacttgcaaccaccatgatgtcattgaataatttaacaaaattaagcattttttcttataactgcactgctggtatctcttctggtatagcaaatattccacataacacttgaagtaattatgtccctttctaactgatttgccatttatgttttgtaagctcagttcagttattagttcattagttattaatacattggcatgaagaattataatgacattattttaccttctttctgctgaaaattcttaaggttacagtctctagtacactttattattcatttatcatttgctgagaagagcaatgtactcataaattattttgccattttttattggtattattagattcttggggcattggcattttttaattcactataaa

SEQ ID NO: 54520 - DNA, 238 bp, Glycine max
  unsure (1)..(238): unsure at all n locations
  Clone ID: PAT_MRT3847_20244C.1
tgacagacgcnagatcaactactcccgatgtttttnnnnntttttcctccaacatcctctgcatgtgattcatgccttgctgaaatcttgccatnnctgatcttaaatcattcattatctcccactcaatttcagaacgatgcatgctatggcgngaccatccagcttgatgcatatcttggtgccacagaggttgtggtggaggtactgctggataatgcaacaccagtgaaggtct

SEQ ID NO: 54521 - DNA, 158 bp, Glycine max
  Clone ID: PAT_MRT3847_20245C.1
attccgtatgggcgggggggggtattgaaatctgagaagtgagatacactaagttatactcgagaaatacactctaattaggtggaaagataattgggtgagcgggggaacattggggggggggagttcattttcaaatttttccactaaaatattat

SEQ ID NO: 54522 - DNA, 215 bp, Glycine max
  Clone ID: PAT_MRT3847_20246C.1
gcggcggatcgacgaatataaattgccattgttcgcatttacatgatgatagagagcgagagtgattgcgctgttattttgctgagcgcacaagagagtctgacattgatggctacaattcgtcacaacaaaggctcgatgacggtccctcatgcattggaagagcgtctatcttttttcataatatgcctcaaagttttactaccggtgaccct

SEQ ID NO: 54523 - DNA, 194 bp, Glycine max
  Clone ID: PAT_MRT3847_20247C.1
ggctcgagcttgggaaacgagctcatgtttttgaggacgcccccgctgctctgcgtggggacttttttggctaccacgcatatcattaccatcactcaggccaagactgtaccacccattcttgacgtatctaaagtcaacccgaaccagttcacacggagggtttggttacgggacagcgctagttggatacc

SEQ ID NO: 54524 - DNA, 797 bp, Glycine max
  unsure (1)..(797): unsure at all n locations
  Clone ID: PAT_MRT3847_20248C.1
agctcaagtctctatatcttcccatcttgttatttattaccttcattgttattctttaatgtttgttcgagtaaaaccaattcatcacaaagaaattttacataaacaactgagtgtaccggtacaaatgagacgatgcctatcggattgagaatatttaaatggatgggtataagctatagagaagtttttatcctcagcagtcaaccacatatcgctcttgatccctattccacaagttaacagttatagcatatatttcatgcagaactccacactaatcagagggaaacaaaaatccaattacgggcttgtagaaatagaaatgttgcgtcttggaagttgaaattggaggcaagaggataacatgatttgaagcctgaagccacaagccaaggcggttgtcagagttctaccatgttaagtgtattcacatcgattgatgataaagattactgaatgaagctgtggtggcagagaactggtggtctataaaggaacaacaaacaaatgcagaatatctcaatgagaaatatttgatgcattacattgtaaaccttcttgccacctcggtgaaaccttatcttcgagaatcgcaatactgaggaaattcacatttgcacaaaccttctctaacctttcgaaatgtaaaagatacccttcttgaagcccttctgatgactttgccattcactttgtctatcttgtggtgtggaatgtaatgatgccatgcataacgtgcttctccagnncagagaagcnnngatcgagngggaagatagatagcccttcttata

SEQ ID NO: 54525 - DNA, 222 bp, Glycine max
  Clone ID: PAT_MRT3847_20249C.1
catcaatcctctcccggaaaccacctattcccattctgggttttgatctctccgagtttaaggttgtgggattttcatgcctttgtgatatcctgatgtgggttgggtaatttggaaggtgattaatggttaatggttgttcctctccaatcgttatttgaaaggaattgttggaagttggtgtttgtcaggttcacagtatccgcttggcaaattgacata

SEQ ID NO: 54526 - DNA, 313 bp, Glycine max
  Clone ID: PAT_MRT3847_2024C.1
aaagcacaatttgggggggaagcaatttacatttcagctttttattaaaacagtttccatgcccacacaaaattttatttatgaatagtttttttcctgcggggccttgattaaatctcactttataataaaaaacacaggcggaccactttaattcccttttttttattgaaaaaaactttgggatcccttttctggactaattgcaataacaaaagggattacaactccccaaccaatttttccgaattagctgcaaattttaaaagggttccctggacccccctttttaaaatttttaaaaaaacctttg

SEQ ID NO: 54527 - DNA, 263 bp, Glycine max
  Clone ID: PAT_MRT3847_20250C.1
tccaggcgtgcgaagacttcagaaagggctactgagggggtataacaattttggaaggggaaagccaataccgtcccatttgataactaccaggcaactataatttttgactccttctgcaagatacacgattatatgactatcctatccatcaaacttcatgacccaaccatcaagtttacaattatacacactcttactctgacaatcttaagacacaactttaattagaacctatccttctccccatagagagttactgc

SEQ ID NO: 54528 - DNA, 379 bp, Glycine max
  Clone ID: PAT_MRT3847_20251C.1
gcctggtgtaatgagactacggatggagagaccataacacaggtgaagattagatgtacaacagggtaaatcgaggagcggcaagctactggcagcttatggggtcaaacattgttatacacattcatgtacgcaccatgagattataagtggctcgaaaagcatattgtgctcatggtaccggatatagtcatggcgcgggatcatcccatggatcggattaagcatgtggatactgaggatgtgacacctgctacaggagcgcacgagcattgtctaatacactagctagcacacgatggatgatatgaaagactaggaattcatccagaatacgaaagctatgctgagctagatgatataaaggtactctgtcaaa

SEQ ID NO: 54529 - DNA, 386 bp, Glycine max
  Clone ID: PAT_MRT3847_20252C.1
cactctggtaggcattcatcccctggacaacgataagaaaaagtatgaacatgatggattgttaggaatcaactatggatctcgggggtgtagaatatgtgggtcttgcacatgtgttgattagaccagtccctacattctctccgtcctctcctctctccccttccgccttctccgacgcccaccaccctcacgcttaacaaactcccctcggcaacaccgcacccgcttaattgagcagggtggtctcgacgaggatggcggtgactcggtatgggtcgacgttggaagccggtcgtcggtcctcgaggtagccgtagccctgctcgccaacgtgtcggggaattcggatcgaggcacctcggttggcaacaccagccgagaac

SEQ ID NO: 54530 - DNA, 622 bp, Glycine max
  Clone ID: PAT_MRT3847_20253C.1
atggcccctggcattgctaatcaacttcccaacattctcagagacgttggagaagatgcaagaagaggaagagtatatctgcagaagatgcaagaagaagagtcctcaagatgaattggcacaagctggcctatcagatgatgacatttttagagggaaagttaccgacaagtggcgcaatttcatgaagggccaaatacagagagcaaggatgttttttgatgaggcagagaagggagtttcagagctcaactctgcaagcaggtggccagtatgggcatctttgttgttgtataggcaaatcttagattctattgaagccaatgactacaataacttcactaaaagagcttatgtaggtaaagttaagaagctgctatcactacctgctgcatatggaagagcacttctaggtccccaaaagttgaccaaaatggttacgagaagtatgtaaaagttgttccaatgagcatcaaattgtttgagcttgtaaattctgttcactagaaatcagaaagctataaagtgtatattttttttcaagttttaatagtatacatctcaagtaaaaaatattcaacaaaaatcccagtggggggggggggggggggggggggggggg

SEQ ID NO: 54531 - DNA, 506 bp, Glycine max
  Clone ID: PAT_MRT3847_20254C.1
tttagcataaaatatcgaactcttcattcattccattagattttaccgacataaactaccaccgtcacgacttgttctatatatgctcattgttccatttctagaattcccgtaaaaacataagagcttttcatcagtcctagctagctagcaatatcatcatgatcaggcctcaacgacaaggttttttatagtacgaggattggcgtcaaaaaggatctcgagtgacttggtttttctgttccgaactctgcctgtttccttcaacaactcgtccaaccttctcttctcatcaacaacatcaggatttgctgtcccaagcttttcctccctcattaccacaatgttttcaagaatttcaattgcttcatccaaccttccaattgcatcatacgtgccagcaagattgccatatactccaagtgtttcagggtgataaggtccattctcttgttccagaatgaccctcgcttcttcaaataattcgacagcctcatctaaggcat

SEQ ID NO: 54532 - DNA, 522 bp, Glycine max
  unsure (1)..(522): unsure at all n locations
  Clone ID: PAT_MRT3847_20255C.1
aaaaaggtccaaaaacaaatgaatgaaaggatgctctctgtctcacacacacactccgtggaagaggtaacttgaagtcttcaacgatggctacgaattcgattacctcatcctccttccgaatagtctcaaccagaatccgtcttctctctcttctgcaaaacctcacttttccttacattccccacanaagtctttctcaaaacccatcaccttccacagatttcaaccatcaccaccaccctcatcatcatcaccatcagcatcccttcaacccatcgaagaccttcctcccaagctccaagggccaatccgtccccgaaccaaaagccaaatacgaacagctcatcttctacggcaagaacctcaaacccctcgaaccccaattcaaaaccaacgacaacaaggtccaaggctgcgtctcccaagtctgggtccgagcctacctcgacccgaaccgaaacgtcgtctacgaagcggactccgactccggcctcaccaaaggcctcgccgcgctacttg

SEQ ID NO: 54533 - DNA, 1927 bp, Glycine max
  Clone ID: PAT_MRT3847_20256C.1
tacggctgcgagaagacgacagaagggggaaccaaacaacaaatattcatggctttctttattctctccttcctcttccttcttcttgtttcatctgccactgcttgtgatcgctgcttgtatcaatccaaggcttcctatttctccaaagcttctgctctttcatctggggcatgtgggtatggctctttggcactagacataagtggtggacaccttgcagctggtgtggattctctcttcaaaaatggagcaggttgtggtgcctgctttcagataagatgcaagaacccaactctatgtagcaaagaaggtaccaaagtggtattgactgatcttaatcacaacaatcaaactgattttgtgctaagcagcagagcctttgcgggcatggctcaaaagggtatgggccaacaaatactgaagcttggcattgctgaaattgaatacaagagagtaccttgtgattacaaaaatcagaatttggccgttcgagttgaagaatcaagcaagaagcctgattacttggcaattaaatttttgtatcaagggggacaaacagagatagtagccgttgatgtggctcaggttgggtcttcaaactggagcttcatgagcagaaaccacggggcagtatgggacacaagcagggtaccccaaggcgcattgcaatttaggttagtggtaacggcagggtatgatggcaagtggatttgggcaaagaaggtcctacctgctgattggaaaaatggacttatatatgattctggccttcagattactgacattgcacaagaggcttgttccccctgcgatgatgggacatgattctttgctgaaaaataactcacatatacgcatagatagtaggcatcaattttattaatactatactataggctcacaatgcaacttataataatactaaggaatcatggactagcttaataaatttgaaaagcattcttatttgtaaaccactctccacttcgttactttatattctttctcattgtaagttgtaaccaaccaaaataatatattcttcctttttggagtaaaaaaaaaaaaaaaaaaaattttgagaaataggtgtttaatggagcagagaaccttgtgaatacaaaaaacagaatttagccggtcgtgttgaagaatcaagcaagaagccagaattcttagcaattaaatttttgtatcaagggggaccaacggagatagttgcccgtgatgtggctcaggtgtgttgcaagacataaaacattagtattaccaaattatttgttatttggttgaataaaatttgctaaccgttgccttggtgggttactattatttattaggttgggtcttcaaactggagcttcatgagcagaagcgacggggcagtgtgggacacaagcagggtaccccaaggtgcattgcaatttaggttagtggtaacggcagggtatgatggctcggaattctgggcaaagaaggtcctacctgctgattggaaaaatggacttatatatgattctggccttcagattactgacattgcacaagaggcttgttccccctgcgatgatgggacatgattctttgctgaaaaataactcacatatacgcatagatagtaggcatcaatttaggttagtggtaacggcagggtatgatggcaagtggatttgggcaaagaaggtcctacctgctgattggaaaaatggacttatatatgattctggccttcagattactgacattgcacaagaggcttgttcccccttgcgatgatgggacatgattctttgctgaaaaataactcacatatacgcatagatagtaggcatcaattttattaatactatactataggctcacaatgcaacttataataatactaaggaatcatggactagcttaataaatttgaaaagcattc

SEQ ID NO: 54534 - DNA, 671 bp, Glycine max
  unsure (1)..(671): unsure at all n locations
  Clone ID: PAT_MRT3847_20257C.1
actccaaaaaggagagaatattatttannttttggttggttacaacttacaatgagaaagaatataaagtaacgaagtggagagtggtttacaaataagaatgcttttcaaatttattaagctagtccatgattccttagtattattataagttgcattgtgagcctatagtatagtattaataaaattgatgcctactatctatgcgtatatgtgagttatttttcagcaaagaatcatgtcccatcatcgcagggggaacaagcctcttgtgcaatgtcagtaatctgaaggccagaatcatatataagtccatttttccaatcagcaggtaggaccttctttgcccaaatccacttgccatcataccctgccgttaccactaacctaaattgcaatgcgccttggggtaccctgcttgtgtcccatactgccccgtggtttctgctcatgaagctccagtttgaagacccaacctaataaataatagttagcataattttattcaaccaaattacaaataatgttttatgtcttgcaacacacctgagccacatcaacggctactatctctgtttgtcccccttgatacaaaaatttaattgccaagtaatcaggcttcttgcttgattcttcaactcgaacggccaaattctgatttttgtaatcac

SEQ ID NO: 54535 - DNA, 644 bp, Glycine max
  Clone ID: PAT_MRT3847_20258C.1
tgaaattgaattagctggggcatgtgggtatggctctttggcactagacataagtggtggacaccttgcagctggtgtggattctctcttcaaaaatggagcaggttgtggtgcctgctttcaggtgggtgtgtgtacaattatcaggaccacgtccaaccaatttttatttcattaattattattgtcatgagagtagtctaatgaacattttttttaatgtaattaatggatgatatgctgcagataagatgcaagaacccaactctatgtagcaaagaaggtaccaaagtggtattgactgatcttaatcacaacaatcaaactgattttgtgctaagcagcagagcctttgcgggcatggctcaaaagggtatgggccaacaaatactgaagcttggcattgctgaaattgaatacaagaggtaggcctaaatcaaatcaactttagttttagataagttttattttatccttttctttcttgctttgcgagtggttttggttttggttttggttttggtccgtccccacttcccacctaacggccagcgccaccggcccacccaccacctatagggaacaatcaatgtggaccaacgtttaacaactatgtaattaggacaatcatgttgtgccacttt

SEQ ID NO: 54536 - DNA, 162 bp, Glycine max
  Clone ID: PAT_MRT3847_20259C.1
acgcgtacatcaactattaatcggctcgagcaatctgtctttttttaatcttgagggtctaatcagcaaaacggtggttttgaccctgtcctttatgagaatccatgctcttactcaagttccaagcttaaagccggggtaagactatccgctcttgatttt

SEQ ID NO: 54537 - DNA, 239 bp, Glycine max
  Clone ID: PAT_MRT3847_2025C.1
ttttgtttataaaattattgaccttgcattctaaggtgcagttctttttttcccttgggagaggggttaaaaatgtatttgtaaatttttttcgtttgagcatcataatttttattttaccataaattacgacttgcatgaaggattaattgaagcttttttacgcaagataaactacaaaaaaggtcggccactcctaacattgtccgtcgtccgggaattgaattccggccggttcc

SEQ ID NO: 54538 - DNA, 135 bp, Glycine max
  Clone ID: PAT_MRT3847_20260C.1
accaagaatcattgatcctcctatcatttcttttcactgcattgatcctcctatcatttctttttactgcattgatcctcctgtcataatccggggaaagaatttaacaatgaataaaatgctttacaaaacggt

SEQ ID NO: 54539 - DNA, 547 bp, Glycine max
  Clone ID: PAT_MRT3847_20261C.1
ggtgaaataagcttatagatttatccattatgattacgaacattgctagtttagacaaagcatgaatgattacaactagttacaactacaatacaccatccaagaaaggagatataaagaaggaaaagatcacgggttgatccctcctgctaacatttaacatttattgataaaaaaaatccaggaaagaaattaacgaggaatgagttcataatacaaacaatatatgaagcaaagtgtatgatctaaggcaaagagttggtgtagatgtagtcttcattctccaaaactgtatcttccaacccaccatttccttccctgtactcaaagccttgtttttcacagccacctgatcttctcaattcaaaactcacgacactctcagaaccaacaactcgttcgttggtaactgcttgcccttgaacagtagtgaagatgaaaaccaggaagagaagcaatgttggtttggagagtctcattttattggcaagaaactttgggacctttaaggggttaattaaagtatgattatggatctgaatggagg

SEQ ID NO: 54540 - DNA, 775 bp, Glycine max
  Clone ID: PAT_MRT3847_20262C.1
ttcaattattaatgtttttacttcactagaatagggaacaaatgcatacacatcaagagcataagtaagccatcagcttaacatagtcctagaagattttaggaaaagcttttgcaacataaactaagattcatcttaacaagcaagaagagaaacaaagagccactagaattgcaaacaataaaatgaaactatgaagcaaaatcaccccgacaaagttccaaacaattaaaattaaaagagtcatctcaaaattaaacttaaggagtttactttgaatacaaccaatgcagttcagtgaatacaaactaggcacttcatgcaaagtctaatagtaattgatagcatcaacaaaaaagcttaactctcagtttgctccctcaacctcctgatggtgctccgtacagtcacggcacttgcggtattcaaagtgtaagcaccgccagctttcactttaccacagtccttgcatccccatattcccacagctttcctcttcacagcatactttccacaaaattcacagaaaaacttgctgtgttgactaacttccatcttcttaatctgcttacgcagactggcgccataacgggtaccgtattttccaacaatgccagccttctttgttctcttagtctgcaaaaacaaaacgcggcagtgtcaacataaaacgacgtacaatagaaaccctaattgtgatggtggaagtgaaagagaagagagagagagagtaccatgttttctagatcgaaggcgctgcagagattggggcggt

SEQ ID NO: 54541 - DNA, 641 bp, Glycine max
  Clone ID: PAT_MRT3847_20263C.1
acgcccctgcgttactttgtcttttgcatgtcagctgaccagcacccagaggcggcccagccgtcgccgacccgccggctccggcacctgttcgacggcgacgagaccaacgtgtacaacagcgagttctgcaacctgtgcgccggcacgccgggcccggacctgctgcgccgctgcgtcgacatcttcgaggaggccacggcgcacaggatggcccacgagcggaaggacgcattcctcttccagaacggcgccacggacggcccgtgggacttacgggaggaactgagccgattcctctccaagcgctacgacgaccaattgaacgcggatgacttggtcctgacatgcggtgcgtcgcacggtctccagctcatcctcaactcttatatcgagcccgacggtgtcatctttgtggaggaagtcacctacatgatcgccatcgcggacttcagggagatctccgggatgaagatcgtctcagtgcccttctgtgacacgggggtcgtggcgtccgagctggaacggctggcacgggaggagaaggctaagagaggcgaccgatcgacggggaagccgttctggggcgtggtctactccattcccgtgtaccacaacccgacccgggttgggcaccaacc

SEQ ID NO: 54542 - DNA, 281 bp, Glycine max
  Clone ID: PAT_MRT3847_20264C.1
tgggcttcacagttaagacaatcaataaagatgagtttgaagaacagcatgatgctgctaaaggtgtgtacagttgcttgttttccttgcgggggttacagatgcacgcatggcactgagctctttcaaaagtgatcagtcatcaagttatgatgatgatgagtattcaaaaccatgctgtgatctctgcatgtgcacacgctcaatgcctactcaatgcagctgcgaagatattacgctgaatttatgacactcacattgtaagagctgtatgtgcacac

SEQ ID NO: 54543 - DNA, 1092 bp, Glycine max
  Clone ID: PAT_MRT3847_20265C.1
cggcacgagcagatgcccgttttaacaatggattattctagccctttgcaatggaggaacagagggaaagtagtggtagctgaatctgaatccatttctttgtgggatgtgaactcactcactcctcaagctctgctctctgttcctacaggcgggcaaaaagtttccgctctccacgtgagcaacactgatgcagaattgggtggaggggttcgcaaaagagtaagttcatctgatgctgagggaaatgatggtgtgttctgcacctcagattctattaacgtgttggactttcgccagccatctggtgtaggtctcaggatatcaaaacacggtgtcaatgtgcaatcagttttctctcgtggggattctgtgttccttggttgctccagcacaagttcaacgggcaagaagcagacctcactgctgcaacaattttcactgcgcagacaaggactttttacaacctatgctcttccagaatccaatgcacactcacaccatgcagcaatctcccaagtttggggcaattctgactttgtcatgggtgtttgtggcctaggactgtttgtgtttgatacagtgaaagatgatgcactaagggttctcaacatggattactctagtgatcaaagttttagagaagttattggtccggatgacatgtattgtccttcctttgattatcttggatctcgtgctcttctgatatcaagagatcgaccagctatgtggaggcatctgatagtttgatagttatggttttctggtaactacaagctttacttgtgtacaattacaaaacaggaatttgcttaaagtttaaggttgtgtttctgcttttgttttttcttggttttctttttaaggaccaaagttatactttagaggaaattatgttagatgtggatgcttggttgttagtattttatgcaagagccttgtacttttcccgggtaaccacttgtcactgatcaatctggtaaagggggatctctatttatgtcaacccactggtgttcgttgattctgtatattttcattttcaatctatttaaaaataaaatgataatttgaaaaactttagtatac

SEQ ID NO: 54544 - DNA, 411 bp, Glycine max
  Clone ID: PAT_MRT3847_20266C.1
aagctggattcggctcggtacggctgcgagaagacgacagaaggggtattgctcatgactcatgtttgaatcttccttggtttaaccgcaattatacaactaacgagataataaaactttgttggaagttgaaggttctgattagaagatagtgatttgttgcgttgtgatttattcagaaagaaagtgacaaattagttcaatgaggaagagagaaagtgaaagtagcagttagcaattagattttgtgtgtgtgtgggttagtatgtgtcgaacagaggaaggtgttgcagtttagtttcttgataggtgatatttgtgaatttgttactttatacaacttaatagtatttttaactttccaagtttgtttatgaaattttatagaatatcctttgtttttcaaatctt

SEQ ID NO: 54545 - DNA, 319 bp, Glycine max
  Clone ID: PAT_MRT3847_20267C.1
gcacggatgcacttcatgtgtacagagtcaggtatctagcattaatacctgtttcggctggctaaacactacaagtagaaatgcctgatagagtccttatgcgcataattactcaagggtaaaatagactaggaggtcatagaaaatcaagtgttacttttgtttgctaaggcttgaagcatcacttaatgatcttgtgaaattacagcaggttgcgtctatcactgacaagcgtgttgccactatcattgaagacttgctgacattagcttctacaatactggaacttctgcaggacacgagacaagggagtgaatac

SEQ ID NO: 54546 - DNA, 314 bp, Glycine max
  Clone ID: PAT_MRT3847_20268C.1
tgcactcacacgctcgagcacaggaagacggacctcattagcggaaacaactggattcgaaacttgattcaaagaatctctaaatctctgcctactactttgtagacgaaagattaaggcaatgaaaactactctctgagctggccacagacttcgtgaatcactctcagttccactgttagacaatctgctgtacactatactatttgagataagacttagagtcagactgaaactttctcagtcttttgctcaattctaagttcaatctcaagaaaaagctggtgaaagctcggattattgtatccactata

SEQ ID NO: 54547 - DNA, 288 bp, Glycine max
  Clone ID: PAT_MRT3847_20269C.1
atcggaggaacacgggcgttacatagcattcatacccgagtaataggaaattacatttttgggacaacaaagactaatttgcaaaagttggaaacagcctaggcatcccttccaatgggaacggtcgataacagcatttgggtgaaaaccatccaaatattactggcagggggggctaattttttaaaaacattccccatataattgattccacggaaaaaaacaaaatgcccaagagaaagggaaacctggtcgggccccattgttaacgaaccaaagtgcttagcc

SEQ ID NO: 54548 - DNA, 1021 bp, Glycine max
  Clone ID: PAT_MRT3847_2026C.1
gttccttgcagcaacaattttctattggggtcaacgatgtaactcgtgtccttgagcgcatgaaaccgtggaagtacgaagaaaactctgctgcactcatccactctacaatcttcgattcagtttcttcagttaagcttcagggtgaatgcctctggctatctaatgtagagtttaagtgacatttgtaaatcgcggatttagttctctctcctctctttgatagagttactatgaaggagaacgtctcaccaatctgctccaatcaatccgtagggggatccaatctgcaagacatttggatggaagttccttgccagagaagatatggttaaagcaacaattttctattggggtcaatgatgtaactcgtgtccttgagcgcatgaaaccttgcacggagttagaaagctctactgaactcatctctttgagaagcaaccatacagcatcttcagttaagcttcaggctgtgcttgtagcttctgactgtaacccacgttggctgacgaaacatctcctaagtttggcttcatcaaggaatgtgcccctggtatttgttagagatactaaacaaggttctttgagactaggtgaacttgtgcaattaaaaacggccattgctatcggaattaaggttaaaggaagcaccataaataaaattattcagcaagttattcaaggcgatagatttgaactttcacctgaagggtaaaattcagcaagaatatttgatgcgcaaagtaactttcaggaccctgactaaaaaatgctgtcaaatgtaatttaatcaatatttcttgtttataaaattattgaccttgcattttaaggtgcagttctttttttttcccttgggagaggggttaaaaaaaaaaaaaaaaaaaaaaaaaaaagtatttgcaaatttttttcgtttgagcatcataatttttattttaccataaattacgacttgcatgaaggattaattgaagcttttttaagcaaccacgggaccgtttagattacgggcgggccg

SEQ ID NO: 54549 - DNA, 713 bp, Glycine max
  Clone ID: PAT_MRT3847_20270C.1
taaacgctatcatatcatatcatctcttaccatttcatatcacattccccattaacttaaagtaacattgttccattaagattctctcatctcatcaacccattccagattcttctcttttttccttcctggttttcgaatcttcaggaccacggattgcataagtttctgcagattggtcttgctgtcatatggggatttccttctcatgtccatttgccaagtacaatgatgtggaggatggcttagactccgttgttgtaaaatccatcaactttggcaatgatgaaatcaaaactccaatgcgatcggtcagtttcaagaatgatgatttagaacccaccatccttaaatctctaggttctggaaagatgacagtagagacatctgtgagcttcaaaagaaaggacattgataacattatctcaaccaacactttgtcatttgaccaagaggaaaacatgcctatctcaaggactagcaagaagagcaaagaaatggatgatctgccttttaagtcagagtgtcaagtggaaaccatccagtccgcacttctaaatccaaacagccccaaacacattgctgcacttaaattgcagaaagtatacaagagctttcgcacgagaagaaagctagcagattgtgcacttcttgctgaacaaagctggtgggaaactcttggattttgctgaactcaagcgcagctccatatc

SEQ ID NO: 54550 - DNA, 414 bp, Glycine max
  Clone ID: PAT_MRT3847_20271C.1
aggttgagtttccacattgtgaacactgagcaagggctgctttatattatacccttaattattgtttgctgttttattgttccctttttttattgttctttcttccacttttgtttttatctatatttctttcttagttttcgctttttttcttgttttagtaatgcttttagtttaacgacctaatgaaaacagttagggtaaatagtcacacacacacacactaaaagaaaaggatttcattatcattatgagtctaaaagagtgtattagacattaatagtgtatttgatcagatttggtttaattatctcctgatgtgttaagtactattttccttgatccattttcctaggcatgtttttgttttaaaatttctttataacgtagcattgttgctccattatcttatat

SEQ ID NO: 54551 - DNA, 363 bp, Glycine max
  Clone ID: PAT_MRT3847_20272C.1
ctcttgttgtttattttttttaggattaatttgttttttttttcttattttacttcaatttattcactatttttactctggccccgaggttgaccaggtgcccacatgaaaacaacagtgccatgggatttctctgccggtctattggactgaatattttttggccccctacgagaaagctgagataacacgggctcttcattctaccatgggattcctcatttggtaaatatctgtgtcgctccgaggactggtttggatctttaaacaagggtgctggctgaagtgggccctgatctaactcacagtctgaagaaaaagacttagcactccccactgaacttttggaaagattggattctt

SEQ ID NO: 54552 - DNA, 292 bp, Glycine max
  Clone ID: PAT_MRT3847_20273C.1
gttcaccctctcataaaataatcctcttgctgcctggaaggcttactgactcggacactgactcacctcactggaacaagtgccattaatctatagttgtacattcactgaatcacgccactatactccctggaggagggaagctttcaagcggtggtagcgattagtggcctaccgtgccagccaaccatgagggagcgcgttttctccttaaccctatgcccatcaccgcctgctaatagagcaagtagcatactcgcttgcttgaatgcgtttgacccgatatgaaccg

SEQ ID NO: 54553 - DNA, 336 bp, Glycine max
  Clone ID: PAT_MRT3847_20274C.1
gatcctctagagcggccggtttcacttatttatcctcatatattctctgaaaagaataagcactaccattccattcacacctagcaaactaaacattggagagggacatcatgttctgcttcaaaagaaaattaaaaactaaactgtcatgtcatctgctatacagctaactgctgttttatttacaaaaaaaggtccaaaccttggcttaatctagaaaatcacctttgctgacattcacagttacatcccatttgggcaacattctactatatggacaatattatgcttggaggcttattttgaaggattaggtccccatcattttttttcttt

SEQ ID NO: 54554 - DNA, 395 bp, Glycine max
  Clone ID: PAT_MRT3847_20275C.1
aaaaaaaggaaataagtaaaacaaatcttttttttatcgcaagtttgaaagaaagaaaaaaagggaaaatttgaaggaaactgagaccctgtttcaaccaaaaggggggggctggccactggtcccccaccatggggacgggggaaactttggcccccccccagggggagggcagttttccggcagctggaaatagcccatttgttgacttgaaaacctggggaaagaagcagaggaaaactgaccagaggttgaaaacaatgggaatggggttggggaccccgaaaaaaaaaatgaaggaaatgatgattcccctgaaggggattgaagggaacccaattgggcattatagtacaactgctgaagcaaactaaaaggggattggtgttgtattt

SEQ ID NO: 54555 - DNA, 462 bp, Glycine max
  Clone ID: PAT_MRT3847_20276C.1
cttctgcggacactgaggaaattgttgatgcttaaattaagtttcaaattatataccttttcttttctgttttgtctctgcttatgatttgaattttagaataaatttttaaaaatgtgaatgaaaaaaaaaaaaaaaaaaaaaaaaaaaaaaaaaaaaaaaaaaaaaaaaaacaaaaaagaaaaaaaaaaaaaaaaaaaaaaaaaaaaaaaaaaaaaaaggggggggcccttttaaaggacccaactttccttccccggccttccaacgttttattttttttttggggcccccaaattcaatttcctgggccgggttttacaaacgtggggacgggaaaaccccggggttaccccactttattcccttggcaccaattccccttttccccggtgggggtaatagaaaaaaggccccccccatccccctttccaaaaattggcccaccttaatgggaaatgg

SEQ ID NO: 54556 - DNA, 236 bp, Glycine max
  Clone ID: PAT_MRT3847_20277C.1
atatctatgtacactacaattaatgagcatgctacttggctcattgccacaacacagctggagagacgagctaggcaacaagtaaaaccagcacgcctcgctagagcctagagtcactggctcgttcaaagggcatgagcataatcaccacagagtccaattatggccacaccaaaccaaagtgctttggaagtgggggtcaaggttattttttttgaccaccattatgaaacaca

SEQ ID NO: 54557 - DNA, 247 bp, Glycine max
  Clone ID: PAT_MRT3847_20278C.1
gctcggtggcactgctacttcaactcactcccaagtttcctcctttctcacatataaacaatgccaacgtctgggatattgcaccaaggctttcaatatgcttgtaggattgtgatcctgcttgccttacatgcttttccatgtcagtgttcgcataccatatattgcagactgtcttattgatacagtggactgactactgagatattggaaggccaaaatggattccccttagatggtggatatt

SEQ ID NO: 54558 - DNA, 228 bp, Glycine max
  Clone ID: PAT_MRT3847_20279C.1
gatatccacttgaggaacatgtgacaggtggctagaggtctacctctggctaaactggacagggcaacacatatggtcacaagctgtatatgagatggaatggtaatgctgagtccacactaatcttatttagactatatgagatgtgatagactagaaaagcatttatacactgcaaaagcaccctcacggaagagaatgcaagcattatatgcaatgctatgactg

SEQ ID NO: 54559 - DNA, 344 bp, Glycine max
  unsure (1)..(344): unsure at all n locations
  Clone ID: PAT_MRT3847_2027C.1
gnattaccgaaatttgtctgtttggttccttttgaagaacttccacgccnacnaccagaggaaaaggcccccttctttgccaaaaaagatccctcgcaaggttaaagggttgggggttaaattaagcaccttttttgccttttaaaacccaagactttttgcctaaacttcggggagtaaaactaaccaggatcttggttaaattcgattccttaggcaaacctgccattccttcaataaaaaggccttttttccaataaccccccttagtttccccaaaactaattgtgcttaaataacaaaaacccgtgttaaaaaacccccccctctttttttccaccccc

SEQ ID NO: 54560 - DNA, 292 bp, Glycine max
  Clone ID: PAT_MRT3847_20280C.1
ccaatctgtcacaaccttggctcccgtttacttgtgctcacctctcgactacctatctgttgtagcgctagaactggctgtgaatgctccacctgacaccgaaaagaacaagaatattcctagacatgcgctattgcttgcaacgatcgatctggagatgctgaaatagcttgcttccgtgatcattgctcatgatggagtgctatcgaacatcaagcctgcactgttgacgaataagactgagacctcttccaaggagctctagactacatcctccgactataaatctcct

SEQ ID NO: 54561 - DNA, 357 bp, Glycine max
  Clone ID: PAT_MRT3847_20281C.1
tctacttactaatttatcctatatatttcagcttcacatccacaagattaatctgagtcatcgtgtacaagaactcgggagcgatcaacctaatggaatactctttgctcaacatacactatatcatatacaacaacaacttcctgtccatataaatacccttatcacattaacctgcaattttcaacttataatatgctacatggctagaatcaaaccaccgcataatgtgtaagctaatatctgcattgcaataacacatttctgataacgaactaatacttttcatttacaaatctatcacactttatcaccaacttatacacctaaacaacttaatatcccaaacatatttac

SEQ ID NO: 54562 - DNA, 795 bp, Glycine max
  Clone ID: PAT_MRT3847_20282C.1
ttctcatcaagtggacctataacaaactagttcttatcaaacttgtccttgccatgacatagctaattaactttacatttgcacaccactttctatattttgcaactcttggagctgaaacactcacgcacttcatcaaaactctcctcagttatccctccaacagaagataaaacatggttctagttgcaagtcatggcgaggaggaaaagggggcagaaggcattgctgctgttgattttcgaggtcaccctgtggacaagacaaaaactggaggatggctagcagcagggctcatcttaggtactgaactggcagaaagaatatgtgtaatgggcataagcatgaacttagtgacctacttggttggagttttgaatctcccttcagctgattctgccaccatagttaccaatgtcatgggaactctcaacctgcttggccttcttggtggcttcatagctgatgccaaacttggcagatacgtaactgttgccatatctgcaatcatagctgctttgggggtgtgtttgttaactgtggctacaaccattcctagcatgaggcctcctgtgtgcagcagtgtcagaaaacaacaccatgaatgcattcaggccagtggcaaacaattggctttgctatttgcggcactttacacagtagcagtgggtggtggaggaataaaatccaatgtctcaggttttggatcagatcagtttgatacaacagaccccaaggaggaaagaaggatggtgtttttcttcacaggttctacttcttcatcagcataaggtc

SEQ ID NO: 54563 - DNA, 2142 bp, Glycine max
  Clone ID: PAT_MRT3847_20283C.1
ggctcgagagtttgtagaatttaaaaccatgtcacttgaagtgaaaatgccaacagtaaataaccatttgccatctttattggagcttaatgagaatgaggaagaaaaagttcctgagacacccacttctttggagagtctacatcagctacacaagaaactacttctccttgagaggaaagaatcaggaacagaagagtcattggatggaagtgtgataagtgatatagaaggtggtgaggtaaccattgaaaagttaaaatctgcattgaaatctgaaaggaaagccttaagtactctatatgcagaactagaagaagagagaagtgcatctgctatagcagccaatcaaacaatggcaatgataaataggcttcaagaagagaaagcagcaatgcagatggaagccttgcagtatcaaagaatgatggaagaacaatctgagtatgatcaggaggctttgcaactcttgaatgagctcatgatgaagagggagaaagagaagctagagctagaaaaggaacttgaggtatatagaaagtagcaataataaaaagacttacaagaaaagataatgatctaaggaagatggaaaaccttgacaatatcaacgtaatatgcctcttctagcaatgctgaatatagagatgtattgaacatttgattgaattactgagcaagagtggaaaatggattttatagtcatcaaggtaaagaaagcagtatcgagaacacccccgtggacacggtcttatatttagaggaatcattggcaaactttgaggaagagaggttacaaattctaaaacagctcaaggtattggaagaaaagctagttatattgaattacgatgaagatcactgctccgatgatgctaaaagtaagcccaaatttttggaagagaatgggaatggataccatctgggggaaaatgatcatgatgagtatatgtgtggatttgcaaatggtcatgtaaaggaaataaatggaaagcatcaagggaggaaaatcatgggtgcaaaaggcaaaaggctcctcccactttttgatgcaatgagttcagaagcagatgtagagttgagtggagacgagttagactttccccacttgcaaaacaattcagttgaaaaggttaattcggataagaaaaagcttgctttagaggatgaggtggataatgtttacgagagactacaggtgctggaggcagatagagagtttctaaagcattgtatcagctctctgagaaaaggagataaagggttacatcttctacaagaaattttacaacatcttcgtgatttgaggaatgtggaactccggctcaggaacatgggagatcttgcagtgtaagaagtctacatgctcaaatgttgcaaagagatgatataggtaaaaataatgctgatcttgctctattagaaattatttatatttctcaatcataatatcatttgtttgtgagtaataatatgtgaaacctttgtatatgacaagtctattaacttttgcaatatatgttttaaaagcatgcatgagcatcactgcggtctacatataatggaggacaccaaaatgcatgacttcaattttaacaaaaaaaaggtcagtgggagttccctgatggagaggggagaatccaatggtggacaagaaaactgaagtctgccattctcttttctttgtttcttttgtccaagtaagcccaaattttttgtgggttgtgtccatcatcaccttttgtggaaaaaggaggatgatgagtatatgtgtgtgtaggctagtgaggtgaagccaccctgtccacttgtattttgtgagagcatagacctggcttgcaaagctggagacatcccaaaaagattccagtgccaggtaaaatagcactagtttattagacagacagaattaggcccactagttttgtcatttctttcattttttttctttttctttttttggttagagtgaagattgaggtaagtagcctcactcttctctctttctcttctttttttttttcattcttgcatcatcctttgagatttgtttatttcttagggggaaaagctgagtcacttgtatactacatgtattcatttgtaattatatatataaaaaaagtgagtgtttgtttatat

SEQ ID NO: 54564 - DNA, 500 bp, Glycine max
  Clone ID: PAT_MRT3847_20284C.1
tggagaggggaccatccaatggtggacaagaaagctagagtcccccattctctgttctttgtttcttttgtccaagtccaagtaagcccaaatttttggtgggttgtgtccatcattaccttttgtgggaaaaggaggatgatgagtatatgtgtgtgtaggctagtgaggtgaagccaccctgtccacttgtattttgtgagagcatagacctggcttgcaaagctggagagatcccaaaaagattccagtgccaggtaaaatagcactagtttagacagacagaattagggccactagttttgtcatttcttttctttttggttagagtgaaagattgaggtaagtagcctctttcttctctctttctcttatttttttggcattcttgcatcatcctatgagatttgtttatttctgaggggggaaagctgagtcacttgtatactacatgtattcatttgtaattatataaaaaaaaaaagtgagtgtttgtttat

SEQ ID NO: 54565 - DNA, 537 bp, Glycine max
  unsure (1)..(537): unsure at all n locations
  Clone ID: PAT_MRT3847_20285C.1
gaccataatctgttgacaacntaaaacaagaaaattcataggaactaaatgactaaagtatttcaatagggtgagtcatttagcatgtaaacttacacctaatttagcaatcaaacgctggtgaaagccaaaaatttgtgaactaaatataaatttattaaatttagcctaaactatttctataagctaaacttaatgtgaccagataaagaactaggccatgtttcccatgttctaaaggtaagctttcagtactaaaatgtcaatgtgaagccacttgactccctgagtcgttgcaaggttccatcttcaatgctttcctctggcgaccataatctgttgacaaccctaactgcaaggaagtatctgaaaggtcattttcctctgaagcacaattgaaaagggattttgaaccattcttggaaaatgtcctatccaaagagctgaattcaaggaactgagactttgttttattttgtatttcctcaagctgtttgcgcagaacttcattttccagcatggccttttgctcctgta

SEQ ID NO: 54566 - DNA, 499 bp, Glycine max
  Clone ID: PAT_MRT3847_20286C.1
ttaagctttacggttattttatcttaaatgtatactaattgttaactaattttgctaccattgttaatcatcttttatgctcattaatagttcctgtgttaagtgtggtccattcatttactgaaaatgtctgcaattgtttattcattgtgttcaatcaaaggtctctggtgtgactgtaatggctgtagttatttcgtttggtttcatgcaatggatttcatattctgtagtttgaggactttattccgaaatgatttttggtttcaacaaccatttaagtgaaattggatttgacaggtgattcaatgattgatttcaactattgattggtatgataaaatcttggaatattttctggttcaatccttgctttggtcttaattgagtaatcaaaagaaatgtttgttgatttttgttacattacatccagactaatatctttaatggttaaattaaatgaaattaatcatttattcttcctttttttcttttttta

SEQ ID NO: 54567 - DNA, 1766 bp, Glycine max
  unsure (1)..(1766): unsure at all n locations
  Clone ID: PAT_MRT3847_20287C.1
tccgagtgcactgtattccagttcacgtgtcttctggttgctttctcgcacttccaccatacgtaattcaggtttcgaaggcgtgctcgtaataagtctccagtgctatattcatggccaccgccgaatccgggccccgtgctaaaatcatggccaccacagccaccgaacctctcccttcctccgctgaaatgcctcctgccccgcctcctccgaagcaaccgccgcaaccggtggcggcggcgtcagcagtgaagcctgaggctccattgtccgattcgaaagcttcggcggaggcgaacgtaatagtggtcccgagctactctcgttggttctcgtgggattcgattgacgaatgcgaggtgcgtcacctccccgagttcttcgaatcggcgtcgaagagccctagggtttacaagtactacaggaactcgatcgtgaagtacttcaggtacaatcccacccgaaaaatcaccttcaccgatgtccgcaaaacgctcgtgggagacgtcggttccatccgaagagtcttcgatttcctcgaaacttgggggcttatcaattaccatccctcttcgtcgctcaccaaacccttgaagtgggacgacaaagagaccaaatccgattctgcctccaacaccaccgaatcttcttccgctcccgccaaagaaaacactaagagactctgcagtggctgcaaagtcgtttgcaccatagcttgttttgcctgtgacaagtatgatttgactctttgtgcgaggtgttatgttcgtggcaattatcgagttggtgtgaactcttcggattttaggcgagtggagataagtgaggagacaaagacggattggaacgaaaaggagaccacgaatcttctggaagctattacgcattacagtgatgattggaagagggtttctcagcatgttcctggcagaactgagaaggagtgtgttgctcattttctgaagcttccttttgtggatcaattccagcattatcaacaacaccctgctgtcaatggcactgatgacagttgtaatccgttaaagagggtaactaatgctgatgcagaatctgaattggatactgttgcctctgctgaacccaataagagaatgcgtctcacgcctcttgcagatgcaagcaatccgattatggctcaggctgctttcctgtctgctttggctgggtcagaggttgcacaagctgctgctcaagctgcattgacaactctgtctgaggtttacaaagcaactaaaataaattatcggtcgtttccgaggaatacattgctgcaagatgctggtatcatgtctaacggtggtaatacttcagattcatttcaaggatctcgattgcatgcaaacatacagcttgagaaggaagagttagatgtggaaaaagcaatttctgagattatagaagttcagatgaaaaatatccaagataagcttgttcagtttgaagatttggacctgctgatggaaaaagaaggccaacagctggagcaaatgaaaaatatgtttttccttgatcagcttactcttttatttcataaatcatctgcaccaaaaactggagaatgccaagaaggcaataatgtaaagacgaaccatggctattgatcttaggcttagcgaatgtattcaattttccttttcaattatcctgctctctccatttgctttggcctcgagtcactggactatttcttcaatatcatacaactctatcttgatgtttataaccaannnnnncatgcatta

SEQ ID NO: 54568 - DNA, 422 bp, Glycine max
  Clone ID: PAT_MRT3847_20288C.1
aacaggggcaaacaggtccctggattttttttttctcgcagcaggaaagccccgattgacagtcaagttaagctttttgatacattagaccccaaaatcccaacaccacttctcaggtgggcagttgttatatccgcctttcccaggaaaggggcataaagggagataaaagctttttctttcaacccaccccaccataggggtcaagcccaagggaattgtttgacttaaacggggacccttttcaggatttttttttaaaacactggagattttttgaatttgttaaaaaaacaaaagccttgttatctggaaaaccacacatttttgggaaccagcccccccccccccaggggggggttcgcttgggctgactgaataaactttttttttgagactttggacattggcctcctccaatt

SEQ ID NO: 54569 - DNA, 776 bp, Glycine max
  Clone ID: PAT_MRT3847_20289C.1
gtttatttttttcttaagatccgttgcaatttctgaatgatccaagctcggaattcggctccgtaattcatatttcgaaggtgtgcttgtaataagtgtccattgctaaattcatggccaccgccgccaccgaacctctcccttccaccaccgaaacgcctccggcaccgcctccaccgaagcaacccccgcctcccgcgccgcaacctcggcggcggcggcggcagtgaagccggaggctccattgcccgattcgaaaacttcggcggaggcgaacgtaatcgtggtgccgagctactctcggtggttctcgtgggattcgattgacgaatgcgaggcgcgtcacctccctgagttcttcgaatcggcgtccaagagccctagggtttacaagtactacaggaactccatcgtgaagtacttcaggtacaatcccacccgcaaaatcaccttcaccgatgtccgcaaaaccctcgtcggagacgtcggttccatccgcagagtcttcgatttcctcgaaacttggggtctcatcaattaccacccctcttcgtcgctcaccaaacccttgaagtgggacgacaaagagaccaaatccgattctgcatccaactccaccgaatcttcttccgctcccgtcaaagaaaacactaggggactctgcagtggctgcaaagtcgtttgtaccattgcttgttttgcctgtgacaagtatgatttgacactttgtgcgaagtgttatgttcgtggcattatcgagttggtgtgaactcttc

SEQ ID NO: 54570 - DNA, 347 bp, Glycine max
  Clone ID: PAT_MRT3847_2028C.1
caacacgcgatcacacaaacattcaccttccacttattccaacctatctcaaacacttcgttcaagctattttttaaaaaactcaacccctcaaacttctttcatattaccatcattcaactccaaacacttttttttaatccacaatattcttataattcaattacatctcttacatttttcttataattctaatctcacttaccattaatgttactccatccaatacaccaactccatcaccttctccttcccctactatacacttaatcaactttccattttttcttaatttattgcttcttacatatatttacatatatatatatacatataaacaactttat

SEQ ID NO: 54571 - DNA, 608 bp, Glycine max
  Clone ID: PAT_MRT3847_20290C.1
gcaagatgctggtatcacgtctaacggtggtaatacttcagattcatttcaaggatctcgattgcatgcaaacatacagcttgagaaggaagagttagatgtggaaaaagcaatttctgagattatagaagttcagatgaaaaatatccaagataagcttgttcattttgaagatttggacctgctgatggaaaaagaaggccagcagatggagcaaatgaaaaatatgtttttccttgatcagcttactcttttatttcataaatcatctgcaccaaaaactggagaatgacaagaaggcaataatgtaaagacgaaccatggctgactactcttaattagctagtgatcttaggcttagcgaatgtattcaattatcctgctctctccatttgttttggccacgagtcactggactattagttcaatatcatacaactccatcttgatgtagagcgtcttttaacttttttttttataaccaattgtacatgcatttctagagtaatgcgttgtctgtatttgtagataaaatgtgatttttttttccaaacatacacaaaaaattaattatttaccaaaacatacatattcttccattatttacc

SEQ ID NO: 54572 - DNA, 346 bp, Glycine max
  unsure (1)..(346): unsure at all n locations
  Clone ID: PAT_MRT3847_20291C.1
ccaatggntatcantggttcaggtggtgcacctattccatgcttctttcatttcttagtactgctggattctggatgaccagcctgaatgagagactgtcattgtgcgatgcaatacttattggtcccatgctccagataacatggactttcttcttaatctgtacaggatttatctattttcaacaatatcaggatttcgatgccttaatcacagcgatgtttatacttggcatgatttgagtgtttatggccatctctgtgctggcaccttatgaatcaaacgttgcatgttctgagactaaacacagttgttgggattccatgatgtcttctgccatgtcaac

SEQ ID NO: 54573 - DNA, 487 bp, Glycine max
  Clone ID: PAT_MRT3847_20292C.1
tggcttggaacctttgggctgatttatgtgcttgcatggtcgtgagaagatgatagaagggcaacccgggaaccaccgtctttactgttaccggccctaccgctggtgtcaataccccgccgggcggggttcctctcggagtggttacgaattttgtcgcgatacccgggttcgtcgctgcgagtcggattcggattaattatcggactcatcgggttgggttctctactggcggcggaactgtcggttccgcccatgaggccgctcccactagttatatttatgagtagtcctttattatcgatcatcagagggggggaaacgaaaacaaaaaaaaaaaaccgcgcaccaccgaaccctctcggaactcctcctcgcgcacgtaagtcccctcctgtccgtacgcgatgctcctccttcacacctattcaaccctaacctatcggttcctgctccaaacttccgcgatcgggagacgttcggtgcc

SEQ ID NO: 54574 - DNA, 703 bp, Glycine max
  Clone ID: PAT_MRT3847_20293C.1
caacaaaaattcgacatgatttttttttttggaaagcattctgtgatacaagatgatatttggctaattataattacattatgacatattgcgttttggacattttcttacatcctatcaggggaagtttggtttttatattagaaagttcaatctattgttaactagagtctacagtgtgttaactatgagaggatccattctctaaatgatgaaaatcatcaagttcctgtctcagtcaatagcaatggcattcccaggtcgacatcccctccagaaatcaaactcagaagattgattgttaccatccaagtgtgtgaaacgaatgccaaaaggggatatgaatcgatacagagctaatcacatgagttcaggttggtagattttgccaagatattgaattagaagactgcaacttatcctttccgaagtgattggaggcaaaataaatcataatgataatatggagctgctggtcaggctttaggcttggaaaagactgataaacccctcatctcttggactcgttataaaattttctcctaccaacatgcacttcaaagttcaaaccatgcactctacttcttaggatactcaaaaacaaggccttctgctacacttattgctcttccattaccaaatagcttgctcacaatggccaatgcaaaatctgttacagtggcaagtccctcactagtgatca

SEQ ID NO: 54575 - DNA, 425 bp, Glycine max
  Clone ID: PAT_MRT3847_20294C.1
aagacaaaaaaatcagtccatgatagaataatcagaaatgcaaactagcatcacatatcacagttagagttatgccatctatgcatatataataattattttttacccagcaaccttaaaaacaaaagatttttcccacctcgacccagttccaaccataataattttgaaaaacaaaatcaatatttttcacccaccacctaccatcattaaaaacaattaaatatcacccaacttcaaaatgttccgtccccattagcatggaagcatcccatctgagtttggtattagccagctagctgtcttctcttctgtgctcataaggtcaactaaccattccgcataatcaaagcctcatttaatgaaatgcgtacaatatcaggacatttatcaattaataatcgagtctgctttgagccactcat

SEQ ID NO: 54576 - DNA, 257 bp, Glycine max
  Clone ID: PAT_MRT3847_20295C.1
taaaaaaaaatataaaactaaaaataaaaaataaaacattataaaaaaataaaaaaaaaaaaagggaagggtaaaattaaaaaaaaggggtaaaacgcctccctctactctatatctaacactttttcccctttcatactctaaacaactctcttactacactgtcaccaaaattcaatttattctccatcttttaaaaacatcttcacttaaaaaaccctatcttttcccaactaaaatcactttcatcaattccc

SEQ ID NO: 54577 - DNA, 242 bp, Glycine max
  Clone ID: PAT_MRT3847_20296C.1
aatatatgataatataattttcaaataaataattttgccattatatttacacattaaaaatattttttaacactgaaattgaaatgttggataaatcaacacaatttgaaaatagtctcagtaatgctagcgttaatttactctagattttaaattaaggtaatctgcaagacatcatttatacgctcctgaagactctttcttaaagttatgcactacagacttgaatcgtttgattcaag

SEQ ID NO: 54578 - DNA, 543 bp, Glycine max
  Clone ID: PAT_MRT3847_20297C.1
cctccgatagaatccacacggtaagaattgctactctatgaaatcagggactgggaagttacttaacccatgcgcgggggggacctcagtctaaccgaaaccagattccgacccggcagaacgagtctccttgctcatgagcctagaaatgctctccttggtgctaagtcaaggcttaaccttcttcatgacaggtgggtcctaactatatgggcctagttgtaacagttgttaatcccactaaagatgcggatcctgggcccgggtggtaggaaagatataggaaccctggtcgcatggtgggtcgctttcggaaatccgatcccggggggccgcttgtacattccaagcagaaagcgcaagacctcacctttccagggtctgaaatacgcaaagaccccacctgctcattacctctccccttcaggggcgacaattgagcaaacgttccaggaggttatacccagcccaaagaagacacttacggggtcggtgatagattcttgactctcgaagacatccttgcctgcctactagggggac

SEQ ID NO: 54579 - DNA, 412 bp, Glycine max
  Clone ID: PAT_MRT3847_20298C.1
aattccccgaggaattccgatctcatttccttgggcttcaggataggcctaataagaaaacatagcagtgcgcagcatatattgcacatttttgcctccttatttcttgaaaatgtggaattggaattccccgaggaattccgatctgattgggctctggcttcaggataggcatagtgagcctactcgccaagtcaattcatatatgaacatttttgcctccttatttcttgaaaatgtggaattggaattccccgaggggatccttgtagagtagacctgcaagcatgcctgctgcacattaaaattcatgagtgatccctccagaagtgaaggttttcttaatgcttaagaagttcaagtagccttgtcgtacccaactttaaacgccttgcaaaacaatttcttttta

SEQ ID NO: 54580 - DNA, 187 bp, Glycine max
  Clone ID: PAT_MRT3847_20299C.1
cccacgcgtccgtgaacgtctgggttgccctcatgggcgccttcctcatcttgctggcttggcgcctctgtcatgcctacttctttcttcccttacacctggtttccttcgccactctgcttatggttctgctcatgattcttacctgttttccccaacaagccttttttcaccctcatccttcaac

SEQ ID NO: 54581 - DNA, 279 bp, Glycine max
  Clone ID: PAT_MRT3847_2029C.1
ctaaaagtatattaaccaagtattaagttaggttttgacagaacaaatatttaatgggatcgaagtaaaataagctttaataaaaactaaggtaaaaaagataattaagtagcaattaaatagaagagtactatataaagggcaagtagtactaaattcctcaaaattagaaattaggaggagaaatcattcacatgataagtagtcgttaagtattaattctttttttatatcttggaaaacttgaatacgtgagtacttctcctcaaaaatagaaaa

SEQ ID NO: 54582 - DNA, 1128 bp, Glycine max
  Clone ID: PAT_MRT3847_202C.1
ctaattttcactcctcggctcgagattcccatcacttttcagtaaaagcattcttcctctcaatccacttgttttcactcctaaacgacaacgtcgttcatacacttcttctgcaaacaaaaaaaattcccgcattagggtttcctttctccggcgacaatggaggtagctgcgaacgcgcggaaccccgccgctaagcgaaaattcgacgacgccgtttctaacggcgtcgccgcccccgccgacgtcgatctctccctcctcgaagccatcgagaagtcgcagaacgcggtcgaagccctcgatctccgagccctaaagaagcacgtgctctccttcgagcgtcgcctgaaggataacatcgaagcgcgccttaaataccctaaccaaccggaccgcttcgccgattccgaagtagaactccacgaagagcttcagaagctgaaggtcctcgccggcgcgccggagctctacccggacctcgtcaacctcaacgtggttccctccatcgtcgacctcctcaaccacgacaacaccgacatcgccatcgacgtcgtgcaattgctccaggacctcaccgacgaggacgttctcgacgacaacgacgactccgctagggttttggtcgacgcgcttgtcgacaacagcgcgctcgagctcctcgtgcagaacctgcaccgcttgaacgattccgatcccgacgagaacgccgccgtgtacggctccctcgccacggtggagaatatgatcgaggtgaagcccgcggtggcggagctggtttgcgagaagacgaagttgctgaagtggcttctcgggaagataaaagtgagggagtttgacagtaataagcagtatgcttccgagattttggcgattttgctgcagagtagtactgtgaatcagaagaagctgggacagatgaatggggttgatgtggtgcttcaggctgtggctatgtataagtctaaggatccgaagagttccgatgaggaggagatgttggagaatttgtttgattgcttgtgttgtttgttaatgccgttggagaataaggaacggtttgtaaaggctgaaggggttgagttaatgataattattatgaagcagaagaattggcttatgggtcgg

SEQ ID NO: 54583 - DNA, 683 bp, Glycine max
  Clone ID: PAT_MRT3847_20300C.1
agaaaacagaaaggctcatgtcaatgcttttgggaaaagtatggatttggagaaacaaagaaaacgtgctcctgtatcaaacttaaagctggaaggttccataaaaatggttcaaaataaagcaggaaaagcttctgggaacaacgttcgtggagttgcaagtaaaacacaacaggagaagagcttgttatcaggagcaattttcaaggatgacagtagcggcacctctgtagatgaagttgataattctgatgccagcactagaactccatcatataatccactgttgtctgatttttctgatggggatagcagttcaggtccgaatgctcgtggaggtcgggtctgtggtgcatgttgttcctttattgcggggtgggccggcacgattgggttggctgtcgctctgggtcttagtagccctcgctcgctgagtggcgccggtgctgcggcccctctgtgggtcggctcgcttagccggccctaccttgttcctgtctgccccgccggggatccgcacatttccgccgtggtcaggtttatcgacacggaacctcttctgtggtctgttggtgcgttggtgtgcccgctcggtcccccctctctctgtttttgttgcccttttacttgtaggtttatctcgttcttaacattccaaaatccaaacagaaaactatttttgc

SEQ ID NO: 54584 - DNA, 481 bp, Glycine max
  Clone ID: PAT_MRT3847_20301C.1
gctggtgctatgaccttttttccacctttttcgaatatattgattcagtgctctcagaacgtggatcaaagccttcctatgctacagattcggatcattctcctttagatgcttctgatgcttccctggccgtgctttaagtacttgtgtatggagagtctgttccttatttagctaggactttgagtctctagagtgcccctctgtatttgaaggcgcatttttgtttatgcatctgaaaaggctgaaatggcttccaatttgacttgcttatagtaaagtaaagtggatcaacctcgttcagtagaattctgaagaaagaaggctaggcttcttgaaccagagctaattcaatctttccctttctacaatatgtttgaatagcaagcaaaagtaccacgaacgaacaatccgattcggttagcaaactacttctagaatgaactacatcatgtggacttcagtgatgcggacccaaaac

SEQ ID NO: 54585 - DNA, 894 bp, Glycine max
  unsure (1)..(894): unsure at all n locations
  Clone ID: PAT_MRT3847_20302C.1
cccggngtcgacccacgcgtccgggaggatggaggatgaatgctcagcatgggattggacggaagcagtattccaattctgatgtttttgagggtttatggaaagaaggagttcctgaagggagtggcaggtatacttggaataatggaaatatgtatgttgggaattggaaaaacgggaaaatatatggtcgaggggttatgaagtgggttaatggtgatacttttgatggtttatggttaaatgggcttatgcatggaacaggagtttatagatttggagatgggggcctttatattgggacatggaataaaggcttaaaggatggaaaaggagtattctatcctgcaggtagtaaacatccatccttaaaaaagttgcatagccctcgtgatagtgatcataacggtttcttgttgaatgtagaaaaacaagaggctccaaaagccagagttaagcgtagcctttctgaaaacatgccggtcattagtagattcaaaagtttccgtcaaatatctcacaggacttcatcattgaaaataaatttgatccgtagtgattctgctcaagattgtgtatgtcatgattcttctcttacattatccaatgcgttggatggagatcaatctgaggcatcgggtgaaagtactttggtttatgaaagggaatatgtacaaggagttctaattatggagagaatgtgtgagtgctctgagtcatcacgtgaaaagaaacagcataataagtttagtgtgaagcaagtaaagaagagttcatgtttggacatttttgaaggccgggcgaagctattattcttaagcttaatttgcagcttggcatcaaggtataccgttggccagattgactccagtgtctgcacgcccagttcaatca

SEQ ID NO: 54586 - DNA, 606 bp, Glycine max
  Clone ID: PAT_MRT3847_20303C.1
cccacgcgtccggtccgttccaaaaaaaaaaaaaaaaaaaaaaaaaaaaaaaaaaaaaaaaaaaaaaaaaaaaaaaaaaaaaaaaaaaaaaaaaaaaaaaaaaaaaaaaaaaaaaaaaaaaaaaaaaaaaaaaaaaaaaaaaaaaaaaaaaaaaaaaaaaggggggggcccttttaaagaaccaaatttaaattccccgggattgaaaaaaaaaattttttttatgggggccccaaaataaaattaatgggccgtgttttaaaaacgtgggaatgggaaaaaccttgggttaaccaaattaaatggctttgaaaaaaatccccttttaccaagttggtgaaaaacaaaaaaggcccgaacaaatcccctttcaaaaaatttgccaaccctaaagggcaaagggaaccccccctttacgggccaataaacccgggggggggggggggttaccccaagggtaaccgttaaatttgcaagcccctaagcccccgttcttttggttttttccctttcttttttgccaaggttcgcggtttttcccggaaaagctttaaatggggggcccctttaagggtcccaattaagggtttaagggcaccttgaccc

SEQ ID NO: 54587 - DNA, 209 bp, Glycine max
  Clone ID: PAT_MRT3847_20304C.1
ctctacgcaaattggcaaagacccttgcgaacctataagggaacatattgaagatctggttcccacctcggggacatgggcccccgcaaattctttgcacaccccatttttaccttagcgggtcaaaattcccccagatagaatctaaaggggaccgcaaccaagggccttatccccgaaggccaaaccttgcccctgggggggggaaa

SEQ ID NO: 54588 - DNA, 252 bp, Glycine max
  Clone ID: PAT_MRT3847_20305C.1
ctaacattggtgttggtctccatctttgttatcatcatggccatcatcagcatagcatggcttgccatgcatccgcatgaccctggttttcggttgacatcactttacgtgaccaacttcgccctctcagactcgcaggtacgaggaaagtacgaggttggactaaccataacaaacccaaacaagatcaaagtccaagtggtgcttcaccgtgtccacacgttacggctttatggcgaggagtggcactcc

SEQ ID NO: 54589 - DNA, 1127 bp, Glycine max
  unsure (1)..(1127): unsure at all n locations
  Clone ID: PAT_MRT3847_20306C.1
gggagttttgtttcacattgaagaaaacacattacacatacgtgtattaaataccactaatacgtagtagaagaagcaagagatgattttgatgttgatgttgatatgcttgtgagatgtgagtgatgaccacgcgtccggtggacaatgatcccacaccttcaacagtgctgccacaattgatttttccacttctctctctgctttgattcctgcattgaattcctcgcccaataacctttcggatctttctcgggatctccgaaatctgttggtttctcactcactttgccgccataacatacttacccacgtggaattgccactcccctttagccaagttttcttctttttcacttttggttttctgggttgctacttgcatgaatttacaggagaaccttcagggtgaaatcttagcatatattatgatcattcaacatacagccaagtcatgagtttttaaaaccctctgttgacatggggtttggtttaagccttggaaagaaaagctcaaagcagcaaagcaggtcaaagacagataaggagagttctgatttgcctcaacccaatccatgttcaaaggattcacttaagcttaaatcaaagtctaatgttgatcaagcaaacagtgatccttgtcataaagcaaaacatgatgtaaaaggaaaggctcagctcttggatagtgctaagggaagttcaactcagcctgatgaacttgtcaagtacatgtctaatttgcccggttttctcaagcattctgatggaggagcaagcattcaagggaaggctttaaatgttggggttcttgattggtcacagcttgaaaaatggaagaataagcaaacacatacaaaggcagaagctagctatttcacatcattcgatagcagtgaagaaatatcctcaagggcagccaccacatcatctgcaacttctggtggccataataaaaagcttgatggtagaaaaggttcaagttcttcaagaagcaagggatcttataaagaagaccgtcccagaagttctaaaatgtcttctcagaatgtcaagcaatatcaacattctgaaactgaaataaagaccattggagatgtttactttccagtttggtcnnnnaagca

SEQ ID NO: 54590 - DNA, 413 bp, Glycine max
  Clone ID: PAT_MRT3847_20307C.1
cgacccacgcgtccgcttcccttgtcaatctagccactctctcagaacttgacggttgctccgcgtaatctcgtcggtttctcactcgctcgctcagtgactcagtgactcgctcactcttcttcagatctgatcgaagaaagaaatggaggaagcgctggaactgtcacgcgccaaggacacgaaggagaggatggcgggcgtggagcgcctccaccaacttctagaagcttccagaaagagcctatcctcttccgaggtcacctcgctcgtcgatacgtgtatggatctcctcaaggacaacaacttccgcgtctcccagggcgcgctccaggccctcgcctccgccgccgtgctcgccggcgaacacttcaagcttcacttcaacgccctcctccccgccgtcgtcgacc

SEQ ID NO: 54591 - DNA, 399 bp, Glycine max
  Clone ID: PAT_MRT3847_20308C.1
acaaattcaggatctaaccctgggcaaactttaatcatatatctgttgaaagggccaatacattttttacatacaaaaactttttaacaaacaatgaccagggacttacttcaataccctgtaataataattaacaagcaaaagaatcattatttttttaagcaggaaaacggtttacaccatttccaaaacacaaccctttcagtttacaaaaaaaaagtgcccgccaaaccattatgcaaaaaatttttcccgaacgggtccctcgtttttatggagctcattgaccttaagggaaccttaggcaccattttattatccattaaatcaacctttagctcaggggcaatctttttcccctttaacttgcatattttttgcagcacgcaaaaagcccct

SEQ ID NO: 54592 - DNA, 1209 bp, Glycine max
  Clone ID: PAT_MRT3847_20309C.1
gccattggattttcaagaggggcatctgtgtatagaggtgtgacaagacaccatcaacatggaaggtggcaggcccgaataggaagggttgcaggaaacaaggacttgtatcttggtacatttagcacacaagaagaagctgctgaagcatatgatatagcagcaatcaagttcagaggaacaagtgctgtgaccaactttgacataagtaggtatgatgtgaagagaatctgctcaagctccactcttattgcaggagatcttgcaaaacggtctcctaaagaatcaccagctccggttcctgcctctgacttcaattcgtgcggttcatcgccgatgccgctggtgtctcagccacctcctttggctataactgatggtgaacattctgatgagttgtccaacatgatgtggaatgccaacaacagtgatgagcaagcacagaatgagagtggtggtgctgaattcaacaacaatgtaactgaatcatcatcatcacaacaggtttcaccaagcagcaacaaggatgctttgaaccctcaaagccccaagtgttctgtggggctacccaatgagtttggagtcagtggagcagattatggacatggctacttcacccttgatggaccaaaatatgatgatgggaacaatgaaaatgaccacatgagcaccaacaggcttggaaatttgggattggttaatcaagttcccatgtttgctttgtggaatgaatgaagggaatgttatgttgatgagttgagattacaaaaaacattagcttaggaaaaaaaactaagatcagatggcagaattattgaatgattattatattgtagcttggtatggtaactttttattttatgttgaaagaaaggggatatgtcagtagtgctgattcctgaagtaaaaagagcagataatgaaaataggtacttcacccttgaagaaaaaaaaaaggatgatgggaacaatgaaaacgaccacatgagcaccaacaggcttggaaatttgggattggttaatcaagttcccatgtttgctttgtggaacgaatgaagggaatgttatgttgagttgagattacaaaaaacattagcttagttagggaaaaaaaaaactaagatcagatggcagaattattgaatgattattattgtagcttggcatggtaacttttattgtatgttgaaagaaaggggatatgtcagt

SEQ ID NO: 54593 - DNA, 158 bp, Glycine max
  Clone ID: PAT_MRT3847_2030C.1
tgagacctcaggtcaggcggagctaccccctgagtttaagcatcccatatgcaaaaaattcacaatcatcagtcaagcggctcgctctacatgatccaagcttaattacgcttgcatgcaacatcctagctcttctagactgtcacctaaattcagat

SEQ ID NO: 54594 - DNA, 553 bp, Glycine max
  unsure (1)..(553): unsure at all n locations
  Clone ID: PAT_MRT3847_20310C.1
tttattttgtttggtattatttttttttaggtaggggctgaaagcctaatatttgctcaccaacttgccgccagaagagtattatgagtttgaattcaagggaaaaatacagcggatggatacccacggaggaggatcgacccgttttttttcaaattgttactcggagttttacgggggggtattgaaacaaatatatattttttttcatgggaaaatcgagggggcgaataactgactctctccaatcgatggagtgcgccactggganaccccaagagagcagcccagttctccaaaggtgcatagccgggagaagctgatggatgaacccctaatcccccagaagccaacacaagcaaaacgtccataggtaataacattgacattgcattccctgaaaaggggcacggccctgtaggtctcccaaaggagcaaacgcacccccagggcatatgttcttgtgagggggcttatgaatgcgcctttggtgctgccggacagaaatacctaggaattaactggcctcaatggggggccgggggccccatgg

SEQ ID NO: 54595 - DNA, 551 bp, Glycine max
  Clone ID: PAT_MRT3847_20311C.1
ggcaggtgatggttccaacatacaccacacttgtaaatcgctgaacacccacaaacaaccaaatcactaagctttatgactggatgacagtgcagtacatgtatttgaaccccatgacatcataaagcaagtggggtgtgcctcctcctattgagaatggttctgcaagcaatgtggcatctacttaagttggaccttcttatcaagctcaaagaaatgccatgtcaatccgaagcaatgtttattatacatacttagacatagctgaccattgtaagaactaaactagtacttaagttaatgcaggacactatctccaacccagtccatccagctaaccaaaatccatctcatcggacatgccaaaggatcggagcaactcatttggatggaagaccaacacacataataattatgccaataacatgtgaaaaaatcttgctaagcttaatgctaagatgatgtacacggtctttccagtactgtcaacttacttctagctattgaattacactgactgaccctaacacaaaaaaaaaaccaaaagggcc

SEQ ID NO: 54596 - DNA, 2421 bp, Glycine max
  Clone ID: PAT_MRT3847_20312C.1
cttgttcaatgttttgattaggcagaataaggtagttgatgctgttgttttgtttagggagcttatcagattgcggtataagcccgtgacctacacagtcaatattttaatccgagggttgtgcagggtcggagaaattgacgaggcttttaagcttctcaaggatttaaggagttttggttgtttgccggatgtaattacatataatactctcattcatggtttgtgtctgattaatgaggtggatagagctagaagtttgctaagggaagtttgcttgaatggggagtttgcacctgatgttgttagttacaccatgattatttcgggctattgtaagttgagaaagatggaggaggggagtttactttttgatgaaatgattaattctggaactgcacctaatacgttcacgtttaatgctcttattgatggctttggtaagttgggtgacatggcttctgcactagccttgtactcgaaaatgcttgttcaaggttgtctgcctgatgttgctactttcacttctctaattaatgggcattttcgagttaggcaggtgcaccaagcaatggatatgtggcataaaatgaatgaaaaaaatattggcgctagtttatatacatactctgttcttgtcagtggtctttgcaataataacagactacataaagctcgtgacattttgagactgttgaatgagagcgacattgttccacaaccatttatctataatcctgtcattgatggatattgcaaatctggcaatgttgatgaggctaataaaattgtagcagaaatggaggtgaataggtgcaagcctgataagttgacatttaccattcttattattggacattgtatgaaagggagaatgcctgaagcaattggtttctttgataagatgttggctgttggttgtgcaccagatgaaatcactgtaaataatttaagatcctgtcttttgaaggctggaatgcctggtgaagctgcccgcgttaaggaagttcttgctcagaacctgacattgggtactacatcatcaaagaaatcttatcatgaaaccacatatgtaagtatacctgttgctgtttagtgaagtgctatggcaaagtgcaaaccagtggattgacacggcattccaccattatgcctcgagtacttggtgcaggtgtttccagcttgtggatcaatggcatgctatcatcggacagggtgtctcttgtttctggagattatcagtatttacatttgcattcccattccctccaagtttctgctgattatttttggacctgacattaggtatactctatttaattttgttgagttgatttttcacttttcatggtctcatggctggtctcaagtccaggtagaggaggagggttggatggttgtgacataaaacttgtcaaaatcccaaacatggatttttcatttttcctatagatttgaaaattagtttctaacatgaaataggttttatttagtctctttgtttgtaaaatgtagtgctagtaattgatattcttgttcatatgatagtgcatttgcttcagagtatactgaattctctttgtaagaaattgaataaaatgtgaaacatttgaaaaggggtcttaaggaaattcttttgttcttaggctcggtaacttacaagatagaaggtggttgtatcgtaaaattgttcaagattattgtcattcatgattgtgtagaaagatttaaagacttgggccaaaatgcaaagaaccctctataaccacagttcgattgcagaaaatctcctgtggttcaaaacacaacagcacaactccttgatcttaagtaaaccgtgtattgactccatacaggtggttttatgcacttgcagtggttaaattcactctactctgcaagacttggtaagccttacttgagttgctgagtttttttaaccatatgggagtttttggcaacatatagttggtacacttttacatttgacaaggtatttaatcatggggcttctcaacaagatgcttttattgagatatcacaactggtacaaagtgcgcttcatgggtacaaggatacccctcaaccgatgagaagttgtttactcacaaaattagacttcaatttgatgaactgagttatttgaagacaaactggctccatggcaattggaaccaaagtgtggccctctatcaaagcctagcaagcttaactgcggagctagcattggggtggtttctttgatgctctgcttttagtaggttaataatcctattggatcatggttcagagtaatttctagaagggtatcgttatttgcagtttgacgcccctttttctctatttgatgcactccttataagaataagatgtcctagatacactccttttataagttatttaacgaatatcttattcttc

SEQ ID NO: 54597 - DNA, 318 bp, Glycine max
  unsure (1)..(318): unsure at all n locations
  Clone ID: PAT_MRT3847_20313C.1
nacantgangcacgcgtacgtnagctcggaantcggctcnagtaggntcnctngggaacntnngngcatttgggnatcatgctggaagnggnngnagtctgagnggtcncnannggttcnnctgatngttncnctgatagcnnatgtganggntnanngctcagcagtnccnctnaaccatgatccngtgttgngngncngtgncnngttaccatcnctggncgnctcanctcgatanngcgttnnggggnngatggtgantnantcgggcctnaacgtatnntctcngttnatccancctcagagcncanccgntgg

SEQ ID NO: 54598 - DNA, 316 bp, Glycine max
  unsure (1)..(316): unsure at all n locations
  Clone ID: PAT_MRT3847_20314C.1
gtggaacataaaaataaaaaatttttttaacaagnccttttggtcgctttttacaaacttttaagtgttttggctgccaccctctttgattaccatattttcaaaccggaccaaaattttttatggatgggaaccgggggaccaaaaaaaccactatttaacggtttggtaatgtgatggcacgcaataaattgatttaaaatggggggtgggtattcaaactagatagaattcttggccaaacaaatatgggggggcaatatacacatatttaattcttccagagatttgggttcaaaactttatcgcctaaaat

SEQ ID NO: 54599 - DNA, 401 bp, Glycine max
  Clone ID: PAT_MRT3847_20315C.1
gccgacgcgagggaaaaatctcgttctgcgttggtttgcctaaaaggcgcacttcttgtgtgcttcttgtgacggatgctgggaaagcgaactactttttgaccgtggaggttctttgattgaaagaggggtcaagcactaggttgctatcagggtgatcagtggagggggggtatcaaggagcgtgatggaaaatttgatgatgtcctacaacctgtatgtcactgcctgccttggtgacatgggtaccagattggtgtgagaaagcactgcgtgtgcagcagcttgatgttcgatgtgagacgaataccatagacaatgtttctgtcactggggctgcatctgggcaaaccgagcggtgcttgaaaagatctgacgcgtcgtatagctaccagcacagg

SEQ ID NO: 54600 - DNA, 294 bp, Glycine max
  Clone ID: PAT_MRT3847_20316C.1
cacgcgtccgctttctctcactaatccaacccgccttggatcaccgagcgagcatctcacgcggatcggatctgagcaatcaactataaatacaccacttccgatcacgacgctttcaaccaccaaacccttcttctttttcttcttcaagtacattcatcgctaccttttttcctttttttaggggtctttcctttttttccgggattcttggcgcaatctctgcgatggaggctcgcgacagaacccggttcggggtcctgctcgcggaatttcgagaatttcggatggaaa

SEQ ID NO: 54601 - DNA, 250 bp, Glycine max
  Clone ID: PAT_MRT3847_20317C.1
tttttataagacaatggctatgatgggggaggtaatcaactgaacacattgacttgaaatatagaatttatcataacatggatggaccattacaaagcttataattggcatttatacattacacaggaagttaaaatataaagaatagaaaaactaagaattgcttccccaaatgccttattcatatcttttagcaaatgaaatgttaaaaaggaagcttccaagggattagaccataaaatcacattaa

SEQ ID NO: 54602 - DNA, 2564 bp, Glycine max
  Clone ID: PAT_MRT3847_20318C.1
cggctcgagctcgagccgaatcggctcgagacggctgcgagaagacgacagaaggggacttcaaagtggagaaaaacacacacggttggttctccatctcttttctttttcctcaaaaagaataaaagggaaacaattagagtgaggttgctactcttcgatagtagcagcttctcagttctctcatttctcgtcttcactgagaaaaatccttctttgtgcatgctcctcgtttccatctaaaggggagagggggtgagtgagaaaaagtgagtgaggtttctagcttctactgttgagtaaacatgactatggaagagggcagggtagagaacgaggactacacacaagatggaactgtgaacattaaagggaaacctattcttagatccaaaagtggtggttggaaagcttgctcctttgttgttgtatatgaggtattcgaaagaatggcttattatgggatatcatcaaatttgattctgtatcttacaacaaagcttcaccaaggcacagtttcctctgcaaacaatgtcaccaattgggttggtaccatttggatgacacccatattaggcgcctacattgctgacgctttccttggccgctattggacttttgtcatagcctccaccgtttatctctcgggtatgtctctgcttacactggcagtgtcccttcctagcctgaagccacctcaatgctttgaaaaggatgtgacaaaatgtgccaaagcctccacactacagcttgcagtgttctatggtgcactctacactctagcagtgggaacaggaggaaccaagcccaacatctccaccataggagctgatcaatttgatgattttcaccctaaagagaagttacacaagctatccttcttcaattggtggatgttcagcatcttctttgggacactctttgcaaacagtgttctagtttatatccaagataatgtggggtggactcttggctatgctcttccaactcttggccttttagtatcaatcatgatattcgtggcagggacacccttctataggcacaaagtgcctgcagggagtaccttcactagaatggctagggtcgttgtggctgctttgaggaaatcaaaagttcctgttcctagtgactctaaagaactatatgagcttgacaaggaagagtatgcaaagaaagggagctacagaattgaccacactccaacattaaagtttcttgacaaggcatgtgtgaaaacagattcgaacactagtccatggacgctatgcactgttactcaagtagaggagaccaaacaaatgataagaatgattccgatcttggttgctacatttgtgcctagtacaatgatggctcagataaataccctttttgtgaagcaaggtactactcttgacagacaccttcggaagcttcaaaattcccccaccaagtttggcatgctgttgttactggtgccttgcttgtttgcattccgtttttttatcgagactttgtgaaggtcatgcaaaaatttaagaggcactacacatctattaaggatggtaattggatttgtaatccacacattgatcatgcactgatcatgatcatctgaaagctatagactcaaggttgcaagagaacatggcgtggttgaaagtggaggtcaaattgcctttcaggtccctttgagcatattcattttgcttcctcagtttatactcatgggaactgctgatgcattcttagaggttgcaaaaattgagtttttctatgatcaatgaagagcattggaacttcatattccaacttcaccttacaccttggtaacttcatcagttcctttcttctctcaacagtgtcaaatatcaccaagaaaaatggtcacaaggggtggattttgaacaatctgaatgagtctcatcttgactactactatgcattttttgcaatattaaacttcctcaacctcatcttcttcgcgtatgttactaggtactatgtatatagggttgaagtttcagattccatagacaagcttgcaaaagaactgaaggaaaagaccgtgtccaacgttgtgaatcccaaagactagttgattggggtatctaaggggagaaagaggattaagaccgtgaaaagtttcaaaactactttatgtacaaatttggatggccaaagaactagatatgtgtgtgtctgtggggggtgtgtgcgtgttaactttggaatggttttggtcattggaagtcacttcagaagagaacctaatcaagttattatagttattgggggtcgttttagcatcatgtgatcatttttcttatcctttgtaaccttcgagaaatgtcacttgcatcttgaaaaaaacacaagattggaaaaatgaatgtaatatgtttgaagtttttctttctagatcttaattttcttgccatttaagcttttctttactcaagaaattgtaaaataaagggtgaagacaaaatctatcaggtgagattttcattttcattcctccaataaaattgcttttttattataaaaaaaaaaaaaaaaaaaaaaaaaaaaaaaaaaaa

SEQ ID NO: 54603 - DNA, 1372 bp, Glycine max
  Clone ID: PAT_MRT3847_20319C.1
ggctcgagactatatgagcttgacaaggaagagtatgcaaagaaagggagctacagaattgaccacactccaacattaaagtttcttgacaaggcatgtgtgaaaacagattcgaacactagtccatggacgctatgcactgttactcaagtagaggagaccaaacaaatgataagaatgattccgatcttggttgctacatttgtgcctagtacaatgatggctcagataaataccctttttgtgaagcaaggtactactcttgacagacacctcggaagcttcaaaattcccccagcaagtttggctgcatttgttactgtgtccttgcttgtttgcattgtgctctatgatcgcttctttgtgaagatcatgcaaaggtttaccaagaaccccagaggcattacccttcttcagaggatgggaattggccttgtaatccacacactgatcatgatcattgcatctgggactgaaagctatagactcaaggttgcaagagaacatggggtagttgaaagtggagggcaagtccctttgagcatattcattttgcttcctcagtttatactcatgggaactgctgatgcattcttagaggttgcaaaaattgagtttttctatgatcaatccccggaacacatgaagagcattggaacttcatattccacaactaccttaggccttggtaacttcatcagttcctttcttctctcaacagtgtcaaatgtcaccaagaaaaatggtcacaaggggtggattttgaacaacctcaatgagtctcatcttgactactactatgcatttttcgcaatactaaacttcctcaacctcatcttcttcgcgtatgttactaggttctatgtatatagagttgaagtttcagattccatagacaagcttgcaaaagaactgaaggaaaagactgtgtccaacgttgtgaatcccaaagactagttgattgggtatctaaggggacaaaactactttatgtacaaatttggatggccaaagaactagatatgtgtgtgtctgtgggggtgtgtgcgtgttaactttggaatggttttgatcattggaagccacttcagaagagaacctaatcaagttatagttattggaggtcgttttagcatcatgtgatcattttccttatcctttgtaaccttcgggaaatgtcacttgcaccttgaaaaagcacgagattgaaaaaatgaatgtaatatgtttgaagtttttctttctagatcttttcttgccatttaagcttttctttactcaagaaattgtaaaataaagggtcgaagacaaaatctatcaggtgagattttcattttcattcctccaataaaattgcttttttattttaaaa

SEQ ID NO: 54604 - DNA, 188 bp, Glycine max
  Clone ID: PAT_MRT3847_2031C.1
taaggttattctcctaaagagaaacgtatataaatggaagtataaaatatttttatctagccaggcaactggttatagcgtaaacctctatgcctgcctgaatgaaagaaaacgttttacacaagcccttgatttagagcctaacccgggtaaacacatagaattatttaaacatacccggacctaac

SEQ ID NO: 54605 - DNA, 516 bp, Glycine max
  Clone ID: PAT_MRT3847_20320C.1
ttctacgcgtccgcttcagttctctcatttctcgtcttcactgagaaaaatccttcttcgtgcatgctcctcgtttctatctaaaggggcgaaagagtagattataagggggtaagtgagaaagagagtaaaaacaaaattaaaacatgactatggaagagggcagggtcgagaacgaggactacacacaagatggtactgtcaacattaaagggaaacctattcttagatccaaaagtggtggttggaaagcttgctcctttgttgttgtatatgaggtattcgaaagaatggcttattatgggatatcatcaaatttgatcctttatcttacaacaaagcttcaccaaggcacagtatcctctgcaaacaatgtcaccaattgggttggcaccatttggatgacacccatattaggcgcctacgttgctgacgctttccttggccgctattggacttttgtcatagcctccaccatttatttctcgggtatgtctctgcttacactggcagtgt

SEQ ID NO: 54606 - DNA, 367 bp, Glycine max
  Clone ID: PAT_MRT3847_20321C.1
ggcccactgaaccatcaacaataaaatatagttttctttgtgtgtgtgtgtaattagctgatatggttttcacatgtataaatatgaataagatttacttttcggttatattaatttgaaaacgatttttggttgtcaaattgaatctgagatatttacaagtccaggtctttaatatgcatctacttcacaatattttcaagtctggtatccactgtacttgtttataaatgtgtggtcaatggatttcctttgacactcttattttttgtctttcaatttggtttgtgattctgaaaataaaaaagtaaagctttttgtggaaaaagaaataatgaatatatggtgatgggttattgtaagtatt

SEQ ID NO: 54607 - DNA, 287 bp, Glycine max
  Clone ID: PAT_MRT3847_20322C.1
taagacaaaaacgctaccggatattctattaattacaagctgttcttacatatttgtccctaacggaggaaccactagttcctttgggcaggaggtatcaaaatactctcagacccttctgtggatgtgtgcacatttctttccttagcatcaaagcagaatacaggttgaccgtctaaatggtcattgatacaagccctgccatacactgagcattattcaccacagtagctcggacttgcctgtgaccagagtatggtgcgccaagttctactatcatacgtttt

SEQ ID NO: 54608 - DNA, 267 bp, Glycine max
  Clone ID: PAT_MRT3847_20323C.1
ggctcgaggaaaaaccaaattttaacaagcttacacaaaagcaaaccgccggggaattcttaatgcaacaacctgtgagtgggtatgttccacataagcgctatgactgtaacacgattgggcaggacctgtggtattatgataagacagatcaactttctcatggcaaccggaagcatgtactggatcgacttgagaccgtccacaatatgataaaaccagggtgcactaagacaaacgcaactattttggacaggccaaccatac

SEQ ID NO: 54609 - DNA, 612 bp, Glycine max
  unsure (1)..(612): unsure at all n locations
  Clone ID: PAT_MRT3847_20324C.1
catgagtaagaaaactaatttattaaacctctgtacacaaaggtgagcacacctttattggaagcatatttgaataattaaattacaaaaagtaaaagtgttattaaaatcatgcatgaaaatcttacaaaaataccccgagcaagcaggagcaagctgccgatccctgattgttctcatttggttgttgaaattgaaatgtgaatttaaaattgttagaattttctttaaaaagtgatatattaagcttatatatacaggataatagcaaaatgtagaaagggaaaacaatttacaaaagacattaaaaaaaaaaacccttcactcttgacagacactcacgatccaaaaatagtctaacccggaccaagcatccctgaaccagctcccgcacgcaaactctgggctgctgtcagtgagaagaaaagaagaaactcacacccagtctttcattctgtaaaacagccttgactcgagatcacaattacaccagattctgaaaggtgggagggacaaacgggtcacctggcctcaggctggtgggacaatcagagctgcacatcaccacgcagccagngctcactcacaagtctttntgtttttctgctgatt

SEQ ID NO: 54610 - DNA, 488 bp, Glycine max
  Clone ID: PAT_MRT3847_20325C.1
aggtcgagcgacaattcactaagctttaattttttcatcatggcttcctcgtgtgcttcctctgccattgcaactgttgccatctccacaccacgttcccagaagaatggatcactcttgggaagcacaaacgcttcttttcttagcgggaggaaactgatcgtgatcaactctacagtgccacttggagcacgacccagcactacagtttgcgcagctgttgagcctgataagcctgtgtgggtcccaagcaggacccctcctccatggctagatggcggagagacaacacattatggttttgatcctctaggtctagcatatgatcctgacagcctgagatggaatgtacaagcagagcttgtgcactgcagatgggccatgtagggagctgatggcattttgatgccacaattccacacaaagattgacatcctcaacaccccttgatggttcactgctggagagcaggagtacttgccagacac

SEQ ID NO: 54611 - DNA, 309 bp, Glycine max
  Clone ID: PAT_MRT3847_20326C.1
ctctcgcgtccgctcacgcgttcggcttggaattgatacatcgaaccaaattacattgcgatattatttgagaaactggatggactgacaccataatgccagatgttcaggaaccaattgattgactgatcccatctcaggagtgtgatggcaacacctattgtgaagcaaatccacaaaatcctttactgctaaatcagcggatggtgaaactgaatttccaacagggtacttcccaaaggcgctaatagactgcctctttgtataggggcgaggagctcgatgcaaagaatgctgacctgatgaata

SEQ ID NO: 54612 - DNA, 831 bp, Glycine max
  Clone ID: PAT_MRT3847_20327C.1
gaactagtctcgagtttatcaggttatggttaagagtgacatagttttcctttattatttttataatataaaagaaaattcttatttcttctttaattttatcttgcagaatattaaatcacagtcaacaagccagtcgctagtgctactagatgaggttggtggaggaacaaacccccttgaaggagcagcattaggaatggcattattgaaatcttttgcacaagacatttgtttgttgactatggctacaactcatcatgatgaattgaaaacactaaaatacagtgatgaggcctttgaaaatgcatgtatggagtttgatgaagtgaatttgaagccaacttacaagtttctttggggtgtaccaggttaatacaagattaccaagacctattggatgaagcacgtcattatctgagataagtctgggcctcccaaggttggtgatatggtgcatgtctcttcccttgggaaaaaggtgactgttttaaaagtggatttatccaaaggagaaattgtagttcaagctggaaacatgaagttgaagctgaaactaactgacattcaaagatcatagaagcgggggaatcatggccatggttagaaatgtgaaaaatgtgcattgaaactgctatcatatgataatgacgtaagataaagcaaaggtggggggcactttcagcttcagaaactaaagttcctagatttctccggatgtgtcaagaactacagttttgcaatgtcatcagcaatacaaatagttggcgtgctagttgtgcaagaataaattaaaactgccaaaaaaaaaaagaagaaaacaagccattc

SEQ ID NO: 54613 - DNA, 249 bp, Glycine max
  Clone ID: PAT_MRT3847_20328C.1
cagctactatcggcggccgccctttttttttttttaatttattttaccccgcaagatggaatggacagggaaccatatatagccgcaactttttttctgaaacccagtcttaaacacactggacactaccagacaaaattatcaactccccagtaagcggacaacccattatgttctttccacataataaaccttatgctacactctaaaacagctgcttaccaattaacccatcagcataacatacat

SEQ ID NO: 54614 - DNA, 262 bp, Glycine max
  Clone ID: PAT_MRT3847_20329C.1
ctgctcgagatggaatcacaacctctcggtttccagggggacttgcatattaaccaacctacatggagttaggtatggcgtctataagagtaaatagcatatatgaacttttctttcacatgcatacgtgcattattggcgttctcaagagtggcatggaatcacaacctctcggtttccagggggacttgcatattaaccaacctacctggagttaggtatggcgtctataagagtaaatagcatatatgatgaatacttt

SEQ ID NO: 54615 - DNA, 410 bp, Glycine max
  unsure (1)..(410): unsure at all n locations
  Clone ID: PAT_MRT3847_2032C.1
tacggctgcgagaagacgacagaagggggaggatgccccagaggtacagggtactgagagcaaagatgaatgtttaaatgaattgcatggacaggccatctgtacctctcgtggtcttgtttgtttccttaaggaggatgaaaacctaagtcccaaattttcttcagcaaatgggtgggaagacaaggttccattacaagttcaaggttcagaagtgctgttacttccatacaaagaagaaagttcctctgctgctgagatcattggaggggatggtgaggcctcctcatctgttttgggtggggggcaagaagaagttttgtgctttggctnnggngactnanncaacgagccngaagggggggctgggccngcncctagaccatcnacangaagagaggacanggaag

SEQ ID NO: 54616 - DNA, 289 bp, Glycine max
  Clone ID: PAT_MRT3847_20330C.1
gcgaccagccatcctctcatcctttacgtattaccgagtgaggtcccaaataatctaatggcctatcagctagaacattcctatatgggcttcattactcagcttttcatcgcatgcatggcatactcaatataatcccagctcagactgtaaacatgaatacgaaggacccaatctacaccgattttgcatatctagacctcaagcttgaataacatgcagttacgttcgtatacttatacactgaacaaactattacttttggtaaaattcataatcacattaaatg

SEQ ID NO: 54617 - DNA, 215 bp, Glycine max
  Clone ID: PAT_MRT3847_20331C.1
gatctatattgtggcatgagtcgacccgttttttctttttcgtggagggctgccgaacttccttaccctatggagagtgagaccaaggctggaccatggcgtggccagagctctgtgctaactggaattgcgatcacacaccaatatgacacaatatacgcattccaaacgtgaagagactagactgccctgcgagttaagagatccaacttact

SEQ ID NO: 54618 - DNA, 209 bp, Glycine max
  Clone ID: PAT_MRT3847_20332C.1
aactttttaaaaaaataaattatacattttattttttaaaaaaaaaaaaaaaaaaaaaagggaaggatttttaaaaaaaataggtagagcaaaaacgccctcccttttaaaaaatccaaacttacctacccttccattcaactaaataacttttctataatgtcacctaaattaaattaactgtcccgcttttaacaaccacttaactt

SEQ ID NO: 54619 - DNA, 223 bp, Glycine max
  Clone ID: PAT_MRT3847_20333C.1
gtcttaatggctgatgcaatccaaccatttactgatgctttctatcagtatcttgctgctcgatacagggatatattcaaattccaggaaggggttgttaccttgcccctatctgtagtaaatgcaatactgtctagtgatgatctccacgtcgcatcataagatgctgcatatgatctttgtgtttaaatggtctccacagcagtacacttaacctgtaaac

SEQ ID NO: 54620 - DNA, 367 bp, Glycine max
  unsure (1)..(367): unsure at all n locations
  Clone ID: PAT_MRT3847_20334C.1
gagacccgatngnaattgaagtcattgaggattattcaccaagataacattacaaatccattcaaaatttttaaggaggggttaggagcaaagttgaatctcctttttccaggggtaaatgatcctcactctttttcacacccttcatgtatgttgcttcaaatggtggaccatgcagcacgatcttctgaacttttgggatctgtgaacctgcctgattgttctaaataaaaattgtgaagctacgaacattttggaatttgacatacttgaaaagtaccggttttcccttaaggttttcttaagacaaattcgccacataaattggggggaaaccattgtcattactaaatgccatgtgctcctt

SEQ ID NO: 54621 - DNA, 358 bp, Glycine max
  Clone ID: PAT_MRT3847_20335C.1
attcgtgtaaacatattttatgagctttttttttgttgggttttctttttttggaaaaaaactgattggccgcgcaagcattttttttttggggcctggccataacaaatcaaaggccccccaagagtttctatgttccccggttaaaaacaaaactcccttgcggttcagcctacggaaaacccgaaactgtttaaagcaaaaacctatttgtttagcccgcttaactcttgacaaaccaaggttttggtcgggggccaaaaaccttgataaaaaaagccctttaaaaaaaaaattttactttttttttcccaaccaaggggagggggactttttggcttcccccaggattttttgg

SEQ ID NO: 54622 - DNA, 283 bp, Glycine max
  Clone ID: PAT_MRT3847_20336C.1
gactcagcaggagtatgtgatcaactgtacgagagactatcttgaggagaatatgacgctatttgcattggctgatacagcaatagtaacaccatgatgacgcgcccacgatacactctaccaagaaatccacactgtcatgagaaccggttctatatacatgatcttcgccgtaaaaatggcatcaactatgatcagctgatgttctctcttcgacacatcgtctagaatggtcactgtagcgtgcaacgaatcaacctaggactacatctatggcaaacac

SEQ ID NO: 54623 - DNA, 423 bp, Glycine max
  Clone ID: PAT_MRT3847_20337C.1
tggcttggaacgttggggctgatttatgtgcttgcatggtcgtcagaagatgatagcagggatcataatacttagaaggaactaaggtcctattgtgcttcgtgctcttgcggcggtacgtagactcctgccaagatttctattggtaagatcacaatttcagaagctgagagtcttgatattactgataatgctaaggtcaagacttaggataaggagggcacttttttagattagtagaggtcgactcctgttggtaagtagtctgaggatggatgcatttccgtcgatcataatacttagaaggagctaatctcttatccggcgccgtgctcctgcggcggcacgtagactcctgctaagatttccatgggcaagatcaccatttctgaggcggagagtcttgatattaccgataacgcg

SEQ ID NO: 54624 - DNA, 1843 bp, Glycine max
  unsure (1)..(1843): unsure at all n locations
  Clone ID: PAT_MRT3847_20338C.1
aattcggctcgagcaaatgggtctgcacctgtgtatccggcagccgttacgcaacgaagtggtggtgaaacttggtttgaagtagggcaatttaagacgtataccccaacagctgatgacattggacatgtccttaaattcgagtgtactgtaggtgatgcagaggccagagagagaaatggaagaagcatcatgtgtatgcttagttgtcatactgatactagctctcggcttggcatggagggtgctgaactgatgtgccctgattctggagtggcaagctatacaccgaagagagcttatgacccatgggaatgcttacaaaattccaatagcatacacaattgcacaagaagttgcccattcttttcaatttgtgttttaatcnccttctcttatttacctttaaatccaagcctcgttaatgatgatatgtaggcaagaattcttttatttggtttgggcgaaaaccaagggtgatcatcacagagcctgagttaatcaaagatgtacttaataagatgcatgatttcccaaagcctgacacgagtccgcttgtcaagttacttgctactggtcttttaaaccatgagggagaaaaatggaacaagcacagaagaataattagccctgcattcaatttagaaaaattgaagaatatgttaccaatattctacaaaagttgcaatgatttaattatcaagtgggaggaaatgttgtcttctgatggatcatgtgaaattgacgtatggcctttccttcaaaatttatctagtgatgctattgctcgaacagcatttggaagtagttatgaagaaggaagaaaaatatttcaacttctaaaagagcaagcagaacttgcaatgaaagctataatgaaactttacatccctggatggagatttctacctactgctaaccataggaggatgaaggaaattgatagagaaataaaagcttcacttacagatatgattagcaacagagagaaagcactaaaggcgggtgaggctaccgagaatgacttgttaggtatacttttggagtcaaatcacaaggaaactgaagaacatggaaacagtaagaatgttggaatgagtcttgaagatgtaatcgaggaatgcaagctattctacttcgcagggcaagagaccacttcagctttacttgtttggaccatggtgttgttaagtaggtaccctgattggcaagcacgtgcgagggaggaagttttacaagtatttggcaaacaaaaaccaaattttgatgggctaagtcaccttaagattgtcagcatgattttgaatgaggttcttaggctatacccaccagcagttggccagaatagaaatgttgacatagatatgagagttttaaacccaacaaatccaagagtttcattttttccctttggatggggtcctagaatatgcattggacaaaacttttccttattggaagcaaagatggctttgtcaatgattttacagaatttcttatttgaactttctccagcatatgctcatgctccgactatgtcaattactactcagccacagtatggtgctcatatcattctacgtaaagtgccaatatgaaataaattagtaggctcttcattgtgtgattttaatattacacgattatagtaaagcttataatgtaataacaaaataacttcttaggtactaaatgtgtttatttactttcatttacatgtttgtgtgttaatagtgtttgttaaattgtaacttggttattgaagagacaaagaaagaaaagtgacttcataaatatatagccaaatatgatattttttgctggataaaaaaaaaaaaaaaaa

SEQ ID NO: 54625 - DNA, 2129 bp, Glycine max
  Clone ID: PAT_MRT3847_20339C.1
aatctgtaaaccctgatttttcttctttgtagaaattcggaatttttatgtgacaaagacgttatgattatctagtttttttctttttctttttttccccctgtacaacgatatctggctattttgtcaccttcacctattcttgtttgtttgattctctctgcttaacgtaactttatcatttttctttagagattttgctgcatttgacagttgtttctttcaattccgtccaacatttgggcttcgtcgtttacttgaggccgtgtcatcgaaaacgcgttttgtatgttatgaaacgacgcaatagcctttttggttcacgaataccacatgtaaaatattgattatttttatccctaagtgtgcccctaagtgtgctgtacgaggattgtcatgtgtaagctcgaaacccggattcttcgtctctggcccaacgagtaatacggaggagacgccgccctttttctccctccgcgcgcttcagccaaattgcatgtcgcgccacaacgatatgataccccgtcctcaccattttctcttttgaccggtcactttctcttcggttcccgtcttctttagatggcaagtgggtttgggggatcaacggggaggtcacccccaagcccttcctacttcaacaacaataataacagcgatgctgccaattttgaatgcaacatttgctttgaattagcgcaagacccgataattactttgtgttgtcatcttgccgcctggcattggctagaggggggccttcactatagctcagggcaagtcacacatacacgatatgataccccgtcctccctctcttcacttttgactattgacttcctcaaccgatccactcttctctctatctgcagatggcaagtgggtttggggaatcaacagggagatcacccccaagcccttcctacttcaacaacaataataacaatgatgctgccaattttgaatgcaacatttgctttgaattagcgcaagacccgataattactttgtgtggtcatcttttctgctggccctgtctttacaaatggcttcactttcactcacaatcacgagaatgcccggtgtgcaaggccctcgtggaggaggagaagctggttcccttgtatgggagaggaaagtcgtcgactgatccaagatcaaaatctattccgggcgataacatcccgcatcgtccggctggtcagaggcctgaaactgctcctccacctgaaacaaatcattttcatcaacatgggtttggatttatgggtggcttggggggatttgcgccaccgccgatggcaacaacaagatttgggaattttgcattgtccgcagcttttggtggttttataccatccttattcaactttacagttgcatgggtttcatgatgctgccatgtatgggggaggggctggttttcctcatggatttgccaatacatttcatggtgtccatgcccatggattccctctgcgcacccatcaagggcaacaagattattatttgaagaagcttcttctatttgttgttttgtgtgttgttcttgcttttatatggcaataggttggatacaatctctagcagtatctgacttctgctctgataggtcttctgatgtgctctttgttttgtaactaaggagtaaggatgttgttcatatgataatactgtcttattaatcttgtagttcttttctttgtgatagctttgtggttcccatggtatccatgtgcaaaagatataaagcatgaaagcaatgcacccattgttaggaataaggatctgggtaccggtccgtagatattaatttcttagttattatactgagtttgaaactacaagatagctgaaatagtgaagttatgcccttggtttccttttgtgttctcatatttgcaattacatgttggcatgctattgctaatgttatatctaatattattttggtgcctcaaaaaaaaaaaaaaaaaaaaaaaaaaaaaaaaaaaaaaaaagaaaaaaaaaaaaaaaaaaaaaaaaaaaaaaaaaaaaaaaaaaaaaaaaaaaggggggggccgcccaaaaggaaccaagctaacgaacgcgggcaggcaacgaaaaagctctgcaaaggggggcccaaa

SEQ ID NO: 54626 - DNA, 792 bp, Glycine max
  Clone ID: PAT_MRT3847_2033C.1
gttgtttcaacaactatatagaagaagatcacagtcattagagctagatagctgccaagaacaatcccagttgtaaaaatttcactaagcttccaactatcaggaagtggagaaggcttaactctatctttagatattgtcatgatggtacctacaaggatgctaacaagtcaggggacaagaaataaagaatttcagagaaacatttccacaagaaaattcatattgtaaatgcaaccaagatatttgcaattgcaatattcttaaacgaacatcaagtaatggtgacacataccagtgatcatttttacactcacgccaagatcaagagctcttctaattgtttctgcactatcatggcgaggaggatcaaaaagagggagaaggccaacaaactcccatggtcctcctggactgtctttagttccctcaggtacttcctaaattgagaaatttttcattgctataaaaaatgtacactggtatattaatgagatgatggagaactcataggacatgaacctggcgggcaactgcaagagaacgaagtccacgttctgcaaacttgtcaataattgcatgaaccctctgttggatttctgatttgttatgtgcaagattgagaatctacacagtagaagagttaaataatgatcaaacaaatgttactctagtaggtagtatggttctttagagttataatggattatgttctacctgctctggtgcacctttgctaaccctgtgcattttaccagcagcatcaaggtatgtaagtgcagttcttttatc

SEQ ID NO: 54627 - DNA, 413 bp, Glycine max
  unsure (1)..(413): unsure at all n locations
  Clone ID: PAT_MRT3847_20340C.1
aaaagttgcaaaaacctaaaataacgatgaataaatgtattggaattttttattgtgcattgaaattctcaatgactacagaaaaaaattgagggttttctcatttacatattaagaaaaggtttcaccgcataactgaatctgtagatgctgcagttaccactcacatgttttacaagtccttcttgaagccaccttattatcaatacattggtatttaacatgagcaggaacatgtaaattacatactctgttcaaaataagacagtctgtaaagtggcagtccagtatctaaagattgaacataaccttgatggcgttaccaccacgagcacttgtttcaaaagcttnttccacttccttttgagaaaacccaaacctatgagttataaggggttttacatcgatttttc

SEQ ID NO: 54628 - DNA, 868 bp, Glycine max
  Clone ID: PAT_MRT3847_20341C.1
ccctaacaaggggggggttgcttccatgctttatatattaaatttcgcacatggatcccataggtgccccaaaactttcacaaagaaaagaactccaagagtaatttgccagttttattatatgaacaatatccttactccttagttacgaaataaagagcgcaccagaagatctatcagagcagaaatctagttctgctaccaatctgagaatgtattcaacctattgccatttaaaagcaagaacaacacagaaaacaacaaatagaagcagcttcttcaaataataatcttgttgcccttgatgggtgcgcagagggaatccatgagcatggacaccatgaaatgtattagcaaatccatgtggaaaaccagcccctcccccatacatggccgcatcatgaaacccatgcatctgaaagttgaataaggatggtataaaaccaccaaatgctgcggacaatgcaaaattcccaaatcttgttgttgccatcggcggtggcacaaatccccccaagcccttcctacttcaacaacaataataacagcgatgctgccaattttgaatgcaacatttgctttgaattagcgcaagacccgataattactttgtgtggtcatcttttctgctggccttggctttacaaagggcttcactttcactcacaatcacgagaatgcccggggtgcaaggctcttgtgggggaggagaaattggttcccttgtatgggagaggaaagtcgtccactgatccgagatcaaaatctattccgggcgttaacatcccacatcgtccggctgggcagaggcctgaaactgctcctccacctgaaacaaatcattttcatcaacatgggtttggattta

SEQ ID NO: 54629 - DNA, 509 bp, Glycine max
  Clone ID: PAT_MRT3847_20342C.1
acgagtttggctggtctgtgatttgcaactcaggattttctatcacttcctgtcattttccatttccatgattgttctaattttctgtgtttcaccatttaataggatcaacgcttcctgattttgttgtatattttgactgttaataccataataataaggggattccttgtcaatgctcaatacagaggtatcctggttcatggttttggtataaacctagaagggacatggggttcaagatcctagcatattgtgattttggccttccaggtcccttgacattcatcatcttgggctaggtaactgtttcagcccaaaacgtcctgcagggctcatcatttgtcccgtctagaaggactgtctagatcatttgacttgcttgctgtcttatatatttgaagatgttgatttataccaaattgtgatggaaaaatagaaaatatagatggtagctatatgctgcagttcttaaattcatgttatattgttgggttaagctttgaaat

SEQ ID NO: 54630 - DNA, 1060 bp, Glycine max
  Clone ID: PAT_MRT3847_20343C.1
cgcttcagtcatctggaaagctaataatatagatataaatcactgaaacaatgaactgtcaatcaaaatttgtatttaaattttttcagcaaattacaaacaaatatcttcggcaccttactcctcaagccccaggcaggctagaggttctgaaggtcaataaataatctgtgaccctcagaataagatggatccaatgttgtaatctgtaatcataccataccaggcattctactggacgaaaattttctttctattgaccagatttttctatcactatattcacttccttcactattagttagtgacagcatacaacctaaccgtaaattttgaatagaaatatttacaccagaaagcttggatgtgtaagtaaactttcagcatccggaataaccgtgaatataacttatggcctggagaaaaacaagtcacagatacagagaattagcaaacataatacctcgtcgaaggctttcacttgcagctgcaaacttcttctccaagtcagcctctccaactgcattagcagcagcacgcaactgattcaaaaactcatcaagtcttctagcactccgaataatactcccttcaaagatgtcagtcatttgtataacatcggcaaaatttgctccctttgaccatgagtatatcacatccatcaagaatggtcttacggttgaatccacatactcattcacatttatatccaatttgcattcatgttgtatctcagctatccttcttgcactatcttgaagctgttgcagaggcctagcaagctctgttctcaattgtatctgctcagttgacttatctcctggtatgaaacaacttgcaagggcagcaacttgatgatggtcaaggtcattaaaagtaccattaaacattaattcagtgacaaggagttcatcgcctgtgtcaatcaagcaggctgctcgtcccttcaactgaactacaccatcagcatcaatatgaccaagtttctttaagactcgtgagcgattcttaagttcttcacgaaatttttgtagctgctcgagccgaattccgagcttac

SEQ ID NO: 54631 - DNA, 400 bp, Glycine max
  Clone ID: PAT_MRT3847_20344C.1
ggctcgagggaaaacataacaatgcattctcacaaacccgagcttcagaacgcggctatcaactgccacgaggtctattgccccttaaccttaaaccctatccctatgctacttgttggaccgtttctgaaacccgaaacatggcgccgtcttccagcctgatgcgtgcttatgccacttctcaatggaggggcctgcttgttacgtagttatgcagtgcgatgactttcgggcccaggttgctgaatctggaaccacgttggaactaactcgaagcgtggtcacggagattgaggactccactggggtgacctatgccacagttatactccttcaccaatctcgtcccactcccgagcttatagagaccgtcatgcctaacggtaatgtgttaaagaag

SEQ ID NO: 54632 - DNA, 515 bp, Glycine max
  Clone ID: PAT_MRT3847_20345C.1
tcgaattggttgaggagattggtcgctacagacacacactactctcactcacacacactcagatcttagtcccaaatgatctccttccaggagattggtcgccactagagatgctttgcaaccacgtgaaagagaagagtcacatggatcttggcggccagggaggggcgatggtgggagagaaaattgagagcgacttcggctaaagggtgttctaccaacaaatcaatatggaggaaatccagatcaacaatctgtcgaccattgtgctccagcaacaacgtttgtgcggccactaacgagatctggatcaacgttgtcaccgacgagatctggatcaacgctgccaccgacgagatctgggttttgcagtttttgggtttgtttccttttttggttcgaacttgaatatgactctagatttggatttgtcatgaatgtgttatttatttatttttttggttcaagttgaaaaacatgtttgatttgggtggatttatgttgtattgtgtttg

SEQ ID NO: 54633 - DNA, 262 bp, Glycine max
  Clone ID: PAT_MRT3847_20346C.1
tcgccatggtaaatacatggcttgctgcctgttgtaccgtggtgacgtggttcccaaagatgtcaatgctgccattgccaccatgcaaaccaagcgcagattccagtttgcggattggtgccccactggcttcaaggttggcatcaactaccagcctcccactgtggtgcctggtggagacctggccaaggtacagagagctgtgtgcatgctgagcaacaccacagccattgctgaggcctgggctcgcctggaccacaag

SEQ ID NO: 54634 - DNA, 694 bp, Glycine max
  Clone ID: PAT_MRT3847_20347C.1
aaagcaaggactaaaacgttgactccaaagatccccaatgatacaactgcaatccaaattgccatggcagaaaatcatgtggacatggttcatttgcttgtcatgaatggtgcagatgtctctgatgtgcataaccatgaattttgttcatccaccttagatgaaatgctgcagaagcgtgaaattgggcatctaattaatgtaactgaggtcatgcgcagtggagttgtattaaaggggaaacatcaagaacaggagctcaatggaggaagatctaatggactaaagtttccaagggtaagcatatatagaggtcaccctgtagttagaagagaaaaaggttcggtggaagctgggaagctaataaggttgcctgattcattagaggaactcaaaactattgcaggtgaaaaatttgggtttgatgcaaaagatgcaatggtgacaaatgaagaaggagcagaaatagattccattgatgtgatcagagataatgacaaacttttttttgttgaataatctgagatgcgaaaatgtcaagtgtaaatatataatctcgcacaacagaattacttacaagtttcttttgtgttagtaattttgtcttcttcctgtagccataaagaagtggcttgattggaaacatttttcagttgacttttggtttataattcatagttttttacttccaata

SEQ ID NO: 54635 - DNA, 456 bp, Glycine max
  Clone ID: PAT_MRT3847_20348C.1
aacacaacagagttcccaagcctccattatttcttatttgtcataaagagtccaaatatcacgccataaacttgtcctcatacaaagtaacaacaatatatttacacgtaaccttcaatgaaaaacatttccccaaaaaccaaaattaaattaattaagcgggcgaacgcctccaccacagctcctccaccaccatgcagtaccccggccgccgcctgcagtacccctgccaccgccgggcagcaccgctccaacactcatctagtggaagtgtaggccaaattgttttttttttctttctatgctcgactaatagatatatactaactatactataataattgtatttagcatataagtcaagaggcagttgcttcctgcacctctcttaagctttcagaacacctaatccaaaatacaaaattacattgggaaattatctctctagaatgtaaa

SEQ ID NO: 54636 - DNA, 1262 bp, Glycine max
  Clone ID: PAT_MRT3847_20349C.1
gactctcacacagctcctgagactcaagaccaatactcttctagaagcaatgcagattaaaagagaagataacatacaaatactcaaaaattttcttcagcatttcaagcaggttaaggatctgagtatcaaagatttgatggtggagaacgtagaagaagaggaccctaacatggctgtgaacttgctaactgtggcaagcactggcaatgctgcttttcttgaggagcttctaagagcaggtttggatcctgacattggagactccaaagggaaaactccattgcacatagcagcatcaaatgggcatgaagggtgtgttaaagtcttactcaagcatgcatgcaacatgcatataaaagacatgaatggtaacactgcactatgggatgctatagcatcaaaacattactcaatattccggatcctcttccagctttctgctctctctgatccaaacacagcaggcgatctcatgtgtacagcagcaaaaagaaatgaactaacagtgatgaccgatcttctaaggcaaggactaaacgttgactccaaagatcaccgtgatacaactgcaatccaaattgccatggccgaaaatcatgttgacatggttcagttgcttgtcatgaatggtgctgatgtctctgatgtgcataaccatgaattttgttcatccaccttaaatgaaatgctgcagaagcgtgaaattgggcatctaattaatgtaactgaggtcatgctcagtgaagttgtattaaaagggagacatcaagagcaggagcacaatggaggaagatctaatagtggactaaagtttccaagggtaagcatatatagaggtcaccctgtagttagaagagaaaaatgttccatggaagctgggaagctaataaggttgcctgattcaatagaggaactaaaaactattgcaggtgaaaaatttgggtttgatgcaaaagatgcaatggtgacaaatgaagaaggagctgaaatagactccgttgatgtgatcagagataatgacaaactttttttttgttggataagctgagatgcgaaaatgtcaagtgtaaatatatatataatctcgcacaacagatttacttagatgtttcttttgtgttagtaattttgtcttcttcctgtagccataaagaagtggtttggttggaaactagtttttttttttttacttccaataactgaaaatccatttcctattacacaaaaaactgaaaatatagttgacattttttcttttt

SEQ ID NO: 54637 - DNA, 373 bp, Glycine max
  Clone ID: PAT_MRT3847_2034C.1
tggcttggaacctttgggctgatttatgtgcttgtttagtgcttgctggtcgtgagaagatgatagaagggggcgtattgcgggaagtatagcgcccgctctccttccttttgtcttcctctccttaattaatgccgacgccgcaattttaagtaagggccctccccgccccaccccctgacccccgacctaaacccgctccgatccctccctgcgcacccccgccgacgcaccgaccctccagacccggatggagcaaaagagaagggaataagaaaggagaaataagatcaaccctggtggcacgacgaagagccggctgctagtgacgggagcagagaatgaagagaagaagaaggagaaacaagcctca

SEQ ID NO: 54638 - DNA, 443 bp, Glycine max
  Clone ID: PAT_MRT3847_20350C.1
aattaatatgatgcacaatggatacgctagtaaaaacattgttttttaaaagaaagtgcaaaaaacaatgatcatgccaagtaccgcgggcacgggactacttaaataatgggggccatggccccaagttgggaccaactaattaaccaaaatggctggtggaccaaaagtacctggccgtttttaaatgaccctcaatggcctgaacctccgtccaataagtatgcatcgaagtttcacgtaccaggcatgggatcatcaaaatttaacccccacgaaggaatcagggctggatacatttgaacctacctcaatactatataaaactactcaaccatatctatatatatatatatatatatatatagatatatatatatatatatatatatagcttcacaagtacaagagtgggaatctacaccaatactattatataatat

SEQ ID NO: 54639 - DNA, 248 bp, Glycine max
  unsure (1)..(248): unsure at all n locations
  Clone ID: PAT_MRT3847_20351C.1
caattcctaattgtttaaacctaattctcatttcttcancgttcgattcttctccgcctanagatgnagatgcttcgtganaactttnaccggtaagaccatcacccttgnggtggagtcctccgncaccatcgataacgtganagctangattnaagncaaggaagggntcccanctgnccagcagananttatctttgcgggtaaacancttgangntngtcgannccttgcccgantacaacatg

SEQ ID NO: 54640 - DNA, 180 bp, Glycine max
  Clone ID: PAT_MRT3847_20352C.1
tcctggccactctccttctcttctctctaggtcttcagcgcatctccacctaggggtaatgaaaatttatatggggaatgttcgcatccgtatttttgtcacctgctatttctacttttgtaaatccacttccactccttaccctatttacaatctttcatgccttctctagcctgttat

SEQ ID NO: 54641 - DNA, 549 bp, Glycine max
  Clone ID: PAT_MRT3847_20353C.1
actgttctaagctggacccactacctgcaatttgatttgggacgctggcccgcagtgcagggatatttgcaacgcatgtgctgcacgccccgctgtgcgggccgcgatgatggccgaaggtctcatcaaggaatgatccgctgccatgcgttgcatcgtcttgtcggcaattgcaaacgcatggatacgctatcaggatcagtcacacccatttccggagcacgaccgcgcgtcgtactggtgctgcaaggcggtggcgcgctaggttcctatcaggccggcgtctatcaggcgctgcatgaacacggtcttacgccggactgggtggtcggtacctcgatcggagcgatcaacggcgcgttaatcgcaggcaacgagcgcgccaatcggctaccgcgcatcaaggaattctggaaccgtgtcgcacaccgcgatctgttcgacatgcggcgtgtgccggatacggcgcggcgcttcaatatttggttcaacgcactcgactcggcgtttcgcggcgttcccggcttctatacgatgcgctggttcaac

SEQ ID NO: 54642 - DNA, 137 bp, Glycine max
  Clone ID: PAT_MRT3847_20354C.1
cgatgtgagtgagttccatctagttccagaactaacagccaaaacacaaatgcagattgtttcctaggcgtcttaaattctatcttcgagcttgcctctgccaactacatttgaattttgcgcaacctcattcttat

SEQ ID NO: 54643 - DNA, 410 bp, Glycine max
  Clone ID: PAT_MRT3847_20355C.1
ggctcgagctccgtaccagtttcaccgcacgaatatcttgttgtttggagcgatccgagaaaaactctgtaaacatgttggtttaccaggacctgcttacaggtgatgagcttttctctgactccttccgcctcaaggaaattgaaaaatggagcgctgagggaagtcgaagggaagtgggttgctgaaggaacacctgatgtagacatggtcgcagacccttctgttgatggtggtggacctaatgagggagccgctgatgcagctgtgaatgttgttgacattgaggacacagctatactctaggagcgaccccaaattgataagaagcagtgtgatgcctatatcactagggtgatcagctaattggactctccgagcgtcgcgcataacaacgagagatgttcaaa

SEQ ID NO: 54644 - DNA, 576 bp, Glycine max
  Clone ID: PAT_MRT3847_20356C.1
cactaggactagcgtcgatctatcgctagcaatgtgccagagtcctgtcaccactacaaccacggtctaattctggtttggtggttgggggactcctcgtgtgcggcgctaatagccaccataacagacacatgctacataaaaaccgctgccggcagaggcgaaaaggactataaaaaacacctggaaacccgaagtgcccacctgccaaacaaggtggcaatacgtagcagaaaaacgggcccctaccgggcacgccagttagtaaacacagtttagcaccgaggcctgctagggtgaaacataggggtaaaccaccaacagggaaacggggggcagaatagtagctcatagtaggtaaagtaagagagcggccactcatgcaaacagaaagtgtagcaggttttgcactacacctgacgttaactaatgtgctactagttaggagagttaggccaggaggtagggttagtaaggcagcaacccgccagacggcgaaatggtaaaaataaatttaagcgcagcaacgtgatgcaaagccggctggcgcatgctcaaagccggtgtgcgcaacag

SEQ ID NO: 54645 - DNA, 563 bp, Glycine max
  Clone ID: PAT_MRT3847_20357C.1
ttttttttttttaaaacaagcaacaaaatatgattattcatggcttgcatcattgtcttcccaaaagtacgttcagagggtataagaaaagtcgttttagtatatcatctaatgaacaaagtattgaaaggggtgaatttttgtatcataatccgtacgtatacatggatcatttgcttttgtaaactatctcttcatcatccacatcaaatgctggattacagaggcatttgaagagcctacccagaccctgcgtgaaaaagggagttcgataggaaattgctctaggcgattcatcatctgaagaatcagaactgctttcttcatcatcagaatcagcagcaatcttcttcttcaaagtttctccttttggatacttgtcctgaaatatcttcccaagaattttaagagcagtagcccgaagtctaagttcctctttcttaacgttattttcctttagtaccatttgacacacatgtacgagggttacttctatatccacaacatttaacttccacaaggaattcatcaatgtatccttattgaggcgaatgtgagagtca

SEQ ID NO: 54646 - DNA, 259 bp, Glycine max
  Clone ID: PAT_MRT3847_20358C.1
actgcccagttcttaccacacaacatacaatataaaaaaaaagacgcttattgatctgcgaaaatgaaaaagtgcaacccgagccacacttgtcaggctggtatccaggtcggaaatgcttgctgggagctctactgcctcgagcacggcatcgggcccgatgggcaaatgccaagtgacaagacagttggcggtggtgatgatgctttcaatactttcttcagcgagactggtgctgtaaagcacgtgccacgtgcag

SEQ ID NO: 54647 - DNA, 323 bp, Glycine max
  unsure (1)..(323): unsure at all n locations
  Clone ID: PAT_MRT3847_20359C.1
gggtgttgttgttttttttgtttgctcctccctcgttgttgttcctttgttcgcggttctgtgattgttgtcggcccgttttccctcttgttttgcctccctctggggtgtgtnggcccggcgcttcttggtgtcttgccctggcttcccgccgctgctgggggtgggttttgctcctgaatcttctggnttgttcctctccggtcccggcgtttttcgggggcccctgtgcgggtctctttgcgcgaactggtgtctcctgcgtctccttttgccttgtccggtcgggttctgcctctctgggtgttgttcttgctcgagcc

SEQ ID NO: 54648 - DNA, 456 bp, Glycine max
  Clone ID: PAT_MRT3847_2035C.1
tttttttttttttttttttttttttttttttttttttttttttttttttttggaaaaccaaaagcccagggggagatccccctaaaatttagcaaaactatttggggggggaaatccacatccaggggaacccttattttataactcttctctcttttttttgggaacattaaaaggccttggttccattatccggccttaaagcttcctgggggttcgttttatagcggctattttggggggggggttagggctttccctttggccttaaaaaccccaagccggggggtaaaaccccccctcctatagccaaaaaaactttttaaccaaaggggtttccccccccccttggggggaaataatccaacatcctaaagctctcacctttcggaggaaaccaaattggggaaccctcccttgaatgggaaacaaaacctaaactggctttataaccat

SEQ ID NO: 54649 - DNA, 206 bp, Glycine max
  Clone ID: PAT_MRT3847_20360C.1
gctgcacgtaccagtcaatggctctggcctaggtcaaatctcgctcgtgataacaggtgaggctttaggcaggctacccatcacaccgtagcatgtttcccctgtcaacccggatcctggcaggtaaatgccggttcttatgcagtccagcgttttatgtaacctgagcaatgttaatgctggaacatctattggttggtggtttg

SEQ ID NO: 54650 - DNA, 468 bp, Glycine max
  Clone ID: PAT_MRT3847_20361C.1
aattcggctcgagacggctgcgagaagacgacagaagggtccatcatgaacctcaattcacgactttcccattttcattaagttttattgatcgatatcttcaccactctcagtgttttatccttgatttagtctttggttcataactccatcacaaaggtcctatgttttattccaacttcaagtaattgcatcctccttgctttaggaacttagagtctcatgttcatgtatttaaaatgtttacacttttttaattggggtacttctcataatgaattatgagcacttagttaggattatacgcttcacaaatgcgcttcacttagagtccatttgtctcacagggattcaattccccatttttttcaaacaaggtttcatcaaacaataccatacacacataacctaatacttttagtctgcactcttaaagtcttagatcataggataaataattcaattaat

SEQ ID NO: 54651 - DNA, 1143 bp, Glycine max
  Clone ID: PAT_MRT3847_20362C.1
cgggacgccacatcggcctcaaaggaaaaagaaaacctctcgttttctttctctctctctaaaacacgatttccaattttctttctctagaaatgggaacagcaatccttcgttcccacgattgcctccaaggccggttcctccacaacgaagccttcgcgatcgccacgtcacgtgttgcatcgcgaagaaaccctaactctaacaacaataaccataatagcttcgcctcctccgcaaaccagaattgccgccggaagcggagtccggtcaccgatcgagagcgccgtcgatcgccgccgaatctcgtcacgggacacgttaagatcctgaagcgaggcgagaaattgagcctccagaataaaaaccaaagactcgctgtttccgcggagaacgttttggtgaagaacgatgtgggcctggatttgttattgggttccacggatcgattgggcccgggtccattaaccgtgaagaagcagattagggtttcggatgcgaacaacaacggcgtgtacgcgggatcggcgttcgtttcgtcgccgcacccgagttctgttccggtgccgggatttctagtgcggaacggcgccgccaccagcaatcttcgacggttgctgcgactcgatttggaatgatgattaattcgattatatgatttcggtgtttgcagattatattgtgtactttgcaatgaataggggttgatggatgatgatgatgatgattgctcgtgtggtctctgacgcgcttcctttattttttcaagaggataggcgcagggtgcgggcgcgtgaagaaaaaacggagaaagcaacgtgtgaaggtttttagggatggagatattggtgttacggtttctgtaaggggggttagataggtaggtagtgatgtcgttagttttaaaacgctgttaaagacggaagggtggggtataagaataagaaatagaaatgtgggtctggtatatgtgaatctagaatgtgtagtttgatgggggtttcgtatggtagaagaaagtttgatgcgttgtgtatgttttaggtgatgttggtgtgatgttcagttcttattatcatgctcataatatgtagttgtgaatctttatattagtaatacaagaaagtttctggtattagcttt

SEQ ID NO: 54652 - DNA, 169 bp, Glycine max
  Clone ID: PAT_MRT3847_20363C.1
ggcttgctcaatgatctgctctccttctgtcaccactggctaccgttccgttgcctgcatcgttgctctattcaccggcctcaaatccatggctggctttccctctatgaatactccacttgacttaacctccattgctgtcagcggtggaatagttcaatgcatgcac

SEQ ID NO: 54653 - DNA, 567 bp, Glycine max
  Clone ID: PAT_MRT3847_20364C.1
acaaaaccatcaatcaggtacagttatatcgctgaataagaaaatcataaacaatcaatgaaatacaaaaaacgagaataaaattaacaaaatacaactttccggcaagaagttgaacctcaaaatacaactttcctaaagcttcagggtatctgagaagtacctatctccaaaagcaatggtctaaggaatatacatgttaagaggttaaactagccacaaaacaaccttccaatttcaccactgtctccactgcatcctaaatagaatgtgcaactcatgcctaccctgtacccaccaattggctaatgggtccattgatcagaggttacccaaaaaacaccaatcaatgacaatgtatcagaacgagacacacattattcaacacaaaattttcacacttgaacagaactacctttctcttccacaggtgaaacttgaagaccaccctcatccccatcacatcatccgcctcacatctgtgttacccatcatcataccatcaaaaccagcattctcagaacagtcctcgccccattgcgtttcttacacaacacatcacagaaa

SEQ ID NO: 54654 - DNA, 469 bp, Glycine max
  Clone ID: PAT_MRT3847_20365C.1
cccattttaattttatttttttttctctcaaagtgatgatggcttcaaattaccctagaaagggactagccttaacttcttcaaaggccatagctaatgcagcttcatggtactgtgcctttgttctcgtggccctcgcgctcctaagcatgttcaaagacagctccatgcttattcctagtcaatatgccagcggccaactattgtcacggccatgcgaggaaatctatgttgtcggagaaggtgagacgcttcacacaatcagtgacaagtgtggtgacccttttatagttgagaacaaccctcatatccatgaccctgatgatgtcttccctggcctcgttatcaagattacaccctcacttcgtacctagaaattaaggttgttatataaggaaaaatcaattttcctatccatgtgagagagaaataacatccttttcttgtcattaccttctctcttctattt

SEQ ID NO: 54655 - DNA, 1716 bp, Glycine max
  unsure (1)..(1716): unsure at all n locations
  Clone ID: PAT_MRT3847_20366C.1
ttgatgcgggggccatctctggatatgcctgggtgaccaagacgacgcgggatccgaacaaaaccccaaagcatcgcaactctgtctctctctggctcgagtttttttctctctctccctcgcaaatgcgattcgttcgtgacgcgttcggcatttagaagataagaaaaataaaccaatggcggaggaaaaacggttccgaatagggtacgcactgttgccgaagaaacaaaacaggttcattcgagactcgctcgtgaatctcgcgagatctcgagggatagacctggttcgagtcgacccgaaccggaacctaacggatcaaggtcccttcgattgcgtcctccacaagctctacggcgacgattggaagcgtcaattaacggagttcactgttaagtaccctaatgccgtggttctcgactcgccggaatcgatcgagaggctccacaatcggatttcgatgctgcaggtggtgtcggagctgaacatcgacgacgggagcgagacgttcgggattccgaagcagattgtgatatacgacaaagagacgctcttagaccggcggaactgggaggcgctgaattttccggtgatcgcgaagcccttggttgccgacggcagcgcgaagtcgcacaagatggcactggttttcaaccacgacgggttgaattcgcgggccgcgccggtggtggtgcaggagttcgtgaaccacggcggggtgatcttcaaggtctacgtcgtcggcgagcgcgtgaggtgcgtgaagcggaagtcactgccggacgtccgagaagacgagctggtgagggtttcggaggatttgcggaggttttcgcaggtgtcgaatttggccacagatgagagaattgacgataggtattataagatgatgcatttggatgacaccgaaatgcctcccctgagcttcattactcagatagctcgggggttgaggcgtgccatgaagctgaacctgtttaattttgatgttattagggattctcgatgcgggaatcgttaccttattgttgatatcaattacttccccgggtacgcaaaaatgcccggttatgagactgttttgacagactttttctgtgatgtgttgtgtaagaaacagcaatggggcgaggactgttctgagaatgctggttttgatggtatgatgatgggtaacaaagatgtgaggcggatgatgtgatggggatgagggtggtcttcaagtttcacctgtggaagagaaaggtagttctgttcaagtgtgaaaattttgtgttgaataatgtgtgtctcgttctgatacattgtcattgattggtgttttttgggtaacctctgatcaatggacccattagccaattggtgggtacagggtaggcatgagttgcacattctatttaggatgcagtggagacagtggtgaaattggaaggttgttttgtggctagtttaacctcttaacatgtatattccttagaccattgcttttggagataggtacttctcagataccctgaagctttaggaaagttgtattttgaggttcaacttcttgccggaaagtcttttgctttgtggttttgccttttaatgatgccttaattcttcattttgttaattttattctcgttttttgtatttcattgattgtttatgattttcttattcagcgatataactgtacctgattgatggttttnnnatcnnnatcta

SEQ ID NO: 54656 - DNA, 312 bp, Glycine max
  unsure (1)..(312): unsure at all n locations
  Clone ID: PAT_MRT3847_20367C.1
ngcnngcacncgtacgcgtacgtaagctcgagaattcgagncngganctgcaccnancagangntggagcntnacacgatgggcncctacaaatatggnntcagaagnnannggcgaaagnnagcngtacngctgtcangcgacntacttgcagagggtgnngtgctgcagantaanagncanaaaactnncattnnnctgatgcngnnantccgacccgncctgagcaaggctcgtcgcttgngctncaaggctanacagngcnatgcgctaagncnnnttaaaattcnnnccgagnttgggnnngcngac

SEQ ID NO: 54657 - DNA, 252 bp, Glycine max
  Clone ID: PAT_MRT3847_20368C.1
gcaacagagggggggaattccggccccaaatttttttctaacccccaggatatgggggggggccttggttgttttataacggattttgtttatatgacccgccctacaccccatgtttttttgggggggggggatcttgtttttccttttgcatggggggggggggagccacaaaaagagtgccttgtttatccccaagcccctcagggggtgcccccttgaatgttttttgtttgcccaaaagaggatccc

SEQ ID NO: 54658 - DNA, 476 bp, Glycine max
  unsure (1)..(476): unsure at all n locations
  Clone ID: PAT_MRT3847_20369C.1
tggntctggacctttgggctgattgtagtgcttgggtcgtgagaagatgatagcaggggtctgctcagcattctagcgcgagtgcctcgttgcatgttcgtccctaactgatcgtaggactcctcctcctcctcgtcgctctttttacagacggaccggtaagggtaaaagtcagtggagtaatcgacgtagacaacgtcgtccgtacccgtcgcgaccgtacccgccggcggacacgctacggtcctcccttaaacgacgacctctacacacgtcgggggcgtggcccctattattccgcctatcgcttttaaccggttttcccctaactgttacttatccatgcggccggacttaatcgaagcggaaaagtacttttagttataattactcgctaacgcaatctaaaaaaagaaatttggcaaaaagcaggccccccccaccacaaattccccccgggggacgacacactcccg

SEQ ID NO: 54659 - DNA, 344 bp, Glycine max
  Clone ID: PAT_MRT3847_2036C.1
ccaagagcacgacagaagggggaagtagaaaagcattggaagaaaagaaaaacgtgaaagaaggaaagaagagaactgtaaagcattcaagattgggtacaaatgaatacatacaaaatgcctgttagataagaacaccttgattcaattcactgaaccatcgttttacaacctgccgacttaaaaaactaagccttcactcaccttaattccacggcaaaacttttttatattggcagctaaactaatagccttgacgcccgtttacaacgcccttactaacaaaaacccagccttaaccaacattattaccctccctgaaaatccccatttagccccttggg

SEQ ID NO: 54660 - DNA, 1376 bp, Glycine max
  Clone ID: PAT_MRT3847_20370C.1
ccacgcgtccgcacaatccaaaccaaaaccactcactctctttcattttttctctcgcggttgcatcccaaatggaataagttcagacatgtccatagcgttgaacaaaactaacagcagcaaaatgagcacacccttgttccatgaattcaaaaagcaagcttctttcttcttcaaggagaaaattaagactgctagattagctctaacagatgtcacccctgcagaactgatgacagaagaggcaacaagtggaaatccatgggccccagatgccagaactctcagatcaatttcaagggatgcttttgagctagacgattattggaggattgtggagattctgcataaaaggtttcttaaatttgaaaagaagaattggaggatctcttacaattccctgatcgtgcttgagcacttgttgactcatggaccagagagtgttgcggaggaatttaagagtgacaaagatgtcattagccaaatgaaaggttttcagtatattgatgacactgggtttaattggggcctaactgtgagaaagaaatctgagaggataatgaaactgctggaaaaagggactcttctcaaggaagagagaaaaaatgctagaaggttatctagagggattgaaggtttcggaagtttctctcatcggtcaactccggcacaaggtgttctacgtgagaaatcattgccaaccacacttaagagatatgactcagacttaaacaaccatgaagatcaggaaaaccattcctcttgttcaaacaatgttgtgaatgtggacacagtggctgtcaaatctcctagccatcaaggtgaaacttttaagtcattgggtagtgtggaagccaaggaataccaggatgatgatcttggcaacaatcaaatgcttccgaaatctgaaacaagttctaaagaaaacatggagcctagcaaggaggagttccatctatggaacttgaatggggagtccaaagcacttttggattgtggtgaagaggattccaagcttggaatcatcagaacagaagatgatcaccccttcagttcagcagaaatgcatgccactgcctctttgctttcggcttgctagagacggaaatactagtatactacaagggtgttgaagcaatttgaagatttaaatgaaccccccaagttcaagttgttagcaaatattgcattttcaattcagaagagcatagtttaaagaacgtcttatggtacatgtattcatatttgatggatatgggcaaccattatgttactgctaaaatttcccctctatcacggtttgttacccaacaaaaagaaattttgtccttttggattgtatttctgtatatttaatctgcgtagagattcaacct

SEQ ID NO: 54661 - DNA, 122 bp, Glycine max
  Clone ID: PAT_MRT3847_20371C.1
aaaagaagcatcaagggctacagatgtgggtgattgggaggatagtgaaagaatggttgacgggatattgacttcagcatcttctgattcatcaagtgtgaatagggtcttggagatgggct

SEQ ID NO: 54662 - DNA, 295 bp, Glycine max
  Clone ID: PAT_MRT3847_20372C.1
tatttttttttttttttttttacagaccaggttcttacagttgatgcaggtttaccacaatgagtttggttagtttttgtagaaattatagttattggggtcgcctgtgtaaatgtgtatactttaattgtaataattgtatgaacaacctgctaaaaaaaaacaaaaaaaatttttttttatttaactagagagggcccaaaagtacaaaaattgaaaagcggggactgcccggtttttaatggggggacccggcaagccaaaaacatttacgaaaaaggggacgttataaaat

SEQ ID NO: 54663 - DNA, 1072 bp, Glycine max
  Clone ID: PAT_MRT3847_20373C.1
cccacgcgtccgccaccctttattctcttacgtctccaactaatcatacagatcgataatcataatcatatctatagctaattaacttaattattttcatccctctactcttcttctctcctctaaactctcttttccattcttgcttcctttgtgggttgtttgagttttctttccttcaatttaattgaaagatggcttgcttggtatctcgctcgggaagggaattgcagaggtacaacaacatgggtggccggcaagttgttgggtgcataccttatagatataaacaagacatagagggtaaaatgagcaacgaattggaagtactagtggttagttcacagaaaggtcaaggattgatgttccctaagggaggatgggaacttgatgaatccgtagaagaagcagcttatagggaatcccttgaagaagcaggagtaatgggaatgattgagcgtgaactggggcaatggaatttcattagcaaaagatatggcatatactatgaaggacacatgttccccatgtttgtcaaggaacaacttgatatatggcccgagaaaaatctacggagaagaatatggatgactgttgctgaagctagagaagtttgtcagcattggtggatgaaggaagcattagatatactggttcaaagaatcgtgtcttcacaacaacgaaaagaagatttatacagcatcggatgattctctaagttttaaaacaatttagtctaggtgggcctaggtcagattgccaagattttgaatcttcaaacattgagagttgttatacagaggattgatttagggagaggaacagaattgtagataaatatggaattgcaattcaatttaatttacacacttatagaacttacgactagacttccaagagttaaataatttcgttttcaagcccttcttcttgtgtctgtctgtcttatggtttatcaaatatactcagaatttataagcacattgcccttggactggggcaatggaatttcattagcaaaagatatggcatatactatgaaggacacatgttccccatgtttgtcaaggaa

SEQ ID NO: 54664 - DNA, 605 bp, Glycine max
  unsure (1)..(605): unsure at all n locations
  Clone ID: PAT_MRT3847_20374C.1
caacgccgccgcttacaacgtaatgcttcggtttctcagcagaaggcaagactgggaaggcgcggagaagctcatctacgaaatgaagggttccgaattgataagttgcaacgccttcaacacccttatctacgcgtgctgcaagcagagcctcgtgcaattgggaacaaagtggttccgaatgatgttggattgcggcgtcgtgcccaatgtggccaccattgggatgctcatggggctctaccggaagggttggaacctcgaggaggcggaatttgccttttcccgaatgagagggtttcgtattgtgtgtgaatccgcgtattcgtccatgattaccatttacacgcgtctcaggttgtatgacaaggccgaaggcgtgatcgagttgatgaggaaggacgactgtggtgcccaatttggagaactggctggtgatgttgaatgctcctagccagcaagggaaactgggtgatgctgagagagtcttggaggcaatgcaagaggcagggttttctgataatattgttgctttcaatactatgataactggttntggaaaggctaggagaatggatgctgcacagaggttgtttatgaggata

SEQ ID NO: 54665 - DNA, 1165 bp, Glycine max
  unsure (1)..(1165): unsure at all n locations
  Clone ID: PAT_MRT3847_20375C.1
ttggacgcgtgggcggacgcgtgggcggacgcgtggggcatgttgtacgtgtaatcttgtgtatatatattcggcgcaatcaatcatttattttctttgtttccttaattgattcggctattataatgtccatttccgcaggtgcataccttatagatataaacaagacatagagggtaaaatgagcaacgaattggaagtactagtggttagttcacagaaaggtcaaggattgatgtcccctaaggtacttttgttatgaatatatcatttcatttgaacatatatgctcaatttggtattcaatggtcaattaattccgtacaacgtgggttaacatcctattcatgatctgatctcagggaggatgggaacttgatgaatccgtagaagaagcagcttatagggaatcccttgaagaagcaggagtattgggaatgattgaggtatatattttcttcatatcttttgtttgtttgtttgttttttcttctgtttgcttcaaatgattgaggtataattttgttattcatatgcagcgtgaactggggcaatggaatttcattagcaaaagatatggcatatactatgaaggacacatgttccccatgtttgtcaaggaacaacttgatatatggcccgagaaaaatctacggagaagaatatgggtatgtttgggccccactcttactcgcacatattaattgattttttaaaacacgtaatttgcaaattttcctaatttttgcactttttgcagatgactgttgctgaagctagagaagtttgtcagcattggtggatgaaggaagcattagatatactggttcaaagaatcgtgtcttcacaacaacgaaaagaagatttatacagcatcggatgattctctaagttttaaaacaatttagtctaggtgggcctaggtcagattgccaagattttgaatcttcaaacattgagagttgttatacagaggattgatttagggagaggaacagaattgtagataaatatggaattgcaattcaatttaatttacacacttatagaacttacgactagacttccaagagttaaataatgtcgttttcgagccaaaaaaaaaaaaaaccnncccnnaaannaagggcggccgccgactngattgctcgtcgacacgggaatt

SEQ ID NO: 54666 - DNA, 310 bp, Glycine max
  unsure (1)..(310): unsure at all n locations
  Clone ID: PAT_MRT3847_20376C.1
tngcntgcacgcgtncgtaagctcgganttcggctcgagcagagtntnnntngtanttcnatncntcnagaggntggaagctattccntggcatntgnagcaaanatctatcntgnggctntnnntcncccttagcnntanacgnatgnaatntnnctgacacngggncnctcnntnttgangtgctngcncttctggngatntntccangaannatanntgtnctggcacttnnccncctntncctgnantnattacttnccaccagntanangtnacatattttanggctcatncantgacaanantc

SEQ ID NO: 54667 - DNA, 469 bp, Glycine max
  Clone ID: PAT_MRT3847_20377C.1
ggagacaataaaaaaattgaaagaagaaaatgaagtgcacattcaggaagaggccatatcaaaggagacaattaagaatctcaaagaagaaaatgatggactacttcacaaagtggtttccttggaagaggtcatcaataatttacaaactgataatgaattgcagacacaaaaacatactagtctggaaatgagaattgcacaattgaaagtgagaataattccttacttcaaaaagaggctggattggtggaaaaaactaatcagctgctgaatgaaaaggtagttttgagcctgaaagctgagagtttagagagaaaaataaatcttctggagaatgagttgagttcttttagtgagaaagaggttggacttgaaacaagaattgcacaattgcagagtgagaataattccttacttcaaaaagaggctacattggtggaaagaaccaatcaattgctgaatgaaa

SEQ ID NO: 54668 - DNA, 2129 bp, Glycine max
  Clone ID: PAT_MRT3847_20378C.1
cgtattcctccgaaaaaattgaaagaagaaaatgaagtgcacattcaggaagaggccatatcaaaggagacaattaaaaatctcaaagaagaaaatgataaactacttcagaaagtggtaatatatactgcaaattttatcaattatcagagggatatttgttttaatgcttaaattgcaactatatatttactttctcaacgggcattctagaaaaaagattaaaaattagctatcacaagttatgcatttatttaacaggttagcttggaggatgtcatcaataatttacaaactgataatgaattgcagacacaaaaacatactagtctggaaatgagaattgcacaattgcttagagagaatacttccttacttcaattagaggcgactgaatgtggttggacttttagaagattagaaatcattgattttgagaatattataaatgagtttatttgatgagatatcatatgtaaactggagtggtggagaaaactaatcgattgctgaaagaaagggaaattttgagcttgaaacatgagagtttagagagaaaaataaatcttctggagaatgagttgagttcttttagtgagaaagaggttggacttgaaacaagaattgcacaattgcagagtgagaataattccttacttcaaaaagaggctacattggtggaaagaaccaatcaattgctgaatgcaaaggcagttttgtgcctgaaaggggagagtttagaacaaaaaatatatcttctggaaagcgatttgaattctttagtcaagaaggagaattcaactaaagaaactatttcaaacctgaatggaaacattgctgtgctacaagcgcaggtggaagaattggaggagtccaggaataatctttttctagaaaaccagcaattgagggaaaaagtgtcgagtcttcagtcaacggtccaaaatcatgaaaacagtaacacttcttcctgctcatgggatgcatctgtaaaggatcttgcttctgaaaacgaggacttgaagtctgaaattgaagcagcctttacgttggtggagaaattgatggctgaaaatgcagaacttgttgagaaggtcaccgagttatgtgttgagctggatcaccgaagtgcagaagtcggacattctggagtcactgaatccaatgggatgactgaatttgttaaacctactggtgttgccattcctctaccagaatctgctgagtatgcgtctgtatcatcccccaagttgaattcattggaagagacttcagtgaaggataatggtaactctaatgatgctaagcatgttgttggggtaacgtcaaactcgtcgttggtatcggctgatgacgctggagaaatcgtgcaaattccattggatgataatgaaatacaagatatagagttgcaggatgctaagaatgtggaaaatgatgctgatgctgtgccaatcacagatgctccgcttatcggtgctccatttcgtttgatatcatttgttgctaattttgttagtggtgctgacttggttaaccaaagctcttcaaacactgctcgttgacttggttgaccaaagctctgttttttttggctggcagtcttgaacatacaataacctcacttacattaggcagaataccaatataggttggcctaatttgggccattttaatgtttgtatgttaattctttgaacacggaaatattgtactggggaaaagcatatagttttatgtgttcttacttcatattgctttcacttttggaaattatacctttaaaaaatggcatcatgaatagacatgcattaaaagaaaaaaaaaaaaaaaaaaaaaaaaaaaaaaaaaaaaaaaaaaaggaaccctgtaaaaaaggaaaggatccttccaaaggacccgcggcgacgtaccggcttctttaatggtatcaagctctcctttatttgccccccagtttctactacaatgcccgtggtgaaacaacgttgggacggcgaaaaccatgctggtagcaaaacaaccctccttcatctgcagaggtatttaagaagcgggcagcacagcaccgttctccccttctgatcggcctgccaaacggatgggacgccgccatgagcaatggaaca

SEQ ID NO: 54669 - DNA, 917 bp, Glycine max
  Clone ID: PAT_MRT3847_20379C.1
caacattgctgtgctacaggtgcaggtggaagattggaggagtccaggaataatctttttctagaaaccagcaattgagggaaaagtgtcgagtctagagtcaacggtccaaaatcatgaaacagtaacgcttcttcctgctcaccgggatgcacctgaaaggatcttgcttctgaaaacaaggacttgaagtctgaaattgaagcagcctttacgttggtggagaaattgatggctgaaaatgccggaacttgtggagaaggtcaccgagttatgtgttgagttggatcaccaaagtgcagtcaccttgaacccaatgagatgactgaatttgctaaacctactggtgttgccattcctccaccagaatctgctgagtatgcgtctgtgtcggcccccaagttgaattcattggaagagacttcagtgaaggataatggtaactcttttaatgacgctaagcatgttgttggggtaatgtcaaactcgtcgttgttatctgatgatgctggagaaatcgtgcaaattccattggatgataatgaaatacaagatatagagttgcaggatgctaagaatgtggaaaatgatgctgatgccgtgccaattacagatgctccccttatcggtgctccatttcgtttgatatcatttgttgctaattttgttagtggtgctgacttggttgacccaagctcttcaaacaccgctcgttgacgtggttgaccaaagctcctttttattggcagtcttgaacatacaataacctcacttacattaggcagaataccaatataggttggcctaatttgggccattttaatgtttgtatgttaattctttgaacaaggaaatacagtactggggaaaagtatatagttttatgtgtgttcttacttccaaaaaaaaaaaaatta

SEQ ID NO: 54670 - DNA, 260 bp, Glycine max
  Clone ID: PAT_MRT3847_2037C.1
ctcaaatgcctaaaagctttcagaaaatacatggattagcagggcgttttcattttcagagggaacctgcaattaatatgggaatggtgagaagatttgcttccacaatctgaggcagattagattgaagcaatgcttctgaacctaaaggaatcatctgaatttcataatagatcatttgaatgtgctgtggactctgttcaggccattgcagctagtcatctctggcagcttgtggtggtacgtgctgacttgaatgg

SEQ ID NO: 54671 - DNA, 293 bp, Glycine max
  unsure (1)..(293): unsure at all n locations
  Clone ID: PAT_MRT3847_20380C.1
tcaccacgcgtcgattcattctgtatgcgtttggatggtgtangaggtaatgccggatttcgacctggtcaaggaggcaattttggtggtttaaggaaatcaaccacacaaaccccttttgagtatgctggaaggattctttctggtccaatgcaatccatggtaaatcaaggaggaatgcaaagaaatagccctgatggagaaaggtggcagcgtgctactagctttcagcagaggggtttaattccatctccttctactcctcaaactcctttacagatgatgcacaaagc

SEQ ID NO: 54672 - DNA, 720 bp, Glycine max
  unsure (1)..(720): unsure at all n locations
  Clone ID: PAT_MRT3847_20381C.1
ctttttcctcttttttgaacttggcagtgttgatgagttgcggaagcttttatctaacaaagatgtgtatcagcagtttttaagttcacatgatgaggtcaagattcagaataatgtgaatgatgatctttgcaaggagaatctgcagcttgccgatgaaaatctacgaaaggaacctcgtgttgtggaactcaggaaccagtataaaataatttgtacaactgagttggctgtggctcaagagaaactgaatgagcttgagaagcagaaagaggaaatgttgaagttgaattccccactataccttctccaatggattcaagaggctatgaataatacagaagaggaatctgaaaatctgcatcagcaagtccttgacagagagattgaccttggagcttttctgcagaaatacaaaaagctacgtactgcttaccacaggaaaagtctcatacatcttgcagctagaacatcaaatatatagctacataaagaataggaaaattaagaatgttactctttgtttgtggagcatgtaactgattttttttcttcattcttgtcaatatagtagtcatcagtcaatacatatgttttcatttttaagtagtttcagaccatctgggaaagagttactgacaaacgcatcattattcagcttctgcgttacttttatcaataagatatttctgagtctaaaaaaaaaaaaaanaaaaaggg

SEQ ID NO: 54673 - DNA, 307 bp, Glycine max
  Clone ID: PAT_MRT3847_20382C.1
caatccaaaaaaaaaaacgggttcctttaaaaaatccccaaagctataaattgccctttttttcttttgctaaaagttaaaaagtttgtacaaggcccaacataggtttcttttcccccaaaatatcttttaaatcaggttttaatttcccccctgccacccccaagaggcctttttggtttttgcccttttttaaggggtttttttttttttttccccccctgtaggccctgcccctattttgttcaaaccctccccccttggataaccccccccactttttgaggtttttttgtgccaatttttt

SEQ ID NO: 54674 - DNA, 531 bp, Glycine max
  unsure (1)..(531): unsure at all n locations
  Clone ID: PAT_MRT3847_20383C.1
ggaacgtgcagggtttggccagtttcattcaaggatgttgtaaaaaagtaatcaaattttttgagttacatttcgttacctctacagctgatgaattatatagatgctttgactttcaaggtgcttagatatgactttgcagtgtatagaagtttgggcatgatgaatgaaaatgaatttgagactcacgaaaaaaaaaaaaaaaaaaaaaaaaaaaaaaaaaaaaaaaaaaaaaaaaaaaaaaaaaaaaaaaaaaaaaaaaaaaaaaaaaaaaaaaaaaaaaaaaaaaaaaaaaaaaaaaaaaaaaaaaaaaaaaaaaaaaaaataaaaaaaaaaaaaaataaaaaaaaaaannggggggggcccttttaaggggcccaatttttcccccccggggcggaaaaaaatttttttttttttggggcccactaaaaaaaacccccgggccgcttttttacccccgggggattggaaaaacccggggttaccccaattttttccgctggggggcaacccccttttgccgggggg

SEQ ID NO: 54675 - DNA, 426 bp, Glycine max
  Clone ID: PAT_MRT3847_20384C.1
cttattcgtccgaactacctacataaaagttgcgtgatactattacccattatccagcagcagcagcatccattgttttacacaccatacctgtatcattacaatagaatagtagaagctagtataaaacccttttctttctacattctctccctccctcccttctcaaaacttctttttcagttttgattattgtcacagtctgatactgcttctgcttctgcttctgtgagagatagtaatagtaatagtagtatagaatagatccctagctaggcatctaacggtttaaaccacatattttgaaaaagggaccataacatatcagtattcagtagtagtagttgatggcgatcgtttagtctctatcacatcaacacccccctctcatatttactcctttttcatcacctattttttcttgat

SEQ ID NO: 54676 - DNA, 394 bp, Glycine max
  unsure (1)..(394): unsure at all n locations
  Clone ID: PAT_MRT3847_20385C.1
cttatcanctacaattcttaactttttttattaaaccacaaaaaaacacntgggtggtttttttaaaaatgggagtaacacataaatattataaattttacaaactttttacatatacaatattaataaatttttttttaataattaaatacatttattacataatcaaaaaaaaagctattaatgctgtctctggcattttatgggtttagttaatttctgcagacactaaaaacaataaattgaccataatcttacacattgatccagtaaaaatagtagccaacctaagaaatccattacctcactcatacataaattttttttgaccaacaaaagaggaaaatacataataacctaaaaaaaattcagcaaaaaaaatttttgtaacaat

SEQ ID NO: 54677 - DNA, 402 bp, Glycine max
  Clone ID: PAT_MRT3847_20386C.1
tctgtgctgctactcgtgttctcaaatacctcaaaggatgtccaagaaaagggctctcttttagtagagaatctcccattcaaattcttggattcagtgatgccgattgggcaacatgtattgattcaagcaagtcaatcacatgggactgcttctttcttggagttctctaatctcatggaaagctaagaaacaaaacactgtttcccgctcatcctcatcctctgaagctaagtatagagctctcacctccaccacatgcgaattacagtggcttacttaccttctaaaagatctccatgttactttgatatattgtgacaatcaaagtgctttgcaatagctgccaatcaaagtaatatatcatggacaattggagattgattgccacattgttcgaga

SEQ ID NO: 54678 - DNA, 1072 bp, Glycine max
  Clone ID: PAT_MRT3847_20387C.1
tgcggagctgtttccggcctcactaccgtcgtcaacgccatctctcttgctcgattggtcatggaaaacacgcctcacatctatctcgctttcgatggagcagaggaatttgcaagacgacaagtagtaccacttacttctttatccctttcttttcaactttcttatcgtatcaacactcgtctttattcatgattccttctcaaggcgttgagactgtggattcaagccattttattacaaaagaaaatattgaaaggctaaagcaagcaaaagaagctaacagggttcagattgattatacgcaacctatccaaaatgatactaagaaagagaccgcattggctaatggtgatagccaaattggaactgttgggtgtgtggctgtagatagtcttgggaatttggcttctgcaacatctactggtggattagtgaacaaaatggtgggtcgaattggtgacacaccagtcattggtgctggtacctatgcggatgcacgttgtgcggtttcagcgacaggcaaaggtgaagcaataatacgtgggacagtggcaagagatgtggctgctctgatggagtttaagggtctttctctcgtggaagctgctaattgtgttgtacatgagcgcacaccaaaaggcactgttggtttggttgctgtgtctgccaaaggagaagttgcaatgccttttaatacaacaggcatgttcagagcgtgtgctactgaagatggatattctgagattgcaatttggcctgctgccaaaatagagtagtctttaggctttactgatttccaagcttaatgtattctgacatttgatgatgcttcacgcatgcttatatcacagggaaatctatctgcttttcaaggtataaatagtcgtttggttcctgatcatagtcttcccaagcgcctctttatccgttacactctgctttttatatagtttgtgctacattgtgaatatgataaccttctatcattaccaaggtgtttataaccatcatcttcctttacatttaaaaaaaaaaaaaagggtcggtcgcgagttactggtcccgactg

SEQ ID NO: 54679 - DNA, 367 bp, Glycine max
  Clone ID: PAT_MRT3847_20388C.1
cagtatttttctttgaaattgatgacccccacggggagattctagctagctccatattccaaagtaagaagtgacagaagaaaaggaggagaaattagaagaaaaaaaatccagaattcggttatggttaatcaataggggctgtggatgaggtatattcaagttcatgtgcatgattgaagaggatggccaacatggagcgagtgatttcagatttcatgtcttggtttcctctttgggcaattttggtgcttgacttgctgctcaaggtttctggcaacacagaaggtgatgctctgactgcattgaagaacagtgtgagtgatcctaacaatgttcttcaaagttgggattctacacttgtcga

SEQ ID NO: 54680 - DNA, 293 bp, Glycine max
  Clone ID: PAT_MRT3847_20389C.1
ggggcttattaagggttgggttttgatgtagccctttgtatttttttggattgaaagggtgttatttttttttttgggcagcggaccaggtgcaaaatgaagggaggttgtctaaggaaaatgggttttgaccttaggacacgagttcgctataacctgggttggggaaaaacggggggtaaaatttttcagagccccatttttgtgtgcctaataaaaaaaaaattttacaggggggactcccgtccgcgggtgaaaaaccctcgggaccaaaaaggtgttgcccccttaag

SEQ ID NO: 54681 - DNA, 442 bp, Glycine max
  Clone ID: PAT_MRT3847_2038C.1
ctagctggttcataaccggatgaaggataatatatcttgttagcaatcttttcctctgccagttgttccaaaatctcaagtaatcaagtggatttgtacaagctgagttatattttttaagcttagcacattaagaatattgaaaagatttaccttttaaattcatctagagttagtttttactttagccaatgtaaaagtcctactgtatctgactagaactagatcaaccagacaaagtggcagcagtgccattttcagagtaattttgatgtgattaatggatgagaaaagcaccagcaaggttaatttctttgtttggaagaatgagggggacattattttaaaatgttctttacaatttccctgctaccttccctgttttcatgaagcaaaccccatgttgtgattgttgattgttatgagataaatgtgtgtgtgt

SEQ ID NO: 54682 - DNA, 457 bp, Glycine max
  Clone ID: PAT_MRT3847_20390C.1
gaggcccccaataaaaggactttagatggaaaaggggatcaatattttccggaactaaaaagatctaaattaacaaaaaacataaacccgggccctcaaaaaaaaaatatcttcggagtagccataaaaccaggaaaaacccgggcaaaaaaaaacccagcataggggaaaacatacaaagggttactacttaaaaaactagcaatttccctccaaaattactattaggcccgtttatatacatatataaagggggggcccccgctaaagcaaaaaagaggcggggaacaactatacaaggttagccccatccaggggcaacaatagatgcataaccaagaggcccttttttttaaaccctaccaggtccatttaactaaaaaaaataagggggattataactgcccgcaaatgcaatattcaaaggggcaaaagaggaatctatggtggagttttg

SEQ ID NO: 54683 - DNA, 321 bp, Glycine max
  Clone ID: PAT_MRT3847_20391C.1
aaggaaatgaagacataaccgtggacaatatttagttaatcgcaaggaggcccttcgtaaaaagccattaagaagatccattgagggcctaatcacttgctcattgaataaggggctgtaactaagcccttgtttcaaatgtgtgcatatttctttacaacgggctcctataacatgtaaaacagatgcctatgttgtactggagtggaaggcatatgaaccgcctgtcgcagcagggagaaccatgggaggcgcttactgatacacggcgagaagtttactttcatgaaaggttgaactagcgatttgtggcttgtgaac

SEQ ID NO: 54684 - DNA, 662 bp, Glycine max
  Clone ID: PAT_MRT3847_20392C.1
ccacgcgtccgttgccatttggctgtgcttttcactctttctcacacatctccctatttcttttctctctcattcgtttacaagtcacaacccaccttggattgtttttctgcgaccaaagcacgaacttacacacacacagactccgacttgtgttgtgaaaacctttgtgcattacccgacgcttcttcttttcttgttttcgctccaaaacccattgcttcaatcactaatactccactttcagatcggggtgtgtctctctccaacacgcacaaaaaaaggttcttctcttcttttttctgacgaaattttattccttataccatactctttcttttccatggtgtttttctcttcaaattttgaaatttgatcactgcatgtgggaaacgaatactgggctcgtttgatctcacacccttttgttcttcagatatttttaggatacttttccttttggtggttcaatagtgatgctgaatttggtgcatgcaaatgggttttcttttgaaagatttgggtttgaattctggggggttttcttcattggcttctgcttctgaaattgggggcctttcaatttttgatttccctgtattctaatgctggagttttaaagggcatttggggggtttgacctttgaatataagggtttggg

SEQ ID NO: 54685 - DNA, 569 bp, Glycine max
  Clone ID: PAT_MRT3847_20393C.1
gaatgaaatcaaagtatatttgggttgtaagtatattatcttaaattaaataaaaggtatggctgtttaacaagaaattcatctttgcctgaaaacttgtggcatgttctagagttaagtaattgcaagtggagttgtatgaacaatttagcctctgtaaacacgtggttgttttcaactaccacacgaatgttagattttcatgtttctcctgtatagctttcattttgatcttttcctctcttgttgattattatactattgaagtgtagcagcccaccttaggctggtaggctgcttttttagtcttttcatattctctgctttcctttgttctcttctttccttcaactacattattctgaatcttctttatttgacaattgatacttatctttgtacctaatttcttggcattagcactagaaatcttgcagatttaatgatgatttctgactgattgttctaaatattttctcctttcttgatgattgtaatattttcatttctcatcattattgtttgagaggttagattattaacactctgtctgccatggctccaaggag

SEQ ID NO: 54686 - DNA, 398 bp, Glycine max
  Clone ID: PAT_MRT3847_20394C.1
ctttggggggggggggggggggtaaagggacaagttgccaactttggttactgtaattaaccctagaagggaagcaaaggtgaatttagtcaggaggaaagggctagccccaaggagtcagcggagtattaaaatgcggtgtattttgggtaaaaggtaaatggagtaacggttagctggggaacggattggaccatgacattggaataaaaagaagtgaccgaaaagcacacgaaagaatggcaggtagaagcgtatggactatggaattgttgggaacctagagctaaacgagagcaagcggccagtactagtgttagtttggaacgagctagaacattaactaacgagtgagtaggtagctgtgctttaatagaagatgccaaaggtggaagtgg

SEQ ID NO: 54687 - DNA, 437 bp, Glycine max
  unsure (1)..(437): unsure at all n locations
  Clone ID: PAT_MRT3847_20395C.1
aaggttcctcttcctagagatgaaaatctctcttacatcacccgcttttttgaagtgttgccacaattcctcctctgttgtgtcttcaaggaatcgagtgaaatagaacgaagagatgttctgatggtccccccagttttccctcacgtagctttgttgacctcctttcctttttctgatgaggttgacctcctttcctttttctgacgaggttcaaacatggaccctccctctctctcactctctcgctctctctctgctcctttctattcctcactcccacccattgtttctctcgtcggtgtatcactatctctttctcatcagtgtctcgctctctctctctctctctcatttgnatctctacaacgaagagataatgtagcctaaaaaaaactttaattgaattgccatagaaaaaaaaattgaacatttta

SEQ ID NO: 54688 - DNA, 227 bp, Glycine max
  unsure (1)..(227): unsure at all n locations
  Clone ID: PAT_MRT3847_20396C.1
tttctcccactcatccatcctacttactcactaactacatacctttctataatggcagtcttctatnaactttaagtctaactagacaataactatacgtcttctatactaatcatgacccatataccaataacttattaactccctcaaaaaattattcttttaattactctcatcttctactttatatgatcattcttactacacttccatgttcctaataataa

SEQ ID NO: 54689 - DNA, 177 bp, Glycine max
  Clone ID: PAT_MRT3847_20397C.1
tttgaactgctttactaccgtaaatagatgtggatccctcatgcttgctttagcggtggacattgcttgaatggttgctgctgggaccgctattactagttgctcaatttgctgctctggtatttcagctccatactgctgttcataaacaacgctattagtcacgtgatctatttc

SEQ ID NO: 54690 - DNA, 546 bp, Glycine max
  Clone ID: PAT_MRT3847_20398C.1
cccaaaaaatttgtttttaacaaaaaacagggttagggccaaaaaccccactaagtggcaaacaaaaaacaccttcaaaatccgatcctctactttaagggaaacaaaaccacctttttatttcccatggcgaaaaacaaccggaaggaatatccatctttgggataaaaaaagggcaaaattaattaaccggtttaaaaaggaaaatggatggggtttaaagctggccccacccccccaaaatatgatgcccccaaaacctggagttattatttcatcaggccccccctaaaaaaaaccagggggggcctccttgaaaagctaaacctttttgtctaaacagcttgcattctaaaacaaggctttgctcactgagggacctgccacagggccaccccccccgggaaggataaataagggaaaaaaaacttttttaagcccccgttctattttttcagaagtttaaaccatttcaacaccactctgaaaacggggttaatccttgtaagcaataacattgaaagcaggcaggcccctctttttaaa

SEQ ID NO: 54691 - DNA, 1230 bp, Glycine max
  Clone ID: PAT_MRT3847_20399C.1
tcaccatattaactttagcagcttttttaaaaattaatccccgtgtgtctatccagtttgctctactacagactttgacattacggccttcaaagctaatctagtgaataatgaaagttgtcaagctgagaaagaaactccaacgattttgcctgccatttacatcgcatatttacagcataataccctctaacagcctacaaaattcttaattcgccgatggccactacccccctgcccatatcaagaaacactttactatctcaaacagtattaactccgacccgattacctcaccccctctttttttgttctccccatcttttcctttttttgctttcctttacgtttcttgtcccattttatatatggagttcttgaaagcaaataatcagttactgactggccgacttcaaccaggaaccaagcaaccataaaacagaagctcctccctccttagccagtcttctaaccaattttgctaacatctgtcactgttgcgttgcaaaagaaacatctttggcagttcaaaaggtgcctggtaatgcagccataacaagacctgtgtgaacaaggtgcaatttgagcatctgcttcacatgcataacatatgcagcacaagctgtcatcaagatctgtatctcccacactatccactttatcatcttgtaacacagtgcgacaactaaggagactcagaaaattctctagctgctcatattttgccttagcacggacgcgtgggcggacgcgtgggcggacatgtgggagaagatactggaatccatactgaacagtatctggacagtccatgcttgcgaaaacatctaaaagatcattgttttctcgatattctgctgaacttgtagcatccaataaatttaggatgatccctactagaggtgccaatatcatgcctcggtttactttttctggaggttggctatgccgtctaagggacaagtcaaagaattcggcatcggctgcagaagtaatgtgatttaagataaacacaaccaactcggttacccttcggaggtttgtgtccggtccagagaggaatgcttgaggaatctcacgagtgcagaactctagaatccttgtaagattacatgaaagatcaaatatgacacagcatttcctttgctgaaactctattacctggtacttttcttgcatttctcgaacagaaactgaaaattcagtcatggtccagctgagtgtattgaa

SEQ ID NO: 54692 - DNA, 137 bp, Glycine max
  Clone ID: PAT_MRT3847_2039C.1
gtgagtcatatggggaacaacctctcctgtgtggttgattttgatgggtgaagtgtctaaataacataaataagctggatgaattatgtgagggagcttggcaaatcgcggtgttggccgctttcggttattgttct

SEQ ID NO: 54693 - DNA, 455 bp, Glycine max
  Clone ID: PAT_MRT3847_203C.1
aattcggctcgagattgcctgcaaccaacaaacacctggcttctgttactctctcactgcatgcatattaaataacatgacttggccgtgctggtccactccaagaagtatggaagagtcttatggcagacaaaatgggaatattgagagttacatgagcagcaaactgatgcatataggctcagcaatcaacgtcatggctcaagactacctctacactattctcattctgcttcatatagatgcaatcctatccctatccatgacttgcgagagattcaaggctctaagtatctcacacacactatggaaatctctttgcagataggactgtggctatacttgagttgactcactactcaactgttgcaataacaaccaggatcatcactgaccatggatgatgctctacatgcaagtctctttgatggattctgtttgctgtcatgaactat

SEQ ID NO: 54694 - DNA, 537 bp, Glycine max
  Clone ID: PAT_MRT3847_20400C.1
gaggagagtgacggttttgacgaggaattggatgaggaagaggaagaagatgaggaggatgaagaaagggagggagaaggagaagaagatgaagaagaagaagaagaagaagagatggaggatgaagaggaagaagaagagaatgaggaaggtggtggcattgaagataaattcttgaaaatagatgaattgacaaagtacttagagaaggaggaagaggatttcgagaatggcgaggcacacagagaaggtgaggaggaagacgatgacgaaggggaaagtgatgaggaaggtgattttgggattggtgatgatgatgatgaagatgaagatgaagaaacagagggcatagaaaatgcaaggtatgaagacttctttggagtaaaaaggaaagggggtcaaaaagaaaagctcaagcacttcaggaatctgattattctgatgaagatgacatggaattggacaagcagacgaaagggactgcatctgcccatgataagcaactggaaaagattcagtccaagatagagcagatgg

SEQ ID NO: 54695 - DNA, 476 bp, Glycine max
  Clone ID: PAT_MRT3847_20401C.1
gtcggatgagcctagcaatggattggcgttgagcgaaactcaagcccagttcaacacaccctaagtcaggtcacgattcagcaagattgcaagatgtgctgcaaaatgcaaattgcatttgactgtaccatttacgtaccacggatcctaagaccatcaaagcatgttctttcactgcaaaatgagtctgatcaatcatatgcataaaatacaagatgagtatcaatattaatctgaagacggcgtgtttagcaattagcatccatgttgtgtataattttaatggcaactataaataccacataggagtttgtcatctcaagcagcaaattaagaaagtccttgttcatgaatcacactcagaaagagaaagatagatagagtaagagtgataatagggatggaaaaactaattttcagtggtctaataatgcttgtggtgttattcaccacagaacttagaatagcattcccaa

SEQ ID NO: 54696 - DNA, 126 bp, Glycine max
  Clone ID: PAT_MRT3847_20402C.1
cgaacagtctagactaggaatgtcggccgcgacgctgtttgagcggtttaagagaaacggaaattaaactacagtacttttaaactattactgggtgatttggggcacctccttagaggagtcccg

SEQ ID NO: 54697 - DNA, 431 bp, Glycine max
  Clone ID: PAT_MRT3847_20403C.1
cggcccttttttttttttttttttttttttttttttttttttttttttttttttttttttttttttttggcaaacaaaaccaccaattttttttattttttattttaaccggggaaacccattgaaaaaacttgttttttgtaactttaaaaaaaaattttttccccctttttttccaacaattttttggaaacttaaaaaaaactgggggcttttttttcccccaaaaagctaaggggtcccacaaagttcctaaaataactccgggggatgaaaaaaacccctagtttttttggggggttttttttttcttttttgggtggaaaaacaagaatgaacaagggcattttggatttttcccaggaccccctttgtagaagtggttcccccaatttccagcactaccagtttgaacattggagcagcttttt

SEQ ID NO: 54698 - DNA, 261 bp, Glycine max
  Clone ID: PAT_MRT3847_20404C.1
caaatataggaccagggagaggaacatagtggagctgttgattaaatttaaattgctcattttcttctgcaattggccagtgatgcatctcatttttgatgaattctttgtgctggtaagccttggagacacctcgacaatcttcatgcattgccttgataaatttatttatttttattttttttgtggggctgggagggcattctttatgtgactctgcattttcgtggttttacaaaatgtcatgtatggttgaggatg

SEQ ID NO: 54699 - DNA, 300 bp, Glycine max
  Clone ID: PAT_MRT3847_20405C.1
taccaaattcacggaggatgggggcttactttcatatgccagttctaacttaaactgatctgcctcttactatatcatatgatgttgttatttataatacatcaaaatttatcctgatccacaaatgtgatattgttcctatacaatggaatcatatctctaattttatcctaatagaacccaattactataataaatgtatgtactattctgttactcaactttactatatacacattgttattaattacttttctaatagaaattttttttcttaatttttcatctatatcatctaat

SEQ ID NO: 54700 - DNA, 225 bp, Glycine max
  Clone ID: PAT_MRT3847_20406C.1
ctcagagcaagtgctacacaggatcctatgggggtgatcaagtctgccaaggttacagtgcctatccaacacctgctccagtaatatgctccacccactagtgctggtgctggtggtcatacaagccatgcgccattctgcagaatcatggccccctatatggtaccaattatagggtattaagatacttaattaaagttttgtcaaggaccgctatttaaacta

SEQ ID NO: 54701 - DNA, 479 bp, Glycine max
  Clone ID: PAT_MRT3847_20407C.1
gtgagaacagatctgggaacttggcgcctagaaggattaaaagactacttctatccaattaacaacatgctgtaaagcggtgatgcacattctgttgcataaatttccttacctatgaataaggcccggaaaatatgttgctaaaataataatgtgtgcctcaaagaccttgaaacaggatggtacttgcttagactgaggatgatgatgcaactgtcgctgacaacgcatactcgacagtgcatgaaccgaatctaaaggatgatcttacagcttatgtgaatacgcatgagttttgtgatgatgctgtgcttgatgagcacgttaccaatgatgaagaatacctaaccacatatcaaccagtgattgctacgacataggaacgaaccatacctacctgccatgcttatggtcacacctgaattggcaagacgtacgcattgcagcctgtaccactcagagctgcacaagaccttgta

SEQ ID NO: 54702 - DNA, 355 bp, Glycine max
  Clone ID: PAT_MRT3847_20408C.1
aattcggctcgagcccatacccttgaacgacgcttgaaccaaatggacaaacctaagcgatctgcctcttgctcagaacatgcccagccgaaatccgactagaaggctgcccacattgaacgcaatataaatgagggaattctcacataacaagcattacggacttcatacccgatataaactttaagggccgcttaacacataacacctataatgacactgtttaagagccattggttacatcaagagaagacaactgagaggatcgcggcagcccatgagaacgcacaccctagcataacttatgatctttcctccacggatgaaattgatctatccagcatatcgcttgatg

SEQ ID NO: 54703 - DNA, 735 bp, Glycine max
  Clone ID: PAT_MRT3847_20409C.1
gtgagaataaagaagggccatgctattaaaataaatggaagtcaattatcgcctcccttccataaattttgagtcagttattcattcatctctggagaaacaaagttagaatgatgaagctgagaagcttttttgagaaatgatcactagatgtgcagaaaacaagttttgcaaacaccagaatctgcatcagccagcactaggcaccttgcccagagtctcatccattttctcctgctcccccttttttgcccactatcttcaatttcaactccaggcaatagctagagaagttgctgttggtgctgctttattattcactgctccttcaagcgttttcatggtggtgctgaagaaaaagattttttctttgatgtgcatgatacatctttggcagcttggtgttgatcataagttcctgccgattgtcttttttatcctctttccttcttattcatggtctttgtttaagagaattctaattaaaaaaagaaaagaaagaaaaggactaaagtgcttcttaatggtatacacattttttcatttatcattttctggaaaattgaactcagaatttatgttagtattattaagaagcagagaaggtgcttatgttattgaatccagatattgatgccactttttcctgatttagcttataatgaacttcttagtaagctattcgaggaacttggtgtgactgttgatgatgtgacggaattaattgagagttgg

SEQ ID NO: 54704 - DNA, 562 bp, Glycine max
  Clone ID: PAT_MRT3847_2040C.1
ttttttttttttttttttttttttttttttttttttttttttttttttttttttttttttaaaacaaaaaccggccgggggcttttatataaccgggggggggaatttatccccccaaccaatcccccctggggggggggggggcctcaaaaaaaaaccccccttttaaaaaccccaaccaaccccccttttaaattccccgaccttaaaaaaaaaaaaaaattaaccggggggaccccccgggcatgaccggcaaatctttctcccaggccggaggagggccccctttaaaggaagaaaacccccctgggaaaaaccccctttcccccaaaaatttttagccaaatttttttttatttttcccccccatgccttgggccggggccttaaaccccccccaaattccctttttacccccccaaaattggggccccctcccggaagggggaaagggctttcattaaggacccctttctcaaaaaggtcaaggaccccctggggataacccctgggaaacaaaatccccctgccagaaaaccaaaaaggctccccacagggccct

SEQ ID NO: 54705 - DNA, 326 bp, Glycine max
  Clone ID: PAT_MRT3847_20410C.1
gtccttagaggtgactgaaacagctcaagactgaggaggtaattcagagaaacgactcttctgctttgatctcaacgaagatggtgctgatgatatggctgtttatgtaaaagctacgtctaccccaataccagttgtctctgcttcaaggcctgagccaacttctgggttgcctgtggcccctttgcaggttgagggaacacttgcatggtacgggtcagacggcaccagtgccttccgacctgcatagtcttgtcacaatcgagataacgacaagaatctttctgctgacacgaactctgatgcttccaagcagaggcaggatt

SEQ ID NO: 54706 - DNA, 525 bp, Glycine max
  Clone ID: PAT_MRT3847_20411C.1
ccacgcgtccgacgttgcaaggcttacataaatcccttcatgaaattcattgatcaaggaaggcgtttcatctgcaacttgtgtggatttagtgatgaaactccacgggactaccactgcaatttaggtccagatggtcggcgtagagatgctgatgaaaggcctgagctgtgtagaggaacagttgagtttgttgctacaaaagaattcatggtccgtgagcccatgcctgctgtgtacttctttctcattgatgtatccatgaatgctgttcaaactggtgcaacagctgcagcttgcagtgccataagtcgagttattaaagacaaagaccttcctgagggtcctcgcacattggtgggagttgcaacttttgactcaacgattcatttctacaacttgaaacgtgcattgcagcagccactgatgctcattgttcctgatgtccaagatgtttatactcccttgcaaactgatgtaaattgctccactatctgagtgccgtccccacttagaattacttct

SEQ ID NO: 54707 - DNA, 996 bp, Glycine max
  Clone ID: PAT_MRT3847_20412C.1
gcagggtctactgagtggctacaaatgaaccacctttggggtgcaaattggtgcattattggaggacctttaagaggaccattctcagtgaaattgagctcctccactgggagaagcctctctgcaagagatgttattccaactaattgggttccaaaggccacttacacctctcgcctaaatttctacccctaatcacatcctttggtgcaattggtacaagtactagtacacccagggctttttcccaaagggggtaactaatatttaataagtacattttaactagttaaagctggtcaagtcccataactcaaaaatagcatgggcttccaactttcttttttcccctttatttgctatatatacattagattttctcttccctttttttttttataagaaaagtagccacttggagtgcacaagggcatccaatggttctatttctttcttattttttttttaatattgaatttgtatacctacttttctggtgtgttgtaacagctggtagtaaatgtaatgtagccctctccaaatgggagagagagcgtgttagtttagtatcctttaatttcttatggggttgaatatgtgtaatggtcccaatggctatttaatggatattttctctggacccatgaaaaaaaaaaaaaaaaaaaaaaaaaaaaaaaaaaaaaaaaaaaaaaaaaaaaaaaaaaaaaaaaacccaaaaaaaaaaaaaaaaaaaaaaaaaaaaaaaaaaaaaaaaaaaagggggggccccccattttggaccttctccccccggaaatttttttcggaccggttcctgggggggaacccattttcccttaaggggggccttttaaaacttggggaaaaaaggggaaaaagtttttcccggggaaaaatgttttcccctcaaaattcccaaaaaaataaaaaccggaaaattaaaggggaaaccccggggggcccaaaggggggaccaaccccccttttttggggggg

SEQ ID NO: 54708 - DNA, 797 bp, Glycine max
  unsure (1)..(797): unsure at all n locations
  Clone ID: PAT_MRT3847_20413C.1
attggaggcaatatatcctagagatccaggtctcgatgcatcatttcaaaagtggggtcacacccaagttgctgtcggagctagggttgcttgttaccatgatgaaatcaaactttcccttcctgctatgtggacaccaacgcaccaccttctatttactctatttcatgttgatctgcaaacaaaattggaagctccaaagccagtggtaattggatatgcagcacttcctttatcttcccatgctcagctgcggtcagaaataaatcttccaattatgagagaattggttcctcattatctccaggatgcaggacgggagagattggattatttggaagatgggaaaagtgtcttcagattgcgtttgcgactgtgttcgtctttataccctatcaatgaacgtattagagatttctttcttgaatatgaccggcatactcttcgaacaagtccaccatggggttctgaacttctggaggttgctgcgtttcgggccatggttaatattgtaaccaggtatggcttttacctatacttgatccaagttggataaaaatgtatttgatgtttgaaaacaaattaacacgctgtttggtttgaaaaaaatgtgtcctgtttttcactgctaactgcataaaaattatcttgttttctgttttgtaaagttaatacatgaaacagtgaaaaaaataanaaaagttgttttccctgtttcctttantaatctttgaagtcaaaaacaaaatgaaaaccaggtgacaatctttgtaattaaagtgaaacatgaaaacatt

SEQ ID NO: 54709 - DNA, 227 bp, Glycine max
  Clone ID: PAT_MRT3847_20414C.1
aatcactgggaagcctttaaattcgtaaaaagggcccttacccatagccatttgggactttacaaaattcatagggggctgggttaaaattgggggataaacaatcaataaacctttcttgataaaaccaaattaccaaatatttccttctactttttaatgataccaccgggatttgggggagaaaaataaattctaatcccttctgccggcttttcgcacccgta

SEQ ID NO: 54710 - DNA, 441 bp, Glycine max
  Clone ID: PAT_MRT3847_20415C.1
ggaccagaggggacttgccccttcgttttcttcaggcacccatcttaaatgagattagtttgtaacttgtggggtgggaaacacccataatatttgattcaagacaaaaaaaatatattattaaaattaataggcttactttatatagggttggcaaaatgaacgggtcgggttgggtctgtctagtttgattcatcgggtcaaatagtgaaaatgggtcagcccagactccatccatattcttttggattgtaatttcttagacctattccatcccattccaacctaacatgctctatctcgtgttgtcggactaatttagaaattaataaaaaattaaaaaaatggcttctatattaaaaaatataaaaaaaagaatttaaaagacaaaaagttatttattatgtatatattctagttaacaagtattgaaaaaaccat

SEQ ID NO: 54711 - DNA, 248 bp, Glycine max
  Clone ID: PAT_MRT3847_20416C.1
caagttcttacgagacatcctaaatgtttataaaagattttttattttttctccaattataagtgcttgtttttcctctcttttcagtatttgttttctttgaattcagcgtcattacatttgctccacccttactactggggtactttttcttattgtgaatgtaaaaagttctttatggcagcgcaattttccttcaatttaatcaacagttacagcataacaacaatggagtctttagccagtgt

SEQ ID NO: 54712 - DNA, 338 bp, Glycine max
  unsure (1)..(338): unsure at all n locations
  Clone ID: PAT_MRT3847_20417C.1
ttttaaanggggnccnnnnaaaaaaccnngggnggcccngggggttttnaaaaaccgggngttttnnaaaaaagggcccttttcccgggggggnaaanattttttcccggggggcctttcccggaaagaaaaaaggaaaaaggttnacggccaaaaaaggatnggaacaagcgtcggggatgtttggncaggaaggggcaaaagataaaggggacantggtgttgatgccaaagaatgtgttggacttcaacgcataactcgtcgaaagatgtaggaacgcacgtttggaagtgagtagnanatgtntatctgtgcanncctnatnatatatngatga

SEQ ID NO: 54713 - DNA, 654 bp, Glycine max
  unsure (1)..(654): unsure at all n locations
  Clone ID: PAT_MRT3847_20418C.1
gagagaagtcgnnnaaatanncattcaatatgtaaagagattgaggtcttcacaataaacattnnnnattaagataactaaaacttaaatatcatcaaaaataaacttttaaactattgaaattaaacatgaggcattcctcttctttttcaacatcaccattaacttcatctannaagacaaaaaaaaaaaaacaatatcattaataaggcaaataaataaaacaacacacattattggtatgattattttaagaacaattatgggtatgcttttacccattacttcatattgattatgagaggaagaaattatataaatgggaaatttactcacattattgttatgattattttaagaacaattattataattatatgctatgaaactatacttatatctttgatgatttcaaagttaagttaantattgcatattttactcttttgacttatttaaatattattaaatatgaaatatacnnnnnataagaaaatatatgataagctactttaataaagcataatattcgatatatnnnnttttatgatgataatcacatgaaaagattgnncatcaatacnnntaattttaaaagatattcataatacttacgaatatcatttataaggaattatttataatgaattataa

SEQ ID NO: 54714 - DNA, 833 bp, Glycine max
  unsure (1)..(833): unsure at all n locations
  Clone ID: PAT_MRT3847_20419C.1
tcggcgtgttcttctctccccctgaacacgcgccttctccttcgaaacccttctccacagcaagaaaccgattcccgccaaagaagcgcttttttcaaatcaatgaatacagagagcagcacttcacaattccctgtgtcgcaactcaatttctctcgccaaatcaagggaaatgaaacagagattatcatttcgagatacgaagatcattttatggttattgccactcaaataggaaccatggggacaataatgtatgccagaaaggaagaaggggtgtcaattaatccaacattcaacgtttctgttatatttggcaaacgggatgagccaatgttagtagcatgtgcacgccagctgattgagcacatgagtttatctggctcctccaggccattggtgctctcacttggtcttaaagaccattctgtggaaacattgaaaggcattgtttctgctgtgatggacaatagcatgtggtgagaaattgctgatgaaatatcaaagtttgcagaactgccgtatagctcaaccttgtggagttgcagtgatttttaattagtgtatgctgactatttttctaccttattattttccaaagtaaatgcaacagtgtattactgacgtttgcacttcagattgtagtaagcgattgacatttattactgcaagataatcattttcagctgataggtgtgacgggttgaagtattcaattattcatattatggtatgcaaacttgggttaatattgtttctaatgagtcgttaatttactgtaattacattcgaccactcaaagcagtgattggattttaaaannnnnncnnnnn

SEQ ID NO: 54715 - DNA, 316 bp, Glycine max
  unsure (1)..(316): unsure at all n locations
  Clone ID: PAT_MRT3847_2041C.1
gtcgcatgcacgcgtacgtaagctcggaattcggctcgagcggctcgagggaggcaagtggngctccanctatgtgnntgctttntgcatatattaggtttccaattcnatncccacaatatatgtntcatgtacatcnccccattctgaccattncctgannatttnaaacagtgagagttncacccccttctcnttctcctacagatcactagccaggatgaagnttcgatntcaaaatttnccaggcatgtatcagtnccgtcantnaaacgataccagttgcgtctcttgttcttaagcagggcagctanga

SEQ ID NO: 54716 - DNA, 774 bp, Glycine max
  Clone ID: PAT_MRT3847_20420C.1
atgtccaaatcttgtggatttgggatgaccggccctctcgatgagtcgatctcttgctttctcataagggtggacccttgggtacttgtacctatcaccttgagaggactacatgtcctcgccatcagaggactgcatgtcctcaacttgagaggactacatgtcctcgccatcagaggacctcatgtcctcgccttgagagggctgcacgccctcacctccagaggactacatgtcctcgccttgagagggctacacgccctcaccttggttaccttcaccgtcagagggctacacgccctcaccttgaaaggactacacgtcctcgccagcagagggctgcacgccctcacctccagaggactacacctcctcgccttgagagggatgcacgccctcacctttagagggctacgtgtcctcattttcagtgtgctcgacatccacaccttaaaagaatttaagggatcgcacccacaagacacccagtggacccggaaaagtccaacagggccctggggtttccagctctggttacgggcctctatcagtcctatagggtgcccgtacccccccggcaagttctacggagtacctgtaacctccagcaagggcatcagaccccctactaatcgagctttcatcaagaagtactgcgtccccaggcaggcgcagggcaaaacaccacagcagcctggggatggccggcagcgggcaatagacacaccgccatcacctctagagttcacctcagctcatccacaaaaaggttag

SEQ ID NO: 54717 - DNA, 485 bp, Glycine max
  Clone ID: PAT_MRT3847_20421C.1
cctatctaattttttggattgatttatctggaattatcaaaaaaataattttgaatttacttttccaaaaaacttcacaatgttttgttttgattcgtagttatgaaaaaataaccaaatattaatcattatgtgcaatgtatttttgcaaacgaaatatttgagccaagtgtatcccatctaggcatctagtttgtgctttattcactgccctgtgtcctcccgctcatacaagcaatagcacgcacaccatatgtttgattaattgcgtcacccaacacagaataaaaacggtttctcaatcacgaactgtacctcggtagtgttgaatgcggatgcacttgaggcagttctttcgcgaggctaacctgttaaacgggttaaccttgcaagtgcaagctcgttcctatgctcgtcgccgcgaacaatttcccaccaagtttctcactgcctccaccgtgcaaagctcattgactccattagac

SEQ ID NO: 54718 - DNA, 723 bp, Glycine max
  Clone ID: PAT_MRT3847_20422C.1
atgttggtgcgcatgatccgcactcgtctctttgcggcggcacaggtgaaatcttgccccggtatgcatagtagctgtgtgatagcctccctctctggttgtgctcgcacagttggccctcctccaatatcagggggtggcccaagaaccgtgtggatgtcgagcacactgaaaatgaggacacgtagccctctaaaggtgagggcgtgcatccctctcaaggcgaggaggtgtagtcctctggaggtgagggcgtgcagccctctgctggcgaggacgtgtagtcctttcaaggtgagggcgtgtagccctctgacggtgaaggtgagggcgtgcaaccctctgatggtgaggacgtgtagtcctctcaaggcgaggacgtgtagtcctctcaacggtgagggacgtgtagtcctctcaaggcgaggacgtgtagtcctctcaacggtgagggtgagggcgagtagccctctcaaggcgaggacgtgtagtcctctaatggtgagggcgtgcagccctctgatggtgaggacgtgtagtcctctcaaggcgaggacgtgtagtcctctcaacggtgaggggcgtgcagccctctcaaggcgaggacatgagtcctctcaaggtgataggtacaagtacccaagggtccacccttatgagaaagcaagagatcgactcatcgagagggccggtcatcccaaatccacaagatttggacattag

SEQ ID NO: 54719 - DNA, 410 bp, Glycine max
  Clone ID: PAT_MRT3847_20423C.1
gcaagaaccccaaaaattaatattaggccccctgatttattgggccaaaacatgaaaaattttccgggggggacttgggggtttgcaaaaaaaaaaaaaactactttcccttgcatttgcaggcgggggaccaaaaaaaaattggcttccctccccctggcaggtttgtaaaaaaaaaaaataaaagttaacccttccagagggtacaaatttaaagatttttttttgaaaaaccaaaacgggaaaaactttttttttttccaaagggcttaaaggggaaaaaatccaaaccccctttcttccaaaaggaaataaaaacgggggggacatgttgggcttttcctgaggccaaattccgggtttacgacccggggggatgggaaggaataattttttttttggggccccta

SEQ ID NO: 54720 - DNA, 457 bp, Glycine max
  Clone ID: PAT_MRT3847_20424C.1
aaaaactaatgacctcaattaagagaaacaggccacgggaaccaaaccctatgtaatgtaactagattatcgcgctttacacaaagacactgtttacagggggaaaagataatgtttactgtgaactgaattatataaaacacctacctagtaactaacatataggtcacaccgaacaaagcataagatgatggggcaaactggtacaaaacattgaagacccaccaaatcgcttcttctggtgaccatattcttagaccggacaattccacaggacgctgattataccgctccctgactctttgtggaacccccaaatattctgtcctttaggggttacacacctacacgggggtacaagtaggcccagaatagcatgcacttataatgtctcaatggcccaaacacccttaggaccaggggtggaagacatcaaacgggcggagcgtacagggaa

SEQ ID NO: 54721 - DNA, 471 bp, Glycine max
  Clone ID: PAT_MRT3847_20425C.1
tttgagggttttttttttttttttttgggtttctcccttttcttatgtttttttcgatactaagcgacaggggttgaatcttaggggacttgtggattattggtcagaggggaaaatggggaaaaacgccttgtttaaaaaagcccgcaaaggggaccaccggacacccaaagggaatgggggggtacggggccccccaaggctaaattgggaaaaaaggggcaccaaaggggggggggggagggtaacccaaaaaaactggggccaacttaaaaaaagcccggggggggacccgtaaaaacaccctcgggccccgggttattggggcagagacggggaaaaacgaacggcagtctttcgtcggaggaaacacagggtttccccgtggcgcccaaaaaagggggatccgggggggaggagaacccccacgatcccgggggggggcaaaaaaaaaaaaaggaaaaacggggt

SEQ ID NO: 54722 - DNA, 456 bp, Glycine max
  unsure (1)..(456): unsure at all n locations
  Clone ID: PAT_MRT3847_20426C.1
ttattctcgcgtncgcggacgcgtgggtgcgtgaggagttattaagcttatgagttaatggagtgatactaaatcagctccttccttttgattgaagttcgattatcatgttaaatttttcttataagtggcatgcatcaaacatggtttattttcattaggatttaaatagttatatcctgtggacaatccttgaaataacagaacataaaccatgtgaaaactgctcaatcttgctgtttctgaggttgaggtttcattcaatttccagcaaacccagattacagggtttccaatcaattgccagttatattaaacgagaccaagtctaaaatatcccattttaccttgcctacattgcatagaatctccaatttgagatatgaatttcctttttgcatgatttataggatatgaacttttcatcaactcaactagtcctgacgaaaaggatgg

SEQ ID NO: 54723 - DNA, 299 bp, Glycine max
  Clone ID: PAT_MRT3847_20427C.1
aaaccaaaccgcaataaatttgatgaaaatggggtttcctttgccataaaaggggttcttcctaaattgttcaaaggggactttttttccacagtttactttttttggtttacaaacacaatggatttttagggtttttcccaaaaagggggggcctctttaccctgacttttttttttgaaaagaacccttaaaaacaaatcggaaattttggaatacttcaccctttgggaggggtcaccccctctttttcccttgaaagcgcaaaaacctttctgcaattttatctttttttaaag

SEQ ID NO: 54724 - DNA, 479 bp, Glycine max
  Clone ID: PAT_MRT3847_20428C.1
ggtagacagacgggtgctgctttgaacaagaacactgttgcgctgcgttgcctattgtccactgtgtttacattcttacgacgacttttacgattttttgctcacattgtcgtgaataatctgacagaggcggccgctgataccagtggctacagctcccaaaccttggactgttgaggaggcggctactcgcaacacctactgggatagctggattattatcactggacaggtctgccgcttcttgatctcttcgtcttagatcttctctttcagactctgttattaccatgatgcgagctaaatgctcgctcgatgcctcatctagagcgtgtgatggggtgcacaagccacacgtaaagctccagtacggactatcaagcttatcaagtgaattgcttgattggttgagattagggatcactaccaaatgtgaaccccaggaatgcatctctgcgatacacatactacgttggaac

SEQ ID NO: 54725 - DNA, 393 bp, Glycine max
  Clone ID: PAT_MRT3847_20429C.1
ggtgtggtcaagaaacacccccccccccataaaaatttttaaaaaacatgccaaatccaaagtttttgggggaaaccagtggggaaggacacccttccaattaatttaccattgcccaaaattgcgagggaaaaaaaagagtctgaaaaagggtttttccccatttcccccccccagctgtctgtggatttcccaaatttaagattttttaacattgggggaggggccaaataccttttgggttttccaaaaaaaaaaatcccctgtgttgattaggccagaaggctttccaggcacagtcttgaatgggatctgggcaacaaattttttctttccgggggaaccttttgatattggggggtgggcctttgttgtcaccaaattacccttttg

SEQ ID NO: 54726 - DNA, 523 bp, Glycine max
  unsure (1)..(523): unsure at all n locations
  Clone ID: PAT_MRT3847_2042C.1
anatccagaagaccttcaacaacatcaagatcaccatcctctgcggcttcgtcaccatcctcgtccttcgcggcaccatcggcgtcaaccttggctcctccgacaacgacgccgtcaaccagaacctcatcgaagaaaccaaccgcatcctcgccgagatccgatccgacgccgacccctccgatcccgacgaccagcagttcttcaaccctaacgacaccttcaccctcggccccaagatcgataattgggacactgagcgcaagaattggcttcaccaaaaccccgaataccctaatgtcatcggagaaatcttggattgcggtgaatactgggagttttctgtttaggaactgtcagtggtctttggatttgcttgatgcttgggctcccatgggccccanaggggccggttcgtgaggaggccggngaagatcttgacggccaatctcaaggggagggccggcgtttgaggccgacgaatcaggtccgccttggatatactttgctttgttggtccaag

SEQ ID NO: 54727 - DNA, 319 bp, Glycine max
  Clone ID: PAT_MRT3847_20430C.1
accgcgatcataggttgccggaccttaaaaccggaaacaaaagcaatcgcgactcgatgccaagaatctgtcaataatctgcctacgttggggtgtacaatctaccaagggaaagaaaatcactctctgtgctggccacagacttcgtgaatcatgatctttaccatgcttagctaattggctggacactctcctatttgatataggacgtcgtgtcagagttaaacttctgctgattctttttcagctctcggcccaattgcaaggtcaagctggagaaatcgtggatcagggcttccactctgctatgtggtatagg

SEQ ID NO: 54728 - DNA, 423 bp, Glycine max
  Clone ID: PAT_MRT3847_20431C.1
aaagatgagaaaaaattattattgaatattgagtttttcataaagtttaatggcgtcaaatgatccataaagctgcccatctaacaaggaaagaattggttgttatatttataagcttgggcaaagcaaaacattctggtggccaagataagaaagacctcccagtatcaggaaatcaattactttttccctcaacttttattgttgctataggggcctctccaatatgaaagtagggggatttgtgtacgcctgaagtttatgaaccccgaagctgattgggcagttttatttgcttcaatatctaaaaccccccccaacttgatgatatgaagacttttttcctttggggatctttggacaacaatgttagaagcataccctttttttctcatttgatggcatatctcacaaggattgtta

SEQ ID NO: 54729 - DNA, 357 bp, Glycine max
  Clone ID: PAT_MRT3847_20432C.1
tttacacaaggaaatcacatatacctctgaatatactcgaaatccaaggactttcactacacccctggctaaaaatgccgacaggaaaaaccaaaaacgccaaatacttgctgccaccatcaaaacttaaaacctggaataggtaacagggatctataacaggacaaaaaaagaatatctaactctgaaatacttactagctaaaccaacttatgcagccaaacggaaaactgctccccaaacgatatctagaaattctgcgactaatagaaaatcaatggtcactccccacatggcgcctgcaaaacagcttggctaaagaggacattcaatgtgcatacattagtgcggcacttg

SEQ ID NO: 54730 - DNA, 589 bp, Glycine max
  Clone ID: PAT_MRT3847_20433C.1
ggagagaactagtctcgagtttttttttttttttttttttttttttttttttttatttttatttttctgttctgaatgtacttttttttttaccttatttgcatgcatcaatgtgttcatgtaccaataactgggtttccccatagtaggaagccacagagagggtgctttatgactttgacaacataatatttggggctcatcttttcagtcacgataaagctgatcatgcatgagccactttaatatttgtagaggactgtgtcccggagagtcagcttttactaatgctggtattcagtataatgcaatattaactttgaatcttaatttgtcacttaaaaaaaatcttatccaatgtttgtggcataaaaaacaactgaactcatatgtttttttaccaaatagtacttttccaatgtgtctggccccccaaaaaaatgatccattgttttttaccaaagagaaaacaaaaaaaaaaagatccaatattggcacaacaagctaatcattagtcttatgaaattaaactctaggtacacaagaggaagcagctgaagcctttgacattggtgctataaatttccga

SEQ ID NO: 54731 - DNA, 380 bp, Glycine max
  Clone ID: PAT_MRT3847_20434C.1
caaacacagaggttgttcataggagttataatgtcataattcgaaaaaatgcgggtagggtcgataatgattgcagtcggactcaacactatacaagtggatgccgacatttacaagagcttgcacatcactcggcgtgttcaatacgcgtcaattctgggcgaatacctacatcgagtgttggataaaacctaaggatcagctgctcaatcaatgagatcattcttatgtggaagcattgaaatgctaatcaagctcggacctggtgattctgacggaactagtacagtctactatttatactgtgcatgaagccaacatgacgagatacatgttgagttcttaggcaacagttcaagacagtcatacactgttcacac

SEQ ID NO: 54732 - DNA, 474 bp, Glycine max
  Clone ID: PAT_MRT3847_20435C.1
gtctgaaaaattaaaactgtgaaagttgatagcaatagctggaagtatttacctctgaaatttatttttcttttctgctttcactgtttgatctgaatgtattgtttttgattattaacacgttcaggttagtatttagattttacatttgataccagagtcttgtatgtctctgccttgctttgtttgacactcttatatctgaaacgttgttttattaagatatggacattctgtttttgaacattttaatcattaataagacctgaaatcatatggaaattgagtttctaagctttctgtgaattaaaacgatgagtttggtgttgagaatgaagaaacaatcaggtttctatttaggtttgcgggatggaaaaggtatcgccttgttacgtcggcatcacgtgaaatgttagtccatactgcaaaggtcttttgttattgcttcctttgacccaccgtgacatcaaatgt

SEQ ID NO: 54733 - DNA, 637 bp, Glycine max
  unsure (1)..(637): unsure at all n locations
  Clone ID: PAT_MRT3847_20436C.1
gtcgcatggccacgccgtnacccgtaagnccttggaatnccctctagaagccggcccgccctnnttttttttttnnttttttttttnntttttttttttttttttttttttttttttttttttttttttttttttnaaaaaaaaaacaggtaggaccaacccctacataagacgagggattcaaattttgaattggggtttttaaaaaaaaaattaataaaaaatacaggggggcggagggccccaacaaaagggaaaaaaaaaaaatgcccgcctgtaactttggaaagacggagttcaaccataaattaaaaaagggggggcactcaaaaatctctggattggccttgcaaaaattttcgagcgggacaaactggttttggttctccctggggggggtcgccgccccgctaaattcccccacctcgtcccaggccgccgggcattccggggaaccgccgcctcccaaacacgcctcctccgggctttttaagcccccccctaccttttccgataatttctccgggggcccccgaacgggccgggttttcaccaaaccaggccatttttgaaggggcctcgaaagaactggaaaccccacggccggggccttttgggctgagtctattcccttaac

SEQ ID NO: 54734 - DNA, 295 bp, Glycine max
  Clone ID: PAT_MRT3847_20437C.1
tctgggatcttgtcctttggatctgaaacactctctgagctttctttcttagaaaacgatgtcgtctcaacaacaagaccttcctcttcatctcaactttaacctcaacctcttatggtggacctcactctcattcatgaagctgattctaaaggagctggtctctctctcagctaaattgtttttatttggcttctttgtgtgatgtgtctcttttcgaaatctgcattttgagtttctatgtaattggtactcattagtacttcactgcttcacattgcattatctgtatctg

SEQ ID NO: 54735 - DNA, 432 bp, Glycine max
  Clone ID: PAT_MRT3847_20438C.1
gaaggaccatattcaggaagtggattcacctgaagatcgagttcgggatcaaaacagcgaaaggaacaatgaggaggcaaaagaggaatattatgcctccagtgaaggtttgaacaagacaaaacaatctgacaagagagaaaacaatgaatttgagttggagtctcaaacaaatggtaccgaagtggctcatgttcatgagaatgagagggtcttaaatgtaacacaacgaaaagctacacaagtgactaattctgttgtcacaaatataaccaaccaaggaaatggtagtgagaatcaagctgagaaaaagaatgattcacaaaagagttctattgccgagtcagataagcaggagcgagagcctaataagccctctagtgatgatgtagaagctcttcactcacagaatggtacttgttccaactgaaa

SEQ ID NO: 54736 - DNA, 275 bp, Glycine max
  Clone ID: PAT_MRT3847_20439C.1
ctcaatcctaatcaactcttactacagcctgccttaccttaaaaccggggacaaaatcaattgtgactgggtttgaagaatctttcaatttcttactacttctttgagctctatatattaaagtaaagaaaatctctctctgtgctgtccacatactcattaaatcattttcttttccactcttaatctatttgctaaccactattcctatctatatacgacttcaaatcagatctaaactggttatgtatctatatcaactctctgctaaattt

SEQ ID NO: 54737 - DNA, 1916 bp, Glycine max
  Clone ID: PAT_MRT3847_2043C.1
ctttttcttcgaataagtgattctgtttctaaacctccgtctcaggttacaccctctactctctgtctctagcctcttccctttccctccaactaacctaaccaaacactccctaacaccatttctttatgcatttcgctgcttcttgggctcccatgtgccccaagtcaattccccgtgaggagcgcgccaacatggggacagccaatctccacaagcgccggaccagcgcgagtgacgatcagtccgccttgagaagcttgctgttgtccaaggaggataagtggatggacaagatcctgaagaccatcaagaacttcaagatcgcctacctctgcggcttcgtcactatcctcgtccttcgcggcaccatcggcgtcaacctcggctcctccgacaacgacgccgtcaaccagaacctcatcgaagaaaccaaccgcatcctcgccgagatccgatccgacgccgacccctccgatcccgacgaccagcaattcttcaaccctaacgacaccttcaccctcggccccaagatcgataattgggacactgagcgcaagaattggcttcaccaaaaccccgaataccctaatgtcatcggaggtaaacctcgcatcttgctccttactggttctcctcccaagccttgtgataaccctattggagatcattaccttttgaagtcgattaagaataagattgattactgtagattacacgggattgaaattgtgtataatttggctcatttggatgtggaacttgctgggtattgggctaagttgcctatgattaggaggttgatgttgtcgcaccctgaggtggagtggatttggtggatggatagtgatgctttttttactgatatggtgtttgagcttcctatgtctaagtatgatgagtataatctggtgcttcatggttaccctgatttgttgtttgagcagaaatcttggattgcggtgaatactgggagttttctgtttaggaactgtcagtggtctttggatttgcttgatgcttgggctcccatgggccccaaggggccggttcgcgaggaggccgggaagatcttgacggccaatctcaaggggaggccggcgtttgaggccgacgatcagtccgccttgatatacttgctgctgtccaagaaggagaagtggatggacaggacgtttcttgagaattcgttctacttgcacggttattgggccgggttggttgatcggtatgaggagatgattgagaagtatcacccagggttgggggatgagaggtggccgtttgtgacacattttgtcgggtgtaaaccgtgtgggagttacggagattatcctgtggagaggtgcctcagtagcatggagagggctttcaattttgctgataatcaggtgctcaagctctatgggttcaggcaccgtggtctcttgagtcctaagatcaagaggatcagaaatgagacagttagtcctttggagtttgtagaccagtttgatattcgaagacattctacagaaaacacggaatcaaagagctagtgagaaagttgttgttcaatgggtggtattatagagagtaattatttagaagtggagtttcatttggggacagttcacatgtaacttttgcttcttctgtcgtcttggtacttctgtgagaattttaggatagaattctttcgtaagttcttctttcttccagatttgagcaatcagcaaacaaattttatttactcatctactgtatactgagcttcctttgtatttgggcttttgtgacatgaaatgaattcagaaacttaattaatacacattcctgtcctcttgaatgatatcgttgtgatatgttgtaacatgaggtaactactgttttctgtagctgttatatttgatctgcatatctcaaatgtgtttaac

SEQ ID NO: 54738 - DNA, 601 bp, Glycine max
  Clone ID: PAT_MRT3847_20440C.1
acgagatcaagtgttcagaaagtagatgcaagagaatgtcgatccttaaatcaattttcatcaaacgccttatggattcaggtttactagcactactttagctgataacgagcaaatgttttctgacgaaaaatgatcacataaatatcatagtcattaagatatattttctgttgaccggtgtagttccacaatttcttttccattcattcctcccattttatttcattgttaactatagaaaacaccattaaaagacaataattaagattttgttttttgtttgtgggatgtgtcgcaggtaaaaaaagaaaagaatgaattagaagtcatgatgccaaaaagggagattccaaaatggttccactatgttaacaagggacggtttccggatttcaaggctcgtgggaagttccctgcggttgctatagcgtttgtatttggggaagtgaatgccattgacaaagctaatagaagtataaatgttggcattcacttgttgattgaggatgaaaggagaaagtttcgtaatgtccctgtccctgagaatcatgtgttcttgtgtgacctacgaggtttgttcagtttggaagaatgggag

SEQ ID NO: 54739 - DNA, 360 bp, Glycine max
  Clone ID: PAT_MRT3847_20441C.1
gtaaaaaatgcttgatcatgtggggattaaacaatacacgactgaatgaacggcttggggcaatatactaccgattgaggcaacataacatctgtgcaataattatactagtttaagtggatagattacctatcaggtacacagctagattgcaccaaagatagacagagtttgagatggggatgaagatttatgcctgacaggacgcacctgctgttggcttgttgttcaaggatggcaatttgtaagaaagatatttggagagttgaatgtggaataccttctggatatccgctcacaggtatgtgcaatagcatttttaatgagatgctcattagatatagctatgaaaaattactg

SEQ ID NO: 54740 - DNA, 863 bp, Glycine max
  Clone ID: PAT_MRT3847_20442C.1
aggtagggtactttttttaaattcataaaaaaaatgtcaatgacagaggtacaagtttctgttacatttagttcctgttacatgatttcataaacatgaaattaaatttaaacatcatacagaacaaatatgaatatgacctactccttttgtggaactgatgatccttacccaatcacgaacaaaaccagtgctcaggataatattttgtacgaagcatctttaaactatcgacctcattatacagtatgaatatcattttttcttctactttcttctccttatgatagacagggacacaagtataaaggccatactacaaagtacctatcaaattcatacttggtcgatttacactgccattactcattagggtttccaaaagtgcatgtcgaattccctggccatggaatttgtcgacaatttgagagctgttggtgtcagttgaaattttgaagattgtgaatggacaaaaaatctcttcacctctcgcataatgtaactgtcttctgaagtcacaacacttcaactggaagggttaataatattcagcaactgatttacccattcagtttcccacacctcaagaatcaatgatagaaggcaataatggggacaccattgattaaaatccttcttacttgatgagcatgagaaggcatataggtttaaccattattccaccatgaggggttaaaaataaatatatttgaaatgagaaggatgccaaatcacatctgacatggattaagaaaccaccatgttctgctcttggtacaacaaggaaggatacagctatactcccaaatgtctgggtactagagacaacaccatttgtcatacatgtcaaagactcccttgag

SEQ ID NO: 54741 - DNA, 245 bp, Glycine max
  Clone ID: PAT_MRT3847_20443C.1
cataatatagacatatcttttcccattactttcaaattttgcaactaccccctcgcgggggttttatctttatctaagcatgttcctctagatacatggaaccaatggagatcgcacatttactacttctcttgtcattatgcacccactgctccacagcctcctaagcaattttctacctctctctaataattcaaaaaaatactttctcccctgtctactataattgagcaccgcccgttctt

SEQ ID NO: 54742 - DNA, 460 bp, Glycine max
  Clone ID: PAT_MRT3847_20444C.1
gcgcaattatctgtttggtcatggaggagaaacagattgagaaatttgactaaggaataaggataaccgagtgaagttgcttgcccttgtctttaacttgcattccaaagtcttttgaccttattctgtctcataaatgcacatagtagtgaagtttttttggaggattccatgagatgtcctttgtgtgcctgcaagttaccacctaaagttcttatcgttgtcatgattcatgagaaattagatattaaatcatgcatctactttgtatcaggcaggctaaaaggtgtggctttttttttgtgagttttaaatatggcttccatgattcacaatttgatatatttgtttcatgcaataccataaactcccatcatgtgtttgagtgtacacaatccatgcatgatgcatacatcatatgatgtcaggagcttctgcaactgcggatgaaattattctg

SEQ ID NO: 54743 - DNA, 328 bp, Glycine max
  unsure (1)..(328): unsure at all n locations
  Clone ID: PAT_MRT3847_20445C.1
atccaatccatctaatctcatatcattatttttgtttattcaaaacttcgaattttgacttcagcattgcaagctcagcatgggggtgagatcagagtcatgaggtgaaattccgattctttgaggtgatacccatttggtgtctgaccctgaaattgagcttggatggggaaagtntggattctgatggtgtntgtntggtgggtgtggttggcattgttgaaggggcaaggaagcacccatcatcagggaggaggatccacactctgttctctgtggaatgtcagaactacttcgactgggcaaacagtggggctgatgaacagtt

SEQ ID NO: 54744 - DNA, 622 bp, Glycine max
  unsure (1)..(622): unsure at all n locations
  Clone ID: PAT_MRT3847_20446C.1
aaataattggttttaatatatatttttctttaaattaaaaaaataatattttctaatataaatttgctatgcgtgtgcgagagtgtgatataataaatatatacactttgattgatgtgaactacaatatcatataatcattaattaggtgacggtccttgggatataaagagaagggagagttagttaagatagttggactattaatgagttagtgggttagttggttagaggaatttataagattaaataggggaagaaggatagtagagaggtaggtcttatcatttgtagattgagagttagctctttttgaaatgagaacttctttatgaaggggaaatccttggtgttggatcaagtggcctcggaataattaagaagggggggtgaattaattattaatgaacctttactaattaaaaaaatctatccttcttaatgttactgaaatcaattaggcttttactatagtgttaagaaagtaaagaatagaaatagaaacttaaccataagtaaaagtgataattaaagtgcacaacggaaattagaagtgtagggaaggagaagacaaacagagttttatactgggttcgcacaacccgtgctacatncagtccct

SEQ ID NO: 54745 - DNA, 1398 bp, Glycine max
  Clone ID: PAT_MRT3847_20447C.1
tatatatctaatcttgattattccatgtgttagctagcttctactacttaagtaacattttaatattttctctaatgtatttggtaggttaacatgggattaccctccacacaaaccagtactggctcaaagagacaaccagagacatccatggccaagcccaatccacacactgaagccccttctgcacctgagccacccaaagctgtaaagcgagagggcaatcgcaagggaacaacatcaagctctgagcaggaagcacccaaaacaccagatcctaagacactaagaagacttgctcagaatagagaagcagcaaggaaaagcaggctcaggaaaaaggcgtacgttcagcaactagagtcaagtaggattaagcttaatcagatagaacaagagttacaacgttctagagctcaaggcatattaatgggcggaaatacacttctgggtggggagcaaggctttcctatggccatgagtggaattagctcagaggctgcaatgttcgacgtggaatatgcgagatggttagaggagcaccaccgcatagtgtgcgagctaagagctgtactccaagaacaccttcacgaaaacgagcttcgtttatatgtggacaattgcttggctcactatgaccaagtaatgaacctgaagagcatggtggccaaaaccgacgtattccaccttgtttttggcgtgtggaagaccccagccgaacgttgctttatgtggattggtggcttcaggccatctgaactcatcaagataattctgggtcaaattgagcctcttacggagcaacaaatacttgggatatgtgggttgcaacaatctacacaagaggcagaagaggctctttcccaagggcttgatgctcttaatcaatctctctcagagactataacatcagactctctgtggtgtcctccaaatatgactaactacatgggacaaatggctgtggcaatcaacaaactctccacccttgaaagctttgtgagacaggctgataatctgaggcaccagacaattcaccgtctccaccaacttctaacaacacgccaagccgcgaggtgtttggtggcaatttctgagtacttccatcgtctcagagccctgagttctctgtggtcaactcgtcctcgccaagatcagtagtgagtggtggcggccggcggtaatagtgacattccataactctcaagctatggctagatagctatatattagatatatatgaccttgtagcttcttaatttctcttaacttataaatttaatattttctcaattttattttggtaccaccctcttgatttctctccctctggactttcccatctatatgtatatagatatacattaacaaattaaaaatagaagtaattgtaatgtt

SEQ ID NO: 54746 - DNA, 467 bp, Glycine max
  Clone ID: PAT_MRT3847_20448C.1
agaccttaataaaaaaaaaagagagtatattttaaatattcgagacctacaacaataaaaaaaaattgttatgttaaatctataatataagttacattccttcccatgcttaacatttaatttaacaatatataaatgtttttgccttggcctatccactttccaaactaattgtagactatggttgctgaaactcaattgtgagtagaacttaaaactccaaagaaaggatttgtcattgcagaatttaggaccaaaccagctgaatttaacagtgccatgtcaaccttttcatcaggaagatacaagaagtcacccgttctctcaaaaccacacagctcaagaaactgtacacctccatttaaacttccaactctatcctggaataatgggttattcagtccaattttcctgtacttgtcctccctgggattcttggccacatttccaacatagactaaaattgt

SEQ ID NO: 54747 - DNA, 178 bp, Glycine max
  Clone ID: PAT_MRT3847_20449C.1
cctagcgcacgatagccctccatcacccatgcttggggtactctgcgccactcgctccaaacctgggctcttctccctcggcacgcctcccttcctcggctatcccatgcccctctctcaccttccggctcggcggcggcccgtcggcgccattccaccggctgcgaactctttctct

SEQ ID NO: 54748 - DNA, 332 bp, Glycine max
  Clone ID: PAT_MRT3847_2044C.1
cgaagctggaattcgctcgagggcgatgcaaccttgcctcgacggaatggttacacccgtcgtttttgccgtctaggtcgtcgcgtctgtctgacaaggtgagaggagggttcgcggtccggatctagacgaataacgacgtgcgtggtcactcggcgtgcggtccccggcggctaccttggcgtgccattaaaagcggcgcatcctgggtctggataccacttgcatcgtactacgtggcgctctctgcggtgcctgactcaacgtcggatgcatcccttccaaggcactgttgattcttcccacatgtgtgatgaggctcaacatgcatt

SEQ ID NO: 54749 - DNA, 173 bp, Glycine max
  Clone ID: PAT_MRT3847_20450C.1
cgcccacgcgtccgttcaaaccgacaaaaaaacttgttacgatggtttcttccgacaaggagccaggagaggaagtccttcaagcatggtacatggatgatagtgattaagatcaaagactcccccaccacatagaacccaatgagtttgtctcgttggaccaacttgctgaa

SEQ ID NO: 54750 - DNA, 491 bp, Glycine max
  Clone ID: PAT_MRT3847_20451C.1
gtttcgagttttttttttttttttttacagaaccttaaccaaaattggattgagaaaaaataacatatcaatattcttacacttgtccttttatgaaaacattttgttcctctaactctttaagcaactgaaaaatttgatgttttctgcaaccaaagctagatgttttaccaatacccaactaaacaagctaacaactttaaagaatcttctccatttgcttaaactaatccatcttctacagaaaaacttctctgaaatatcctttcccttgctttaattgcctgtttttcccagtttgtacaacttgtgatgagagatagcataattgtttggcagaaggcaccagtcagtattccaatccaaaggccttttcctcttaattgtagccagaaacccaatatggcagccattggaattcccacaacataataagctcaaaggtttacatatgctcctatgtgctgccacccacatcctctagcaatacc

SEQ ID NO: 54751 - DNA, 1101 bp, Glycine max
  Clone ID: PAT_MRT3847_20452C.1
cggctcgaggctgcgagaagacgacagaagggggagctagttaggtgttaaatatttgattgcaatattaatatgaaggcacagtgtgagtagtgagaaggggcattagtaaagaggatgggtagacgaccctgctgccccaaagagatcaacaaaggtgcttggtctcgagaagaagatgaaaccctctccaaatatgtttccatccatggagaaggaaaatggcagaaggttgcccaaaatgcagggttaaagcgatgtggaaagagttgcagacaaagatggttgaattatctcaagcccggtataaaaagaggccacatctctgtggatgaagaggatatgattataagacttcatcgtcttcttggtaacagatgggcattgattgcaaagaggctacctggacgaacagacaatgaaatcaagaactattggaacacaaatctgtcaaagaagttacaaaaacatccaacatcatcagtttcttcacttcaacacaaacgtcatgaaaaagaaaaaaccatacaaatgcatgtatcacccgaagcaccacggcctaggagagttaatgcagttgaatacagtaaaaatttggagaatggtgggtgtggaaatagacctagtacaactcccagtccctcaaataaagtagagggtagtagtgaagaagcttcttttagtgatttcctcatccacgacattgatcaaaaccaatttttgattgctgatgattcaaactcaaaggtgccacaaatggaagaagatcacccccacaacaacaaggtggaattaataaccaacaacagtcctagctcttcatcaccttctgatcattgtcaccatctcttgccagagaaatttgacccttttgagacccttttggatgtggagctggcttcctttcttggatttgaaaatgattgatcaagagattttatttattattattgcatgcagtgagatgaatgaaaaaaggtcaagtacttagggagtgttatagataatatcccatctatatatggaatgcctaactaattatgcatctagctatagctagatgtaatatacaaatccagggtttctttttctttttcccgg

SEQ ID NO: 54752 - DNA, 2007 bp, Glycine max
  Clone ID: PAT_MRT3847_20453C.1
ctcccaccatgcctccccacattgagccgtctagtcccttcttcctctatctctttggctattagcaaacactctcatatttggttgttctagttctcactaccatgtcaacccacattgaaagcctgtgggtgttggccttagcctcaaaatgcattcaagagaacattgcatggtcactcttgatcatcatggtcactctctggctcaccatgaccttcttctactggtctcaccctggtggtcctgcttggggcaaatactactactttaattactggaaaaaaaccacctcaaccaacacaaacatcaaccttaaaatgattatccctggtcctagaggctaccctttcattgggagtatgagtctcatgacatccctcgcacaccaccgtattgctgcggcggcggaagcatgcaaagccacccggctcatggctttttccatgggtgacacacgtgtcatcgtaacgtgccaccccgacgtcgctaatgagattctcaacagatcaatctttgcggatcgtcccgttcaagaatccgcgtacagcctcatgttaaaccgcgccatcggcttcgcctcttacggcgtttactggcgaagcctcaggagaatcgcctcaaaacacctcttctgcccccgccaggtaaaagcctctgagctccaacgactcaaaccgccgaatggaagagcttcgctcagtaacatgatgtgctcggtgtttggaccaagattatgaccttgacgagccaaacactgcaatggacgagctatccatgttggtggaacaaggctatgacttgttgggcacccttaattggggagaccatatccctttcctgaaagactttgacctacaaaaaatccggttcacctgctccaaattagtccctcaagtgaaccggttcgttggttcaatcatcgccgaccaccaggccgacacaacccaaaccaaccgcgatttcgttcatgttttgctctctctccagggtcccgataaattgtctcactccgacatgattgctgtcctctgggaaatgatatttagggggaccgacacggtggcggttttgattgagtggatactggcgaggatggtgcttcatccggaggtgcaaaggaaggtacaagaggagttggacgcggtggttaggggtggcgctttgacggaggaggtcgtggcggcgacggcgtatcttgcggcggtggtgaaagaggttctgaggctgcacccgccgggcccgcttctctcgtgggcccgcttggccatcactgatacgaccattgatgggtatcacgtgcctgcggggaccaccgctatggttaatatgtgggccatagcaagggacccggaggtgtggctggacccacttgagttcaagcccgagaggttcatgggtctggaaaacgagttttctgttttcgggtcggatctgagactcgctccattcggttcgggtcggagaacatgccccgggaagactttgggtttgagcaccgtaaccttctgggtggcttggcttttgcatgagtttgaatggctaccgtctgatgaagccaaggttgatctaacggaggtgctgaggctctcgtgtgaaatggctaacccactcattgttaaagttcgccctaggcatggattaagcacttaatgataatataattaagcctatctacgttattaacttgaaatgttttaatgggaaggaaaaaaaaaaaaaagagaggttttgttttgcttttgcatgtggcaagtgcatggccctttggagccactaaatgtcaagcgaatggatgaatcaaaggtagaaagcttgagatggctctgtctctatacaatggggtcatcaaggatttttttagtcccaattttttgtttttctttgtttttattaagttgactagtctcaagttgtttggttatcgagcaaaaattagaaaatatatctatttcccttgtaaaaattttgctcaaattaaaacaagctttttaagtttgccccccc

SEQ ID NO: 54753 - DNA, 337 bp, Glycine max
  Clone ID: PAT_MRT3847_20454C.1
gacccacacgtcaggccacgcgtccgcccaagcgtgggtccggctgtcataggactatacattgggacactaacaaatctcacttttccatttgccatccgttgggttgtgtacagtgtgaatgggttggcttatgatgtgtgttccatagaactccaactagtcacagaatcctgtgtgggacaaattgcactttgacactcctaaagcgtgcgcagcataaaggcatacacaccacatgggatggatacagctctcactaagctcagcagcatgcaggtagcgttgacgaggtcatggatctccagataggcgatcgacgatttcgctaagatct

SEQ ID NO: 54754 - DNA, 413 bp, Glycine max
  Clone ID: PAT_MRT3847_20455C.1
gagtttttcttctgtttttttttttttttttttctgtctatgatgcatttgactgaactctgattcttttttctttttacatcaactcttggcttcttagtgtgtcacagtgacttcagtcctttctactaagggtgtgtttgacttaagagcaagcctaaattggaaaaggggattttttttttctttcattttggccattcatctctctctggggacattttgttctctctgcaactatggaaaagctaggtttaactgaatctccattccccaagctctcttcagatgagattctggaattggaaagaatatacgaagacatgggaggaaaagtgctaaatcggaagtcatgcctggagattgctaaacgttttagttcctcatcaaatggtgcttgtaaaacttcctta

SEQ ID NO: 54755 - DNA, 509 bp, Glycine max
  Clone ID: PAT_MRT3847_20456C.1
tcgcggcttagggttaacgataacaagcggcgtaatttgtctaccacagtttcaaacgaaacgcaaccattgtgtctgtctcatatctctgtgttagggtttcaatccaatcgattctgtgttagggtttcaatccaatcgattcttgttctgttttatcttatttttgttaagggtctggagtttggctcttaggctttataaacccagtgccttagagatgaatgcagcacccaataccaagccctatcaaccttttcactaacattcgctaccatgttttttcaatgggtccagcggatctctttggtaaggttgatacatttctttttcaattttttttgttaccctcctttatatatcagtcaatgtttttaatagtgcaaagttgtgagtatgaactttttttttaagtatcgagtggtaattcaggcagccttcttgccacaattgtaaaatggcattaaaggtgttaaactactcgtaaatcaaatgcttttgctcttcgt

SEQ ID NO: 54756 - DNA, 167 bp, Glycine max
  Clone ID: PAT_MRT3847_20457C.1
gatcttatgactgactatcgcgaaatccatgcttggacatatgcatggactatgtctgttaatagatactggagatgaggagcatggaggaatgtatggctgaagcgaactggtttgtattggcatatcatacatgacagttgatgtactagcgcctcaatgtatga

SEQ ID NO: 54757 - DNA, 991 bp, Glycine max
  Clone ID: PAT_MRT3847_20458C.1
atggaaaagctaggtttaactgaatctccattccccaagctctcttcagatgaggtgcggctgtggttcaaaaataatcagagaatgttactgggtaaagatatctcatcttctgacctgctgaaaatatctgctgatcttgcagagtcacctcttttaggaaatggaaaaggtaaacaagctgcagctctcgatgacctgggatttgaagcaagatctacaaaagacattgcatggcatgatgtttcaatgttccttaactacagagttctgagtacaggcgaacttgaagtccgcgtacgatatgctggatttgggaaagagcaggatgagtggatgaatgtgaaattgggggtgcgggagagatctattccattagaaccttcagagtgtcacaaggtgaaggatggagatcttgtactatgtttcctggaaagagaagattatgccctctattgtgatgctcgaattgtaaaaatccataggaagatacatgatccaacagagtgtacgtgcaccttcattgttcgattcgtccatgacaacactgaggtaaaatcttcgatattaacactatctgatgttgtttcatatgcccatgccaggaaggagtttcttttgacaggatatgctgtaggcctacacaagaggaatctgcttgctacccagatcttgcccttgatcccacctcaagtccctccttaaatgtcaccctaaataccatagagtccttgtggggataaatgagccaactttttggtattcccctttattacttctgggttaatgtttagtgtttgttacagtgtaagatagtaagattttgatctaaaaacgagccagggaactttgaatggtttctattttggtttattttatttaatagagaaatgttaacatttcatacaacagtttgtacaacatttttgtgtctcaaaaaaaaaaaaaaaaaaaaaaaaaaaaaagcggccgctcgaattcggacgcgtgg

SEQ ID NO: 54758 - DNA, 1498 bp, Glycine max
  Clone ID: PAT_MRT3847_20459C.1
tacggctgccaaaaaaacaacaaaaggttacggctgcaaaaaaggtgagggagggattgagtttttcttctgtttttttttttttttttttctgtctatgatgcatttgactgaactctgattcttttttctttttacatcaactcttggcttcttagtgtgtcaccggcacaccaaaatatacttgacaattaagtgaacggagaaactgtgctctgcattttacttccattttcctccgctagttaccagcaccggtcgccgaatccgaaaagtgacttcaatcctttccactaagggtgtgttttgacttcagagcaaacctaaagtggaaaaggggatttttattttttttttctttttcattttggccattcagttctctctggggacatttttgttctctctgcaactatggaaaagctacctttaactgaatatccattccctaagctctctttagatgagattctggaattggaaagaatatacaaagatgtggtaggaaaagtgttcaatcggaagttgtgccaggagattgctaaacgttttagttcctcatcaaatggtgctggtaaaaattccttatcatggcaacaggtgcagctgtggttcagaaatagtcagagaatgttactgggtgaagatatctcatcttctgacctgctgaaaatatctgctgatcttgcagattcacctcttttaggcaatggaaaaggtaaacaagctacagatctcgatgatatgggatttgaagcacgatctacaaaagacaatgcatggcatgatgtttcaatgttccttaactacagagttctgagtacgggcgaacttgaagtccgcgtacgatatgctggatttgggaaagagcaggatgagtggatgaatgtgaaattgggggtacgggagagatctattccattagaaccttcagagtgtcacaaggtgaaggatggagatcttgtactatgtttcctggaaaaagaagattatgccctctattgtgatgctcgaattgtaaaaatccagaggaagatacacgatccaacagactgtacgtgcaccttcattgttcaattcgtccatgacaacactgaggaaggagtttcttttagcaggatatgctgtaggcctacacaagaggaatctgcttgcttcccagatcttgcccttgatcccacccaaagtccctccctaaatttccccctaaataccatagagtccttgtggggataaaaagagccaagttttttggtattcccctttcatacttttggttaacgttttgtgtttgttacaatgtaagatagtaaggttttgatctaaaaacgagccagggaactttgaatggtttctttattttggtttattttatttatagagaaatattaacatttcatatagagaaatgttaacatttcatacaacagtttgtacaacatttttgtgtctcaaaaaaaaaaaaaaaaaaaaaaaaaaaaaagcggccgctcgaatt

SEQ ID NO: 54759 - DNA, 800 bp, Glycine max
  unsure (1)..(800): unsure at all n locations
  Clone ID: PAT_MRT3847_2045C.1
cgatnntannntagatgctacaaatacagaacatctaaggggggtgagaccaacttaggagtgcatccacatacagattctggcttcctaactatattgaatcagaagttaaatggcttagaaattcaattgaaagatggagagtggttcaaggttgatgcctcacccaacatgtttgctgtcttggctggtgatgcattcatggtatggagtaatgacagaatacggggttgtgtacaccaagtattcatgaattcaaaggtagacagatactgtttggggctactttcatatgctggtaaggtgatggaaccagaggaagaattagtggatgaggaacatcctcttcgttataaaccatttgaccattatggatatcttcgtttcttcctcacagaagaagctgtaaaatctgcttctaggatcaaggcatactgcggtatttgaggtgtacaaaatatgtttgatatgaaaaaagtctttgtgtggtttctatgatgatgaatatatcagaagttgaatgtgtgtgttggtatgttgtgctatgtttgtggaataaaatctaaatttctacagcttctagttatgtatatgaaagaagtttgtggttatgtagtatatgttgtgatagtacttaaatgaataaaaatttacccatggaaatggaatatttctctttagtttttgtgttcatccctagtcaattgccacaggcaactgaggcaagaatgaaaagcaccatttgttgtgacttggatgggagcattctcttgtactttgtgtgtttnntnngnnnancc

SEQ ID NO: 54760 - DNA, 341 bp, Glycine max
  Clone ID: PAT_MRT3847_20460C.1
gaactaacagctgccacaagaaatttccgtaaagacagtgtgttaggaggagaaggtgattttggatcagttttcaagggctggattgataaccactcactggctgctgcaaaacctggcacgggcgttgttgttgctgtgaaaagacttagtttggatagcttccaaggtcacaaggatcggttggtgagtttaatattcttctttaacccctttgatttgctcctgctaattaagaatcaaacactgcctctgttacatgtttaatttttaactgcgtttgagaatttttaccatataggcaaggcacggtatgactcatgaagcaagtcttgaggtgc

SEQ ID NO: 54761 - DNA, 642 bp, Glycine max
  Clone ID: PAT_MRT3847_20461C.1
tttttttttttttttttttttttttttttttgtgtatgaattgaatccatttgcactaattaaaattgtaaatgctttgatcgttatcaaacaaggcctataaaaccaagattaaggacattttatagctgctaatatttcgtaggaggtaaattagggttcaccaatgaaccttctcctccttcagtgagtctttctcctatgctgcacctgtttctgggtggctaatctataaatccaatatatcatagctaggacatgagctgctattagaagaaccactaacaaaggcactgcatcctggatccacggtcgcgtcggcgtgtgttgttcgcgcgccattccacactgaaattccaaaacgcaaagaagcgaaacagtgaggattgcaccaaatagtgtttaccctttcccttcttttccaacataaccccaaatgaacccctcagaactacaatgatatactaataactagggatttgatgttacatatatgccggatattataattttaattcatcaatttcaaaattatttatgttttcaacggatttaatttagttaattaaataaaattaagtgagttattataaatcttttttaatgttattttttatttttataaataaataaaaaattaca

SEQ ID NO: 54762 - DNA, 348 bp, Glycine max
  Clone ID: PAT_MRT3847_20462C.1
gcgcgtgggtacacctcctgttgacgctactactaattggatgtggcacattgccaacgcccatgtgtgctccaatgatgctggggggcaccacctcggtaaccattgtatacatacacatgccgacttgcaaccatttatatgtggggcatcatatgcaaataagggctatgcatgcaatatttacgttgagggaccggccacatgatgcacacctgtgggatcaatgccttgcctagacagactttgatcagttgctgtggaagcagtgaaaaatgctgtactactggtgactgtggcatggagaatactattgcttgctacactaacctttactgctttgacatg

SEQ ID NO: 54763 - DNA, 385 bp, Glycine max
  Clone ID: PAT_MRT3847_20463C.1
gggaggcataataaagagggatgcaaatacaaattcttgggcaaaaagtacccttaacaaaaaaattttgtttcttaaaacagggacttcttttttttctgtaaaacaagccggttttttttttgaaaagaaacaaaaccccgcaaattgcttgacgggtttaatttccatttttttaaaagttgcgttttgaaatttttcctgttgacacttaccgtaaacaagttttgaaagtaagtgaaacctccaaagttgaatgaaaacaatgcgatttattcctgccattgtaatcttttgcccaaggtttttcttttgttggggagtttttttttttattagcaattttgaacaggtttttttaaaattggaaatccccattggggcc

SEQ ID NO: 54764 - DNA, 436 bp, Glycine max
  Clone ID: PAT_MRT3847_20464C.1
gccataaaacaaactcaacatttcatcattcacggggggtgcgggaagttcaaaatatccatatataaaacccgcacatcgaatctattattattacattcatccattatattcggaaatcttcaagcataatacacgactatgcaaatgacactataagtctacaagaaatgttcagaagcctaacagcatattgccagcgacctgcaacctaatattgcacgccttggtgacaatttattagatcttgttctagaaccaggtggcgatcttaatgacttccactgaccacgatcagcatttagacttgtacatagagttctgacgatacccatagccttgattctgttcaatatccaaggtcataagcaggagaataagacctacgcttttgttcaccattcatatccctggggaggaccttttggtgatccgg

SEQ ID NO: 54765 - DNA, 158 bp, Glycine max
  Clone ID: PAT_MRT3847_20465C.1
gggaaggggggaaataatcaatttaaacaggactccctttaagaaaacaaataaaagttctcgggcatgtttacccccataaacccttccctcccaaaaaaaataaagttcctaacaaaactgataatctggtgggggatagttaaaaactttatttt

SEQ ID NO: 54766 - DNA, 145 bp, Glycine max
  Clone ID: PAT_MRT3847_20466C.1
cccgaagcccctgaaggcttacagagcaatctgcgctgcagccttcgactagaccacagatgcaccaccagatactcaggctgaacctttcggagtcaccgcaccagaactcgacctaaacagcccttccccgatcttagggggc

SEQ ID NO: 54767 - DNA, 243 bp, Glycine max
  unsure (1)..(243): unsure at all n locations
  Clone ID: PAT_MRT3847_20467C.1
nnnattcctaaattgtctaaaatttcgaaattctaatttcgttaggggnaanagattgtttntgtntgancgagtatggctggaaaangcgagggtcctgctatcggaatagatttgggaacgnctactcttgcgtcggcgtntggcaacacgatcgtgttgaaatcatagccannngatcagggtaacanactaccnatcntangtggntttcaccgatacaaancgnntnnncgncnatnc

SEQ ID NO: 54768 - DNA, 444 bp, Glycine max
  Clone ID: PAT_MRT3847_20468C.1
tcggttttttttttaatagttccagttggtgtttttctaattttgggttcataagtttggtcgggtacttttaattccggtgagggtgtgttttttaaattttagttctttaagattctaatttttttatttattaaatttgcacttgtagggcccaaatttaaaaaatgcgaacttaccagatttaaaattagccaaatatcttacaggacccaacttggaaaaccacaaatttgcccggacttaaattagaaaaaagtgcttacttggcccaaaaccttttttagcttttaagaaaattgttattccttgtaccggtttattattggtcaaaccttgtttaatttggcaattaaaaaggtggtatttttttaattttgggttccgaaggtttttttggttaactttaagttccggtaaggtggggtttttttttttaggtcc

SEQ ID NO: 54769 - DNA, 598 bp, Glycine max
  Clone ID: PAT_MRT3847_20469C.1
aaaaaaaatgtcatccattgttgcatgggctaataatattacatggatcatgacgtgagttaattttttcacatcatacatttgagagatattaataaattaaactccgaaatactaaaattgaactttttatatgtttacaaagataaaaaatatatattttattatattaatcttgggcataacacctaataatattattaatatatttaacatggcattcatcattgctattttattatgtaaattaaggataacactagatttagaaagggtttacaatcatcacaaaagttaaaaaaaaatattagtaaggtaaaaccaggtgcatatattatcccattaattttgattaatgacattgagaaacaaaaagaaaattgttgggagtgtgtgggtgttgaaacggataagggactaaaagactaggggaaagataaatttatagactttaaggtggaggaaggttttgtacgtccccttgaatccttaattttattttcttatcttatctcattaagaaaaaaaccattttagatgcaaatattccagaataattcataaattaatagttaactgttgcgaattgcccttttgc

SEQ ID NO: 54770 - DNA, 222 bp, Glycine max
  Clone ID: PAT_MRT3847_2046C.1
gcctggtgtgtgggagtacctgatattgaatgtgcacgctcttgtttttgaggagttgcaacctgctgagtgccttcacttcaaggaagaactctttgatggaagttctaatggcaactttgtgcttgagttggactttgaaccattcaatgcagcctttcctcgcccaactcttaacaagtcaattggaaatggtgtgcagtttcttaaccgtcacctttt

SEQ ID NO: 54771 - DNA, 340 bp, Glycine max
  Clone ID: PAT_MRT3847_20470C.1
tatgctactttttctgcattcgctctctcactccttcatctacgtttcttaaatcatttcctcctttctgtcttacaggatctgctcatagccatcactacagtctatgatcacctgaaaggtctcatcttattaaccatagattaacgattagaggaatacactacaagcagtcatattacttacatatataacaaggcgaggggaacttgatccgcttggttgctctcatacagaaaaagccagaaaggtgcgggagcttgggctatctagaaggttgaaccacccaggggatgcatggagtgggctctaccgatacagcgatgactaaatggctcat

SEQ ID NO: 54772 - DNA, 256 bp, Glycine max
  Clone ID: PAT_MRT3847_20471C.1
gaagactacttaagggattttaagatcggaccatggtcactgagtcctcagagtacatatcttaggaatctgaaaattcattccatcataatacccctgtccatcgtacaatagcaaacgaaattaatgctcggatcttaataaacctagcaacaattaaccttcctaacatatatcaacagagcctaccattatatcacttttcttaccttcaaaatatttcttacaactcatatttgttactttgaatatcaaa

SEQ ID NO: 54773 - DNA, 276 bp, Glycine max
  Clone ID: PAT_MRT3847_20472C.1
tccaacttcactttggtggcagttgaacgagtttgcaaccccacacacagtaaccatcacccttaaaaatgtcatccccctcgccggtggctacggtggtccccgccgccgcgctgtacgagtgcgccacaggggtggaagaatgctacgacaccaaggtcggagtcaacggtttgatcgattcgggaatcagtaccatcccgcctttcttcgtccacccgagggaaaccttagcggacctcaagcgcggaacctatccctggtctccgccggaca

SEQ ID NO: 54774 - DNA, 269 bp, Glycine max
  Clone ID: PAT_MRT3847_20473C.1
gaaggtgcaggagttggtggtaagctttaagggagttaatcgtaaggggattttgaagtggttggtttccttggtggctgcagtagttttggaagcatggccatgccatggcccaggttaccaaaggttccttctccgaatgaaacctgcttatggtgagcgttcttcggaggtaaaatgcgcaagtttaaggctggctgtggaagcacacaacatccgagcttttaaaaccatccctgaagagtgcgttgacccaacaggggtctact

SEQ ID NO: 54775 - DNA, 457 bp, Glycine max
  Clone ID: PAT_MRT3847_20474C.1
taaattccttcaacactaaatcaagccatatatattaacaagtagcaaaagaccttgctatatacttagcttcacatgttgagagtgccaccaccggttgcttcttagaacaccatgaaattggtgcctctaagaactttaatatgtaacctgaagtgttattcttgtttgacttaccacacgaatcaaagtcagaataaacaatcaattcattcccttgctgcaatagcttgctaggaaataacacaccatactcgagtatgcctttgatgtacgtcaaaactgtcttgggctgccaccaaatgactttgcctcagacatgtatccactaaccaacctaatagagaatgcaatgtttggtctactattgcataagtaccttagatagccaattaattgcttaaacaaaattagatcaacctcttcatcatcatcacttgcagcatctagcttcaat

SEQ ID NO: 54776 - DNA, 432 bp, Glycine max
  Clone ID: PAT_MRT3847_20475C.1
cggacgcgtgggcttttttgtgcacaacaatcaaacaaacaaacctaccacctgttcttctgtgtatttctatgctgtgtcaatttctcgtgccagttgagactcttgacaattacaactaccttggacattacctttgcttctgttctgtatttccatcatcgtcttcttcttccttacattctatcataataataataaactcattctacgcactcttgcattgcctccacctcgttttcctcactacgtctattatataaacctgataatggctgctgaagtatattaccaggctattggcactttgcagtcccattcttatctgaataatttaaataatcaccaaaaacatcaaaacaatttagtaagattggtggctagggattttatcagcagtaatggcttgtcaacgagaagaagtaaccgctc

SEQ ID NO: 54777 - DNA, 428 bp, Glycine max
  Clone ID: PAT_MRT3847_20476C.1
ggggtattcttttactttttttttttttctttttattttttttgtctttttgtcgtatctttcgggagcacggccgcactttttataacaggcacaaagaaaaaaacacctacgggaagctcttcacgagactaggggtcacacagtccctccttcaaaagggggataaccgccccccaaattaagcgccacaaaatacatcttaataggggggggccagcgccattattatatggcaaaacgaaccccctgggggtatgccagggcttgaagaaaatgaaaggcccggtttacaccttcggggcctgagacgaaagagcccacttggcccacattgatcccaacgggggtgttgccctgcctaaacacttcccagctcgctgccgttgggttcaaaacgacccagggaggggagggctcaagaggaa

SEQ ID NO: 54778 - DNA, 1659 bp, Glycine max
  Clone ID: PAT_MRT3847_20477C.1
atggcattggctccaccctctgtttttgctctgtatattgttattgacctgaagattgagatctatatgactatatccgccatgtgcggaatcctcgcagtgttgggttgcgtcgacaactctcagaccaagcgcgctcgcatcatcgaattgtctcgcaggttgcggcatagaggtcctgattggagtggcatacattgctatgaggattgttaccttgctcatcaacgccttgctattgttgaccctacttcgggggatcaacctttgtacaacgaagacaaaactgttattgtcacttatgaagaacatggagaagaatttgttaatatgctggatgggatgtttgcctttattcttcttgatactagggataaaagttttattgctgctcgtgatgctattggcattacccctctatacttgggctggggtcatgatggatcaacatggtttgcatctgaaatgaaagctctgagtgatgattgtgagagattcatatcttttcctccagggcatatctattccagcaaacagggaggattaagaaggtggtacaatccaccatggttttcagaggatattccatcaactccctatgatccaacccttttgcgtgagaccttcgagagggctgtagttaagagaatgatgactgatgtaccttttggagttcttttgtctggaggattggactcatcacttgttgctgcagtggtcaatcgttatttggctgaatctgaatctgctcgtcaatggggatcacagttacatactttctgcattggtttaaagggctctcctgacttgaaagctgcaaaagaggtagcagattaccttggtactcgtcaccatgaactttatttcacggttcaggaaggtatagatgcacttgaagaagtcatttaccatattgaaacatatgatgtaacgactatcagagcaagtactgcaatgtttcttatgtccagaaaaattaaagccttgggagtgaaaatggtactttctggagaaggttcagatgaaatatttggagtttttatggctttgatgatttggcagattaaagctcttcatctttatgactgcctgagagccaataaatcaactgcagcatggggtgtagaggcacgtgtaccattcttggataaagaatttatcaacgtagccatgagtatagatccggaatggaaaatgataaggcctgatcttggaaggatagagaagtgggtattacgcaatgcatttgatgacgataagaatccatatttaccaaagcacatattgtacaggcagaaggaacaattcagtgatggggttggttacagctggattgatggcttgaaggatcacgcaaacaaacaagtcacagatgcgacgatgatggctgccaattttatttaccctgaaaacactcctaccacaaaagaaggatacctctacaggacaatttttgagaagttctttccaaagaatgcagcaaaggcaacagtgccaggaggtcctagtgtggcatgcagtactgcaaaagctgtggaatgggatgcagcatggtcaaaaaatcttgatccttctggtcgtgccgcacttggtattcatgatgctgcatatgatgcagtggataccaaaattgacgagcccaaaaatggaaccctttaa

SEQ ID NO: 54779 - DNA, 688 bp, Glycine max
  Clone ID: PAT_MRT3847_20478C.1
gagtatagatccgaagtggaaaatgataaggcctgatctgggaaggatagagaagtgggtgttacgcaatgcatttgatgatgataagaatccatatttaccgaagcacatattgtacaggcagaaggaacagttcagtgatggggttggttacagctggattgatggcttgaaggatcacgctaacaaacaagtcacagatgcaacgatgatggctgccaattttatttaccctgaaaacactcctactacaaaagaaggatacctctacaggacaatttttgagaagttctttccaaagaattcagcaaaggcaacagtgcctggaggtcctagtgtggcatgcagtactgcaaaagctgtggaatgggatgcatcatggtccaaaaatcttgatccttctggtcgtgcagcgcttggtgttcatgcagctgcatatgatggtgcagtggatacaaccaaaaatggacccctttaagggcccataatacattgtcaagaaaaaaaaagaatgtgtgcaacaaactgtcaagtggggatttaaatttcaagtagatgaaactaatgaaaagtggagttgtttttatttacaggttaaaataatatgtaggtcttgaactgtttggattattttaaataaatatctatatttaaaattttgttaaaaaaaaaaaaaatattattaaat

SEQ ID NO: 54780 - DNA, 2183 bp, Glycine max
  Clone ID: PAT_MRT3847_20479C.1
tacggctgcctcttcacctctgtggcggcctgagagccaataaatccaccgtaccacccgctctgcgggcaaccctcgcactcttggactaacaagtcatcaatctagccatgcgtgtagatccggaggggaaatcgctaaggcctgagcctatggcattggctccaccctctgtttttgctctgtatattgttattgacctgaagattgagatctatatgactatacattttttatttgcagccgccatgtgcggaatcctcgcagtgttgggttgcgtcgacaactctcagaccaagcgcgctcgcatcatcgaattgtctcgcaggttgcggcatagaggtcctgattggagtggcatacattgctatgaggattgttaccttgctcatcaacgccttgctattgttgaccctacttcgggggatcaacctttgtacaacgaagacaaaactgttattgtcactgtaaatggggagatatacaatcacaagcaattgaggcagaaactgagttcccatcaatttcgaactggtagtgattgtgaagtgattgcccatctttatgaagaacatggagaagaatttgttaatatgctggatgggatgtttgcctttattcttcttgatactagggataaaagttttattgctgctcgtgatgctattggcattacccctctatacttgggctggggtcatgatggatcaacatggtttgcatctgaaatgaaagctctgagtgatgattgtgagagattcatatcttttcctccagggcatatctattccagcaaacagggaggattaagaaggtggtacaatccaccatggttttcagaggatattccatcaactccctatgatccaacccttttgcgtgagaccttcgagagggctgtagttaagagaatgatgactgatgtaccttttggagttcttttgtctggaggattggactcatcacttgttgctgcagtggtcaatcgttatttggctgaatctgaatctgctcgtcaatggggatcacagttacatactttctgcattggtttaaagggctctcctgacttgaaagctgcaaaagaggtagcagattaccttggtactcgtcaccatgaactttatttcacggttcaggaaggtatagatgcacttgaagaagtcatttaccatattgaaacatatgatgtaacgactatcagagcaagtactgcaatgtttcttatgtccagaaaaattaaagccttgggagtgaaaatggtactttctggagaaggttcagatgaaatatttggaggttacctgtattttcacaaggcacctaacaagaaagagtttcatgaagaaacatgtcgaaaaattaaagctcttcatctttatgactgcctgagagccaataaatcaactgcagcatggggtgtagaggcacgtgtaccattcttggataaagaatttatcaacgtagccatgagtatagatccggaatggaaaatgataaggcctgatcttggaaggatagagaagtgggtattacgcaatgcatttgatgacgataagaatccatatttaccaaagcacatattgtacaggcagaaggaacaattcagtgatggggttggttacagctggattgatggcttgaaggatcacgcaaacaaacaagtcacagatgcgacgatgatggctgccaattttatttaccctgaaaacactcctaccacaaaagaaggatacctctacaggacaatttttgagaagttctttccaaagaatgcagcaaaggcaacagtgccaggaggtcctagtgtggcatgcagtactgcaaaagctgtggaatgggatgcagcatggtcaaaaaatcttgatccttctggtcgtgccgcacttggtattcatgatgctgcatatgatgcagtggataccaaaattgacgagcccaaaaatggaaccctttaaggcccataatcgattgtcaagagaaaaaaatgtatgcaacaactgtctagtggggatttaaacttcaagtagacaaaactaatgagaagtgggattgtttttattttcaggtcaaattaatatgtaggttttgaactgtttgtgggttattttaaataaattatatttaaattttgtaattaagtcattaaatttttaaatcattagttggaccttttgatcccc

SEQ ID NO: 54781 - DNA, 363 bp, Glycine max
  Clone ID: PAT_MRT3847_2047C.1
cacacaaaaacaaaatcccctactttatctctgaaagctctttattctggagatgactatccactgcaccgacattgcaaacaacaggcgagtcgtgtataatcttactaaggcgcttatccccctatcagacccctggacggcgagctacttctgtcaatggacacgcgcgaagcgcatacctaccgttcaccataacatatatatcttatatagaatatgtgtacctcttactactgatcataactggatcttgcaactcatgtggttttctcttcatagcaacaggctttgcggggcattgacttcattcgccaacctgtacatgctcgacaagaggtgcttgtcgggaataactacacc

SEQ ID NO: 54782 - DNA, 262 bp, Glycine max
  Clone ID: PAT_MRT3847_20480C.1
agctaaaaaaagaaaagctgtttttttttgtatcctaacaagaatctccgaatgcatagtatggtcttagggtataatctatgaacacacacccttcggcagatcggaaaatgtttaacagtgaaaaaaaataacttaaaacatgtgggccttagcgtgcgagaactacatatgggaggagcttaaggttcccgactaaaacagcggtggaaaaatatgaaggagagatactattgggaggcgagaatgttacccgggaaat

SEQ ID NO: 54783 - DNA, 1269 bp, Glycine max
  Clone ID: PAT_MRT3847_20481C.1
agcaggtagaagatgatgatgactcttgggaggtcagagcttttgcagaagacacaaggaacatcatgggcaccacatggcctcctaggtcctacacctgcaccttctgcagaagggagtttcgctccgcccaagccctcggcggccacatgaacgtccaccgccgcgaccgcgctcgcctccaccaagctccagtaccctcctcctcctccaaccccatgacctcttctcttcccacttcacccttcatcaatatccctcctcaagaccttgttgcaaatgctggcttgtgcctcctctaccacttgcccaaaagccctagtagtactgcaccacccttcccaccttcccccactactccttctccttccactcttctctctatctcttcttatcctacaaccaactttctgatgcaaacttcctttaattttcccggtgcacccgcaactgggatcaatactactactactactactgtttcctctttgtgctataactctagcaaagtggaacaatccgcaacttcctcctctattgatcataatggccacctcgaagagcttgatctagagctccgcctaggccacaaaccaacaccaacctcataaagcttgcctgaggagctcatcagaaatatatcaaatatatattatatagtgtgaaccatatatatatatatatatatatatatatagtactgctggtagtagcttctgagaaaaattaaagtccgacaatattattgttttgctctctttttaactgcagcgatgtgtggaagacaggaagagatatggagagtgttgttatttgtagatgtttgttataccattaccatgtccaccttttggtatagctgataggcttgtgggttttgttttgggtttaattttgttatttttcttggtggattgatttttatctgtgtgaatgttttgtgactgaaggtgcacatggagatggagggaggagcaagcagggggtggggataggaaagaaggagagaggtaccacatgtaaatttttcaaacaaaaagaaaaatcaattgtaagttggtattaatttttggagaaatatattatcagtaattatggggggagattagggtttggatttagacactgaaaaaggttgcagtgaagtgtcattttctattttagagttgtctaagtacatacatgtctgtctgggcatacatttccgtggggattattttcctcccttcactaagtaaacctagtaatatattattatcttcaccgttc

SEQ ID NO: 54784 - DNA, 194 bp, Glycine max
  Clone ID: PAT_MRT3847_20482C.1
caacgagggctgtccacaccactaggcactatttctgccgcgcggatgctcttaatacttgttatgtctctctgcattcatcgccctcggcctcgtgggcaacctcttccgtgcctgtctctgcactactatgtgcgccttgctcccaactgtgtggtcaccgccggagggtttggtatttcacatttgaccgc

SEQ ID NO: 54785 - DNA, 336 bp, Glycine max
  Clone ID: PAT_MRT3847_20483C.1
ctcgagccgctcgaaattaatcgaaaactcaaactccgattccgcgtcgaaatcgctcgattcgccggcgatccgattaccgggaaccgaggatcggatcgtgttgtacttcactagcttgcgtggaattcgaagaacctacgaagattgctacgcggtgcggatgatatttcggggatttagggtttgggttgacgagcgcgacatttcgatggacgcgaattaccgtaaggagttgatgagcgcgttgtttggagagaataacaataacaacatcaagaagggacacgtggcgcttccgcagatttttataagggggcggcacgtggggggtgc

SEQ ID NO: 54786 - DNA, 230 bp, Glycine max
  Clone ID: PAT_MRT3847_20484C.1
gaattatttggacgctcaatattctggtgtgattggaattggcacacccacacagccggtcatttgtgtgagagacgcgtgtagttccaaccttggggtaccatcatcaaagtgctactatactcttgcttgctatacccatagtggtgacacggctaaccattcattatcgcatgatgcaaacgggtactcatatataattttctatcgaactggatcaggatatggat

SEQ ID NO: 54787 - DNA, 334 bp, Glycine max
  Clone ID: PAT_MRT3847_20485C.1
ctaatactggacaaatggaggcaaacaaacctgagaggtagaaaattactgagcctaagactccatatcatccgatgattgatgacgacagacaactatcccatgtacgaagaagttttgatgcatatattgatgatcaacatcacacgatgcatgctgaagccatatggagtgctgtgaatgatgtagacttcagtagcagaagaagcactggacaatctggtggttgaacatcatctgaagatgtatcagaaacattggagcatgatgacgatgataggaacttgagttataaagagcacagaaaggcccactatgatgaatttcttaaagt

SEQ ID NO: 54788 - DNA, 377 bp, Glycine max
  Clone ID: PAT_MRT3847_20486C.1
aactccggaggttattagggggggcgccaaagggcttagaccgtttcatttataagctgacacgacggcccaaagaatggtaggaccccaacaacgactcaaaacttataatgctccctcccacccattgaacaagtatgtccccgttggtgtcaaatgccaatacagtgcaatagttgcagtcaatacggccaaagtccacggtaatacaaaaagaaaaattcattgatactaaaaatggtgcaattgtgcactctgactagaaacaaaggaatgattttgcccaaagaataaggtgtgaaagccaaaaaagaaacatcaatgagtggtaactttgaacctttttttggcctcactgcaaagcacaaccccgatga

SEQ ID NO: 54789 - DNA, 165 bp, Glycine max
  Clone ID: PAT_MRT3847_20487C.1
tacggctgcgagaagacgacagaggggatatgactttactctattcatattgttcatagttatgataggtttggtattttccttttcattgatctaacccaactgtttataaaggcctcctctttcccaaattattctcttgagattctctcccaagaaatttat

SEQ ID NO: 54790 - DNA, 199 bp, Glycine max
  Clone ID: PAT_MRT3847_20488C.1
gcgaacatagtcaaacttcaataagtttttcttcagtcctcagtagtccaaagatgatgaccatggcctatagaataacggacataatctactctagaatcaacgcgcagctaaactttatttctagtacactatgcacagtcaacacattaagaaccaatttgcagctgaagctcagtcaaccattgggtgggtcact

SEQ ID NO: 54791 - DNA, 212 bp, Glycine max
  Clone ID: PAT_MRT3847_20489C.1
ataaccgatgagaggagtggtatgcgtgagatcgacccactgtccgatatcttcgctcgagaatggtaatggaaagggttcatcaggaacatattagaggtcacctgagatcataatcttcgagcttgatcctatggggttacggatgataatgaggagggttcgaaattcgggaaggagaagaagaggtgatttctgattggggaaatctc

SEQ ID NO: 54792 - DNA, 381 bp, Glycine max
  Clone ID: PAT_MRT3847_2048C.1
gggaaaaaaaaagagaaagggcccccccaaaatgggggcgggacaaaagggccaaaatttaaggggaatttaaaacgcgggggagcattagggggattccatctaaaagggaggaaaaacccccccagaggggccaaaagggatattgggggggtaaaaaaaaaacccccaaaaaaatttgggggatataggggcccccctaaaagaaaaaaagaaaagaaatcttaggaagggggggaaagttaattaagcccccttccccccacaagagcggtggaaaagaaaccctgggggcccctttaaaggaattttaaccaaaaaaaaggcgcagagaaaaagggggagagggggaaggtccccggggaaaagaagggggggaaa

SEQ ID NO: 54793 - DNA, 244 bp, Glycine max
  Clone ID: PAT_MRT3847_20490C.1
ctcgtcactcttcagatctctctcacttccttacatcccatccacaacgatgatgagaagccataaaccatggtgaatattcgctgtattagagctggctatgttggtggcacaagcatagctgtacattgacttgaagtgtcctgcgatcgaagtgatcgctctggacattgctgcaccacgaatcagcacgtggattcagcaaccacctcccgatatatgagcctggactaggtcgtgtagt

SEQ ID NO: 54794 - DNA, 171 bp, Glycine max
  Clone ID: PAT_MRT3847_20491C.1
ctccgaagaatggcgaccatgactgatgttagccagctattccccatggttttattgagcggatcaagctaaccgcggatcgcgcgtgcggtaaaaaagtaaatttcgcccacacatgccatgcaaccggatggaatggcattgggtctaatgatgataagcccaaacgtt

SEQ ID NO: 54795 - DNA, 501 bp, Glycine max
  Clone ID: PAT_MRT3847_20492C.1
gactgcgtatatactgaagattattcaaagcaacggatctcggggatgaagagatgttctctttacattgtcacatcctcatataatctttgggcaactactgtatggcagctggaggagaacgggctcataacccaccatgatgataggcatgactctgacatacgtatgattatcgaaactagcgttctatacgatatgttggattacacattgagctaatgggagtacaaggtatattaaaatatgggacgggttgggctttgggaactaggagcttcctcagccttcttatgcgtttgtgtggtgccaacactggatgtctcttcataaacagtgcgaatagctctattaggctgactttatctagctcctgatgaacatactaaatacgagctagtgccgggactcactgagaagagtcatgtcatcaagccgtgtgatatcccacaccggaggcttaaccaagcgctccgcgtgatgtgttgatcaaagaagacc

SEQ ID NO: 54796 - DNA, 300 bp, Glycine max
  Clone ID: PAT_MRT3847_20493C.1
attatttctctcctttttattcctacattctattccttatcattcaacttttatgggctggggccttttgcacatgcaaggtgaatctcaatttcgtgaatataattttaatctaattgtggaaaaatgaatgctgaatgtgcattgctataagattacaagacaagattggttttttttttgcgcttaattttaattgagcaagagtatattttttgctttacaataatgtggcttgagtgccaaaaccttgttatgggcatatcctcgatttttcttgttatatcttcatttcttttg

SEQ ID NO: 54797 - DNA, 448 bp, Glycine max
  Clone ID: PAT_MRT3847_20494C.1
gtgtgttgttttttttttttttttttttttttttttttttttttttttttttttttttttttttttttaaaacgaaaagccttttggggtggtttaaaaagttcctttggccaacggggctccttttccccctaacaaaaccatattcctctttggggggggggccttactaaagcctttggttttaaagcaaaggcccttggcatggggggaacaggggggggcactttttaataagcggttttttaagccttgaaataattcttgtggggtaaaataacccaagcttaatcttggggggttaaattttcgggaacagtcccggctacgggtgctgctggggcggcggcccccaaaacggccttcttccccttcccctttccctttttcttctttttctccggggaagaagggggggaaacaggctccttttcaccctccttttccg

SEQ ID NO: 54798 - DNA, 345 bp, Glycine max
  Clone ID: PAT_MRT3847_20495C.1
attagattgatgctgctctcttatatatgggcgtataaaccataacttcttaccctgtgacgctgtctcccatacatcatggctgggcgatagcccaagatcggaccttagacatcacataccaaacttgctgtgcacaaggatggcgccaccacctagactcagtttccggccaggacagggactgcttgagaatattgtcacacgcaagcgacgcttccgagtgcacaattcgtgttcatggaggaactcatgaatgtgagcaaccaggaacattccacaacaaagcacctattgctgtggtcaaagctgatgagacatgataggaagacgatgcctgatgct

SEQ ID NO: 54799 - DNA, 338 bp, Glycine max
  Clone ID: PAT_MRT3847_20496C.1
cagcgacagcggctccaccagatcggtgtgacgcatgaagatctcgcgcacctgccgcgacaccgccttgtaacgcgtgacatataaaaatttgcattaatctctaaaactccgaacctataaaaaaaaaaaaaaaaaaaaaaaaaaaaaaaaaaaaaaaaaaaaaaaaaaaaaaaaaaaaaaaaaaaaaaaaaaaaaaaaaaaaaataaaaaaaaaaaaaaaaaataaaaaaaaaggggggggccccccctttgggagttcttctccccgggaataaatttgggcccggtccctgggggggtcccactttttcttattggggggtgtattaaagctt

SEQ ID NO: 54800 - DNA, 416 bp, Glycine max
  unsure (1)..(416): unsure at all n locations
  Clone ID: PAT_MRT3847_20497C.1
ggctcgagtctagatcgcgaccggccgccctttttttttttttttgagtaaaaatgggaaagggagcgctgagactctgaaggaaatccttattatgcagtatctcacccccgatgaatgcaacattcangtttaaatgcatccaatcctatttaagtatcatgcaaatcactgcttgagactcactgagagagtgtcttaatacaaccaatactgcatgctaagaccgattctacaaatgccaggtgatctgtaaatctagatgcacgatctaccgacgctcttcgacagccatattattatacgataatttttctttaactttctaaccagccaccaatgcattaagtgacccgccatgcttaacaaactattcgccctttgcgacaccgaagacgacgacattaccttaaagt

SEQ ID NO: 54801 - DNA, 201 bp, Glycine max
  Clone ID: PAT_MRT3847_20498C.1
ttttctcacgttttttttttgaaaaggctgcaccaaataaacggtggggaatttatattttgaaggggtctaacactactcttacatatacgaaagcataaattaacaactcactcatcaacacacaatttcaaggccccaaccgcaaaaaaaacgttgtctgcttttggacatttttacataaagcttcactttcaattt

SEQ ID NO: 54802 - DNA, 552 bp, Glycine max
  Clone ID: PAT_MRT3847_20499C.1
gcaatgagcatgcatctttacttcccatgtgggatcattataggagctctttccaacttggaaattccttgtgcagtttttgcgtatatatcaaaccttcctgcatgttcatttgtggtccgtataaaagcttgaagagttcatagttgtaatactgatgatggaaggggaagcattaatattgttcaaaacaatgctttgatgtctgtgagctcttttgtcgtaaaatgctcgagtggggaatgtttctttacgagatataaactattatattaaatgttattgactggaatgtgtaggaagggctcctgaggtagtattttgataagtgaggatttggttctttcaggcgcagattctatggagtacgataacatcgaattattggactgtggaaagacggagaattccaatcattgtaatattgttgctcttgtatggaaccttttaaaacatgtaccacttattcgattgccaatttgcaggaggctggctttttttaaaaaaaaataaggctgacttaaacctccacatttaaattatattttcttc

SEQ ID NO: 54803 - DNA, 715 bp, Glycine max
  Clone ID: PAT_MRT3847_2049C.1
agggaagagtgcattcagtgcgtaatgtagccacgcgtccaaatttctaatgtgagaatctttctgagaatgagatgttgctaaatatttcggatgttgtcgacaaggatgaggtaataatagttagagacaggacaaagcaggggaacaggcagagcatggatggagctatcaacacaatattgtcaagaaactgagagtgagaggagaaatatgttgtggttctgctcatgcactgcctcttccctggctctgtctccatttctccttcccttatttattttttgatttattgagtatgatctgttttcaaatgtgttcataggttcaacttattaaggtacgaacatactctgggcattgaaaactggtttgactcttgaacatattccgcaccactaatctttcttgtaatccaggctcacgcacgatcactataaggtcccacattcttagtggcctaatcgttggaaaatgctactttggcactacttgatgaattgtatggctgggatttttttccccttgcttgtagaatcctctcaatttatgtaaccatcgtgtactcatttacatgtcatcaaattttgaatgagatgtgatatacatagaacaatttgtatgacctcattttctgtgtttatttctctccatcaatatcattttctaaatctcaaaattctctcttttttcttagttgtagaagttattgttt

SEQ ID NO: 54804 - DNA, 232 bp, Glycine max
  Clone ID: PAT_MRT3847_204C.1
tgacggtctcttggaccgatccgaaatcccagattacttgaccggagaactccctggatactatggttatgacccatatggtcttaacctgaagacagaagactttgccaaatatcaggcatttgacttgattcatgccacatgggcaatgcttcgtgctgctggaatcatcattcctgaggccttaaacagatatggatcacactgtggtgcataagctgtgcggctaaga

SEQ ID NO: 54805 - DNA, 178 bp, Glycine max
  Clone ID: PAT_MRT3847_20500C.1
gaatttttaattttaatataataggaaacaaacaagggggtgggtggaatatatgatccaggattataaacacaaatatgatatttaataattgtattataaagtcacctataatcaattaaatgaacaaaggtataaaactatgggactgagaaaaacatgaaattatccaaattaa

SEQ ID NO: 54806 - DNA, 685 bp, Glycine max
  Clone ID: PAT_MRT3847_20501C.1
tttttgtatatagacttttaattttttgttacaacagcacaagttacagacatgttggaaatagaccatataaaggttcgcaaaaccaacatataacgcgtacctagcgacaatgcctatcactacccatgcccctaactggacaagcccttggctccgccatttaagtgacaggccaagcatattgctccagtacttacataaaggccttatttatatgatttacactgacgaggctgatgttgtctccacctgtgagaatgctattttctttaccctacacaattgtgtttctgcttgcttatccgtactaatgctcgaactggcgacttgattcccaccccaccctggatgctaagttgatgaaccctcattaagggacaggctttcaattcttcctatatggttcggggagatcgtgctagccacccttgtccataattcctagcccacggtaattcttggtggattctgcaatcgaccggctcaagcgtcacagccaattgcaagctgatcactgagtacttctgcgctcgctataatcgaattgactttagctacgaaaacgacagcacactctatggactgatccatctggccggcaggatctttaaaagattttccacttctaccactaaacaaggggtctccagtcaaaacaaccggctgataatcctcttcggca

SEQ ID NO: 54807 - DNA, 222 bp, Glycine max
  Clone ID: PAT_MRT3847_20502C.1
gggaaacattactctttgctcctgctaacgcggtggggggtgttgcatgctgacacaaaggtatttactggtcacgaacgttatactatggacctccaaagtaccataggcgggatagggcctgaccaaaacaagactgtaacaccaaatcctggaaaactttccacttgcacggttggattggatcctaaggtgaacctcttttcttgaaacaagggggcc

SEQ ID NO: 54808 - DNA, 171 bp, Glycine max
  Clone ID: PAT_MRT3847_20503C.1
ggatcaggcctggagggccgtcgacccactcgtccgctctctgatctggatttatcagcactacgacaacacacacatggggtgggtcttctaattaaaaggtacagtcttctaaaacaaacaaaggctgaccaaccacttcgtattatgcctacctgccccatatcctct

SEQ ID NO: 54809 - DNA, 498 bp, Glycine max
  Clone ID: PAT_MRT3847_20504C.1
gttctcaatcaagttatgagcaagatggcagaaatgataaacagtctttgtggtggtgatgaaaaattgatgcgtgaaaaggacgcacctgctgttggctttgttgttcaaaggatgggcaaatttgtaaagaaaaggatgttttggaggagtttgaaatgtgggaaatcccctttcttggaatttcccgcttcacaggttatttttgcaattaagcaattttttaaatgaggatggctcatttagaatattagcctaatgaaaaaatttacttgcgcccagggcctaaaagcttccaaagtattgttttttaaccaatcccttccaaaaaaatttttggtttcttttggtggtgtggtatcggtggatggataactttaaattaggtgttcaatgaatattgtcaaggccttacttttagtgggttctaaaattgaaaagctttcttagctagtcataacatcaccattacttgatggtattgacaaaactagtgca

SEQ ID NO: 54810 - DNA, 757 bp, Glycine max
  unsure (1)..(757): unsure at all n locations
  Clone ID: PAT_MRT3847_20505C.1
ggaaagcctttgtcccctcccagaagctgcacaacaaaaactccttaaacctctcctaacaccctaactctcaccattccttcttcgtattctccctcctccatttcctcgctccgcgtaagtttgttccttcgagaatggcatcaccagcaattttgagaaggagaagtttaatccatcaatacttgaataactgttttgcttcttctccgtctccgtgtaatcgctctctggaacgcgctatagctacgacgtcatctctgtttccttgtaagcacggaacgaacgccgtacagagatgacttgttcaatcctttcggattgggacaagttgttcgaggattcgggagcgcggttccgtgggacgctttttcgagactgaacgcgccgataggtgtgcggtggttgtcgcagtcgtcggccgcggcggcgaaacgtcatcaaccggataagaacgatgagacggtggcgaagaagcggaaagaagcgtcaccggaggaagtgcgatcaagccgtcgaaggcttgaccactgcgaaggccaaagccatggcgaaacgggcgcaagaagaggcgcagaaagacctgcaaaagcgtgttgcgggagagtgtggaactgcgtttttaggaaatcggtcctgcgttgagagctgttcgcgtctatgagtangggaggactgggcaaaaaaactggttcactgggaaggggaaatttgtgtcgaccttgcagcattattggtttgggttctaagctgctgt

SEQ ID NO: 54811 - DNA, 220 bp, Glycine max
  Clone ID: PAT_MRT3847_20506C.1
taattcgccctcccatttcactctcgcacacctcacatcataccatatactccatcttcctcttgtacgcaacgagggattgccgctggaagatctcacctcctatctctgctaattcgcaagatggccgttcacaaaccctctgtcgactggaactcgtcgtttagattccagggtgggtctctcgacgaagcctacgatgattgaggtccatcgatct

SEQ ID NO: 54812 - DNA, 361 bp, Glycine max
  Clone ID: PAT_MRT3847_20507C.1
ggctgaaaattgcttatatatcatacacttctggatagaggtgaaaccgaaaagcttcgtaacccaatggggcaaccaggactgaggaaaaatgttgaggaaccgttcgaccctaatagcctacgctataccttcacgcaatgctccctcatacttccacactccgctacttgatcaacgactttgaattgaggctatcatacgtggatatatgatatttgccatatcccaacgcctacattaatacaacccatctgatgcacttctcttgcaaaggctggtacacttgattcaagcacatgaactaaccgttcaatcgtctgcatttgaccttaaggagcaatcggtcttaacccatcag

SEQ ID NO: 54813 - DNA, 145 bp, Glycine max
  Clone ID: PAT_MRT3847_20508C.1
tgatgatatgactccacatacatgctgtgagctctggatgtacacatcctcaatgtcacctcagtgtacttgagatgatactaggatgaagtcaagtcactgagctggggagctctgagcgtgcacactcttaatgccatgccaa

SEQ ID NO: 54814 - DNA, 161 bp, Glycine max
  Clone ID: PAT_MRT3847_20509C.1
ttgacaaatatgccttaaaaatgtgggggtgttaggtatgctccaactcattggtacagtaaacaatttgagtgcttctatttgtaaaaatgcaaattgttcattattcttgtttctattcctattccttggctcagtttattaggctcttagctgttact

SEQ ID NO: 54815 - DNA, 458 bp, Glycine max
  Clone ID: PAT_MRT3847_2050C.1
ggggggaaaaatttaaattttagcccccaagaaagggttcctatgggaaaaaaaggccaaaaggttttggggcttaaatccccggaaccaccccccaaatttaattgggggcatgcccaaagcacatgaaattctttttgaaaaaaacccccttccccatgaaaaaaaagaaccccaaaggccttaaaaaaaagtttaaaaaaaaggttttgaagggttgttttcagggccaactgaaaaaaaaattggaggttttgaagggttggtttaaggcccaattgaggaaacaagtgcagtttttgaagggttgttttttgaggaaaaaggggcactttttaaaaggtgggttttaaaaggggggggttaaaccacccaaaaaggaatttttttcccaaatttggaaacgggtgggaaaaatttaatggggtccacaattccttttaatggaaccttttggt

SEQ ID NO: 54816 - DNA, 747 bp, Glycine max
  Clone ID: PAT_MRT3847_20510C.1
ggcaccgcttcatcactatcaccatcccaaaaactgcatgtgcttctgttcgttttccaaatctcctctttgtttctgaatcttcccttcgctgttgcagagatggcttcgcggtgctggccttctgatgctgagctaaatgaattgagagagagagtttcgaaaatagtggatctgaataaagaggaagttcgagttgtggtatctccctatcgaatatgtcctttgggggcacacattgatcatcagggtgggaccgttgcagctatgacaatcaataagggaatacttctggggtttgctccttctggcagtaatcaggttgtaattcgttctggacagtttgagggagaagttaagttcagagttgatgagattcagcagccaaaagataagactttggacaaagattcatcagagctacaggaacaatgtaactgggggcgttatgctagaggagccgtatatgcactacagagtagaggaaacaatctttctaagggtatcattggatacatatgtggttctgaaggtctggacagttcgggtttaagctcttctgctgcagttggtggggcgtgcctcatggctttgctgggtccgaatgatggcgtaatggccccctcagctattttgctttctggccgggggtgtgtgatcggcttgttgggcctgaccaatggctttatgctcctttcccctccattgcttccaggccacggcgggtgggggcgcccgaatgccact

SEQ ID NO: 54817 - DNA, 561 bp, Glycine max
  Clone ID: PAT_MRT3847_20511C.1
ggctcgaggctgggttatggaaaaggaccttactattgtactggatccttctttctcgaaccatgtctcatctttctggatgattcaccggcaaagtaaaaggaaattacgtgtgagcattgaacatgatatgggcgggacaagtgctgccccaaaaacattaagactctttgtcccttactggattgtcgacgatttttctttatctttggcataccgtgtggtggaagtggaacctttggaaaatgtagagatggattctgtcctactctctagggcagttaagtctgccaaaactgccttgaaaaaccccataggctcattggatagaaggcattctaattcaaggagaagcctgcaagtacttgaagtaattgaagacaacagtccatttccgagcatgctttctccacaagattatgctggtcgtagtggagtttcaatgtttcaatctcctaaagatactaggctgggcatttctgcttctatgcagtcttctgatgtttacagctctgggatttctctgcttgaactgaaaaaaaggaacgtattgatgtcaag

SEQ ID NO: 54818 - DNA, 412 bp, Glycine max
  Clone ID: PAT_MRT3847_20512C.1
cggggcggggccgagcccaaattccaggtttactaccccgggatgggaaagaaaaaattttttatagggggccccaaaattaaattaccgggcgggggtttaaaaacgggggaacgggaaaaacccgggggtaccccaaataaaaggcttggggaaaaaacccccttttccaagtgggggaaaaaaaaaaaaggccccccccaatgccccttccaaaaaatggccccccccaaaggggaaaggggacccccccttaacggggcaataaaacccggggggggggggggttccccccaagggaacccttaactttgcaagggcctaaagccccccccttttggtttttttcccttctttttcgcccccgttggcgggttttccccggaaagtttaaaaaggggggcccctttta

SEQ ID NO: 54819 - DNA, 737 bp, Glycine max
  unsure (1)..(737): unsure at all n locations
  Clone ID: PAT_MRT3847_20513C.1
tttttttttttttttttttttttttagcagatcggcaaaaataattatatatatatatatatatgaataaatacaagtaccagaggtactatgtacataagtagaataccatacacatggttccttagtgaaactgctacagtttcattaggaaccataatatggctacataagtagaacaactgctagaaatccaagaaaagctaccccctactaatgcaaaaatccttgtcgaatttgacttgaccattgattaaaataaaaatctaaatatattcatgaattctgtcaactagctaaacacacaaaaaacttgcttctatacacacttatcaaccttctcatcccttttcaaggtttggaggccatcctgtgttacaggtgtcaagcactagatggttcattgcaatagtagatgatcaaacaagagttacttcagtgtatcccataaaaggaaaatccaaagctagatttatatttcagaaatttcactcgacaataaccaagatttttctattgtgaatcatgtctatagacaaaccattgatatctaaatccttcttaagtggttttgcatatngttgagtaattctaaagaggatagttgggaaatttccttatgtaattacagtaattagaatatttgtaattacataaagancatccctaactatcctctttacattaactctaacacaagcaagtttaagaataattgagtcccaaaatgttcctaa

SEQ ID NO: 54820 - DNA, 251 bp, Glycine max
  Clone ID: PAT_MRT3847_20514C.1
ctctcttctgagagaggcccgcagcttattacacatggctgagcaaaccgagaaggcttttttgaaacaaccaaaagtgtttctcagctcgaacaaaactgggaagggaaagagacccggaaagggtgggaaccgcttttgttaatccattgggcttgcatttaagacgggggggggaagccatcttatgttctacattgacaagacgtaccccttgagcgggggaggctcccatccggggggcgcccccc

SEQ ID NO: 54821 - DNA, 449 bp, Glycine max
  Clone ID: PAT_MRT3847_20515C.1
ttccgaactcgattacgatagatatagctattgcacaatctagcggcatacaattaggtcgagcgactgcttgcagcattatcgttctttgccttgaagagggtcagagcacatgctggtgcaatatgtaacattgactcaagtcaactgaacttgtgacctgctgcaataactgtgcaaaaccctccaccacctgatgacaaatgatgtgcaggtattcaccaacccaatttgaggtgactctgcaaatactagtctatcctaccttcgtttgccaattagccccaaagatgttttggccttgcctgctaaatgtgctctactattgcctcctaatttttgagtgcatgcaagcagataacgaccttccagatcattacaagccccttaaatagaatgcatgcaattgcttctccgggccttactaacactgaagatagaccctaaga

SEQ ID NO: 54822 - DNA, 395 bp, Glycine max
  unsure (1)..(395): unsure at all n locations
  Clone ID: PAT_MRT3847_20516C.1
acacattaaaacacttctcttactttctctctcttcgtcgtcgatatcacgcgccgccgcacatggccgaatcgcacagcagaacccgcccgtcgggccggaagcccagccgccttcagagccgcgccccgtcgtcactccagataaaccgcgccctcgagtggaacgttgcgatcccgctgctgtccccgctggcctcgtcgccgccgccgctccctctgccgccgcagaaggaggatccgccgcaacaacaacggccgacggaaaaagtggtcttcaaaaagtggcagcaccccgcggcgccgttctgctacgaaccaccttcgctggttcctcccttcgttaacgtgtaaataaataaaaatgaagaaaaattatgaatatttcttctaana

SEQ ID NO: 54823 - DNA, 240 bp, Glycine max
  Clone ID: PAT_MRT3847_20517C.1
cacattctgactattattcttctagatgctaagccatggctactagacgcaggcttaagggtgacgttgaactgaagtgtaacgcagacaattgctggcataccctcatgaactccaatgaaatatgccccatagccttcctgaatgatgacaatagcattgacgctctagacgttgatggcgaatcacctagttctatcccagacataagttacgttgaaggctcaacacttgtgaatt

SEQ ID NO: 54824 - DNA, 351 bp, Glycine max
  Clone ID: PAT_MRT3847_20518C.1
acatggacaaacttcgaaacttgaaagcagttagtacaacactccttttctgaaatttattattgtacttaaaagcattgcactctcgactcctaaaagtatatatataaaaaagaactatactgtctatacaacaaaacttcccagtattaaaaatcatgcttattgtagtcttctatgtactgaaaaaactttaaattagtcttttaactttactaaaatatattgactttgatagatgtttaatactagaaagattaactgtatagttttattacttaaggcactatttatttaagacaaaggataatattttagagactaaattaatagttgatactttattattcc

SEQ ID NO: 54825 - DNA, 281 bp, Glycine max
  Clone ID: PAT_MRT3847_20519C.1
tttaacatagtcggggctttgctccgggaggaaacggatcataccaatcctgtaactgcggctctgagtatttttgttgcgcctttcagaggtgtatggaccatgctgttggttacattttcgattaccattgggcatattgttccactcatgatttcaaggttttagctattgagtaccactaccgttggtgattatggtcatagaaaagatctggcatgggttaaagttaacgtttgatgtgctgctgttggcagacatccaggttcactccaactcca

SEQ ID NO: 54826 - DNA, 288 bp, Glycine max
  Clone ID: PAT_MRT3847_2051C.1
gtgatttcagtgagtgatcggtgttcacttgatctcatcataatcgtcagcgtcaattgaagaagatgccgatcagaaacatcgccgtcggaaggcctgaagaggcgactcaacccgacacgttgaaggcggctttggctgagttcatctcaacctgcatcttacgtgttcgtcggttcaggctccggcatcggctacaacaagctcaccgataacggcgctgccgaccctgccgggctcatcttcgcctccataggccatgcattcgccctctacgtggccgactcc

SEQ ID NO: 54827 - DNA, 428 bp, Glycine max
  Clone ID: PAT_MRT3847_20520C.1
ggaacaccggcatataaggagtctcaagaggaggcttttaagggggtttaaaaaggtccccaattacaaaagggggtttttaaaccttaaagggggacccaggtttttcaagaacaaatttaaaaagcccttttaaaaaattttttaaaacccggcggatttgactttttttgaaaaaattttttttagggagggttttttttgggggaaaatttggaacaattggttcaagggtcaactgattaaaaaacctttttccaattgaggggtttttaaaatttttagctttatatttttccacttggaaaggttgaaaaacactttttccatttttaaaaccctcactggtttcaatggtctggaaactcccaatacacttgaaaaacttacttgggtttttggcatcccttaaaacaaaaacaaggggg

SEQ ID NO: 54828 - DNA, 416 bp, Glycine max
  Clone ID: PAT_MRT3847_20521C.1
gtgagtatattgacgacactgacgactatgtcagcattcaacttggtaaccaccgggatgaacttattatgctcataatggccggtcacacgactttcacttatgtagaccgtcgggagacaggctcataataccctactgatgacagggtcgcaagaataatgcagcctactgacgagaggaaccagatgattcgcacaattgaacagcgagcttggctgacaagacaggggcccaaaagtaccaagcgttggaagatgactgcacgcctcttattggagatccggtctataatcgagtcgtgctcccgccgtgcgtttgcctgccagcaggagggggcctgagccccccaaggcacgtgccgatggtgaccctcgtgtggcggattatccctacgtgacgccttgtggcgcatt

SEQ ID NO: 54829 - DNA, 538 bp, Glycine max
  Clone ID: PAT_MRT3847_20522C.1
atctccatgctactccgctttttgttttcactttcactctttttttttctttttttttcaaaacattgattgcattgagcagtttctcagtggtttttgatttgtcattggcttttccttagtcactaattgcatccgtgtgatttgctctaagctatgagatctaagggcattttttcgcttttacctcactttaccattttttcttttaaatagaggttttgttttgtttgcatgtgcctgatgattgagtatcactgtgtaggctcaatgatatcatcacgttagattttgtctttgctattttcttattgcttggtatttttttttttttacatactttgttctttcttttaaaaaatggtatgatggctgaaataccaattaaaacctgtgagatgtaaaatctaacgtgagaaaggtgcaggaactttgcaaagttcaaaggaaagaagatgaaggaggttggagaactagcgcgagggcgaatgagggtttcgcaaggctgccgtagcacttccaggatttgggaggtgga

SEQ ID NO: 54830 - DNA, 306 bp, Glycine max
  unsure (1)..(306): unsure at all n locations
  Clone ID: PAT_MRT3847_20523C.1
angcacgcnancnnggnattcggntcnagntcganngantagtgctggtatcananatggcttcnactatgaancaggttncntntaatntgancaggncnantcggtagaacgttcaaatcntcaaggcgacgtccaatcctcagatgtgtggattacnctcntcgatntccaagacatcangggngccactnnctcatgacancntngngnagatngacgnagcttgnnaaanttatggnttttntcaggtgagnaancatngnntnccaganggtgtgattgacaganggtnaaggtgaccaa

SEQ ID NO: 54831 - DNA, 485 bp, Glycine max
  Clone ID: PAT_MRT3847_20524C.1
gagacttaaaaactttaatagcatgttacatgtaatgtttgtaagaaagttttgtatattatagtttaaaattatcttattgttttttatgaaaatctttaattttatttaaaaaaaatattttttttactttttaatataaaacaaacctttagatgagcctcgcaaacttatataaatgtcactcctaaaaatgggctcataatagataacaaatgcaagtttgagttataaaaatataaaacaagttaggacagggcttatatagggcttatatagggcttatccaattcaatccattctcacctctaagtaagcataaaataaatattagagagttgatattcaaacaccaacagagctagactcacaggttatcctgacaaaacttatatgcatttttatcataaaattatatatatcattcatgcttatatttttattacttatttttaatcaaatatcaaacgatttattcttattta

SEQ ID NO: 54832 - DNA, 316 bp, Glycine max
  Clone ID: PAT_MRT3847_20525C.1
cccgaaagggaaaaatatatgtcatgattatgtgaatgcacacgatacttccagaaaaattgtttacacaaaacatcttcaaaaaccagtaattctgatgttaaaatgattttttttaaaacaaaaccatgccttaattttatccagcatatgcacgatattttcaagggatggcaaactttatattggacagaagtttttaatcaaacactgaataggcagtcgaagtagaaaacctccagttttacaactcttcctgatgcagtaaaacatttgaaatcacgtagcgaaacagcggaagcggaacaactttttg

SEQ ID NO: 54833 - DNA, 221 bp, Glycine max
  Clone ID: PAT_MRT3847_20526C.1
gaggggtcccaagttttccttatggggggcggtttaaaagttgggggaaataagggcaaaagtggttcccgggggaaaatggtttcccgttaaaattcccacaaaaattccggccggaaggcttaaggggtaaggccggggggccctaaggggggacctacctcactttattggggtggcgctaacggccggttttcaagggggaaacctggtggggccag

SEQ ID NO: 54834 - DNA, 539 bp, Glycine max
  Clone ID: PAT_MRT3847_20527C.1
gtttgaggctcaaacttattcaaaatggacttcgacggccgcatcaaggcttaccgcttcgtggcttactccacggtgtccttctccatcatctctctgctttcggtttgcttcacgctgccgatgctgaagagctacgtgtccaacgttgggctgaagatggactctgagctcagctcatgccaaagcaatgccaaggacatctggtcagaagtgagtcagctgaagggtctgccgttgatcgtcagcggaaaccgtacggcacgtcaagtgtacggtggcagcggcggctacggaagctgccaagactgttgctcaggcggaggacccggcccggctggcccgcccggacagcccggacgccccggaaaccctggagctcccggatcgcccggacagcccggacactccgtccagactccctgtgagcaagtgcacccgccaccatgcacaccttgccccggcggtcagcccggaaaccccgcccccccgggaccccccggacagtcccgagcacctgccagcccgcagtgaggaga

SEQ ID NO: 54835 - DNA, 466 bp, Glycine max
  Clone ID: PAT_MRT3847_20528C.1
ttttccaggatcttagttgacatacctggaggaacaaacccatttcgcggtagtaaaagaaatcttttggtctacttcatatatgacatttttattttcttctatttataaaagtttcatgatgttgcatgcatgagtactactgggttcagttctacttaattaatttttcttttcttcgggctaaaacatcatgtttgttaattttttgggcgttcatcgcactgactctcgatttcagaaacatatttcttcactggtcataaaaatcttaggccatttctggcaaaatcaacatgcatgttcctacctaggctcctcgcatgcatgtttcagatttcttctggaaaaaaaaatcacagaatttcagggctatgtcacatcttgtgtgcacactctctttctatacatcaaatggtactctcacacctgtgatctaccaaaatttggatccaatgtccaccat

SEQ ID NO: 54836 - DNA, 882 bp, Glycine max
  Clone ID: PAT_MRT3847_20529C.1
ggaattcccgggtcgacccacgcgtccgcacgcggagaatccactctcccctcttaatggtggtaactacataaaaggagaagcgcacgataatagcctcagttgcatcgaagagagagagagcgagagagagagagagaatggcagcacttggtggcaatcgtgatgtggcaggaagccagaacagccttgagatcgatggtttagctcgctttgctgttgaagaacacaacaaaaaacagaatgcccttttggagtttgaaaaggtagtaagtgcaaaacagcaagtggtttctggtaccttgtacaccatcactttggaggcaaaagatggtgggcaaaagaaggtttatgaagccaaagtttgggagaaggcatggttgaacttcaaggaggtgcaagagttcaagcttgttggagatgcacctgcatagtctagtgcttaattaggtatttgataacattacacagttgcccctgcatgattttcaagtatgaaatgtttcacttatgaacttctttcttgtttttgctattcttaagatggatcaaaaaccgaggttaaaatgaatggggaactaagtggggtagcggagtttaaagaactagaacttgaagtttggatcagttttcgatttacacattgggcattttgtcagtacagtgcttgtgatattaatgattgataatgctcattcattttactatctggtgtataggtttctatataacctgtcaataagttgttgattatcattgctataagtttgcgggaaattcatttttcatttttcctgatgaatcagctttgagggtaacgacagtgatatattgtgatcacgaattttgttaaacattttatgaaattatattattcatttc

SEQ ID NO: 54837 - DNA, 300 bp, Glycine max
  Clone ID: PAT_MRT3847_2052C.1
ttttatttttttttttttttaaattcaattaactgaaacttcatatgagggagggtggaaatttccaaaggcgcgggcaacacaggagcatgaacttatacagaacaatggtgcccaaccagaaaaactacataacccaaatgagctgaagccctaaaactgtgtcaactcctttatattaagaggggtacttgttaaccacatagaaatgggtcttaaaaaaaagtggggctatgaataaatcagtctagtttgcctgcttcaagtggcccaattagcttgacttccaacacgaggcat

SEQ ID NO: 54838 - DNA, 1588 bp, Glycine max
  unsure (1)..(1588): unsure at all n locations
  Clone ID: PAT_MRT3847_20530C.1
ccgtaacgggtgaactcgtataccgcgtcttgaagaaccaaaccccgttttctgtgaccccacaaatatctcattcccgttgtgcgtttctaaccgaactcacccctttcctccgatcaccggttaaatggttccggccaccggtgaccggcatcaccagcactttgattccgcggagccctaaccctaaccaaccaaccaagtactcttttcagattcatggatcctcctgattctcaccagtcccaggaacaggaagcgcccaagaagaacgacgtcgtttttctcatactgcgatgggttctcgctattttgttccctttcctcttctttctgtcgattccctttctgcttggcttgctggttctcatgttcgccgatttctccatccccaaccccatttctctcccctcacagtgcaaaattgtatccactggtgttgatattaggtcatctaagatatgtgaacttggattgttagattatattcggctcgaggtgttccatcattttgaaagaagcaaatttcgctgccgttatgattactattgggcttcagtattcaaggtggaatataaagatcacttttctggtcagacacaagttgcatttgctgaggctcccaatgaggcccttcctctttattgcaggcctaattttggtgctgcatggttgacacaatataaatttaaggtcaacgagacttatgattgttggtacacatctggcatttccaaagttcgtttacatcaagatagtctttttggttgtgatgcccatgagcagtctactcttgagaagagtagacaatattctaccatggcaatggagatggtaatttcctggttttcgagtagaggaaggaccaagcattggaggtgggaaactttagctggagttgtaactgggttcttaacttcattgatctccataacctttattaggttccttcaactacttctgccttcgctatatcaatctttcacaacatggatattttcttggcgtgtcaatgctgttctcatcaggcgcgcttgttttcttttggcatacttatcttttgtggcctggttagctatagaatatgggaagaggcttggtctcatggatatattcagacttcctaaatcatagcactggtttttgtgaagagcaatgcacttttcgttgaatccccatgtaatattataactgtagcaggtgatattcttgtcccgtgataaatgggcgtcggcaccgtgtaaggaagtcatgtatagttcgaagagagagaagggaggggggattaaaaactgcaataatttaaagtaaatgcctaaatagattttaatctcttggttaaaattagtatcttcgggagcagtggtttacaatttacatagtttgtcgggtcacataaggccaatttagtatatgtttgagtgctggtgagtcacctacgcacttgaattaaagatgttgtaaaagtctttacggtagcatttggtttgttggaatggttttgctggacataataatgaaatgaaaattgcatttattttcccactaaatctctccgaaaaaaaagaaaaagataattttgatttnn

SEQ ID NO: 54839 - DNA, 778 bp, Glycine max
  unsure (1)..(778): unsure at all n locations
  Clone ID: PAT_MRT3847_20531C.1
aaannnnaaaataaattatttaatgttataggaaaattttaaaaaaaaagccgatctccgaacaacttcctacaaatagcgtggccacataacacccttccctccccatccgatcatctgatacaagcgcctcacggggactcgcgcctccgatgagttgattcccttaagaaggaaacccctcaggcccctgctcccccccccccccccccccccccccccccccccccccccccccccccccccccccccccccccccncccccccccncccccccccccccccccccccccccccccccccccccccccccccccccccccccccccccccccccctccccccccccccccccccccccccaaccaccaaccccccccccccccctctccccccccccccctctccaccaacacctcccccccccccccccccccctcccccccccccccctgcccccccccccccccccccccccccccctcccccaaccacccctttccccgcccccatccccccccaacaccccaccccccccccccccccccccccccccccccccccccccccattacttttcccacctgcgcgcncccccccccccccccccccccccccccgccccatcccccnncccccccccccccccccccccccccccccccccccccccccccccccccccccccccccccccccnccccccccccccccccccccccccccccccccccccccccccccccccccccccccccccccccccccccccccccc

SEQ ID NO: 54840 - DNA, 544 bp, Glycine max
  Clone ID: PAT_MRT3847_20532C.1
gtcaatgctgttctcatcaggcgcgcttgttatcttttggcatacttatcttttgtggcttggttagttatagaatatgggaagaggcttggtctcatggatatattcagattccctaaatcatagcactggtttttgtgaagagcaaggtacttttcgttgaatccccatgtaatgttataactgcaacaggtgatattcttgtcccatgataaatgggtgtcggcaccgtgtaaggaaatcatgtatagttcgaagagaggaaagggagaggggggattaaaaactgcataataatttaaagtaaatggactcagttactattagagggaaacaatgttaaactcttagttaaaatagtaagttcgggagcagtggtttatatagttgtatcacatatgtccactttagtatatgtttgagtgctggtgagtcacctacgcacttgaattaaagatgttgtaaaagtcattacagttgcatttggtttgttggaatggttttactggacatgataatgaaatgaaattgccatttattttcc

SEQ ID NO: 54841 - DNA, 261 bp, Glycine max
  unsure (1)..(261): unsure at all n locations
  Clone ID: PAT_MRT3847_20533C.1
cnatgcgggccttttgtcttttcttccaaaacaaccacttacttcttgcaggaaattaatgaggccacagtataagacttttctgtccaagggtggaacaagggaggaacaaactgaattatccttctttgttatcctccgacagggttaccccttttttaatcgggggaacaaaaaaatccacactccttgggttttctactatttaatgatgccaaatagatcacctttttcccattgctaccacggggaatggtgccc

SEQ ID NO: 54842 - DNA, 440 bp, Glycine max
  unsure (1)..(440): unsure at all n locations
  Clone ID: PAT_MRT3847_20534C.1
agcatgtctagctatctcgatcgaactgtccaaggtcctgtcaccactagagggcagtagtggcaacactgctcatacacaagtgggcgaggtacggtgccatacaggccacgtaacgtaggggccccagctgggctaggggtaaaacaatgcagaagcaggtggcaagtgttgcgggaaagtataccgcgaacagggtggactgagtgttccgcaagggggtggtatgatgggaaaccgcgtgccagatgcagccttggtgtggcccaaggttgcgtagttgtgagcaaagtaganttgggcgatggttaccatggataaacgtgcaaccaaccgggtgaccgttaaggcggggacgtgtagtccggtggggtgagcttccaagaatgggtgttgatggacggtgcatattgcgtagtaggaaagggtgggcggattga

SEQ ID NO: 54843 - DNA, 1050 bp, Glycine max
  Clone ID: PAT_MRT3847_20535C.1
caattggcatgttgccccgggctgttgggtcatctggttgtcttcctgttcttaacattgttgatgatgaaaaacagaatcaagtatcgccttgttgtcttcctgttgttgacattatcgatgatgaaaaacagaatcgagtatcagaaaaggaagagaattggaaattgaccccacatggtgccaagagagatgccactttagaccttcttcaacttgataattcaactgtcaagaagatgagggagaccaaagaatttggtgaattaaacaatgaattgccattgcaaggggagaaaggatgtctcgtggtaggtggagtttggaagaaacttacagaagaagagctactagtcattgagtcttctgtaaggattttagtttaatttatactttactgcttagttcttgtcaagatttaattcatgttagttatttttatgcttatttgtttgatttattttagaaggtatggtacctataagatacaggtgcctggccttaaaatatgcaattccacaaacataagagaatcctgtagcttaattacctgaaccacattcatgcaataagaatttcattctacattcttttacccttgctccattttcatttgtgctgagtgcattcgcaatagattggaattggatgccaatgctgtatcgtggtagagaaaagttcggcatgggtgacctgaaaacacatgagctgagtcacataaaaggtcacaagcaaatatgcttgtattctgaatctgcttcatgtggtctcaggactaccctgtagaaccctctaccttcacatattttggaaatgtctttgcctgaactggaacattgaattttgaacaatgttttatcaatttgatgagtttatccaatttgattaagtggatatatagctttgcaagcttggtacttataggcttagatgtactacgccgaagtacttttattagtaatgaattgatctgtgttccgttaagagtacaactttgtactactggttttaacacaaatctaagacgctatatagcagtacaacttcccg

SEQ ID NO: 54844 - DNA, 1122 bp, Glycine max
  Clone ID: PAT_MRT3847_20536C.1
gcttaaacagctaaacagtatattagcttcacctgctattcaattttctgtcactcattgtcactaacaaatggatatagctatcttctctccatcatccctcttctctgaagatgacattcctactcgcgaggaagatgcagactctcaagaaagctatgttgagaggaagcaccagtttcctgggatggagttggttattcgagaattttcctttcatcaactgaatgctaatttactctggccagggacatttgcatttgcagaatggttagttcagcacaggtcatgcattgaaggacggcgtgccattgagttggggagtggcacaggtgctttggccatatttcttcgaaaatcttacaatcttgatattacaacttcagactatgatgaccaagaaatagagaagaacatagctcacaactgcagggcaaatgaaatacctatcgttcctcacataaaacacacctggggagacaagtttccaaattctgaccctgactgggacctgatcattgcaagtgatatcctattatatgtgaaacagtatgcaaatttgattcagaccatttcctttcttctcaattgttacaagccgcaagagagaagagcagtttctccaactggaaatgatgagaatgatggagatgtagtgttgccgcggccagcctttttaatgagctggagacgcagaatcgggaaggaagatgaattgcttttcttcaatggttgtgagaaagctggtctaaaagtgaagcatattggatcccgtgtatattgcatcaattccatagagaatgagatatcagaaacaaaaggttgattaatgaaattagtattcaagcatgcatgggaggagaaagaagtgtaaactagaaggttggtccattaatagagtttcttctggtcatagttatagcttctatagagtaatttgcagctcctggatcctacttgataacacgcatacctactataaaacttttcatcaatttgagccgagagcaactgtgctacaatttctgacttgtttttattttcttattagttgttacatcactgaaattcaagatcatgttttattttctttagttgttacatcaaaaaaaaagaacgacc

SEQ ID NO: 54845 - DNA, 116 bp, Glycine max
  Clone ID: PAT_MRT3847_20537C.1
ccctcgtgaatcccccacgcgctcgaccactcctccggggacgaataaaccctaactgcgggcgcacaacctcctgataaagcttaatttccacactatcaaggcactcttttctt

SEQ ID NO: 54846 - DNA, 685 bp, Glycine max
  Clone ID: PAT_MRT3847_20538C.1
atttagatacggctgcgagaagacgacagaaggggaggtattggtgggtgaaatcaaaaaccctagccctcactctcatcactttttttgagctatgtttcaagagagttagttagggataatagggcagggaagaataagagggatgtacaaagaacgagagcgagttggtgtttctgtttccgcttccaaatcggaggatcggaagcgaatcaacgacgttctcgataagcacttggaacgatcctctccttccacttctcgccccatcacctccgcctccaagaattccaacctccaagtggaggaatctgaaacggagagtgaagagtctgatgttagtggctctgatggggatgacacctcttggatctcgtggttctgtaatctcagagggaatgagttcttttgtgaggtggatgatgattacatacaggatgactttaacctatgtgggttgagcagtcaagtgccctactatgattatgcccttgatttgattctcgacgtcgagtcgtcccatggtgacatgttcacggaggaacagaatgagttgattgaatcagcggcggaaatgctttatggtctgattcatgccagatatgtgttgaccagcaaaggaatggctgccatgcttgacaaatacaagaactatgattttggcagatgcccaagactttactgc

SEQ ID NO: 54847 - DNA, 468 bp, Glycine max
  Clone ID: PAT_MRT3847_20539C.1
cccaaccggtcccggacccggggggcgacccgggaaacccgggccgggacccggagggggaccagggggccctaaaggggggcggaaaaaagggggggggaaaaaagggcaaaagggggtcccgggggaaaatgggaaccggtcacaaatccacacaacaaaagaaccggaagcaaaaaggggaaaaccgggggggcccaaagagggagccaaacgaaaaaaaaaggggggggcccaagggccggtttccaagcgggaaacccggggggaaaacgggaataaaaaaagggccaaagcgcggggaaaaggggcttgaaaaatgggccccaaagggggttttcctttcaccacggggaagggcaaaaagggaggggcccttaacggctgggcctaaaagaggtgcaaaaagggggccaccccggggtgccccaagaggggaaaaaactgggggaaggggggtaacggggg

SEQ ID NO: 54848 - DNA, 1929 bp, Glycine max
  Clone ID: PAT_MRT3847_2053C.1
tttcattgtttttcagctcattgcatgttatttttcttccttatcttgggtaggtggtcatgagcttaccaaaactactggaaatgctggtggcagagtagctggtggtaagtataaactgcaatattaaatgctgtctttttggacattccttatggccgctcgacccgatccagcctctactccgtcttctagactcttctttttctctaagtctaaggggtgccctgagatcactttgagcaatggtgaaggctgtggcagttcttggcagcagcgagggtgtcactggaactattttcttcactcaggagggaaatggtccaaccaccgtaactggatctcttgctggtcttaagcctggtctccatggcttccatgtccatgccttgggggacactaccaatggttgcctgtcaactggagcgcatttcaatcctaataacaacgagcacggtgcccctgaggacgagaatcgtcatgctggtgatcttgggaatgttaatgtcggtgatgatggtacgtctgatctattattttttcttctgtttcatctatttgatttgttaatgtcggtgatgatggtacgtctgatctattattttttcttctgtttcatctatttgattagtgattgattccaactaatctgaaaagatcaaaaagcaacatatttatctgattccaaatttcaaatttctgattatttttacaatcccagtgtgaaaagtaatatatattttttgaataagcaataaaagtaatctttttagcattacaaagaagtaattgatagatgacagataatctggaggttctacaagaaacttttccatattttgaaatgatgtttggtaattgagattacttgcgttctattttggtgatagttcatctttgaaagaacttgtctattttgcctatcataccacatgcttgtttggtctttattttaaaatggttttatctcattgtgtaactcaaggtaccgttagcttcagtattaccgacagtcaggtatgttactcatttccaaatcaaatctctgttgaattcttctaggttgacaccaagacttgggaagtttcaatttttaactagtaaatttgtacagattcctctcactgggccaaactccatcataggaagggctgttgttgtccatgctgattctgatgaccttggaaaaggtggtcatgagcttagcaaaactactggaaatgctggtggcagagtagcttgtggtatcattggtctgcaaggataaactaatcacatgaggttggaaccgtgctttagaattgtggaataaagtagcacccatttaaacccgtttggttaattcggctcgagggagtctcccttttggttgcactggctggtttagttgtagcagttatattgaccaaactgtctttaccggacatatttgcttctatgttggctttcattcctactggttggggaattctgtcaattgctgctgcctggaagccggtgatgaagaggctcggactatggaaatccgttcgatcaattgctcgcctctatgatgctggtatgggaatgctcatctttgtacccattgccttcttttcgtggttcccatttgtatcaacattccaaactcgcctaatgtttaaccaggcttttagccgagggttagaaatttctcttattctagctgggaacaatcccaatactgggatatagttgtatttggctcaggccttgttcctaaacgagatacaatctatggtgtcttttaaattttgcgggggtgagtcggtaaatcttcttgtaggaagcctagatttctgtaaaaatcgtcagcattgtgaatagttgtatcatcaattttctagtgtatgtcatttaaatcgtcatgtagtattgggtttaatgcaatgcactatcagttttgaaaaa

SEQ ID NO: 54849 - DNA, 1427 bp, Glycine max
  Clone ID: PAT_MRT3847_20540C.1
tccccacgcgtccgcccacgcgtccgtacggctagcaagtagtagtaacaatttaggattgtggtgtgttgttgttgttgtagctatcagtaggtgaatccaaaaccctagccctcactctcaccaccattttttcaattcttgagctatgtttcagggataatagggcagggatgtacaaagaacgagagcgaggtggtgtttccgtttccgcctctaaatccgaggatcggaagcgaatcaacgacgttctcgataagcacttggaacgatcctctccttccacttcccgccccatcaacaccgcttccaagaattccaacctccaagtggaggaatctgagacggagagtgaagagtctgatgttagtggctctgatggggatgacacctcttggatctcgtggttctgtaatctaagagggaatgagttcttttgtgaggtggatgatgattacatacaggatgactttaacctctgtggattgagcagtcaagtgccctactttgattatgcccttgatttgattctcgacgttgagtcatcccatggtgacatgttcacggaggaacagaatgagttgattgaatcggcggcggaaatgctttatggtatgattcatgctcgatatgtgttgaccagcaaaggaatggctgccatgcttgacaaatacaagagctatgattttggtagatgcccaagagtttactgctctggacagccctgctagttggtcaatctcctagtagttttgttagaaatgtcaggtgtctggggattcgaaccctgcacctttgcccctaattcggctcgagtttagacattgatggagcttattttggaactacatttcctcatctgttcttgatgacttatggacaactaaagccacagaaaccatcacagagctatgtcccgagagtttttggcttcaaacttcacaagccctgaagctgaaattttaagcttccatgaatgtaagagttcacatgtcttggttaaaatctttctcagtagtctttgtgtcatgctgctgatcataagctttcaaaatgagtaacatctagaactaatgttcttgttttaggagcatgttgtaaagagaattgcagacgacatgtcatgcaagtgcttagtttcaatttcagcttggaattcagtgagctttgagttcaatgagcaagtgcttagatacttaaatgcactctaggtgcttagtgcaaattgtattcttgcggttagttttacttacagttgtttatgtttgtctcagaatacagatactctactattttatattattttattccatttgctcccctcccatatttacacagcgtttgaatttgttggacctgaatgggttcacatatttagtatgatattcaagacctcagttgttatataatgttagaccgttttgccc

SEQ ID NO: 54850 - DNA, 466 bp, Glycine max
  Clone ID: PAT_MRT3847_20541C.1
ttcctcatctgttcttgatgacttatggacaactaaagccacagaaaccatcacagagctatgtcccgagagtttttggcttcaaacttcacaagccctgaagctgaaattttaagcttccatgaatgagcatgttgtaaagagaattgcagacgacatgtcatgcaagtgcttagtttcaatttcagcttggaattcagtgagctttgagttcaatgagcaagtgcttagatacttaaatgcactctaggtgcttagtgcaaattgtattcttgcggttagttttacttacagttgtttatgtttgtctcagaatacagatactctactattttatattattttattccatttgctcccctcccatatttacacagcgtttgaatttgttggacctgaatgggttcacatatttagtatgatattcaagacctcagttgttatataatgttagaccgttttaccc

SEQ ID NO: 54851 - DNA, 1231 bp, Glycine max
  Clone ID: PAT_MRT3847_20542C.1
gtggtgtttccgtttccgcctctaaatccgaggatcggaagcgaatcaacgacgttctcgataagcacttggaacgatcctctccttccacttcccgccccatcaacaccgcttccaagagttccaacttccaagtggaggaatctgagacggagagtgaagagtctgatgttagtggctctgatggggatgacacctcttggatctcgtggttctgtaatctaagagggaatgagttcttttgtgaggtggatgatgattacataaaggatgacttgcccgtctgtggattgagcagtcaagtgccctctcttgattacacccttgatttgattctcgacgttgagtcatcccatggtgacatgttcacggaggaacagaatgagttgattgaatcggcggcggaaatgctttatggtatgattcatgctcgatatgtgttgaccagcaaaggaatggctgccatgcttgacaaatacaagagctatgattttggtagatgcccaagagtttactgctctggacagccctgccttccagttggtcaatcggacattcctaggtcaagtactgtgaaaatatactgccctaggtgtgaagatctttactatccgcgttccaagtatcaaggcaacattgatggggcttactttggaacaacatttccacacctcttcttgatgacttatggacaactgaagccacagaaaccagcacaaggctatgttccgagagtttttgggttcaaagttcacaagccataaagctgaagttgaagctttcatgaaagtaaaaatctgcccgtgtctcatttaactcttccttatggttctctttgcaacatccggcaaatcatatgctttccaaaccagtacaatctaggcatctgttttaattgttataggagcttgttgtaaagaaatatgcagacatgcgaagcaagtgcttagtttcagcttcagattcaatgagaaagtgcttaggtacttgatgatactttttaatgactgtttacgaattgtattcttgcgattaacttaatattgtctatggttatgtctcgaattacaaataccctgctatttttatattgttttattccatttctccccatttctgtagcctttgaatttgtggatttgatgccaatgaattcatacattactgatttccaagttcacttgcttggatgttatactcagctatccaacattattggttatttggaaaa

SEQ ID NO: 54852 - DNA, 1893 bp, Glycine max
  Clone ID: PAT_MRT3847_20543C.1
aaaagagggtcccaccgaaacaatgttggagcaagcacgcaggagacacgtagacgcagagagagggagttactaaaaatgaggtttggtttggagggagttgcatcggcgacaaatactgttgttgttgttgttggagataagtagtgaatccaaaaccctagccctcactctcaccaccattttttcaattcttgagctatgtttcagggataatagggcagggatgtacaaagaacgagagcgaggtggtgtttccgtttccgcctctaaatccgaggatcggaagcgaatcaacgacgttctcgataagcacttggaacgatcctctccttccacttcccgccccatcaacaccgcgtagtagtcaacagaaaaagagtgttaatgatggattcgaggagtagcgagccgaaacgaaaaagggaagccttcgctggttctgtaaattgtaaattgcatcatccctgaagctgaacctcaaaaccctagctgccggcttgtctgcaacggcatcgtttcagtatctcgttatgattagttgagaatccaaaggaatcgaatcgaatcatctcgacgaggaagcaaaacaccggctatagttatgtacagagagcgaggaggcgtcggatccaaatcggaggtaacttccgttgatcggaagcgaatcaatgacgtcctcgataaacagctcgaacgatcctcgccgtccacatccagagccgccggcgccatcaacggcaaggaccgctcctcctcttccctcttagccgccgccaaggactcccgctccgcctccgtcaccgcccctatctccaagaattccaacgcttccgacgaggaatctgaaacagacagcgaggagtctgatgttagtggctccgacggagatgacacgtcgtggatctcgtggttctgcaatttgagaggaaatgaattcttctgcgaggttgatgacgattacataccaggacgacttcaacctctgtggattgagcagtcaagtgccttactatgattatgctctggatttgattttggatgttgaatcctctcatggtgacatgtttaccgaggaacagaatgagttaattgaatcagcagccgagatgctttatggtctgattcatgcccggtacatattgacaagcaaaggaatggctgcaatgctcgacaagtacaagaactatgattttggcagatgcccacgagtttactgctctggacaaccttgtattccagttggtcagtcagacatccctaggtctagtactgtgaaaatatactgccctcggtgtgaagacatttactatcctcggtccaagtatcaaggcaacattgatggagcttattttggaactacgtttcctcatctgttcttgatgacttatggacaactaaagccacagaaaccatcacagagctatgtcccgagagtttttggcttcaaacttcacaagccctgaagctgaaattttaagcttccatgaaagagcatgttgtaaagagaattgcagacgcgacatgtcatgcaagtgcttagtttcaatttcagcttggaattcagtgagcttcaagttcaatgagcaagtgcgtaatacttcaatgcactctaagtgcttattgcaaattgtattcttgcggttagttttaattaaagttgtttatgtttgtctcagattacagatactctactattttatattattttattccatttgctcccctcccacatttaccagttgtttaaatttgtcgcagaatacagatactctactatcatttagactgatattcatgacctcaattgctataataatgttagaccggttcgcccagacatcgataatgattatatggtggaaaaaaaaaaaaaaaaaaaaaaaccccaaa

SEQ ID NO: 54853 - DNA, 824 bp, Glycine max
  Clone ID: PAT_MRT3847_20544C.1
ccacgccgtccgaaaagaaaaaaaaaattgcgaggaatagaaacgaaccgaaacggggaatcattgtctgcgtctgtaaattgtaaattgcatcatccctgaagctgaacctcaaaaccctagctgtccgcctgtctgcaacggcgtcgttatgatcagttgagaatccaaaggaatcgagtcgaatcatctgaccggcgacagttatgtacagagagcgaggaggcgtcggatccaaatcggaggtaacttccgttgatcggaagcgaatcaacgacgtcctcgataaacagcttgaacgttcctcgccttccacatccagagccgccgccatcaacggcaaggaccgctcctcctcttccctcttagccgccgccaaggactcccgctccgcctccgtcaccgcccctatctccaagaattccaacgcttccgacgaggaatctgaaacagacagcgaggagtctgatgttagtggctccgacggagatgacacatcgtggatctcgtggttctgcaatttgagaggaaatgaattcttctgcgaggttgatgacgattacatccaggacgacttcaacctgtgtggattgagcagtcaagtgccttactatgattatgctctggatttgattttggatgttgaatcgtcccatggtgacatgtttaccgaggaacagaatgagttaattgaatcagcagccgagatgctttatggtctgattcatgcccggtacatattgacaagcaatggaatggctgcaatgctggacaagtacaagaactatgattttggcagatgcccacgagtttactgctctgga

SEQ ID NO: 54854 - DNA, 329 bp, Glycine max
  Clone ID: PAT_MRT3847_20545C.1
acccatcttattcccacgcatacgaccggctgcgagaagactacagatgggggggggggggggaaatgcatgttgttatgttcatgattccttacgtggaaaacgcaagcatactggattatgttcactggccaacgaacattgagatgatttggattcctaaatcttggatgggaaatccaccttaccaagaacattgatgtgcctttattgtgtttagtgatttgtttgtacctctgtgtttataaatatgacatggttgatcttgaacgttaaataatatcccttttggttattttacaaagatgcttttgggtaaaaataatatt

SEQ ID NO: 54855 - DNA, 457 bp, Glycine max
  Clone ID: PAT_MRT3847_20546C.1
aaaaccagaaaaaaaatcagggggggcaaaactaccccaaagccttttttccaacaatggaaaacaaacagagggaaggaaatttaatctaaataaataaaaaaagcgaatgaccactttaatcctaaaaacagtttattttcccccacacattcgggcttggggggaccattataaaaaaattgatgggaacaaaacaatttttagtcttgattttacaaaaatcttttatcctttacccccccacaaaaacaaaaaagggggggggagaggcttcctttcactttgttcgggaaaagactctgggaataaaatctatcagggctttccttgattttctaacatccccggcgccactctccggaaaggaatcaattgctgctgctgcaaggttagcatgctccacggttaccccccgtgtcctttgtatacctcggcttttccctaaaaactccaa

SEQ ID NO: 54856 - DNA, 912 bp, Glycine max
  Clone ID: PAT_MRT3847_20547C.1
attctgagtcaggttttttccatgatgtccgcgttccacaacatggttggcgttaacctatacaatgatttctggtattcttcaagcaactatcgcatgtttatagtatccaaaaaaaaaaaactatcgctatgcttcaactttttcacattctaatttttaattcccaaaaatgctgatggagaattaacataagaataaaatttgttaaaaaaagtttcgacggactaaaaattgagatctgaaaaaattgaggaactacaacacttaaaaccgaatttgagacggcaagtgaggggtaaaagaccatgttaaatgtatattatgcttctataaattgcagcataaaaaaagatcaaaatccaatcaatgtcgcaacaagtgtcatcaggattcactaccaatgagtgactattcatcctcctgtgtgcgtaatctggccgttttgtttgtcacaacaacatcaagctgcgcggctctctcaactatatcttttctctttcttgtggatatattgtgggcaatctcagcacagtaagtcctgttgtgcatcatgagcagctccaagtccttcacattgtgaacaacaaatttcttgaaaccattagggagatagtggcgggtcttcttgtctgaaccataaccaatgtttggcatcaaagtgcatcccttgaactttctcctaacacgagaatctatgccctttggcctgcgccagtttgtcttgacagaaattttcctgtcactctgaggcctcttgaacttcttcaccctcttcttcacgatcttcttggagagtagaggcaccgccattttctgtgaagtagcttgagatagagactgagatgtgggtttgaatagagtctctacggtttttaccttttgacggtgtgcgtctattgtagggttttt

SEQ ID NO: 54857 - DNA, 419 bp, Glycine max
  Clone ID: PAT_MRT3847_20548C.1
acaaagggggcccacaaaatggccaattgactaccacattcgcgaaattcatatgagttcaacctattaaggcgggggactctacagaaaacataaaaggtttttgttacagggttttccactagcttgaataaagatctaaacccatcacccagactctattgggcaaggttaaaaatatcacctttttgttaagcgggaataaaactacattaacccccaacctacctgattgtgatcaaggggaacctctcaaaattcaacaagagggggaataacacgacctgctaaggtttatctccgaagacaatttaataaaaacaagatggccacatccacgattacaagggcttggtgaagactcaaaaaaaataggtaacggccaaggaggggcttttttttaacaggtgaaactgatt

SEQ ID NO: 54858 - DNA, 639 bp, Glycine max
  Clone ID: PAT_MRT3847_20549C.1
gatcaaaatgcaattttttatacgattaatacgagaataaaagatgatcaaaatacaatgtcacaactagtgtcaccaggttcactacaaacaagtaaatttcagtcctacaatttatacgagaataaaagatgatcaaaatacaatgtcacaactagtgtcaccaggttcactacaaataagtaaatttcagtcatttagactattcatcctcctggctacgtaatctggccgttttatttgtcacaacaacatcaagctgcgcggctctctcgactatatcttttctctttcttgtggatatattgtgggcaatctcagcacagtaagtcctgttgtgcatcatgagcagttccaaatccttcacattgtgaacaacaaatttcttgaaaccattcgggagatagtggcgggtcttcttgtctgaagcataaccaatgttcggcatcaaagtgcatcccttgaactttctcctaacacgggaatcgataccctttggtctgcgccagtttgtcttcacagaaatcttcctgtcactttgaggcctcttgaacttcttcagcctcttcttcacgatcttcttcgagagaagaggcaccgccattttttctggagtggtttgaggtagagactgagatc

SEQ ID NO: 54859 - DNA, 3179 bp, Glycine max
  unsure (1)..(3179): unsure at all n locations
  Clone ID: PAT_MRT3847_2054C.1
cacgcgtccggttcacttatgttttgacatgtcaaatttatggtaagcagaaagaagagcaaaagcccgaggctgctgatattgctttacttatgcaaagaaatgaagctcttcgggtcgctttcattgatgttgttgaaactttgaaagagggaaaagtgaacactgaatactatcgcctcaaagcttgtgaaagctgatatcaatgggaaagacaaggagatatactcggtgaagttgcctggaaatcccaaattgggtgaagggaagcccgagaatcaaaatcatgcaattgtatttacgcgtggaaatgcagtccaaacaattgacatgaatcaggataactattttgaggaagctttgaagatgaggaaccttcttgaagaatttcattctgatcatgggcttcgtcctccttctatacttggtgttagagaacatgtcttcactggcagtgtctcatctctagcgtcatttatgtccaatcaagaaactagttttgtgactttagggcagcgagttttagcaaatccattgaaggtccgcatgcactatgggcatcctgatgtttttgatagaatattccacgtaacccgtggtggtatcagcaaggcttcccgtgttatcaacattagtgaagatatctattcaggattcaattcaaccttacgtcaaggaaatattacacatcatgaatatattcaggttggtaagggaagagatgttgggctcaatcagattgcactatttgaaggaaaagtttctggtggtaacggtgaacaagttctcagccgtgatgtatacagacttggacagctttttgatttcttccggatgctgtctttctattttacaacagttggatactacttttgtaccatgctaacagtgttaactgtatatgcctttctatatgggaaagcatatttggcactatctggtgttggtgaaacccttgaagaaagggccaggataaataagaacactgcactgagtgctgctttgaatacacaatttctctttcaaattggtatcttcactgctgtgccaatgatcttgggcttcattcttgagcaaggtttcttgaaggccattgtcagttttgtcacaatgcaattccagctttgcactgtctttttcacattttccttgggtacaagaacacattattttggtcggacaattcttcatggtggtgcaaggtatcaagcaactggccgcgggtttgttgttcgccatatcaaattttcagagaactacagactctactctcgtagtcattttgttaaaggtgactgcatctaactggggttagcagaaatgacttatttgactgctttccaactgctgttactcaaagttggaggttgcacttctgttgatagtatatcttgcttatggctataatgaaggtggtgcactctcatatattcttttgagtataagcagttggtttatggctctatcctggttgtttgctccatatttattcaacccatctggatttgagtggcaaaaggtggtggaagatttcagagattggacaaattggctactctaccgaggtggaattggtgttaagggagaagaaagctgggaagcttggtgggaagaagaactggctcatatcangagcttgggttcaaggatagcagaaaccattctgagtcttagatttttcatctttcaatatggtatcgtgtacaagcttaatatgaaaggggcggcttcactgacatgctatggtctctcgatcttaggaacgcgttctcgttccttttcttatactagcctcttcctagactcttctttttctctaagtctaaggggtttaccctagactcttccttttctcttctctgtctaaggggtgccctgagatcacattgaacaatggtgaaggctgtggccgttcttggcagcagtgagggtgtcactggaactattcacttcgttcaggagggaagtggtccaaccaccgtaactggatctcttgctggtcttaagcctggtctccatggtttccatgtccatgccttgggggacactaccaatggttgcctctcaactggatcacatttcaatcctaataacaaggagcatggtgcccctgaggatgagaatcgtcatgctggtgatcttgggaatgttaatgtcggtgatgatggtactgtcagcttcactattactgacagccagattcctctcactggaccaaacaacatcataggaagggcggttgttgtccatgctgatcctgatgatcttgggaaaggtggtcatgagcttagcaaaactactggaaatgctggtggcagagtagcttgtggtatcattggtctgcaaggataaactaatcacatgaagttggaaacgtgctttagatttgtggaataaagtagcacccatttaaacccgtttggttaggtccggtctgtactgctgaattctgtgttttgcttgtattgtatcgacacttgatgcttaatcaaattgttacattgcttgaagtatgtgttggtggttatccttatttcttgtatcaatttgtgcttgaagtatgatgatactcgagaaatgtgagattttcaattggaaaataatgacatggaatggaatagcagtttctagctttacacagttatatttctatggtgtcttttaaattttgcgggggtgagtcggtaattttcattttaggaagcctagatttctgtaaaactcgtcagcattgtgaatacttgtatcatcagttttttagtgtatgtcatttaaatcgtcttgtattattaggtttaatgcaatgtactattagttttttaatagatagaatatcttgcttatggttgtatcataggtctgcaaggataaactaatcttttgaggttagaacggtgctttagaattgtggaataaagtagcacccatttaaacccgtttggttaggtccggtctgtactgctgaattctgtgttttgcttgtattgtatcgacacttgatgcttaatcaaattgttacattgcttgaagtaaaaaaaaaaaaaaaaaaaaaaacccctccaaaaaagggggaaaaaaaaaaaaaaaaaaaaaaatggggaaaaaagacccaaaggggggaggctccgggaggccccaaatttaacttcctatttttccaacagggaaaactaaattaa

SEQ ID NO: 54860 - DNA, 699 bp, Glycine max
  Clone ID: PAT_MRT3847_20550C.1
gagagagaactagtctcgagtttttttttttttttttttttttatcacacaccgaaagattaaggtttcttttattttcgttcctaaagatgtagtggacagggttcaaggcaagataagaattgcaagagacacaacaaaatcaaacttggttctcaataagcaaaatacattgaagcagaattcaatttaaaattaaactgcaaatttgatattgaactactgaatcactacagataagtgacttttttagtcatttagactattcatcctcctggctgcgtaatctggctgttttgtttgtcacaacaacatcaagctgcgcggctctctcaactatatctttcctctttcttgtggatatattgtgggcaatctcagcacagtaagtcctgttgtgcatcatgagcagttccaagtccttcacattgtgaacaacaaatttcttaaaaccattagggagatagtggcgggtcttcttgtctgaaccataaccaatgtttggcatcaaagtgcatcccttgaactttctcctaacacgggaatcgataccctttggtctgcgccagtttgtcttgacagaaattttcctgtcactctgaggcctcttgaacttcttcaccctcttcttcacgatcttcttcgagagtagaggcaccgccattttctttagagtggcttgaggtagagactcccgga

SEQ ID NO: 54861 - DNA, 491 bp, Glycine max
  Clone ID: PAT_MRT3847_20551C.1
cgttacgcgtgggcgtatcccccccccccattcattcattgctcatttcctttgaaccgtttgcccattttccattggccaaccatcaaaaaatgaaactgtctttgttcctgttggcactgttcggaattgcgctcgtttttgttgcggcaggagactacggttacggtggatacggcaagaaaaagtacggttctggaagccacgaatacggctacggtaaaaagaagcattacaagaagaagcactacgacagcggatcctacgaatacggaaagggcagctatgggaaaaagaaatacggcgactacggtggcaagaaatatgacgactatggtggatacggaaaggactatggatacggcggctatggcaaaaagtacagctactgcagcggctcgcatgagtacggaaagagctacggtggctacggaaagagttacggtggttaccgaaagagttacagtgcctacggaaaggcatacgatgac

SEQ ID NO: 54862 - DNA, 799 bp, Glycine max
  Clone ID: PAT_MRT3847_20552C.1
gacccccaaaaaaaactcatcaacgttatcacacagccaaagattaaggtttcgtatatttttgttcctaaaaacaaatcaagatacgacttacatgaaagaggcacatcaaaaacctggttcccaataagcaaaatacactgaagcaaaatacactgaagcaaaattcaatttaaaattaaactgcaacttcgatattgaactacagaatcactacagataagtgactttttcagtcatttagactattcatcctcctggctgcgtaatctggccgttttgtttgtcacgacaacatcaagctgcgcggctctctcgactatatcttttctctttcttgtggatatattgtgggcaatctcagcacagtaagtcctgttgtgcatcatgagcagttccaaatccttcacattgtgaacaacaaatttcttgaaaccattagggagatagtggcgggtcttcttgtctgaaccataaccaatgtttggcatcaaagtgcatcccttgaactttctcctaacacgagaatcgataccctttggtctgcgccagttagtcttgacggaaattttcctgtcactctgaggcctcttgaacttctttaccctcttcttcacgatcttctttgagagcagaggcaccgccattttctctcaagtggcttcggacagagactcagatgtgggtttgaatagagtagttgtataagagcggctgcgtctagggtttctatttgatggaggtaagtgtaaacgggttgggccaaaccgggcaaccaagtaaactgtgctaagttagc

SEQ ID NO: 54863 - DNA, 534 bp, Glycine max
  Clone ID: PAT_MRT3847_20553C.1
aaagaaatgtgtctcattaggagtgtaggatccagatgcgtacactttatctagagcgagagctaaagccttggatagaatagagggtgagcatggttctcaccatcctcttcatgtgctcgctgacaagctattacttatccagctaccagaagggcatgacatagacaaggctcgctccagaaaagattgattgactcatgtgcccgtgcactgtttattccctttgtgcgaaaccatagtcgtttattccacgttgtacttaggtcgtgcccttctggactctatgctctctccctgtgtctacctgctcacccatctcaacctaaagattgctttttccgtacaactcttaagatattactgagcttgtgaggctcatttgtcaagattgttgtatttcatccgacttatgtacttggatagagtcttggagcatttgactgtgacatacaccaccactgtcgctgctgaccaaaacttggacttggtgttttatactttgcacctgggtttctttgacatggtttttga

SEQ ID NO: 54864 - DNA, 875 bp, Glycine max
  Clone ID: PAT_MRT3847_20554C.1
gggaggggaaaaaaaaaaccaacatattaatcgtttatcaaagctaacaaatttataaggaagaatgaaaaaaagatcaaaaatccattgtcaagagtgtcaactaggatcactacaaataagtgactccgtcatttagactattcatcctcctggctgcgtaatctggctgttttgtttgtcacaacaacatcaagttgcgcagctctctcaactatatcttttctctttcttgtggatatattgtgagcaatctcagcacagtaagtcctgttgtgcatcatgagcagttccaagtccttcacattgtgaacaacaaatttcttaaaaccattagggagatagtggcgggtcttcttgtcagaaccataaccgatgtttggcatcaaagtgcatcccttgaactttctcctaacacgggaatctataccctttggtctacgccagtttgtctgttgaataaaaaaagaaaaggttatttatacagactaggataaaattttcatagaaaagaacaatttgatctgcaatctcagccgaaagatggtgatatttaggataataatcacagaaaatcagcacattatagaaatttcatcacagattgcagatcagacaattttctggtaaagcaaaaagcattcttaactaaatgtgcaagaaaagtatcgctaaaatgaaaacgatttttaagaccaacataaatgtattcaagagatgtaaacaggaaaatagtaacagaaggcttatagcaaagaaagccatctgtgtcgcaaggcctgtaagaattttatatatgcccttaaaacgagatatccagctataacaagacaaaagtccgagctcaggatatcagataccatgggcaatcggga

SEQ ID NO: 54865 - DNA, 285 bp, Glycine max
  unsure (1)..(285): unsure at all n locations
  Clone ID: PAT_MRT3847_20555C.1
gggatgtgaataggagagggataataagaagaaagaggaggaagaaaaggggaaaactcanataaaaaaagaggaagatagatcaagatctcccttgcgtttgtctcagatgaagaaattcaagagcagaacgatactaactcaacggtatcagacgtttcagggtttcagcacttccattttttttttccggatttgacttggaagacaatcaaagaggttcctaattgcttgcattgttcctctgggtggtggatactttgagtattcttaaaatattgacat

SEQ ID NO: 54866 - DNA, 752 bp, Glycine max
  Clone ID: PAT_MRT3847_20556C.1
ctggcaacactagctagcggtttacttgacgccgcaaagcaacgaaatctctcgctctctctgatggacgacgtttgcgaaggcaaggacttcacgtttccgaagcaggaggagaagattctggacttctggtcccaaatcgacgcattccacactcagctatctctgacgcaagacaagccggagtacatcttctacgatggccctcccttcgccaccggcctccctcactacggtcacatcctcgccggcacaatcaaggacatcgtcacgcgctaccagtccatgaccggccatcacgtcacgcgccgcttcggctgggattgccacggcctccccgtcgagaacgagatcgacaagaagcttggcatcaaaaagcgcgaggacatcctcaagctcggaatcgacaagtacaacgaggagtgccgcgccatcgtcacgcgctacgtctctgagtgggagaccgtcatcacgcgcaccggaaggtggatcgactttaagaaagattacaaaaccatggacctcaacttcatggagtccgtctggtgggttttcgcccagctgttcaagaaaaaacttgtctataaaggtttcaaggtcatgccgtatagcactggctgcaaaacgccgctctctaattttgaggctggtcagaattataaggatgtatctgatcctgaagtatttatcacgtttccagcgcggggtgatcaggatgatgcatctttttgtagcatggacaacgactccat

SEQ ID NO: 54867 - DNA, 317 bp, Glycine max
  Clone ID: PAT_MRT3847_20557C.1
aatctgtctaaacaaactgtatcgcgactaccgacgttcatccactcacgataaccaccagctctcaacacagggagtaacatgacgccaggatccattacacggtaactgtttgccgctatgggaaatgccagagctccgtcgaacggctacggaagtggtagtgcgacgagtcacgatcgagcagctgacgtgagatgtaccgtgacatacttgtccatatgactgcgtctgagcttgctgttgctaccgcttacacctgacagcacgcgccattctcacagcagcgcactgatttgcattggagtgcgtgaccg

SEQ ID NO: 54868 - DNA, 312 bp, Glycine max
  unsure (1)..(312): unsure at all n locations
  Clone ID: PAT_MRT3847_20558C.1
gagctattagtcggcggccgcccttaatattcagggggggtttttttgccggattacgggagacaaacgacaacacataaaatagcgaaacaaacgttgggaggaagatgccttgaacacaattttctttcctaatgcaagaatttgacgggagacaaaaagcccacagccacaggcaagcttaaccaaagggccttgcccgccaaacaacaactgcaagacctcgaaacacattgtcactaacaaacaaactaatagtggactncatgacaccaacactatgcgttgtacaacaaacatcaacaagaacta

SEQ ID NO: 54869 - DNA, 344 bp, Glycine max
  Clone ID: PAT_MRT3847_20559C.1
cggaccacaccgccgctcccgcactacacttatcgaataccctcagtaattgcttttctaacaaacgaaactcaaaacagtgcaaagcatggagaaaaaaaacactgcacaaaacaatggcctttgaatttgattcatcgaccagccactaaaccaccatcttcctcctcctctttcgtcacccctcgcccttcgcggaccatccagagcatccctgggaggaactcgcgccgctccatcgccgtgcgcgccgccgccacggagggtgctgtggccactatcaccgcggcaagggagtgcaggctgagccccgcgaaggcccggcacatcgcggacagccgcgg

SEQ ID NO: 54870 - DNA, 762 bp, Glycine max
  Clone ID: PAT_MRT3847_2055C.1
tacgaattccagctctgtacccggggatcctctagagtcgacctgcagtgagcattaggcaaggaacatcattaaagacaaaagtgattttagttgtaatgagaagattcaatgagatttaaaagtcgcaatcagaaatgacaagcttgtctagacatattagaagtttatacacacgataaagacattctgaagaattgcttatggttaatagcatgttttcattataatttttgttattaaaagagattttaagtgaactgataaaagtaaaaaaaaaaagctaataatatataaggagtgtaaaataattttatattttcattcaattataaatcattgcttgattactttaaaataattattttaaaaattaataaacttatcctatataataaattgtgattagatgactataaatttttttttattgaatacataattctttttctcatatataagtcctaggctagttgaaataataagctaagaattgctaaataaatttctatacttaataaatttattttggttaaattagcctataaattagtctaactaacttatactagactgtcttgataatcaccatagaaaaaaattgttgacattaattattatttaaatatgttgataattcatattataatcaaataaaatttgtaaggcttttgaaaacaaagtaagaaaaaatggaaaaagaaaaaagtaaagttgtcccgttcaaccaacaagtattgttgtaaaaaaaaaaaaagatga

SEQ ID NO: 54871 - DNA, 334 bp, Glycine max
  Clone ID: PAT_MRT3847_20560C.1
gctctgaattttgctctagaatttacatataccctttttgtgtttctcgccaaccttgcatgacagcggcgaatgtcagatacccctcttgtttttgaacaagccaaacctgccgctgcgaaagggtcattaatcagatgagatgcatgtcgtgattctgatcgcaaccctataagcaactgcagctgataacacacagcattccttactggcagtatttgcacaccctaatctcccgatacatgtaacaaaactgcaagaaattgggatcgacatcttatgtgaatgattccacaaaaggactaccaaccaagcaaaagcatatgctgccact

SEQ ID NO: 54872 - DNA, 558 bp, Glycine max
  Clone ID: PAT_MRT3847_20561C.1
actactgtcgatctatggatagccaatgtacccaagtacctgtacactgggtaggattaattgtatatataattttgggtgtggtgtggttaaggataaagtttggtggtgtgtgtgtgtgtgggaggtgtagggtataatgtagtaagttttgtgtgtgtgtgtttaaatctaaaattgaactagcctgtacaacctttacaaaaatcatatgcacgggaaccgttttcaatttagtagtaattttgctattattattattattattattattgtcagggttcaattggtgacaggtggtcagctaattatttttcttatggtagtctctgttttaaactcagtttgtttgtgtcatcaccaagtgtacatccattaaatcatcgtggtgcactttaaatctcttcgcaattctgctgttcctgcttcctcctctcgcccatgtatcccaggttccgcttctgctccacattggggtgctctacactattctgatgttcattcatatcatgctgctgatcatgataaacttctccacacacaacttagtctcacaca

SEQ ID NO: 54873 - DNA, 347 bp, Glycine max
  Clone ID: PAT_MRT3847_20562C.1
cccaactagctagctagcttgctagcacacacttcgacgcagaaccaggccatgctcttatgggcttggcacgtttattactcttgctacgcgctctaaccctatacactggtcaccgatgcacctcggggcaagacatcgcgagatagttgaaactcgggtgacatcgagcctgtgcgcacgtagaaaataggcatggtattaatgaaggattactggaggagctacactgcataggaggagtatttgttgcaataggagaatttcgcacacattattgtcggatatggtatgcatcaaacgctggaatccacgatcttccagcgcactatactttttttggatgc

SEQ ID NO: 54874 - DNA, 248 bp, Glycine max
  unsure (1)..(248): unsure at all n locations
  Clone ID: PAT_MRT3847_20563C.1
caaaacggggatagcactaatttaaccgccgcatatcaaacattcggcgtgttacttttanctaacactttctgcaataattgcacgtactancatccaaacaagctcttcatcacgggcaaaaaaaatttaatcttttttcatcgctctcttctcaaaagactattcatcatccacattgtgcatgaaagagctgacaaagatctttaattttcttcaataaacaaatccaaatctcctccctcttt

SEQ ID NO: 54875 - DNA, 116 bp, Glycine max
  Clone ID: PAT_MRT3847_20564C.1
gcccgaccaagccaacaataatattgccctgaagatggaaggttgagcatgctgctaactactatgaattacccatgctgccgaacctgatcagctgaacataattttgtttttac

SEQ ID NO: 54876 - DNA, 241 bp, Glycine max
  Clone ID: PAT_MRT3847_20565C.1
atttatttcttaactaaagcacacgatattaggtggatattgcgcacccatgagcaacgaagggattaaaagggagcatgtgaccacctcaggtattgagacattcggcaacggacagaaattgtgatgggccataaactgattacaatgtgctacgggcacttgcatgggcagtatcaaggattagctcgtatctcattagagtgaggtagccttagtatgcccagatcatgttttgatt

SEQ ID NO: 54877 - DNA, 1177 bp, Glycine max
  Clone ID: PAT_MRT3847_20566C.1
tgaaccccgagcttttggtggtaactttcctgctcaggtgcggttcaatgttgcttctgattgtttcccgctaccagagagcattttcaaaaaggcaataaaggaaaattacaatgagaagaacaagttcaaaacagaacttactgctcgacaagttaagaagctcactgaacttttccggcctgtggatgttcgttcaggcttgcagcctgttcgttcccctccaaaagcaataattcctgatagggttgctcctgatggtgttaggggatcatggtcctatttgcacagggaaagggatccccaaatcgaacggcaagaagaaattccccgtgatttatttcttactgagaagagttaccgagcttatggtctccaaggagataaaaggaatgcgataccagcccctcaagttaatcctacactcgatccttatgagagggattatgaaagagatcaccttcatcatgtggaccctctctaccgcacaaacgtcccttcatacagagaaagtcttcatgccgatcctcatcatttcaatgagagtgaacaccagacctatttgcgtggcggaatttctgcacatgcagacgatccttatcaccagtatccctatggtgcttcaccaagggatccatatttgccacctatgagtagacaggaaatctcttcaagcacttatttggctgggggaagatccttgactgcaagtgataacttacaaaggagggaggctgttcaggataggctttactcaacatattctgcggctgatgctttgtctgaatacaatcggatgcagcactaccaagagagtttgaaagctacagctgtgccagtttcatcccgttactcttttgccggtccttcatattcacttcgctaaattaaacatgcacttttgaaaactccttggatgtgtttcttaagataatcttccattctggtgactgactcattgaaattaaaagaactgtatgaatcctacatactttttttcttaggcagaactctgaattgggaaagcagtttcttcgttgtgtgagatttgatgtgcaaaatgccattgaaaatgaaaccacgtgctttgcaactatcaaagtttgtgatttatggctaattggcatgtgctgctttggcatatatataggaatataaacaagcgatatttcaattg

SEQ ID NO: 54878 - DNA, 2128 bp, Glycine max
  Clone ID: PAT_MRT3847_20567C.1
ccacgcgtccggtcgttgtgggtggtttcaatttggagcacatccctgcttgcgtcgttcctttctttctctaccttttcggtctctctctctctctctctttccaagacgcagagctgaattaatcggcattcatcacatcacagcgacacagccctgatttatctttttctgcctttgtacctgtataatatgcaaagagacagaaagaagggcagtaagtatcctcccggggagtcttctaatcctcaatcatcagaaaaagatgatcacaataatgatacaaatcttgctgaaggatctagtaaaccagagctgagtaacaagaatactccacaatcactgaaggccaaatctaaaattgttaagaaatccaagggtggtaagttcaagaccataataaataaaggttctcaacagattgggggaaagagaagacttagaaagaacaaaaaagtagtgggcaatagtgatgaactgcctaaagagaagagtgagaaagatggaaggaataaagagaaggaaagtcaaaataggagcactcatgaaaaaagtcctattgagaatagccatcgagctgaaaaaaataagatcattaaggtggataagagcgaacagaagcagaagaataaagagaaacatacagagtcagacaagggtgctgggagcagaataaaccgaactaagcatggtagagtggaaaatactgtctccagtgagaaaaagagaggaaaacctagtggtttcatctttatgtgcagtgcgaagacaaaacctgactgtttccgttatcgtgtcatgggtgtttcagctactaaaaaagacattgttttaagtatcaatcccgggactaagctttttctttatgattttgatctgaggctgttgtatgggatttacaaagcttcatcttctggtggcatgaaacttgaaccccgagcttttggtggtaactttcctgctcaggtgcggttcaaaattgcttctgattgtttcccgctaccagagagcattttcaaaaaggcaatccaggaaaattacaatgagaagcacaagttcaaaacagaacttactgctcgacaagttaggaagctcactgaacttttccgaccagtagatgttcattcaggcttgcagcctgttcgctcccctccacgagcaataattcatgatagggatgctcttgatggtgttaggggatcatggtcccatttgcacagggaaagggatccccaaattgaacggcaagaggaaattccccgtgatttatttcttactgagaggagttaccgagcttatggtctccaaggagatagaaggaatgtcataccagcctctcaagttaatcctacactggatccttatgagagggattatgaaagagagcaccttcatcacgtggacactctctaccatacaaacgtcccttcatacagagaaagtcttcatggcgatcttcatcatttgaatgagagtgaacaccagacctatttgcatggcggaatctccacacatgcaaacaatccttatcacccgtatcgctatggtgcttcaccaagggatccatatttgccacctatgagtagagaggaaatctcttcaagctcttatttggctgggggaagatcgttgattggaagtgatatcttacaaaggagggaggctgttcaggataggctttattcaacatattctgcggctgatgctttgtctgaatacaatcgaatgcagcactaccaagagagtttggaagctacagctgtgccagtttcatcccgttactctttcgctggtccttcatattcacttcgctaaattaaacatgcacttttgaaaaccccttgcatgtgtttcttaagattatgactcattaacattaaaagaactgtacgaatcctacatacttttttttttctaatgcacaactctgaattggggaagcatcatttcttcatggtgtttgagatttgatgtgcaaaatgccattgatgatgacaatatgccttgcagacaccaattactatgcaactttcaaaatttgtgatttatgtctaattggcatgtgctgctttggcatataggaatataaacaagcaatatatcaattgattttttaagttaggttgtc

SEQ ID NO: 54879 - DNA, 220 bp, Glycine max
  Clone ID: PAT_MRT3847_20568C.1
ttttcttatcaaacttgatcgccattatgcacactgaagcaaaaatacagcaattgcacaaactatttggtgcctcatgttaaatgccaacaactatacgttctacagctctaggaacacctacagctataggtggcaccaccaaatacaacaattcgacgtaaccatttacttgagaagaattcgccaagctcattaccgcactactgaacgcaatgaa

SEQ ID NO: 54880 - DNA, 425 bp, Glycine max
  Clone ID: PAT_MRT3847_20569C.1
ggacacagtgagagtgtgagataatggacgaaattttacgacgtctttctgcggtggccgagtatcgaagaaagttttacctttgtcaaataatccattacagaatccgagcagccaaaagggttttgcgggatgcaaagaaggaatatgcgacaactcagtccctgaggaggggtggccaactcgttactcttgttgaagggccttataatgatcacaatcaacgctttatagtaaaatcaagcagtggagcagatagacatatagttggcattcatagtaaggtggagaaggagaagctagttccaggcacaagagttagcctggataggactaccatgaccattatgagaattcttccgtcccaagttgacccttttgtgtataacatgattcatgaagaccctataaatgctaattactct

SEQ ID NO: 54881 - DNA, 249 bp, Glycine max
  Clone ID: PAT_MRT3847_2056C.1
ataaattgcagcatctattataaaataatgtttcctaagaagttttttttcttctatttttttattttttaaaactaaaacttggtggaagagatgacagattggcaggataaaatgcagtcagagaataatttaatttcattattaatgtaattaaagattttgtctttcccgtcatcttgaaatattaaataattgaagaataaatgtaatataattgctggtcagaaaataaaaaataattgctca

SEQ ID NO: 54882 - DNA, 363 bp, Glycine max
  Clone ID: PAT_MRT3847_20570C.1
ggaaggcgaatcaagcactttctctgaacaatttacccttaccaagagcacatgcatataaagggattaccgatgctctgacatggatctgaatccatactattaccaacacaaaatttcctgttccactcttactactctatacaggataagtccacttacacgatacattgttgatcttcatgtggaatagtctctggctcaaaacctaaagcaaacaaggcatatcattacatatgtacaaggctactaatagattatgcttctgtccactgatcaatacacacttatgggcctcttatcaactcctaatcaactctcatgattcattgagattttcttcagacatctacgatgcaccaa

SEQ ID NO: 54883 - DNA, 682 bp, Glycine max
  Clone ID: PAT_MRT3847_20571C.1
aaacgggcccacatggggttagtggccgcgcctttagaacccgccacccaccagggtaattttcggcacccggcctttggccaccgcctggatcatcttcgccccgtgcttgatcaccccctgttgctcggcctcggtgccgaccatgaagccggtggtgttatgcaggaacaccaggggcgtgcggctctggtcgcagagctggataaactgcgccgccttgctcgcgcccttgggcgtgatcgggccgttattgccgatcaggccgcagggccggccctggatttgcagatggccgcagattgtctgggtgtcgaactcggccttgaattcgaggaagttcgagccgtcggccaggcgggcgacgatctcgcgcacgtcatagggttttttcgggtcgtcggggatcagtccgagcagctcgtcgatgggatagagcggttcggcccaggtcctggcggctgtgatcggcagtcggtcgttccagggcagttgggcgatgatttcccgggcgatacgcacgccgtcggcatcgttttgcgccaggtattcggcggtgccggccacctgggcatgcatctgcgcgccgccgagttcctcgtccgtcgccacttcaccggtggccgccttgagcaatggcgggccggcgagaaacaagcgggcctgccacggaccaccacca

SEQ ID NO: 54884 - DNA, 1128 bp, Glycine max
  Clone ID: PAT_MRT3847_20572C.1
atgagaataggagtaaaaatagtgtgaatttcatttaaactttaaagaaattaactctattcttatatatgttccgaattagcttaatgagccatgcttaatccaaacaagggctactatagatgagaaaaccaaagccttctctcacattgtagctttcaagaggagccacgctttctttgcctacagccaaatatacaaaaatgcattctcaacaagctaaaacttgcgtatgattaatgttaaaattaaattggtagtgatggtgggtggtggaatcgagataggcacgtgctaaccgaatgcccaattgaacctgagacatggtggtaaggtgaagtttatctggcttcagacgcagtccctttgcatccacacacttgacgttaggtaatgttattcccatttgagcacgcctcaccttctctataaacttgccttcccctgatgcaagtgctacctggataacaaggagagagggaaggttgagatcggatcgaaggtccataataaacctctccatcttatccttataaccctcagcatctttttttctcaccgtgtcactttccccctgataccaaagcactgctcgaatcgtgccacctccaatcgcctgcatcgcgcgttgtaccaactcatcgtacaacctcgtccctcgactccactgtccaatcttggtcccacccacggcacaagggacaaggcccaccagcccaccagctccacgggctttgacaacctcgttcgcaaatgccattccgggcccaacgccacatgtcttgcccacatcgatgtccgcatgcagtggctcacgcgcctcctcccactccaggcccgcgctcagcctgaaaacccacgggctgggcctgcactcctctgggacatcaccgtcccattttcccccgaaaacccctcctcgtcctgccatgttgctctgtcctgccagaataaatatgtccctagaaactgcccctaaacctccacgggcagctactaccaaaacgcacaaaaaccatgacaagaccacaattgaatccatctatttcttcacaatgctacactaatttatcaacttataaaacaaaataaaaaaattcttcttcggctctcatctcggacgcgtgg

SEQ ID NO: 54885 - DNA, 227 bp, Glycine max
  Clone ID: PAT_MRT3847_20573C.1
cagaacctgaacaattatggttctgttattcatactcatctgatttatattttttagaaaaaaagcacagcgcaagttataaagttttgctatgggatgagtatgaataacataaccttaacaattatggtttcgcattaaccgacatctatgctcatctattctagcaactccttatatttctattatcaatgtaatttaatacttaatgtacctttactgtttaa

SEQ ID NO: 54886 - DNA, 425 bp, Glycine max
  Clone ID: PAT_MRT3847_20574C.1
aaaagggaaaaaaaatatagttgatttttatggctaacttcaaggtttcgtctagtccatggaagtacccaataaagatcccaaattccttctttagtaaaatcctaaaaaagagctggggcttgttacttttatgtcaaaaaaaactgtttttgtggaaacatttattttaaatacccgaaaggcattacaaacttttttccattttgccgtacaacaggctttaaaattttttggttggttctccaacatccacaatagaaaactttgttttcgcccttcgaagacacaacttacttgtttttccaaagcaaaataaaaaaggggctccagcgttttaaataagcaacctttccatttcctaatgctgaaaatagggaccctccagctacgggggttacttcctactgctacaattatttttt

SEQ ID NO: 54887 - DNA, 232 bp, Glycine max
  Clone ID: PAT_MRT3847_20575C.1
ccggccaggagggacctgttgaaggagggaagagagagattttcacaccaatgtacttcttcctggcacggaagcctgatttagacaggaactaagctggctgtacaaataggttgctgttttcatcagttacggtgattctggttaccaacacttcattttgctgcttgtttcgatgaagcagtgctcctccatattttgtttaccctacaaaaaaaaagagggggggggg

SEQ ID NO: 54888 - DNA, 328 bp, Glycine max
  unsure (1)..(328): unsure at all n locations
  Clone ID: PAT_MRT3847_20576C.1
agcccgaatccggctcgaggcaaaagaatttcagncacaacctttacaatttactctacacctcaaccacacggggactcggatcaccctgaacaccgtacacaccacttaaataaacaaccacttataattaccccacaaatggagctatacacaaagggggacaatgacactcccacacagggcaacgtcgcacttctgcgtttccgaaacccaataaaatataaccgaggcactcacgtttttagaaggaaggacgctcaacatgaaacatctacattacacctttctgatataagacacaccttaggaacccaatgatacaaac

SEQ ID NO: 54889 - DNA, 869 bp, Glycine max
  Clone ID: PAT_MRT3847_20577C.1
gcgagccgccttcttttatctctctctccactaccatgtgagtcacttcttctccttttcgcctttccccctcactcagtcctctttttactggaacggggataaattctctgtgttcagatcgaaacaaagtcgttttgagttccgccgaaagcaccgtaagttgcagcagctatggatttggcatccaatctcggtggcaagattgacaaagccgaagttctctctgccgttcagaagtatgagaagtatcatgtttgcctatggaggtcaagaggaagagagaaaagctaattataccgatatggttaataaatactatgatcttgttaccagcttttatgagtttggctacgcgtactcccacgcgtccgcccacgcgtccgcggacgcgtgggttcgagagagcatcaaaagacatgaacacttccttgcttcacaacttggactgaagccagggcagaaggttttggatgttggatgtggaattgggggaccattaagagaaatttctcgattcaggtaaacaagattgatttcatataggtttcctcttcctttgtctttcactgtttaactttactagctaataaaaatcaaggggtatctgtgcagcttaacttcaattaccgggttgaataacaatgagtaccagataacaagaggaaaggaactcaatcgcattgctggagtggacaagacttgcaattttgtcaaggctgacttcatgaaaatgccattaccagacaacagttttgatgcagtgtatgcgattgaagccacttgccatgcaccagatgcttatggatgctataaagagatttttagagtgttaaagcctggtcaatgttttgctgcttatgaatggg

SEQ ID NO: 54890 - DNA, 415 bp, Glycine max
  Clone ID: PAT_MRT3847_20578C.1
caaacgtcaggggatactggatattgattaccgttggggcggagatcctacaattattgggcctggtgcatctggactaggtgcctcaatccctatacagctgaaggatctacgcgcgtttcaccattaggcgtgtgatatttcaactaagatgaagacatcccctgcattggtggagtgggtgtagctctgattgctgagccaaaaccgaggattgattatactctgcaagctgtaggtggaagattaacgggtattcctgcactctcagatatgattgatgatactgggaactcaattgctactgacatgctccaatggcctcataggatagaggatccacttggcggcgttcctgctgataccaatgaactggagctgataccccagcggaaacttgcactgactgagagca

SEQ ID NO: 54891 - DNA, 776 bp, Glycine max
  Clone ID: PAT_MRT3847_20579C.1
cccacgcgtccgtacgactaatctctctttctcgaagtgggttcccaattcatcgttgtctccgccttcttttatctctctctccactcccatatcgaaacaaagtcgttttgagttccgccgaaggcaccgtaggttgcagcagctatggatttggcatccaatctcggtggcaagattgacaaagccgaagttctctctgccgttcagaagtatgagaagtatcatgtttgctatggaggtcaagaggaagagagaaaagctaattataccgatatggttaataaatactatgatcttgttaccagcttttatgagtttggctggggggaatctttccattttgcacccagatggaaaggagaatctcttcgagagagcatcaaaagacatgaacacttccttcctttacaacttggactgaagccagggcagaaggttcaataaaacaactaagcaagctgatatctgatttacaatatttttttttttaaatttcatgagcctttataatttgttttaggttttggatgttggatgtggaattgggggaccattaagagaaatttctcgatttagctcaacttcaattaccggggttgaataacaatgagtaccagataacaagaggaaaggaactcaatcgcattgctggagtggacaagacttgcaattttgtcaaggctgacttcatgaaaatgccattcccagacaacagttttgatgcagtgtatgcgattgaagccacttgccatgcaccggatgcttatggatgc

SEQ ID NO: 54892 - DNA, 1279 bp, Glycine max
  unsure (1)..(1279): unsure at all n locations
  Clone ID: PAT_MRT3847_2057C.1
cctgccggtacgcggcccggaatgtcattgctcggtcgacccacgcttttttcccacgcgtccgtacggctgcgagaagacgacagaaggggacacacaacaaagttctcattttttctcattcctttccgaccatggcatcaccggcatccaacccccaaagcgccgagactaagaaaagccgtggccgccaaagggttgacattaagaaaatgagcaacgaggccaacctccaagtcacgttctctaagcgccgcagcgggcttttcaagaaagccagtgagctttgcactctctgcggcgctgaagtggctctggtggtgttctcgccggggcagaaggtgttctccttcggccaccccagcgtggatggcgtgattgagcgctatctcactggggtcgcaccgccggaggcggacaacatgaattacatcgatgtgcaccgcatggccaaagtggttgaccttaacgcccagctgactcatatcaaagatcagctcgaggcggagaggaagcgcgccaaggagctgggcggcattcagaaggaggccgaaacccatctgtggtgggcccggcccgtggccgacattaccgatattaacaacctgctgaagctgaaaaaagctttccagcagctgaaacaagatgtgtccggtcttgctggtatggctttgttccagtctgttgcaaatggaaacccggggcatcagttttttgctggggcttcttcctcagccgttcccaatgttgtgcttcagtcacaaccactgccagtggcccaggtgttccctcctgctgttccacagatgatgtttccaccacccatatttgagaactacatggtgaaccccaatgggtttgatgacatgggaatgggaggaggaggatttggaggagcaggaccttctagtgctggtggtggtggtggtggtttcttttgatcctgccagctggattttgatgcccttttgtttttaattaagagttcatgttgttttaatttctgtactgttccgggttagctagtttcatatgtacgtgacaacatgcttaattagcactgattagctagggttcggaattcggatatccttgtcttgaaccatcatcagcattgtcatgtaatgctagcagctggaatgttttccctttcgtatcgtttctctgttatgttgctcggactggagtgatgtactttcatttgagttgtttaaattgaataaagggcatcttttttatttgtttctcccaaaaaaaaaaaaaaaaaaaaaaccccnna

SEQ ID NO: 54893 - DNA, 660 bp, Glycine max
  unsure (1)..(660): unsure at all n locations
  Clone ID: PAT_MRT3847_20580C.1
ttttaggctagcaaaaggacacatcgcacatgctctgttttgatgcatacatttccatttctctatttaacacttgttaccaaattctcgctacatccgccttcttttttctctctccatccaacatcgaaacgaggtcgttttgtgttccgccgaaggcaccggaggttgtagcaggctagcagctatggatttggcatccaatctcggtggcaagattgacaaagccgaagttctctctgccgttcagaagtatgagaagtatcatgtttgctatggaggtcaagaggaagagaggaaagctaattataccgatatggttaataaatactacgatcttgttaccagcttttatgagtttggctggggggaatctttccattttgcacccagatggaaaggggaatctcttcgagagagcatcaagcgacatgaacacttccttcctttacaacttggactgaagccagggcagaaggttttggatgttggatgtggaattgggggaccattaagagaaatttctcgatttagctcaacttcaattaccggggttgaataacaatggagtaccagataacanagagaaaaggaactcaatcgcattgctggagtggacaaagacttgcattttgtcaaggctgacttcatgaaaatgcc

SEQ ID NO: 54894 - DNA, 1551 bp, Glycine max
  Clone ID: PAT_MRT3847_20581C.1
cccgcgtccgcctcactcacttacttctctttttcctttaacgtaaaataaattcattctgtgttcccacgcgtccgtacggctgcgagaagacgacagaagggggttcccaattcatcgttgtctccgccttcttttatctctctctccactcccatatcgaaacaaagtcgtttttctctctccctacaacatcgaaacgaggtcgttttgtgttccgccgaaggcaccggaggttgtagcaggctagcagctatggatttggcatccaatctcggtggcaagattgacaaagccgaagttctctctgccgttcagaagtatgagaagtatcatgtttgctatggaggtcaagaggaagagaggaaagctaattataccgatatggttaataaatactacgatcttgttaccagcttttatgagtttggctggggggaatctttccattttgcacccagatggaaaggggaatctcttcgagagagcatcaagcgacatgaacacttccttcctttacaacttggactgaagccagggcagaaggttttggatgttggatgtggaattgggggaccattaagagaaatttctcgatttagctcaacttcaattaccgggttgaataacaatgagtaccagataacaagaggaaaggaactcaatcgcattgctggagtggacaagacttgcaattttgtcaaggctgacttcatgaaaatgccattcccagacaacagttttgatgcagtgtatgcgattgaagccacttgccatgcaccggatgcttatggatgctataaagagatttttagagtgttaaagcctggtcaatattttgctgcttatgaatggtgcatgaccgattcttttgatccccaaaacccagagcaccaaaaaatcaaggcagaaattgagattggtgatgggctacctgacattcgattgactgctaagtgtcttgaagctctgaagcaagcaggttttgaggtaatatgggagaaagatctagcagtggactctcctcttccttggtatttgcctttagacaaaagtcacttctcactgagtagcttccgtctaactgctgtcgggcgacttttcaccaaaaacatggtcaaggttctggagtatgttggactggctccaaagggtagtctaagggttcaagacttcctggagaaggctgcagagggactagttgaaggagggaagagagagattttcacaccaatgtacttcttcctggcacggaagcctgatttagacaggaactaagctggctgtacaaataggttgctgttttcatcagttacggtgattctggtagggtgaatcgtaagctaggattgtttttggccttgttgccctagtgattcttgctgtttctttgttttgtttaggttaccaacacttcattttgctgcttgtttcgatgaagcagtgctcctccatattttgtttaccctaaatattatatgctcttttactttgtttaaaagtaattgcagtttttgtcttagtttgcattgaaaaaaattttaatcttct

SEQ ID NO: 54895 - DNA, 236 bp, Glycine max
  Clone ID: PAT_MRT3847_20582C.1
tagggtagatctgattgttaaattttgttttgttgctaatttagttttcagttggtgaattttgtaggtgaatttagattattatggcagttgctttttttatgatctgtattatttttctattctgtatatacctagtggattatgttgagctgttagttatttgtatgtgaagcatgtaagcatttgaatatattgtgtaacttctaattttagttgcatatgttatgtgttta

SEQ ID NO: 54896 - DNA, 250 bp, Glycine max
  Clone ID: PAT_MRT3847_20583C.1
tggaaaggccttgagagccacagcatgtgctacatcatgtgcattggcagcacacaaattgcggcgcccagtcaggatgtatctaaatcgaaagacagatatgataatggctggaggaaggcatcccctgaaaacaacttacagtggtgggtttcaagaatgatgggaagattacagcattagatcttaagatattggtcaatgcagggatatatgtggatgttagtccaataataccacgcaacatgat

SEQ ID NO: 54897 - DNA, 484 bp, Glycine max
  Clone ID: PAT_MRT3847_20584C.1
gcactctttttctctgtttttaacggaatatgaacatcaagtgcttatactcagtggaacagaaaaagtccctcacactcactttattatgtggagaacacggaggcccacaataactgaaatagggctatggactacttatagctgagccacgcatgcagtagcatacactctctcaaaacatccattgaagcagtacacctggagggtgtctgggctaatgcatttgctatacgagcaaagattgtttcagcgcttaaaaaacgcatataggacagagtgcacaatcccaaagacttatagagcacctatcaagctccataggtcacatgaaccaaaaaactaggcgcaactagccttgcctgctaaattacaggaatcgcggctcgtctatcttgaggaatataccagccacagatctcaaaacatgactagaggctggactcaacacagctcttaggaagcacactatgacccgtttgca

SEQ ID NO: 54898 - DNA, 725 bp, Glycine max
  Clone ID: PAT_MRT3847_20585C.1
aagaaattctgttccagaggaccccggtcaggtatgctttattggatccataaattcattagaatcaatttatgagcccttattagcaattattgaaatatttaatccgctaaaagaaaagccactgaaagttgaaacaagaagattcctcagctttttataacatatatactttaacgcatgagataaggctgaattgcttgtttgaagtcaaagaaaggttcagacctgtgagagaagtgaaattactaactaatacttctctttttttattcccatatctagctgttgaatgacaataatattggcctgaaaagaaagggagctccgaaccaggtacatatgcattctttccttttaatttatacgaagctgtggtactcgatgagtttagtatttttcttcatttgactctttgttgttttgaatattcaaggcgtacgcatcatattctgatcacgtaagttgtcataattacaatcagttgtactactatcatagtgggcaaaattaaaatggttaaagaaattagataaagtaatagtttatcacattataaaataattttataatattatttaatcacacagataattatatataataataatttttaaaattaatatctgatgattgggtaagagtgtgaaaagcttttacacttaccggatgtgcatgcattaatgatattaaactctagaattaactgtatcaaacattgcatg

SEQ ID NO: 54899 - DNA, 324 bp, Glycine max
  Clone ID: PAT_MRT3847_20586C.1
atccatatgaggcattgcaaaggctaaatcattatccagcaatgaaatcattaatggaaggtggaacagctatacaggatggaactctcactataaatgaacgaggttatcattctatgccatatgcagtaattactggacgagcaaaaattggatgttcagctagcttcatgaatgtaccaaaaataaagggaactcacacaacgatgaagttaagaatgctcgcacctgcaaggacatatggtgcactcaatgaaggtctatatatgaatatctattaggcatgctaagagaaattgatggatttgggaagaattgcataaa

SEQ ID NO: 54900 - DNA, 824 bp, Glycine max
  unsure (1)..(824): unsure at all n locations
  Clone ID: PAT_MRT3847_20587C.1
gaagggagaagaatggtttccatcatcatggaaaagtgctgatgatcctggccaggagagactctttaaaatagaccgcagaggatttcccaagcagttcttttgaaggggaccactataagcactagatttggtccatggaatggcttttacttttcagggtctttgattgattcacgtagtccagatgttctttttgagttcgttttgactaaaaaagaaacattttctcagttccaggctctaaagaaatctctttcctacagattttgggtgaccaccaagaggaacgcgttggtttctctttgggaaagtcaagtcagtgactggcacactctctatactcaaccatcatccccgtgtgaatattatgggaagtgtggagcaaatagcgtttgcaatgcgagcaatcctaggtgcacatgcttggatggatttgttgcacacatcaatcggtccatgggnttgtgttcgaaccattcgcttgacttgtaacaaagacgggttcaggaggtacacaggcatggttcttcccgatacatcctcatcttggtatgatagaaacttgaatctacagcaatgtaaggatctgtgtttgcaaaactgttcatgtacggcatatgcaaatttggatatatggtggaaggaagtggctgcttgctttggtatcatgatctcattgacttgaggcattacccacaagctcaaggggggcaggacatttatatacgatactctgattcagagctagatcacagtcacanaaatggtttaagcaagaagaagattgaagccatcatcagttgctctaccacattcgtcat

SEQ ID NO: 54901 - DNA, 494 bp, Glycine max
  Clone ID: PAT_MRT3847_20588C.1
atatagactcgcgggcggatttttttttttttttttttatcttttttcttaaattcccagttgctatcattgatactgcgagaaatcagagaaatacagccaatgcagccacaacacaaatcttaacgttgtggctgaagtcatgttcaagactgtcttttaaaaccttggacttgtaactaagcagcaaatctaaggctgttgggaaatggcagtatcagcaacagacgacacggaaactcttctggcaggacgagtagactttttcacataagatgaattccactccccaccatcttgagcatagtaatccatcggataatccccaccaaaatcttcccctccctttgcatcctcacaacaagacccactcttgttgcaacaacccccaccctgtgcccaaacctcattcttctcccaccacccgggtatcactccgagcgcaacctcagcctcaaaaggagtaagcaccggtttcacaaaagcctcccccc

SEQ ID NO: 54902 - DNA, 265 bp, Glycine max
  Clone ID: PAT_MRT3847_20589C.1
ttaaaacctagccgccgatgtcggcagaaacacagccagtaaccgcagcttcagcactttcatttctcattcgatgagggcccttctccggaatcacctcttgcatttgtcatgttctccagctcgcacgcttctggttcggcttcaagcgtgcgagctgtcatcgtcatcttcttctcctcctcgtgactcccgatacgttagggtttcggtgtggtgggatttgaggagctgcccggtgcctgatgacgtggaccctttgaag

SEQ ID NO: 54903 - DNA, 876 bp, Glycine max
  unsure (1)..(876): unsure at all n locations
  Clone ID: PAT_MRT3847_2058C.1
tgttgtttactgtagaaaattctctttgccacagtgggatatcatgtccagtggtgggtcagttcagtccgttgcaaatttagctaaaggaaaagaccgaggcaacgttgtaaacattcaaaaaatacaatcaaaagataacagtgtgtggatcttgcaagatagctgcacaagtgcttatgagtcaatggtggtatatgctcctgtggaatttgctggtatacaatctgtgctgacaggatgtgattcaagtaatcttgctatattgccgtcaggattctcaattcttcctgatgggattgagggaaggccattggtgatttcgtcaaggcaagaagaaaaatacactgaaggaggctctttgtttacaatggcattccagatccttgccaacccttctccaacagccaagttaacaacggagtctgtggaatcggtcaataatcttgtgtcttgtacattgagaaatattagaacaagtttgcagtgtgaagatggttagtcaagataaaagataattagatagatcatacataggatttgattagctgctacagttatgtaggctttaatttctaccccttttacagttgggatgaatatttatttagtgctccnatcgaaactatcgaggcgaacgttctggatggactttattctatatggaaacctcatccttgaatcncccctttcagtaactncanggattttcacatgcttcgtcgcttccgcgctcactatagcacnatgcgctttnnctactgtgtccctctgttaacctacaacnacnataacgcngggggaggcgcgggcccnaccacccccnnngtctggtnnttcntccggccncccgcgggncncgtgtttcgccctcng

SEQ ID NO: 54904 - DNA, 324 bp, Glycine max
  Clone ID: PAT_MRT3847_20590C.1
gtaaaggttagataaaaaaaaaaatattgtatatcttagaaagagaggaagtggagggtggtttcatgcttcctgttaagaaggttttaaattttttgcttacattttatttagtatttcttgattgttgtgtgatatagtaacatgcagttcattatctttgttatgccattctagtttctagatttcttgatcttgaatgaagatattgtaaccaatattagaattttttatttgataaagaaatatgtttcggagatttttttcttgtaattatatgaaaatgagagtgttacttgatattcttaagtatatgtctgtcaa

SEQ ID NO: 54905 - DNA, 309 bp, Glycine max
  Clone ID: PAT_MRT3847_20591C.1
attcttggaataccaccacgaccaaaaaaaaagtttaatttaaatgttttgcctgaaaagtctgttttatgaacaactataacccattgggatacctacgcccggaaatttaagggaccaaaattccatatgaacaacaactaggaccataaaaccaaatggataagaaaacccttggaaccctcaaggagccacattttaacatggaagctcaaaggcggctgttggtccttttacagatgctcaaaatgttaagctgattgatgccattctttaaaggtgtgggatggtggctcgcctttatgcaaa

SEQ ID NO: 54906 - DNA, 217 bp, Glycine max
  Clone ID: PAT_MRT3847_20592C.1
ccacgcggcacaaagggcgaaagcggcacacggagatttgtttctggggatggagaaaacacacccttgacaccgggaaccaacgttgaagagggtgcgacaagctaataatggcacagaaactgagacgagggtcagtgcgtgattgactgtatcgaggaaacaaacgaacatacgaaagaaaatacagacatccctaacatgcagatgattcact

SEQ ID NO: 54907 - DNA, 412 bp, Glycine max
  Clone ID: PAT_MRT3847_20593C.1
acctcctccttttagggtgtgggggccatatcaatataaacgggatggtcatcataagaataacgcagcttcatattacgacttcaccaatacctgaaaatcaacactgccctacccaccctcgcgttaactcgaagccgccgttttcctgatatcccaaggtaaagccctctccctggaatcccaaatcatttgacttgcggcaggcaacccacttgctcttctgaaatgggaaggctcataccctaacctcccctccatcctcctctattgccacaccagacctcgacccatcggagctacttcaagtggacccaccactccctttaatgcccacctagacatttccggccgcattttctccccaggctctcacgacatgaagtgcgtagggatgcactcctcttttagg

SEQ ID NO: 54908 - DNA, 211 bp, Glycine max
  unsure (1)..(211): unsure at all n locations
  Clone ID: PAT_MRT3847_20594C.1
antacattttaagttgnnannangcgtacgtaagctcgngaattcggctcgagagtctccantnnatnntacnaancnggttacnnagntgccgacaagttgctgtccttntggnacntnngnngancangngnctttgcacaagattatgccanatantnntntcngtcnanatanngncaccgtngaagncgncatcgcncatantgtt

SEQ ID NO: 54909 - DNA, 123 bp, Glycine max
  Clone ID: PAT_MRT3847_20595C.1
ggtggaacataaacaatgtgttgtgtatgtgaattcaaatccatggtaggccggttcttacttgacaatggagtctcgtagaagatggtgattacattgttggaggctcgaatgataaggttc

SEQ ID NO: 54910 - DNA, 1879 bp, Glycine max
  Clone ID: PAT_MRT3847_20596C.1
caaccatggctatgtctactattttgcttttgactttcttttctttcatttatggcagtgcagctactcatcacgtttatagaaatcttcagagtttatcttctgattcctccaaccaaccttacagaactgcttatcacttccaacctcccaagaattggataaatgatcccaatggaccattgagatatgcaggactttaccacctattctatcaatacaatcctaaaggtgcagtttggggaaatattgtgtgggcacattcagtgtcaaaggatcttgtgaattggactccactagatcctgccatttttccatctcaaccgtccgatataaatggctgttggtcaggatcaaccacactacttcctgggaacaaaccagttattctatacactggaattgacctattgaatcagcaagttcaaaacttggcccaactattggacagacccccaaattctatgtagtaaaaagggttcatccgtcaaaagtggtttgggcccatttggtctactagtttttgcttcagagggtttgcaagagtatacatcagttttcttcagaatattcatgggcattggagggtacttgttggaagcaaaagaagaactaggggaatcgcaattttgtataggagcaaagactttgttaattgggttcaagccaaacaccctttgtattcaatcctaggaagtggcatgtgggagtgtcctgattttttccctgttttgaataatgaccaattgggtgttgacacgtcggtgaatggttatgatgttaggcacgtgctcaaggataaagcacaactatatgctttcaataatggaactgctgatgtcaagatcacaagattgagtgcttggagcatgaagaaagcacaaatacattgaaagtaagtagagtggtatggaaaatactatgcctcaaaaactttctttgatgatgggaagaagagaaggattttgttagggtgggctaatgaatcctctagtgttgctgctgatatcaagaagggatggtctggaatccatacaattccaagggctttatggctgcataagtctggtaaacagttggtacagtggccagtggtggaagttgaaaagctacgtgcatacccagtcaacttgcccccccaagtgctaaaaggaggcaagttgcttccaattaatggtgtcacagcaacacaggccgatgttgaaatttcatttgaagtgagtaatttgagagaggctgaagtattggactattggacagacccccaaattctgtgtagtaaaaagggttcatccatcaaaagtggactgggcccatttggtctgttagtttttgcttcagagggtttgcaagagtatacatcagttttcttcagaatattcagacaccaacacaaatatttggtgctcttgtgcagtgatcaaagcaggtcttccttaaacaaagacaatgatttgaccagttatggaacttttgtggacgtcgaccctcttcatgagaagctatcattgagaaccttgattgatcattctgtcgtggagagttttggaggagaaggaagggcttgcatcacggctagagtttatcccacattagcaatcaatgatgaagcacaactatatgctttcaataatggaactgctgatgtcaacatcacaaaactgaatgcttggagcatgaagaaagcacagataaattgataccgagcagaatgggagaaatggaagaaccataaaagttcatgatgactaattttttgacttcttctactgatgcctctaaatatcattgatgcacaacaataatatgcttgtcattcatcttattcagatttaatatttgataagttgacaaaataaaaaatatatatttaagaaaa

SEQ ID NO: 54911 - DNA, 266 bp, Glycine max
  Clone ID: PAT_MRT3847_20597C.1
ctttattcatcataaagctgttttatttcccttttctcctggcttctgattcagattcagttcacctcttttttttcttcattttttttgtcttttgttaattttcttggtgtcattgcgtttgcaaagagaattttatgtgttccattgatgtaaagttttcagctttgaattgtagttcttgtggggtgcgtgtattccggagcttgtgtttgatgtaagggtattttattttatttatttttttttttttggggggggggggg

SEQ ID NO: 54912 - DNA, 449 bp, Glycine max
  Clone ID: PAT_MRT3847_20598C.1
agcgtgcgcaccagacctcacaccctgctcgtcaatctaggaggcggtgatagagataataagcaatgggatcttcaagagcccagtacatagggttgtaacaaacgcggagaaagagaggctatcaggggttctgttctattctatagatcctgagagagaaatccggcccgctgacaaactgatagacgagaaccatccaacactatacaagaaggtgaaagtcaaagaatatactggtggactctacgaacatttctctcgagggaaattggttaaagagactgcaaagatatagcttgttcgctttggattaaatccagctatttggactaatccttagagacaaaaacactgtataagtagtaaaagtcggtacgaattaaagctcaagctagtcgtatctatgtgatggataagggtgaaacctttgcgatcctagataataa

SEQ ID NO: 54913 - DNA, 298 bp, Glycine max
  Clone ID: PAT_MRT3847_20599C.1
tttttaaaatgatttataaatagcactgaatattacacatctttgttataattgggacggggtaaaactgattgagatgcttgtgaataaattgattcacacacacacacatctcggacacaaaaacatacaggcttccaataaggggctgtggatttttaaccgtaaactcgcatgactatctttgacttaaaattgtttaaaaaaggttttcttgttacgcaaatctaccccaccgtcgcagaatttttttttacaaacatgaacatcttctccatggaaagttatattctccaca

SEQ ID NO: 54914 - DNA, 348 bp, Glycine max
  Clone ID: PAT_MRT3847_2059C.1
ttatcggcacgtgcctttggggggccgaggccctttactgttgttcggttttttttcttttgtttcttgcgttaaagattgaaccccctccccacttgaaggaggtttttgtccttttttaagggagcttaagggaaatgggaaacccccaatttgtttttttcgccttgaagaaagcgtcaggaattttaattttatttttcaccccaatggaagggcgaacctccaactaattttttcccctgtgttgaaggggaatttaaccctccatagggccccctcgaggataattttttcgggcttacctgggggtttaagcttgatcattaaggcgttgggggggtttaa

SEQ ID NO: 54915 - DNA, 433 bp, Glycine max
  Clone ID: PAT_MRT3847_205C.1
aaaaaaaccccctttttcagggttcttttaaaccccccccttaaaaaacaaaaaaaaaaatgggtttttctagcaacagttactgaatctcaaaaggttcacctaaccccaggttaattttccctgggtaaaaccccccccccaacccaaaaaaataccttggggggggaaaaaaacccttggtttttttttagaaaaggggaaccccccccccaaaaataaccctcccccaaaaaggttggccaaggggtaaaaaaaagggggcttggaaacccaggaaaaggggcttttatttaaaccgtttttgctaacccccccatcccttttgaaaaaaaggcccatggggaaggcggcacacggcaataccaaatacaagggtttaaccaatttaaaggcctataccttttggaaccccttttttaacccccggttt

SEQ ID NO: 54916 - DNA, 316 bp, Glycine max
  Clone ID: PAT_MRT3847_20600C.1
ctgacgcatgcgttgctgaacaggcagtctcatatatatagacctaatatgcatatactaatgagggatgggccaaatattcatacgcatcatcactgcttgctactcttagatatctgatattaatcagtctagatcaaggcctatgccttggatgacatatggtcttgaaaatgttctagtgcattacaactctgagttgaaacgctcccgattatacatggctaagctcatggatgcgaaattataacatgctcagatcgctgagactctaaatagctcaggattgacttaagctgcctcagatgactactca

SEQ ID NO: 54917 - DNA, 432 bp, Glycine max
  Clone ID: PAT_MRT3847_20601C.1
ccacgccgccggcgtcctcgggcactgtccaagaactgaggggggatgtcttcaatgagggagaccgaggaagccctgcttatcttagattgagccagaaaactgtcaagttccttgaaacctaggactcaaactcacaaggtgtgtgaattttaggtctatgtgtaacaccacctgcacattttgtaaggctctgttcatacatgacatattgaaaggaccatagatatgactaaaagtataacttttttgtattgaggatgcttcattttaccttattatattcaattgaaagttccagtatgggtttaagctgaaaagctacttttttttgacgtttgctttatccaaagtaaaagggtgttcatatctgaatttggattcccttgaatcatttctctactgacctacacatttggcaacttgaaccat

SEQ ID NO: 54918 - DNA, 301 bp, Glycine max
  Clone ID: PAT_MRT3847_20602C.1
ttttttttattttttttgctacgtatatttttttttagagcgtatgaacccgtgttcagccaccactttaaacgtgcgagtgcctttgttcgacgcaaccctaatctaaaaaaaaaatttgtgttcgggggtgtgttttgcccaaatagacactgggaattttgaaggggcttggaaaaaaaaagggggggtgcgggggaaattctttaagaaaaaagggggttcttcaaattgaatttgtggttaaaaggggggggggaattttctatacaccggaaaacttgggggtgggcctcccttt

SEQ ID NO: 54919 - DNA, 632 bp, Glycine max
  Clone ID: PAT_MRT3847_20603C.1
attcattcaagaattattattgatggccttcattctcataattgcttctcttgtttttctgtggatcgtttctctttgcaaagttcttcttctcccccgcatccctttcggcaaccattttacgcataacaacggcagagcatttcggaagagaaatgccttgttggttattgctcatcctgatgacgaatccatgttctttactccaactataaattttctgacttcaaaggggcataatgttcaaatactttgcttatctattggtgatgcagatggcaaaggaaatatcagaaaacaagagctttttcaggcttgtgtagccctcaaggttccgatgcaacaagtgaagattgtcaatcatccagatctgcaggttttgatccaataggatggttttggtaaagtttggagccataacttattggcaaagattattgaggaagaaataaccagatgttgcattgatatgattattacctttgacagccatggtgtctcaggtcactgtaatcatcgtgatgtgcattatggagtatggttagcaccaatattttgcgcaaatatagtggtccagttgatatctggttgtccatattttttggccatgctgcacacaaatggaacaatgc

SEQ ID NO: 54920 - DNA, 1373 bp, Glycine max
  Clone ID: PAT_MRT3847_20604C.1
gataaaaaaataagttggccaaatataatataattacaggacaattaattacaagttttagcccgtgggtgattcaagattgatcgaaaaagtcacgaaggattcatggctatttgctaatacatcggtagtaaagaatattattgtgctactttatcaatacaataaattgaaaactcagtaaacaaaatctgataaacttagaccagaccactgatatgcacctaggatatttggaagaaaattagcagtgattccgttcaatcatgtcatgagaaagtgaaaggctgcttgagccgcagagtacaatccacataatgtatttagcttgaacccggaagaaagattatagatacagagcaggagcaggtttgcaaaaaaatgaaagctgatctcacaagcaacacaactccttcagcattgcatctttactttacctttctaagagtgttcatataggtataactggacaaggttacaaaaagcttgcggaacctgcaaaaaagaattaagatggagataaaaagatgtgctgttgtgcaatgcttctttgagataatttcagtcgaagtttctaaatatatataacatagatgtcatgtgtgatagattgcaatattgacacaaggagggcaaagattaaaggaaggaaaaacattaaaagaaatagaatccaaactaaacatttgcaaaatttcaaggaaagacatttagtctatagtttttataataaaagtaaggtaaagcatgcgtaccacacccactggcttgaatgttgggccattgcaataccgctcctacgggaatgttcatttaccaagcactgcattgttccatttgtgtgcagcatggtcaaaaatatggacaaccagatatcaacaggaccactatatttgcgcaaaatattggtgctaacaagctcccaaacttcaatatccctttgtaaagtatcatgtagtagcttgcatactccataatgcacatcacgatgattacagtgacctgagacaccatggctgtcaaaggtaataatcatatcaatgcaacatctggttatttcttcctcaataatctttgccaataagttatggctccaaactttaccaaaaccatcctattggatcaaaacctgcagatcttggatgattgacaatcttcacttgttgcatcggaaccttgagggctacacaagcctgaaaaagctcttgttttctgatatttcctttgccatctgcatcaccaatagataagcaaagtatttgaacattatgcccctttgaagtctgaaaatttatagttggagtaaagaacatggattcgtcatcaggatgagcaataaccaacaaggcatttctcttccgaaatgctctgcc

SEQ ID NO: 54921 - DNA, 283 bp, Glycine max
  Clone ID: PAT_MRT3847_20605C.1
cccggtctaccgctcactagccggggtcgccctttttttttgctatgcaaaggaacatttcagactttttgaagccgtcgagcctcgcgtctcaggggaagcaaccgtccaggaaaacgactcataataaccatacacgatattaaacaacgacaattacaaatcccatacatcatccaagtatccatacgaacactgtcaaaaggatctcaggctagctccactttcaacaccaaccaactatttacactccacaacggaatgcagctcaacggttatcaac

SEQ ID NO: 54922 - DNA, 632 bp, Glycine max
  Clone ID: PAT_MRT3847_20606C.1
agatcggaaaaacgcgataccaaaaaatttattatactcacgtatatttaaccaactaaactaaatcttcttatatacattttatatatgaagttactaatgacattttctttattttcgtcaatattattagagtgagggaaagatgatgagatcaatggacttgttcggagagatggacgagcaggtatcgtcgatggcaatggacgtggacgacgtcgaccctctcgagatcttcgccgagggcgtcatcgccgccgacaacaaactcgccgacgccgatttcttcaacaatttccaagacgatttcgatgactctgatatcaactaaaacccctttcttcttcatgggtattctcggggttaaataatttctcggttagggtttcggtattttgtagtttcctcttcattatggagaaggaaatagaaaaaggaaaacaggttgtactttgtttctgggattttcttgttgatatgataatggctctttcgtgatgaaccacattatcttctgcaatttattttatgagttgttttactttttgtgatttaatggattttttatattcgtgcttgcggagtgtgtgatttaacgttgctgtttgattaccgtgttcatcttttttggt

SEQ ID NO: 54923 - DNA, 353 bp, Glycine max
  Clone ID: PAT_MRT3847_20607C.1
ctgtttctttggcgcgagcgccgaccttttttttttagtttatagtcttgttctacatgtcaggataatctttgaaatttaatcatgattatgatagattattgcaattgttggtcttcaacgaggaattcctagtaagagcgaataatcatttctggttgactacgtcccattcctttgaacatagcggcaatggttcttacagattaaatggtacgtacaatagttatgattagatgaacttgagctgtacgatcaccttaacaatgtgagaagtccactgaacattatcattcatagaatagagtataatataagcttgataatgaaaggagatgagagtggataaaaat

SEQ ID NO: 54924 - DNA, 2773 bp, Glycine max
  Clone ID: PAT_MRT3847_20608C.1
attttacggctgcgagaagacgacagaagggggccacgtcatgacgagagtagcgatgatctagtgaggagattttggtgggaagatattttcgacgattttcgcggttgtgggcgaaagctggctgccagcgatagtgaatcagaatcgtaagctcgacaaagaagcaagcaaggttattattctttgtggttgcggaacgaagcatgctgttgctgttcgagaatggatgagttgaacggcgccatgacgacggagaatagcaatgcggaggtggttcgatgggagaggtttctgccgcggatggtgctcagagtgctgcttgtagaagctgatcattccacgcgccaaatcatcgccgcgcttcttcgcaaatgcagttacacagttattgcggttccggatggattaaaggcatgggaaacgttgaagaagaaggcacctgagctagatctcatattaacagaagtggagctaccagcaatatctggatttgcacttctttctttgatcatggagcatgacatttgtaaaaacattccagtcataatgatgtcttctcatgattcggttagcatggcattgaaatgcatgttaaaaggggcagttgattttcttataaaacccattcggaagaatgagcttaggaacttgtggcaacatgtatggagaaggcacgctattagcactcctactcaaaatacaatcttttcaccgaaaaaacttaaaactgcctcagaagacaattctgcaagcaataaatctagtggttctgtggcttcctcaaagaaaaacaacgaatgcagcgagagattaagtgaggctcaaagcacttgtacatcaccaattttcgaagctgagagtacatacgtggaaaatatgcaggatgtgccccagtatgtacattgccaagttatgcaaactcttgtgcagagcacttgtacatcccctatttttgaagccaagagtacatatgtggaaaatatgcaggatgtgcccccgctgaaaagttctaaactgaacaaaattgatatggtgaagcatgaaaagtttgcccaatttgaaagggaatcagctgagcataatgatgaaacagaagataaatcagttacaattgtatcagatgctgcaaggtgcgacaaaacttctgaattaacagagttaaggccagaacaagactgtggtgttgctgaacctgaaactgaaaacgaggatgaaatcttaaaatctgagttagacggagacaattctcatgttagtatgatgcaaggatgcagtgctgagcgggtgaaaccttctaaaggagctattgacttgattgccacagttggaaatcttccaaagcaccttgatgaaaactgtagtctcaatggtggtaatacaaccaagtttgattgtgaaacgcaattggaactttccttaagaagtgattttcctggcagctcaggtaatcaagcaagtgaagcaactgaggaatctcaaagattgaaccattcaaatacttctgccttttcttggtatagtaatagtaaattgttgcagcctcatttttcaacaccatcgattacatttcctgaagtaaacaacctcagttgggattctcatgaatcccataaattatctggaattacttctggaaattgtcagtatggtggctcaaatcagaacctggagaatatgatcggtacagtcatttgtcagtatggacaagttacaccaaaattatcaaacagtcaatgtggactcttacctgtttctggggttatctccaaccttaagtctgagggacatggtaatgttttcacttctttgttctatgcacaatctggtattcaccctatgtcgagtccaaaacctgtctgccagaatgagagttctccctttcccacaagtacctccacccagtcctatcctgaaagccacaactcagatcaactacatgactgctccaatgatgctacttgtcttaatcaaaatgtaaaggataatactgattcagatcacgcaaggcatgattctcctgttgctgatcagagtgctggtaatagtttatgccatgatgctgcaaatcatgtcaatagtagtgcatatggaagcatggacagtggaaatgatggaaatgctacttcagctatagtatccaagaacgccccagatggtttcagtgatagtggttgtcataattatgatggatttagagtgacagatcctcatcgctccagtcaaagagaagcagtgctagtgaagtttcgactgaagcggaaagagagatgcttcgagaaaaaggttcgatatcaaagccggaaaagactggcagagcagcggcctcgggtgaaggggcagtttgtacgtcaacatgatcatcctgtcgctgaggctggtggtgattcatgaactttgttctttttaggtttcgtgtagtattaaattacagctgactgtaacactgattgtgtcaacaaggattagctgtagggtggtgtctgtgtatgtgttgttggaatctgtttatccattaggcaaaagaagagtaggccagtagggagatttatatttggactgccacttacaaatttaggattgcaattatttagtgggtttggtttggattttacctgtgtatatgttttcttggttgaatactaatatgggtctgtaaaaaatcccctctagaacctctggttttgcaattgagtgatctttctttgcattcgacagaaaagaaaaaaaaaaaaaaagtaaaaaaaagaaaggattcgatatgacagtttcg

SEQ ID NO: 54925 - DNA, 470 bp, Glycine max
  Clone ID: PAT_MRT3847_20609C.1
agagaattaaaattatatttaagtgcactaaaaaatattatattgaaatttttaatgaattaaattatttattgatgatatcttaaataaatatattagaacttgttgaattagaccaaagaaatcaaacttatgtaaaattaaatatttgaccaaaattaataactgattttcgatggaagactaatgtttctattttaagtggagagatctaaatggttctctctttcacactaatctctgttatctttatttttaaggggaatgtcaataattattttaaaaaaagattgtaatagtgaaaatcattttatctcataggtgtaattactcgtgataagcctgaaatataaattatatatttaaaaatattgattatatattgaattataatacttatcataaattttaattatataaaaagaaatatttttcacaggattaaaggcgttggatgtggcaaacattct

SEQ ID NO: 54926 - DNA, 1380 bp, Glycine max
  Clone ID: PAT_MRT3847_2060C.1
cggtcatcaatgttcctcaacagtaaagagaaatggtttacatcttttctggtgccactataattttctacaccatttgttatagtcctcatgaacaaatccctcatgttctatctgtctgtcccattcccaacattcctccaaaaagttcacatgacagcacatggtgttctcagctttatatccatagtcttcttcaaggttgcggcccaggcaacagtcaaaagaaagtgggggaggaggcggtggtggaggtggcaagagtggaaagacaatgtccaccaacagcaaggagaatttgttcatagtttttcttgttacactttggtactcttcaaacattggtgtgatccttctgaacaagtatctgctctcaaactatggattcaagttcccaatcttcctcacaatgtgccacatgtcggcctgtgctgtcctcagctatgtctccattgtgttcttcaaggtggtgcctcagcagatgatcaaatcaaggtcccagttcatcaagattgcaactttgagccttgttttctgtgcctctgtggttggtggcaacatttctctcaggtaccttgctgtgtcattcaaccaggctgttggggcaaccacaccctttttcactgctgtttttgcctatttggccaccctcaagagagaggcctgggttacctatggtgccctggttcctgttgttgctggagttgtcattgcaagtgggggcgagccagggtttcacttatttggattcattatgtgcctaagtgcaaccgctgcaagagccttcaagtctgtccttcagagcattttactctcttctgaaggggaaaagttgaactcaatgaacttgctcctgtatatgtctccaatcgcggtcctagttttgttgcctgcagcacttatcatggagcctaatgtcgtagatgtcatattgacgcttgcaaaggaccataaatctgtgtggctacttcttttcctaaactcagtcacagcatatgcagctaacttaacaaacttcttggtgactaaacataccagtgctctcacactccaggtgttaggcaatgcgaaaggtgctgtagctgttgtaatctcaatactcctattcagaaaccctgtcactgttcttggcatgggtggctatacaattaccgtgatgggagtggctgcatatggagaaacaaaaaggaggtttagatgaacaatctcaaacattcaccgattgtctgattcgtgtatttttattgtagtttatttatttatatgaacaagattctttgtaacgtgactaggagtagaagggagccattttataatgatattctgttgtatctaccacataaatatttatttatcactcgtacattttgtcctaagtaa

SEQ ID NO: 54927 - DNA, 480 bp, Glycine max
  unsure (1)..(480): unsure at all n locations
  Clone ID: PAT_MRT3847_20610C.1
acggctgcgagtacgagctgccgagaagaccatccttagggcaattactttctattttctagttcaatctntctttcagtatttcntgcttaagtatgcaggagtgcctactttggtaacctgcttattaagaggctcaataatcgccggtaattttacccgtaagcacatgttacacgttgaatattgaaccattgcaacaaccactcttgaacacttttggtggaagcaagtcgtcaataattttgaaattttacctcaaatagctatgctgctttgtgttaacaattcttctattaagttagcctcaattcctaccttctatgataagttcaagtacattggcatcgcctgttatttaatccgagattacatttcttctgatttactcatattaattcatatctatatatcaaaatattagcttggaaacttcctaaccatgccacttccttctccattcttctatgtatgccaaaa

SEQ ID NO: 54928 - DNA, 610 bp, Glycine max
  Clone ID: PAT_MRT3847_20611C.1
acgtttgctaagccacgcctcgaggtggttgtgggcgaaagctgcttgccagaaactgagcaaagaagcaagtaaagggcggtttggaaattgttactattattttctctcttacatgtgttgaggatgatgatgaagtcaatttcattcactctgttttcttcttcttcttccttgtggccgattagggttattattctttctggctgtggaacgaaccatgctgttgttcgagaatggatgagttgaactgcgcgatgacgacgacgacgacgggagaatagcaatgcggagctggttcaatgggagaggtttctgccgcggatggtgctcagagtgctgcttgtagaagctgatcattccacgcgccaaatcatcgccgcgcttcttcgcaaatgcagttacacggttattgcagttccggatggattaaaggcatgggaaacattgaagaagaaggcatctgagctagatctcatattaacagaagtggagctaccagcaatatctgggatttgctcttctttctttaatcatggagcatgacatttgtaaaagcattcctgtcataatgatggcttctcatggatccgtttacatggcgtttgaa

SEQ ID NO: 54929 - DNA, 1135 bp, Glycine max
  Clone ID: PAT_MRT3847_20612C.1
tcgacccacgcgtccgcagaaatactcgctttctttacgaaaaaactcccacggatgtgctcagcgaacgggatttagtttcgctgcttgaacgatgtatcaaggccgaaatatttggtgtggctctggaattacttgaacataagcttaaagatctggatcctgttcggcaccctcaattattaaccgacgtcgtctctggcaccttgggcgcattggctcaaatgccttctgtattctcaagtggctgctgtcaatctggaccgccaaaccgaaactgtagaattaggaaattatcttatacccattatcaagttcaagaaatattgagacacctgaagaatatggttgcaaaacttaataatagacagctcattgaagcctcggtgtacgatgctatgttggatgcagccaagcatggaattgttgagttcatagaggctatgagggaggctaaccatgagctcttatgggccttggacagccataagagaggcgtattttcatatgcggttcttaatcgcaaacaagacgtgttccaactcatacatactgtcaatggaaggagggatataatcaaatctcgtaaagacaggtttggaaataaccttttgcatctagcaggacatttagggccttcctctgagcttagtcaaacgcccggggctgctctgcaaatgcaaagagaatataaatggtttgaggttatccatcttttctttctttttacatatatccattttcacataacatgtgcaatgtactaattaacaatagtttacttgatgattttacaaagaagattaatagcaaacaagacgtgttccaactcatacatactgtcaatggaaggagggatataatcaaatctcgtaaagacaggtttggaaataaccttttgcatctagcaggacatttagggccttcctctgagcttagtcaaacgcccggggctgctctgcaaatgcaaagagaatataaatggtttgaggttatccatcttttctttctttttacatatatccattttcacataacatgtgcaatgtactaattaacaatagtttacttgatgattagtacattgcacatgttatgtgaaaatggatatatgtaaaaagaaagaaaagatgga

SEQ ID NO: 54930 - DNA, 306 bp, Glycine max
  unsure (1)..(306): unsure at all n locations
  Clone ID: PAT_MRT3847_20613C.1
nagtgcgagaatggcgcgctgccggaagcttgtttcatgacgttatggttcgtgttcgcgctgatgacggtcgcggcgattttcgccgtgctctggccgctcggccgcagcgcgcgcgcgcaaaatcagggcagcgaggtcgtcgtctacaaggaccagttgaccgagatcgagcgagaccttgcctcgggactgatcgctgcgcctgaagccgaggctgcgcgtgtcgagatcagccgcaggctgctcgctgccgccggcagcgagcctgtgtcggagcccaaatcgagcctcaaatggcgccgc

SEQ ID NO: 54931 - DNA, 150 bp, Glycine max
  Clone ID: PAT_MRT3847_20614C.1
atggaccatcagcaggtttataggcaaattgatctgctttcagagtatctaaaccaacaaggaattaatgaaacattgggcttactccggattttggttgtggacttgaagagggcaaataaagcagcgcttaccttagttaatttctaa

SEQ ID NO: 54932 - DNA, 236 bp, Glycine max
  Clone ID: PAT_MRT3847_20615C.1
tcccacgcgtccgtaataacaagctagcttttagttcgattttgtagtaagtgaggtgccaatatggagaagatagctttaggtacttttgatgactcttttagcgctgcctcttttaaagcttatttcgcagagttccacgcaactctgatttttgtgtacgctggagatggatcagccattggttacaacgagcttacaaaagatgcagcctaggatccaacggggctggtggc

SEQ ID NO: 54933 - DNA, 253 bp, Glycine max
  unsure (1)..(253): unsure at all n locations
  Clone ID: PAT_MRT3847_20616C.1
accagggggaaaaacccaggccggaaggaacaaccatnaaaccaagcactaacgaaaacatacacaacaccttatgaacattaaaaaaaaaataaagaaaatagtatctttaaatcacaaattaactaaccaaaaaaaaaaatttaaccaaatttaataatcccacataaaaaattatgcaacactgatccaaaaaaatgcttaaaaattccattttcttcaactccaagccataaagaggacttccctcaaa

SEQ ID NO: 54934 - DNA, 377 bp, Glycine max
  Clone ID: PAT_MRT3847_20617C.1
cattaccaaaacaaagggaatcaccaaatggggagaaaaccaattcctccaaggccccatgacccataccccgcacacggggacccttcaaataccaagcccccaaaaacccccttcccaaatgcgcaatttcccacgagcctcaggcgggaaaacccaaaaggggaacacggggccaccgggggaccgcataaaaatagcctgacgtcatggtcccaaaacccggcccaaatgaacgggtgtgaccggatgcccctaaaagaacccagagtgggcccccattaagcccccttttttacccccggcttttcaatctgccacacccccttcttctacttggggggggggctcctcatgatggatacgggggaccccga

SEQ ID NO: 54935 - DNA, 692 bp, Glycine max
  Clone ID: PAT_MRT3847_20618C.1
gcaattaggtgtcgaaacaaaataccactgataaaaacccatggcatcgtagccaacaatactttttcatttctctttgtgggaagaagataacaatgttgaagttgggaattgtgtttctaatattgattctaacgcctttactgccggcggcactgtctaagtatgaagccatagagcctttgctgcagcgcttggactccaaaagggcacctccatccgtgcaagaagccgccgccattggtcttctcaaaaggctgcttcctatccatttctccagttttcagttcaaaatagtttccaaggatgtctgtggcggagacagttgttttctaataaacaatcacaacaagtcaagccagaatgagcctgagattatcattagaggaaccacggctgttgagattgcatctggcctccattggtatcttaagtattggtgtggtgctcatgtctcatgggataagacaggtggcattcagacaacttcaatccctgagccagggtcactacccagtttaaaagatgagggtctgaagattacacgccctgttccatggaattattaccaaaatgttgctacctctagttattcatatgcttgggggaactgggaaaggtgggaaaaagagttagactggatggcacttcatgacgcgaatcttcccttggcatttactgggcaagaagca

SEQ ID NO: 54936 - DNA, 448 bp, Glycine max
  Clone ID: PAT_MRT3847_20619C.1
cgccaggacccgccccgaaataattgcgtggacgaaccagtcctcccacggactagtttaaaaaagtgtacagattgagtttatcaatcagatgatcatttggagggggaaattaattaagggggtgggtacaatcaaacaaaaatagatttacaagacaaataccattttaaaataaaacaatatgtatttcatacttttttaattcattaaatctatatattattctttattaatatggtacaataataaatatttaatttatctttcttttgtatttttttacaatagaattattttttcttttatcttctttttgtagttatctatcttatttttttttacttttatatttaattattatttaagtatctattaatattttttttatttaaataaatttttattatttttattcattaatagattattatttgccattttataa

SEQ ID NO: 54937 - DNA, 282 bp, Glycine max
  Clone ID: PAT_MRT3847_2061C.1
gggggggaataataattgatccccgcataccccggacaacccaaaagagacatttttggccggtcttatcaagggaataggccaatgggattggaggcaaagcctcagctttcacttgcaggtttccacggtctggttatcttggggaaaattaaaacaaaaaaacactcccaccgagaaagagataactttccggaatatatactcttcgctcactctttattcgttttgcgcacactctcgagagtataatgtgcaccctctttctcggggtgttctcca

SEQ ID NO: 54938 - DNA, 629 bp, Glycine max
  Clone ID: PAT_MRT3847_20620C.1
ggcttggaacctttgggctgattgatgtgcttgcgtgagaagatgatagaagggcatggtcgtgagaagatgatagaagggcatggtcgtgagaaggtggtagaagggcatggtcgtgagaagatgatagaagggcatggtcgtgagaagatgatagtgggccaacctttgggctgatttatgtgcttgcatggtcgtgagaagatgatagaaggggaactctcctatagaagaaaaaagagaagaagacgggcccgaagaataatacggcggcgtcaaaggcgcgcccggcgtcatccccttccgcggggggcatcatcagcgttaatccgaggtcgagcaagtccggttcgtctacgaaaagcgactactactaatatctaaacgacgacgagctcctaaaattacgtcgcgactaacgtgtacgtataaagctaaatttcctctaacgttgtcgcctagacacgacgtcgaacctgcgttacctagtccgtaaactccgcacccgtgtaccactgcacttcgtatagcgcccccgcgccgatacaattgaccctcgtcacgaattccgtaaatttaacgaggacgataaggaaaatcatcaacgaataaagcgcacgtacgcaagt

SEQ ID NO: 54939 - DNA, 573 bp, Glycine max
  Clone ID: PAT_MRT3847_20621C.1
ctgagaagtcccgaacaactatatatgctttggatcgatcttttgagaccatattgtcatcctttgcaccacctattgttggagctttggctcaggatgtgtatggttacaaaccaatcacaaaaggatcctcagatgagatagaaaaagatagagaaaacgctgcatcactcgccaaggcactttacactgcaattagtattccttcggtactctgcgtttccatctactcgtttctttattgcacgtacccgagggacagggagcgagcgagaatggaagcattagtggaatcagaaatgcaacagctacaggtggaagactataatgatgttgattatccaagggaagaggatgataatgatgagaaagttttgttgtctcggtagtttactaagtagggaacacggaggttcatacacagaaacattttcatttgataattcaagtcacttgaagaagtgaaacataggaagcaccgatattttcatttgctccatgtatttatatttcacacacatatcttacgccatttagaaatatcatgaatgatctcaaaaagctttgatttat

SEQ ID NO: 54940 - DNA, 492 bp, Glycine max
  unsure (1)..(492): unsure at all n locations
  Clone ID: PAT_MRT3847_20622C.1
aaatttctcttttctgagtcgcgataggattacttcttcattggctacatgacattgccttggccatcctccgggatgaatttgtgccacaactcatttttatccttaaacccaccattccaaaccagaattcaacttcctttttctgcaaatattccattttcacaccctctcacttcaatctctccccacttcaattcaaactcccttcaaaaacccagattcccacgcgcgagtgcaaatgctactaccaacgaagcagttattatgccaagcatggccgaaattctagacgcatcgagagcgcagaaactcgaccttcagctcanaacattgggaccctttttcagaatcacggcaaggagcatggtaacgggcacagagctcggaagggccgaaggttggtaagattctgggtaggaggcaaaattcttcacttggactcaatcaaactacanagagagacactggacatggagaaatcaatctttg

SEQ ID NO: 54941 - DNA, 273 bp, Glycine max
  Clone ID: PAT_MRT3847_20623C.1
aacgccccaaagtgaagggggttttgtgaagggattaaaataaaacaaactaacctcccaaggcaaaggggcaataggaaccccaacttttaaaactttgatattctaaaagaaaacaagaaacctaggggtcatgggggtggggactaaaaatctcatattttacttctaaacgacaagccgaaaaggcaacggggatgggggcaactgaaaaaggaaaaaaaaaataataacttttcccccttgccggggggaaatgttgttttttttttt

SEQ ID NO: 54942 - DNA, 259 bp, Glycine max
  unsure (1)..(259): unsure at all n locations
  Clone ID: PAT_MRT3847_20624C.1
ggagaaaggntgggcagcggacactcggggaaacacgggcggnacagcgcgcaagggaacagcgaaaacaggccgcgaaagcagcngaaggcccccggncggcacaggaaggaggaacggngaaagagaagcggggagacgcaagcggactcggaggggcccncaagagggaaaaagaaggangcgccgcggggagaagggcaggagagggcgcgcaggggcgaagcgggagcagcgggggggggggcaagcgcaccaa

SEQ ID NO: 54943 - DNA, 505 bp, Glycine max
  Clone ID: PAT_MRT3847_20625C.1
ggctcgaggtctttacctgaaggtttatttcgcttgtgaagtgatcaacataatatcaaccctaccctcaatctcttcttcctattatatattagttgcctcttggatcgatcgatcttatcatgaaccaaccctcccttgttgatttttagtctagtgatcactctttaactttgttgctcggctcagctatataatttgcacagacgtagaaataataatgaggccaaggagtaaagccatgttttatttggtttacgataggggttgacatccatctccctccataatttttttattttattttattttcattttccttcctaatctaagctatattagtgtatatagtttgtttgaattataattgcttccagagtgaaattaattaaatggatgatgttgatgagagtactaagaagggaaaagggaataagaaaggtggtggtgggctgatcacgaaaacatgggagcgatgcatgtccataggacgaggccgaaaggt

SEQ ID NO: 54944 - DNA, 702 bp, Glycine max
  Clone ID: PAT_MRT3847_20626C.1
gtcctccaaagattatcactaaattattccttgaaagatttcatgtcaccaaattagtcccttagaccctcagagatctataattttatatttaccacataagaccttttgtatatgactaaaatggtgacaaaaagaatatttaacattgtgtttagatgatgcatttgaagataacaatgcaactttcaaggttattctaattgctactctctaatgctctggttgggtatttaatagaaggatttaaagaattctcttaacattttaatcctttgataaagccaggaatttaaaattccatcaaaatatgtgggattttaaattttctcatcctccttcatctaatagaacccagcatcttcccaccatcaaacagtcatacctccattgaaacccatcctctgcaaccttatgttatgccctcccatgctgtaaaccctgaaaaccaccagcaaaactctctacctccacccccttttcttgctgctgtagccctgcctgcttatgtaagtaataggaagttggatttgggtgttaatttcagattatgataggaaacaaaatttctagaatatggggagaataaattaatccttgatattatgtatttttaagaatgggtttttattatttcttatctatttatatgcttgtacaacagaacagggaattaagcagaataaacattattctcttctt

SEQ ID NO: 54945 - DNA, 288 bp, Glycine max
  Clone ID: PAT_MRT3847_20627C.1
gaagagagcatgcatatgaacatgatgatgaaaacagtgtgtgggtttgcaatattgatagtggcagtgcatcttcaggtggaagtgagtccctacgcacacgctgtgacgtgtatccctgtggagctgagtccatgtttgggggcaataacctcattccaactatcatcaacaatttgttgccacaaggtgaaggaacaaatgcaatgccactgttgttacctcaaaagcccaagtccaatgccatatgccaattctcctgtctccagaaaggttgctagcccttgt

SEQ ID NO: 54946 - DNA, 556 bp, Glycine max
  unsure (1)..(556): unsure at all n locations
  Clone ID: PAT_MRT3847_20628C.1
ggctcgaggcaattaactttgatcaattctcatctcttgtgactcttctctgtcactcacatacctcacttagctgttagcaaacatgggtgttcctgaattgatgttcagggtatcttttatggctgtactcatcaaattggcctcggctacaaattacattgttggaggaccaagtggtgggtgggacacaaactcaaaccttcaatcatgggcatcttcccaaatattttcagtgggagacagtcttggtaagtcactattagcatgcatcaaaacattacctttatgttgatcatactaaaatactccctccgttcctttttaattgttgaaattttgaaaaaaaaaaatgttttgtatttcttgtcatttacaaagttcaaaatcacattaattactcttttatcaattatatccttacttttcacctaatttataattaatttacacattgagtgaagtggaaatgaaagcgggtaatatgagaaatcacacaacaattntattagaatcaagaaaatttatggnatttcttgatttttctggtgaatct

SEQ ID NO: 54947 - DNA, 294 bp, Glycine max
  Clone ID: PAT_MRT3847_20629C.1
attaagagagaataaaaaaataagaagcgagatctaaaagacttttaatcagagattttccataaattaaccttctacataaaaatatacatagtgtcttaacaaaggaccgtgtcactaacatatcatcgacataaagtgactagtgtcaatgcagtcgagagatcgacattactctggctgaaatatactactcaccgggggatttcacttcctgtgccttgtggttaaaatgaatgtgaactactgagatgagaaaccaagacatgtgtgactaactcccgttgggcgtct

SEQ ID NO: 54948 - DNA, 252 bp, Glycine max
  unsure (1)..(252): unsure at all n locations
  Clone ID: PAT_MRT3847_2062C.1
gcaaaccttactatcatcacnttcggcggagccagacactactccttnaacataagccctaccctctatttcagattccgaagcagccaaagatgttgntggaagctttngaaaagtgcnttacagtgatatttgttcaacttctgattcgggtagtagtggaggaagtgatttgagccacgagttccacaaccttggtcncgtcatcatcgtgagcccacattgaagttaggctttggaaccgtggatntg

SEQ ID NO: 54949 - DNA, 1144 bp, Glycine max
  Clone ID: PAT_MRT3847_20630C.1
cagagggaaaagatattatttatttacttgaacaaaaagtgacaagagtactacacacttttttttaacacaatctctattactagttgaaatttgttaaaaaactgcaaaattatgagtggactcattaaataagaagtaaaatccacttaatttatagtttttaataaattttaactaataataaaaaatgtgttcaacaaagtatcattgtgttactagaatttctcaaaggaacaaaggggaccacatcaccggtctgggaaatgttatctatagaaaacttccacttctgtatgtaggaaaaacacccccaagattgacatggcagatatttgcaaatcccatatactcattattttccatcttctcaaccatgttctcaattcccactccacctaaactgatcgcgctcaaaaaaatggtgaatgctagtacaaagatgatgatggatgctcgaccgaagatagcaattatctttctcaccacatgctggccagttaatgcagctatggttgcaaccaaaataaagtaagaagcatagggtactgggaagcgttctagaaggtaatattgcaccactgacatggaggaagagaaaaccatagcaaaagttgatgtagcactagcaacctgaggaggaattcccaactctagaaagagtggtcccaaaatgaagccaccacctagacctagcaatccactaactataccagctattattccgcaggaacagtaaaggcagatcttgtgaagcttcatccaatctgtattttcctttcccttagatgaaatcactctagttccattgcacaagcatatggcttcataaagcgtaaccgaaattgcaataggcacctgcaaggaattaagaacccagtacagtatggagcaagttttagtgtatgtcttaataatctgaacaatgagaaaagccacccagacatacacaaggactaataattctttccaatagatgttctttagtaaagggacctcctcatctcgtggatcagctgaaccagctggtagtgacttatagtcttcttcagaaacatagccaggagaggaatctgattccaacatcttagctgcttcctttttcataattgtttcctttttccatgtatctatgccctcgagc

SEQ ID NO: 54950 - DNA, 368 bp, Glycine max
  Clone ID: PAT_MRT3847_20631C.1
tgatgatccactgttcaagctggtttcaaagttgtatgaagttgttccacccatgcgtattgaattggggaaggtcaagaacccatggcccaatgttgatgctcacagcggagtcgtgctgaatcattttggtttaacagaagccaagtattttactgttctgtttggtgttgcgaggagcatcggtgtaggcccccagctcatattggaccgaattcttggtttacctcttgaaaggccgaagagtgtcaccatggcatggctagaagagtactgcaaaaatgctgcaaaatgagctttctgtgttaggactggaaatttcagactaataatggaaataccttttgagagatcagccatatgtgatc

SEQ ID NO: 54951 - DNA, 360 bp, Glycine max
  Clone ID: PAT_MRT3847_20632C.1
gggaaaaaaaaaaaaaattgggagccggaatttcccctataggggtgctaaaccagcctccttttgaatggggcccccaaaaaatgtaaacccttttggccaaattgtttaggtaaaaaaaaccccaactttgaccctcgggggccctattccaactagggggccccccacaaattaccccccccccttgctgctgcccgtttaggaaaacaacccctttttttttctctgacaggtgggatgattatgccccccacagatgaaccccccagggcccattcccctgcccgaggggcacccggtggttgtcacagtggttactgaatgcaccaccggaccatggaccccgggggggggttt

SEQ ID NO: 54952 - DNA, 499 bp, Glycine max
  Clone ID: PAT_MRT3847_20633C.1
aacttctgattaagcttgtcttattaatccatgaacaaacctgttgtatggttttgccttgcagttatttcaattcttcccttagacatgtatggttaatattggacagctgaaatgagatgcaatgcatgttggcgagaagtagaagggcgagccatttccacaacttgtggtcacctattatgtatccacatacaatcaattttgaccttgagttcctctattttaattaaatatgatcaatttagttcttatcaaattagattgaattttcttcacattttatcattgaagtgattagttagtttacatgtatgtggtttccttaacacagttaaaaggcacagatgatgccaataagatattaagcaatgatggagcatgtcctatttgtgatcaagtcctttcaaagaggtatggatatgatagggatctgtttgattgaacatgattttgttattcacctgatgtaatactgattataacgttcaattagtgc

SEQ ID NO: 54953 - DNA, 411 bp, Glycine max
  unsure (1)..(411): unsure at all n locations
  Clone ID: PAT_MRT3847_20634C.1
tgccgcgtcgttttctctgaattccctggagattnccttccgggtggtacaattgaaagcacgttttggattattgaaaagatatggatgagaactacgcggtaggatgattttggtgggtagggggttctgtagaataacttattgagaataggcatatatttcggtggataatgtaattcgttaacttaaatattctgcattgattttttttatcctgaatggtgtgctctaaatatcaacgtattgatatataccaattgatctttttcgtctgtggacctttgaatatataattattaatatatgataattattgcttcctgatactatttagtatattttcctctcaatttttttcctgtctaattttttttgcgtactattttttacctataattttttttttta

SEQ ID NO: 54954 - DNA, 466 bp, Glycine max
  Clone ID: PAT_MRT3847_20635C.1
gagggaattcatcgtctgatgttcaagttttatataaaatatatgggagggtttctgttatttatgatcaggtggccacgtacatacttcatccttcgaccacatagactctgtcccatagatgcttactgcggctctagtagccctataggacggctttgaatgactttcttgaaatgatgaggagaaagaacatgtccgtgctctacattacatccccatgggatgagctgacgggactatccctggctttactgcatctagctttccccatgacatgcttgtgaagaaccctgtcgaattttgggtcaactttgcgatcaaccttgagagaggtattaacgccgaggggcatgcttattacttgacacaatatacgctcgtccatgttcttgggatggacgattggccatccagcattgatgaatccaaatcatggatagcttcgttggccgtgacctactcc

SEQ ID NO: 54955 - DNA, 1298 bp, Glycine max
  Clone ID: PAT_MRT3847_20636C.1
ggagcctgaggcgacggttctggcagttgccctcgtctcagcctcgcgcgatgtttccttgctctttcatcttttcctctttctctatgcaaataaccgattgatcaatcgaatttttttgtgattcaatttcgctcttttttctcggcgcgagaaatcatggctttgggaacggtgactcgacggttggggaataaactcttgccggcgttatctccttctcccaggcttctacattctcacgccaccagtttcgggttcaaacaagtaaacgaagaagaaaaggctcgcatggttggtgacgtattcacgagcgttgctctcaagctacgatctcatgaatgacctaatgagtgctggtttgcatagattgtggaaggataggttagtttccaagctgaatccgtttcctggaatgaagcatcttgatgtggctggtggaacaggggatgttgcttttagaatcttggagaacatacacaaagttaagctgagaggacttcgaggtgcttttcaagatactttagaggcagaaactcagatatatgtatgtgacattaaccctaagatgttaaatgttggcaaacagcgggcctcagagaagggttttggagaagatggttcccttgtatgggtggagggaaatgctgaaagcttgagtttccaaaatgattcaatggatggttatactattgcattcgggattagaaatgttacacacatagagaaagtactcagtgaagctcatagggtattgaaaccaggaggcaggttcctttgccttgaactgagtcatgttggtattcctatatttaaagatttgtatgactattattctttctcagttattccatacatgggtgagctggttgctggtgaccggcaatcctatcagtacttagttgagagtatccggcgtttcccctcacaggaaaaatttgcatcgatgattgcggatgcagggttccagaaagtagagtatgagaatctagttgggggagtggttgctatccattcagggttaaaaatctgatatattttttaactttcctctcgattattattatgtctaataattcatgcattttttctccaccgtctataagcatggagactgaagatcaaatgtaatgttattagaattcatagagaagatttgagttgtcagaatgtgtactgtaatttcgatagtatggcgtctgcaattttttttacagggactcaagtttttcttgaaacatgtatatacgcctatcatacgaagagtaaacacttttgattttttttaccaaaaaaaa

SEQ ID NO: 54956 - DNA, 213 bp, Glycine max
  Clone ID: PAT_MRT3847_20637C.1
ccggaggcgccacgcgcgaaggggccaaaaacaaactcatttttgaacccctttgagggcccgaaattccaacccaaaacaccccaaataaaaaacctataactgggccccgggaaccccccctctaggttcccaaaaagtcaaaaaaagggccctccttcctgggaacctaaaccccccccccggggggaaaattgattttaaatcaaatta

SEQ ID NO: 54957 - DNA, 974 bp, Glycine max
  unsure (1)..(974): unsure at all n locations
  Clone ID: PAT_MRT3847_20638C.1
ttggagcatcgagctcgtgccgcattaaatgactgaagaaagggcatgaactccttctttaacctttagaaatcacttataaaccgacctctcgaagaagaaccggaacgtcaacgtcatttcccatacgatcttagcccttgccgaccaccaccctcccctggaaccctaaccctaaccctaaccctagaattcctgatgatttcgaccgcgattatcnaccacaaacaccaccgccttttcccgccgccccgcttccgatcgaatcccaccgctacgaccccgaccggcaccaccaccccgtggatccatatgagcagaaccctagggagcccctcgcgtggggcggcggtggctaccacgcgccgggccagggcgatgtggaccccacgtcctacgtccgtgtgtacaccgtggagtccgacgccgacgtggcggggagaacaacctccaagagatgggtaatgagtgatagggatagaggaagagagatgcacgagtcttcttctggtttagtgagtagtaatggtaacagtgagaagtattatcatggttctgagaataatatgatgggtaggtatagtagagggaatagtagagagtgtggtcatactcacgaatttgaacgcactcctccgaagaaacaggtacagaagaagagtgctcttcttaggattcagacggttaaacctaataataatcataggaaccgcgagaatcgcgaggttgagcagttgcggtacccgggttatggttctgagaatggaaatggtttttacagggggaaggagcagtattttggtcatggggtgaagggggaagagagagaggagagccctgttgagattgatatttcttttgagtccaattcgttggttgcgaaggcgaaggcggttgtggcgccgctgccaccaccttcgagttcagtgtcggttcctgatttgaatgtgatgccggtttcggattcggatttg

SEQ ID NO: 54958 - DNA, 248 bp, Glycine max
  Clone ID: PAT_MRT3847_20639C.1
acgtcgaatttggtaccggggaaaagatcttaggttccactgaaaaaacaggaaaagttcataccccccagaaagaacaggaaaatacaagtggtgtacatgagattttctggatgaacggacctccatgaataactaaaaaggaatgcctgattacctgagaactcttcaacccaaccgtagggtttcgcatgaaagacggaggcaatgaatatgaattgcctagaggctgttatttgatacaacat

SEQ ID NO: 54959 - DNA, 376 bp, Glycine max
  Clone ID: PAT_MRT3847_2063C.1
caaacttgttcctgatcaatgttcaaatttgcatttttttttgccttttttctttttttcactactaatactacctccggaagccacaacaacacatcatcctgtcctactaacagctgcaaaaatggacctaagatcagttacccattttggttttcccaaggttcccttcctgatcaatattgcggttaccaagaacttgggcttttttgtgatgacaatggcaacgctattttttctccacccccaggtaaatactattacgtaaaagacatagactatgcaaaccatatacttaagctcgttgattttgacactgcaaacataacttgtccaagggcacttcacagctttcccttgggcaacctaccactct

SEQ ID NO: 54960 - DNA, 391 bp, Glycine max
  Clone ID: PAT_MRT3847_20640C.1
ttctttagctttcttttgatggttttcttctttgtgattttgtcggctttcaggattttgtggttctgcccagaatgaatctggttgcatacattttggtcctcgaggagaaagaagatcataccgcatatatacatcaaacttttttccgcaaacaagtggaccactaccaaaaattattgataaccacccccgcaaagctttttttggcatagcgcccccgccctagggccaaaaaaaatggttgctccaaaaaaccgcttgtccccctggggggggtgattgatttcatgggaaacccgccgggcccaaacccatggggggtacaaattccgttgttgctttttagaaaaccagggggacttttatgccctgaccgggagggggacct

SEQ ID NO: 54961 - DNA, 308 bp, Glycine max
  unsure (1)..(308): unsure at all n locations
  Clone ID: PAT_MRT3847_20641C.1
nnngtcgcngcacgcgtaagtaanctcggaattcggctcgagattcaccaagtgtnggattgttcacccaccaatagggaacgtgagctnggattagaccgtcgtgagacaggttagttttanccnactgntgacagtgtgcgcnatagnaantgcancctagctacgagaggaaccgtntcttcgcacaattggtccatcgngcttggttgaaaagccagtngcgcgaagtaancgtncgtnggntatgactgaacaccnctaagtcaaantncgggctagaaacgagcnnncacccgncggccgtt

SEQ ID NO: 54962 - DNA, 385 bp, Glycine max
  Clone ID: PAT_MRT3847_20642C.1
aaaaaagaaaaagggggggggaaaaaattttttgaaaaaaaagggcaatttaaaaagggccaagggtaacccatatcctttcataaaaaactgaaaggaaaaaaatggtttaaaaatttgcctttaaattaaggggaacccattttaaaaaaaaaattgcctggaactttgaaaagaaccccccctaaatttttaccgggaaccacttaaaaaaatccccttttgggaaacgggggtaaattccaaaagggggtttgcccttttgggggggtcccaaaaaaaaacccagaccccccaaaaaaaaaaaaaaatccttttcataaaaccccggtgaaggataaaccttgattcccaaaaagatgtgttccttaaaaccaaagccaaa

SEQ ID NO: 54963 - DNA, 440 bp, Glycine max
  Clone ID: PAT_MRT3847_20643C.1
tgtgaatattttagacggcaaacccaaggttcaggcctacgtgtaccgcgtgacctcggattcagataaaagacatgcggcgtttacaatagaaggttcctatgcacataggacatacgaggtaaagtgttggatgagtacaagaatgccgtcgttgaaatcaagagaaaggaggccaataccaaagacgtttctttcgggatagagatttttcagttagttgttcaccctgtgtttgatcctagttttgccatggcactcgttttactactggatcaaatgttttcataatactcttccatagagtaacacatttctagtttctatagtataccattttactcgaaaggcactgtaaattagctggagagatctatataaaactaagaaaaaaatattgaaacagtcaactacaaagtgtttcaaaaaaaaaaaaaaaa

SEQ ID NO: 54964 - DNA, 748 bp, Glycine max
  Clone ID: PAT_MRT3847_20644C.1
tgcggctagatgactaccactgcctgttttgttcgagtcatgaggaggaagcatcccacatatttttcggctgccaaagaataatgcctttatggtgggagagccttgcatggacagaggttgtaactgtgttccctgcatcacctaaggaacactttctacaacattcatactgtaattcatctggaattgtccaaaacagatgatggatttggtgggctgccctcacatggtgcgtttggaattgtagaaacagaattgtattctcaaatgaggattttaatggacagaaattgatggaggatacaattttctcctgctttgatgtgctagtgatgaattcagagattttgaagtactggaaacttgccatcaagaagaaggtaaatgacatggaacaatccagcatgggtcaccgccatatttcctggaagcacgtatgggcaaattattgtttatcatgccataacaacaagctcctagatgataatgaagcacttcaaaattttggtgtgcggaataattctcaggttcaatttgtctcctatgtcatgacaaaagaatctcggaggcactcgaagaggagaaagcatcgtttttttcatggccttaataagcgttcctgatcaaaatgatgaatgatagtaattaaggggtctagattagttcattgatcagggtgtgtgagcaagagtgactttagaattacatcaaataccttaaattttatgaaattgaaattctatga

SEQ ID NO: 54965 - DNA, 539 bp, Glycine max
  unsure (1)..(539): unsure at all n locations
  Clone ID: PAT_MRT3847_20645C.1
cgattccgttccaaggaaggtttcccgtcatcactgtatgacgtcctccttctttggggggggggggggggacatagaagatcaccatgggagagaaggtaaggcatggaataaagtaaagacgaaagtaagctgagggccggagatagccgaaaaaaaaggtaaaggccggtggtacgaataaattctgcggtgggggtaacaaaaagataggtgtaacgaagcaaaagtgaatgacccataccaaaaggacacatgccacagtagaaccgttcaacgaaatgtaatggttgggtcgggaatgaataaagtgtgatgttggcggcgtaagcggcgggcacagttacgtaacgttggtagacagtttggtattacagcgccgtatacacgtgtgccagagattacgcctctgcatccacccaagcaacattacctggagtacggagtgtggtantaggtagagtaggaccaacagtggctggcggcctaaaaatgacaagtatcgtagtgtgtaatgtagttgtaggtaataggtgagc

SEQ ID NO: 54966 - DNA, 451 bp, Glycine max
  Clone ID: PAT_MRT3847_20646C.1
tttggcttggaacctttgggctgattttaaaaaatccgaccagggcgacggcctatgcagcgggttactgtttcgacagatggccccctgtttcccgatgccggagcttatgcctccaacagcggatctccgccttaaatcggaataatatctaatttcactctggctcacctccccgacccacaagggaccccgttgaccctggttcaccggccaaaaaacgagtcgacccaataaaaacccaatgtgaaccccaataaaacaccaatgtccataacccaggcggtatcccctggggaaacgcgtgtggaattttcacccgtccaccccctcaaacatacctaaacacgcacttgtctacgagataacaatttcgacaaacgtcctaacaacaccgaaaaaggaagagcacgagcacctaatacccttgcgctgtttccacctttccccc

SEQ ID NO: 54967 - DNA, 399 bp, Glycine max
  Clone ID: PAT_MRT3847_20647C.1
acccaaaccttaaagcctgttgtcttttaatgcatcccaatatccctacaacagaactgcaggaggcttagaagctcaaaaccatttatccgtgggcatgggggagaatacggaaatactgttcggttttgccgctcggcaaacacagaaaggcatattgctgaaattcatccatgatgccgaaaggctacttgtgtccggctatgacgtgatgacattttttccacaattgcccatagggaactatgtatttttcatcttcctctttcagggatctgggggtgagcaggataaaggcccaattactgcacacgggccaacctggaaagctgaaaaagaacgagccattctccaatccggtgttcccgggattgggggactggttttccactcctccac

SEQ ID NO: 54968 - DNA, 320 bp, Glycine max
  Clone ID: PAT_MRT3847_20648C.1
tttctgcccagccgcccgacgaccccccagggggggggattttggattctttgccggctttctaaccggctagagtatgagcgaccagagataaagaagggctgatgctctcagaagaatcacgacgtgcagtaattggacccctaccctacacccctaggtactgcagctatcactgatactgttactgtcgatcactatgcatcgtatttctagaggttaaggcgcttacagcatacagggtcacttcacgcacctccaccttagttcaccgatcttcctatgcaacacgtggcaacctactgtggtactccggtccc

SEQ ID NO: 54969 - DNA, 373 bp, Glycine max
  unsure (1)..(373): unsure at all n locations
  Clone ID: PAT_MRT3847_20649C.1
tggtcgagcggagaatgtccattacctttcacggagatatcacattgagctggctgtccgtgatgctgtcttggataactatttattatggctgcctggtcaccttgatactcatctatctgggtcacctccgaaggcccccacacttcctctactcactgcagatctttactctaaatgtgggctgcaaaaccatataaccctgttatacgggaatcctgaatagcgaccatctaaccaactatctatttctttcttgaggctgacacttctccaatttatagacttaacggttagacagatactcctgaatacgaacatcataaatcttccttcttaaganatgcctgctatatattccatctaattccat

SEQ ID NO: 54970 - DNA, 555 bp, Glycine max
  Clone ID: PAT_MRT3847_2064C.1
cgctcgagaaaaacactaccaggaaaaagtccactttagctttcacaggcacaaactcgaagggtttaattgtgttgtccttctcagaaatcaagagcctcacaggggatttcaagaatcaaattgggccaaaggtgttcaagggtttgctacccaacaatcatctgattgcagttaaagacctgaatgcgtccatagaggaaaggaagttccgaagtgctgttatgaagatgggttgcatccaccacaagaaccttgtgaaactggagggttattgttgtgagtttgatcacaggtgtttggtgtatgaatattgcaaaaagggttcagtggacaagtacatagatgatgatgctcttggcaggatgctgacatggagaaagagagttgagatatgctcaagtgttgcaaaggccatatgctatttgcactccgggtgcaaggagttcataagccatggaaacttgaaatgcaaaaatgttatgttggatgaaaaacttatgggccaggggactgaatttgggtttgctattgcaaatggcaaagcaacatatt

SEQ ID NO: 54971 - DNA, 1067 bp, Glycine max
  Clone ID: PAT_MRT3847_20650C.1
aaaacacaaaacaaaagggtgtacttttgccaagatctaaactcacgatttacaattttagatccaggaaacaaaatggaaatgtgattactaatcgtgctgaggaatactttcatagctgaaataacagtcacagataaagatgtctaattgaaagcattagtgacggagtataagaagtccaagaagcctgtcccctttaaaagacccttacctgttaaaagctcaaaatccaacaacaggaggaaaccaataacagctgctctcccgtttattatttcgttcttcccagtaaaaccaaatccctcttgatcctcatcaacgatcattttaacctcatcaacattgacatcagttgctgtaaaaccaggttgagccttcccactaaagacaatttcagcagaagcatcagatctcacacctcctcttatgctgatataaatattctgttcatctgttttcacaggatagataaagagtttcctcaaagcgggcgtgagaactctcagaacaggattttttggataccattccttgatatctcccgttcgcagatcaaatgtgctatcagttgatgggcaaactatgcacccatcctgggtgagcttggcattgagcaagccttcagtataggcgccttcagcaggggacctattctcaatagcgaaaacttggtctttgtaccaaagcagcagtatggtctcgccgtcctgaatgatcacgcgccgctcccccttcggcagagcagacagaggcaccaccggaacccagttgtcgccggacgccgacgactcttcggcgaccgaaacttgggctgccttacatgtgagtcgcggagtggaacggtaacggagcagagagtggcggcagagaaagaggggtttgggaggggagggaagacagagaatgtgggttttagaggagcatgaaattgaaaggggtaaaaggtttgcggccatggagcttgggagtgaaagttgttggagagagaaagtgaagaagcaccctcttgctttgtctgcctctgcattgcctttgcatctgtggatggctaaagtccacacaac

SEQ ID NO: 54972 - DNA, 563 bp, Glycine max
  unsure (1)..(563): unsure at all n locations
  Clone ID: PAT_MRT3847_20651C.1
ctagactagactacatcatcacctaatacccagaccatctcgccgcacacagcgcactgcagcgttgtgtcttcgcacgccgccgtcgacgtcgtccgcatcgtcacatctcgccggagcgtcgcgtcgctgtaagatacccttcattgtctttcctttcgtctcgcacggtgtttctctttctctcggtagggttctggacatcaaaattcaaagctccttgcttgagttaattaatcaggctaagtgccaagtgctgctgctgattttgtggcttgttgataaaaatgagacttataacacataacatgctgtcatcgaacataaagggtgttgtnaatggatttcctttgcggattgaagcagagaatgttgttgaaaagactgtggaaatgaacggtgagtttctgaaaaagatgtttgagaagattgattggaaggcttttgttgttgcctcacgagccttgggattcaccgtgcttccttgggaggccgnctcttccctgctggnttctggtgaatttctgaacaggtttcaccctgctctcttgggactccacctt

SEQ ID NO: 54973 - DNA, 898 bp, Glycine max
  Clone ID: PAT_MRT3847_20652C.1
ggggtacggctgcgagaagacgacagaagggggagctagccagccaagtaatattcaataaaaatatggaactgacgaggctcatttcggttctcttcttcttgctagtgatcacggtgggatcttctgcttctccacagcattggagaaaaaaaagggttcgcgagccgtgcaagaagttggtgttttatttccacgacataatttacaacggccacaattccaagaatgccacttccgcaattgttggaacacccgcatggggaaacaggaccatactagcggggcagaaccacttcggtgacttggttgtgttcgatgaccccatcaccttggacaacaacttgcactcgccaccggttggacgtgcccaagggttttacgtttacgataagaaggagattttcaccgcttggcttggcttctcttttgtcttcaactctacccaccatagaggtagcattaacttcgctggtgctgaccctttgatgaataagaccagggacatttcggtaattggagggacaggtgacttcttcatgactaggggtgtcgccactctctccacggatgcatttgaagggggaagtttatttcaggcttcgtgcggatattaacttgttcgaatgttggtgattaatcaatcaagctagccgtgaatttcttcttattttctgtcatttatgttatctttttaatggggtggaggcatatatcatacgacgtcgtacgtacgtaggagttctctcatgctcttagtacccaagtttttctaaatatgtatatgacggctccacggcttaagctcgacgtcgtcatttattctgcttatttagaatttattaaataatgattaacatgcatgtatgattgttttgttcctggaagattgatcgct

SEQ ID NO: 54974 - DNA, 388 bp, Glycine max
  Clone ID: PAT_MRT3847_20653C.1
ggaacctttgggctgatttatgtgcttgtttatgtgcttgcatggtcgtgagaagatgcatagagggaggttatggtgggaagcctatgcggactggttatggtcatgagtaagccgagacgttgtatggcgtcacggatgttaaggatttgaatcctgaggacttcgcggagactgttattgcgcgactgtggcggcccttggcggttaggctcgcaaacagcagcaaccggtgaaatgcgcccccctgcgcctaacaacgcgaagtgaactggagaagaagtgcccctcgcgaccgaccgccacagactcgactcactcgtggcacccggcagcagtacggtatccgccgcatacacactgctccggagccggaagcgtatctgca

SEQ ID NO: 54975 - DNA, 634 bp, Glycine max
  Clone ID: PAT_MRT3847_20654C.1
aaagctttggtgaaaccttaaactaaactaatttcgatccaaagcaaaagctatgaatgaatcctacgaccgaagacccaccacgcgcccttgaccgcaccaaagtattctaatttctatccttcatttcataaccatcattattcatcacccttctctttcatttcctcacccttctcttttgttttcttctgtttttattttcgctctgttctgtttctcacttctctttagggtttcaaagcctcccattccaattcaaaccctcctttcattctatttcctcacctcgattcccagtattctcgctctagatttcgggtcacgcggttgatttctgatgcagcagcaatttcaatctgattgccgtttgcaagggttggattcggttgtggatagcttagaatcactttttttctatttattttttattttttgacgaaagaggaggtgcagttgtggaccgtgtttcaaggttcagtagtgagtggcttgtgatgattttgattatgatttagaagtcaccctaggtatctgtgtatgtttagatatttggcgattgatttgggagtgtgattttgattcctagagttttttgctttgttgttttgggggggaatgattactgattgga

SEQ ID NO: 54976 - DNA, 390 bp, Glycine max
  Clone ID: PAT_MRT3847_20655C.1
cccatctctagtctactaatggcttcaatcttgctattactagaagccttgataagatgttgtcaccatgaacttgtgccacagagtccaacgtggaaagaaaaagagacaaaagacttgacacacattattgaggtgaagaaaccagctgggaaagcatccataggcatggacaaccttgatggcttctggagtttcttcagtgatcacatagagtagaccaaacactggaaattagctgagtgttgcatttggccttaaaattatcttccctgtcttattctactacattatgtttgtgtttcttggttactcttgctacatcatgttgtcaattcatatctcacaagctagaagataaaatttaatgcttttcttttccgtaaaaaa

SEQ ID NO: 54977 - DNA, 592 bp, Glycine max
  Clone ID: PAT_MRT3847_20656C.1
tgaaggatttttaagacggttgtagactatatatggaacttcttctagctttatttaattgtagatagatataggaccaatagtgtagagtatgtatattttattaggataggcaagagtagttgacccacaagtctcagttaaactatagctttggtatataaaggtacaagaagtaacacgcaagaattattccacttgtggcagcaaatattagttgttagtattgttagcttttgttagcagaggattctaacccatgacctctccccccttcccttccctctttaccactagactaatcttatatcttgttagcatttttttgtatgtataatcctctgacattacttaatttggatttactatattgtttattagtccaaacttttgttacccttttattagcatctatcttcctcatgatcttctactcatattcacattataaatcatcatgcaaatccaaaacagaaaaatattccttcaacataccccatggtagtagccaacagatgcccccttatggaaaaagtactcctcgatcgtgcgatcaagaatatgagccaatgggaggaaggacagatctcgt

SEQ ID NO: 54978 - DNA, 214 bp, Glycine max
  Clone ID: PAT_MRT3847_20657C.1
catacacgtacgaacaccgacttaatgaaacaaagtctctatcttaagcatttagtgataactcatataaactctatcaaattctacaaaatcctacttcttctaaccattaatctgtagactctaaacttttcaacttgactaatgcttaaaattcattcaacattcctaatagttgaaccactgcggatagttgatcttatcgtgatcactt

SEQ ID NO: 54979 - DNA, 527 bp, Glycine max
  Clone ID: PAT_MRT3847_20658C.1
catcttatttaagaaaaaagaatctcaaaaattagacattgatcatttgagaatacaaatctagagaagcagccaacctagcacaaaagtagaaaagaatgcactcattatatcatgctaggcggtaaaacatatacagagcttcataggccggaaaacaagagctatgacagcatgagctttggtgcaatcatcataggggtaaagctgggtttctggttcagtgagatttgagtgaaaatggcacttcacatgataatatttggatgatgaaaatccaacccatcaatgaccaaacatgcccaaactacttcaacctgttacatctgggtcagattggctttgagaggttaatcagattcagaggaatcagatggttgcttaccaataatttcggggaaaaaggggggtgctttgggataatctcagggaaaaaggtttgcattatagaatttgcaggcattacagactgacgggaaccaaccaaagtcctctcatttactttaccaacttcccggacgcgtggg

SEQ ID NO: 54980 - DNA, 429 bp, Glycine max
  Clone ID: PAT_MRT3847_20659C.1
cccccccccccataaaaaatacccgccctggctttctccataagtttaatacgtaaaaaaaaacatagtacccaggggtttaacatcccctgggaaaatagggaaggctttaaatatttcattattacaaaaggggccacaaaatttttaagttttccccggggtaaatggcagccggcaaaaaattttcacccggggggaacccgcgggacgggacctcatttaaaacaccaattttgtaaagggtttcctgaaagtcaggggcaaaataaatttaataaagccatgacagtttttcttgggggaactcgagcagttttttaacattaaagaggcgttttttaattaccacttcccagccttcaaaatttccactttcatttccccctttaaaagaaaaaaaagcccctttagccctgggaggggggg

SEQ ID NO: 54981 - DNA, 493 bp, Glycine max
  Clone ID: PAT_MRT3847_2065C.1
agttactgtatctctttgctccaccagctccaaagccagcacaaaactctgaacttaatatccattatcactcacaagcaaaacaaaaacagacatccatgccccttttcattattaaaactcttaacaccctctctccctatgaaaacactaaaccacaacactactcactccacgacaagaaaccctttggcaatttggttgaaacagacacacaaacacacacgtatatatatatatagaagaggccacgttgaatgattcttatgacatgtaccatgactaccataacctctcatatctcttggacacatactctgcctgcttaggagggctctcctggagtggcattatccgacgaggaggggcggctggcggtaagacacccaaagaatcggcacgctggagcaatggcgaaagacggccacccggagtaccttgggagaggaggatgaactcacattagtggctgagtgaggagaagaagcccatc

SEQ ID NO: 54982 - DNA, 941 bp, Glycine max
  Clone ID: PAT_MRT3847_20660C.1
aaagcaatgtgccaatttgcctaatgtatggaaaagaagatccctgggtgaaaccgctttggggactccaggttaaaaggcaggtgcctgaagcttcatattatcaaattagccctgctggtcactgccctcatgatgaagtccctgaggtcataaatttcttgctacgtgggtggatcagaaatctagagtctgagggttctatctcattgccactgcttgatggcctagacaatttgaaacaagccaatgccagggagttagaatttatgaaagaaggttcaaaaaaatcagtgatggtgagatttttcgactccaaattctccctttgggacaggataagatcttatatcaaccctcgattcaagttgagaaattcggcaaccaaatctcagatttagtttaataatgtacatttaaaattattattttttgattgatccatgtacattagacattagttatacaataagaatcagttgcccttgtcgtatggtttgcaaacattacacattaaaaaaaaagggcggacgaataaaaaagaaacaaagcttacgaacgcgtgcatgcaacaaaataggggcggctatttttagaggttaacaagctatcgaccgcgcgcatgcaaagaaatacctttcttataaagttctataattaaataagatgggcacattgtttgcaagtcgtctgtgtaatatttcattaaaggataatattccttgaggagcaaacatgattgaggctaatgacgttgcagcagctgaatgctttgtggtttaaactatgcgtgaaaaaacgttatgtaggtttgttgaatgatctgcataaacctgattaagtacctcagcaatatttccatgggccggaacattccccctaccttcaagtataaagagacttacagagttattgtgggagaaaatcggacgcgtgggcga

SEQ ID NO: 54983 - DNA, 468 bp, Glycine max
  Clone ID: PAT_MRT3847_20661C.1
cctggctgtgctgatgctcgtcatgcacctgtatgaactttgccaccgtaggacattacttcttatcctagttataccaccaccactaccacaacattaaaattccaaccctcatcaggtatgatggcgagtacggtggggtttgcttacgcaagtgcacaaaggatggagctggacagacaagctatgatatacaagtgcatgatggcttcctgcccagacgcacatgatctcctcacagcatatgatatgtcatgctgcatggatgagggattctaactgaagctgacaaatagcactgaccctgagtcaggtacttgctcatgaacagaaggctagcaatgccgatgttgaagagatgaggctactaaccacaggcactgtgagcaccataagcatagacgccctccccgtattataaagcttctcgatgttaacaacaacagcaccaccactcatactagcgac

SEQ ID NO: 54984 - DNA, 2331 bp, Glycine max
  unsure (1)..(2331): unsure at all n locations
  Clone ID: PAT_MRT3847_20662C.1
attaatgttttctcatataagtgaaaaatgaaacatgtttgctctatctaatcagtctcaaaatcaacaccatatatcgttgaaatgttcagaattaactacacctagcaagatacttattgttaaatcaaatcacatccctgttttcttctgttgtaatgatattagagtacagtaattgagagttagttttttacattattcttgcagagaatgggaagcatatttaagtgagaggtaaaaaagagtatgagagatgttaatcttaactatagaatcaaattaaatagtaagattaggtttaagtaaatcattgtgagggttgtatgctcaaaattgacttctcttatctctcattaaatatgttcccaaaattgataatatatatatatatatatgcaattgcgcataataataaacaagaccagtttgatgtcatgaggctcgagctccggacgcgtgggtttctactctcacagctgtttattttcttcctcttctcaactgtgttcgtgtgtatgcatttgagttgaaagccagactcaaggagctgaaagacaaaagaagaaacttggatttgaatcagccaaaatttgagttacacgtaattgcaaagataagatgagtgttatgtatagtcctgttctcaattactcagatgtggagcatcagctaaggaaaaaccaagacatggattcaagtattggacatccacaacaacactgtcaccaacccaattctggactattgaggtattgttctgctccaagctcattgctggcaagcctcattgacaacaccattcatggctgtgtcaacgaggaatcgttcacaagtgagaatcatcatcatcagcagcagcagcagcagcagcattatcttccatctacaagttcagaaatggagaccatgttatccaaattgctaccatccaacaatggatggagcaattcagaagctttgcaagaatttggaggcaagcctgtgaagcaggaaataggggaatctattccacaagagccaccacaacagaatggttattcttatggtggctctcagttgatttaccaatctcagcaaattcaaggcttgccaaatggtggatcttccagtgcttctggcagtgcttttgatggctcttttggtgtggtgcactccatggcttcagaggactccattcaatctaaaatgggtatcaggaattgctccaatctctttaggcaaaagagttcccctgctgcatttttctccattgaaaatgatcttgcagcattgagagaagtaggaagctttaaagccgatgatgtttcaaatggactagttactgcatcaactggtgggttgcatagttctcatactttctcatctaggccatcttcatgcttgaaacggttgccacaaatagccgaaaatggaaatgaaagcctagaagaaaattgtgaccaaagtagaaacctagtaaatgacaatggtagctcaaaatgttacatacctagcttcaccaatgaattatgggaaagttctgcattcaatgccccaaaaacagagaatgaagatgaaatcatgttttccacttcaaatattttggaatctcaggaagcagatttcagctttcaaaatctgggtttgactcaccatttgagtctacctagctcttctactaagatgtcatccatagaaaagtttcttcagattcaaggttctgttccttgtaaaattcgagccaaaagaggctttgccactcacccaagaagtattgcagagagggtaagaagaacaagaattagtgaaagaatcaagaaactgcaagacctttttccaaaatcagaaaagcaaacaagcacagcagatatgttagatttggcagttgagtatattaaggacctgcagcaaaaagttaagatactctcagattgtaaggcaaagtgcaaatgtacaagtaatgagaagcattacactagaacttgtgcttgatttatttgcatgtagatagcaaaaggatggaagattttttagtgtgccaaagttagcaattgtaattagataaaataatgctgacatttgcctggagtgagtttaggaccaggtgaatttttttttttacttttttttttcattttttcccttaatttctttttcttcatagtttgatttaaggatcataaagacctagcatgtttagcatgagttttgtagctcttcattattacatataagaatttatgttgaaatttatatggaaaaaacttttgaaacttcaaaaaaaaagggcaatgcccggacatggaacgaatnccaagnncttacggtacgcgggtgcagtgcgacgtc

SEQ ID NO: 54985 - DNA, 1859 bp, Glycine max
  Clone ID: PAT_MRT3847_20663C.1
ttaatgttttctcatataagtgaaaaatgaaacatgtttgctctatctaatcagtctcaaaatcaacaccatatatcgttgaaatgttcagaattaactacacctagcaagatacttattgttaaatcaaatcacatccctgttttcttctgttgtaatgatattagagtacagtaattgagagttagttttttacattattcttgcagagaatgggaagcatatttaagtgagaggtaaaaaagagtatgagagatgttaatcttaactatagaatcaaattaaatagtaagattaggtttaagtaaatcattgtgagggttgtatgctcaaaattgacttctcttatctctcattaaatatgttcccaaaattgataatatatatatatatatatgcaattgcgcataataataaaaaagacagttttgatgtcatgactgaatacttctttatttattatagatcttgcagcattgagagaagtaggaagctttaaagccgatgatgtttcaaatggactagttactgcatcaactggtgggttgcatagttctcatactttctcatctaggccatcttcatgcttgaaacggttgccacaaatagccgaaaatggaaatgaaagcctagaagaaaattgtgaccaaagtagaaacctagtaaatgacaatggtagctccaaatgttacatacctagcttcaccaatgaattatgggaaagttctgcattcaatgccccaaaaacagagaatgaagatgaaatcatgttttccacttcaaatattttggaatctcaggtacgtaacaaattttatattgaccattgaacttttagtttatgaatttactttcaaccaattgaaatttttcacggttgatcactgaaaattgttgttatcatcatcaggaagcagatttcagctttcaaaatctgggtttgactcaccatttgagtctacctagctcttctactaagatgtcatccatagaaaagtttcttcagattcaaggttctgttccttgtaaaattcgagccaaaagaggctttgccactcacccaagaagtattgcagagagggtaaaattctatcacatctagcaattttaaatctatagtcagttagtcaatttccatactaacaaggccatgaacttaacggttttatattttttatcctcaggtaagaagaacaagaattagtgaaagaatcaagaaactgcaagacctttttccaaaatcagaaaaggtaactttatttgaaattccatttgattgaaatttcactcactttgaaagttgatgataacttataattcttcccttggcagcaaacaagcacagcagatatgttagatttggcagttgagtatattaaggacctgcagcaaaaagttaaggtactagagaagtataaatctttccataaattctgaaaagaatatacacattaaactccaccaaagttatagtgtctaactaaatttatttctcctcatgcagatactctcagattgtaaggcaaagtgcaaatgtacaagtaatgagaagcattacactagaacttgtgcttgatttatttgcatgtagatagcaaaaggatggaagattttttagtgtgccaaagttagcaattgtaattagataaaataatgctgacatttgcctggagtgagtttaggaccaggtgaatttttttttttacttttttttttcattttttcccttaatttctttttcttcatagtttgatttaaggatcataaagacctagcatgtttagcatgagttttgtagctcttcattattacatataagaatttatgttgaaatttatatggagactgcttttgaaact

SEQ ID NO: 54986 - DNA, 542 bp, Glycine max
  Clone ID: PAT_MRT3847_20664C.1
gaaagggcgaagaggaccctttcatctactgcacagactacaattgagattgattctctttacgagggtgttgacttctacaccacaatcacccgtgccaggtttgaggagctcaacatggatctcttcaggaagtgtatggagcctgttgagaagtgtttgagggatgccaagatggacaagagcactgtccatgatgttgtccttgttggtggatccactagaattcctaaagtccagcaattgttgcaagatttcttcaatggaaaagaactttgcaagagcattaaccctgatgaggccgttgcttatggagctgctgttcaggctgctattttgagtggtgaaggtaacgagaaggtgcaggatctgttgctgttggatgttacacccctttctcttggtttagaaactgccggtggtgtcatgactgtcctcattcccaggaacactactatccccaccaagaaggagcaagtgttctctacttactcagacaaccaacctggtgtcttgattcaagtgtacgagggagagagagc

SEQ ID NO: 54987 - DNA, 2355 bp, Glycine max
  Clone ID: PAT_MRT3847_20665C.1
tatcgcgccgcttcacccgtccgccaattcttattctttttctctctttctctctgcttgcggtgcttcacaagccaaatctaacttgtctctgttttctccgatctagtactactatcaatggccggaaaaggagatggtcctgctatcggaatcgatctcggcaccacctactcctgcgtcggagtgtggcagcacgaccgtgtcgaaatcatcgccaatgaccagggtaacagaaccacgccgtcttacgtcgctttcactgattccgagcgtttgatcggtgacgccgccaagaaccaggtcgccatgaaccccgtcaacaccgtcttcgatgctaagcgtttgattggaaggagattttctgatgcctccgttcagagtgacatgaagctatggccatttaaggtcatccctggtcctgctgacaaacctatgattgtggtcaactacaagggtgaggacaagcagttctccgctgaggaaatttcttccatggttctcatgaagatgcgtgagattgccgaggcttatctcggttccacagtgaagaatgccgtggtcactgttcccgcttacttcaatgactcccagcgtcaggccacgaaggatgctggagtcattgcgggtctcaatgtcatgcgtatcatcaatgaacccaccgctgctgccattgcttacggtcttgacaagaaggccaccagtgtgggtgagaagaacgtgttgatttttgacttgggtggcggtacctttgatgtctctcttctcaccattgaggagggtatttttgaggtcaaggccactgccggagatactcatcttggaggagaagattttgataacaggatggttaaccattttgttcaggaattcaagaggaagcacaagaaggacatcaatggaaaccctagggctcttaggaggttgaggactgcctgtgaaagggcgaagaggaccctatcatctactgcacaaaccacaattgagatagattctctttatgagggtgttgacttctacaccacaatcacccgtgccaggtttgaggagctcaacatggatctcttcaggaagtgtatggagcccgttgagaagtgtttgagggatgctaagatggacaagagcactgtccatgacgttgtccttgttggtggatccactagaattcctaaagtgcagcaattgttgcaggatttcttcaatggcaaggagctttgcaagagcattaaccccgatgaggccgttgcttatggagcagctgtacaggctgctattttgagtggtgagggcaacgagaaggtgcaggatttgctgttgttggatgttacacccctttctcttggtttggaaactgccggcggcgtcatgactgttctcattcccaggaacacgactattcccaccaagaaggagcaagtgttctctacttactcagacaaccaacctggtgtcttgattcaggtgtatgagggagagagagctagaaccagggacaacaacttgttgggtaaatttgagctttctggcattcccccagcacccaggggtgttcctcagattactgtctgctttgatatcgatgccaatggtatcttgaatgtctctgccgaggacaagaccacagggcagaagaacaagatcaccatcaccaacgacaagggtagactatcgaaggatgagattgagaagatggtccaagaggcggagaagtacaaggccgaggatgaggagcacaagaagaaggtcgacgcaaagaatgctttggagaactatgcctacaacatgaggaacaccattaaggatgagaagattgcatcaaagctttctgatgacgacaagaagaaaatcgaagatgccatcgagagtgctattcagtggttggatggaaaccagctagcggaggctgacgagttcgaagacaagatgaaggagcttgagagcatttgcaacccaatcattgccaaaatgtaccagggtgcaggtgctcccgacatggctggaggcatggatgaagatgttcctccatctggatccggtggtgctggccccaagatcgaggaagttgattaaattgtttcattatttagatgggatgggcttgtgttggatctattccgtttttttttcctttattttatttggtctagaatattggcccattattttggttactaacaccaggtatggtgattggtaattctttttttttggttttgaatagtttatccagatttcacctcgatggagacttgtttaaaaatttttgccaaagaaaacaattttatgggccgttcctatttaatgttttcttaaattttgatgtttgatatcaaaaaaaaaaaaaaaaaaggggcg

SEQ ID NO: 54988 - DNA, 194 bp, Glycine max
  unsure (1)..(194): unsure at all n locations
  Clone ID: PAT_MRT3847_20666C.1
gatcttgcaaaanaanaaaancccaatggnancgancgctccnantcnangcgaananttcgtgtacatggcgaactggcggacaggccgaccgtngaggagtggtggntcatgnaggttcgcctccgccacacnagactgcctgagacnaactcttcgtgtaagantatgngtgcggtctggatacntcatna

SEQ ID NO: 54989 - DNA, 464 bp, Glycine max
  unsure (1)..(464): unsure at all n locations
  Clone ID: PAT_MRT3847_20667C.1
gcgagttaacatcttccttagnttctatatagggagatagcccttcatctctctttctctttcttccctttagcttagctacgtcttgtgcgagtagcatagcctttgcgtgattagcgtccatacaaggctcatacgagtagccaatctcaacaatcctcatacgcgtttggaaccccgaccatccgcagttgagtcccgaagagtggtttagattcataacatgagatactctcaacatccctgagtctgaaatagcgccggtgtcactagtttccaaactcaccctcaaccgcaatggcctccacttgccatcttactcaccttatccccggatgatcatcatcgcccaagggaaaggagcacttggagttgcaattccaggatgtcctgagacgtttgaggagccacaagaacaatcaaacagaagaggctcaaagtcgcagaagcagcagctacaggac

SEQ ID NO: 54990 - DNA, 228 bp, Glycine max
  Clone ID: PAT_MRT3847_20668C.1
aaccataccaatgatttctttctcatcatttctatcaatagtttattatgtcaccccttttattgaatatcatcccttacgctattattttattttatctacaacatttaaagatacaaccaatgacttttaaaaacatctcaacatcattctcctttaaattatattgaaaaacaccacattctttaaatttattcaataaccctcccactaaaacggacctacatt

SEQ ID NO: 54991 - DNA, 153 bp, Glycine max
  Clone ID: PAT_MRT3847_20669C.1
gtttagggacctctataagagatctgtacgtgtcatgcgcgcgtcctgaaagactctgagtactggctcgaggagcagacctctgatctatatatatcggatgacagtcttgcttcacttggttggagagcacgtgcaaatgttgataaggtt

SEQ ID NO: 54992 - DNA, 170 bp, Glycine max
  Clone ID: PAT_MRT3847_2066C.1
cacaaatgtgattttaagttcggatggcgtggcgagcaagaatgaagatcatggtcgtttcatgccatcagctgatgatactggagtgtgagcctaccccttttggatgaaataattaaacactcggtttgattgctcatgcatggttgatatttaattgtctagtgaaa

SEQ ID NO: 54993 - DNA, 306 bp, Glycine max
  Clone ID: PAT_MRT3847_20670C.1
tccacacatactcctttcattatttaccttccacttaaatgaatagtattagcgtcagggctattactgtactttgttccctaactttataaaatcatccttgattctcctctaataatgttatctacacctatttcaattctattctcaacatagtcacatactattagtttccaattattagactaaatggcttctcaatataatttgaccaaaccaaaacacaaacataccctctcactgttgagcaatctacctttacagtctcaaacagtctaccactgataatattatccccatttaaaa

SEQ ID NO: 54994 - DNA, 269 bp, Glycine max
  unsure (1)..(269): unsure at all n locations
  Clone ID: PAT_MRT3847_20671C.1
tttatttttttatattaacaacttttttttttttcgaaacaaaattttttgaatctttttgtcaatcaattcccgaatttttttttattttttttgaaaaaagcctttactttaaattttttgcccaaccgtaatttccttaaccaaagaaaccacacacttgtgcttgttgaattacgggatttttgaaactttcaaggttttctttttcaatcgtnggaaatgtcaactttttaatttttttgacaatatagtaaacttcatgccag

SEQ ID NO: 54995 - DNA, 214 bp, Glycine max
  Clone ID: PAT_MRT3847_20672C.1
gggacgtgtgatccgtgcgcatggtgagggatcatgctgggtgttgaattgccacacgcgccaccgggagggccctgcccggttgcggagcctggatttgggatatggcatcgggtgcctgaatgttgtggtgactggcgtgatgcacgatgctgtgcgtggggcgcctctgtctgatgtgggcttgacgcacccgttgcgctgcaagaatcat

SEQ ID NO: 54996 - DNA, 290 bp, Glycine max
  Clone ID: PAT_MRT3847_20673C.1
agcgacacttttcaacttcaataatcgcatcgcacaagcggagcgcggcgcatctcattgtctacggaattgatcgacccaactttgagcaatcacatccagcggatcgggcggtaccatctcaagccgtgctatctgataggcgatggcgcattgtgctgtccaagcgtagggctaaggttgccggcaactacaccaacgccgacctgggagctgagcaagttggcaaggatatcaacgcccttggcgacggcttagatgtcgctggcttcaaggctaactttggcaac

SEQ ID NO: 54997 - DNA, 225 bp, Glycine max
  Clone ID: PAT_MRT3847_20674C.1
gttggatgcatttctatttctactaatcatagagcttactattatcgttgagatagattagattggcaaagtcataaaatctctttgagttgaacacaggggccaagattccttctgttgggtcaatctcttgtcaagctgaagctcttgatctacttcttcggaggaaacaccgacgacggaggcctgatggcgcaagaggtagaggaaggcgtatgactttct

SEQ ID NO: 54998 - DNA, 1491 bp, Glycine max
  unsure (1)..(1491): unsure at all n locations
  Clone ID: PAT_MRT3847_20675C.1
cagatcattnttaagagcagcatttatatcgtttgtctttttctgctccattcccaaaacccatagggagtttcaaatctgttttcagggaagcatttatatcatcttgtcggaatttgattcatttccacccacccagagggcaagactaggatgatttgggtcaccacgtccatcaacatccccagtaatccaaaactcttgccataccagaaggccataataatcacagtaatgataaaactccggtctttcagccagcccaccaccccagcatcgaatcatgttgaaattcatatctgcatgaaatttgatatctgtattataccgcttctttgaaagccgcagtagtccatctgacaatatccagttaccccctcgaataaaaattggttttccattgactttaaataaccttccaccagtagcatcatcaatatgactctcaattttgcggaatccaaagtgatggctccatgaatcagattcaccaaatcctttaacatcaatgacaataacaacattgtacaaagattgtccaccctgatggttcgatgaatcaaaattgggatatgagaagaaatcaatgggaattatatattgctccgctgagtttgcaggaattgagagatcttgagtttgaagatgctctactaagcaaatgctatcctcaagttctgttgtcacttggacactcaaagaacactcagcagtcaaggagctcctgttttccaactcagttgttgtatgtagatatgccttcttataatcatcagaaaatgttgaaaccaagtgtggatcaattatttttactggcccagtaacagaaatagaaacctcatcccatattccagtattcctatcccttataggagccatccaatcccaaccttcaacatactgtgtagtcacatcctttcctatctcatgatcaccgccttgtcccccctcgggaggaattctcccgggatgatccggaggatgaacaagaacagcaagcaggtttgtgccatccgaatgaagaatatcggtgacatcaagggagtgccttcgaaacatccctttcggtaggatgatttcgtggccgttcaaatacacatcagcagagtaattgattccacggaagttcagatcacaatgctcattgcttgaaagcttgcaattaaaggttgtaaagaaccaaaaggtgtaatagtctcttccagaatcagcaatgtcaatgatgtgctcattttgcagtccatagaaaggatcgggaacggctttgttcttcaccaaggtcgctagaacacaggaacgagagctggcatccatggggaagtggggcgtgttggagggtgagtagtggtgagctggattccggtgaattggacctcagtggacctcgctgcgacccagcccgaatccagcgtggtcttgcggtgttgctccgccatcggaaacctcagatcgccggagaggcttcttcctcactgctctcgccaaacgcac

SEQ ID NO: 54999 - DNA, 507 bp, Glycine max
  Clone ID: PAT_MRT3847_20676C.1
gcacgagaaaaaatagaacataaactctacaaattagtattttattaaaattaagaaatattatttcatttcttaatttttagaaaagaagcttaaaagacaaacatagaaagataccgagggagtataacttacaaattctatccacaaatcagtaaatgattttgatccttttttataagtttcttaaaaatcaatattatcctattttcgagttgttcattaaagtattaattgaagtgtaggtatcgtacagtgagtcaagttatagtactaacaatccgcaacaggtggcttcaatgcattggtaacacattaatgaattaagtaatgtgaacaaacgatcgacattaattagtttgaaattagcgggactaatttaattcagtcgttgtacaaagctaagcatagtacgtagtacacgtactaaacatttccaaacattgacatctacccaacattcagtcgttgcatgtgcttaatcccttggttattgaccttagtttt

SEQ ID NO: 55000 - DNA, 451 bp, Glycine max
  Clone ID: PAT_MRT3847_20677C.1
ggatgaaaaaataggtgaacgtttataattcgattatcaatactcttatgaatagggaagaaacagcctccgaagcatacatgtgcacatgaatgcaagagctagtacgcacagacaacactgcttaactttgttcctactctatactcgggagacacttacagcttcattacatccagggccattatcttgcttctaattcttgtcgctgcaaataacattggaacggctaatgtgctgttgcagaggatcttatgcaggaaacgcagactatcgtaaccatactgccatgacattgctcatgcttgaccctgctgacaccactgatactgcatcaggctgatacccaatgatgtaacgacggctgacactgcattcgctgaaagaggtcttcacccagagttagagctggatgcctgacatattccatcgcttgaacttcggcattcag

SEQ ID NO: 55001 - DNA, 288 bp, Glycine max
  Clone ID: PAT_MRT3847_20678C.1
ggatacaaaattgagcgatttctccaattttaccaattcggattcgacattcgtcaagaacttttaagcattggaactctaagtgttgaaatgcgtatctgagcgctttaaggtaccgattaaaggaccaatcgtcccttcgggttagatggaagtgaggactacatgggacaaatggtatcgagcacgtctatggactatgcgcactgaatagttcagcaattggtatgaatctcaacctcctcagtctgttctatacaactcctatgtacacatcgtgtcattgac

SEQ ID NO: 55002 - DNA, 170 bp, Glycine max
  Clone ID: PAT_MRT3847_20679C.1
ccgtaatgcttcgaaaatactacaaattgcggaaacagtgttgtcctgatggtagaccttcacatacatgtgaataatctatcatgaccatggaagaggcaccagcatccacgtgcaatccagaccacctcggaggggtcagaacgcgacgcacttcgacacgatctcca

SEQ ID NO: 55003 - DNA, 544 bp, Glycine max
  Clone ID: PAT_MRT3847_2067C.1
gtgaaagtgaagtgacattgccaatacgtcgtcgtagaggcaggttaattcggctcgagcgtaaacgaaaaagaacagagctttctccctctgattggttccctctcgtcatctctgcattccaacaattgcaccttccattctgcattttaggtcatggctacgaggaaagttatagctatatgtcaatcaggaggtgagtttgtaactgataaggatggatcattgtcatacagtgggggagatgcctatgcaatagacattgatcagcagacaagtttgagtgattttaagtcggagatagcagaaatgttcaactgcaatgtaagtacgatgattatcaagtacttccttcctggcaacaagaaaacacttattacagtgtcaaaagacaaggatttgcaacgcatggtcaatttcctcggggatgctaacacggttgatgtgtttgttatgtcagaggaaggagctgctcgaaataacaattccaacatgcctggtagtaggtcaagcaggacaactgtgtcagaagccgctgtacctg

SEQ ID NO: 55004 - DNA, 248 bp, Glycine max
  Clone ID: PAT_MRT3847_20680C.1
ggtattcgggtcgagcaatatcatcctgatgcgttaaaatggcagtggctactcgattgctctcccttgtcgatcgttggtccggcagcgagtgaagctgggcgcatcattccggggagttcggagggtccgcatgttgcacattgtcactacgcaggcctcttgcggaagccgatcttgccgttgattcctcgtgaagtgcttaggcctattgttttgccgtgtctcgtactacctcactggtgcat

SEQ ID NO: 55005 - DNA, 485 bp, Glycine max
  Clone ID: PAT_MRT3847_20681C.1
acggctgcgagaagacgacagaagggtacggctccgagaagacgacagaagggaggcaaaattcaatacattaatgaatgagcatgatagtatttgtgatgtagaagcaatagaaaagtaaatcttaagtagcagggttacttttataatatccaaaaatttaattaatttttgtaacatctagttaaggttagtattttgggccagatctgttttttaagaattctagtattttagtctaaggacgtttaatgggcatgggcttgtagtaagagtctatgattatgttatggtagttgtttacttgtaagttgctttctaataagttattcctacaaagttgtagtttaaaaattattatcggaaattcttaaagaggtgtgagccacaagtcttgtaacctgaaaaataagcctcagctattgtatggcagaccttttctctgaatcttaaatccaaaattatcaagaactttctcctttctt

SEQ ID NO: 55006 - DNA, 266 bp, Glycine max
  Clone ID: PAT_MRT3847_20682C.1
tctgaggtgactttaattatgaatggaaaacaatactaaaaatacctaaagaaccacatcaaagttttgtcctttgttttatattataattttgcaatgactatttttccctagtgaacagaatttctggcacaataaattgtgccattgttttgcatttgtagaatctggactattataaccttttatctcctcttactgtctaatgttcttactgctctgcgatagatttgttcattctttgttcactatgtttgtagtggaat

SEQ ID NO: 55007 - DNA, 389 bp, Glycine max
  Clone ID: PAT_MRT3847_20683C.1
acgtccacgcgtccgcccacgcgttcggtctctttctctccatttttgcttcagaggacaattgttctctgaatttcgttttgatattttgacatcatttacattgctgccatcattccctgccactactgcgcttccctcaggcccaaatggttcaattccaacaactcacattctaagcctttatcgtacccactattaggactcctaggtttcaatgctcgttgcttttaccaaccactccatcattctgaatctcataacaaccataatctgacgttattttacttgaagcagtgtgctatatctattgcactggcattttgcgttactaacacgagatcctacattggatggtcccaccattgctcattcagctaatcctgtgt

SEQ ID NO: 55008 - DNA, 147 bp, Glycine max
  Clone ID: PAT_MRT3847_20684C.1
caagaaaaaataaaattttataggtttctttgctttactacccaccaagattttgggtagacaaacaaggcattttctagccttcttgaatttctctgagcctcgggaaaaaatcaagacatatctacactcattgttgatgaatgg

SEQ ID NO: 55009 - DNA, 405 bp, Glycine max
  Clone ID: PAT_MRT3847_20685C.1
ccactctttctttactatataagccgtgactgccatgcatggcatgcgcaccccctcttaattagcagatgaaacacattcatgtcgcaagcccatatagccctagtatgggtattattccctagatacgtatagtacatatacctagcgtgctaactatattattatgacccaagcttattccatacgggaccctatacctaccattcactattatgacccattcatagctctacctatactaattactactaataactacttgcccttaacacatcatttgacgatctcacacatggtgcatatgacataacacttctgagacacatgtttaacctctatgatatacctaattcatttcgaggcccccgacactctgatcctaggtagacacttcgagggaaa

SEQ ID NO: 55010 - DNA, 252 bp, Glycine max
  Clone ID: PAT_MRT3847_20686C.1
cttaatctgactgccactgactgcaaaacctgtcttggtgcttctaaaacagccatgttcaacgggtgtccgaaacgtgtaggagctcgttcggtgctgcatgattgtacaatcaggtatgagcagtacccatttgatgattgagatacagaattattggagctttggatttctgtttccaccgcaaagctttgtaagccataaatttgtttgtgtaccacaaatgtatgtatgggttacttataaagtcaa

SEQ ID NO: 55011 - DNA, 445 bp, Glycine max
  Clone ID: PAT_MRT3847_20687C.1
gggtattccgaattttgggccccaaaacttggtttgaaaaaacaatggggggccttacttggggcccaacttggcaaaaaaccaaaattggcccaaatggttggtttttgccttcccccttattaaaaaaagcttttggtttttaaaaaggtgggggggctttttgggggaaaaaggcacttcccttttcccggttatttactaaaaaagggggcccaatattggttattttaaaaaaaccccccaataaagcccttgttaaccattgggttttaaaaaaacgtttttttaaaaaaccttttttttccggggggggaaaagggcccagatttgggaaaactccaaattggcccgtttttggagaaaaaaagatatcctttacttccgaataccaaaaaatttggtggggggggcggcccacaaggaataaagggatttttttaaa

SEQ ID NO: 55012 - DNA, 486 bp, Glycine max
  Clone ID: PAT_MRT3847_20688C.1
gagacaacaggctcactgagaaaacaatttatacttgcagagattaggacatattggttgactattatacaatagcaactcaatttaaaaaatctataccgcattacattaagcggcatatgcataccttgctgatcatacattatgccatctattataactgctgaaatcaaatataagcggaatatgagtaatacatcatatttccgggttattttacaacggcagatataaattccggactaaacacaacaaaaatcttgctttgacagacaaggaaaagatggaagtgattagaaacagaggcattcctgctgatgttctcgcaaagcgagctcatgaattagaaaaacatgttgctcatgaaagcctcaaggatcagattcctgctgatgacaagctgtattctactaaagttaataagtttgcaaaaattatgaaccatagacaaaatgttgctggtgatcttaaactcctactgatggg

SEQ ID NO: 55013 - DNA, 236 bp, Glycine max
  Clone ID: PAT_MRT3847_20689C.1
agaaatctacttttggggaaaaccattttataccccttttaaaaatagtgataataagtcagggatatcgtacatccggggtcgtttcagaaaaaattacctgtcatgtgattttgcctaactgccttcctttgggatgcaaagctcattacactggcaaagtaaaaccccgaatccaacatccgcggcaaggttgagcccccccgccaaattcccgccttacctacgcgggcctg

SEQ ID NO: 55014 - DNA, 959 bp, Glycine max
  Clone ID: PAT_MRT3847_2068C.1
ggaatcaaaaattatgaaacccaaacatcagattagttcccttatttcagttgtttcagatacccgaccttggttcctacctagcagcacaggaactcctggagctggttcctggaaagagatctcaggtactggctcttttaggaattggtcaaatagctatgagagggaacttcccccaaaacctaatcaggtcaagaaagggaaaacacgccggtggagcctacaatctcccacacaacaaaaccagatggagtattctcataataagttacccatgtatgctgctgcattcatgcttcctgccatggagggatatgataaaaaaaggcaaggtgttgacttgcttggaagagattttattgtcttggggaaactcatttatatgcttggggtctgtatgaaatctgtagccatgcatccagaagcttctatgctggctccttccctcctaaatatgttaagatccagggaggtatgccatcaccaggaagcatatgtgagaagagccgtgctttttgcagctgcatgtgtattggttgcccttcatcctacttacatttcatccaccttactcgaaggaaatgctgaaatttcgactggccttgaatggattcgcacatgggcacttgacatagccgagtcagacacagataaagaatgctatacgatggctatgacatgtatacaactccatgccgagatggctcttcaaacttcccgagcattggagtcagtaagaagttcactcaaggcaggtcctgttcttccttctgatgcatccaaagtgaccattaaaattccctactaaaatggggattagtgatgcttctagctattgtgaatagcttctagcccagaatataaattctaaacgtgctaaactgctaattatttctgctactcaatattaatttaatgttttattgggtccatgtttttgtaagaaatttgtattt

SEQ ID NO: 55015 - DNA, 881 bp, Glycine max
  Clone ID: PAT_MRT3847_20690C.1
ggggtctttaccgatgcaataaaaaatgcagttggccggcctcgcccagacttctattggcgttgcttccccgatggggtagagaattatgatagttggggaggtgtggtatgtcatggcaatgctagcgatataaaagaaggacacaagagtttcccaagcggccatacatcatggtcctttgcaggtctaggttttctgtctctgtacctatcggggaagattaaagcttttgatcgcaaagggcacgtggcaaaattatgcattgtgtttcttcctctacttgttgcttgcctagttgcaatctctcgagtggatgactattggcaccattggcaagatgtgtttgccggaggcattctagggcttgttgtggcaaccttttgttatatgcagttcttccctgcgccctataatgatgaaggatggggtccatatgcatatttccgggcaatggaggaatcacgagcgaatgcaaatattaatcgggaattaccagttgggcaggccatggaggatcgggtaacgaatcaagaaccaaggagaaatggtgataccacctttaccccttactcttaccgtagcccaaccttggaagccatggaaatgggacagaagtaatagtcttctatagcactaatcttctccctagctacctagttccttacttttgtgtatacttatgagcttctctatacggcaaccactagatttagctaattgtgcagcttctgtttcttcttgcattattattattattggcactgccactgtaaaaaatgaaaaatgacggcttctttccgctgaattagattatgttgatagatggtacgttaatgggatcccattttgaccttataatggggattgcctactcctgt

SEQ ID NO: 55016 - DNA, 756 bp, Glycine max
  Clone ID: PAT_MRT3847_20691C.1
gtggtatgtcatggcaatgctagcgatataaaaaaaggccacaagagtttcccaagtggccatacatcatggtcctttgcaggtctaggttttctctctctggaccttcgggggaagattaaagcttttgatcgcaaaggacacgtggcaaaattatgcatgtggtttcttcctctacttgttgcttgcctagttgcaatctctcgagtggatgactattggcaccattggcaagatgtttttgccggaggcattctagggctagttgtggcaaccttttgttatatgcagttcttccctccgccctataatgatgaaggatggggtccatatgcatatttccgggcaatggaggaatcacgaaccaatccaatcattaatcgggaatcacctgttgggcaggccatggaggaacgggttacgaatcaagaaccaaggagaaatggtgatacctttaccccttactcttaccatagcccaaccttggaagccatggaaatgggacagaagtaatctttatttatggtcttctcttgcacagatgaatcttctccctagctagttctttatgtatacttgtgaggttctctacacgtcaaccactagatttagcaaattgtgcagcttctgccttctgtttgttcatgcattattattgccattggcactgccactgtaaaaaatgaaaaaatggcggctgctttccgctgaataagatcatgttaatagatggtacgctaatgggaggtttttttc

SEQ ID NO: 55017 - DNA, 346 bp, Glycine max
  unsure (1)..(346): unsure at all n locations
  Clone ID: PAT_MRT3847_20692C.1
ctggtggcatcacagngagaganacagttnagtgagccaccaccnnctccaattcatctactttctctccacattcttcaaaanggttgtctccaattctncaaaagggtganactntgaaggagtaaagatngtggngcnataaaagcagcgattggagacgcagtnttgactttcatgtnngcgtntgttccnctgtgttgggnattgctgtctgggtacatgacnaatgcccttaaccttcaacacatcactacaatgggtcccttacgcntcnaacttntcanaccanctcgnttgntcttgtatgctggnacacaacggcatgtcntgngggcanttcaac

SEQ ID NO: 55018 - DNA, 127 bp, Glycine max
  Clone ID: PAT_MRT3847_20693C.1
actacacgaatatcttattacttacatctatctcttaaaaactctgtaaacatatattatttaccagacacctttttacacatgatgaccatctctataactacttaccatacaactaaatttataa

SEQ ID NO: 55019 - DNA, 144 bp, Glycine max
  Clone ID: PAT_MRT3847_20694C.1
tttgaatgtgccaaaaaaacacttggtacctttattaaccgcgtccctacttggtctatctctctctcacggtatgggcacacacaccctggcttggacatgttctttggcgaaagaggattggcaggggctttctatatcttt

SEQ ID NO: 55020 - DNA, 298 bp, Glycine max
  Clone ID: PAT_MRT3847_20695C.1
ctatcaaaatatcccacttttcctaggttttgaatgcccaacaccccatggatttggtttgtacaaagaggatgcgggaccttccactttatcaaactatgctagtcttgatcttaatactcccccaaatatttaaaatcattaaagaccctaatgtggacttcttcaaatttcacaaccataacttatcacaatccgaacacacatacacatatttcaaatacttccgatggggtgctaatgccaaaaactatatctacagccacctatttgaaaccttattcttgagcccagcatt

SEQ ID NO: 55021 - DNA, 331 bp, Glycine max
  unsure (1)..(331): unsure at all n locations
  Clone ID: PAT_MRT3847_20696C.1
gggccgaaaaaatttttttttatttaatttttttnncccttatattccacccaccctaatacaccaccgcccatttttctaaaaaattcacccacaaacctcaccccaaaactcatactcaccaattcccattaatttatacaagtttctttcttaaacctcccaacaccatccatttcaacctaaaaacttatattgtaacaactttttctcccttattctcaattattctcaataaaaaaattcaacatacctcaacacttattttgattcacaaatccatccacaactcataaccaacaactcaacttccttataaccatcatttctt

SEQ ID NO: 55022 - DNA, 532 bp, Glycine max
  Clone ID: PAT_MRT3847_20697C.1
ggctcgagggaaactgggaggcctctcatgtgaccctaggaactgtcagtgatcctagggacagcgcacctcccaatgaagcactgactactctcgagggggggcatactggaatggggcttatacggccggcacatcaatatgaggctggggaacatgctcagctctcaacctagaccaaagtggaattgataaaaatgagagccacataaatgatcctgggatcgataggagggagtttatgaccagatgaccagaatgaaataatgatgacaataacatggaacgttgcaggggacaagggactagggactaactgagttaggggcggccctgccatccatattaatctcctaagggaccttgggcccatgcaaacacactaatgtactggtgaaatactgaataatacactagcccatttgcagatatccttatgcgaaataaataagagagcgtcagtgcgtagccttcattctactacgctacgcaaaggttacaaagtcgggtggctccccactaggagagtcaa

SEQ ID NO: 55023 - DNA, 395 bp, Glycine max
  Clone ID: PAT_MRT3847_20698C.1
acctgtttctggccaaggcctggtatcttagtgatcaaagagtaacaagaagccgatcctctgaattgcggcggaggtatactgaaatgcaaaattctcaaacaaaacaaggaatggaatctatgagcatggaccctcagcatggtgtggacactacaaaacaaggaattgcacattttaatggttttgattacattactatgaccgagcttccaagccaaaagggatcattcatttctccatccaactcatctttatctaactttccacactcatcaaattgggttgatgcagataaagtctcatcttgtgtaagtatgctaaagggtacattacaaccgcaagagactcagcaaccaagttgagaattgaggagagaaagctggcagcagata

SEQ ID NO: 55024 - DNA, 193 bp, Glycine max
  unsure (1)..(193): unsure at all n locations
  Clone ID: PAT_MRT3847_20699C.1
gtcgangnaggcgtagtccgcncngaattcngnncgcgnctnaatcagtcaanacaaggggccttgcannagnacngaggtaaanctcntganannnagnnntcgngatctgtatcacgtnaatntgatanttgacangttgcctgtnatgaggnttggccaatcaaaatgggattcagctctagnggacggn

SEQ ID NO: 55025 - DNA, 488 bp, Glycine max
  Clone ID: PAT_MRT3847_2069C.1
gttgtgatcagatattttgggggtatcaaattaggcaccggaggattggccagggcttatggaggagttgcatcagaatgcttgagaaacgccccaacttgctttgtgaaaactaaggtcattaaataatattggagatccgcttataacagggttgacacaccaacaagtacttgagttgtcgatgggaatgggactagagcccattatttagttacaacaatggacatccatctccgtgtgattggtgatcccatgaatggagttcaatgggtaacaacgaaattgcttgttgactaaagtacaccaaaataaaattttgtagagttatttcatttctcattcctatgacgaggtgtattataatttgtgacaatattaaggttgaggtatttatatgtgtattttttgtttaaaaaaattctcttaatgaattcaatgacaattattgcatgggcggtgtcacataaccctttattttgtggttt

SEQ ID NO: 55026 - DNA, 677 bp, Glycine max
  unsure (1)..(677): unsure at all n locations
  Clone ID: PAT_MRT3847_206C.1
gacgtcgcatggcacgncccgtacgtaagnncttggnattcctnctagnnagtcggccccgccctcttttcttcttctcttttctttctcttcttttcttttctttttcttttcttttttcttttttcttttttcttttttctttttttctttttttttgtttttttttaaaggggaaaaaaaaacccaccctaaaagtttttttttttttttaagaaaaacaaaggaaaaaaaaaatttttttgggcatctccttggattttttaaaaaaacaacccggggaaaaaaaggggggaaaaataaaagggggaaaaccgggacatttttttcttttttaggggaaaaaaacctctcctttttttggggggggcaaaaccttacacccggaaaattttttttaaatattaaccccgaaaacccccccccccccaaggggggaaaaaaaaaaccctttgtttttttttattaaaaaaaagccccgggggggccgaaaaaaactttgaaaaacccttaaaaatttagggggccacttaaaatttatttaagggccccccaaaaacgggaaaaaattcccaacccttggcctttgtttttggcaaaaatttccggggtggaaaaaaacaaaatggggaaccaacacctttggaaaattctaaaaaaactgatccccccttttt

SEQ ID NO: 55027 - DNA, 2255 bp, Glycine max
  Clone ID: PAT_MRT3847_20700C.1
ggacgaaccaggtgacgaagaagagttcaggaggtgcacccgaagtgcgtcaggggggtggaggtgcaaggagagggctatgcgaggaagaagcttctgtgagaggcattttctgtaccagcagcagagaaataggagtgcgaagaagaaacgtgcttctgggggtgttggtgtgccccagaaaagaggaatgaaacaaagaaaaaaacctgaaggtgatttggaaaatggggttgtgggtgctggagttgttggcgccgatggtgatggcgccgatggtgatcacactggtggtccccatgttgttgaggaatttgctgggctttttggtgaagggcatgatggtggggtgaatcttggcttgggttgtgaaagttttgacctttggggtgaagtagagggtcagcatgttcatatgggtggctttgggggaggatgtgggaaactgggtcaggttgaagggcaggttctaggtcagccatggagcaatgcaaatgctggtggtggggtttttgatgctgttctgggaggtcatgcaagtggagctggtgtgggtgtttgtgaaaatgattttctggacctttcttctggaggtctagaagctgattttgatagtctttatgatcagggttttcaagctctactttgtcaaggtgggggctgtgaggaagatgtgggtttcattggctctgattgggccattcccaactttgcagctctcggtggtagcacagggtttcaggggttgagtggtgaaaatgcataccagtttagaggtgaagaagttgctgggtgtgtgggaaatccaggagggtatggtaaaaattcagatgacagttttggtggcatagacgtgccggggtcaaatagcaggcaccatggggataatgcatcagatagcaagatgcttgttcttggtgttgaagagggaatggaacgattgttagatggaggacttgccagcagtgaagaggcaaaaggtgtagccttcaggccagtggctaggaggggtaggcctaaaggttccaagaataaggataaacagtttcacaccaccttgaacagacagagtgttggtgaaaatgttaaaggaggaacaaatgggatcagtagtgtcacagtttcagggtctgtctttaaagctgttgatgaaggtgcagtcctgggtgagattgcgaggccaaagaagcgtggtcgacaaaacggtttaaatacagtgaataatgtcacaattttagagtctgaaagatctgtattttctgttgaggaagataaggcaggtgatgaaggtgtgggtctgggtgagattgtgaaaccaaagaagcttggtcgacgaaagggttcaaataggataagtaatgtcacagttttagagtctgaaagatcattgttttctggtgaggaagataaagctgaggatgaagttgcaggcctgggtgagattgtgaggccaaagaagcgtgatcgaccaaagggttcaaataggatgagtattatcacagttttaaagtctgaaaggccattgctttctgttgaggaaggtagtgccgatgatgaaggtgcaggcctaggtgagattgtgaggccaaagaagcgtggtcgaccaaagggttccaggaataaaaagaatattttgcatgtaagtaataatgttgttgtcatgtttgcaggacccaagaagcttggtcgaccagaaggttcagaaggaagaaagaagagtgtagtgttggttggtaataaggttgttggtgagattgcaggacctaataagtgcggcaagacgaagggttcaaaaaataaaataaagaatgttgttgaggttggtaatgaagttgctggtgctggtgagattgcaggacctaagaaacatggtcgaccaagaggttccacaaagataaagaagaatgctttggaggttaataatgaagtttctggtgctggtgagatcacaggatttaagaaacgtggtcgaccaaaaggttcaacaaagaaacggtatactgttgtgtacgcttctagtaatgaagtggcatgtgaggttgcaagacaagatctggaaaacaaaatgctgagcaatctgtgtcaaaaagtttctgatgaacttgtaagcataaataataaatatggtccagcaatgagtacaagaagtaactcgaggagttttgtatttgagggtcagaagtttccagggatgtctaatgatattaatttagaaggtgatggtggaagcacaagtgtttggtcaagtggtttgg

SEQ ID NO: 55028 - DNA, 269 bp, Glycine max
  unsure (1)..(269): unsure at all n locations
  Clone ID: PAT_MRT3847_20701C.1
gntnntgnntgtctccctctctcntacggtctttactcttttaccattctcattttatcgactacgtacgtaatcaaacacacaataatataaagcgctggatctgaattttccgttgcatanctctctgtttctccctgtccaataaatttgtgatttggncctgagaagagatggatcgagaaaatggcgacggcgacattgagngcggtggagccgacgacncgggtttcgatcttcgatggtcgcaatacgcccgtgttggccac

SEQ ID NO: 55029 - DNA, 531 bp, Glycine max
  Clone ID: PAT_MRT3847_20702C.1
ggaattctagaaagcttcactccaaccggtgatcttcgacaaggtgaccactttcgccttatctcttttagatttgcatggaaaagttggcaattcttattcagtccaaagttaatgaggaaacttgggaacccattaagatttctagaaatggccctggtatatctcccatttattcttcccagataattgtttactttttgtgaaagccactagttctcaagttaaattggtgagagatgtgttgcaacagttttgtttaacctgaggtctcaaggcgggtcttcaaaaatcccggtttctagcataaaagaatgtgtctaatcgaaaaattgccaggttctcttttataatagttattagctggtcgaaccaagaaagaggactttgctcatgtcgttgatatgataaataacaggcttgatgggtggaagagcaagctgcttagtcgagcagagagggtaacactagccaagtctgtattggccgccatacccacatacacaatgtagaattattggctgccagagg

SEQ ID NO: 55030 - DNA, 356 bp, Glycine max
  Clone ID: PAT_MRT3847_20703C.1
aaaaaaaaacaaaaaaacactaacttcccccaaaggtcaaaaaccttccctcaaaggtctgctgctgcaactcaattctagcttcacttggacagttggattcactctccgattccctctctcgtagtcaatgcggtggccggcgccgccggcgaacgccgggctgggtatagccgccatgtcctatatcaccgtcgactacctccgccacctttccccggcgtggcactcgcgtctgcaaccggcgctgtggtccctcctcgccctcaccgccgttttccgcgtccccccctaccggcactggtctgccgagctccggtcggcgattccgttcatcgcctccatgctcttcatgc

SEQ ID NO: 55031 - DNA, 425 bp, Glycine max
  Clone ID: PAT_MRT3847_20704C.1
gtgcagagtatgcgatgcatgctccaacattaaatgcagctggtccttatggcaccctactgaaaggggctgatctatctgcacttaagataggaaaatcgtctccaaaacctgctttatctaaagaaatggcatagtcatctgaaaggcatcaacaagtctgccgcttaccacgagtcaaaatctgacttataaaagtcagatgcttatgaagatttttctagtcctcaaattcgcaaggagatcgccaagagattattggacatcagaacaaaactcactccacttatatctatcatcagatgtcatacaggatcctcttctttcacttggaaagggtcttacagagcagtaagatgttaaagttcatgagaatgacattattatcaaagccgcagctgccgctctcagaaatgtaccagaag

SEQ ID NO: 55032 - DNA, 269 bp, Glycine max
  unsure (1)..(269): unsure at all n locations
  Clone ID: PAT_MRT3847_20705C.1
ataacaaaaaattattcaaaaagggggaagggggaaacaataaaaaggaaaaaccccaagacccaaaaaccccaaaatcaaaccttcaaccactaaaaagcacataattaaataaccctctcccactaaaaacccttttaatatacatgataaaaaatttattccctaactccctcacacacgaacaaacttncttacaatctctcagtaataaaatggaatcccaaaaactgtatctcacaaagcttgacggacctaactgtgatggg

SEQ ID NO: 55033 - DNA, 235 bp, Glycine max
  Clone ID: PAT_MRT3847_20706C.1
acttcacccattcatacttggtgttgttactgctgctcttttctcttttcttgtttctttatttcactcttccccatactctttctatgcacaacacctcctctacaaagtaaaactcttcattcaatttaaagatattcttaaagatcgatgaatggcaccattctcaaagcggtataaagaatttccaaaaatattattttaatccactccttaatgccatcccaaattactt

SEQ ID NO: 55034 - DNA, 339 bp, Glycine max
  Clone ID: PAT_MRT3847_20707C.1
ccggagacctcggctgcgcggctcttaagacggctacaaaagcaatcgatacttgattccaagaatctataactttcgtcctactggctggtgacccccttaatatggaagccaaaatcactctgtgtgctggccacagactgagtgaagcataagctgtaccgtacttagttacatggcggaacactctcctattggacataggacttggggtcaaaactaaacttgttctgtttcttttgcagatctctgtttaatttgaagctcaagctggtgaaatctacgataagagctgacactgtcatatgtggtataggactacacgggtagactttgcta

SEQ ID NO: 55035 - DNA, 352 bp, Glycine max
  Clone ID: PAT_MRT3847_20708C.1
catctacaatccccaccaaccccttttctctcacttctttacttacactgtactgactacatcaatcggagtcttctctttcacaacaagattcaactttcaactatccttacatccataactactcctatacgctatcaaacatcatctaaataatctgccaccacatcactttctcataatgttttcaacaagaacacaactttcccttctttttgatccaattcttcaataaaaatccctctctattccacctatatgtatatcaatctaaacataaaccccacaaataatcgtattaataatacttacaagaagattcacccacttctaatctttttaactctttcct

SEQ ID NO: 55036 - DNA, 441 bp, Glycine max
  Clone ID: PAT_MRT3847_20709C.1
ttctttttttttttttttttactgggcataagttattgcgattgtagtgtttatgttttttctatttaggtgttatgttcatgtctgctacataagtttcctttttactctttttaggttataggttttggtttatatggttttaatgtatttagcatattattgatttggtcatatggaaacgtcaatttaattagtttggtagagattgtatatgtctcttttggattaaagaataaataattttgttttataataaataaattttcattaaaaataatttattttatttctttctaattacgtaaaaatatttcattccaaagtcagataaagcaagaatgttaagctaggaaaatagaacataatttccagtgctatatccttggcaatcttgccaagattgaagtttgtagttcatcactaagactcaaaacatta

SEQ ID NO: 55037 - DNA, 255 bp, Glycine max
  Clone ID: PAT_MRT3847_2070C.1
aaaaacgcaatggttacttaattgaatattgattaagagcaagatggtgagtgtcagggggacgacttcactccaacaactgacaactgtcatacacaatctggatcttagagggatagcttccagtgtaccccagagttgatctaagacgaccttatatgcatgtcacacatctcactgtaagcgcctagagtgtggactgatcccattccctaaatcaaggcacataggactataccctagttaaccaacatt

SEQ ID NO: 55038 - DNA, 280 bp, Glycine max
  Clone ID: PAT_MRT3847_20710C.1
cgcaaacacaataattgtatagtttttagtctgtcgagaactcattcatgatctgtgatatttgttaaagagagagcgacagacagagagagagaggatgggttgttgccaatcatctatcttgctgatagtgggagagaggtagactcaccctgaaatggtgaaggaaagggtaaaggaaaaagagcaagcgttctgtaaccactaaaggcatgctgctgtatgagagctcgacggcgagaaagacgtggttgatttctcgttctcggtgttctcactt

SEQ ID NO: 55039 - DNA, 685 bp, Glycine max
  Clone ID: PAT_MRT3847_20711C.1
cacacaagcaaagtagaagccatattatcatcaattaatgtccaaacaaaggttgcagggtaaggtggctattgtaaccggtggagccaccggaataggagctgaagcagtgaggatattcgtggagaacggtgcttccgtagtcatagcagacatcaaggacgaattgggtcacaacttggcaacttcgttaggcttagacaaagtggattaccgccactgtgatgtgagagatgaaaaacaagttgaagaaacagtttctttcacattagagaaatatggtagcttagaaattttgttcagcaatgctggaatcgcaggccctttatcgagcattctagacttcgatctgaatgaattcgacaacaccatggccgtgaaccttcgcggtgcaatggcagccatcaagcacgcggcacgtgtcatggtggccagagagacacgtggatccataatttgcacgaccagtgtggctggttccttcgcgggatgcgcgggccatgattacaccgcatccaaacacggccttatcgggcttgttcgctcggcgtgtagcgagcttggagctaaagggataagagtgaattccatgtcgccgtatgcggttgcgacgcctctgacttgtgagacattcgatatggagcctggtgaagttgaagctgcggcacatgctctggccaacttg

SEQ ID NO: 55040 - DNA, 983 bp, Glycine max
  Clone ID: PAT_MRT3847_20712C.1
ggtagtttcagttaagtgtaccaagttaataggtctttatatttagttgttgacatcaacaaagtcatggaggaagttaatggtatgtgccttttcttaagggaaagaaatttctcattatctctctcttttcctttgtatatacctggattctgattttatttttctcctcacaatcaatttctttcctctaatttcaacatttccaatatttatgcttcgctttgaacaaatgttaatatttctcctatgtacttataaatgataattgtcgactagtcttatattaattgtcagagtagtacaaggtcatataaggcttttgcaagactgcaatttgcactggtagtataacaaaagtgtataaactgagccactccatagattaaacatgaacttctagtggattggtgcatcacccagattccctaatgccttctttggattaagggtatatatgtttagtttaaggaagtgaaagaaattttataagttctttaaagaaaagaaaacaagagaaaagaagttatttagtatgtatataaaatatcataaatatctctaaaaaaaatgatattttagatatttaatgtatacactcagaagctctctccttttatttttgggatggaaagagagacaaaaattgctatcccatctcactttttcatttcagatgcattgcgaggcactggattctacctgaaagcacaattggagattaaaagggctgatggcaaagcggcaaatttgctaaagaagtttaatcaatttaatacttaaattttataaaaagtaatgatttttgtcattcttcatgattaaaatcttcttttgataagaaaaaaaaatcattatttttctaaaatttaggaattaaattgaggaagattaaagtatgagaagtaatatcaatttttactgaaaatataaaaattaaaaatatattttatccaaataataatataatatataatttaaaa

SEQ ID NO: 55041 - DNA, 827 bp, Glycine max
  unsure (1)..(827): unsure at all n locations
  Clone ID: PAT_MRT3847_20713C.1
cgggaaaggaacggtcatatttattggaaaactagcaaaaagaaaaaaaaatgttgagaagtcttcaactggagtctggttacagaatcatcttagctttgagactctcttccctgctaattttgttttcttcggttctgagtgctcatgggtatccttcaagagctcatatcttcatttatgcagcctgttctcaagaaaaataccaaccaaactcaccctttgaaggcaaccttaacagctttctgtcttcagttgtcagttcattctcggatgtaacttacaatagttttgctattggaaatggaagctcaacaccacaagagggaaacgtatacggcttgtatcagtgcagaggtgatttgcatccagttgactgctcaaagtgtgtaggaagacttgttaaccaaataggcttggtttgtccttatgcccttggggcttctttgcaacttgaaggctgccttgtaagatatgagcatgctggtgatttcctgggcaaactggacaccagtctcaggtataagaaatgtagcaaagccgtgactagtgacgttgagttcttccgtcgtagagatgatgttctggctgatttgcaaacggctaatggatttagagtcagtagttcaggcctagttgaagggtttgcacaatgcttgnggggatttaagtgtatcagattgctcctcttgtctagcagatgcagttggaaagctaaaaagcttatgtggatcagcagcaacagctgatgtgttcttggggacatgttatgctcggtactgggcatctggctattatgatgaatcagattccntcaacaatgacca

SEQ ID NO: 55042 - DNA, 416 bp, Glycine max
  unsure (1)..(416): unsure at all n locations
  Clone ID: PAT_MRT3847_20714C.1
aaaggaactcctgtgtttcctaaggtaaagttctcatacatgtcttgcattattactttatattgttatttatcttatgctaaatttaattttaattcctctgtaattctcaatattcgagtttagtccttctattttttccatgattttaacttttagattttaaaaaattcacaattttagttcaatctttaattttacatgcatgtctatctttcttttactttttatattttaatcaaataaattattttttaattgtgaaatgttaatttcaacctcaccataatactaggtgatacatcatcatcaaccttaaacggtaaacatgcaaaattaaggattggaaaaaaattgtgaattttctaaaatttacgactaanattgcagaaaaaataagaaattaaaattataaa

SEQ ID NO: 55043 - DNA, 453 bp, Glycine max
  unsure (1)..(453): unsure at all n locations
  Clone ID: PAT_MRT3847_20715C.1
baaagnaagncatcnaaanngcagagancggttgaaaggctncagggnaaattgcngnggnttccgggaggttttantaaagagaggtttcnggnanannnagtatggagancaggggtnttgaatgngaggnngagatagatatgnngaaantagacttanacggatatagcgtntgtgagtagtagagtntgtagagtcnncgagagagaatgngcagcanatnngaaggnncaacggccgatnggnagtananantnngctngagngangagagnannnnggtaaganagntggcnaagtggnngangnngnnaanagnggagnggagangagagannnntngannanaggaggaagnagtgagnagaagtcnatagcanaggtttgatnngnaggangnagaanngtnggnngaatnggnatnngntgatgnggngantgaaagggtcc

SEQ ID NO: 55044 - DNA, 300 bp, Glycine max
  Clone ID: PAT_MRT3847_20716C.1
cgtcggaacctgtttcccatagtgcttccattgatagatccccccgaaacccactcactaatctcatttcagggactcccagaagcgcagctattctcttccacatattacacaaacaagagttcttagcactgaacacacttttaaccaaatatgagaccaccacgataagcctccgcgcattcaaaatccaacgcccgataaattcgcaataccatcactaaacctcctactatctacaccggaaaatccatctcgaaagcattcgtacaaagatctcatttccgaactaacactctc

SEQ ID NO: 55045 - DNA, 750 bp, Glycine max
  Clone ID: PAT_MRT3847_20717C.1
aagttacaaaaagaggtgagcttaaaccctagccgctcttctcttcattcttcactttggaaacaatcataatggcgttctgtaataaggttggaaatgtcttgaggcagggtgctgctcgcagcacacatgcccctgttgcgtccatgcttaattacatccgctgcatgtcttcaagcaagcttttcattggaggcctttcatatggagttgatgaccagtctcttaaggatgcattttctggctttggagatgtggttgatgcaaaagttataactgatagagacagtggaagatcaaggggatttggatttgtcaacttctccaatgatgagtctgcaagttcggcactctctgcaatggacgggaaggatctaaatgggcgaagcattcgggtatcctatgcaaatgataaaccatctgcacctcgacctggtggcggtggcggttatcgtggcggggattatgatggtgattttgcttctcgtagtggtggttggtgatcaaatttttgtttgttgcgccttctgcttagttgagattttatgtttatgcctagcacttcgattaaggtggtcactcaagtggtaaagtagtaattattggaattttatgtttttccccgttacatttcttggttatgttattctgtgattttaatggagcatttgtttccatctattatggtcaatgtgcatgttaggttgtatttcgaaaaaaaaaaaaaaaaaactcgagactagttctctc

SEQ ID NO: 55046 - DNA, 413 bp, Glycine max
  unsure (1)..(413): unsure at all n locations
  Clone ID: PAT_MRT3847_20718C.1
tcaccttattagtccaggcggaaacaaatttttccttgtgtggtattatccaggtttccttgacatagtcaacaaatattggccaaggtgcacaagctacttcgaacttcttcaggcattcatcaaactgttgttctgaaggacaatcagtcagagatccccaacaatccatgacataattccaagcatttttttgcgcattagtgatttatatttagccttcacattcttgtttatgtgaaagatgcacaacanatttgtgcattcagggaatacatctttcactgcattcatcaatgcttggtctctgtcagtgacaataactccagggagggcatcacgctttaaaaaaaggcctcgaaagcgttgtaaagcccataccaaattattaacgcgttcaccctccacatatg

SEQ ID NO: 55047 - DNA, 1302 bp, Glycine max
  Clone ID: PAT_MRT3847_20719C.1
ttaaaaataacgagtcggacattagcattgccatactatccattggaagatcacttcaatttttaatcgattcaatcctaataaaatgatcattttggaggaattaaaaatcgattaattttcattttttgttttctaaaaaaaaatatagcacatttaagataaaatatagcacatttaagataaagaataatatatttttctttatttagaaaatatccaaactttgatccctaaaaccccataaatagttcgaactgtatagcaacaataatcgattttcgctcgaatggtttgtagaggaactctaccttctctgatccattcaacacgtgcaatttcttttccgtccctagcccctcttctcttcattcttcactcaggaaacaagcataatggccttctgtaataaggttggaaatgtcttgaggcagggtgctgctcgcagcacacaagcacctgtttcatccatgcttaattacattcgctgcatgtcttcaagcaagctttttattggaggcctttcatatggagttgacgatcagtctcttaaggatgcattttctggctttggagatgtggttgatgcaaaagttataactgacagagactctggaagatcaaggggatttggatttgtcaacttctccaatgatgagtctgcaagttcggcactctctgcaatggatgggaaggatctagatgggcgaagcattagggtatcctatgcaaatgatagaccttctggacctcaatctggcggcggcggcggtggtggttatcgcagtgggggttttggcggcgggtggtgattttgcttctcgcaatggtggttggtgattcaatttttgtgtcttctgcttagttttgagattattttttttatgtttatgctttgcactttggtaaagtagtaattagtgaatttttatgcttttcctccttacatttcttggtgatgttattctgtgatgttaatggagcatttgtttccatctattatggtcaatgtgagtgttaggttggatttcaaattagtttttcttggttcatttccactatttttaaattgttatcgtgacttgagaaaatagccccggcactaccaccttttattgtgacagtgagtgtatcaggagttttaggttttatcaaatgcttccatgatcagatttcaaagaaactagttgctttgtgcagcactcgtttatagggtgttctgccctttacccttaaaactcgattactcttgatttttgtcactgggtaaaggaggtgagttatatatgcaaatacaaagac

SEQ ID NO: 55048 - DNA, 245 bp, Glycine max
  Clone ID: PAT_MRT3847_2071C.1
cagagacagatccaaaatgcatcaacacattgaaaatcccaactaaacttacaatcacactaacataaaaagaaagaaagaaaatgataagaagagttaccagttttgcgaatgccgaggcgcttggcaacgacaaaccaaaccctccgaacggggaacatcatgttctgccaccactccacccgccgagaaactttcatctcctccatcatgcacacaatgctacaattcgtttccaccccccc

SEQ ID NO: 55049 - DNA, 369 bp, Glycine max
  Clone ID: PAT_MRT3847_20720C.1
agtcaaaagcagagaagagtcactcagggcagcagtcactgagtgaaaactactggcaattgtctgctgatgagaagcttacctttgaaccaccgcctatagattgcacaactagcggagattgcatgtaacgcagtggtatgtattataccaggggcgctggtgacacaccacattattaacgcctatgttgctataatgatgctcgtacagagaacatcattgttggatgcactcgcattgacgagtcaagactgtgaaagatgaagactgattacgaaactgatgaatggtgggctaatgggataagtgagacgcatggtatggtactatttgtgcctaaggtaatggatcaagcattgatggtgg

SEQ ID NO: 55050 - DNA, 346 bp, Glycine max
  Clone ID: PAT_MRT3847_20721C.1
tgggacacagatgaacgagtacagaaagaaggagaaggacacgcatcgcacaggtgtgaaccttctcaaactctctttcgtcaaaacgcgtccatgggatccatcaacgcacgcccaacatttactctttgagagttcacgttggtggatcttatgtcagtcctcagaggaccttcagggattatcacatgggtctgtcaaaagctcgccgctctgtttactaagcaactgcattgacgaactgtgtgatggtgatagcggcgattgagaacaagggttgctacatacgactatggctaaggctcgcgatggcatatctgcgcatggtagctgtcatggtcatgta

SEQ ID NO: 55051 - DNA, 196 bp, Glycine max
  Clone ID: PAT_MRT3847_20722C.1
agtgctctagagatagatagagagacagaaagaaaagagtgtctgtatttatagcgtttgtgtgagagatatagtgattgagagtgagaaagagttgctgataaaaacataattattttgttttcttggtctttggagggtcatgtcaatgtagttttcttagaatctatggttatttagagacaccctttttctt

SEQ ID NO: 55052 - DNA, 400 bp, Glycine max
  Clone ID: PAT_MRT3847_20723C.1
ttcgcaagaagacaacagaggggatccttcgtacggcttgtcatgagagaatggcatctaacgacagactaatgcgattgggaatgctcaatgatgagacttatttctgatcagtatacgcgatacattccacatatttgttaccaagggcatgtgcatagcctacatctgtcacacatactttaatggcttgaggaagcacaatcttcgccaagcattaacgccgtaaagttgtcttttaaagagattaaaagttgatcaaacaacccaagataaaatcaatgcataactgaatttctcacaatcaaaggcacttgagatcattcaaggggcaatgctttaacgaccctttttgttcttggtaattaaaatggaatcttttaaaagcgggaaacccatt

SEQ ID NO: 55053 - DNA, 639 bp, Glycine max
  Clone ID: PAT_MRT3847_20724C.1
attagatgaaaaataatgttttttaatcaagtagagatccaatttccagttacaaaattctatgcatgggttaacttataaattattattagggtaaatattattttggtcaataaaaatgtgaaacatttataaattaattctttaaagatagaaaatttaaattttgtatacgaatgtacaaaaaataagataaattgattcaattgttgaatttatgagactattttatcattaaattataatattcaaaataatattgacaataaattatatttttttttatcaatttgatattaagtttgtaaaattcatagaccaatttgttattaaattattcacaacactaatcttttacaattttacatttaagactaaatttatattttttatcttttaaagatcaatttgttgttgtctcatacttttaagaagctaaacagatgtttactcattggtattattatctttttataataattgatttttttatctcccaaaacatagaatatggttatttaatgttaatttaaatttttattaactaaatttgtatgggctgggttaatttattacttatgagttataatactcatattttctattttctgacaatttcgcaatccgatttttaaacta

SEQ ID NO: 55054 - DNA, 261 bp, Glycine max
  Clone ID: PAT_MRT3847_20725C.1
atgaatttcatacattgaaaactgatgtcctttagcaatacacattcggtgtgctcaagggtggtagttttgtttctactagagaacagcaccagtggaagctattctacgctagttttcatacattgtgtattttctagagaaatatagcattgtgtatatattagaaagtacaatatgttggtacggctacgaatgtaaattcgtatgaatcctgtaggttcgggatcttttggaacttttactaatgcgaagtatggg

SEQ ID NO: 55055 - DNA, 110 bp, Glycine max
  unsure (1)..(110): unsure at all n locations
  Clone ID: PAT_MRT3847_20726C.1
ctcctatactctatttttcgcgtcncatanacacaacaataacctggggacgaagcangntgttgatgttgggactatgccgtccctattgttcctactgccatttccca

SEQ ID NO: 55056 - DNA, 828 bp, Glycine max
  Clone ID: PAT_MRT3847_20727C.1
cattcggctcgaggtgagttcttctcttctcgcaaagctctgtatcacattcttccgctgttatcgtaagagggtatcagcggttacggaacaatttgacaattgcatgaagaagcaagtagaagcaattgcgcgagttttgcatttatttcaatcctacaaagaggacaatattccgtgcaaaatcgacgagggtctctatttgggttcgattgccactgcagctaacaagcctgctttgaaagactgtaatattactcacgttttgactgtggctggtagaataccacctgcacatcctcacgattttgtctataaaattatagacgttgttgacaaagatgatgaagacttaaaacaatacttcaatgagtgttttgattttattgatgaagccaaaagacacgatggaggtgttttggttcactgttttgctggaagatccaggagtgtgactatagttgtggcatatctgatgaagactcgtggaatgagcttttttgaagctctgcaacatgtaaggagtatacgaccagcagcaggtcccaatcagggtttcatttgtcagctgcaggattttgaaaagtctcttcaaggtgccaataaattgcattagtcttattttcaattgcaacctagcttggtgcattatttataaacgcatatcataaatcatctacataaaatggtatatatttacgtcttaaatatattttgaactgatatacctctgaaaccatcaagatacacatttacaattgtaaaattacacgtgaaagatctttcatgtaatgaagtgaaatttgtaatgatagcttaaactaaaag

SEQ ID NO: 55057 - DNA, 479 bp, Glycine max
  Clone ID: PAT_MRT3847_20728C.1
ctcgagccgattcggctcgagcgagaatgaccagctcagcggttacggaacaatttgacaaatgcatgaagaagcaagtagaagcaattgcacgagttttgcatttatttcaatcctacaaagaggacaatattccgtgcaaaatcgacgaggtgcaattctcacttcgattttgtacattctgtttttgttaaggcttttattccgttattggtttgcactatgcagggtctctatttgggttcgattgccactgcagctaacaagcctgctttgaaagactgtaatattactcacattttgactgtggctggtagaataccacctgcacatcctaacgattttgtctataaaattatagacggtatggtaattttcatagaaatcaaacttttatttgcttttcatgtcgatctataaatgtgtgtgactgatgatcaataaacgggttttgacattgatatacggctattctgatt

SEQ ID NO: 55058 - DNA, 188 bp, Glycine max
  Clone ID: PAT_MRT3847_20729C.1
ggctcgagccgcccttctttttttttttttctcatgtctaacgctataacctgatttgctacgagggactggggaattattaacacctgacaccagcgttactcaataaaacttcgaactagccccatggcacactacgatcctgaaacatgagctccacacacaaaaacctggatcatgtacggaac

SEQ ID NO: 55059 - DNA, 1596 bp, Glycine max
  Clone ID: PAT_MRT3847_2072C.1
cgtccagatcctctacgtcccctgcatactatgtttcgatgcacacccttcagtcttctctcatgtctttcatattctactctctgttttcctcttattcaggtatttggtgagactgttgatttagaaaggtagggttaaccagtgtatgtttggcgttttctatggttttcatggtttgcaacattatgctgcttttcagttcagcgtttgccaaaactactattcccccctctctgagcccaactccaccctaagggatacaggagagaaaaaaaagtgtgttccaaccattaaagtatattatgtttcaccaaagcaccctcaagttagaagcatctctttgctgtagctgtagccaatagtaatacccttccagctggtatacgtaccctccattctatctttatataccctccttccattctccttcctcgtccttcacattctcctctctgaattcctcttattcaggaatttggagagactgttgatatagaaaggtaggataaaccagtggccaaggaatatatggcgttttctatggttttcattgttagcaacattatgctgcttttcagttcagcatttgccaaaactgctagtcctccctctctgagcccaactccagcaccagccccggcacccgactacgtgaacctcaccgagttgctcagtgttgctggtccatttcacaccttccttggataccttgagtccactaaagtgattgacactttccaaaaccaagccaacaacactgaagaaggaattaccatctttgttcctaaggacagtgccttcaatgctgtaaagaaaactgtcctatccaacctcacctctgaccagctaaagcaagtgatcctcttccatgccttgccacatttctattctcttgctgagttcacaagccttagccaaaccagctctactcccacatttgccggaggggattacactttgaatttcactgatgattctgggacagtgcacattagttcaggatggtctaagaccaaggtgagcagtgctgttcatgccacagatcctgttgcaatatatcaagttgacaaggtgctactccctgaggccattcttggcactaatatacctcctgcacctgctcctgcaccaactcctgatattgcccctgctgctgattctccaactgaacacagtgcagatagcaaagcatcatctccatcatctactcatgatgactcctcttctcacaagttcatcagctatggaatctgggccaaccttgtcttggcaacttttggtgtgctggtgctcttctgatggcactcttcctattgaatatttaatttagattatatttatgtatctacatttggtgccacttgctttgatttgaatccatttttttgaacataagtgttattcaatatatgtatgaatgtgatttcttctattatactatttttttgttaaatctcgtagcatgcggatgtcatgtgatgtggttgccatgttattatgactgtatctaccttttttgagagttttatgccatcacttaaagttaaagtctattcctaaagttgattttattccctagagggatgtttccgg

SEQ ID NO: 55060 - DNA, 358 bp, Glycine max
  Clone ID: PAT_MRT3847_20730C.1
cccacgcgtccgcgcgacggccgtccctttttttttttttttagtggtgagcatccaacgcaatactacaattactgatctcatcctttcatggcctacaaacaaaggcactactcttgtcagttttgctctatcataataaacaaatgaagaaaaatacatcttgtgtctgaagttctagttcagttgaaaatgtgcaagggtagatatttccgaaaaagaatccgtctgctgaatgtgtttgcttgaattggtagaaaggtgctgatccccttaaaatggaatgcagcagcaaaggtgaacttgcactgtcacattgagagtgtgcacttaaatggtttaacatcaaatgcaacat

SEQ ID NO: 55061 - DNA, 202 bp, Glycine max
  Clone ID: PAT_MRT3847_20731C.1
ttaaaaaaacaccaaaagggattgttttaaaatttaacactcaaccccgatttgcgaagttctaatatttcatttcacacaaaatgtctttgattccaaatttcttttgtggcacaaagaacaatttttttgatccttttcttcctcgatatgtgggaaccttttaaagattttacttttcccacttttctttcttcttaaa

SEQ ID NO: 55062 - DNA, 355 bp, Glycine max
  Clone ID: PAT_MRT3847_20732C.1
ggagattttcacagtcttctcttctctgttgcctgtcataaattatggtcaaccatactttctcagctccatcaggtacgtgctcatgattggcctaccttaagttacgacagatcagagtttcccatagtccattattaaaccgtttgagatttctccaacccaatacaatggagcagctgacagaattgtgtggttttcacaaccagatattctaaaggcgggaacagcaaagaagaggaagaaatctgttaaaatggtccaagtaagaggatcaatatgccccatgcattgccaattttgttgtaccaagtcactgaaatattatgagtctgacgttgagcccgattttttt

SEQ ID NO: 55063 - DNA, 606 bp, Glycine max
  unsure (1)..(606): unsure at all n locations
  Clone ID: PAT_MRT3847_20733C.1
tttttacggtaatcatcttgtatatattccttataaatattcattatattttaatgcaatattacatctcccaaaatagttgttgaagcaattcttaagcaacccacccaaaatatgcacacactagctatggagtatggataacatatccttattccaatttgcaagttagtgtttctgagcagtgaaatctggctcagctggctttggaggtaacagagatagtagtctctgctgcattgtattgtgtctgctattttctctcaagtttcgcagtgcattgacagcaaaccttgatgcatatatggttgcaccaaggcttagactagacccttcctcatttgccaaagcatcttgtaggtctgcttctgctttgcacaatgacctctcaatcttctttttccagtatcgacgccaagctgcttgtatgaaagtagcagcccatgtcttccactgtgaggaatagaacctgaaagcgtgttggagctgtttgctgtgaaggcgtcnaaattgggaagcaacaaaccttcagtcatccggccatgagagcaaaggcttcaacttctgatattagtttctactgccctagntgaaatgggtagattt

SEQ ID NO: 55064 - DNA, 912 bp, Glycine max
  Clone ID: PAT_MRT3847_20734C.1
aaataatgttactgtaaacggacagcccatatcagattgcgtccgcaagaaggctgaaaagctagccggaacaattcagcctggaaattattggtatgattttcgggctggattttggggtgtcatgggagggccttgtcttggaataattcctccatttatagaagagttcaatcatcccctcccagacaaatgttctggtgggagtactggtgttttagtaaatggtagggaacttcaccaaaaagacttagatttgctatctgggagaggactccccacagatatagatagatcttatatcattgaaatttctgggagagtcctggatgaagacacaggtgaagagctggacagccttggcaaacttgcaccaacggtggagaaagtaaagcatggatttggcatgaaagcacctagagcagctacataagctaaatgtataaaaaaagattctgcgacaggttggagaaggtgaattttgctccttccttctgattcggaatcgttatttgggacccctgataatggaacaagctggaaatatttgcaagattacttgaaattcttccattgtatgcccaagttcaattgattttgtgcatggctggattttatattacatatataatgtgtaatttttttatacgcttataggttaaaaaaactgcattagaagtttggtgcttgatatcagggaagtctttggaaaagttttaagcggaaagtcttgcatatagtgtagaatttgtaatttattccttgaccagtttgttttagttatgcatttttaagtgaatcatggaaatgttttttttttttttttatgatctggagcaagattactgttgattcttctatcttgtgggcatgcattttgataagatgtaaataaaatatgtaatttttttt

SEQ ID NO: 55065 - DNA, 453 bp, Glycine max
  Clone ID: PAT_MRT3847_20735C.1
attatccacttaacattgtgcaatgattaaaagattggaacaattggaagcaagtccctagaatgaacaaattctatatcaagaactatgtgggtgagcttgggtcaaccacgccaaaacttattactggctgcagagcaatacaaactacgagagcctctactgagactgactgactcaacatggcactccttttgcacctgatacgtactaaaaggagctttgatgtattggtctacatagcataccttatcagcagagttggtctcacacatatcatggaatgggcttccactctcagctttaggtgcccatggccgcttgctcgctactagatgatgaaaatcgacacgtctttggctgtgaccgcatgaatggtcatacgatggatcgactttaacaatatcatgttccctgaccatattgaaggttgagccaccagtagaggaaaca

SEQ ID NO: 55066 - DNA, 424 bp, Glycine max
  Clone ID: PAT_MRT3847_20736C.1
catcccttaaaatgtatatgttctgaaagatcacatactagtactcataaaaaagggggattattatccaactataccgaaaaagagggtccgaattgtgctgatgtaatgaaacatagagaaaatctgagctatccaataatacgaagccagctgattgcaaaagtcccttgccaagagtgtgggaaccctttttagttaaggcggtaccttatcccccttgcgtgtcttctccagttcatttgttaagaccgggtcatatgtgccggagtgaccatgcagtagagatcctgaacctgccatttcctcctctattgagatcaagagcgatggatatcatgcgaagactacatataaaactcttctttacaatgctgaggatttccttgactgataacatcccactgacatacatgttagcact

SEQ ID NO: 55067 - DNA, 188 bp, Glycine max
  Clone ID: PAT_MRT3847_20737C.1
cttctctcatcacctaaaagcacaattttattttcattgagattataatttaaaaatcatgtgtcatacattgttgcaatgactaatgaatactttgtaggtacatacgttgttgacattttttaatttttatttagattagagaagatgggtgctcttgaagtgggtaaagtgattcatagacacca

SEQ ID NO: 55068 - DNA, 162 bp, Glycine max
  Clone ID: PAT_MRT3847_20738C.1
atgggaaaaaaaaacgtgataagttggggttatatattaaataacagtgaagaaagggaaaccgtggcaaatgatcggataaaaaaaaatgacccaaggggggaacaacgtacaataagcgcttaggatgtaaacaaagagtatgggggccaaccgaaccct

SEQ ID NO: 55069 - DNA, 294 bp, Glycine max
  Clone ID: PAT_MRT3847_20739C.1
tttttgtaaccataaaacttattttttttttggaaagctaaataatgcatgtttaaatattacacatttagtgtgataaatttctaacttttatattaccaaggacatacctctacatatgggtggatttttaagcttagttacatttttacggctaatgcagggctaaattatttaatgaccatactagcattctagtgcctaaggctcaataataacttgcatcatagccacattgatatgcaacaaaatatgcgtctcagttgtttcttatctaataatactacaaattgc

SEQ ID NO: 55070 - DNA, 160 bp, Glycine max
  unsure (1)..(160): unsure at all n locations
  Clone ID: PAT_MRT3847_2073C.1
gaaatccggttctncgagctaaacactggagctaatatcccctcactagggctgngcacttggcttggngatcctggtgtngtnggtgatgcnatagtcatgccgtcgangntgggtatcgccatanngaantgtgccaaattacggnnatcanggggga

SEQ ID NO: 55071 - DNA, 373 bp, Glycine max
  Clone ID: PAT_MRT3847_20740C.1
ggaccctgatcgattccacagcgctttggatggccttatgggggaacatcggtgttcctaaccgggtctttcacccgatggtcaacccatatggctgtggctgcgacggaaggatgcccagctgtgttgcaagttgcatgcaactcaatgccagggtttgatcattacaaatactaatgtatatggagagtgccggcacgatgagcagctgccatttgaaaatgggagctgtggagtggtgaacactattaatatcgcgagagaaccagatcttttaccttacatctaaaatactgacacacctgatcgatcacacatggaggttgacaccatggaagctattcccagggtgactgagtctgatctggaagtt

SEQ ID NO: 55072 - DNA, 296 bp, Glycine max
  Clone ID: PAT_MRT3847_20741C.1
ccagtcttctcgttctcatttgcgccgcgaggaaaggctcctattaaacatcttgccgccaagggactatccattttataattgggggttgagttttttttttttagttagggcctatagaaaccaaccgcctcttattcctaatatcccccctgaacatagaaagttgtttctaaaaaaaaaaaagcacgagcaccctggtttttttcttttttttaaccccagacccttttcccacctgggggaaatcaaaacaaacgacctttggagtgaaggacccccctcggggtggacct

SEQ ID NO: 55073 - DNA, 449 bp, Glycine max
  Clone ID: PAT_MRT3847_20742C.1
acatgattgaataaaatatacgggcataaaggccaacttttgtacatgataagagctaaatattaccaaagacgatattaaaaattcacagtagcacattaccctgtataacagtttataccaaagctcacactctcaactaggatacacaagaagcaatgtcaaaacctgcccacaaattacacaccactgctgaggacaatacaaacgatataagcaaacaggatgatgtcggctatgatgaggtccggcattatactattttggataagaaagctaagattcaatctgctaaagacggcattggatagggaaaccatgatgaggcgagagactcagataaatggcgtagtcaatactgagtgatctcaggtcagatcgatgatactctatgagtaggtccatgagacggatagcgatgaccacaaacgagtcctgaatggtcgtac

SEQ ID NO: 55074 - DNA, 317 bp, Glycine max
  Clone ID: PAT_MRT3847_20743C.1
catcgtggaccaattaatatatggttacagcagacgcaatcggatcaaccaacatgcatgtagacacacgtacatgagcacaaagactgacgccaaacatgcagagagagatagcaaactgaagaactctgtttctctctctctcacacacacaccacacaatacctatgtatggcagccagctcggcctcgcttattattgttcaaccaccaccacaagctagatagataataatcatatccatggtcgtcgatcgatgtgatcagcagttgcaggggtcgcacttgcagccgctaccgcagctgcagccgtgggc

SEQ ID NO: 55075 - DNA, 502 bp, Glycine max
  Clone ID: PAT_MRT3847_20744C.1
cttaatttttctcttctttactttattttatctgtattttgtgatttcagaagcttttcttatccatctatcaggtttgatatattaccaattcctcatgattttcaataataggcatgaacttatttgttatagtcttatagaccttgattattggtatattagtattttcaccattttctactttttattgtcaaagttcacactattttactagatagtccataatctcttttagtgaatactagtcacaggataagttaaatttaaggcttttgatgtgaagcactcgaccttatacaaaattaatgcttttaagatttgtttagaaagattattaaatatacaccttagctcaaactttgtgagttgtacattgaaatattaaaatgccaatgcagaagtttcaaaatttggggagttatatgttgaaattatttggattatctaataatacaatactaattactaaatcaatgttcttatttgtactaatagttag

SEQ ID NO: 55076 - DNA, 621 bp, Glycine max
  unsure (1)..(621): unsure at all n locations
  Clone ID: PAT_MRT3847_20745C.1
ccacgccgtccgaaaagacttgaaatccgacaactacctcgtcgtttgcgccgcgctcaacgccgtctgccgcctcatcagcgaggagaccatccccgccgtcctgccctccgtcgtcgacctcctcgcccaccccaaggatgccgtgaggaagaaggccgtcatggcgctgcaccgctttcatcataagtccccgtcctccgtttcgcatttgatctcgaattttcggaagaagttgtgtgataatgaccctggggttatgggtgctacattgtgccctctcttcgacctaattgcggttgatcctagcccttataaggaccttgttgttagctttgttagcattcttaaacaggtcgcggaacacaggttgcctaagagctatgactatcaccagatgccggtgccgttcattcagattaagttgctgaaaatacttgcgttgttggggagtggcgacaagcaggctagtgagcagatgtatacagtaattggggaaataattaggaagggcgattcgtcaagtaatatagggaatgctattctttatgggtgcatatgctgtgtctctttcatatatcccaatgctaagntgntagaagcggctgcagatgtcaatgc

SEQ ID NO: 55077 - DNA, 485 bp, Glycine max
  unsure (1)..(485): unsure at all n locations
  Clone ID: PAT_MRT3847_20746C.1
nnnnnnnnnnnnnnnnnnnnnnnnnnnnnggctcatcctcttcttcttcttctccgccgtcctggttcaacttcgccatgagcttgagcttcttcttctcgcgcctcctttcgtcctcgtcataagacagcttggataccccatgagaggagcgccatcggaggaaagcatcacgcctttcgtcacatggggtttcagtgaccccaacacgagggtattcaaggagttcgcaaggcatgtgatgcggcacaaaggaaggacaaagagcttagaggaagcagtaatgggatcattggcggctatcataagtggttgagggtccgaacacaagggttggattggctcccgaagctaaggggtgcgagaaaggaagaggctaaggggtccagacagaagggtttcagctaactgcacatggagacttgccgtacatcgagttccggtgtcatggcaagcccgcacatagctacttgatagaagaagag

SEQ ID NO: 55078 - DNA, 363 bp, Glycine max
  Clone ID: PAT_MRT3847_20747C.1
atcacaaggccctaaatttttcccctaaaaaaaaaaaaatatgggggtgctttttaggggccggcggcctatttttaccaacccccccaaagagaattgcttctcgaaaaacggcccttttggaacacttttggggtgttaaaaaccttgcctaaattcttgtcccttttttatgaaagtggccttgtggaaacattcccttaaaccataaaagggcctcaatttaaaaaaacaaacccttttaatatcaaggtttgtgaaaacctggatggtgggggaaaacccaaattactttttttttgggggggggtggcccctctcaaggcttttgggaggggttcggccattttttaggaatttttt

SEQ ID NO: 55079 - DNA, 238 bp, Glycine max
  Clone ID: PAT_MRT3847_20748C.1
accaaaaggttacggttccaaaaaaccaccaaaaggttacggttccaaaaaaccaccaaaaggttacggttccaaaaaaccaccaaaaggttacgcttccaaaaaaccaccaaaaggttacgcttccaaaaaaccaccaaaaggttacgcttccaaaaaaccaccaaaaggttacgcttccaaaaaacaaccaaaaggttacgcttccaaaacaccaccaaaaggttacgcttccaaa

SEQ ID NO: 55080 - DNA, 154 bp, Glycine max
  unsure (1)..(154): unsure at all n locations
  Clone ID: PAT_MRT3847_20749C.1
gggcaaagtcaagatcggnatcaacggatttgggaagattggccgtttggtagccagagtggctctgcagagaaaccaatgttgacttgttggccgtaacgaccctttcatcaccaccgtttcactgacatccatgtttaaaaccgacagggtt

SEQ ID NO: 55081 - DNA, 413 bp, Glycine max
  Clone ID: PAT_MRT3847_2074C.1
cccacgcgttcgcccacgcgttcgaaagcttttctacctccgtaacttctctagcactgcgaacccttactctgcgtgctggacaacatctgtgctctacccaatgcttttgctcgtccctgtccctaatccctaactccaaacccatcaccattgccgacgtctacctcaaaacagcgctgacgacctcgttgccgacgtcgctgtcacctctatctggtacacgtgtctttcgttcggaacaagaggaggacaccttaggtgacagcgactgccccaccttattcccctaccttaagctcttttttgccaattttcacttcaatttcgacagtacgctgcttgagaagctcttcaagagtgccgtgaatgtgcatgaggttgatgtcttcaatgactagactactgtgatg

SEQ ID NO: 55082 - DNA, 761 bp, Glycine max
  unsure (1)..(761): unsure at all n locations
  Clone ID: PAT_MRT3847_20750C.1
gaaaatcctatgggagaaaggttgatgtatatagttttggacttatcttatgggaaatggtgactggaaccccacgcgtccggtttacctatgcaattctaatacttttatgatgctgtattcagaatgtaaggccagttattccttcaaactgtccacctgcaatgcgagctttaatcgagcaatgttggtctttgcatccggacaagaggcccgagttctggcaggttgttaaggtattagaacaatttgagtcttcgcttgctcatgatggaactctgactctggtggaaaatccttgttgccctgatcataagaaagggcttctccattggattcaaaagcttggtcctgtgcatcataataatggccctgtgcctaaaccgaaatttacatgagtcttcaaagtggcctggctttttgtagtataccgggttcattgtaattaatattgaatggtttgaaatacccaaaagaaaaaccaaaggtttgttttttgaggttctctagctgtagtcctccttatgatgttcatgcaagaggaaattgatttgtaggcttatacattgaagtgaagacagcttttgtttttactgttgtgtataccaccaattacaatcaagtaattgcactaggttaagtttctttcttcttttttttagaggggtggggacacaatttcttgtttatttgttatacaacgtacttgcatttttagtttctctaatatcaaagttcaantactataaaaaaaannnnnt

SEQ ID NO: 55083 - DNA, 628 bp, Glycine max
  Clone ID: PAT_MRT3847_20751C.1
tatgaggatatgactcccatccaggctgcttttgccgtagtaaataagaatgcaaggccagttattccttcagactgtccacctgcaatgcgagctttaatcaagcaatgttggtctttgcatccggacaagaggcccgagttctggcaggttgttaaggtattagaacaatttgaatcttcgcttgctcatgatggaactctgactctggtggaaaatccttgttgccaagatcacaagaaagggcttctccattggattcaaaagcttggtcctgtgcatcataataatggtcctgtgcctaaaccaaaatttacatgagtcttcaatgtggcctggctttttgtagtataccgggttcattgtaattaatattgaatggtttgaattacccaaaagaaaaaccaaaggtttgttttttgaggttctctagctgtagtcctccttatgatgttcatgcaagaggaaattgatttgtaggcttgtacattgaggtgaaaacagcttttgtttttactgtttacaatttagtaattgcactaggttaagtttctttttttagaggggtggggacacaatttcttgtttatttgttattatacaaggtacttctatttttagtttctct

SEQ ID NO: 55084 - DNA, 286 bp, Glycine max
  Clone ID: PAT_MRT3847_20752C.1
gaatgtatctgtacctgaaccttgccctgaagaagggacacttcctgatgctggtcctccttcacctgctgatcatctgcgtaagcttttctaccttgtgggtatgaatgaccaggagcttgttgcgttttctggtgcacacacattgtggccgtctataccacattcgcaggtgtggggagagcctgatactaaatatacgaacgatggaccaatatcaccctgacgacaatcctggacagtgctctggttgaaatttgacaactcttacttcatggacatcaaa

SEQ ID NO: 55085 - DNA, 376 bp, Glycine max
  Clone ID: PAT_MRT3847_20753C.1
gggggggggtcaataaatgaaactcttggggcagggacttaaaggctttgggtataacattggacatagagaagaaaaataaggttttgagtaaattatatcgatacttactgatattttttttcatattatacacaaaatccttcattttccttttcctacatgaaatttcttaatttttttaaaaacattagacttatatatatattattaactcccttattggttaaaaatattatattatataccccttaaaaaaaagttgttgtaattgtgaacgttaatgaacaaacatattatgtgccatttgaaaaaaaaaaacaaaaatattattgtgacttactttaagaattttaattttcgcattattttttaa

SEQ ID NO: 55086 - DNA, 160 bp, Glycine max
  Clone ID: PAT_MRT3847_20754C.1
gcggacacgcgacagaggggggggcaagtgaaaaaatacccccggttaccccccccaagagggcaagacaggccaaaacgcgagggcggcaaggagaagggcccagaaaggacaacggaggaccaggagacgacagccgaaaccaccacgggagacaaac

SEQ ID NO: 55087 - DNA, 1489 bp, Glycine max
  Clone ID: PAT_MRT3847_20755C.1
tcatgccatgtacccgagactggtctctttcctctctccgaagcttgagctcattgttgctaccccacaaagctcctcggaatttatctcgaccatgctcttccctagctctaattttagagcttggacttcttcatcctcttccggagcttcgaagttctcctcattgataactttcaacttggagagccaatctaacccttgcgtatgaactcgtagccattcatgataaccaccgatgatgccattacggatgcccctaagttctttatctttcctcaacggacttctccacgccttgtggactctttgtacaaccttgagactttgcgcaccgaaatctctcacaaggaaaggcgagaggctctcttctgttggcactcccctcatggggtaccctagcgctcgtcccatcaacggaatgttagggtagtccccacatgagaaaagaactccctcatttccttccttccatcgaggaaaccaatcgattgtgctgcctcccatcccagccaagtgttggtcccaatcaactcttctcttttcgacgcacgagtgatagctttgaagcggacacgggtgtcttatgtcttgttggaataagtgcaaaatcaaccacacacaaagagcgggtaagcagcagacgatccgtgcactattcttctcgcaccttcggtcaaatgtatcaaataagtccaccaagatagccaccactgggctctccttgctatggtgatatgcaaggaaagcatcaattgcggctaggtccaccaaaccatccacgttcggaaagaggacaaccccaaagatcagcaaagctagtatatccacaaacgagacccacttttcttgacttgccatatcccttgccttgcattccaagtatttccgcggtaggcccactacgccgtttcgagtttgcttcatacgatccaactctcttgccgaatctccgaccacagctacaatcttactcaaggagggaagaaacccagagaaaagatacggttttcttcccccaagagggcatcctaatatctcctcaaattcttcaacggtcggtaccatttggaagtccccaaacgtgaagcatctcaacggctggtcatagtattgggcgagggatacaacaacttccgtaaatacctccgctgcgatcaaatctaaaatctttccgtacactttgcggaaggcttgcctttggaggggtcccatcaaccgtcccaactccttaaggttggtgacatctagtcctttaatcttgacttgataaaatctttttccgttttcatttgtccccatcatttacctaaaaaaggggtggatcaagactccgacatgaatgatgcaatgcgtatgcatgaaacggaaagaaaacaacacaaaggggtaattcacacatacgagactgcagggatccaattttaatgctacgttttgggcatgatggcgcctcaatgtagtattaaaaaaggtcacgtattacctt

SEQ ID NO: 55088 - DNA, 377 bp, Glycine max
  Clone ID: PAT_MRT3847_20756C.1
gtggagattatcatgctgctgtgagagatgcaattaccaaaaagctctttgatgttcttttgtatagtagcaggaaagaagagagatgtgctggaactgtttggctagtatcacttataaagtactgcggcaatcatcctactattcagcaaatgcttccagaaattcaggaagctttttctcaccttcttggtgagcaaaatgaactcacacaagagttggcttctcagggcatgagtattgtgtatgacattggtgatgaatctatgaaaaagaatttggtgaatgcacttgtaaataccttgactgggtcacggaaacggaaaagagccatcaaacttgttgaagacactgaagtatttacggatggagctctt

SEQ ID NO: 55089 - DNA, 515 bp, Glycine max
  Clone ID: PAT_MRT3847_20757C.1
agaacaactgtccgtatgttggaaagtttgatacgcctagctcaagcccatgcaaggttgatgttcagaaatgaggtgactcgactagatgccatcacggctattttatgcatagaatcctccatgactacctcagctattgtggattgcattgggaatgctctgcattccaattttactgacaaccctgatcaggaatatgcgaggcaagaaagattgatcctagaaaaattgggatcaatagacgacatttgatgaatagcatggaggagtgaacgcagagaaaggaaaacaagatggaagagtcatgttgtatcatgaagtggtttgttttgcttggctttgctattttttattacaatgaaattgattgctttagcaatgaagggggcaatattttttgtttctaaatgatacaaatgtctttcctttgtttcttgtgtacttttagctgcctctggttgagcacttctgagatatttgaccgtcgatttgcacgactatcattccgttcc

SEQ ID NO: 55090 - DNA, 2379 bp, Glycine max
  Clone ID: PAT_MRT3847_20758C.1
tctgcgccatattacggctgcgagaaggcgacagaaggggagtgtgagtgtgagtgtgagtgtgttgttctctctgcgaaatgcgaatgtgattcgaagaagctcgatgagaatgcgagagttagggtttcaggaacgaaggtcgtggaggcggagaggcggcgacaccagccccgactccgtcatcttcactctcgaatccaacttgagcctcttctcctccgcctccgccagcgtcgaccgctgctccttcgcctccgacgcgcacgaccacgactccttagcctccgaaatctcactccatttggcagcacaggatcatgacggtgatttcgctcatagcgaaagctggagcggtccagatccggatctggatccgaataaacgacaacaacaacgacatgcagatacagattcagatgcagcacacacgaagcatcgccgaaatcgtttctccgggaaaggagagaaagcgaaagttcaaaaggaagaagacagtgacggtggtgacactgaggacggaaatcaacacttggaatttgattcggccagaaactctttctctctggctctcaaagaatgccaggatcggaggtcaagatctgaggcgttattcaagaagcacgatcggcgaaggcctgcttcgttagatctgaacaatgccattggcaatggcaatgtttcttcgcctcatttgggattaagtgctatgaagaagagcacgctttgttctagaaggtctggctctggcacttttccgagtcctggaacgcctaattatcttcacgccactgttgctatgcaaaagggttggagttcggagcgagttcctttgcacaccagtgctgcacgcaagcaggttggtgcggctctgttgcctttcaacaacggccgaactttgccgtccaaatgggaagatgctgagaggtggattcttagtcctgtttccggtgacggcggcaccgggagggcctcgctcccggcgccgcagaggaggcccaagtcgaagagtgggcctcttggcccccctggagttgctgctgttgcgtattattccatgtattcccctgcggtgcctttgtttgaaggtgcgaattcaaggagctttatggcggcatctccgttttctgctgctgttagtgtcccagctgctgctgctgatgggttaactgccagttccggtggcagttgtggggtgctctcaaccagaactgatccttgcatggctcgctcggttagtgtccatggttgctctcagatgcatagtcagtcatcactgcctgcccaaggggagaagtttgatggtttcaaagatgcgggcaccaatgtatctcctgctctttcaaggagggatatggccacccagatgagcccagagggtagctcatgctcctctcccagtttgaggccttctttctctgcctccactccaccttcccttcctctctcagagttcacgagtttgcctttctctaaaatggatatcagggatgtgccagtagatgaacatgtaaccatgacaaggtggtccaagaaacacagggccctattctctggcagaggctcagaaaatgttgacagctggaaaattaaggaatcaagtagtcgatcttcatcttgggacatttctgaagggtcaaagactgtttcaaaggccaaaagggtggaagccaaaatcaatgcatgggagaacttgcaaaaggcaaaagctgaggctgcaatacagaaactggagatgaagttggaaaagaagcgagcatcatctatggataagattatgaacaagctgagattggctcagaaaaaagctcaggaaatgagaagttcagctttagccaaccagcctcatcatgttcccagaactcctcacaaggctatattatttagtagagccagtcagatgggttccttaagtggttgtttcacctgtcatgccttttaagcttgaagtttgggtttcataattcagaaagatttaaatgtgccccatgttaatgaattttcggtggataaaagagagagcagcttactatgttgacactaaattggtgtcatcttggttgtgcaatgcatgaaatagcagcgccttctgaaggcatccgataaaatcttaagtcccttgtgccctcacccttgggagtttggattcaatgataaataatatgtgtatgtacgtaggccaaactttagaaataagcttcatttttattttatttttttcctttcctaaacagtttgctgttcagaagtaatatgctatctatcttcagtagaacgataaattaaccacaaatctgcaatttagtttttccttcgcaaaatcaccctcagttcagttcgttgtctgaaaaaaaaaaaaaaaaaaaaaaaaaaaaaaga

SEQ ID NO: 55091 - DNA, 303 bp, Glycine max
  Clone ID: PAT_MRT3847_20759C.1
aaaaattcaaccatccaagtctatctatcttagtgccaattttcttgtttgcccatcacagcaaaagaaaaatagactaaaatgaaaaaaatacgcatgggataataaaaaatactttctctctccggtctctctatctttttaatgaaaggaaatggaacgaggaacttttttgttggtgttgtacatgatggcgagaaaactgagaagggtgggtaattcggccgtgagattcaatgtgcgacacattgtaagttcttccttgtagaaagaatccctccttacgttttgtcacttggggcc

SEQ ID NO: 55092 - DNA, 344 bp, Glycine max
  Clone ID: PAT_MRT3847_2075C.1
cggtcttgaattcccggctcgacgcacgcgtccgtcttcttgaaaggatttttgtactggatcctgaaaagaggatgaccgttgctcaggcatgaagtcatccattcatcacgggcaagtgaattatgatgctgccttatgatctattctgaaatagcccatctaatccttcggcatttttctttcttttccctgctgtactgaaccatgagcattgtttccaaattcgcaacgtggataaagcgtggggcagtcgatttaaagaccttcctacatggcagttcttatcagtgggatgtgttctgttctcttggtttcgttcagggctatgatgataacaccca

SEQ ID NO: 55093 - DNA, 134 bp, Glycine max
  Clone ID: PAT_MRT3847_20760C.1
gcctttgagggcctgtggaagaagtgtctgcttaagccatctcttgtcactcctgatcgaaaaaccaaaatcaaagttaggtcaacttaggtgaaccacatgtaatacaaaaaacttttgaccaagtatctaag

SEQ ID NO: 55094 - DNA, 290 bp, Glycine max
  Clone ID: PAT_MRT3847_20761C.1
gcgggccccggcccgagaatcccgggggacgcatcccacgcgcgcgtgtactgccagatcttatgacaccgcgcttgagtgcgtatgaacaggcacttgtatccccttccgcatggtcgtttgcataacccactaaaggaaactaggcatgacccactagtacagtctgctctgctgatttgaaaatttccacacctgttttaattgtctgaatgatctgcgaagtgtgtgttattctaaacaaaaaacaaaaaaaatgcacctaaagcgtagaaattcaactcaaaatc

SEQ ID NO: 55095 - DNA, 240 bp, Glycine max
  Clone ID: PAT_MRT3847_20762C.1
ctcgagccgaatcagatcgatgccagatcgagaacctagattttctcaaaccctatgaagaatatatatgagacggtatcaccatactaaagacggtggatggatgaaataaggactctatatacctccatggtgtatagtaggtaatacgccaactagtatgacgatcattgataacctcttgtagaactataagcctttaaggactgaatactaagttcattgcttaccatacaacat

SEQ ID NO: 55096 - DNA, 280 bp, Glycine max
  unsure (1)..(280): unsure at all n locations
  Clone ID: PAT_MRT3847_20763C.1
aagatgagaattcgaggatacctgggctgccggagaagcgtacaacagtgctctgttccgcgactatgaaaatggacgtggagaggcttggacagataagtttgaaagacgcagtacacattcgagccgctccgtcagaaaagggacaggaaacggtcgangccaaagacgatcaatctttctttgcaccggcgcaactgaagcaatccctacgcatggtggcaccgaagctccgattggtatctttgataccctattgaagcgggntttgcannaaagg

SEQ ID NO: 55097 - DNA, 628 bp, Glycine max
  unsure (1)..(628): unsure at all n locations
  Clone ID: PAT_MRT3847_20764C.1
ccacgcgtccgcaccagattgctgcacttgctgttgctctacagcaaactatgtcgcctggcttcaaggcctatgcaaagcaagtgaaggccaatgctgttgcaattggaaactatctcatgagcaagggctacaagatggtgactgatggaactgagaaccaccttgttctctgggatctccgcccccttggcttgactggaaacaaggtcgaaaagctatgtgatctttgccacatcacattgaacaagaatgctgtcttcggtgacagcagtgcattgtctccgggtggtgtccgcattggcgcgccagcaatgacctcgaggggtctactggagaaggatttcgagcagattggggagttcctccaccaggcagtgaccatctgcctgaacatccagaaggagtacggcaagctcctcaaggacttcaacaagggcctggtgaacaacaaggacatcgagaacctcaaggtccaggtggagaagtttgccgactccttcgacatgcctgggttcacgcttgagagcatgaaatacaaggagtagacatgcctcccatgcgncgncagggtctcctgtaccgatgtctttccttgtggtggcgcagggtgccatggcactgcact

SEQ ID NO: 55098 - DNA, 852 bp, Glycine max
  Clone ID: PAT_MRT3847_20765C.1
tacggctgcgagaagacgacagcaggtgaagaaaaaaaaaaaaaacacaacgtcacctgtgcgttcctggaatggtacatcagcagagggttctcttctgttctggttaggttatgctctatgcaaaacagtgccatggaagcctccaaactcagtagcagtgatcaaaacgttcgatgccatcactgcgcaggacccctttccaaagacatggaaaccagtcactggaccgtttcgcctctcattagggatagcttctccatgattggttctgccgttggcggcgttgcaagtgcattttatggattcaatcttgttatgccgattgtccaaagaaggatcaaaggacccatgtggttgcattttctcataggtgcaccacctgtgatagtattctcttcagcctgtgccggactggcgggtggggctgttcctgctgcagcacaacttgtttcctcatcttatcatgcagcttactcttctcctacctcacctccgccatcaaaggatgaaaatattcaaaggtcgagaaaatgatataatggacttctgagtctgaccattcattcatgatgggtgtgctgagagttttgtttttcttgtgtaaatactactctgagattggtatgtttggaacttggatgagaggaaagataatagtaaggagaaaaaacacatatgatgcattttattttgtttgattaaagtgaaagtgaaagatagatagagaaaaaaagtttattgtacttttgttttgcatacactgcgttcttgtttattggatgcaataaaataacaaatcgttggcagtttggttaaaaaaaaaaaaaaaaaaaaaaaaaaaaaaaaaaa

SEQ ID NO: 55099 - DNA, 325 bp, Glycine max
  Clone ID: PAT_MRT3847_20766C.1
aaaccaaacccaaaattttaaaaaaaaaaaaattttaatggagggattaaaaattcaaaaaacaaattcccaacccccaatccgggagtgggggcccctttttttttactaggccccttggaaggggctgggggcccttcccttaaaaagaaaattcattcggggagcggggtggacccccatgtttttcgctaaggggggcggcttccattggattacccatatcgagggacacaaatggcaaacaaatgggttaagaaacaaccctcctaaaagtggcggggccccctttccttcccaaaaaaaagggtattaacccccccct

SEQ ID NO: 55100 - DNA, 424 bp, Glycine max
  Clone ID: PAT_MRT3847_20767C.1
aaaggggtccaaccctcgaagcatttaaagaaatttaagataattaatatccaggggggggggtccctaaaaaatgaccctttttgtctaaaagaaaaaaaccctttttattttttgggggggggggttaacaaattaaaatcaacagatcttttgggtttaaaaacaatacaatttttggccccctaacttatacaggaacggggggttcccctttttgaacagggcccttataaccatcacttccctgggttcctttggaagcattctgaaaaaacttgggctctgaggggaaattttttttcgctttccggcttccttaaattttccactgaccccatacccaagtttttggggggggagatgcctctccaattggggcaaccaaccctgggtttccatcatcaataacaccatcaactaa

SEQ ID NO: 55101 - DNA, 250 bp, Glycine max
  unsure (1)..(250): unsure at all n locations
  Clone ID: PAT_MRT3847_20768C.1
cataagaacccggccaaggcgagggcgaagaagccaggagacacaaagaaagacacgccgaccccacggacagcgngggggacggagccggcgacgagaacgggcgggcggagcgagccggcagcgacagaaggaaaaaggacagcccacgccacaaagacgcacgcaggcacgccgcgggaccacaaagacgacacagccacacgcgngacccagagagcgcaggcaacgcaagacgcgacaagccgaa

SEQ ID NO: 55102 - DNA, 248 bp, Glycine max
  unsure (1)..(248): unsure at all n locations
  Clone ID: PAT_MRT3847_20769C.1
tcctcncttcatccaccacgcgttcgccacgcgtccggtacggcttaagacgtcaaagagcccctctctcggcggctgaaggcgctggcagaggtatagagggattgtgccgcggaaggtcaagtctaacaccccgcacatggtgatgcatcgcctgcggaaaatgtgggattctgtcaagtgctaacactcgataacccgagcttgaaaatcaacgaatggcacaatggctctaatgtttgcagtca

SEQ ID NO: 55103 - DNA, 136 bp, Glycine max
  Clone ID: PAT_MRT3847_2076C.1
gaccggagcgataagacggcagtcaggttcagtttcgcgtactctcatgtaaggtaatgtttcgatagatcgactctcaggtaaggctatcacatgatgatcacacaggttgtggcgcaaggatgactacatagcg

SEQ ID NO: 55104 - DNA, 119 bp, Glycine max
  unsure (1)..(119): unsure at all n locations
  Clone ID: PAT_MRT3847_20770C.1
ggaaanatnangttggcttgaaanggccaatggccacccctattgggaanaggacatcgggcggnaaatccntnctgctgagagaagatgctcaatttgtatgccaatgttcgncctng

SEQ ID NO: 55105 - DNA, 262 bp, Glycine max
  Clone ID: PAT_MRT3847_20771C.1
tgttggtttttatttagcgctggaataataatgatagtaataataataatttattacaaccaaagcattatttattcggtgttacaagcaaccaaagtatcggaataattcccgaaagcacgtgcttgatgttgcaaggccaactcatgcaggtgatgattataagcttgactttctgaactgaacctcatggatgatgctgagcatgagtcacataagggcctgggtcttcacagcgagggagccccatttccctcccgac

SEQ ID NO: 55106 - DNA, 373 bp, Glycine max
  Clone ID: PAT_MRT3847_20772C.1
acgcacgcgtggacgcatgcgtggatcgaccaattaattaccgaccggtgcatgcatgccaactatctttatatatagtgagatttgacatagcctgacacaatgacatagatacttgcttcgtgaattaaatagacattcactaacaattacacaatacataccagccgcatacataaagaataaagccttgcgtaactaatgagctaactaacatacattaatttggtctcactgactgctttctattcagtaaacaaacctgtccagctagattaattaatgaatcaaccaacgcgcagagagaggctgcttgtttatcgcgcgccagggttttttttttattaaccagactgacaacaaataattgatt

SEQ ID NO: 55107 - DNA, 157 bp, Glycine max
  Clone ID: PAT_MRT3847_20773C.1
ccttgcctgggcaatagtaatgacaggctttactttacaggatgggacttattactacatcaaaggccttgatctcctgctgtgctacatagatattggggcatgcttctttgtgcaaagaacaccctttaatagtcaacctgatgttactatcatc

SEQ ID NO: 55108 - DNA, 173 bp, Glycine max
  unsure (1)..(173): unsure at all n locations
  Clone ID: PAT_MRT3847_20774C.1
gnaagangagcacgcnnacgtnancncncaantnngctcgaggctnctcgaacccntgagancnagnaaccacgtntctcnctngagtttnattattntgagtatggattatnnagcntnggncggcancnntnnncgtanccnnctagcnatcgnaacngtccagtgnngcc

SEQ ID NO: 55109 - DNA, 1331 bp, Glycine max
  unsure (1)..(1331): unsure at all n locations
  Clone ID: PAT_MRT3847_20775C.1
ccccccgggcagcgcgaccctcaatcactctcattcctccatcgatctcattgctctgcattgcaacactcacacaccaatggcactcagacccatcgacaacgctcttccgacaacatccccagacaagcaaacgacagaagcgggattcatctctctcattgagctgcattgcaacactcactcaccaatggcactcagacccatcgacaacgctcttccaacaaccccagagagacctaaaaaacaacccaaagtcgctcttgcaacccaaaagcaacaagaccgtgctggcgtcaatggcgaaaacatagttccattgccctcatctggggatgccactgttgactatgtctcctccgacaaccttaagcccttgtcggaccctgaagttaagattcagagcttggttgaagatttggattcgaaaaattggacgaaggtttgtgagtcgctgaatgatgttagacgcttcgcgatgtaccactcctctcttctgttccccattttgggaaaaattgtgttggtggtggcgaagacaatgaggaaccctcgtagtgctctctgcaaaactgctattatggctgctgctgatattttcaacgcctttggtgacaagttgcatgacccagaaatctccgatgcatttgatggcttgctgctacagctgctgctgaaggcatcccaagacaaaaggtttgtgtgtgaagaagctgacagggcacttggcttaatggttggttccatgacccctcttccactgcttcagaaaatgagggtatatgggagtcacaaaaaccttagggtcagggctaaggctgctgtttctctctccagatgtgtctccaagatggggcttcaagaaatggagcagtttgggttggttgaactgattgaagtggcagctgatttactgaatgatagacttccagaggcaagagatgcagcgcgaagtgttgcaacttcaatgtatgaagcactgacaaaggactcggaagagaagatggagctgtggcagagcttctgccaatccaagttgccaccaattcatgctctttcaattttgaaaatagttaagccctaaaagggaggggtgtttctgttgcgtgtagtccctagtcatatattcctgaaggcagagagtttacaaaatttagctatattgaagtagtagagctcatgtttcttcatgagcaagcaatatgaaataacatttcatgtgttcagagtttgctctagtactgcataatctctttttaataacagtgacttcccaaaaaaaaaaaaaaaaaaaaaaaaaancggcggcccccccacaggaacccagccta

SEQ ID NO: 55110 - DNA, 171 bp, Glycine max
  Clone ID: PAT_MRT3847_20776C.1
gcgtgtgactgctcgatatggctctcgtactcgacgtctcattgtgttccacttgtaaaccccatcgttctctctcaacctccaatcgcaacaaagcgtcttctacatatcctcttccgctacctcttctgggagtcatcatacagaaaagtctcgagggatctcagatac

SEQ ID NO: 55111 - DNA, 604 bp, Glycine max
  Clone ID: PAT_MRT3847_20777C.1
attctttctttttttctttcttttatatgagggaaataaagggctcgctgaaaataaattttattgaaccagagggctgaaatagctcaaaggcctcgggacagcagagggtcgatatcgattggttaaaaaattgacaactgtgactcaatgataaccaataggagctggagcctcttttaatcccttcccttgctgatgaatattaaacgcacaggggttaacatccctgtgatgagcctcatcagggcgaatcacagtgacaccatcctggacagttgcatccttgggaagcctccctgaatccattaccatggcaggggcaagggcattttcaactttaccactctcaatggcattcaaatgctgagtgtatgaaatgacagattgttcctgcaagtgaccaacaaatctatgtgccgcctttggcgacaggaggccatacacgaacaaggcgttgaaaaaaacaccctgcgcggggaaaatcaacagcctctcgggccagctgggcttgacaagctccaccatggccatcaggtgcatcctgtcattcttcgattcctcggcagtgccttgatccatccaccactgtgctggaactttc

SEQ ID NO: 55112 - DNA, 362 bp, Glycine max
  Clone ID: PAT_MRT3847_20778C.1
cgcgtgctacagagaactcttgcacgcgcttgtagccgacctcgccgaagccggcaaagccaggggccgcgatgccgacgaccaaggcgcctttaactgtctatcacgcttcctatctaactccaacctcgtcgataccaaactgggcctcgacggtccaaagatcgtgcagaaatgggttctctttcagatcggcccgaacgtgcgattgggcctacctaaattcttagaaggatccaccatccgaaccttgcgtctcccgtgctctctgatggctatagattaccagagactgtacgatttcttctacgagtctttcggtctagtcttagacgacacggatcgaatgcggatcacgcgcg

SEQ ID NO: 55113 - DNA, 500 bp, Glycine max
  Clone ID: PAT_MRT3847_20779C.1
ccgacgtctccactttcaacatcttaattagggctttgtgcaaggcccatcagctccggcccgcgattcttatgcttgaggacatgcccaactacgggctcaggcccgacgaaaaaacgttcaccacacttatgcaggggtttatagaagaggctgacgtggaaggcgcgctgaggattaaggaactcatggtggagtctgggtgcgagctcacgagtgtttcggttaatgttttggtgaatgggctttgcaaagaggggagaattgaggaggctttgaggtttatttatgaggaggaagggttttgccctgaccaggttacgttcaatgctttggtgaatgggttatgtaggactgggcatatcaaacagggtttggagatgatggattttatgctcgagaaagggtttgaattggatgtttatacgtataactcgttgatctccgggctgtgtaagttgggcgagatcgacgaggccgtggagattctccaccacatg

SEQ ID NO: 55114 - DNA, 353 bp, Glycine max
  Clone ID: PAT_MRT3847_2077C.1
gccatcaatcaatggatctgctttatatcgtgtgttatcagtcaaaatatatatcatagatcttcatttcaataccttttaaactgatattttaatttgcacgcgcaggtcctatttaattttcagaaaataaatccttccaaatttggaaaatatagatcacgaacaaataaaacctagggtagcagaaagcacaatcaaacacactcgaaaatttttgtaatcatacacttatgcagtggaaggatctgtgttcaacttttaaggtacctcgtggaattccaagcgttaatccacattcaaacctgggtgagaaaaaaaaaacaatagggggaaaaaaaaataggccaaaa

SEQ ID NO: 55115 - DNA, 386 bp, Glycine max
  Clone ID: PAT_MRT3847_20780C.1
aaaccaaaccaaatccggacccattttttaggtttaaaaaaaaaaggtcccattttggaaactattttggtataagttggggggccccacgggaaaaggggttttttttaaaaaggcatttcctaccccctttaacggttttaaccttgggaaaaccggggccttggggcaaactcccaaaaagaaaagggggggggttcccccctcaaggggggtccaaagtttttcttggttttgggaagcttttccttgaaaaacgggccctgggtaggggcccggccataggtggcaaggcaatccgggaaggcctttgtaaaaacatgggaggcctcgcccccaaaagtttttggggggggggcgggggcaaaaaaaaaaccctccgggaa

SEQ ID NO: 55116 - DNA, 222 bp, Glycine max
  Clone ID: PAT_MRT3847_20781C.1
gaatcgtgttacaaatataaaagtctatttgcgctgatcgggtggtttttgaatggtaatcactcacctctttcatacacgtgtgtaggctggttgagaagccatggccgaggatgtggagtgcctacgcgctggcaacatggatatgcctgaggaggaagaggatgagagtccaatcctgaaggttgtcgtggaaaaagagattcgcaaaatggcgttgag

SEQ ID NO: 55117 - DNA, 197 bp, Glycine max
  Clone ID: PAT_MRT3847_20782C.1
tcccgtggtcgcccttttatttttttcttttcattttttattttttgctcaccaaaaattaataatatattaagtgagtaccagagggtctaaaaatacaaacggtgcattataagaccacagaccaatggttccattgatagactaatggatttttgttgggaaccatagcctagatttcatgctgaccacgtatt

SEQ ID NO: 55118 - DNA, 559 bp, Glycine max
  Clone ID: PAT_MRT3847_20783C.1
ccgcacgaggggaattgaaactgtgcctgtgggacctgttgagactggggccttgaaacctgcaatgctggcgacttttgcaccaactggactgacgaccgaagatactcccgcggaaatgcaccatgaagctctcgcagaagctcttcccggtgataatgctggattcgatgttaagaatgttgctgttaacgatctctagcgtggttatgctgcctcgaactctgaggatgatcctgcccaggaggctgctaactaccctgcccagcttatcatcatgaaccatcctgctcagattgaaaatggctatgcccctgttcttgactgccacacttaccacattgctgtcaaggacgctgaactcgtgaccaagattgacaggcgatctggcaaatagcttgataatgaacccgagtttttgaagaatggtgatgctggatccgttaagatgattccgaccacacccatggcggctgaaactttctctgattaccccccacttggtcgctctgctgccagggatatgcttcaaactgttgctgagagagtcctcaataac

SEQ ID NO: 55119 - DNA, 1828 bp, Glycine max
  Clone ID: PAT_MRT3847_20784C.1
ggctgaagcagcactcaatagctgatggtgtctacaccacccctaggctcttcgctccaaactccgaaccctaacctaacccaaccatcttcttcgcctcgagcacatcttaccctaattcgattattccccaatttcatcgaaccaatcaataaatcatatacacattttttgtttaatttttgatgccgataaaaaatgccgccgaagcagcagcaatcgaaagctgatttagcgaagaagcagaagattgtagaggacaaaaccttcggtctcaagaacaagaacaagagcaaaaatgttcagaagtatgtccagaacctcaagcaatccgtgcagcccaggcccgatgccgccaaagtcgatgccaagaaaaagaaggaggaagataaggccaaggagaaggagctgaatgagttgttcaaaatcgctgttactcagcccaaagtgccagttggtgttgatcccaagtccatattatgtgagttttttaaagtggggcagtgtgccaagggcttcaaatgcaagttctcgcatgatttgaatgttcagaggaaaggggagaagattgacatttacagtgataagcgtgacgaggaaacaatggaggattgggatcaagagaccttggagtgagtggtggagtcgaagaaaaccgagtataatcagaataaaccaactgacattgtctgtaaatactttttggatgcagtagaaaagaagcaatatggttggttttgggcctgcccaagtagtggtaaagaagcaatatgtttggttgctggtctgccccaatggtggtaagaattgccattatagacatgctcttccacctggttatgttttgaaatctcaaatgaaggctttgttagaggaagaaagtgaaaaaatatcaattgaagaggagattgaaaatcagcgtgccaaagtggcaactacaactcctatgactcctgagttattctttgagtggaagaagaagaagatagaagagagagatgccaatatagctgcagctaaggttgagagatctaagaatgatcgcatgagtggtcggggcatatgacggtcaccagagagaaccagaatcttatgaaactgaacagaatgggaataggaatgctgctgaagatggcccctgctcctcagcaacagctgcttctgatggtgaagatcttgatgacatagatgacgatgatgagttagacatggatgagttagatgaattggaagcaagcttatccaagacatcaatccaaataaaggaaacaggagctgaagcttaatccggagaatttttcgcaatcttcatgtgatatttttatgcctctgctgaacaatagagcattttcctgtggccactcgctctccttgcttccaggcagggtttttgaatgaaggctgtggtgataatgatattactatttgctgcatcgcatttggtatgaataatggcagtttggtataatccactttccttttttgttagatctcttattggaccttagacagacatttttgttgtttgaaataagtagtcttgtgtagactgtacctgatttgaacatgagtttcctctatatgtcgaaaagggtctttagttgttgtcgcgcttgtgattttcttgaaaccatcaaagcataaagtggtatttgttatgttatgttgtcgcgagttgtgattttcttgaaaccatcaaagcataaagtggtaattgttatttaattatcttaccctgttcatagcttggggctttagaggaaatcaagaaaaattaggaaaaaaaaaaaaaaaaaaaaaaaaaaaaaaaaaaaaaaaaaaaaaaaaa

SEQ ID NO: 55120 - DNA, 1858 bp, Glycine max
  Clone ID: PAT_MRT3847_20785C.1
caccaccccatctacgctctaaactccgatccctaacttaacctaaccagacatcttcctcgcctctgccaggcacatcgtcctacgccacacaaacaccacacagatcgttccttcacatcttaccctaatttgattattccccaatttcatcgaaccaataaattatatataaatatatttttatttttattttttgatgccgataaaaaatgccgccaaagcagcaatcaaaagctgatttagcgaagaagcagaagattgtagaggacaaaaccttcggtctcaagaacaagaacaagagtaaaaacgtccagaagtatgttcagaatctcaagcaatccgtgcagccaaggcccgataccgccaaagtcgatgccaagaaaaagaaggaggaggagagggccaaggagaaggagctaaatgatttgttcaaaatcgctgttactcaacccaaagtgcctgttggtgttgatcccaagtccatattatgtgagttttataaagtggggcagtgtgggcagggcttcaaatgcaagttctcgcatgatttgaatgttcagaggaaaggggagaagattgacatttacagtgataagcgtgaccaggaaacaatggaggattgggatcaagagaccttggagaaggtggtggagtcaaagaaaactgagtataatcagaataaaccaactgacatagtctgtaaatactttttggatgcagtagaaaagaagcaatatggttggttttgggtctgccccaatggtggtaagaattgccattatagacatgctcttccacctggttatgttttgaaatctcaaatgaaggctttgttagaggaagaaagtgaaaaaatatcaattgaagaggagattgaaaatcagcgtgccaaagtggcaactacaactcctatgactcctgagttattctttgagtggaagaagaagaagatagaagagagagatgccaatatagctgcacaacaggctgagagggctaagaatgatcgcatgagtggtcgggagctatttttgtcaaatgctagcttgtttgtggatgatgcagaagcatatgacgtgtaccagagagaaccagaatcttatgaaactgaaaagaatgggagtaggaatgctgcagaagatggtcccagctcctcagcaacagccgctgctgatggtgattatcttgatgacatagatgacgatgacgagttggacatggatgagttagaagaattggaagcaagcttatccaagacatccatcctaataaaggaaacaggagctgaagcttaatcctgagagtttgtcgcaatcttcatgtgatatttttatgcctctgctgaacaatagagcatttgcctgtagccactcgctctccttgctttcatggaaggtttttgaatgaaggctgtggagataatgaaattactatttgctgcatcgcatttggtatgaatagtggctgtttggtataatccactttccttttttgttagatctcttattggaccttagacagacatttttgttgtttgaaataagtagtcttgtgcagactgtacctgatttgtacatgagtttccttatgtcgaaaaggtgtctttagttgttgaaaaaaaagtgattatattgaaaccatcaaagcataaagtggtatttgttatgttatgaatgctatagctagataccttggggctttagaggatgcttgggattttgaggtggagttagttttcgtacccatttcttggattttaaaaaaagactccgagaacagtttttttcccatgcttagtattgttttaggaagaaattataaaagaacaaataggcctgagtattttttagaatgc

SEQ ID NO: 55121 - DNA, 385 bp, Glycine max
  Clone ID: PAT_MRT3847_20786C.1
cgatccagttcactacttccatgatgctagtttcaaccatgtgaagttgttgtgcgtgctgtgtttgttgttgtgtactgtattggaccttcataaccaaccatgaatctcagcatcggcaacggatccacttcgagttctcctccgaaagccggagattctgtcgccgaccagtttccggcgggtccccgggtgctagtggtgaatcatgaacccacctatcttatgatcattgatacgatgcgccgtgcatgtctctactaagtgacgatgtgtcatcgaactcaggttgcatcgtacttctcgatgacagacgatcaccggtttgataacgtttaaagcgatgtgcatatgccacatatggatggatttaagcttttggggc

SEQ ID NO: 55122 - DNA, 276 bp, Glycine max
  Clone ID: PAT_MRT3847_20787C.1
actcctcttccaaagcctgaggtctttactctaattccctggtctccagagagatgaaccctatctccaattggaccctttaatcaatcaccctttaattagtaatcacttaatctcaattagatcctttactcctcccacacaatatcatcatgggcgtcaaaggttttgtttaaggagggatcgtcttccatcattgcaggatgctccacacacccacttgaccttcatcaaggtcctgatgcacatttagggcgaaaacaatttgctcaaacc

SEQ ID NO: 55123 - DNA, 514 bp, Glycine max
  unsure (1)..(514): unsure at all n locations
  Clone ID: PAT_MRT3847_20788C.1
tacggctgcgagaagacgacagaagggggttgatacgttgtcttaaaccaacccacatgtgttgctggtgcttggattttgcatcagttaccttaccttaaccttaaccttagcatacttccttgttttgtgtcctctctcttcccttttcactcctttcttgcatgctttaaacaaacactcatatcccactctttgctttccaactaaccattattattcctactctcataacttgttgccaccatcatcattctcagactttgcctccccgatgggtcctgtgagaggattcaagaagaaaagaaagccagagaagaagcatgacaagaatggttctggttctgggtcacccgagggagagggtcctgtagattggtgggatgacttgtcaaagagaatgaatggtcttcagcagtctccatcgaagtgcttggataactntgaatctgttttcaagatctccagaaagacatttgagtacatatgttcacttggtaaggatgatatgatg

SEQ ID NO: 55124 - DNA, 342 bp, Glycine max
  Clone ID: PAT_MRT3847_20789C.1
atatttggacgctttttttttcttttttttttttttccgtttcctgttggcgtacgatcttttccatattgagtgttattagagcttgttggtcggacgcgaggcccaaccccctgagtccagacgggaaccgggcgggagaccacacttgccccatagcggggagcattaaagcaagacccagaggatggccaaaggatggcctaagagaaaaaaagaatgctgcgcacaatgcccgcaaaaaaacagacaaaactaaaaagagtaaagcctggagggcctaacgagcgacccaaagaaaatgaattgcggtgcgcccacagggcgcaatcaggggggaaa

SEQ ID NO: 55125 - DNA, 267 bp, Glycine max
  unsure (1)..(267): unsure at all n locations
  Clone ID: PAT_MRT3847_2078C.1
ccaaagcgcaccgtcaccgtaaacaaacggtggtccaggagggtggttgtatccagtggaggcttcaacctacgaacttgtccttataatgacacgctcacctacgcttcttctctctctcacaccccacacctccttatacacccttctcctctatctaacaacacccaacaaaaataaaagataaaaaacattagggttttcaatttggggaaataaaaatagggggaaacatcccagaganagtgtgtagaaatatgggtgtcg

SEQ ID NO: 55126 - DNA, 556 bp, Glycine max
  Clone ID: PAT_MRT3847_20790C.1
ggctcgagacataatataactttatcatttctcactagctgatcttgttatctactatactttatacactatattgcatattgatcagtcattattgcatattaatagaatggaatcacgtgggtatttgttttttcttctccaaggcttagtgtttgcagcccttgcaacctcagctttctcacaattgtcacctaactactatgactactcctgccccaatgctttgagcaccatcaaaagtgttgtggaggctgcggtgcagaaagagcaccgtatgggtgcatccttgctacgcttgcacttccatgattgctttgtcaacggttgtgatggttcagttcttctagactccacatcctccattgacagcgaaaagaatgcagcggctaatttccaatctgctagaggatttgaagtggtggatgacataaaaaaggcagtagaccaagcttgtggaaaaccagttgtttcttgcgcagacatattggctgttgcagctcgtgattcagttgttgcgttaggtgggccatcatggaaggtgagtcttggtaga

SEQ ID NO: 55127 - DNA, 369 bp, Glycine max
  Clone ID: PAT_MRT3847_20791C.1
tttggtcgtttttttttttttttttttttgggcaattaatcatttcatatttcacacattcataacaaacgtaggtgggatattagagtactataattaacggggcacaattgagttcaacacaaaccgaacttattttcaagggacatttttacagacccattaaacatcaaagtacttgaaatgggttgggaacacatcctacattccacaacgagctgaaaaccccccacaaaaacagaggacatggtgaaaggttaattccttctggaagttgtattaagcgagggtccttgcatacttgagctggttgccaacaaaaatcattctatgaaagaaccgtgggatgccttacttgtgctgaatttt

SEQ ID NO: 55128 - DNA, 386 bp, Glycine max
  Clone ID: PAT_MRT3847_20792C.1
aaactagttactcattttttctctcttggcttctaccatcaatcaccatttccatcttccaaagaatcgatcataatgacgctgaatatagaaacccaatctctaacatcgtccgtccactgctccttcgcgcagctactgaagattgagtggagaaagagataagagatgggtctggcattgaacatctcagtgtgttgtttcccacagcagcgttgccccactctcttcaaacccaccattaccaaacaaaccctctccttccccaccgcttccgctttctcctccgtaactcaactcagcgtgggccaggatttacccgccaactacagcgattgggttcccagtcccgaccccgagcttcgcagaagatgcggcattctgct

SEQ ID NO: 55129 - DNA, 222 bp, Glycine max
  Clone ID: PAT_MRT3847_20793C.1
gtgccttgtaaaatggtgtgtcatcaaatcggtagtactcacccaatattggcttcattgcattgggccatagtgggagttatggaagttttgtcacttatcacttaattagtagaatgttataaataagtggatttgccgcgtaatgacttgtgtgcattgtgaaacagcttgtagcgatccatggctataatgtaaaaatatgtggaaagtgttctgctt

SEQ ID NO: 55130 - DNA, 154 bp, Glycine max
  Clone ID: PAT_MRT3847_20794C.1
ctattattcctccttttttcacatcccatacttattcctccgaccgggtatattttagccggcagtgcaaaaaatcccttcaaccatctctcttattaactactgttctctcctcatcatacattgcaccttatgatctctctatcattcgtca

SEQ ID NO: 55131 - DNA, 870 bp, Glycine max
  Clone ID: PAT_MRT3847_20795C.1
acgtcgcatggccaccgcgtacgtaagccttggactgcttctagggcggccgccctctttttccctcctttggcagacaggcacacacataattacatcttttccattaattttacgtacataacccaaatttacatctactccaaattacaccaccaaaatgtacactttacatcatgtacaaacccaagtttacatctactccaaacacaccacttaaaagcactatttactcttttggacttgataatctaaaagaactacttgctccatttacaacctaggtaacatgctactgagcacaactatttacactaagctatgtatgtacattggtgtttaagctttctactgtacagtgtgaattccaagcccccctttgctggggtaggaacatatacaatttctttatcttgcatacatacatttctgtttgatttgaaagtaacacaatgaaaatgctgagaatgtacaaaggaggactcaagaataagatctgatcaacttaaaattctgaaaagatcgagctttgaaaaaatttcctaagagaaatccaattgttgttggttgagagggctttggtgaaagattagagttatgttttactttcagtactttgtcaccaatttgtctgcgaattgaatctataatcttggggtcaactgggttaccagtaacatctgtgacataaaaagtatctctagcctttccttcttcggttgatatttctgctcttttgatacataaactgttttcgcgaaatattctcgtgatatctgagaggagtcccacgcgatcttctgtgcacaactccagctccattccctcagatgctcgcctttcaattgctgcttcaagacactgcacgag

SEQ ID NO: 55132 - DNA, 325 bp, Glycine max
  Clone ID: PAT_MRT3847_20796C.1
attcttttttttttgtttaaaatttgggggaaaatggggaagccgaaaacaacgtgaatgcattaatttcaatttgggggatattttttgagcttccgaatgtataaattagcagatccctagactcaaaaggggacaattttttttttatttgggcgccgggcaaggaatttataatttccaaaaaaaaaaaaaaacccaccaggggggggcaaaaacaaaatttgggacgcgtctaaaaacggggattttcacagccctttataacccctggataaaagctggccttaaaaaagttaaccttttaaatgggcttgacaccgtg

SEQ ID NO: 55133 - DNA, 150 bp, Glycine max
  unsure (1)..(150): unsure at all n locations
  Clone ID: PAT_MRT3847_20797C.1
ccgaacctcangggatgcngtnnngtcggagaagccagtnaggtgagaggntgaactnacatcccacttggcattctccatttatttggatctgtngctgangcagcagcagaagcagaagcaggggatgaggnagtgaagtctacgctc

SEQ ID NO: 55134 - DNA, 737 bp, Glycine max
  Clone ID: PAT_MRT3847_20798C.1
cccacgcgtccgcccacgcgtccgcccacgcgtccgcccacgcgtccgatttgcaaaggaatcattttttcatttgccaatcgaccttcttcaaccctctagatcgaaaggccaattttttttttcttttagtttttgttattatttcgcattctttttaccttttcaattcttcaaaaattctcgcgactgaattcacgtcagaacacggaaacataaagttcagttttttgcatcgtttttattaaaatttgttggcgaacaaaacagagaaaaaaaaaccaaaaaattgaaatttcttatccgttttggcgaattgaactgcgtgttcaattgggttgttgaattcgaggcagagggaaccgcgggtgtacaaggaatttcgattctgctgttgttagaaacggtgtagtttggtgtgagagaagctggggacttggggtggtcgtaacgacgtcgttgacggagaaggtatggattgtagggtttgcgtggccaccggcggcgatttgtgggtcagagttggcggcggtggcgagattggtggcggtttcagccacgagagcgaacatgatttggccctcatggttagcgattttttagagaatggaagtagtggcgcagagtcttggtgtagcagtgatagcgattctggtcattctgatttcgctcaactcgccgagaggattcagatctgtaaactgtcagtggctcacatgaaagtgacttgctttcag

SEQ ID NO: 55135 - DNA, 267 bp, Glycine max
  Clone ID: PAT_MRT3847_20799C.1
aaatactgaaattgttatagtaaaattaaatttgcttagaaattcgtatacactgtacaaaaccattgagcctttatctagtagctatgggcatatttgattttttaaaatatttttgtttgcattttttgtttttataaataattacaaagatggcattatttttattttatctcctattttaaagacttgtatagaaactggtgaacatatgtagtttatcaaaatgggagtttaccattgacaccaacaaagcttagtttattt

SEQ ID NO: 55136 - DNA, 509 bp, Glycine max
  Clone ID: PAT_MRT3847_2079C.1
gcacgaggcaactttcaaagaacttctttaattctcttcatcctaattccccatcccaagtttagtcacttacactcaagatgattgccaccattttcctcgctgcctttgctcttgctaccggtgccgctgcgtctcctgttgaggccaatgtcaacgctgcgactgctgttgccacccaagctactgcggctgccgggcaagccggcgctcagggtcaagttggggctcaggctcaagtcggtgctaacgccaacttacttacaccgtacggtggttacccttacggcggctacccttacggcggttacccctacggtggataccgttacggcggctacccctacggcggctacccttacggcggctacccttacggctcttacccttacggcgcttacccttaaagtgatgtagctgtgtagggcacacctactggccgatcattgcaatgcgctggacggaccactgtgtggatcctcctagctttatctcttatcgcctcttaa

SEQ ID NO: 55137 - DNA, 279 bp, Glycine max
  Clone ID: PAT_MRT3847_207C.1
gcgcagcaacagctcctatgtgaggaacgcctggaacagggaccccattttgttactcgccctgacatggctcacaattgatacgtgcgcatcttattcccttatataataacgagctacttccccgcgtgataatagaacttcatcctagctcaatggtttaaggctctatattatccttgatcctttgcagcttcttatgaggacactatgttgggcttcagagccttcaatcataatgttaccgtgcgtgagcacaacccctgtatcctgtgaagg

SEQ ID NO: 55138 - DNA, 526 bp, Glycine max
  Clone ID: PAT_MRT3847_20800C.1
ttctgaactgtattacaatgaaaacactaaaggttttatgactgttacctcacttcttctggaaatgcttttgcttcatgtgcttcctctcattcttctggtcattattattaccataggatgcaggggtactagggaagcaaatgaaagatggagtaagattgatggggcgtggttctgagcagatcaagtggccaattcatctagaggtagacttgatttgaagtctatatgcgtttggaggatcataatcatgctttttgattcttacgtctttgaaaatgcttttcttaacactttttaatcatcattttattttttgttaaatagtttatgatttccttggatgttcagcttgaaagtctgtctctcctttctccattggcagcataagtgagaagaattgggggtagccaggttttgaccttggcaattagaatggtacaatggttgtagggcatctaacttggaatttgttataaattaagtttgtattatacttgtatattcaaagtttatatgctat

SEQ ID NO: 55139 - DNA, 338 bp, Glycine max
  unsure (1)..(338): unsure at all n locations
  Clone ID: PAT_MRT3847_20801C.1
aaaaaaaaaaaaaaaaaaaaaaaaaaaaaaaaaaaaaaaaaaaaaaaaaaaaaaaaaaaaaagggggggaaaaaaaaagaaaagataaagngggggggcgcccgttttaaaggatccaagttaacttacgcgtgcatgcaacgtattagcttttttataggggcaccaaaattgaattaactggccgttatttaaaaacgtggggactggaaaaaccttggcgtaaccaaaataaatggctttgaagaaaatccccttttggccagttggcgaaatatcaaaaaggcccgaaccgatcgcctttcccaacatttgcccaccttgaatggcaaatggaa

SEQ ID NO: 55140 - DNA, 961 bp, Glycine max
  Clone ID: PAT_MRT3847_20802C.1
acgagagtttgcggttctccattatctctggctccagaagttcttcggttccagagatatgttgactagctatcatctcgcctacctttctacgtccacatgttttttttagagacggacagttcaatattgaagctataaaaacattagatcgagacaaaaccatctttttttttttttagaaatggcgaatagagaagaaaacaacgagggtcacaaattcacagtgaaatatgttggactcaacggaatggaatgcgaaggcaaattgccgaggagggtggtgggagtgagaaatcactgttaccttttgaaatccaaaatcggagagggttcattctccgccgtgtggagagcggagcagagaccaccaaccggcgttgacgtggcggtgaagcaggtcttcctctccaaactcaaccctcgcctcaaggcatgtttggattgcgagatcaatttcttgtcctccgttaaccaccccaatattattcgccttcttcacttcttccaggatgatggatgtgtgtacctggtcctggagttttgtgctggagggaatcttgcttcttatattcagaatcatgggagagttcagcaacaaatagccagaaaattcatgcagcagcttgggtctggtctaaaagtattacactcgcatgacattattcacagagacttgtaaccagagaagggtttgttatgtatattatctttacatagtagtgagcttaataaacttctgattcatctgaaaaagttaattctatgtccgtttctttctcctctttgatttctctccttgctttacattggataagtacattacttttgggaagttattcaattcatctcttgttaacactgcctgaatatgtagcagctttggacctttctttttgagcttctaaatcgctacccaccttttaatggcacaaataatgttcaggtgttgagatacatc

SEQ ID NO: 55141 - DNA, 470 bp, Glycine max
  Clone ID: PAT_MRT3847_20803C.1
gggccttacatagttattctattctctcttgtgaaaaatttacctttacaagcccctactataattatttggggtgcaaataattgagtgaggtggagattaaacacaacaaatacagagaaataaaataaattaatatattttaaagtctgaattgagatatgcttattaaaggttgcatcaaaattttctcttttctaccatttttgtgtctttctaaacaataaaaaacaaaaaatctatttcactatttttttttttttgcctcctatttctttccctccaaagtcacgggaaggataaataaaaattcatctaactattaattaagtaagtaataatatggataaaaaatcaactcataaatacaattacatgagttcgactcatatttataagtggataaattgtaaatatttggagctctggagatccaactgtctcaattttttatttatttttatacaaat

SEQ ID NO: 55142 - DNA, 214 bp, Glycine max
  Clone ID: PAT_MRT3847_20804C.1
gggaaggctaacccccaaaccatacgtaaaggaacaatacaatttggttaaaagtgaattcatttaaccttacccttcgattcaagccaaacaaaaaatttaatttagcccaaaccagacctaaccaaaccggaacaaatggaaggggctttatttcacaacacaaaagcaagaggccgacccaacctgattagattattttttccttccaaag

SEQ ID NO: 55143 - DNA, 346 bp, Glycine max
  Clone ID: PAT_MRT3847_20805C.1
agttattttatggtatccaacttctattttttgttggtattgagatttttatgtgggctatactggattcggggggtgatacttttaatgctacaactaatgctgtggcagcattgtttaacctttttttctttcaaaatttccaagaaactatgcctgtttatgtgtttttctttattgcaggatgcaacaattgagcagcttcttcctatttttctctcccttttgaaggatgaatttcctgatgtacgcctaaatatcataagcaagcttgatcaagtgaatcaggttattggaaatcaatttgttatctcaatctttgttaccagccattgttgagcttgct

SEQ ID NO: 55144 - DNA, 754 bp, Glycine max
  Clone ID: PAT_MRT3847_20806C.1
ttgtacgggcgagaagacgacagaaggggactcacattcattcattcactcaccccaaaacccaaaaacctttccttttactttttctcaaactgaaacataaaaaatggagggtcttattccttttgtttacaaggctatcatgcaatccaagggcgacaaagagggtcatcctataggatcatggctttgtgagtctccttactcatacatgagacttcctggtgactcgggtaggtttcaaattcaagcaccagctgctgcttcaccctcttccaccaaccctaattcttcttctgctacacaaatcattgtttcctctggtgttcagtccccacatcagtgtttaacacatcgtcgaattgcagcatgaaaatgaacaagtttgtgcctgaagaaaaagccgaaggtgcttaattcaagagttcaagtttgtgctttcaagtgttgggaatcttggttctttgtttcaacttaatttggagttgtaagcgtgtggaaaacaacaaccaaaagggtctcatacgcttattaggtagtggtggtatttcagtatttgtaattacgttgtagatatgggtttctcatgcttaagaaattgttcgtgttttatgaccaaagggtcacttgaactatatgagtttttagacaaaataatgagcaaaatgtaataggtttattgttgtagaataaagcaaataatcaatctgcaattgttcgttgtttattattttcagatttccgactttaaaaa

SEQ ID NO: 55145 - DNA, 1434 bp, Glycine max
  Clone ID: PAT_MRT3847_20807C.1
aaccattgtacatgtgtgtggcagttgtatgagaacactttgaaatacctcagccatgtcgttaaggatgctgaatcttttgcaaacgatctaaggagaagtatttatgatcccaaggatgaagaatttactcgtgcttgggaggctatgctggagaagtataacctccagcaaaatgaatggctgagatggatttatagagaaagagaaatgggctgttgtctttggtcagaatacattttttgtagacatcaaaggctttcatttaggtgagattttgtctaaaaaatttagaaattatctaaatcctgaccttgatgtgcttcaattttttaagcattttgaaagggtagtagatgagcagcgttacaaagaaatagaagctagtgaggaaatgagcaggtgtttgccaaggctaatgggtaatgtggttttgttgaagcatgcaagtgatatttatactccaagaacatttgaagtatttcagcgagcatacgagaagtctttaaatgttcttgttaaccaacacagtagaaatggatcattgtttgagtacaaagcaaatacattttggcatactagacaatacaatgtcaccttcaattcttctgatgacacagttgtctgcagttgtatgaagtttgagcgtgttggtattctgtgtagccatgcactaaaagttcttgatcatagaaacataaaagtagttccatctcggtacatcttggatagatggacaggacatgcaaggttgggaaatcttagggagattaggcaatgtaaaatgcaagataatcctaacatggttgtcacaagctgttacaagatttgtgcaacagactgctcaagttatcagcaagagcctctgaatctatggaggcttatcagtttgccgcaaggcaacttgatgaagtgatgataggagtggagaaaatcttgacattaaaagttgagcaacgtcaagttatcacctcaagtaatattgatgcaaatgcttcagaaaatgagcctgcagagatctttctgaatggacattcaattgagggtcagggtgagagtgacagagcgagtgggggagagggcgggagagcgacagcgggtgggggcgagcgagcgaccgtgactgggagtggggctgattctgataggattttgaatgtagaactatctccaccaaataccgttgtatgcatttcacgcccctcgtctgcatatgtttcatctcattctgcgacaccaaatcccattctgcggggtttgtacggttttgaagccaatcgcgtggttctctgcatgtatgtacagactaatcatgtgctcgaccatcaatctaattctaacaccttacagacacctcacatcttttctaaccaacaggattctcctggtcaatctcagctgctgcgggagcctataatccagagcacataccat

SEQ ID NO: 55146 - DNA, 659 bp, Glycine max
  Clone ID: PAT_MRT3847_20808C.1
ctcgagccgctcgagccgttgctatgtaactgccactagtacagatgctcatcctcaacctcaagtctgatagctaaatagcacctcaactaaaattaaaacaacctcatcgatagcttgctagctgctaataaacacccatcaattcttgttgggcaatactaaacagtgctcaacatgggtgtctgctctgcttcgctcgagtcgccaccaaacaccctctaaatccattcggtacgcaggctcagggagtgagtgcttgaggagcaaggcatgagagtatggggattactgaaagcactagtagagctaatggaagaagctgtagtagtcatagcagcaagaacattcgtgaatgctagcgtggaagtgcggaacctgaaggagttcagttctgcgaaattcgaaagcacccaccaagagttgcaaatcggacgcattgcttggagaatgatgatccggaaagcatacaaaggatggctggatgagacgacactggcaccgaccaaacctggatctggaatcatggttgctattaagaaaatgaatctctaaagtatgcacggccttcgagagtggcagtcacatatcgactctctaggaatgatttcgcaccaaacctgtcaagcgcttgagttactgttgtgacgatgaagaat

SEQ ID NO: 55147 - DNA, 3441 bp, Glycine max
  Clone ID: PAT_MRT3847_20809C.1
aaaaatctggctttctcttgctctcggtgacgtgtccagaattgtggttccattttttcctaccccgttctaatatcatcttttaaatcgtaatacttaaacaaaatttaaatttaaaatcccgcaaaatttaagttaaatatataaactaaaaaggatccttaacttagtcatcaacgaaacccccgtgatcttcgcgcctcactgcttcttaacattcattattcacacgtaacagcctcaacctcaacctccaaactcacttcatttttggccgcaaaaaacccaaatcaccctctcaacgatgcaagtttcatcctcatggttcggaacaatagtactttccaaccgctactcacgcaaccgctccctccctctggaaccgtgttccaccacaaccacatcatcggtttctgctacctcgtaccctcctctattcacgcgcccctatagttctctttcgtttctcgtctctcaaagaaaaggcttcaccctcacctcgctgtcaccgatcagaacaaataagaagagaagaagagcgtcgttgagggtttccgcggtgttcgagaggttcaccgagagagctataaaggccatagttttgtcgcagagggaagccaaagcgctcggaagcgaattagtttacacgcagcatcttcttctggggctcatagccgaggaggatcgttcctccgatgggtttctcgcgtctggtgtcaccgtcgagtattcgcgtgaaattgtgcgcagcgtctggcttcggaatgcatgagcacgtgccggctctggtgccgcacgtgctggggttgatgatgacggtagcaaagcgagtgccacgcaagttccgttttctgttaacgcgaagcgcgtgtttgaggctgcgtttgagtattccaagtctctgggacacaagttcgttggccccgtacacattttgttcacaaaggtcaaagtagatgatggaagtgttagtagggtcctttacagattggggacaaatggaagccagttggcatctgtggcattctccagactacaaaaagagattgctaaagatggtagagaaccgaatgtgatttccaagggggtgcctaacaaatcgatttctagaaaaggttctgatgcaggagcctctgccacaacaggagaggagagtgctctatcacaattttgtgtggatctcactgcccgtgcgagtgaaggaagaattgatccagttgttggccgagaagttgaggttcagagaattattcaaattctatgccgaaaaacaaaaagcaatcccattcttcttggtgaagctggagttggaaaaacagctattgcagaggggatggcgcttcgcattgctaaggcagatgttgctccttttttattgacaaagcgtgtgatgtccttggatatagccctattaatggctggagcaaaagaaagaggagaactagaggaacgggttacaaaattagtaaaagacataataaagtcaggtgatgtcattctcttcattgatgaagttcacatacttgttcaggcagggacaattgggagaggaaataagggatctggccttgacatagctaatttacttaaacctgcacttggaaggggtcaatttcagtgtattgcatcaaccaccctagatgaatacagactttattttgagaaagacacggcattggctcgacggtttcaacctgtttgggttgatgagccgagtgaggatgacgcaatcaagatacttatgggtctacgtgagaaatatgaggcacatcacaaatgcagatacactgcagaggctataaaggctgcagttgatttgtcagcgagatacatagttgataggtatctacctgataaagctattgacctcatagatgaagcaggaagtagagcttgtattgaagcctttaagaagaaaaaggagcacgaaactggaatcctttctaagtgcccagctgattactggcaagaaattaaagatgttaagtccatgcatgaaatggagaacaagcttaaatactatggcgcttctagcattgacgataccaatgaactcatactggactcatatttatcttctacaaccaccgataatgaacctatagaagttgggccagaagatatagcagcagttgcttccctctggtcaggaattcctgtacagaagctcacagctgatcaaagaattcttctgttagatcttgagaatcaacttcggaagcgtgtgattggacaagaggaggctgttgctgccatttctagagctgtgaagagatcccgggttggcctaaaggatcctgatagacccatagctgctatgttattctgtggcccaaccggtgttgggaaaacagaactcgcaaaatctttggcggcgtgttactttggatcggaggcagccatggtacgattagacatgagcgaatatatggagacccatacagtgagcaaattgataggatctcccccaggttatgttggttatggagagggtggcgttttaacagaagcaattagaagaaaaccattcacactgttattgttggatgaaatagaaaaagctcatccagatatattcaacattcttcttcaaattttagaagatggtcaacttactgattctcagggtcggagagtttcatttaataatgcattggtggtgatgacttcaaatgtggggtctagtgccattgctaagggtcgacacaactccataggtttcttgattccagatgataaaacaacatcatacaatggcttgaaatcgatggtaattgaagaactgaggtcatattttcgtccagaattgctcaacaggatagatgaagtggtagtgtttcaaccccttgaaaagtcacagttgctccaaatattggatttgctactgcaagacatgaagaaacgggtattgtccctaggagtccatgtaaaggtgtctgaagcagtcaagaaccttgtgtgccagcaaggctataacccaacatatggtgctcgccctctgagaagggcaattacatcactaatagaagatccattgagtgaggcattcctttatggagagtgcaagcaaggagacactgtcctcattgatttggatgctaatggaaacccctttgttacgaatcagcttgatcagattgttaacttatctgactgacacaaggtcatgcctgtaattaattattgtacataagcagtagtatgataggttatacacatgatgggaaatgttttgtctctttggtagcataggttagttgattcttatgtaaagagaaagcataccacatcaaccaacgagcttcttgatggctcatgagatgtcgaatttattaaatgtggcaacacgttattcgatgtaaaacttttgtccacaaactttgtattcaaactattaaattcatttatgaaaataaccatacacatacttttagttgacta

SEQ ID NO: 55148 - DNA, 567 bp, Glycine max
  Clone ID: PAT_MRT3847_2080C.1
ttaccccttcacctccattgccaacaccaaacatcccctagccactcacccatgtcaataatgaaacagtccttatcccctgaaattagaaacaacctagagaaagaggctttgaggattgatgagcctaactgtgcatgccaaaatttaacctctccactcctcattactctgagaggaaaccataaagggttaacatctgtaacacattcaacactacataatactactctttcaaaacatttgacactatcttaatataattaatattctattcttaataatacctattcttattcttcttgtcatggcttatcctaaatacaccagagaggcagaagactcaaaagtcaagactagtattttgacaaattcttaaatctgaattgttgcatgtatttcaaagactgacttattttgcattctcttgtgtagaacttaaaaagacttctgtatatttcttttataaaaaaatactcaacaatttgttacctagcttgtagctgctccattgaagctctcattctatttttcagtgtgttttcttctttggttgtctaacataga

SEQ ID NO: 55149 - DNA, 334 bp, Glycine max
  Clone ID: PAT_MRT3847_20810C.1
ataaaaaccacaattgctcgttgggcatggaactttgaaataaaaaattacccgtgcaaaccctagtggggacacatacaaaaaacacatttgttttgccgggggtgttccccaatttacaacgcttacgaggacccccagacttggttttttaataatcctaactaacattttcctaataaccatgggaatcattatacttttccccctttagggacggggttgggaccttttttgggttactactagtggaaaacaaatccttgaaacaagttgtgtgatacccttgacagcaaaaaaaaacattgcccggacccgtgggcggacccttggg

SEQ ID NO: 55150 - DNA, 550 bp, Glycine max
  unsure (1)..(550): unsure at all n locations
  Clone ID: PAT_MRT3847_20811C.1
aaatgtaatgttaattgtatatttgttagcttttattatagtgggaatgatttgaatttacaatctctcatttttttaatcatcaaaactaaccttataataattcttatgttgttttattgatctctattcgttcctagggtgctcgacctagctccaaacacttccgtcggctcatagacagtccaaaaacaaattaaaattctttgataagttaaaattaagtttatgtaaaaaaaaaaaggagtcggcgaggtaacatttatcttgtaggaaataacatgattggcatattaaaaaatccattgatattggaaatggttcctcgagatgcgaggagtgacaatttggaacgtattttatataccaggaaagaacatgatatcatctgggcacttgaagtcagcatcaggttttgtatttatatacatacttggaatgcagtagtttgtgtacgggagtagtaaaacttagctagagaagaataactttcgagtaaaataactgtaanncgtatgaattaacaatgatgaataatattcctttcact

SEQ ID NO: 55151 - DNA, 1367 bp, Glycine max
  Clone ID: PAT_MRT3847_20812C.1
aagacaattcaataactgatcatccttattgacaatgtcagatatgaagaaataggaaaatgtacacactttctgagttcaggcatgtctgatgaactctccatctacagcaagaattccctaaggcacctatgcattttcactatttaattagagtgaacaacaaaaagacaaactcaggagtctgttacatgctgctctctagaaaacgagcaaagctaaggtacttgggctcccacccaactacctggctggttcttgtgttatttaatctctttccaagagggccatcagttccagtaaacttgtcaaattttttactgaatttcccacttttattaaccagatccatcatttcttgcctagacaaaggatgattatcacaacccaagaaaatctgtccacggaagtttttcttcaagattgcaactgagagggaagctgcatcctcataatgtataagattcaggatgtgatcaggacgactatcaacaacacccttttccaagaaataattgtgtgcacctctatctgctttatatagtcccgccaatctatctcacaacacagccaccaaactccagtaccacattttcagcttttagaaggacatcaactctggggctcctcccaataggcacaaccggagaatcctcatcacatggtccattatcattacaatcatagttgcaatagcaccttatattgtcaattacagtggagctgtattccgccagtacccaggtccttggcaggtgatgcttaaacaagcagatggttcttatgcttgcatagcagaaagtgcaaaccgcttcagccttggcgaggccaaagaggaattgttgagggtcttgggacttcaagaagaagagggaagttccctagaatttcttcgaagaggctacaaggcaagcacgtggtgggaagaagattttgattcagaagtatcttctgcatggcggagttgagtagtacactgttagaagagactgttttattgcatctgcatgtagtagtcattgaatgggctcccgtatattcaagaaagacatttcctgcagaactgcccaatttttatttttatttgttaatatttcgtaaggtaatatttttccattcttcccctttctgtttgaaaacggatgtcacgcatggcaaagaaatgtaaggacatcacgaactcaattgtaatttgcaacatgtctattgtgggcatctacccgtccatgtcaatagttagtgtgtacaattgttagggataccgcatgcgcatatccctgtagggagagcgccatgcaaccctattttgtaaaatcttgttacattcctcgactatgcaatccgtattgtgtttgattttcaaaaat

SEQ ID NO: 55152 - DNA, 481 bp, Glycine max
  Clone ID: PAT_MRT3847_20813C.1
cacagacttctgcacctcctactggaccttaacggcgccttttttttttttaaatttatataagttctttccaaatacccttcctaatattcataggatacagttacagatttaaaattgcaggggaactctaaataggaaaaaatcagttcaattggtttaattataaatgtactaaattacaaataaaagagcatgaataggctgtacttcaaaaatcacaagtcaactaatgatgagcatttataggatctatacccatgtagacacccaccagatgaggttcacaccatgcctgtccattgagattctggatcgggtgattgctggtggtcccatccccatacagctattccatacggcagagtccgctggtactgggcaccccaaccctcaagagattccaagcccatccactcctggtaatcaaccataaccctgtcaaggctgattaaccctggcagcaaccaggttgaacccc

SEQ ID NO: 55153 - DNA, 348 bp, Glycine max
  Clone ID: PAT_MRT3847_20814C.1
attacccgtttacgcgtgggctgcaacataaagggcgcgatgcttttggatgatgctaaacataccaatactgagaatgcagttgcgagtatcatggttgcgcctctcacaggcggaaggcccattcaggtggttacattgccgaatgccattgtgcacattgaaccacacatgaatgcaaggcttcagatgttgtgtaccactaccaatgtagattttgttaaaggaaaacatctcgcaaggcttaaagttaatgacgcatgcgccgctgtcggcttgacatcaagctacactccaactccattggtggattctgtcttgcaaagagacagtgggataattgaggac

SEQ ID NO: 55154 - DNA, 227 bp, Glycine max
  Clone ID: PAT_MRT3847_20815C.1
tcatctcggggaattccaggtctaaatttttacaaactgaagttggacagctcggttcgcaatactgttgctgggacttgttttcctggcttcagtttctgtctcatttggcattgcttactgggaaaaagagaagcccattccagattttcaagaactgccgaggcacgagtatacagagtttgcgtggtgtgagctcttctcctatcacgctcatcgtgacgctg

SEQ ID NO: 55155 - DNA, 833 bp, Glycine max
  unsure (1)..(833): unsure at all n locations
  Clone ID: PAT_MRT3847_20816C.1
acgaggagaactagtctcgagttttttttttttttttttgctgaaaaaactgttatttattattaataaatgattcaaaaaacacataaaatagaaacattctataatatgaaaatgtgtgggactctaatctaatcaaacctatcttaactatgggatgtgaattagactagaattaacaaaagatatgcatgtcttgcactaatgcactccccattaaaaaatcatttctggttatgatgaaattgagtgtaagtggtaaacaagcaacagattctgccaacagtttattctctcccccaccatgcctgcaagtttttgatgttcaatctcaagaaaagcttccttcactattgcttgtggatgagattctcttggtaatggtagaaatcctgttgaagtttatacctttggcactaaatttgggaaaacattcattttactttcactgttatcctaagacactgttattcctttcatattcacaacactagggggataagccttcctcatctgaacttctatcttgtcttgcatggtacttgttgagaacaggtaaggatgcacttgcggctatcctgaaggatctagctgaaccaatcacagtcctatcctgcatcctccccacttctttgcagacttgatccaaactatttagaaagtctcttacaaccataaaaattcgnaaagggtgcgcttcttcctttgctgcatccccgtgaaagtattttgtaacctctttcacaannnaannaggccttctctnannagccttgatcctaannntttcctcttcagnntctttcnnnancagtgcgnnngagnnnnnnnaa

SEQ ID NO: 55156 - DNA, 353 bp, Glycine max
  Clone ID: PAT_MRT3847_20817C.1
acgcgtcagcggacgcgtccgcccacgcgtccgcccacgcgtccgaaaaaaaaaaaaaaaaaaaaaaaaaaaaaaaaaaaaagaaaaaaaaaaaaaaaagaaaaaacaaaaaataaaattaaataaaaaatagggaggtcgttcataaggttagctcttatacttattcatgaatgtaatgtttaatacttttatatagtgtaacctggggttcatttccctggtgattcctctttgaagttcgtgaccgggaatttgttgggctttactaaacattaacgtccttgcagatcacccggctttcgttttcagccttcttagtggagaagcctacgcgttttgccctttcaaac

SEQ ID NO: 55157 - DNA, 368 bp, Glycine max
  unsure (1)..(368): unsure at all n locations
  Clone ID: PAT_MRT3847_20818C.1
nnaaaaaaaaaaaaaaaaaaaaaaaaaaaaaaaaaaaaaaaaaaaaaaaaaaaaaaaaaaaaaaaaaaaaaaaaaaaaaaaaaaaaaaaaaaaaaaaaaaaaaaaaaaaaaaaaaaagggggggccgttttaaagaatcaaagtttacttccccgtgcttccaaagaaaaaatttttttttatggccaccaaaataaaatacactggccgtgttttaaaaaagtctgaactggaaaaaccttgggtttaccaaattaaattacttttgaaaaaatccccttttagccagttgggtaaataacaaaaaggcccccaccgttcgcttttccaaaaagttgtccaccctaaatggtaaatggaacccccct

SEQ ID NO: 55158 - DNA, 278 bp, Glycine max
  Clone ID: PAT_MRT3847_20819C.1
aaatcccggccgaccacacccgtccgaccgttaaggaagccttggacctggccctttttttatcggctctttttcttgcctgtccggcggtaatatagggctccaccggggtcgtactattatggcaggaaaatttctccctaggaaactaaactgaatgaccttttttttttttaaaaaaagtgccccgttgtttttagcagaatgctcctgattttaagcttgttttggttgtaccgagatctttatgtttttataaatttatgggcaagtaattc

SEQ ID NO: 55159 - DNA, 1715 bp, Glycine max
  Clone ID: PAT_MRT3847_2081C.1
ggaatccagcattgagcatcctgtaaatggacagatgcttgagggaaaacatccttcaatgcctgatttcgaaggaaaacctttctttggttctgctggagtaaggctcagtgctcccttcaacatccgtaatcaggagcagaacgcccaatccaggatgttaggcaagtctgagaaaaatggtttgaggattttggaattgaaattgctctaggtgcttgatcccatttacagcctacaatgcctcttatttcattgaagtggacagattacttcgccctggtggatatttagtcatctccggtccccctgttcagtggcctaaacaagataaagaatggtctgatctccaagcggtggcaagagccttgtgttatgaactgattgctgtagatggtaacactgtgatctggaagaagcctgtgggagaatcatgtcttcccaatgaaaatgaatttggtcttgagttatgtgatgattcagattacccaagtcaagcttggtacttcaaattgaagaaatgtgtcagtaggacatctgttaaaggtgattatgctattgggataattcccaagtggccagagaggctaactgcaatacctccaagatccacactcctgaaaaatggtgttgatgtgtatgaggctgacactaagcggtgggcaaggagggtggcacactataagaattctctaaaaatcaagttgggcactcgatttgtgcgcaatgtcatggacatgaatgcattatttggaggttttgcggcagccttaaaatctgatcctgtgtgggtgatcaatgtagttcctgcactaaagccacccactcttgatgttatctttgacagaggccttattggagtctatcatgactggtgcgaaccattttcaacatatcctcgtagctatgatctaatccatgtggccagcattgaatcccttataaaagatccagcatctggtcaaaacagatgtactcttgttgatttgatggtggaaattgatcgaatgttgcgtcctgagggaactgtggtggtaagggatgcccctgaagtaattgacagagtagctcgcattgccagtgcagtgaggtggaagcctaccgtttatgataaagaacccgaatcacacggcagagaaaagattctagttgcgaccaagacactctggaagctctaattcctattccatggatgcacgcaactgtgtaatttaggtaaactcccttttccattctgtggggttggaggtgtcaaagatatcttctctatgcatcaaacgggtgcgattttctaattttgttcaacattctctcatataaagaagatagtgaggttaagatttgaaaaagattggaagacccttgtgcagttttaggtggaaagcggaagccagtgttgattttattttctctcaacttaaagaatgggttgtaattcaaaaatatatatttattaaaaaagaataatcgttgattctaattcagctacatttcactcttatcttttctttttcatttgtattttattgttttttttttttcccggattgaatccaaatacgtattagagatgtaatattaaatcatttgcgaggatttttatatttctgttgatgatttgctttgctatgttctatcaattttcagtaaaagttgcatgataatagtgattcagttttgttctccaaaaaaaaaaaaaaaaacctttccaaacc

SEQ ID NO: 55160 - DNA, 1404 bp, Glycine max
  Clone ID: PAT_MRT3847_20820C.1
cacccgtccggattttttcgcacactttactaaccctggatagagctgatagaaattctcggcctcttcctacataagtcttctcttatcataaacgcgtgttgctcggataaggttgtgctgcggtgattcactcgtactttgcttaatatggcggttgagaagttgagcattgcaaaagatgtgactgaattacccgcacagacactgcactttttgttttttgacggaaaatttaacacgatctatcctttaacttgcgaatctagaaatgatggaaccttgctccagtgtcaaagacaggatagggtatagcatgattgtagatgctgaggagaaaggattcatcacaccgggtgaaagtgtcctcattgagcctactagtggaaacacgggcataggtttggcattcatggcagctgctaagggttataaacttattataaccatgccttcttcgatgagtctcgagagacgaaccattcttcgggcttttggagctgagttagtcctcactgatcccgccaaaggtatgaaaggagctgttcacaaggcagaagagattcgggataagactccaaattcttatattcttcagcaatttgaaaatcctggcagcccaaagatccattatgaaaccactggaccggagatctggagggctctagtgggaaggttgatgctcttgtctctgggattgggactggaggtacagtaacaggtgctggaaaatatctgaaagagcagaatcctgatataaagctatatggcattgaaccagtagaaagtccaatactgtctggaggaaaacccggccctcataagatccaaggaattggtgctggcttcatccctggtgttctggatgttgatttacttgatgaagttgttcaaatttcaagtgaagaagctattgaaactgctaagcttcttgcattgaaagaaggtttactggtgggaatatcatctggtgctgctgcagctgctgcagttaagatagcgaagaggccagaaaatgctggaaaactcattgttgcggtcttcccaagttttggagagcgttatctatcgtctgtgctctttgaatccgtgaagcgagaagcagagagcttggtctttgagccttgaatgtcaagtcatacgagccatttgctgcttctcaagttgcattctgtccttgggttgtgtatatattttttctcttatggatctaaaaaataaaaaggatttctgtttgcttgttaattgactaagattcaataaaaatatagtagtttgctgaaatgttcaaactcgctcataatttgtagatcatgatgccgcgaactcatgcttgtactattttatttactagttaaattttgcttcttaaaacttgtaatggagaaaacactattacttatt

SEQ ID NO: 55161 - DNA, 269 bp, Glycine max
  Clone ID: PAT_MRT3847_20821C.1
gttgggcatataagggcaatctaatatgcacattgttgactgactccatactcgcactgtcaaacggggcaattgatctttcatgtataaggacgcggtttctcctttgcaaaccctctacctgatgatacctcccatggtgtaaggaatgcggccctagtatcacagggtcatgtgttgtgtcctgtgttcagaagtatgggaagagccctttttgaaggtggactctaagctcccacgggctgttcacccttgaaagaatgcgctca

SEQ ID NO: 55162 - DNA, 529 bp, Glycine max
  Clone ID: PAT_MRT3847_20822C.1
accatccaaacgaagcagaaagagctcatagaagttctcgtcctcttctctctatcttgaatcttcttctcttatcagaaacgcgcgttgctcggataaggttgtgctgcgccgactcactggtactttgcttaatatggcggctgagaagtcaaacattgcaaaagatgtgactgaattaattggcaaaactccattggtatatctcaaccacatcgtggatggttgtgttgccaaagttgctgccaagcttgaaatgatggaaccttgctccagtgtcaaagacaggataggatatagcatgattgtagacgctgaggagaaaggactcatcacaccgggtgaaagtgtcctcattgaacctaccagtggaaacactggcataggtttggcattcatggcagctgctaagggttataaacttattataaccatgccttcttcgatgagtcttgaaagaagaaccattcttcgtgcttttggagctgagttagttctcactgatcccgccaagggtatgaaaggagct

SEQ ID NO: 55163 - DNA, 149 bp, Glycine max
  Clone ID: PAT_MRT3847_20823C.1
aaaaaggcactccatgacttacccttgagctcacaccaatcaatttgcaaacatattcacagccacgctcatcatagtaacaacatcgccagcgagcataataactcgcattaattgcccctgaatcttgctggacaataatgagcgcg

SEQ ID NO: 55164 - DNA, 3075 bp, Glycine max
  Clone ID: PAT_MRT3847_20824C.1
tggtaccgccctgcaggtaccccggtccggaaaattcccgggtcgacccacgcgtccgcaactggcagtccatccaaacgaagcagaaagagctcatagaaaaaaaagacgctgagcagaaccgtaaaattcatttattgctcctctggctattggaaatatcagatcatcgaaccaaccaaacgaaggcagaaacaggcaaagagctcatagaaattctcgtcctcttcctacataagtcttctcttatcataaacgcgtgttgctcggataaggttgtgctgcggtgattcactcgtactttgcttaatatggcggttgagaagttgagcattgcaaaagatgtgactgaattaattggcaaaactccattggtatatctcaaccgcatcgtggatggctgtgttgccaaagttgctgcgaagctagaaatgatggaaccttgctccagtgtcaaagacaggatagggtatagcatgattgtagatgctgaggagaaaggactcatcacaccgggtgaaagtgtcctcattgagcctactagtggaaacactggcataggtttggcattcatggcagctgctaagggttataaacttattataaccatgccttcttcgatgagtctcgaaagaagaaccattcttcgagcttttggagctgagttagtcctcactgatcccgccaaaggtatgaaaggagctgttcagaaggcagaagagattcgggataagactccaaattcttatattcttcagcaatttgaaaatcctgccaacccaaagatccattatgaaaccactggaccggagatctggaagggctctagtgggaaggttgatgctcttgtctctgggattgggactggaggtacaataacaggtgctggaaaatatctgaaagatcagaaccctgatataaagctatatggcattgaaccagtagaaagtccaatactgtctggaggaaaacctggccctcataagatccaaggaattggtgctggcttcatccctggtgttctggatgtcgatttacttgatgaagttgttcaaatttcaagtgaagaagccattgaaactgctaaacttcttgctttgaaagaaggtttgctggtgggaatatcatctggtgcagctgcagctgctgcaattaagatagcaaagaggccagaaaatgctggaaaactcattattgcggtcttcccaagctttggagagcgttatttatcatctgtgctctttgaatccgtgaagcgagaagcagagagcatggtcttcgagccttgaatatgaagttatacgagccatttgctgcttttcaagttgcattctctccttgggttgtgtatctattttttctcttatggatctgaaaaataaaaaatggtttatgtttggttgttaattgactacgatttaataaaaaatataagatgtttgctggacctgttagaataactagaaaatatctcgtaatcttattgttgtatcctagaatattttaaattaacttagatgatatcttatgagtggtttccaacttccatatttcatgatttgtttgcttgtttaattaggatttagagtctaatactagtacaaacaggggatagttctttgtattttgttatacattattactcaccatatatgtagtgatgttttaattccatgattctttgcttccttgtcgtgcacaaatttcagctactgaaactcaatactatcattactttctccgtcttttgcaaatgtggatgggataataaacttgagagaaccacatctcaaaagttagccgtcgtagttggagaacctaagaccttaaaaactcccccacacttgcccatacttccaatgtgagactcaagtattgtaccttgcaattggatcctaaaattccaccacactctgcagtcctgacacccatgcgagttggctgtgcactagtcctttgactagtcttggtgaacactacaatgttgacgtcactgccacgccacttgtttgctgctgagagacatgatggaaaactctgatacctatagataataaccttgggataagtggataaccacaccacaaaagctatctgttgtaattggaaagcccaaagctttataaacctcatactagaatcttatattttcaatgcaagacttaagtctcataccttgcaattggatcctaacagggtgtcagatctacccacatctgaacatctttttaccttgaaggcgctgccatcagatctcccattgtctgtcaagtttgttgtctctcctctttctccatgctctgaaattttcttggagaatccaatcatatgaaacaaagttggtattattcaagggtatataaaattcattttacaagatcatttggtttctcatacttacggaaactgttgttgaattcaatttcctgtattttaaggaatatgtgctttgtcatttaccattattgcactggtgatattattcctgcacgttcttaatgagaattcgtgtgtgcttttgtgtacgtttatcaaatgcctgcctcttgttgtgtacctttctcctgacaaatgcatggttgttaaatggatataaggccctcataagatccaaggaattggtgctggcttcatccctggtgttctggatgtcgatttacttgatgaagttgttcaaatttcaagtgaagaagccattgaaactgctaaacttcttgctttgaaagaaggtttgctggtgggaatatcatctggtgcagctgcagctgctgcaattaagatagcaaagaggccagaaaatgctggaaaactcattattgcggtcttcccaagctttggagagcgttatttatcatctgtgctctttgaatccgtgaagcgagaagcagagagcatggtcttcgagccttgaatatgaagttatacgagccatttgctgcttttcaagttgcattctctccttgggttgtgtatctattttttctcttatggatctgaaaaataaaaaatggtttatgtttggttgttaattgactacgatttaataaaaaatataagatgtttgctggaatgttc

SEQ ID NO: 55165 - DNA, 2092 bp, Glycine max
  Clone ID: PAT_MRT3847_20825C.1
cacccagcttcttcattgctagaggttcttgatccagaacaaaaacaaaacatttgatgatcagtatcctatactcttcatgatgactttcccttatcttggttaataagttttcatattttatgatggagaattgtttatgttttcttctttacatatggaaatgaagtgacgagaaatcagtatctattttctgatctgtgactccagttatcttgcatttttactagcaggctcagtccaaatgtcagtcacaatctcttatagtgtaaataaatgttgatctatagcttgctagcaatatatctgtgtgtagactgtagatttttaatgccattgcccatttggatgggaaactgaacttcgttagattgctttgaagaatgaaagaatgttaacatcagtaaacagtttttataaggaaattatgttaatgttctttatatcctgatctatccatcatttcaccagaactagttcgtttttattgttgctttttttcttcttcttctattgcaataaataaataaataattcaaagttgttccttaagttggctagccatttgatctatccaaggtaattgttgtggctacagaaaatagagcgcaacctattcctccacctctccttgacaggatggaggtcattgagcttcctggatatactgctgaggaaaagctcaaaatagtcatgcaacatttgattccaagagttttggagcagcatgggttgagttctgagtttcttcagattccagaggggatggtgcaactggttattcagagatatactagggaagctggtgtgcgcaatttggaaaggaatctagctgcccttgctcgtgctgctgcagtgagagtagcagagcaagaacaagtagttccactaaacaaaggggtagagggactttccaccccacttctggaaaacagactttctgatggtgctgaagttgaaatggaagtgatacctatgggtgtcaacaatcgtgacatttcaaacacattcaggatcacctctccattggttgttgatgaagctatgcttgaaaaagtgcttgggcctccaaaatttgatggaagagaagctgaggatcgtgttgctacccctggggcatctgttgggcttgtttggactacttttggtggagaagttcaatttgtggaggctacagcaatggtagggaagggtgaattgcatcttactggacaactgggtgatgtaatcaaagaatcagctcagatagcactaacatgggtaagggcaagagcaactgaacttaggctagctgctgcagaaggcattaatctgttggagggccgtgatatacatatacattttcctgcaggtgctgtacccaaagatgggccttcggctggtgtgactttggtaacagcattggtatcacttttcagtcagagaagagtgagatcggatacagctatgactggggagatgacattgaggggtcttgtactacctgttggcggtatcaaggataagatattagcagcacatcgatgtggtattaagagagtcatcctgcctgaaaggaacctgaaggacttggttgaagtaccatcatcagtactggccgatttggagatactgcttgcaaaacgtatggaagacgtgctagagcaagcttttgacggtgggtgcccttggagacaacactcaaagttgtaatagcatccttgacttgcacgttatgtggcaatccccggtggcttatgtattcatttaaatcctgatctatgctattgcaacattgttggtgagtgagtacttatctcttcaacttcttgtgattgagcacaactctagaaaccgacagttttggaaaggagctggcatctgcatatattcttgagactccactctccataatcttttgtaagtattttttttttgctttcgagcagctgtacttatccaagttcagtaaatgatgtttttcactctccccttcagcacccaatccttggctccctgtattttgttaatcttttgtcatgttactataattttattattgtgaataaaccattattttctccgaaaaaaaaaaaaaaagggcggccacctc

SEQ ID NO: 55166 - DNA, 438 bp, Glycine max
  Clone ID: PAT_MRT3847_20826C.1
tttttactggtttttttcttggcatctggagcgaaaaaagaaaaatacctcgtttataattattgtgaagatcaaactaccatgctcacaaaaatcggggggatggccaccctttattacacaaatatattatggggtcagatttttacttaaccaagtcaacacgttcttaaagttcactaaacaattttggaaagcaaacccacacaggtaaattgccaccacaaattccctttctggagctaactgtttctaatacgatacaagtcccctaaaacttggaccttgttttatccatggctaaaaacggtggagatgcccaaccaaaataagtgccttcttgaggagggcatgcccataactccttggaggttcggatatactgccctggcaagaaacacttgtacacgtataattggtgaccttttggcatttgac

SEQ ID NO: 55167 - DNA, 282 bp, Glycine max
  Clone ID: PAT_MRT3847_20827C.1
gaaaaaaaagctagatttttatgaaaatcaatttctcccacagcgttgggggaggggccgttggggatcttcaacacaaacaaatgtggggattggcatattcaacatttaatcaactaaggctacaaaatttccttagaaatttctaggttgttattttactagatatttaaccatgcaaggctgcttcaagcttatatccccaattttcggttataatggcgcgtgcccaccccttaaattacggctttttttgttgcaccgggttttaggccagcaatg

SEQ ID NO: 55168 - DNA, 166 bp, Glycine max
  Clone ID: PAT_MRT3847_20828C.1
ggagattgaacatcaatttattttggctaccggacctttaaaatttactgcactggttactttagattgaattaaagatacaacaattgtaaatgaaaaataaccctcggctactttgtgttattatgaacaattactttttttaaaaatctcataacattatctt

SEQ ID NO: 55169 - DNA, 212 bp, Glycine max
  Clone ID: PAT_MRT3847_20829C.1
ttggggctaatgtaatttacttgatctaccaaactggcttatcctataattaaataaaaaggcttttgggttaattaattattcccacccaatcttggattgtttaagtaggcaactactcaacctttattaatctaatggaattcaaaatttaacgtttttagttttgggatttgggaaccaccttttttcaaccttggttcccgaaaatt

SEQ ID NO: 55170 - DNA, 192 bp, Glycine max
  Clone ID: PAT_MRT3847_2082C.1
cataaaagcacgggcattataataatgtcatccaattattcagatttcacccttttcccctacagccagccttggaagcacactgctgatttctcatttattttatttttttgtttatttatctaattttgttgttgttttttgttctttttgtcaacttgcctacatcttaaaccagtagtttaatatgat

SEQ ID NO: 55171 - DNA, 728 bp, Glycine max
  Clone ID: PAT_MRT3847_20830C.1
gagagacaaggctcactccgaagcttggaagttaaaagacagagacagaggcaaccttgtttcagttggttggtatcataccatgggacaagtctttgacaagttagagggtatttcctcatttcccttctcaattcttcattcatttcttctctcttgtttcttccattttctgattttcagttcctgcacccttttcattctttcatttgttctctacttcatttttttcctgttttggaattgcccttttgtgccgacaaccaaataaaggaccaaataataataataataaatcaaatacataaaactttaacatatatatatatatataagcccatttatctcctgggtgagtattggctaaactgtgattgaatttattaccatgttgtgcatgaaaattatgaaatctggggaagttgggttctatgctgtaacaaatatcaaaatatgtttttttggaatgaaaaaaattgtttttttttttttgggttgtggaactatgaagtatgaattaaatttgaaagtgataattcttggaaagtagtaataaaagagctgttcaacttgtttgtttgatttctgctggaaattaatctgtgtttgcttttaaattgggaagctgtgtaaaactgtaaatccctttacagggttggtttgtttattattgaatcatcttttggatgtgcttgatggtgtgatttttgaagtctatagtcatgcca

SEQ ID NO: 55172 - DNA, 316 bp, Glycine max
  Clone ID: PAT_MRT3847_20831C.1
atcagcaagaatacgtgcattacgaaaactgttaaaaaagaattccagtttttaaactcaatccatgctaaaaatgaccttgaacgaagtattgagttgacccctaccccttttgaaactacaatactttgttcaagaggggtaggggtcaactacaaatcatcgtgcccggtcctaaatcgcatggattgtgtattaacacgggaattgttttttgcccgatcccggaaggcacgtgttcacgctggtatacaaattaatcgtttggtgtgatactaaatttaattttactgggggggcgtgcctacagctgtgg

SEQ ID NO: 55173 - DNA, 419 bp, Glycine max
  Clone ID: PAT_MRT3847_20832C.1
cctttttttttttttttttttttttttttttttttttttttttttttttccaagggtttcagttattggaatccaagcccaaaaccaattccttggttttaaggtgccttcctggttttacctttccaaaaaccaggtccgttccctattttttaagggttgcccaattttttccccaaatggggtttattttttttaacaaaggttttttttccttcgtttcctaaggcaaagcaaatcctttgcaaatgggacatatttttttaataaatagccatttttaatggcacctaacatggtagtcttgcccacaagttggaagggtcccaacttcgccctttttctggtcctcttcaaaacttattacccagttcccttcgttttcccttggctaaaagaaacaatatatggttcccgtc

SEQ ID NO: 55174 - DNA, 549 bp, Glycine max
  Clone ID: PAT_MRT3847_20833C.1
tttgtgtgtttttttttttttttttttttttttttttttttttttttttaacaacaaagttcaatatggccattcagtttagggccctaacaggagcagggaaacataaaagcaatgcctccaaattaaaaccactttggttctgggccccatttgaaccttaaggcccccaaaaaacagaccccaagaacaagaatctgaaggaaattctagaaggtttcatccttttccgggccctcaccaaactgagcacccactttttaataatccttttaaagggctggaagggcctcacgggcttaaaaaaattaaccttttttcatacccctccccacgtaccaggggacaaaagcacgctggggatacaggaaatcaaacttgggatcaaggcggccaaacccttgagccaaactgggggagtttgaaattatgcaaactggcctttgcaccttggaaagggcccctccaaaaacaacgggaggggggcggtaggtaaaaccccacttgaaacccggggggccccccatccacaaatggaaggggccctct

SEQ ID NO: 55175 - DNA, 140 bp, Glycine max
  unsure (1)..(140): unsure at all n locations
  Clone ID: PAT_MRT3847_20834C.1
ggcagccgccctaacgaaaantaacagacccaaagaagtaggggcttgtatggcctaacaggtaaaaacagccgctgcagaggctcgtaagagtctattatgaggacgaagactaatataagtgacgtactgatggcaac

SEQ ID NO: 55176 - DNA, 757 bp, Glycine max
  unsure (1)..(757): unsure at all n locations
  Clone ID: PAT_MRT3847_20835C.1
gaattcgagctcggtacccggggatcctctagagtcgacctgcagagactatgatgccgaagtacaagatagaggtgagtgaaaaaatgaatggatgaatacctgttgaagaaaggatgtcttgcatcgtgtggaatctggcaggaaaaacggatattctgttatcaagcatgtggcaagtcggtcattcttacatgtggtggcgtggcaacgagataagtggatgagaggggttggaatgtcgtcttatgaaggtcgggtgctagatgtcagttaagttatgatcgatggcggccaggtgacgcgaagcctatggcggtaaagtgaaggcggaacatgtccagaacacgtagtttggtatgattttttaaaaaaatattcttagggactaacatttcgaggattttattttaactatttctcaaatcttaataaaatattcctatagaaggaggtagaaattcaagattcttatgaagataggaaagttttagccatactcaagataacatactaaacacattntattgagttttagccacactcaagaaaataggattactaggaaacatgatttttgagaaacacaattcatgaattcttagaaatattgtctacattctttgagaattcttgaacatactaatcattttttgagaattatatgctaattgtctacattaaaaaactatattaatcttttagaacagtggctattccactataacgctttttcgggttggccgctacatgctgc

SEQ ID NO: 55177 - DNA, 851 bp, Glycine max
  Clone ID: PAT_MRT3847_20836C.1
gatgtaaatctgaatccaattataatatatttttggcatccactgataaaaaaaccatcaaccagagtcgagcaaatataacactttcaatcacattgatgatgtccactcaaaatccccattacagcttccattatgaagcagctttggctctctaaaactttaaagcaaaaaggtgtttgggggaagggggaattatgatctcacatacaaggggaaaaaaacccttcaagataactgcactcgcaatctttctctacatcaagggaaaaaacagacaaattgggtaacaatcaactaataaaactctatgggctataataaaaattgctgaaggaagcttattgtttactgaattacaaagtactcaagcctccattaccacataaagatagagactgaattcctcaacagccaccttatacttatcaattcattttagaaaattgaaaacctcaaggtattacttgccgcaaacaagttgtactcctcaatgacagtagcctcttttttattgcattcatgatcatcgtcaacttgatctactgaactctttaagttaaaatctccaacattgtcgccatttgaagatgcagttgccgatttatgaccagttgaaaggtctacagggccaccaaaatgaaacagggaaaaaccaactgccttgtgactttgcagaattaccacattcaacttccccatgcaatgcgcttttgcgaattagctccggcccatgcaatgcttctttttgcaaattagctccggttagagaaaccttttctactgcaaatctactaaaatgctcttgcaccatggatgtggcttagacattagagtcggttcggacgcgt

SEQ ID NO: 55178 - DNA, 205 bp, Glycine max
  Clone ID: PAT_MRT3847_20837C.1
cggcacgaggcttgtccctgctgcgtttgtgctgttcctggttgcttctggctttttgttctctgggggctgtggtgtggctgcccttgctgctttatcttggctttacaacttcgtgggggggaaccagcctgcgggttctgccacccttgcctgtgccaaagggtaccttactgctaaggcatgggctgcgaaggagagggca

SEQ ID NO: 55179 - DNA, 326 bp, Glycine max
  Clone ID: PAT_MRT3847_20838C.1
ggaaaaaaaaaaggggccctttactacagggaatcccctttccaggggagcttttacggaaggaaaagcattaaaccaaagggtttaaaattttttttagcaaaaggggccttttttttaactatacccgggaaaaaaacccaatctcttatcaaaaaaaggcaaatcacccccccccagggccttgggggaccaatttttttgggaaaaaatgaacccccctttttttattagttaagcggcccagttccccaagggggagagttttttttgggtggaaggggggggaaaaaaactcttcacttttgggggcaaccttgaaggaa

SEQ ID NO: 55180 - DNA, 323 bp, Glycine max
  unsure (1)..(323): unsure at all n locations
  Clone ID: PAT_MRT3847_20839C.1
cctcggaancggctcgagcgaagaaagaaacctcaatacaatcatgttcaacctcaaatagatacaaatttgttaaaattgcctttttattatgaaacaactactatatttttgcgggttgaggcttaaaaatactcaatatataactgaactttctaacaacacagtctgagaaaccactatcctttattatttattgcaccataccttcacataagcctattctataacacacagtttatttgtaccccacttatcgtatctaaagcaatgactaaaatggtttaccacacttggtattcctaagaatacattaataacat

SEQ ID NO: 55181 - DNA, 1630 bp, Glycine max
  Clone ID: PAT_MRT3847_2083C.1
ttcaaaaccacttgtttgttgcactccgcctcttccccttctttctcattctcatacgcacccagtcacccagctttccctttttcctattttttttctctttttttattaaaaaaataaaaatgttgaagctttcgtgcaatggcttggaccgggctcactccctggcccaatgcggcttcgcgggccggcccgcctgcgccgtccctcgccggaggaggagcggcgtctccggattccggttgccggaaggcaggtcgatccgggtgtccgcggcggtgtcggcaaaggacggcgcggtggcgacccgggtagaggcggatcccggtacgctggcggaccggctgagggtggggagcttgacggaggatgggttgtcttataaggagaagttcattgtgaggagctacgaagttgggatcaataagactgccactgttgaaaccattgccaatctcttgcaggaggttggatgtaatcatgctcagagtgttggatattctactgatggttttgcaaccacccctacgatgagaaaattgcgtctcatatgggttactgctcgcatgcacattgaaatctacaaataccctgcttggagtgacattgttgagatagagacatggtgccaaggggaaggaagggttgggacaaggcgtgattttatactgaaagactatgcaactgatgaagttattggaagggcaacaagcaaatgggtaatgatgaatcaggacaccagacgactccagaaggtttctgatgatgttaaagaagagtatttggttttctgtcctcgagagcccctgttttcttgtcatgctcacaattttaaattgttgtacaaaacctgaagataggctaaataggttcacatcaatctctgatccattagcatcagattccatgatcgtcattggaccttaagggagcatagaaatccaggaaattggtatggtcctgtcatctactctaaaatacgcactgttagccttgatttgcaaagtattaccttggattacagacgagagtgcggacaacatgacatagtcgattccctcactagtgtggaagcgatacagggtggtgccgaggcagttccagaactgaaaggtacaaatggatctgccacggcaagggaagacaaacatgaacaccagcagtttctgcatctacttaggttgtctactgaaggacttgagataaaccggggacgaacagaatggagaaagaaagctccaagatgagaaccattatgtgtgcttccacccgaatccatgattctgtttttgtcttgtgttgtttcatgttaccagggttgtcttatcaattttcccttgatattttgcttagagtttgtgcgcttaatagggattgaagagttaaaatattgcttctgttttcttgtcatgctcaaaaatttaagttgtccaaatcccgtagttaggctatataggttgacatcaatctctgatccattagtatcagattccatgaatgtcattgtaccttaagggagcatagaaatccaggaagttggtatggatctgccatctactgcatgacttgaacaatgtgtgttaaaataatcattttgaaataattcaattagctaattattaatgttctt

SEQ ID NO: 55182 - DNA, 469 bp, Glycine max
  Clone ID: PAT_MRT3847_20840C.1
cgtacgcgtgggcttttttgtatcacagaggcagtcatatagtgacagttagaatggggaagggggaatgggcttttcatgaaagctcgagaaggtagccgacggatactttatatataaaatatgcaaataatccatcatcaccacattcatgtatagaagccacaccctgccattacaggatgagagcagatcaaactgcattgtacacggaggggttcatatacaaatttggattctggaactgcagttcgtggaagctttgttcctttggtacctttcattttttccttctcgacaaatataaatatatatcataaattgttttttttttaccacacctttttatttaacacgaccattgtgattttgaggattgagtcactgtaaaatttgtttgttcctgattattgcctccaaaattcttagcttttggtcattattaaagagaatggtaggttggacttct

SEQ ID NO: 55183 - DNA, 266 bp, Glycine max
  Clone ID: PAT_MRT3847_20841C.1
ccgggttggaccaagccttcggccaacgcttccgggaagattgcaagaggtgttgccttcccgacatgtgtgcctgtgaacaacactgcctgccacttctatcttcttgccagtgatgaaacattgttggaagacggcgatatattgaaaattgacatggcttgtcttttacatgggttcattgttgctgtggctcacacccatgttcttcatgaggggcctgttacgggacggccagctgatgctattgcagcagcaaacaccgc

SEQ ID NO: 55184 - DNA, 174 bp, Glycine max
  Clone ID: PAT_MRT3847_20842C.1
agaccgagtttctccattccctctctttctctttcctcctcttatctgcagcttttcaaaccctaagaaattctcgaactccaagcttctgcaatcctcaaagaacttctaaattcctgagggaattgagggttgtgaacaactcccgtggggcttcaagaatttgggtggttc

SEQ ID NO: 55185 - DNA, 2130 bp, Glycine max
  Clone ID: PAT_MRT3847_20843C.1
caatgatattccacatcctctgacgtcaacgttacctcaaaaccgttgcgtcgtctttattccgtccaccccaacgccgcccgataaaccacctctccgttctcctctcccccaaaattcaaattccaaatacctaagattcgctaaaatcccttccccgtcgccacatcgcatgaacccttgaattccgattcggataggcatgtccggagcggcgttgtcgccgccgacgagttcgaagtcgctgacgcagacggtgagcgggtcgcacaagttcgtgatcgagggatattccctggcgaaggggatgggagtggggaagcacattgcaagcgacgtgttcacggtgggagggttccactgggcgatctacttctaccccgatggcaagaatcccgaggacaattccgcctacgtctccgtcttcatcgcgttggcgagcgaaggcaccgacgtcagggccctcttcgagctcacgctcctcgaccagagcggccaggggaaacacaaggtccacagccattttgatcgctccctcgagaccggtccctacacgctcaagtacaagggaagcatgtgggggtacaagcggtttttcagacggtctttgcttgaaacctctgaattcctcaagaatgattgtttgaaaatcaactgtacagttggagttgtggtttcagcaattgattgtccacaacttcactctattaacatcccggaatctgacattggatcacactttggtgcactattggataatatggaaggttcagatattacttttgatgtagctggggataagttccctgctcataagttggtgttggctgccagatccccagaatttcgatctaaattttttaatggtttagatgaagaaaagaatgagattattgtaacagatttagaaccaaaggtttttaaggtaaaaactatatgtttcccctttccatattttctttccctggtagcatcaagcttgtttaggatttattctgttattctgtatttttctgttagattttcttgttaggtttctttttcttgatagaaaaaggatcttacaggagttcaagtcttcaagaggtaaagtacaactagggaggatgaatatcctgatttttcctctttttacaggccatgctgcactttatctacaaagatactcttacagaagaggtggacacggtttcatcaaccacaactagtgactttccggtttctgagatattgacagcaaaattgttagcagcagcagacaagtatgacttgggtaggcttagattgatgtgtgaatctcgtctttgtaaggacatttgtgtgaattctgtagccaatattttaaccttggctgatcattgccatgccacggagttgaaagctgtttgcctaaaatttgctgctcaaaatctagcagctgtcatgagatcagatggatttgagcatatgaaagaaaaaggcccatggctacaatcagagatcctgaagacaattgctgggtgtgagggtgatggttgcagcgcagtggaaaagtctcagagtgtatggggccaactttcagatggcggtgacatgaatggtagaagggtcaggcagagaatctgatacctgttgcacactggtatctctctgattctttggtaaaatgcaggtgataatgccgaaaaattggggggtaaaaaagaaaaaggcaaagaagacgaaaaacccttttctcttctgtccaacttttccatgttccaatggaaagtttagaaaaagcgggtagactagatgtataaaaagagatgtcattagtgtgtgtacgttgttagtgcagagtggtcattgaaaatgaacttatctgcagtagactattgatattgactatactttggaagtggatatttggttgctggactttatctcttccatttgctttccccttttctgtactcgattccaacagaatgttagtagaagtaggttcattaggatggctattgttataccatgtacaaaatattcattttgtaacaattgttttttcatggcacacctgccatacaaagagccagtgattctggtttggtggtctgttttgattgacgttgatgactaaaaaaaaaaaaaaaaaaaaacacgccccgc

SEQ ID NO: 55186 - DNA, 605 bp, Glycine max
  Clone ID: PAT_MRT3847_20844C.1
acacaagtaattgtcagcattaatcagcaggaatttccagaatcatacaaataatttgcataccaatcattaattgaaagattggtatgcaattccaatctccaagaccatttccaagacaaagtgaaccttcatgcctcccttttgagatcaggcacataagaaaaggtccccatgagatatctcagtaaaatcagcatttattaggcaattgggcaaatgttcctgcattggggctacaccccacaaccatcatcttcttgaagacagaaaaggctcgatctttgtttcctgacttactatgcccacggatgagagcattataagtgaagacatttggttcaagacccataaattgcagttcctcgaacatctttccggcttggtccaccattccagcatttccaaaatgaagaatcaatgcattgtaagtataaagttcaggagaaattcccctattcttcatttcactaaaaagagaaagagcttcctccaacctacgtgattttccgaggccattgatcataagattgtaagaaacagtatcaggatcgaggccagttaactttagttcctcaaagtagtgcacagcatcatctcgagcc

SEQ ID NO: 55187 - DNA, 1337 bp, Glycine max
  unsure (1)..(1337): unsure at all n locations
  Clone ID: PAT_MRT3847_20845C.1
gcccgctcgaggccnnggccgggcccgggaggtgcaccacatggatatcggctactaaaattctaataaatccaccacgcccaacatctctagcttgtttcaattccttccaattttgcaatggccactactctttctgaagcctatagggaccaccctctccaccttcatcatattatccccttagacttttcttcacttaggaccttacctgattcgcatgcatggcctcaatctgaagatggtgatggtgatgatgataatcatggaattggatcatccatacccatcatagacctaatggatcctaatgccatggaactcataggccttgcttgtgagaattggggtgctttccaattgaagaaccatggcatacccttgagtgttgttgaagaggttgaagaagaggcaaagaggctctttgccctccccgccgaccggaaactcaaggcgttgagatcggccaccggtgccaccgggtacggccgagctcggatatcgccattcttccccaagcacatgtggcatgaaggatttaccatcatggggtctccatgtgatgatgccaaaaagatttggcctaatgactatgcacccttttgcactataatggacaattaccagaagcaaatgaaggctctagcagataagctagcacacatgatattcaacttattgggggacatttctgaggagcaaaaaaggtggattaatggttcaaccaacaacctctgtgaagctgttcagctaaacttctaccctcgttgtcctgagccaaaccgagccatggggctagcccctcacactgacacttcccttctcacaatcctccaccaaagccaaaccaatggcctccaaatcttcaaggaaggggcagggtgggtccctgtgcaccctcaccctagcagccttgttgttcacactggtgacattcttcacatcttgtccaactcaaggtttagatgtgcattgcatcgtgtcatggtgaatagtgcaagggaaagatactcagtggcttatttctatggtccccctgtggatcatgtggtttctcctttggttcttgattccttgcctcgttttcgttccttgactgtgaaggagtatattggtattaaggccaagaaccttcggggagcattgtctttgattagtatgcttaaaaactaattaatgtgcatttttctctaattttggctctcttttaaatagttgataatatcatttcattccgtcaatatggtgtgatatgattgattggtttattattttcactaaatattaatttttgttagaaatattaataaaaaaaatttaaacataagatttctctc

SEQ ID NO: 55188 - DNA, 519 bp, Glycine max
  Clone ID: PAT_MRT3847_20846C.1
aaaagacctgttgaaaggcacataacatcacatcgactcatgcatacaatctcgaactcaacattggtcactctttgtatcttttttcctcttaattattgcgcaagtacgtgtagtagttacccttcaacgacgtcgttccatctcttgacgaatggttggcctcaattttctctccccagcagatattccagaactgtttgtttataaacgaagtacctagtgagaaactcagaaattgggtgagcgcataggatgggagagcggtcaccgttagcaatgcgttggatatcatgcttcaaatcatcataggaaacgacaggaaccttggacttgaatgtgttgcggtctgtggctccattcagtcgaaaccgtttcaggtattctggctgagaatctcagcaaggagcccctcttggacactgtcagtgtttcgtgtcatatcctcaatgaactgcaatgcttttgcgttctcatcatcacaattagcaatggccatggtgggatttcacaaatttc

SEQ ID NO: 55189 - DNA, 536 bp, Glycine max
  Clone ID: PAT_MRT3847_20847C.1
ggagatcgaacaaatatttttaaattaagctggaaattagcatcatcatgacatccacatcttcctaatttaaataacatgtatagtttgatcgagagtttatatttttttcctttttcctcttattttactgaactatacccccctctctgtattgctcctaattaaaggaccatcctgctaaaatccaacctcacaaagctaagatattcatcattgatccagtcatacttttccttaaaagggttgtttagtgtgtttggagggtaactttctatgcagtccttccacacattagtatcagacaagtccctcatcacctcccaaacacagttgttgcacttgaagccggctccaagactaatcatgaggatcctatcacccttcttgagcctcttcttggcctccatgtaccccaaaacataccaaaggccaccagcagaagtgttaccccaacggtgaagtgccatccttgcaggctcaaggtcatattcattcagccttaaacccttaccaaccccatcaataactgccct

SEQ ID NO: 55190 - DNA, 534 bp, Glycine max
  Clone ID: PAT_MRT3847_20848C.1
ttctttgcgtccgctccctctgtgttccctggtgggaccgagagcggagattgttgtgccccttctgtcaccttccccactccgaaccaattacaaaaccctcaccgtctgaagtccttgctcatttccgtgccctcagttacagcgagaatgaaaggggggcgatcgcaccgccctcggagctcggacccgccggacgagtgggtggacgggtcctggacggtggactgcatctgcggcgtcaccttcgacgacggcgaggagatggtgaaatgcgactagtgcggcgtgtgggtccacacgcgctgctcgcgctacgtgaagggcgacgacaccttctcctgcgacaagtgcaaggccaggcacaacaaaaacaacaccaccaccaacaacagcaacaacaacagcaacagcactaccaaccccatggagaccgaggtcgcgcagttcctcgtcgaactccccacaaaaaccatctccatggacaataaaaaagccctcctctgcaggcccaggctctggaccgacagccca

SEQ ID NO: 55191 - DNA, 432 bp, Glycine max
  Clone ID: PAT_MRT3847_20849C.1
gcgtacggctgcgagaagacgacagaaggggacgaataagatggactcttcaatgtattcagttggcaagttggcaatcttattagctttcttcatcgtagcttcagatgtgtgcatggaatcagaagcacttggaaagggctgcgacttcgacttcgagtgtcgatatggatgtcaaaatgttccaaattgtggctgcaaagtgaaatgtattaaccacatatgtcggtgtccaaggtcaacaacctccaacaataattttcttaatcgaggcccccctaaattgagtgccgagatcttgtgatgcaattatcatgtgcttgatattcattgttttttataatgaatagtgaatgattgcatgcatgttgatttgtacccaaacgttccatcatgaatgccaaataaaacttaagctgtgctttcttctta

SEQ ID NO: 55192 - DNA, 121 bp, Glycine max
  Clone ID: PAT_MRT3847_2084C.1
cgcattctgggggacagcggttccgtgacaagctgcgagctcgatggaggcagaatggggaacctgaacgtcgcggagaggataccttcgcgctttgatttaaattatattaacgccgaaa

SEQ ID NO: 55193 - DNA, 885 bp, Glycine max
  unsure (1)..(885): unsure at all n locations
  Clone ID: PAT_MRT3847_20850C.1
cccacgcgtccgctatcccttcttcgattacataaagacgacgtcgtagatccattcaggaaaatggtaaccgctcctccaacaaattaagccctattattaatatttttcttcttcttctgagaatgacggggaagaagaatgtgaaggcgatgaccacggcggaagaggaagatgatcaggggaagcacacgacgtcgtcttcgttttcgtcttcttcttcgccgtcgtcgtcttcggacgagagagagtacgaggtgcaggacctgcgtgaccggttgaaatcgtcgcaagggagcatgttcaatctgatagagaaccagttgggactcaactcgacttggagcaagttcagtcgccaagctcttctccatggaatccgaggcttctccatggacttagttaaagacttcgttattcattctgatacaaggtggtatcgggcatggacaaatttcatattggtatgggcagtgtattcatccttcttcaccccaatggagtttgggtttttccgtggcttgcctgagaatctctttatactggacatcattggacaaatagcttttcttgtagatattgtcttgcaattctttgttgcttatagagacagtcagacctatcgtatggtctacaagagaacccctattgctctgcggtatctgaaatctaacttcatatttgatcttcttggatgtatgccctgggacatcatctacaaggcttgtggaagaaaagaggaagtgaggtaccttttgtggatcagattatatagggtgcggaaagtcgaagactttttccacaagttggagaaggacatacgtgtcaattacattattancccgattgtgaaactgatagtagttgaactctactgcacccata

SEQ ID NO: 55194 - DNA, 479 bp, Glycine max
  Clone ID: PAT_MRT3847_20851C.1
ctggcgatcgacattcttttgccgtttttttattttttatattatattatattttagattggaaaatgggaaaggttaatgggggggactcgaaagtatatctttcaaaattaattcgaaattgttactatatgtaccaaacatattcccaaaaaaacaccacccaattaaataaattcaaacaccttttaccccctaaccaaatttccctttaaatcctaaaaaactggtggctgcttttaagctctttttgaaacagcctaaaaaacagattaattttttaagaaaggaacatttgtcaatcacaagaaattggatttacaaaataaatttcctaaattaagctcttaaatttattacgggcctttttagacaaactggaagctttgaaatttatactttgggggggacatgattaaacaagctttaaaagggctaatagcttacaacaattacagggagataatcctaagttttta

SEQ ID NO: 55195 - DNA, 430 bp, Glycine max
  Clone ID: PAT_MRT3847_20852C.1
ggagaccagcataatttgggtttatgttaactcaaccccaaaagttatcgtcataaaataaaaataaaggttatcctctacttatatacatcattttgacactatttagaattgacagaccaatggatcaactaggcttttttttctttcagatattattaggacgtctacaattatggggcattattcgcaaaattgattatttaccactctataggctggactatactgaatatttcgtacacgttgtaagctatgggcccatatcagtatgaatatgcttgaaaaaatatttccaacttgagcagtatcatggcccctgataccatcccagcaagggtggcaacctatgtgggaatctccgataagtagaaaccgaagttggcaaattccacgaagggagcgggcccgatcttgaaaaagttccttt

SEQ ID NO: 55196 - DNA, 314 bp, Glycine max
  unsure (1)..(314): unsure at all n locations
  Clone ID: PAT_MRT3847_20853C.1
tncatgcnattgtaagancaataggnattcggatcgcgtatnattcnnggtaagttaantgtaagntgncanatanaaggacggaatcntanctangaaannngncatcgtgnaacaaatcagaaatggatcttcttgagnngcagantnntaataattnttntatgantngtnaatnttcaaanatggngaanntgcgtaancaaganaccagatgtatncgnttnncttgnattncantgacccanagtgtcccngngctgnannagnctactacacctnccaattaaatnantagtgncntaacancgntt

SEQ ID NO: 55197 - DNA, 471 bp, Glycine max
  Clone ID: PAT_MRT3847_20854C.1
gctttgcttccgagcaagttatacacgaggaggctgttacgattagcagaacttgggggcgtgctgcaacaacgatgctggatggggcacacccatatttggctgctatggtacaggaggcaacagggtctacagaaccaggggaagttgacatgtggagataatttgggatccatcaacacagtgagtgcatatgggctcaatactgagatgctaagtacatgtatctaggacaccatactgcaccagattaaacatcaaactgtgtggaaacaaatggccacagagagaacaccattgaatgtggatcctgacgagcactgcattagtgaatatgatattgaccagccttactgaagaagttctaaggacaaaagtggagaagggggcacacttatacacaatactgcaggtagtgacaagactagagcagctgctcggaagaaagggtgagcaaagggtgagattgtg

SEQ ID NO: 55198 - DNA, 228 bp, Glycine max
  Clone ID: PAT_MRT3847_20855C.1
cccacgcgttcgtccacgcgtccgatataaaaaataaaaaaaaaaatattttaaggaaaaaataaaaaaagaagataataaattatatagatatgtaaaggggcggagggtttataagaataaagcatacttaattcgagcatgctagaaaatcatttttatatagggtgccgtaaattgagttaattggtctgccttttacaacagcttaaatggtaaagctctgag

SEQ ID NO: 55199 - DNA, 248 bp, Glycine max
  Clone ID: PAT_MRT3847_20856C.1
gctcgtcaaccaacctacctctctctctctctcactcactcttccctattttgtaagcaaaccccataaccatcaccatcatcatcatggtcatcattaattgcctccccatgaagcttctttctaatctttctctgactttataaagcttctccttgtgtacatatcaaattaaccagttgggagaggaagtcgcccttgagaggaagtacaaccatgaggaagccagaggcgagtaataataatac

SEQ ID NO: 55200 - DNA, 210 bp, Glycine max
  Clone ID: PAT_MRT3847_20857C.1
ggaagagtctgagtcgctcgtcagtcgctgcaacgggatgatgattgtagccaaatgcaaagccacgtggaccgcccatgccagcgcataggacagcctcgtattacaaaaaagggtttgccatagcaccgcgccggtaaagtgctggaaagggaatcgagtggatgcgattgcggcgagggcaaggttgaggtctagaggcgaggaatc

SEQ ID NO: 55201 - DNA, 1054 bp, Glycine max
  Clone ID: PAT_MRT3847_20858C.1
ccatcgaatagggcgaacttgtatgccaagttttcttctaatcagccctccaaaccctatatatacaaatcgcacacagaaattcaggccatgcaagaaaatcaagatcaaattaacaaccattgttcgttgtggcagtagcaaaacaacacctttttgaaacccgaggttcagagagaaaagaaacattttccaaattaatggggcgttggatgaaaccagaggtttaccctctattggctgcaatgacctttgttaccggcatgtgtgtgttccaactaacaagaaatgtgctcgggaaccctgatgttaggattaacaaaactcggagaagcatggcagtgttggagaacagagaagagggagagaaatatgctgagcatggcctgaggaagttccttcgtactcgaccaccagagattatgccaaccatcaaccacttcttcagcgaggataaatgaaagagtgtcacacgtagtagaataccaaaataattcaacttatggaagaaaaatcaaagtttctaaatctgtcaagcagcttgcatatgaactttgtcatattacgtgttgtttgatgtctcttcgcgtcttgtaattgtcggcatcaaaatgaaaaataaaatttttgtataattttgtttatatataaatcattgctgttcttacttttaaaaaaaaaaaaaaaaatgaaggcccaattggagggtgctgaaatgggtgttgcagctgagaacggtggctgcaactgtggatcaagctgcacctgcgacccatgcaactgcaagtgaggtcaagatttataaccttgaagcagagataactgtaatatatgtatcaacaaataataagaattacgtgttgtgtttaataaagtgatcatggctcgaatttgcaaattcaaatgttctaggatatttgttgcgagtgtttgaagtatggttgcttagtgtttggttggtctatcataaatatgtaaatttgaatcatcaatctctgcttataaatggactacttttggtgttatatgaataagaagtttgttgggttactac

SEQ ID NO: 55202 - DNA, 357 bp, Glycine max
  Clone ID: PAT_MRT3847_20859C.1
acatctggtgctgggtaaaacgggtggggagcgatccttcttgagtgagggaaacaggagccaagcccttctggcctctgctattgggggcaaaatggctgctggtggctctgaaactcccacaagactcatggcggtgactgctgcggcaccaaacaagacatggctccctgttgttagaggtggaggcaactctcgactacccacaatggcttgatggatcgctaccacatgactatgggattgatccactaggccttgggaaggacccatcattcctcatatggatcagataagctgagcctcattcatggtaggtggtcaatggctgcaccctaggaatctttgtcgggcacg

SEQ ID NO: 55203 - DNA, 208 bp, Glycine max
  Clone ID: PAT_MRT3847_2085C.1
tcctcattgccacgagagaccgcctaagcccgcatgttctcgttcggaacactctccctgctatccgctgttcacaccctccctctcacatggtaaaccctcaagctacccatctccgtctgaacacttggtctcccctttccttcatttacacctttcactggtatcccacctatcaacttctctgagactcactttctgatataca

SEQ ID NO: 55204 - DNA, 442 bp, Glycine max
  Clone ID: PAT_MRT3847_20860C.1
gggtgacttgttttctcctctcatttttttttttgcccaagaaaaaaaagccggagcttttagcgctttaaaaaaaaaaaaacccccccggttaaataccccaaggccccccccaaacaaggaactgggggaacacttttatcctttttctcttgccaacctccccttccttacaagatttgtttcaccctgacccacaaccccgtggtgtgcgcgagcaaacaaggattacccccccctgacacaagacccgccccccaagctgatttcccccatgtattccccatgcttacagtatttgtcaggctaaccctaattttggttttacgggggaggtgcccgatccccaaagggccttaaaccccccttctttccccccccgacattggaacccgggggccccgtcaaacctaaaaaagtttgcggggggggggggggcagt

SEQ ID NO: 55205 - DNA, 129 bp, Glycine max
  Clone ID: PAT_MRT3847_20861C.1
gtatattctcaagtaacattaagggtgtcaaacttctaggaatgttggacagtcattggtcagcatacatgtgatagtgcagcaactaaagttcttggcatctcgttataagcaacctcgctattccta

SEQ ID NO: 55206 - DNA, 296 bp, Glycine max
  Clone ID: PAT_MRT3847_20862C.1
cccacgcgtacggatctagatcgcgagctgcctgccccttgtttttttttttaaagaaagcactgtatgcaaatacttagcgagcgaaatcttctggtaacaagcttttgtgctacttttaatgacagcgtatcacagctatgatacaggaacatttcatcggaagatgctagctcattgtcgagtacaactgtgtcatacacaactacttatacgtggacactgaatcctacctcgcatcggaaacatgcacagcacagtcagacttaacgtcaggaatcccaacactgacacat

SEQ ID NO: 55207 - DNA, 320 bp, Glycine max
  Clone ID: PAT_MRT3847_20863C.1
taccgagcagtattcctcttaagcttgctactgagtttccacactgcataccttaggtcttccgaattcgaagttaatttgcaagatggctaaggaaaaggctcagatcaacattgtggtggttggacatgtggaccctgaggaggcaaccaccatgaacgagctgaataatccagatgtggagaaaaaaactccacggcatcgacgatgagcgtgtgcacggacggcctgcagaggccaaccagaaacaaaaagcaagctgatcagctctgaccctaatgaaacaatggcgtcaacactgagcacgcgaagctggcgaa

SEQ ID NO: 55208 - DNA, 283 bp, Glycine max
  unsure (1)..(283): unsure at all n locations
  Clone ID: PAT_MRT3847_20864C.1
agatgatagaaggggactngagaggagaggngtggtganggtnggggtaggggtctttaaganaacaatggnggtacctgacaagtaaaattgaaggaggagccctgaaggaccgcgcgggaaaaggcactgggcaagggcgaagtgaagctaagactacctagcgaaccgcggcaccgagtgaagtagtagtgacggaaagaaagggggtggaggaggaagatgcgcaaacctgaaccacgccgcgttgtcggataatacggtgaatctacttcgtacaata

SEQ ID NO: 55209 - DNA, 151 bp, Glycine max
  Clone ID: PAT_MRT3847_20865C.1
aagcgggggatatgatctggtgcgactaaacgacagataggtactcgtgtggatattgctacgtaaaaaatcggaggcttgtatacatgcgaggggggggtccattataattatcgaggactcaagaggcctcgacatcaaattcaaaaga

SEQ ID NO: 55210 - DNA, 297 bp, Glycine max
  Clone ID: PAT_MRT3847_20866C.1
caaccaaaaatggcctcattcattctactttggatttaaaagatcagccccaacccatacaaaacagggaaattgcatactttagaggcaaaaacagaccatttggacaaatataaattcgttcatgggacaaatttttcactttacagttaaaagccccccccttaatcatatggcattcgaaacaatttattcccatgtatgggggcataaaggcaaacttgtaaatcctattataaaaagcaacaccactcgacttatttagagttaggggacacattttccctcaaaaccttg

SEQ ID NO: 55211 - DNA, 1013 bp, Glycine max
  Clone ID: PAT_MRT3847_20867C.1
cgatcacgcagaagacgaacttccatgtcgaagacctgaacctgttccctatcgacaatggccacaagaacaaggcgcataagctcaatgctggatatcatgagtgggacttcagcttcaagctgccgtccaacttggatcagagcgttgaggggctccccaccaattgggtcgtctacaacatcaaagcatctgtagatcgcggctacatgagcaaggcgctctctgcctcaacgcacattcgtgtgattcgtaccctgggacgcgatatgctggagtcaatgccgatggagcagatcaacgaagatatttgggcgaataaattggcctataagattactgttccccagaagaactacatcgtgggaacacacatcaaggccgacttcgtgctgataccactaagaaaaggtgtggagatcgcgacgatcaagatggaactcatcgagtcgcgccaactcttcgctgattatgcgggccggcgcatcagccaccagcaagacgtccaggttgctgtcaccgaaggcgatatgccagccgactctgcgcaacgggtgcccgatggtgttgagaacggagacgagcttttcgacgagtcgcatcgctttgccatgacgctcgaactgccgaaatctctcaagaactgccgccagtccgttgacacagagaacattcgcttgtcgcataaattaaggctatacgtcaatctgaagaatcctgaaggccacaccagtcaacttctcgtcaagaaccacgttcacctgttcatctcgccaaatatgccccctgcagaggaccaaagtgttcttatcgaccaacatatgctcaaccagcaagcggtacaagatgaggtcaaccagaatgctccaccaacctatggactgcatcagctcgatgaattgtacaacgatatcgatccttcgggcttcatgacaccaggcggctaccacagcatggtgggcagcggtgcaaacacacccttctatgcacagagccgcagtggctcggccgag

SEQ ID NO: 55212 - DNA, 571 bp, Glycine max
  Clone ID: PAT_MRT3847_20868C.1
gtccggattcccgggtcgacccacgcgtccggaaaaccgtgactcaagtaaccctggcacatctaaaggacatgcctgcgccttctaccctaaccgtttggttatcgtaacttctcactgccaggattggggtacagacggcggcaccttgattgctgataggaagcaagcgcatgccaggctcttagttctgttagaggcaacgtgtgaccacaacagttatggaggaaatactaggattacttccattggtgctagacagtacaactttcgctatgaccaatccgaattttgacggcaaaggaacatacttgatattgaatgtcagagatgcatttctcattactgatttgaattctatagacaaggaccccactagaggctattgacttaactaactcaaatcctgagtgccacacgtttgagcaggatgctaatgatgtgcatgattagcttattggttagaactttggcgatgactactcagtgtcattgagacagcaattacacgatgattgataagaagcttgttgcggcccacaattataacaaagattggcctgtcaataac

SEQ ID NO: 55213 - DNA, 346 bp, Glycine max
  unsure (1)..(346): unsure at all n locations
  Clone ID: PAT_MRT3847_20869C.1
tgtacggattagagccgannggcaaaccctaaggggtctgaccactctgtatcgctttatacctctacgcacaaccaccgcggtggtaggactaagtcacgggaggacaagcacacacgggatcacagctcggggctggcatacatgcatccaaccaaaacgagtcgcagacatatgaagggcgcgaacttgtcacacgatacgacaaggagtgtgacacttgcgaagctaggggcgtgcaagagaatgacacgagaaagcatatgaacatacagggaaggagaggccatactgtatggctcacagacgaatgaaggctgcctgcaagggacaagacggtcctcac

SEQ ID NO: 55214 - DNA, 578 bp, Glycine max
  Clone ID: PAT_MRT3847_2086C.1
ctcgagccggttgagatagagacatggtgccaaggtgaaggaagggttgggacaaggcgtgattttatactgaaagactatgcaagtgatgcagtcattggaagggcaacaagcaaatgggtaatgatgaatcaggacaccagacgactccagaaagtttctgatgatgttaaagaagagtatttggttttctgtcctcgagagcccaggttagcaattccagaggcagatagcaataacttgaagaaaataccgaaattggaagaccctgcccagtattccagacttggacttgtgccaagaagagcggatctggacatgaatcagcatgttaacaatgtcacctatattggatgggtgcttgagagcatgcctcaagaaatcattgatagtcatgagttgcagagtattaccttggattacagacgagagtgcggacagcatgacatagttgattccctcactagtgtggaagaaatccagggtggtgccgaggcagtttcagaactgaaaagtacaaatggatctgccatggcaagggaagacaaacatgaacaccagcagtttctgcatctact

SEQ ID NO: 55215 - DNA, 267 bp, Glycine max
  Clone ID: PAT_MRT3847_20870C.1
cagcaaagggcggaactcttttataaataatgcaaccatattttttacatttaaaaggaaacaaaccggtccactttttcctagcaattactaatgcctccgcgagcagttgtcataaaatatgatggtgcgtgaaaatgcctcaaccactaataattgatggcttgcaaaaaaaaaaattgcattgactatagccattaactgtaccaattgttaaatgcgtggccccacccattaattaaccttatcgcccatgttttatatgac

SEQ ID NO: 55216 - DNA, 247 bp, Glycine max
  Clone ID: PAT_MRT3847_20871C.1
ctctttccttctcttcaattcagcttcttcagcttcatcgaaatcctgttctaaccgtatatcgagcttttcctttagtgcctgagaagccgcgtctctacttgcgttgactgagggagacgatgtctggtggcacacagaatagtctgataaaagcacttggagccctttaggacactacatcagtctcgttggctgatgtcaacagtgattacaacgaattggtcattgctatagttatagccac

SEQ ID NO: 55217 - DNA, 1109 bp, Glycine max
  Clone ID: PAT_MRT3847_20872C.1
agctaggaatgaggctcgagccagaatcaaatgcttcatcagagagcatttataatgctgcattggctctaggcattgcaaatcaacttaccaacatacttagagatgttggagaagatgctagaagaggaagagtatatctccctctttatttgtcccttcatgaatttccgccatttgtctgtaactcttccgcggaaaatgtcatcatctgaaaggccagcttgtgccaattcatcttttcgtatcacccaagattggatttttatttatttttaattgataattgagtgatgcatttgctacttgaggttccattgctgaagtggttgtggtattgaagtttttatttgttcagttgagatactgaagtttgggtgtgtaaatttctactcataatataatttatatatcaaattaatcttaatcttgactgcccctttcaaagctaaaattgacatttccttctcgaaaaacgctccttatacacaagaggaatgaagatgaccttgccgggtaaccataaacaaattttcctgaaaaatctttggcattatctaaatattcattccaaattaaacatgatatgataaaatgacatctgagtggtaaaacaaattaaggaaatgaaaggtgaggatcagaagatgaccatacttgccgagaattccctcctctctgagacccaacattgaagacatcaacaagagcttcaagcctctccattctccaagtttggcaactcagtgaaagcagccttccgcggatctgttccttgaggcatattgctctgcaccatagaaacttgcttgctacattctggatggatctttgctgctgtaaggatcccaagaacaataactggcccccttttcatcactgctccacaccatgagatcatccaggtctgaacctgaaggagtccaagacatatttcacccaaatcaacgctttctccatagttgccagaaagaaaggaaggcaggctgcagtctgccatcgttgactattcaggccgcccaaagaagatgactagaccatgctttctagtcaatcaagatttaaaaggtttgaagaaaaaaaattataaaattaatattttttatttt

SEQ ID NO: 55218 - DNA, 201 bp, Glycine max
  unsure (1)..(201): unsure at all n locations
  Clone ID: PAT_MRT3847_20873C.1
cccgacncttncaatttactaactagctttctatatcaacacgcgcagctctaaaaaaggggcaagaatgattagcgcgtggtaattataaccatagcttctctacttctgatctcttcttaaagtgcacccaatgaatactaaaattttaacaaaaaagatgcgaaccatgctccaaatgggctatatgatagcaaatgg

SEQ ID NO: 55219 - DNA, 434 bp, Glycine max
  Clone ID: PAT_MRT3847_20874C.1
ctccattacagtattctttaacaaacccgaaccaaaacccagagaggagggtattattaaaagagggcttggaaacaccataacaaccaagaaaaagttccatcaaatcatcatggataatatcaaacataataactaataacccataaaactacattttcaatataagctcttttaattacaaaatatttcagatctctcatacaacatttatttatcaaaaatcacacacatatcgaaaatactaatctctaacctaatattaatactggatacaattatcaaaactttttatgtctactataccaaaattcttataacataaatatatactatctcaataataaacaaataaaatttatcattacttgttatatactattaataacaaaatattaatcaaaatatatataaattttacttctcaataatta

SEQ ID NO: 55220 - DNA, 387 bp, Glycine max
  Clone ID: PAT_MRT3847_20875C.1
aattcggcaccagatcaaattctctgtaacaaatgaaagggagaaaaatcagtgcatcttgtttttcactgtacaagctattggaacaaaaaaaatatagtagcaaaaaaaaaaaaaaatgagagacagaaaaagaacaaaaacttctagtcattgtgtagctgtttaaatcgagtttatttccattacaaattgtattctgccatggcacagggaagaaagaaacttctggaggcatctattgtaaacatggggtcaccaaatgaaccattgacttggttactccccttgatgacttgaattacttcataatattctggttgctttcctaaattaaaaaaaaaaaaaaaaaaaaaaaaaaaaaaaaaaaaaaaaaaaaaaaaaaaa

SEQ ID NO: 55221 - DNA, 411 bp, Glycine max
  unsure (1)..(411): unsure at all n locations
  Clone ID: PAT_MRT3847_20876C.1
ctaaccttgggcacaggtaaccaacaatggcggcggcggcggcggcaaagcgttgccacggcgaagtcctcggcctcccccgcgactgcgcccccgacgagatccgctccgcctaccgccgcctcgccctgcagcgccaccccgacaagctcgtgaaatcgggtacgactcccaccgctcccaaatcctcttctccgaccccaacaccgtctccaactccttcgtccccgacctcttctccttcttctccaacaccgtctattccggctactccgacaccgcaaagggattctacaaggtctattccgatgtattcgataaaatccacgccaacgagatcaatttcgcgcgtaaattgnggctgggtgttgatgcggttagacaggcgcctgttatggggaacttggacag

SEQ ID NO: 55222 - DNA, 2201 bp, Glycine max
  Clone ID: PAT_MRT3847_20877C.1
aattcggctcgagcgcacttcccataataacaaggatttggagttttaccagaagacgcaaacccggagccctaaccttgggcacaggtaaccaacaatggcggcggcggcggcggcaaagcgttgccactacgaagtcctcggcctcccccgcgattgcgcccccgacgagatccgctccgcctaccgccgcctcgccctccagcgccaccccgacaagctcgtgaaatcgggtctctcccaagaagaagccaccgcgcagttccaggaactccaacacgcctacgaagtcctctccgaccccaaggaacgcgcctggtacgactcccaccgctcccaaatcctcttctccgaccccaacaccgtctccaactccttcgtccccgacctcttctccttcttctccaacaccgtctattccggctactccgacaccgcaaagggattctacaaggtctattccgatgtattcgataaaatccacgccaacgagatcaatttcgcgcgcaaattggggcttgactctgatgcggttagacaggcgcctgttatgggtaatttagatagtccctacgcgcaggttaccgcgttttatagttattggttagggttttgtactgtgatggatttttgctgggtggatgagtacgatgttatggcggggccgaaccggaagtcgcggcggcttatggaggaagagaataataaggtgaaggagaaggctacgagggagtataattatactgtgaggaggttgggggattttgtgaagaaaagggataaaagggtgattgatattaaggttaagaggagtgtccagtaggaaaggaataaggaggatgaaagggagagggtggaggagagggagcatgagttatagttttattgtgtgctgtgtaagaagaagtttaagagtgagaagcagtggaagaaccatgagcagtccaagaagcataaggagagggttgccgagttcagggattcgattggtgatgaggaggatttggaagaagaagaagaagaagaaggaaaggagggtttggaaagtgaggaggatcaggttggggtgaatgatgagattgataatgggattggtgatttggaggcaaggattagggatggtgttaatgttgaagagggggagactaggaatgggattgaactgaatgatggtgatgagttttttgatgcctcacgtgtgaaggaaggggaagaggctaatgtgaaggttaattttcgttatgatggcaatgatgaagatgatgaaaatggtgttcttgaagcaatggtggctgggcacaagaacagaaaaccacgggcttcagcacacaaacccaaggcttcagtagccccgtcgccaattgaaaatgagaatgatgagcttggctctaaggaatataacaaccggaagggcgcaagaaagaaacgtggagccaagaaagagaagggtcggaaaaattgggaagaatctcagggggctgcttccagtggggattatgagaatataaacagtaatggaaatgataattctcatgcagaggagtcctgttcccaacattttgtggaaaatgaggataatggtatagagaatgagcaggttggtagagatgacaagatttctaatcaaccggctgataaaaaaggtagagataagaatatttctcatcaaccggctgatacaaaaggagctggcaaggacacaaaaactaaagcaaaagtttcatccaaaggaagaaaaggaaaggtgacatcaaagaatgttggcaatatttgtgaggcgtgtggagaggagtttgattcaaggaataaattacataaacatcttggcgattctgggcatgcgacaataaaaggtcgataaaggaaactacagttggaattattcaattcaagcgttcccccgagtcttgttccagttccagatattggcctctgctccaattattggtccattctttaattcttaaaatatattgttaaagtcattttcaagtgatccttaggcagaaagcattctgttatttatgccacagtttagaaagatatggatacaggatctgcacaaatttgacgggatccctttgtatgtctagatatttttcaattttagctcccaaacaaacaaacaaaagtgtttaaaagaagtactatgatgatttagtaatagagattgaatgattctaaattttctttttaaaaac

SEQ ID NO: 55223 - DNA, 747 bp, Glycine max
  unsure (1)..(747): unsure at all n locations
  Clone ID: PAT_MRT3847_20878C.1
ctctggttttatatctaggaagcaatgtaccttttcaaaaggattggctgttcacaacatgcaggttgatgcaactgctcctgatgatgaaagaaaatattccggggatgtatgggatttacctgatctgacaaatacattggagctagctgatgaatttgacaatcactgtgtatctgaggaagagtatgaggttcatactgtttctggtatagattataatcaatattttggtggcggtgtaatgtactggaacccttctgactatccagggaaaggtttctcccggcctccctcgcttagctctgatgacagtctatgggctttgcgtgatgctgacatgaataggacggtggatgatatggttgctttctcttcttcgtatagtacgaatggtttaacatcacccactgctgctacattttgttctcctttcgatcctgtaggaactgctacccagactattggttatgtgatgtcaggtaatgaagtacctggaaagatgctgcattcttcttcagttacagatgcagcagtggatgaagatacttctggttctttgggtaataatttgcctggagaagttgaaggaaaggcaggtgattcacatccatatcctattctacggccaataattattcctaacttgtcagggnaaaggtttgatcataaaagtcccctgtgtttcctccctccnagcgggagcagccctcgtataaagcggccaccatcgcctgtagtgctttt

SEQ ID NO: 55224 - DNA, 1486 bp, Glycine max
  Clone ID: PAT_MRT3847_20879C.1
cccacgcgtccgcccacgcgtccgcccacgcgtccgcaaaaccccgctttcgaggcgcaacagatagcaatagcataccttcgttcatcttcacttcacgctctcttggaggtagctagtcactcttccattttcgtttcaaaggaagaagaatcccaattctctctcgttgggaatgaaccttctctctctaaccttgccacttccccttttttgttcatctctttctgtaacgagacttccctcatttccctcttcatacaagtgcacatccggcgcagttttaaggagatgtgtcaaagaggaaaaggaagaggagcagcttctagaagggatgccaaaggagtactatgacgatgaatggcaagcccaacaacgtgagaagaccaaggagttgcatcggctacggatacaggaggaagaggaagaggaaagaaagattggagagtatcgtgaaattggcatgcggttgaaggaatacccagaagatgaacgtcataaaagcaaggaaattggtttcgagctttctcagagctgctgaagaagtagaagagagaattgaggaagctgccgagaaaggagaactgactgaacttgttttaatggtcatatggaatcgccttgatcttgctcggcgtgatgaagaaaaggatgccattagaagtctggatctgttatacagaagggttgagactgagattttgaaacgagaggctacccctgcgatgagattgctcaatgatcttttgattatgtacgacggctataattttgaagagtggctaaagaaatgtaaaaaggtcatgattgatacgtttcctcgggaggatccattcagtatccttgttccaccaggatttgagtcattcgacatagataagcatcacgggccattgcgaccatcacttgaagtcgataatactcttttgagggtggactttgtaagagaggtggatgaattgctgcaagaggttcattctgaagagaatggagtacaagaatgaaccagggtttgatcctgaatctgttgcaaatagattgaaacaacaggagaagcaacaaacaatacgccaagtagaagctctgctggatttagccattggtttgaaatggtaactattttgtcctagcttgcactttgattcatattgattgagtcatctgacagtacatggttgcgaataggaattggcaagcactacaattgcaatccaaattagcttcattttatggtatccttttaccttctgaagtacgtaaaattatagtaccaaccaaaacaagaaaaaccagaacatacaatgtaggcatggcaatttttggtgatcttattgtgaaggtacaggactacaggcgtgttagaaattaagcttttgtgtttccatatcacaaccttaatgtacatttgctgatcccgtacttcataaatcaaagacttcgaagttaaaatttcaaatttaaaaaaaaaaaaaaaaaaaaaaaaaaa

SEQ ID NO: 55225 - DNA, 317 bp, Glycine max
  Clone ID: PAT_MRT3847_2087C.1
ccttgctttaaccgcactatgaggaattattcattcaggcttaggagggcagcccctcctatactaagcgttgccgagccaacatgtctgatgtatacattccctgtatgatcttacaaaatgtagaaaggattctgtggcacaatactattacctgccttgatactggatgggatcatcactatttcgcttgtgtggtgtagctttttattaaaaggaaatcatctgttgaattgaaccaatgtcgctccacactttctgatttatagaggggttagttgtggaccgaacgggcttgctcttttttgactgtagca

SEQ ID NO: 55226 - DNA, 385 bp, Glycine max
  unsure (1)..(385): unsure at all n locations
  Clone ID: PAT_MRT3847_20880C.1
cggcgggcgtcctttttttttttatccttaacccacatagacaggagggaaaattctccaaagaggaagaattttccaagtctaatgttttccgaatgaccacattccacctttggcaaaattaaattaattataacccaccccccttataaaacaacagcaacatagatcagggggcccagagctcagcgggatatgtgcactcttaactctttctaccccagggtgtctggttaaaagggattcttgataagagaagcgggagaaggtgtcattggtaattgcgctccctgggcccccggcttcctgtcccacctgagggagatataggccgggggactcccaactccttctgtttccgtacccttccggttccttanattaa

SEQ ID NO: 55227 - DNA, 163 bp, Glycine max
  Clone ID: PAT_MRT3847_20881C.1
ttcataatgggtgttttcacattcaaggattaaatcaactcccctgtgactcctgttacgctttactttgatctagtgacagatcctgacaacttcataccaaacgctcttaattccttcaaaaatatttaaaaccataacttaaatggtaccctaagaacca

SEQ ID NO: 55228 - DNA, 757 bp, Glycine max
  Clone ID: PAT_MRT3847_20882C.1
ttttttttttttttttttttttttttttagagcacaacaggcatctttataagtagagttttgaatcagaaactacctggggaaagcaagttattgtaacatagaaagataaaattttaacaccaatgaataaaaatggtttattctactaaaaatacatttgtcaaagatatatcataaaaaggattgctcccgttttgtctcatacagtggcaaaccctactcaaccacggccaataagtcacttgctttacagaagcagtgttttgcatcagtccccaaatccacctcataagcattcatgtcagtgaatagtacctttgttccagcctttagttctccagcctcagcaccaacagttaggatttctcccacaagatatcgctcaaatttaacagctgacttgggcagcaaaactccaccaactgttttatctgatagctcctccaaacgaacaagaactctatcagcctgaggtacaaccttagtgggttcccattttttggtaattgcattgatcttcagagagctcctctgcaaaaatgagggtctcttgtcagagaaagtgatggcattagttttgtgtaggaagggagttggtagggtgagaaacgttgatgccatggataagagtgaagagaccaaacagcagttcgagggagcaaagaatggattaaggaaacgaggttaaaccctcttaggtttatctaaagtgttgctaaaggccaaagaaaagacaaggtgcgcggacgcgtgg

SEQ ID NO: 55229 - DNA, 480 bp, Glycine max
  Clone ID: PAT_MRT3847_20883C.1
cttctgtgttctctctgttgctctaagcaaaatatatatttattatgtttcaatgtcacacaccgcttacaacgggagtttttgatgatggtggggtgggaatgatgctatctatactctataaacattttgattatctgctatctgtgatgagggtctgactcttttagacacacatatatgtgaacattgttgtctacccagtggcacccaatatcatcataactttgaatgttaattaaaaaatgatgtgttacgtttgtattttcaacatttgcattataagacactaacttgacttaatctttgtacatgaattcaaatctattattagcttatttgcaagctttaattaaaagttacttctcaactgtaaaagttataaacaacatcataacactctaaaatcttttgattgttcctttcatttctaaacatattgtggtgtgagatgactatcttaaggtgtatgctaatgct

SEQ ID NO: 55230 - DNA, 718 bp, Glycine max
  Clone ID: PAT_MRT3847_20884C.1
ttttttttttttttttttttttttgatcgcaaaaggcatctttatgagtagagttttgaatcagaaactacctggtggaaagcaagttattgtaacataaaagataaaattttaacaccaatgaaaaaaaatggtttattctactaaaaatacacttatcaaagatatcacaaaaaagattgctccctttttgtctcgttcaatggccaaaaccctactccacaacggccaataagtcacttgctttacagaagcagtgttttgcatcagtccccaaatccacctcataagcattcatgtcagtgaatagtacctttgttccagcctttagttctccagcctcagcaccaacagttaggatttctcccacaagatagcgctcaaatttaacagctgatttaggcagcaaaactccaccaactgttttatctgaaagctcctccaaacgaataagaactctatcagcctgaggcacaacctttgtgggttcccattttttggtaattgcatgaatcttcagagagctcctctgcaaaaatgagggtctcttgttagagaaactgatggcattggttttgtgtaggaagggagttggtagggtgagaaacgttgatgccatggataagagagaagagaccaaacaacagttcgagggagcaatgaatggattaaggaaaagaggttcctctgctttggcttattcaccctttgcctcttc

SEQ ID NO: 55231 - DNA, 111 bp, Glycine max
  Clone ID: PAT_MRT3847_20885C.1
catgtacctctgctagaagacgactgatcggtactgatgctataatactactgaatgttacggatgctagaagactacataaagttacagctgctagatgactacataagg

SEQ ID NO: 55232 - DNA, 391 bp, Glycine max
  Clone ID: PAT_MRT3847_20886C.1
tccggctcgagaggaaaactaacttctacagccttgactagagtggctcagagtccatggatccaatccaacacatgttcggcaactttggtgctctcaagctccacgtctcaaaaaccggaaccggtccaaacgccgtcctattcctgcactgcttcccggagatatgggactcgtggcggcaccagatgatagctctcgccggtgccggattcagagcggttcccttcgattacagaggttacggtctctccgacccgccacccgaacctcgtaagacctcatggtccgatcttctcagcgatctccttcatattatggatgctcttgctttttctaaggggtttcttagtgggaaagaactttggagctcgactctgcatatctattt

SEQ ID NO: 55233 - DNA, 772 bp, Glycine max
  Clone ID: PAT_MRT3847_20887C.1
ggctcgaggttggagcaaacctgtgataatgcaaagcgcttggggaaggataatactagttacgccttcatctatggaggtaacgacagtagttgggtgcagaacttcaagatcgcaattggaaaaattgagaagcatgtgatcaacaatgtggacagtaacatagagccctatcagttgggggagagtaaccctgacaatgttccttcattttggatcggccttgatgggaagaagaagaacaaagggtgcaaggacaaagtggactgtgaaattcaagaagttgtgaggaccttgctttgcctcaaacaagacccttcaggatgggttgttcttagtagagggcgtaacttgaagattctgggtcatgctgagcctatgtatcaaactgtgcttgattttgagaagtggaaaaacaaagtgcttgagaaagaaacctttgatgtggccttcaaagaatattatgatgtggttaaggagaaatatgctagtctcccatatgatcatacttcaagtgtcctagcaacaataacttgcccaaatcccttgtgtgggcgcgtgatggaggttacatcaattaattacaggtgctgccatggtagtgcaaacagctgcaatctctgatttctctcgaggaccaacaagtatctttcaaagtttgtgttgcttaaacatgaagtttcacttcaacttttgtttgtttacttcatatatatgcttgggtcctatgtattcacttttgttcgccctttgaatgggggccggaaactaa

SEQ ID NO: 55234 - DNA, 406 bp, Glycine max
  Clone ID: PAT_MRT3847_20888C.1
tcatcgttgcgggctcagaggtctgaaatggctacgcttttgggtttgattctggtggggttcggtctcggggtgttaacagttgttgctgtggaagctctggggttgttatggatcatgaaacggttgcggcacaagatcaataatgacgaagcctacttctcttccaaaaccccgacaccggcactgcttgatccccaacagtctctggattttgcttatagaaagcagggtgtggtttgggttctagaatcaggaaagatttcaaaaccgtcaagggagcaaaaaaggaaaaaggagaccctggaggtttcccctgttaagacgtatggacaaatcaagggtcaatcacttattcttagagaaagcggatggtttgcacacgacgattgaactcaggggctgg

SEQ ID NO: 55235 - DNA, 113 bp, Glycine max
  Clone ID: PAT_MRT3847_20889C.1
cacatactcaaatatatgaatcacataaaagtgcaccattaggtcatattttcacaatatttcatcaagttaataactttaaggagaaatgatacacccccatttgaacgcac

SEQ ID NO: 55236 - DNA, 356 bp, Glycine max
  Clone ID: PAT_MRT3847_2088C.1
ccacgcgtccgtgcgggtgcgagaagacgacagaaggggatccaaaaagaaaaatggaaatgaagaatacaatggataggaaccctcaaagtgatgcaccaatcataaaacctctagatcctgaagaattcaagaggcaaggctatatgatggttgatttccttgctgattatattaggaatgttagccattatcccgttttaagtaaagtagaacctggttatcttaaacaaagattaccaacttctgctccatgtggtccagaacccattgaatccatacttaaagatgtgcaagatcacatcatccctggcctcacacattggcaaaggcctaatttttatggctactttcct

SEQ ID NO: 55237 - DNA, 396 bp, Glycine max
  unsure (1)..(396): unsure at all n locations
  Clone ID: PAT_MRT3847_20890C.1
gcacgnaagctcggaattcggctcgagctcgagccgattctgctcgatggtgggaagaaatattctggttctttttcgtaccctctacccaacgaaagctcatagcaataaatggcgggaacactctcatcactatctatatactcctataatctgcaccaacacactagatcaatgcattcaaaccaagccataacccgtagcatatactcgacctttccttcctaccacttaagggatttacaacgcatgctcagtcttcaaaatgtaatgcactatataatgcgccaccgctctcacattttaaagccaacacgaaagctaaaacagtgatggctttgacgaatacgaaatataccaagaaatattgttgcagggtgagatacaggaactctc

SEQ ID NO: 55238 - DNA, 389 bp, Glycine max
  unsure (1)..(389): unsure at all n locations
  Clone ID: PAT_MRT3847_20891C.1
tggaattaaaattcctgtttctacatttaatcattttnttccttccatggcggttcggttccctctcctattttagaaggcctttctttggaggattcattgtcgcatcttgtcaaatgggcatttaaagagaaagaagaataagaaaagtatcctcatttggtaaatattggcaaagaaattgtgaaaaaatgcagaggcattccatttccactgagaacgttatggagtttgctattttcaaaatttgatgcatatgagtggcaatatgtgagaaacaatgaattttgtaattttccaccgtcaaagatgacattttaccagcacttaaactaaactacaatctcttgcctatttgagacagcgtctttcttttgttgtccctcccc

SEQ ID NO: 55239 - DNA, 728 bp, Glycine max
  Clone ID: PAT_MRT3847_20892C.1
gcatagtagagaagcaaggtgctgagtaccaagagatagctaaaatgggacttgggactctgccactgaccccttcttacagcggtttctcttcaaactcaggacttatacatgacaccaccaatcacagaagggtcaatagaagcatgaaattcagagtttcagcaaaacaagagaagcaagaagagaagaaaaagcaatctttgttcagcagtgtgactgaagctcttgatttttctcaagtgagatccgctgaggatgctcagcttatagaagaggctagagaagccacaaaatcaggagaaagaatgagtagggaacagtatggagctcttagaaggaaaattggtggtacatacaaggattttttcaaatcttacgttgaagtggacggggcatatgttgaagagggctgggttgacaaaacatgcaaggtgtgcaagaaggacactaagggagaggcaaggcaagtggacaagtttggaagatatgttcatgtagcatgtctagagaaggccaacacagggaacttctttacaagactgttttctagataaagagcagcattcaagagtcatggcatgaaatggtggggggaaaactcattttctcatatagtctttatacccaatgattctatttagtcatccaattatcacattagatattcagcttgtgtgtattcttgtatacaagagtgagaattaattatagtttccacgttggtc

SEQ ID NO: 55240 - DNA, 763 bp, Glycine max
  Clone ID: PAT_MRT3847_20893C.1
aggggcggtgaaagctatggttgtggctttggggaatgaaggagttgctgaggaagcagctggtgccttggccttgattgttcggcagcctgttggcgccatggcggtggtgagggaggaagcagcagtagccggattgataggaatgatgcgttgtggaacgccgagaggtaaagagaatgcagttgcagcattgttggagctgtgcaggagtggaggtgcagctgcaactgaaagagtggttagggcgccggctttggttggattgcttcaaaccttgctctttacaggtacaaagagggcaagaagaaaggcagcttcactagctagagtgtttcagagatgtgaaaatgcatctctccattatggtggattaggtgtaggttattcatttgctagcgattcagcttcaaccagaaatactacaacctttgtgagtgacgtttcacttccaatgtccatttctgttcctgttttatagtggtaatactcattctcatgtttgttgtgttcccgatttttgttgtaactctattgattctttcattgaaatttaaagtcatcaagtataggaataccagatatgtattctaagacttagagaatgatgcgttgttgagcagttagcttcaacccatttgtaatgagttattgccagaaagaatataaagtgttctaaagtggaattattagaccatttcaggcgttctattttttctgtgctttactcctcccgttggcaatttattggatttttaagagt

SEQ ID NO: 55241 - DNA, 580 bp, Glycine max
  Clone ID: PAT_MRT3847_20894C.1
ccacgcgtccgccggtgtatgatttccacttaacaaacaggacattggtttagatcaaatgtttctttcaattaattcgaatttgttgcaatcaaaatttcttagagttagtgcagtgggccaattttcgcaagctagaatttaattgcatgtgagtggttgaatttagtgatttcaaaatctcaattgctcaaatcttgtatacatgtttattaccagaagatattaatgatttttttttctttcacaatttatatgtttaggtatcattcaagttcaattaaacctattttcaacatcaactcaacactcatcttacttctacatttatgtattgaaatatgtaaaatttatattcaacgaaaatgatcaaataagtttccaacacatgaaagatatgtgtatatatgctcactaacgaagacgcatcatatatatacatggcgttacacaacaacacgcttcctaaatatcaaataacaattgattagagatcacaaaagagaataatcacgtaccaatataattttgttttcacacaaatatgaacctttttgtagaagagaaagatgaagcatat

SEQ ID NO: 55242 - DNA, 202 bp, Glycine max
  unsure (1)..(202): unsure at all n locations
  Clone ID: PAT_MRT3847_20895C.1
gacccacgcatactatcaacccttccttaaatttctatcaaattncctaannnnccacttctccgagctttggcctatttatcaactcctttcccattcaatttatactggtcacttattacttctatctttttttctttcccaactctttctacttggcccctcattaaaacatctttttcataaacaactcacttttcct

SEQ ID NO: 55243 - DNA, 573 bp, Glycine max
  unsure (1)..(573): unsure at all n locations
  Clone ID: PAT_MRT3847_20896C.1
agaacttaaatcnnngnntataggattgtcgagttgatgaataattttacgatacatccgctctatatatagtgtgttgatacatcgttaaaagaatttaattcaatttaagtattgattatgtcaaaaggtttatcttcaaaaattcaataataatacctaattaaataaaaaagaatgataagaattaataagtattcttaaatcatacagaaatataattatataatgcattttaattattttatcattattgctaataaaactaattatttattattttatcaataaatattctccagacaccccgttagttagtattcgtttattgttaatttgatcaaatatgggtgatttctaggaatcatgtggacaatttcactggaccacacacagtgtatatgaatgacgaataaggttttcaattgttaattgcttcaactacaattacgcacactatgttactacaattttggcaaacaaattaattttcttttctttgttttnnntttggccattcatattaaccataannnnnatttaaaaaataannngttgtttaaannnnnacta

SEQ ID NO: 55244 - DNA, 280 bp, Glycine max
  Clone ID: PAT_MRT3847_20897C.1
attctcgctggtaacttcagtatatgctcttcctttgcctaaaccagggggtgaatttgttgccatgctgacatcggcattgactgccatagttgttctatagaagggaagacagatggaaaacgaaacagatgtccttggtactgctgcggcatgaggaaccttgcgtttcgcttctaatctgtatataatcgagcgatattcactgggggcgacttgtaacgggggggcacgagctcaccttggtaaagaattggcattcaacacatcggtaaactat

SEQ ID NO: 55245 - DNA, 678 bp, Glycine max
  unsure (1)..(678): unsure at all n locations
  Clone ID: PAT_MRT3847_20898C.1
ccacgcgtccgctatcttctgcgcatccaatgccctagttaattccctccggttcctcaccacaatgtctaccgacacctccttcccggaccacaagctctgcggtttcctctgtgcggttctcacactcactccccgcgatgacacggacaccgaaatagccttcgccgagcgatgcgaaatcttcggcgaagggggcgttgtcgggttccggacccagaacggcgtcgttttggacccggtgctcgattcctcgcaatgcggcgacagcggctccaacaagacgaagaggaggaacaagattgggatggtgaacgggagcatgagcgtggtccaccagctccacgctatggtcacccgcaagttcatcaaaatcgacgctcgcgtggtctgcgtcgaggcgcttcctaggattgtggtgctggttgatgtgtatgtccccgttcaggtgtggagtggctggcagtttccaagatcgggacccgtcgccggcgccatttttcaccatttgagctgtgattggaacgagaggaagttcaatgctttcatatccaganctattgtaagaagactcatggagaaaatgagagcatttggaacctttctgattggcatgtactttgggtgcaagctccattccgggnggaaggaaattcttcagggaaaggctatttgaac

SEQ ID NO: 55246 - DNA, 189 bp, Glycine max
  Clone ID: PAT_MRT3847_20899C.1
cgctaatatttttttttttttttatgagatcgacccctgaacatgtgagtacagttcttttttgttgtgccaaaatttaccacaactattgggaatacactcaaagaaggtaaacaaaaaaagcgaaaaattctcacgacctgagacaaaaaaaatggaccccacggcctggcaagagggagaagagac

SEQ ID NO: 55247 - DNA, 136 bp, Glycine max
  Clone ID: PAT_MRT3847_2089C.1
attagcttgaggggggcaatgatgatgaaaggtccaatactgaaggacaagggccttccaacaatgagaatccgggaacttataaacgttatgaagtacttgccgcaatgtacaaggtcccaaccgaagttaattt

SEQ ID NO: 55248 - DNA, 250 bp, Glycine max
  Clone ID: PAT_MRT3847_208C.1
ctctctttttcgagggcacatgcgcgcacgcgtggactcgatcttgggttagctaaccataacccttgtgcaaacgcaattcgtttcttgtataaccgagtatatcagagatttctggctcctaggggtactattttttacggaaaccaaagtgactatgtgaccatgcctcaaacttggggaataactgacttgtacacatacaaattacttactgcacacaggaatatatgaaaaaggactcaaagtc

SEQ ID NO: 55249 - DNA, 401 bp, Glycine max
  Clone ID: PAT_MRT3847_20900C.1
aataaaaaaaaattaaaaaaaaaaaaaaaaaaaaaaaaaaaaaaaaaaaaaaaaaaaaaaaaaaaaaaaaaaaaaaaaaaaaaaaaaaaaaaaaaaaaaaaaaaataaaataaaaaaggggcgccccttttaaaggaccaaaatttacttacctatggatgaaaaaaaaaatatttttttttagagtaaattaaattaaataaactggccgatatttaacaagttcaaaattgaaaaaacccgggttttaccaaatttaatacctttgaaaaaaatcccatttatgacagttggcataataataaaaagcactataccgattggctttccaaaaatagcgccaccttaattgggaaatggaacgccccttggggggggctattaaacgcggtggtttttgt

SEQ ID NO: 55250 - DNA, 268 bp, Glycine max
  Clone ID: PAT_MRT3847_20901C.1
ctcacatctctagagcctctgttgttgttttggtagctttcctagtccttcccttacttttctcagacatggctagagcaacaattccagaatcagatgttgatcttttagaatttcctttaaatttagaatacttggaggctgaattctttttgtttgggtctttgggtcatggattggatgtagttgctccaaatctgactgagggaggaccccctcctattggtggaaaattggccaaacttgacaactttgtcaaggatgtcat

SEQ ID NO: 55251 - DNA, 2908 bp, Glycine max
  unsure (1)..(2908): unsure at all n locations
  Clone ID: PAT_MRT3847_20902C.1
ccacgcgtccgggggactgttgttcgcagtcgaaagaggtgaagaagcagcagaagagagagagagagatggcgcctcccattcccaaagttctcatggtcgcagagaagcccagcatcgctctctctattgcttctgttctctctcacgctcagatgtttacgagaaggggaagcactgaagttcatgaatttgatggcaagtttcttggatcgcctgcacattttagagtaacatcagttattgggcatgtattcagtgtagattttcctggtaaatatcaagattgggcagccacagatccgttagatctttttcaagctcaggttataaagaatgaatcaaacccaaaggcacatatatgtagacatttaagtcaagaagctcgtggatgtcgttatttggtattgtggttagattgtgatcgtgaaggagaaaatatatgttttgaggttataaagtctactggtttccatataaatgatacttaccgtgcacggttctcttctgttactgagaaagatgttgtgaaggctctagacaaccttgtcagacccaacagagatgaggcgctggctgtagatgctaggcaagagatagatttgaaagttggagttgcctttactcgatttcaaacgagttatttccagggaaaatatgggaacctagattccagagtcatctcctatggaccgtgtcaaactcctaccttaggattttgtgtgcagcggtatttacaaataaacactttcaagccggaaaagttttggagtttgcacccttacataattcaaaatggctatgagattcagctagaatggcaacgtggcaaattgtttgacataaatgttgctatgatgtttcaaaagctggtttctgaagatggacttttggaagttacagaaatatcagaaaaacaggaaaccaaaagtcgccctgttggtctaaacacagtgaatcttctgaaggttgcttcaagtgctcttggatttgggcctcagatggctatgcaactagctgaacggttgtatactcaaggttttatcagctatccacgcacggaaagcacagcataccctccttcatttgactttcgtggtgtactctctgcacaaacaaataatccaacttggggtaattatgtacaagggctacttaccaatggttatcaaaaacctcgattgggaacagatgtaggtgaccatcctcccattactccaatgagatcagcagcagaagatatgctgggcaatgatgcttggaagctgtaccaatatatctgtcaacacttcatagggacagtgtctccggactgcaagtatataaggagaaaggttgaattttccattggcggagagtcctttcattgtacagggcagcatgttgtcaccaaaggatttactgctattatgccttggttggccataaatgataaaaatatcccatcatttataaaagggcagaaaatagaagtatcaaaattggagctctatgaggggagcaccagtcctccagatttccttactgaaagtgagctgatatccctgatggagaagaatggaataggaacagatgcatcgattcctgttcatattaacaacatatgtgagcggaattatgtgcaggtacaagcaggcagaaagcttgtcccaaccacattaggcataacattagtaagaggttatcaaacaatagatccagatctctgcctgcctgatattcgtagcttcattgagcaacaaattactcttattgccaagggtcaggtggatcatcgtcatgtggtgcagcatgtaatccaacagttcacgcagaagtttagttactttgtcaaaaagattgaagacatggatgcattatttgaagcgcagttttctacgctaactgattcagggcgtattctgagcaaatgtggtaaatgcttgagatatatgaagttcatttctactcagccatcacgattgtattgtggtacatgtgaggaggtttactatcttcctcagaagggcacaatanagctgtacaaagaattgtcttgtcctctagacaattttgagcttttgatctgctccatgcctggcccagatggtaaatcgtttccactatgcccatactgctacatcaatcccccatttgaaggtattgaaacactcatcaacacggctaaaactggaacttctggcaagattggcaagggagctggcatgccctgcaacctatgccctcatcccacttgcccaaattctctggtttcccagggtgtatgtgcttgtccagagtgcagtggaacaccttgtctagacccagtaagtgctcccagatggaaactttgttgcaatatgtgcaattgcctagtttttcttgcacaaggtgctcatagaatctccacaactaaagatcggtgccctgaatgcgactcctcaatcatagaagtggacttcaacaagaaaacaactcctctggaagacggagctaccttgcaccatggttgcattctatgtgatgagttgctacattcccttgtggaaatgaaacatggtagaagtttcaggcatatgagttcacgaggaagaggtagaggagcaagaaaaggtggaaggggcagaggacgcgggggtggaaaaatgatggatccaaaaatgagcttccgagatttctgagtaatgctcagttgttcgtcatgtctgtagctgtaacttgtatatgtttctaaaaaaaaagagttatcctttggtttttcagttacattaaatttgttcttggcgtaattatcttgctcactcgatttatgaacaaatagcaaattttgaagcttttttaattttcaaaagtagaagcagacaaatgcacacgttacatttgtgttttacacaattttatttaaagaatatatttcgtggttttatct

SEQ ID NO: 55252 - DNA, 573 bp, Glycine max
  Clone ID: PAT_MRT3847_20903C.1
atggcgcctcccattcccaaagttctcatggtcgcagagaagcccagcatcgctctctctattgcttctgttctctctcacgctcagatgtttacgagaaggggaagcactgaagttcatgaatttgatggcaagtttcttggatcgcctgcacattttagagtaacatcagttattgggcatgtattcagggttggggcagtttatggtgcaaaccatgctatttggtcttgctgcacgttacttgttacacctgtataatcccgagtgttttgagcattcactgctgtttttctatcttttgttgataatctagtgtagattttcctggtaaatatcaagattgggcagccacagatccgttagatctttttcaagctcaggttataaagaatgaatcaaacccaaaggcacatatatgtagacatttaagtcaagaagctcgtggatgtcgttatttggtattgtggttagattgtgatcgtgaaggagaaaatatatgttttgaggttataaagtctactggtttccatataaatgatacttaccgtgcacggttctcttctgttactg

SEQ ID NO: 55253 - DNA, 439 bp, Glycine max
  Clone ID: PAT_MRT3847_20904C.1
cacctctccaaaacttgtagctgaggatattattactcagcaaaaattcatggaagttccaatcaagtatccggcaaaactcaccctgggggtgggtcttacttgtatcatggccaccggtgggttgatttttggctatgaccatggtgtttcaggtaaatccaatcttcaacatttgcttaaaaattcttgctttgatgctaaatccttttctaatttcccattttgaccgtgtttgaatcttgaaacgaggtttgatatctgggtttttatcgcattattatctggtgaattgtgtgttaaggatgggggggtttggtttttaaagacagtacttatcttggtcagaggagatataaggtgtgttgaatggctaaaggaaaaaggaagaggaaaaaggttgtcagttcgatttcttttgctaacaaactaacatttg

SEQ ID NO: 55254 - DNA, 2878 bp, Glycine max
  unsure (1)..(2878): unsure at all n locations
  Clone ID: PAT_MRT3847_20905C.1
cactgccacaaagtgcgagaagcctatcatttaacattttctcttcttgacacacaggcgtcgacgcgtggggggaagagaaggcagtgcgtccggacagacactgccagtgcgagaagcctatcagcaaacagagtcttcttttctttttcttttttctctacacacagtgaaggaaggaagagagtatcatccatggcggccaccagagcagtaaccattgccagcaactccacatgctctctgcttgcaaagaaaacctttgtgggtggcactgctctttccctcaacaacctcaaattttgtcgtactaggaggtcttacacctgcagagccatctacaatcccctggttgtcgtcaaggaagaaggccaacccgaaacctttgattatagagttttctttgttgacaaatctggcaagaaggtttctccctggcatgatattcccttgcggttaggtgatgatatctttaacttcattgtcgagattcctaaagaatccagtgcaaagatggaggttgccactgatgagtctttcactcccataaaacaagatacaaaaaaggggaagctccgatattatccctataatatacactggaactatggcttacttccacaaacatgggaagatccatcttttgcaaactctgaagttgaaggagcattgggagataatgatccagttgatgtggttgagattggtgaaagacagaggaaaataggtgaggttctcaaggtcaaacccttgggtgcattagccatgattgatgaaggagaacttgattggaaaatagttgcaatttcattagatgatccgaaggcgccatttgtaaatgatgttgatgatgttgagaagcattttccaggaactctaactgcaattagggactggtttagagactacaagatacctgatggaaaacctgctaataaatttggacttggcaacaaggcagcaaataaggattatgcgcttaaggtcatcacagagaccaatgagtcctggaataaacttatcaagagatcaattcctgcaggagagttgtcacttgtgtagagatgtattgggggaatgtctattgttcatgccattgcttgcattttctacaattctatttatgaagtagcaaatttttctattgagcttcccagttataactttgacatcaatgtccatttggccaggcattagttcaataaatccatcttgcttatgtattctacattttgacaaaaaaaaaaaaaaaaaaaaaaaaaaaaaaaaaaaaaaaaaagagagagagagagaagggagaaagngagagaaagagaaaagaaaaaaaaaaaaaaaaaaggggggggccccgcttttgggggttttttggcccggggatatatttggggccgggtgagtcactgctcagcatcagatctgtctttgcaattttcccctttcttggccacattatatttttcgttgggggtatctttccaatttgcaagttcactctgacgtctaatggatgatgttctccagccaacaatatgatcatagtccacatttgaatatgcaaatcggcgtttgaaagcacgcaatgcagacctgcacaaagaaatcagaagacgtgaagattctttaaaggaatcaaactcaacaaattccatatataaaaggaaaataatgtaagaagcaacaaacatacatgaaatacaaatcaccgtagtcttgaaccatgcgtttaagcaatggaggttttccttcatcatcatcagtaaggaaaagatgccgacctgttcttctaaaaatgaaatgaataacacaactagcaaccttctcaaaagcaggtacccccaaaagaaatggaacctgcttatttccccttgatcctagatgaggtgcggcaacagcaatgaaattcatagcctccaaaccacctatttggcccacagagctctccttactttcttcattgcacgggcatgccatagatccttgttcacgtggaattaaccttatcaagagatcaattcctgcaggagagttgtcacttgtgtagagatgtattgggggaatgtctattgttcatgccattgcttgcactttactacaattctatttatgaagtcgcccattacattattgagcttcacagtaagcattttcacatttcgttcgctacagtgaacaaacactttatctggcaactccctgacaaatttctccgcagcatatttccaatccgtctcccgtcctagaattccattcaccattacgacgaggtgatccgcggaggaagcgagcgagggctcggaactccaaacgtcgcggcttccatcaaccgccgactccgacgcgcacacctttttctcctcctccattagtgcaaacgaacgaaccctaggtcttcgcgagaggcgaaaatcgtagtccgaatccgaagaaaccaaaatcgatcgctgatgaaggtgcttgaaaactaaaaagggaaccctttgcgatggttttgattttttgatttggcgttatttatacggagaaaaaaagttggttagttttttcttttaggtgcgggagagaagtgatgggtggtgactgttgttactgttacatgagaaggaaggaaactaacgccgaaaacgatgggacacgtggcggcaccgcgcgagttgggagtatgttgttggggaagggaagaaagaagggggaaaatgtgaacgctaccctgaattttgtgaaatgaagaagttatcgattgatatcatgctgtgaataaatgactctgcattttggttttggataacggtagtagcgaaggatttgggtttctttattcgatttccgtggattgagggaaataatttaattaaagaatggtgcttgctagttttgggtt

SEQ ID NO: 55255 - DNA, 230 bp, Glycine max
  Clone ID: PAT_MRT3847_20906C.1
aattaattgaaattaaatcattctccataaacacatgacaatatcaagtaatatatacttgattccttttaaaataatacatatagtcttaaagtaattttacggtgttgtgaatgtttttaattaaaaaaaattataaaaatttctttataaaataatataccaattctctagatttaaaaaacacatgacatgaactgaagcctttaaattgtcaaatttatctttta

SEQ ID NO: 55256 - DNA, 1984 bp, Glycine max
  Clone ID: PAT_MRT3847_20907C.1
tagctcgagccggatttttaagtgacgggaacaactgaaaagagaatagccagatccagacagacactgccagtgcgagaagcctatcagcaaacagagtcttcttttctttttcttttttctctacacacagtgaaggaaggaagagagtatcatccatggcggccaccagagcagtaaccattgccagcaactccacatgctctctgcttgcaaagaaaacctttgtgggtggcactgctctttccctcaacaacctcaaattttgtcgtactaggaggtcttacacctgcagagccatctacaatcccctggttgtcgtcaaggaagaaggccaacccgaaacctttgattatagagttttctttgttgacaaatctggcaagaaggtttctccctggcatgatattcccttgcggttaggtgatgatatctttaacttcattgtcgagattcctaaagaatccagtgcaaagatggaagttgccactgatgagtctttcactcccataaaacaggatacaaaaaaggggaagctccgatattacttttaacattttttttcttctaattacattattttattgatggcatactgttgattaaatgtcctgtgttatgtcttcttcaccgttgtctatttataacataaatctatctgggagcagggacctttgatgattatacccttccttcctcgatgccatcttcatattattttacctataacaattgaagtatcttgcacatctcattcatcagttctttggctttttccctttcttttggtttggttgatgtagctagattgatttagttccatatttagcctattttgaaacatatcttatgcttgttctccagctataatatacattggaactatggcttacttccacaaacatgggaagatccatcttttgcgaactctgaagttgaaggagcattgggagataacgatccagttgatgttgttgagattggtgaaagacagaggaaaataggtgaggttctcaaggtcaaacccttgggtgcattagccatgattgatgaaggagaacttgattggaaaatagttgcaatttcgttagatgatccgaaggcaccatttgtgaatgatgttgatgatgttgagaagcattttccaggaactctaactgcaattagggactggtttagagactacaagatacctgatggaaagcctgctaataaatttggacttggcaacaaggcagcagataaggattatgcgcttaaggtcatcaaagagaccaatgagtcctggaataaacttatcaagagatcaattcctgcaggagagttgtcacttgtgtagagatgtattgggggtggggggtgggggtggtctctattgttcatgccattgctagtattttctacaattctatttatgaagtagcaaaattttctgttgagcttcccggttataactttgacatcaatgtccatttggccaggcattagttcaataaatccatcttgcttatgtattctacatttaaaaaaaaaaaaaaaaaaaaaaaaaaaaaaaaaaaaaaaaaaaaaaaaaaaaaaaaaaaaaaaaaaattttaaaaaaaaaaaaaaaaaaaaaaaagggggcggcccccctttttttttttttttttttaaacaccccctttcaataatccaaattcccgttgcccttttaaaaaaatttttacttggaaaagggttttttttttcacccccttttattttcccccaaattttattcccacccccttttcattaccctttttgggggggcaaggcccccattgaaaataaaccctaaatccttaggcttttatccaaactctttaccccaaactctttacccttaggccaaccttagggggttacatataaaaacccttaaacctaaccagttttttttgccccccttgactgtttgtttgttgaaaatttgactttttgccttctttgaagcaaactctg

SEQ ID NO: 55257 - DNA, 875 bp, Glycine max
  Clone ID: PAT_MRT3847_20908C.1
tacggctgcgagaagacgacagaagggggccacaaagtgcgagaagcctatcagcaaacagagtctcttcttgacacacagggaaggcagagagtatcatccatggcggccaccagagcaataactatagccagcaactccacatgctctctgcttgcaaagaaaccctttgtgggtggcactgctctttccctcaacaacctcaatttttgtcgtactaggaggtcttacacctgtagagccatctacaatccccaggttgtcgtcaaagaagaaggccaacccgaaaccctcgattatagagttttctttgttgacaaatctggcaagaaggtaccctttttgttttacttttattgggccagttttgtttttctaatttgttattaaaggggcattgaaattttggttttttttggggggttttgctttcaactagaaaaatgcgattttgggtcttctaagtttcttcctttttgtatcattgctgtggaaagagaatggtgtgtgtggcctctgtatttgattaatggaaatgtggaattgaaatgtaatgattttcagttcctctgtgtttgcttgttatttgtttgatggaagtgttaaatagagtaatgtactatggtgtaatcgttgtgttttctttgatgcatcaatagcttgctaagttggtatagatagagttcaggctgatgttaactaattttgaatatttgttatacttcaaaaggtgattgtgaaatattctgtttcgtgttatggtgctgaactagactagaatcttagcttgtaattctagtacctctggtactttgctaatatatatatacttattttggctgatccaaaaaaaaaaaaaaaaaaaaaaaccaaaa

SEQ ID NO: 55258 - DNA, 191 bp, Glycine max
  Clone ID: PAT_MRT3847_20909C.1
cggtcgaccacgcgtgcgggagcgtcacacccttctcttcttttctctcataataatttaaatttgttatagactctaaactttaaatgttttttttttaagtggttgcggttttctctttggacatgatcccgttcttgcgtgggagtaaccttgtccgagggatgtgcatgattagatccatacttaat

SEQ ID NO: 55259 - DNA, 469 bp, Glycine max
  Clone ID: PAT_MRT3847_2090C.1
tgtggtttctttttttttttctttttttttagaaactaaatttcagattttatttccttgagaccgtactaggggcacaccttacattagatgatcaccattcacgtgtgtaacatcttatgttttagggaattttacttaataccatattacatggttaatgggttatatcttcaatatgccgcacgacacaccaaaggcaacgggcatctatcacctattgcttactgctaccgagtcatttatgagtggctgatggatccatcaaccttgtccacagaagacggcatgcagaatgcaggagcttgggtctctgggacataaatacgtatctttggccctcctgcacaccccatttgttctctggatacaatttatttattggatggtcgatggtcactggtggcccctgcgtagagcaaatcctgaatcccatcaccccacttgcatatctcgggaccgtggttca

SEQ ID NO: 55260 - DNA, 205 bp, Glycine max
  Clone ID: PAT_MRT3847_20910C.1
atctagctacgtagctgcagcattagggtcattgatctgctccaatgctgaacggaacagggagttatgagtcgagaaggaacaagactcacactctctgtgtgaggtgaggccggcgcatatttcatctaacagacgagtctgtacgccgcttgtgctttccctgccgtcacgcacatatgaaatataactggagcctcaaggc

SEQ ID NO: 55261 - DNA, 469 bp, Glycine max
  Clone ID: PAT_MRT3847_20911C.1
atttcttttgattgattagaaattaaaacatgattttttatcgactaaattaaacaatctctaaaaataaaaaaagttatacttttcattaaaacttatgattcaaagagagtttgagaacatttatattatttaaaccattatgagtcatgaaatacccaacacatcaatctcataataaaataggtgttctatcccaatatcatagttcatggttatggagacatcactacttcttgtccctaatttcttggaaaaaatattctgaattttacaacttaccacatatccatagaaagataaatcataaaatcttcatacatataaagcacgcctcttataaagctaatatattaaaacacatccctaggtcataacacatcaaccatccaatttcaattccaaataaaatcatgactgtccaataacattctattctcacttcattcagatggttggactggccact

SEQ ID NO: 55262 - DNA, 426 bp, Glycine max
  Clone ID: PAT_MRT3847_20912C.1
cgaaaaacaacttttaaaccagggacttcattgcatgtgtcatccctgcataaagttcaacttgggtccattataagttttggttttaaccttttccaaaatcaaccctttccaataccaaagaccaacctgcccggcttttacttaaaaacacaaccaaaaagattttattttacccccaaatacaatccctaccacctttttttattctacaactgaatgccactaaactgttatcactcattcattataggtttgttctcgccggcttagggttcctgctcttttggcttgtgttccccccatttccttttatcaaaggagcctcccttttggctgaggaaggttcggaaaaaaggcaagttaccgtcggaaatcattggcgtttactgatgccaaaaataaaaccctagttctagttttttt

SEQ ID NO: 55263 - DNA, 363 bp, Glycine max
  unsure (1)..(363): unsure at all n locations
  Clone ID: PAT_MRT3847_20913C.1
ggctcgagctccagccgaatcggctcgagcggctcgagcggctcgagcggctcgagcaatcttgagcctctgggtagattcatatctcttgtttcatatagttgatcaggacctgttaccaatttcagtcttggtattggttctatgaagattccccccctcgttttctcagtattttgcactcacagcatacaggaaaggaaactcttaatggttattataactgagaataactctgttgactgcatctatgtttgacaagaaaaacttgctcgatgattcagattggttatatacgaaagtttgtgtaagtactgtgaacatctaaggtggttcttggcagtgatttcccgacacaccana

SEQ ID NO: 55264 - DNA, 416 bp, Glycine max
  Clone ID: PAT_MRT3847_20914C.1
atcctctatagcggccgcccttgcctatttttaatctttcttatttcatttttaattcattttatttttttaatttttttttttaacacaaaaatacgggttcggccaaaacactttaattttaaattcaaaaattttttacttaaaactcaaaccataactttactttttctttacaaaattacgcttctttattaatcaaccaaaaaaagcttttaataaaattttttaactccgaacccttattttctgtaccttttttacccaaagttttcttttaaaaaacacattattttaaaatcaatctccttaacattttttttggaaccattttttacaattctttttttcaaattttttaaatttttttataccccacttttaactttgataattaccatttgctgttttggaaa

SEQ ID NO: 55265 - DNA, 519 bp, Glycine max
  Clone ID: PAT_MRT3847_20915C.1
ctagaaaaattccgggtggccatccccccaaaggaaaatttccatttcaacaaacccgggggatggccctaagttctagaaccaaataaattaatgtgaaataaatggggaaaaaaaaaaaaaaaaggggggaaaatcatgagaccttttttcccgaagcccccaatttacattttggcccatccctgctaaaacgcaaagattttagtcagcagaagctttcacagctttggcgaaaaaccaaacccctgcgtgaaaagaacatccttggatatatccctgggtaataaaaactccaaagacccccgaccaagctttcctgaacattattggggggagccggggattgcccatcataggccggaatcggaaaaaacttcatgtaattctgggacgccataagctcctaaaaaagccccggcactttgttctttttttcttgagcttaaataacctggggctctttctaattcttccccatgggggaaacacccaaatacccgttcccgtttggacggg

SEQ ID NO: 55266 - DNA, 128 bp, Glycine max
  unsure (1)..(128): unsure at all n locations
  Clone ID: PAT_MRT3847_20916C.1
agcctcaagtttngccctttatcccaggattgcccaaattcttnttcaaanaagaagggcttttaaactngcccattaaagttgtnaagtccctngtnctgctanaattcccaaactttcnaanctat

SEQ ID NO: 55267 - DNA, 265 bp, Glycine max
  Clone ID: PAT_MRT3847_20917C.1
aaaaaaaaatttaattttaaaaaaaaaaaaaaaaaaaaaaaaaatttaaaaaaaaaaaaaaaaaaaaaaaaaaggaaaaaaaataaaaaaaaaaataaaataattgtgaatttaaaaggggtgcggtctttttatgggtaaccaaataaaaacttctttggggggcgggttggatatctattgtgggggagggtcaaggcttatcgctgctgaaacactttatttatattacagttaaaatcattgagtttgttgctttaaggcc

SEQ ID NO: 55268 - DNA, 455 bp, Glycine max
  Clone ID: PAT_MRT3847_20918C.1
atttaactcattccagtggcaggagtggccacggcgctgtgtggcggtgacaaccatgggggactcatctgaagaccttgaccagcttctcgatcgtgctttgcatgattctgagtccttcaaccttaatcctcccgctgccaggggtgaagcaactgccaatagcaagacggagagtccttctttgccgtcggaggttcaaggatagggcatgggtctacccgatgtgcgaacgaagaaggacgggaaacactaggcttcccaaaaccagctccctgtatgaggcgctcaacaagctcagggagcaggccagagatgctgtgaaggcgctggtgtctatatgcctacccactgacgacgatctacgtaaagatgccttgaccgacgattgggtcatgcaatttgagcagcttgctggctctcatgacatggaatcctttgaggagaccatgatg

SEQ ID NO: 55269 - DNA, 422 bp, Glycine max
  unsure (1)..(422): unsure at all n locations
  Clone ID: PAT_MRT3847_20919C.1
aaacaaaggatgtgtggtgtatttaaacaagacattgcaagatcaaattacatgagttctaacagttgtattttgtttaagagcggaagcatagatgatgaatgaatatcatcctcttaactagaatctaccgagcgtatagctcagttattgaagcctccatnntttnctgattcttgagctgatttaattatcgattcacttgatcctgtttcccttgagttgtactcccatgactgcatgtctggaagacttccagttctactgttcatataaaatnngcaggtttggcnngggaattggggagaactttagagaatagctatttagcatgagcataatggtagccatggttgggtctgtccgctaaatttttcttgaaccacaagtanacccatatggatacatctcatcatttcatt

SEQ ID NO: 55270 - DNA, 840 bp, Glycine max
  Clone ID: PAT_MRT3847_2091C.1
ctcaatgtcattgtaaccatgctttcattgaaccaccttattttctatataaaagcttttcagttttcaatttttcatcctatcctgtctgaattttctctcttaatatatataacttacatatgaaggtagagtgatatcatgaagaagcaagtctgagtacaagtttcataaaaagaggagttacctttgtatcactagttcaaagttcaccttctcagaagctacatagatacactgatggagaagcttgtaaggtcctgtgacaaagaatatatgaggatggccatgttaaaacacgaagaaactttcaaagagcaggtatatgagcttcatcgtttgtaccaaattcagaagatactgatgcaaaacatggatgccataagaggaattgacacagcctgtcttcatcttctagtggataaagccatcggatcaagtcaagatgtcatggcagtcacactagagaagaaacaagtggaagcataattcggcttgtcgcacattccggtatcacaccaggatacgctagtggaattagatacagttttgattgtgatgacattttacccctcaagttacaaccgtaggaacaaagtcgagacaccgctaacttcatattcatgacacagcttgtcttcttcttttaattctatggtcaatgtgatatattttaagtttctgttttatgagctaagactaactttgtggatgatgtttgtgttgaatgttcagccaaattattgagtgtgataggatttgatatgtctatcatatgagatagcttttttcccctggtaccaaaacccattactattcacaattcgcaattcacatgcc

SEQ ID NO: 55271 - DNA, 602 bp, Glycine max
  unsure (1)..(602): unsure at all n locations
  Clone ID: PAT_MRT3847_20920C.1
ccgtccgtaccggcntgcngnaagaagacngacannngaaggggggacntngctctgcagannataactancganatctatgggngnaccatcnatcnttcntngnngcganagcagagcaacttacctacggtngtgcatcatatatcctttcacttngcngtgtcgtagatcttgtcagatgatggtgactacgatacagagaggacagaacacagtctcacgcaagggtatcaacgcgatngcgtcgaagcgcaagctgcaatattgcaggatatcgactccagacgaggcatctgtattgatcgtggaaaataccaacaatgagctgaaaagcgatctgatagatgtatacataaactcagctgaccaattgatgatgctggaaaccaacaggctgcggttattcatgtaccttacagattaaagaatggatacagaaagattcatgtaaggcttgacgagagaacttgagacagagcatagcggaaaggatgctatactgagtgccacccgcaggatattgaggccaccaaagagaggctatgctgtgcaccattcatgcacccaagcactcactgctgcacacgaagctatgctgg

SEQ ID NO: 55272 - DNA, 110 bp, Glycine max
  Clone ID: PAT_MRT3847_20921C.1
caaaataacatctacaaaagattgacgtctgctcttcaggtcagggcaatcttgtaaggggtggcgggacaaatgcatggagcataccaccattgtattcaaaccttgtt

SEQ ID NO: 55273 - DNA, 360 bp, Glycine max
  Clone ID: PAT_MRT3847_20922C.1
gctacttcagatttctaagatatgacccttattctgactatgcatatttttgtactagaattaaaagccatttcactaaaaacccagaaggatgggtttggagagttccagctgttttgaagacattatggtcctccggaccaaaggtcactttttgacggggaacctatttttcctttgccgcttaagtttatagagctgaaaaaagttgttttttttatggaggaacgtgatttctattccaaactaaaggttgatttacgtgcacagtttcaggattatgttgatgctggaactgtcaaacaaatttttgtaaacattttgctgatgtttgtgcgccttaaacaagctggagatcac

SEQ ID NO: 55274 - DNA, 193 bp, Glycine max
  Clone ID: PAT_MRT3847_20923C.1
ttttttataatcgtttttgcccatgattgtggtcatgtttgttttataaagaacctctatctgctcgggggctggggtgtatcccttgaaggaaacaaggctaggcccttttggtggaggggcaccccccaatttaaaaattccccacccttcttttactgtcgtaacagagggaaaaatggggtgcattttc

SEQ ID NO: 55275 - DNA, 442 bp, Glycine max
  unsure (1)..(442): unsure at all n locations
  Clone ID: PAT_MRT3847_20924C.1
ttntttttttttttttttttttttttttttttttttttttttttttttttttttttttttttttttttttttcttggggggaaaacccaatttttttattttggtggggaggtgaaaaatccccataaccattcacccggcaaaggttaacacttttcaaattttttaccgcaggaaaatccaatcaagagaatttgcaattaacctatctacccaggggggggttgcccaccccacctttaggggtttgggggtttttccaaatccttccgggaactcggagattaaaattttttctggtttcaccccaaaagaaaaaccccctgttggggtaaaagaagagaccaacaagggtggctcctccccttttaagggtatttttaagggtttttggaccccctttccggaccccggggcggacccttgggccgacccctgggtt

SEQ ID NO: 55276 - DNA, 314 bp, Glycine max
  unsure (1)..(314): unsure at all n locations
  Clone ID: PAT_MRT3847_20925C.1
cactgattctattgcgactgcacacaacctacatgctaatgcttccttcatgcacgctaccaacgtgtacatgggcactcacaacctgaaaatttcacacaccatttgtaaagattttggctcggcacccgctgtagctataatcatctgctgccttaagccccatctcaaagatattgctcaaaaatgtgactacgccaccaaaattgccggatttctnccttgccacctaaagcttgcgagtgattattgagcgagcgcacaaggtgttcccaagacgctaaccttcgacaaaatccaaagcaagacatact

SEQ ID NO: 55277 - DNA, 512 bp, Glycine max
  unsure (1)..(512): unsure at all n locations
  Clone ID: PAT_MRT3847_20926C.1
cggacgcgtgggcggacgcgtgggcggacgcgtgggctttgcctctagcgggttgaagactgatgtaactacgattcgtggcggtgcggcgtgggggcttctttgtctggtgatattcacggcgtgtgctgggaagattctagggactttcgtggtggccatgttttgcatgatccccgccagagaatcgctcacgcttgccgtgctcatgaacaccaaaggactcgtagagcttatcgtactcaacattggcaaagagaaaaaggttttgaacgatgaaatgttcgcaatcttagtactcatggctctattcaccactttcatgacaactccaatagtgatgagcatctacaaagcagcgaagacccaacggaagctaggagacattaattccttgagttccaaggtaaatgagttccgagtcttggcatgtattcacggnccaaacaacatcccttccatatcaagttcatcgaatcatctcgcagcaccaccaagtcccttctgaagct

SEQ ID NO: 55278 - DNA, 319 bp, Glycine max
  Clone ID: PAT_MRT3847_20927C.1
gacagtttttgtttgacagcacagcactcggaaatttctggctatctctgcgttttcccctattttgtctgaatctaacaacaaacaggcgtcaggtgcccatttctcctcttccctttccgatctattatgcatgcatgctattccattccaattccacgccgtttcttgcgtcccttttcactcttttctctgcttattattattactcccattttcccctccttcgttaacctgcaaaattacaatgaaaacagggcacatgctccttaactagattcggatctccccacctttccaaaccgaattaaatgtcttt

SEQ ID NO: 55279 - DNA, 203 bp, Glycine max
  Clone ID: PAT_MRT3847_20928C.1
ttactcaccgcttttaatgaagcatccttttctggcaactgcagactggtattggtaactcataaaaacaaaaccaccacacatgtggaataagggtccacactttctattattttgagggctgcaatctacaccccgtccttttagccccccaaaattataaaaaagcatcttttggtttctaactatcaaccactttttcg

SEQ ID NO: 55280 - DNA, 2486 bp, Glycine max
  Clone ID: PAT_MRT3847_20929C.1
atttgtcgtgggcacatacctcaaaaaactcaacctcaatttatggattcttgtctatcacttctgctctgaaacccactcttattgaattttagtcccttgttactgcttctatctcttactttcagaatagcaggggatttgttataaaagcgatgtgcagctgattccattgtgaagaagagagcagaaagaaataagcttataataatgtatcccaaccaagccttttctttagggtcctatgcggagatgatgtctgggacttctctttttcctcatgactacagtgaaactgtaggaggaggacaaaacgaggttaagtttatcacagcaatgggtgagacagtgactatgcactctattaatggccattccaatgctgcaagtggtgatccatcatgcaactctttctgggggaagattcccaggtcaaggacacaaaaatggcagatagtgagcaaacacatcggctgaattgtatctctcagtctcgggacactcaagccgtgtaatgcatgaatatgtcagggttagtagcaatatcacgacactggtctcttaccactaatgaatgaatatccaaatctaaagggaaccatgtctctgaaaaatgatgacgtcaacaacctacataaagaatttaaaagtgctgaatgcatggcatctgttgtcctccttgagggctttcatgacatggtaaaaaagggaatgtttttaacaacccccatggaccccctcaatgtgtcttaaagaagacccctctgatctaccacgttactcatacagtattttgaactcattatacctgaacacggcacaaaaaatgctagatgaaatatgtactgtccgaaaagcattgaagaattcggctaaaggaaaaacaagagaacactggattagatggctctaaagattctgatggaaaatctaccagtcaatctatgcaaatgtcttcaggccctaatggttccactgctaatgcttctagtgaactatcatccgcagagcggcagaacttgttggacaagaaaacaaagcttttgtccatgttggatgaggtagataaaagatacagacagtactgccatcagatgcagattgtggtgtcatcttttgacatggttgctggctgtggagcagcagaaccatataccacacttgccttaagaacaatttctcgccactttcggtgtttgcgtgatgccatcagtggccaaattcaggtgacccaaagaagccttggggagcaagaaggaataccccgtctccgctatgtggatcagcaacttagacaacaaaaggcacttcagcaacttggtgtaatgagacaagcttggaggcctcagaggggtcttcctgaaagctctgtttcaatactccgtgcttggctctttgaacattttcttcatccttaccccaaggattctgagaaaattatgctggctaggcaaacaggcttgaccagaaaccaggtggccaattggttcatcaatgcaagggtgcgtctctggaagccaatggttgaggaaatgtacaaagaggagtttggagactccgagatgaactgcaacctttcatctgagaacaacacggtcaaatgtaaaaaagatgatcttgttcaagagtctgataacattaacaacaataataaatgggaagagacacaggacaatttagtaactgttgacagtgtccaagtccaacctcaagcagaactggatagaggggtcaatgtagaaaatgtggtgatggattctggaactgggaaattgcagggtgatcaaaaccaacaaaggcttggcatgaacaacaacaacaacagcagcagcaacttttattctatctcaaccaaccagaatgatggaggcctaatgggttgttctactcatgccacatatgatttatcagagttgggtaactttactgtgggtagccacgtttcccttgcattggagttgaggaactgtgaaagtgatgggtttgccatgtctgatgatgccatacgcaaacgacgtaatcaagcattggcctcttccccggagactgatttgctagattatcatttcacggattcaggaaagcaacaacacaggtttggcaatccccatttgctgcatgagtttgtcgtatgaaatctagcaaaaaaatatttgatgattttaatggatctctggagaggtgtacctcaacaaagctgaaagagaaaaaagcctatgctgtgctgctgctgctgctgctgatttgctactttttttcttcctcattcttgttgcccattgttcgtaaaaaagtgatgtaaatcacgaaaccgtacaaaatatacaggtagatatgtgtagatatattcgcttgtaatattttacagatgattggttgtatgtatgtgcaggcaatttttgtaaggataaataaagaaaatttctcgtgcattatgttgaataataaggaatcttgtcaaaaacgtaaaaggagtactaccatct

SEQ ID NO: 55281 - DNA, 491 bp, Glycine max
  Clone ID: PAT_MRT3847_2092C.1
atacggcgcgagaagacgacagaaggggggagcatcacaagagtgtctcagttgcagaacctcacatttgggtgaacaagaggttgaccataaggacttcaaattctgtactgaactgaattgaagacagaaaaatcaagatggttgaggcagttgtgtcctttgcagttgaaaggcttcacgacctacttacggaagaggccagattgttaattggggtgagtggcaaagtcaaaaggatgcaaaatgaactatagaggatgcaatgcttcctaagagatgctgagagaaagcaggataaaaatgatactataaagaattatatttcagaggtgagaaaactagcctatgatgcagaggatgtgatagaaatatatgctattaaggttgcattaggcataagtattggaactaaaaatccactcaccaaaactaaacatcttcacaaagttggcactgagctcacatcaataaattctcgaattgatgac

SEQ ID NO: 55282 - DNA, 992 bp, Glycine max
  Clone ID: PAT_MRT3847_20930C.1
aggttcccccctgatcgccggtgctttttatattgagataaatctcaatcaatatattgattatttctaggaaacacacgtcggtatgagggcaccattatcgagtacatctcatatgtaatctaaaagatggcacctccaacgatgggttgctgcctcgacaagacaggattcatcaaagagaactggttgtatggcagcaattggttgctgctgtaggaaggcggcgaccaatgggttagccactactagtggattaagtaactgttgtcgctgttgtaggtacgcagcatagttcgacatagtcagttggttgaatggaagcagctgttgcaagtaggcagcagggtttgccacaactagctgagtcagagctggtacaatctgttgcaacaattgttgttgcaggtatgtaggtgcattggccacagcgagcgggctagatgaaagcagttgttgctgttgtaggtaggcggcagggttcaccatggctagttgactgagcgctggcagaaactgttgcagctgttgttgtggctggtttgcaactacgtttgccagagcaagtgggtttgatgcaagcaactgctgttgcaagtaggcggcagggttcaccatggctaggtggctcagtgctggtaggaattgttgttgctgttgcgttgcgatggtttgtattgttagatgtgccaaggattgttgttgcaactgggaaattggttgttgtaagacgctcgccgcaatcgcttgttgtagcctataggcttgcacagctgggtgttcgaagcccattgaagtaactggtgggaggaactgtgtaataatggaacttggagcaagtgagcattgtggaataatgaacgcatttgttgcgctcgcaaaaagcgcaagaagcgcaaggagggataatatcttggtagccattgttgttaggttgttgctagtgtgcttcgcttggtgtgtttctgaatgctcaaaatattatgggtgat

SEQ ID NO: 55283 - DNA, 251 bp, Glycine max
  Clone ID: PAT_MRT3847_20931C.1
tttagatttgatcaaaaaaagccctaccatgtgctcacttagcggctaaaccaccaaagtttttacaaaaaatactttcaagctcaatgagggtgataagaaggccaaggattggacggaatatctctcacggcgctggaagagatccattccccttggttggcgaagatgtcgcacagattagaagtgaaaccctgaaggtgccccttgccacctttagctttcagttcttagggttttgtcgcaaacac

SEQ ID NO: 55284 - DNA, 524 bp, Glycine max
  Clone ID: PAT_MRT3847_20932C.1
gcttcatcttttactaatgtagcatatgagaggttgcctttggatgaagatgaatctatgcagatgcaacaagggcaatcatcagctggtgatggtagcggtgaccatggtggtggagttagtaataactcttttccggatccgtcttccgggcttccattcttcaatttgccactaaacatgcctcagttacctgttgattgttgggctggcaactctggtggaaggcaatcttactgatccagagtctttgggggcacaaaggtgagaagttgaattgatctcatatatattggtcttctctaatctttcctctgaatattgcttgtgaagaagtactgatttttctattgaagaatcgttttgtttggctaggtttgttgtaaggacgatcagtttctaggaacaactgtaaaacgttttctcttggttgctggagttattagactagactgttgtgcattaaccttgagttgaataaatcataggctcaaatcaataacaaaaatatatattttggattt

SEQ ID NO: 55285 - DNA, 575 bp, Glycine max
  Clone ID: PAT_MRT3847_20933C.1
tcacattctctcttgaaatgctatataattagtccgggagtaatttgattttatgataagtccctacgtggcatatgatttattataacatacagttaatgcttcttaatcctgagtcattaattaggaagtacaaataagacaagcaacatggaaaatttatttagtggcttaaatcacatgttcgtccgtacaatttaacttttctttttttgttttcgtttttgtatttttttttcttttagtcttatccttacaagatggatttgttttattttttgtttttacattgttttagataatcatttaaacagtaaaaaaagtattttgaatagtaaaaaaacaaagtactttaaagataaaaaataaaaaaattacatactgtaatgattaaaatgaaattttttctacagaaacaaaacaaaatactaaattataaaaataaaaaatatatttaagtcttatttaactgatcttggaccacctgactatagtcttaacctatttttatatgatatgtatttaaatttttcatttttttaataagaattatatagttaaagacccctaataat

SEQ ID NO: 55286 - DNA, 141 bp, Glycine max
  Clone ID: PAT_MRT3847_20934C.1
aaaacgtaaccatcgccggaacgatcccatttcccttgacttctcgacgtgaagatccttgtgtcacacagacccacttatcatgtcagagggaaatgtccggaaacgatagataatcgccatcatctgcgtttcaacctt

SEQ ID NO: 55287 - DNA, 1219 bp, Glycine max
  unsure (1)..(1219): unsure at all n locations
  Clone ID: PAT_MRT3847_20935C.1
ttcccttctaacctcccattccgttttctctgcagtacgcaacttatcgttactattctaattaaattcctcttattttaattactccaattttttattctattttatttcctcttgtttttttctttatcgcttttaacggcctgacctttatggccggcatagacttgggttcagcatcacattttgttcatcatcgccttgaacgccctgaccttgaagacgatgagaaccaacaagaccaagacaacaaccttaacaatcacgaagggcttgacctagttacaccaaattcaggtcctggtgatgttgttggtcgcaggccaagaggaagacctccaggttcaaagaacaagccaaaaccaccagttatcatcacaagagagagtgcaaacacccttagggctcacatccttgaagttagtagtggttgtgatgtctttgaatcagtcgctacctatgcaaggaagcgacaaagagggatctgtgtccttagtgggagtggaaccgtgaccaacgtgacgttgagacagccagctgcagcaggtgccgtcgtcacgctgcacggaaggtttgagatcctgtctttgtcaggatcgttcctcccacctcccgctccaccaggtgctacaagtttgaccgtgttccttggtggaggacagggtcaagtggtgggaggaaatgttgttggtcctttggtggcttctgggcctgttattgttattgcttcatcttttactaatgtagcatatgagaggttgcccttggatgaagaggaatctatgcagatgcaacaagggcaatcatctgctggcggtggtggtagtggtggtggagtcagtaataactcttttccggacccgtcttctgggcttccattcttcaatttgccccttaacatgcctcagttacctgttgatggttgggctgggaactctggtggaaggcaatcttactgatccagcttctttaggggcacacaggtgagaagttgaattgatcttatatatattggtcttctctaatctttcctttgaattgtttgtgaagaagtactgatttttctattgaagactcgttttatttgcccaggaataataaaaaaagacagttgtgcaataaccttgagttgaactcttggttgctggagttgttaaactagactgttgtgcattaaccttgagttgaataaatcataggctcaaataaatannaaaaa

SEQ ID NO: 55288 - DNA, 850 bp, Glycine max
  Clone ID: PAT_MRT3847_20936C.1
cattctcaatcttgcatatgctaatgtacattcatttgttaaaatgtccaaagttccaacagtttcacctctatttattggaacatgcaacgagcaaatcaatctttactccacataaataatttgaatagagttcattacttcagtcgtcagaatatctcataggtgtcatcagttttcaatcagtttttatgatttaaattgtgtaagatatcatcatctatatcaaaatacaaaacatgaaatcataatatgatctgtgattcgctaaatcaaatcaaaagagttaggatggcccaccgtaatcgactgcactgtggtatattttaggaaaaattcttaggttggcatggtctataaagtactttctgtgttaagaacataaaatgacaaatggttttacgtttttaaatttgagtcccatcaaattggattttcttattggtttactgcacaaaatttagttactaatccagctagcaagtctaccttagaattctttcagaaggtcgtgattgcccttaatccaccctttatttgaaagtaatgctctttccctatttatgtatttggaacttttttccccttaattgaagtgtttccacgacaactgttagtcttaagaaagctacatcagcttatgttttgtccttctgttcttttgtgcaggacatagggaatctgtccggtgccttcgaaggacaagtagcaatatgtatcataagttaatatatgccctgaaaagttcttaatgtatctcgtgtatttggattttggattgctcaataagtataaattggtgttctcactctgttaccaaaaccataaaataataatatatttggatgcc

SEQ ID NO: 55289 - DNA, 403 bp, Glycine max
  unsure (1)..(403): unsure at all n locations
  Clone ID: PAT_MRT3847_20937C.1
nnnnncccattttttttttttttttttttggtttttttttttttttttttttgggaaggaactcgtcattatctcataatacaatcccaaaaagaaaggggggaattgtttataaggcataattctggggttatacagggttcagcttccttgggctggtggtaacggtttttattacatcaaaatccagcccaatttgaaccctaaaacgaacagaaagggcttgcttcagtcagggttccacaagtcattaggggatccaactgccccccaagtccagggggcaaacagttaaaaaatacttgccagagaaaaaactgccttataaaaaatcttcttactttttcgcaaaaagtttttttggaagttcatccaggggggttggttttaagagaaaaagcct

SEQ ID NO: 55290 - DNA, 190 bp, Glycine max
  Clone ID: PAT_MRT3847_20938C.1
gggccaaacttgggattgggtcacacttattccaaaatcttccattagtaacttggtgagaggtgctgcttggaagaaaagctgttttatgggcaaaaatgggatgtctggggatgccgcagtcaaaaaggggggttgggccttattggtaccaggggtttttacaaacagcaacaggaccaagcatttt

SEQ ID NO: 55291 - DNA, 884 bp, Glycine max
  Clone ID: PAT_MRT3847_20939C.1
ctcgagccgaatcggctcgagacggctgcgagaagacgacagaaggggacttcaaagtggagaaaaacacacacggttggttcattctctctcttttctttttcctcaaaaagttgaaaaagaataaagggggaacaatcgagtgaggttgttgctcttcaatagtaaacttacctatggaagagggaagggttgtgagtgagtacacacaagatggaactgtggatcttaaagggaaacccattctcaaatccaaaagtggtggttggaatgcatgctcctttgttgttgtgtacgagatatttgaaagaatggcttattatggaatatcatcaaatttgatactatatctgacaaggaagcttcaccaaggcactgtgacctcttccaacaacgtcaccaattgggttggcaccatttggataactcctatcttaggagcctacgttgccgatgctcatcttggtcgcttttggacttttgtcatcgcctcagtcatctatttaatgggtatgtctctacttacactatcagtgtcccttccaagcctaaagccaccagagtgccatgaattggatgtgacaaaatgtgaaaaagcctccacactacatctagctgtgttctatggtgcactctacactataggactaagaaccgtgagaactgaggccaacattgccaccattggagctgatcaatttgatgattttgaccctaaagagaagttactcaagctctccttcttcaattggtggaggtgttgcacttggttcctccagttcccagcgctagagtgtaaagtgcaccatagaacacagctagctgtagtgtggaggctttggcacattttgtcacatccttacaggagtcttcaggtggcctaa

SEQ ID NO: 55292 - DNA, 313 bp, Glycine max
  Clone ID: PAT_MRT3847_2093C.1
ggttgtggttgataaatacttgcttgaagaaaagactttgaaaaaaacagcgatgataggcccggcccaggggatacatgggaaggcccaggtgcagctcaccacagcaggcccaaatgtcacactggggaacatggccgctccacagaaggccccacccaacaaaatgggagcgccgacaaggaaaacaatggctatgggagcaaaaaatccaaggacacccttcttggggtaaatggcagctggggagaccggggacacaagacggaaggtcatcacgatctgcgccaccaaggcggggccaaggacaaca

SEQ ID NO: 55293 - DNA, 751 bp, Glycine max
  Clone ID: PAT_MRT3847_20940C.1
cgtccgttcattcccctgctcgacgcccgcgtccgcacactacttttctttccttaacatcagaaccctgctgctctagttccttaccagataaggattcagaatcatatgcattcgtttagtcacagttagaataagtagcatccattgtcagaagtagcactaacatggaggttgtgagtccaaaagattattctgttgcttctagtccttactcttcacctaacattggagccttgctcaagatcaaggtcatcacatggagccaacaaacaggtttacctgtttctgtccgtgttcgagttaaagacaagatattcagcctgcataaatttcctttgacttcaaagagtggatacttcaagaagagattaaacgatgcatctgacgttgagcttccggaaacattccctggaggaccagaaacctttgagatgattgccatgttcgtttatggatcctccacattgattgatccttttaacgttgtggcccttacgtgtgcagcagagtttcttgaaatgactgaagatcactgttcgggcaacctttgtgaacggtttgatctttatctgaatcaagttgtgttgcaaagttgggatgacacccttattgcacttcaaaggtgtcagatgctgcttccttggtctgaagatctgttaatagtgagtcgctgcattgaatctcttgccttcatggcatgcatggaggtgcttgatccagaaaggaggagagacactcctgttgtgac

SEQ ID NO: 55294 - DNA, 474 bp, Glycine max
  Clone ID: PAT_MRT3847_20941C.1
aagggggggcccaaagataaaaaaacagggggaaaaaaaaattaaacaaagctaaaaagcacaagttaaaaacattaaaagacatgggggaaaacaaaggttaagggggggggggaaaaaaaaaaaaaaacacccccaaaaaattaaaaaaaaaaggggacgggggaaaaaaaattagggggggggaacccccccccaaaccgggggggtaaaaaaaaaaacacccccccttgggcttttcaagggggttcccaaaaaaaggtaaaaaaccccccaattttaaaaggttccataagggaaaaacccccaaatgggaaaggggatttcccggtccaaaagccccttaaaaaaaaacggggggggggaagtttcccccccaaacttgaccaggagggggggatttaaacggggtggaagagccggggggcccaaaatttaagcgcgcccaaactaaagaaaaaatttcgagggctt

SEQ ID NO: 55295 - DNA, 159 bp, Glycine max
  Clone ID: PAT_MRT3847_20942C.1
cgacggcttcgtcagcctcctgttttcagtacctgcaacttacctctttcatttattatatcggctcagtgagatcaaacgggtgaatctgaatggactccgctgatagtttctcttaaagcctccttctgtgcaagccatgattataatcatcatcat

SEQ ID NO: 55296 - DNA, 241 bp, Glycine max
  Clone ID: PAT_MRT3847_20943C.1
tgattaatgacactgtttttgcttttgttatttcataaagcgtgctatcatagtaattcaatttagctaacatgttgagtgtaatttcaggtctgagcaatctggttggtagaacctttggtcttagagagtcaagttttatgtctggattagacgatcaaattcctactgccttcgatccttttgctgatgcaatgctgatgactcgggtgctgggtcaaggagtagtgcatattcgcgt

SEQ ID NO: 55297 - DNA, 565 bp, Glycine max
  unsure (1)..(565): unsure at all n locations
  Clone ID: PAT_MRT3847_20944C.1
ccaacaccaagttcaagttttctttattcaaatttgaaaaatgtcccatactgcattattgcaaaaactcactggtccaaaacactttgcagctggggaaaaggcaataaaaagttgattttaaaacattactataaattactgttacagtcctttgcaaattcaaaatttcaaactgcatttccgttttctaaattgcccacagtactcaaggttcctgaagctaaggcagctgtttcaaaaaaaaggggaaaaggtagtaaatgtcaagggatttccatttctcgttcgatgcccacatacttaagggcatcagcctggctgtatctgtaatcaaaaaacaactcttcaccagtctggatagcccttttagcaaaaatgcctatcctggggtcaccattaaccatcataacttttgcatagcagtttggatttactgaatgattagcaaaacaaattttgttgccctttcgggttgcatccaccacaaaatcattgttcaagttgaacaaaaagctgcacatgtatttgncatacacttttcctcttctggctgcttcatcct

SEQ ID NO: 55298 - DNA, 152 bp, Glycine max
  Clone ID: PAT_MRT3847_20945C.1
aaaaaagacgaaactaaataattttcgaatgtagtaattaaagaactaatctacaacaatgaacctcatataaagtatattcactaaaaattcaggaggtaaaatctaaaacgttttcaaaaaaggtagacaaaccccaaatagaaaatgaa

SEQ ID NO: 55299 - DNA, 325 bp, Glycine max
  unsure (1)..(325): unsure at all n locations
  Clone ID: PAT_MRT3847_20946C.1
cttgaattgccgcttcttcaagtcgaagacaacaaacacacaacagngactgaaacgacagcattttttgatctattatggtgaaggggttggcacggggcagaaccttccccggcccaacgtgggcacaggctggtttgattcaggtggnaggcggccaactggctttcgnttccccggatgggattcttcttcattcttcncaangccttcttctcttcaaacgnattcttcccaaacttcggttcagnagcagggggaattgttngcaaagggnaaagcaacttngcgtttaacctggganaggcccattgggctcattant

SEQ ID NO: 55300 - DNA, 500 bp, Glycine max
  Clone ID: PAT_MRT3847_20947C.1
atccaaaagcccagccatttatcttttagctcgacaacccatcaagatatacataccagaatcagtgcactggcatgcacataaacgagaatgacaccacttatctactgtatcctaaagggctagctacctgatcattcaagtgctgatcataatcgggattctacacggtaaacaatctacctccaccattcatgaccactgtctttccagaagagccctcgaatcggtagtaattaataaccctaactacgagttaggaatgcggttaaggcccaaaccgggcttgctcacggacacaccgaggcctcacaaacagatacggagatttctgttaaccgcgctttgtcaaaaatgccctttttgcaaatttcctaatactctgcctgccgaacttgatgataacggcccatggttcaagctcatgatccaggccatacccactcttcatcctaatgatctattatgagccgcccatatgctcatcgtaatggagataa

SEQ ID NO: 55301 - DNA, 319 bp, Glycine max
  Clone ID: PAT_MRT3847_20948C.1
ctgaagttctctctcaatcacagcactacatggctagggctttaactcccatgcgtgatgttaggtgattaatcaatcacatccaacctccataacttcaagtctctaactgcttaaacaagctcaaaagctttacacacaacactctatgctgagtaaacctgtctaattccttcttgaaagacagacttcatggacatactgcacggataagcgtgagggtgacttgcacacctgccactccatctcaagtcaaggccttggggtgggccttaattgcaccactcttcaagctcaacgcgcacacaacagccccatc

SEQ ID NO: 55302 - DNA, 579 bp, Glycine max
  Clone ID: PAT_MRT3847_20949C.1
gaagaaaaaattaccctttatttcattgtctcacacaaaatggtgttcctcccctgcattcagataaatataagtttcaaaatctgagctagtaaccaaaaaattaatttacataactcctactttaacaccatatgatttgttatataattacttacatgagtgtaacaatgggctaatacatgtagttataaatccttcattccttccaacttccattcaactaaaatgtggtataacgttagttgctgcacaataagcatcatcaattcatcagccacaaacaagtgaagtgaaaaggtctttctgtcagaattcttccaactacatagcaaataagtacaattgattccattcgcaacctctaaaacaagcaggcagcaacatgccatctttcaaccaaaaaagaacatcatcaatgagcagtacccaccacttcgcagaatttatgagttgtacgatgagagatcattcaatgtatccacttcatattgggaaatacacctttcctacaaggaaattcattcttaacaacttgaggggagggggggattcatgaaaccaaaattttcacttaaa

SEQ ID NO: 55303 - DNA, 448 bp, Glycine max
  Clone ID: PAT_MRT3847_2094C.1
gtagtggggcttgagctgaaaacagtgcataggagaaaaaacaggaacatatgttggaatttattactatgtataataatcatctgactactaaacacacataatcatgagcaactacccaagtttgactggattgtccaattggaacttgattagggtcaggcatcacttcatgtttgttagtgagcttcccttctgttttcctttgtttccgcaacagctaaaaagggttgttaattgtaactaactataactggttttgaatttttagtctttgatatatattttttggaaaaaaaaagaaaaaaaaaaaaaaaaattagcaaaatcatatatatattgcttacttggttcacttgactagacagaacaagtgctgattaagttgtcgattgaactaattaaattctaatgtcatttgctaaatatcataatctcaaaacaaaaa

SEQ ID NO: 55304 - DNA, 410 bp, Glycine max
  Clone ID: PAT_MRT3847_20950C.1
cccacgcgtccgcccacgcgtccgcccacgcgtccgcttccctcacgaagaaggtggaggattgcccagattttgtcttttcctgttcttttatggccaaatgaaagaaagtattctctgaagtaatgaatctgtgccatgtttgaagtagttgatgattatgatatcatacatacttttggatcaattgacatgatcatcaatgcccggcttttaggttcctacaggtcttgatcactaattatctgcaaaatatattcagaaactcaatgactgcaaatacgagtatttggttcatattcagtatccatcggtcaacctatgtatgtactgctatactaccatgacttgatcaataggataggcaatcttgactcaagctatggccattaccttttactggtgcacat

SEQ ID NO: 55305 - DNA, 354 bp, Glycine max
  Clone ID: PAT_MRT3847_20951C.1
tctcacgcgtccgatatttctatctctctctctctctctctctcattacaatttcgtcaaggccttttatgacgtcatagttttccttatttctttctttacgaacaatcaaatagtccacaccattactcacaaaactaatacatattaaaccgacttcaaggttccctatactattacgcttttcgttaacaactgcggcgtcacccgaaaccctcttacgaataacatgtgtcataagtgcttcaccgtcttcaccacctctacctccaccacattcttcaccaaaagtgcctgaatatcttctacggctaccagatcctgcatcttcgcgcgtccactgaagatatcttt

SEQ ID NO: 55306 - DNA, 549 bp, Glycine max
  Clone ID: PAT_MRT3847_20952C.1
acacggctgcgagaagacgacagaaggggggagtcccacgaaattagataattttcgataaatttgaaggaattaagttctcttatgctgaggaatatttaggtcataaaaaacaagttggaaccctttctgtgtagttccatcgcatcaaaccctggcaatggcagctacggccatacagaggttcccccaacacaaatacgtagacgcagttcgctggcttcccctacaatccgcattcgaccgattcgcagttttggcactcttcgacttcgattccgatgcttcctccatcgaaatccactctctcaacccaaaccccctctcattggaaccacactcttcgtggtcctctccttcccgcgtttcctccctcaaggcctcgcacttcctccagaagcccctcattgtcgcttccacttcctccggttctctccacttcctcttctccgattcctccgtcgcaacgctcgagtccgaggtctccattcccgagggcgcgctgcattccgttcccgcttcttgcgttgacctattggacggtggcgt

SEQ ID NO: 55307 - DNA, 197 bp, Glycine max
  Clone ID: PAT_MRT3847_20953C.1
tgtggttgttactgagaagagaatagaataaaagtttcattaagagatgcatgacaaaaggagaatatcagccctgcggctaataaggatccggcaggactagaagtcaaggacaatcctgacactgtataacgcattctaatctaaaaaaaagatcttattggcctaacggaacggacgggtatcctcaacatgat

SEQ ID NO: 55308 - DNA, 344 bp, Glycine max
  Clone ID: PAT_MRT3847_20954C.1
ccagaaataggccctaatattaggggggggggttcataattcagattatcccaactttatacagaagcgaccaattaccaaccattaaaaagaaaaatagggggtgcccctgggggcttaacacccccttcacgtgcccaactctctggctcttggtgaagggcgagacgtccccactatattttgggggtgcttgtttaacacaaaacaccagggtggcggaaccccatcacagtcttattgcttgtgtttttaggcacacattaagggtttaactttaccccaaaataggggatatttgtgtgaggcgcttgctcccccaacacctcatttgaaatcgcggg

SEQ ID NO: 55309 - DNA, 264 bp, Glycine max
  Clone ID: PAT_MRT3847_20955C.1
atgccggaagtccaaaggaagcattgttgcgcaatccgtgaaggggtgcaaatagcaaccaggcccacttgggccttccaggaagttccccagaaggcaccgccttctggaggaagcaacctagctcgcttgggcgagctgggtggcaagctcctccctcattttcctataaataggggaggagggaagaacaaaaatgttcaaccctcctgtgatttcgcgaaggttttccgccgttcttcgtcattcttcggtcttcaaccg

SEQ ID NO: 55310 - DNA, 173 bp, Glycine max
  Clone ID: PAT_MRT3847_20956C.1
ccttgatgagattgtgttgagggcagactttgatggggcgcatactaacactgttacacgatactggccattagaagttctaactgcacgttatagacaatattcaatgacgggtaaataaccattatatccttttaatcgaatacgactctccgctcgacttattaccatcc

SEQ ID NO: 55311 - DNA, 641 bp, Glycine max
  unsure (1)..(641): unsure at all n locations
  Clone ID: PAT_MRT3847_20957C.1
aggaagtcatctatccaacactgcagtattgagagtcatcaatgtggttaatagggaatacaaggaattggacttttggaccccaaaattcaagtttgctggatctcttgaaatactgaaagacagagagacaaggggtgattatgctacaaataacttagctggcccagtggtttggccaggaggcctaatttctgctgatcctattggatggaaaatgcctacggatacagaacgtttaaaagtggcaattcccacaaaccctgcttttgttaattttttgaaggaagactcccaaaagcaatatagtggtttctgtattgatcttttccacgaggcacggaaaattctgagtgacaagtattctgggatgccttatgagtttcacccctttaatgaatcctatgataaacttctacagaatgtcataaacaagtcccatgatgttattgtaggagatgtaacaatacttgctgaacgatcaaaggatgtgtggttcactcagccatacactgagtcaggcttatcacttattcttccaatagagactgaagggtcagcatggntgtttatgaaaccttntagctcgggaatgtggatcgcaactattggaatcctcatctacacaatgtttatcggat

SEQ ID NO: 55312 - DNA, 282 bp, Glycine max
  unsure (1)..(282): unsure at all n locations
  Clone ID: PAT_MRT3847_20958C.1
gnaagaagcagcagttgcagaagcatcaacacnacngtttncatngggaactgtaacagcgcnaccctctncccaaacccagccaanattcccgatncaggcaacatcatcaccccaaancctccaacgggatnactgtccttngtngcaactngaagnnnntccgtaggccgggntctgggncggtccatggaggacgctcgctcnagctanaacttcggnngnganttnggcagcngctaattcggcgtgangtaccatgtgaggcntaaacacangnna

SEQ ID NO: 55313 - DNA, 2869 bp, Glycine max
  unsure (1)..(2869): unsure at all n locations
  Clone ID: PAT_MRT3847_20959C.1
aacatagctcccacaactataaccagcaagagagaaatggaagcagcatcgaccacaaatcagcaaatagatactaattatagctctaaccctaatatcgaaggtcctttattattttttctgtatctctctccaaaacccaactttctctctcaagaaccatcaaatctcgatcctcccctctccctgcaagatccggtggtgggttccgattgctcacataagggtttggtctcgggtcggtcaaggctggcgggtatttgggtgtaagtaaatggcggatgccggccggaatccggctccgtgagtggtgcaagcgtggtgttgcggcggcggcgttgatagggttacagtgcggtgacgattgttgccaacaagagtgaatgcatgctgagcgtgctgcgcgtgcaccttccttctgatattacccattgtaggctgtgagctcacgccttacgtgctcctacgccgacctgataagaccgttaccaccgatgatttccctggaaaccgccccgttagacggtccatttcttgcgctacaagtggtatacgtggtacagagtgataaaaaggtttctgttttgtagtgtacattccttctgagcaggccgcactgcagtgccgaggattgtgtcaaagggctaaaataccttttgccaaaagttatcactactctacaaagtgtttttaagatgcatggcagtatcattaatgtcttacatgtcaatgctgcaggtgcagcaaatgtaaattgatgagaaaatgtgaatttataagggatgtttattatttcttaatttggtatatggatcattgaataccagcttaatttgtaagtaattaagtgctagttttaaaaatggatcagcacctgagaaagcaatcatttcttggaaagtaagatataaggattctttattgtactgaatgaaaattaattgcatgaacaaaggcaaaggaagaagtaataatttaagaatgaaattaaagattcaattaaagatatagataggagtataaagaaagcatgaaaggagggtgaaaatattgagagagacttttaaggtatcctatcgtagatacttcacaaggaaactgaaaagcaaggataaagctagtatgttattaggattgttgaaatgaaaatcttataaggtaggtagtaatacttttgaggccactttacaggacaaatattaactttaatattacttgctttggcgatgtcattactgggttttttccgtaattaaaaaggatgatgaaggaagatgatcacccaactatttatgaattcttaaagggatgtttcaagtaatcattgtgataaatttttttatacgaaattggtatgacattcttattatgttctttccaaaaaaaaaacatagacagtgataaatcaaacatttaatactattgaccggtttgcgtcaattttccgttgagaacaattttgatacgtgaaaaaataggactttgggtttaatatgggagcacattctttaacagatactgttactgaaagtactctaaaagaaaaatatggcgaatatttttttttaggattttgttgcacttatagttgttttagaagcaaaagtttacaataagtctgttgatattgcagggaatagacagtttctttgtgtgtcaaatacacatttacttgatcttactcgatttcaactttttcaaactgtgacagtacacccctctctaccttatttaggtgcacactcgcttgaaaggatgggagaaaattgctgcaagtgcaaatattccaatgttggtttgtggggactttaattcaattccaggaagtgctcctcatgcacttcttgcaatggggaaggtagatccatcgcatcctgatttagcagttgacccacttaatatattgcgtcctcacagcaagttggttcaccagttgccactggtcagtgcttattcgtcttttgctagaacggttggtcttggatttgagcagcataaagggagactagacaatgcaacaaatgaacctttattcacaaatgtaactagagattttattggctctcttgattacatattttacacagcggattcattggttgtggagtcattgttggagctattggatgaggaaagtttgaggaaagacacagcacttccttctcctgaatggtcctctgatcatatagctatgttagctgagttccgctgctgcaagaatagatctaggcgttgacttataaggtcagatccagaggcacatacagaaaatggttgaaagaagcttttggttgataagttattattaaagtggtagatcttgcctttgtctttttcccaggtatctccttgtaggggagtccttgcaatgatctgctctgtattatgccacctttgtctcatagaaaaattatgataatgccttactgattttcgcccatatcttacccaatcttttttccctataaagtgaaaattttcttcgtacgtttccattggttcaatatgtagcaattaatcgccccattctcaagccattccgatcttgtggctaatgagccttgggctttaatatctcactactgtagtgataatattcacagcttaggttattttgtatctgcttgatcatcagaaagtagacaaattcgaaacggtatatattgatattaaacagaaaagtgtttatgagaatactaccagtaagaagggacacagggagagattgttgcatggcaagtagaatactttatttctgtttttacctcctaattgctgatacggggaccagactaaattcattccatgttttgtaagaatattagcgtgttttctgggtagaatgtgatttagttgcggttnntttncg

SEQ ID NO: 55314 - DNA, 600 bp, Glycine max
  unsure (1)..(600): unsure at all n locations
  Clone ID: PAT_MRT3847_2095C.1
ctgaagcatggatacttctaaaaccatgtcatacatgtaccgggtatgtacccagtacttgttgggtactcatgggtacgtaccaattttattttttttatgaaaaacaattggatacttatgggtgctttttaggtacgtatcaagcccgtacctaagtctgtatgttacaaaagaaattgaagcacatatttctttatccattctatgaaaagaagtaggctcaatccaaagagagatgaagatttagttcttatacatacaaatcttcatcccctcttaaaaaagagtaagagttataaaaatattgatattcttaaattcaagttactactctttctcttgacaaaccagctatagaggcaattcttttgagtgaccatggacaataaaatgatgagattgaaactgttaaaatgtggtatcatgctattaaaatttgatatcatatgtattatagttttttattatgagatttttttgtcatattgaacaatttaatctccttttatattatatattatgcttatttgtgtttttttttatcacttataagatntagtcatacanatganattctatttttatatacatacatat

SEQ ID NO: 55315 - DNA, 1088 bp, Glycine max
  Clone ID: PAT_MRT3847_20960C.1
gatgggctaagtcaccttaagattgtcaccatgattttgtatgaggttcttagattatacccaccaggaattggccttactagaagtgttcacagagatatgaaactgggaaacctaacattacctgctggagtgcaagtttccttaccaataattatggttcaccatgaccgtgaactctggggtgatgatgcaaaagagttcaatcctgagagattttcagaaggggtttcaaaagcgacaaatggcagagtttcattttttccatttggatggggtcctagaatatgcatcggacaaaacttttccttgttggaggcaaagatggctttgtcgatgatcttacagcatttctcatttgaactttctccagcttatactcatgctccgtttacagtgattactcttcagccccaatatggcgctcatgtcattttacgtaaagttgaaatgtaaaatataataataacccttattttgatttgcatttcgcactgcaaagtttataatgcaataatagtagaagactaattgttacttgtgttgcgaaatgctattgatgtaccatggcagcaggatatattctacaatttaaaaagtcattagtgttactgtcccacctacacattttattgagcaggattcattggttgtggagtcattgctggagttattggatgaggaaagtttgaggaaagacacagcacttccttctcctgaatggtcctctgatcatatagctctgttagctgagttccgctgctgcaagaatagatctaggcgctgactcataaggtcagatccagaggcacataaagaaaatggttgaaagaagcttttggttgataagttattgtaaaagtggtagatcatgcctttgtctttttcccaggtatctcctttggggggcggggggagggggggggtccttgcagtgatctgctttgtattatgccacctttgtctcatagaaaaattatgataaggccttactgattttcgcccatatcttacccaatcttttttccttataaagtgaaaattttcttcgtacatttccattggttcaatacatgtagcaattaact

SEQ ID NO: 55316 - DNA, 1143 bp, Glycine max
  Clone ID: PAT_MRT3847_20961C.1
ctggctttcaacaatgtcatgactctgtttatgaaactgggtgaaccccagaaagtgcctcagctagtggagcttatgaaaaagaggaccattcccatgtccccattcacatatcatatctggatgaacagctgcgcctcttcaaacgatcttggtggggcggagagagtctatgaggagatgaaaactgaaaatgaaggccaaattggttggcacacttacagcaaccttgcttctatttatgtaaagtttaaggactttgagaaagctgagatgatgcttaagatgctggaaaaacaagtgaagccgaaacagcgtgatgcttaccattgcttgcttggcctttatgcagggactggtaatcttggggaggttcatagagtgtggaattccctcaagtctgtctcccctgtcaccaacttcagctatcttgttatgcttagtaccctccgaaggcttaatgatatagaggggttaacaaaatgctttaaggagtgggaggcaagttgtgttagctatgatgtgaggttggttagtgtctgtgttagtgctcacttgaatcagaacatgttggaagaagctgaattggtatttgaggaggctagcaggaggagcaaagggcctttctttagggttcgggaagagttcatgaagtttttcctgaagaaacatgagttggatgctgctgtgaggcacttggaggcagcgctttcagaagtcaagggtgataaatggcgtccttcaccacaagttgttggggcttttctcaagtactatgaagaagagacggatgtggatggtgttgatgagttgtccaagattctcaaggctaacaattttgatgattcctggattaaaagttgcattactgcatccaaatcgtctcctgaaattgatccaggaatgaaggaagattctcaagtctaccatgcgcaggagaactagattactagatatcatggaaaaacaattgtgtgtagcatgtaggtgcaattaatgtgaagcaagtgatttgactgttaacttggttttcctaagataaggaacaaattctgcataatcgtttataatttaagagaaaattacaatcatcccctattgtgatttgcttttaaaaaaaaaaaaaaaaaaaaaaaaaaaaaa

SEQ ID NO: 55317 - DNA, 274 bp, Glycine max
  Clone ID: PAT_MRT3847_20962C.1
caaatcgacccacacacctatatgtcgtacttatttcaaataacaaaacacctcattcaaactctgcactttgtcacatcaccctataaactaaaatcttgaactttacatccatacacattcataatataagatacaagctcccattgatcttactatacacttccatgttacccaaccactttttcacaaatcacatatctacccctccaatgcatattctaccctccaaaattgcaaatccatcttcctacaaagcctccttattataaat

SEQ ID NO: 55318 - DNA, 126 bp, Glycine max
  Clone ID: PAT_MRT3847_20963C.1
ttcacaactttcttatgtttactgtctaatcatgaaatgcaagaagcgtatcttgtgatctcctaaatgagtacaagaactgcatttgcacagctcataggaagctcgccaattgagaatgaaagc

SEQ ID NO: 55319 - DNA, 1131 bp, Glycine max
  Clone ID: PAT_MRT3847_20964C.1
agcaatggttgcagcaggagctagactagcatatagcaggcctgattcccataatcggtttcccatagtcttgatcacttctggggtgctttcatttgaccaattgtattacgattttttcaaggactgggggtttttcggaaacaacacgttgtcacatttttgctagagttttcaagtcacaccaccctgaggcctgccattctggaaggctatacatagaaataccttatcttatctcatttttgccatattggggacctgcaatgcagtgtgcaagaaactggtttgatgactctgatgttaaccatttggcaagcatggggaagtatgtatcagaaattctaccggttggagaatgagtcacatatcgacggcgagctttccatctatggtttgccatagtcttgatcacttctgtggtggccacagtttaccaattgtattgggattttgtcaaggactgggggtttttcaatcccaaatccaaaaacccattgctcagagatgatttaattctaaagaataaaagcatatactacatgtctatggcattgaatgttgtcctaagggtggcttgggtggagactatcgtgcacctcaaagtggggcctgttcaaacaaggctactagactttttgttggcttcactagaggttattcgacgaggacattggaatttctacagattggagaatgagcatctaaacaacgtgggtcgttatcgggcagtgaaggcagttccactaccatttcgtgacatagactcagacagctgaggtgattttctcacacttgtacagatttgtcctgtaaaagggataggcaatatagccccaagggaataaaattttgaacgtgacatccctcaccatgcattggataccaattgaagtatcaatcgacaccaaatgtaatgcaaaagacaaatgcataaatagatggcattttgtcttgtgaattggctatcataagttttggatttcatgttctagatcaacatacttagtaacaaaagaaaaaaaaaagatgtattcttttctttttgtcttctatttctgttttgttaaatcggttttaagaaaacatatttgaagatcgtgtatcgaatattttgtaaattgcaattag

SEQ ID NO: 55320 - DNA, 461 bp, Glycine max
  Clone ID: PAT_MRT3847_20965C.1
taacaaacgacaccaaccacagcacaattccgattcaattagggtttggactttccaattttccatggagccccaatctctccctcctcctcccaccatggacgacgcccaagacccttcctcaatttgggacttctcttacctcctcgacttcaacctcgacgaccaagatggtatttttactaacagtaactctctccctcttcccttaaacgacgacgacgacgccgccgctcccgagatttcaaaaaacgacagggtccgaaagcgcgacccgaggatgacatgctccaacttcctcgcgggtcgggtcccctgcgcctgccccgaactcgacgcgaaactcgaggacgagggtttgcccgtcaagaaacgcgcccgcaccgcgcgtgcatctgcgtccgcacgctgccaggtccctggctgcgaagccgatatctcagagctcaaggagtatcacc

SEQ ID NO: 55321 - DNA, 691 bp, Glycine max
  Clone ID: PAT_MRT3847_20966C.1
ttctactagtgcctgctcaatcacaactggtgggaatctctggcggagaaaacattccacaaataatatttactatgcaagttcttgtgcgtcaaaagcttcgaaatacaaaaagaaaactcaaatagaatgtaatattttgaggtcacaacagtcaagtttgaaccatcattacaagcgcatcgaaggaggggcaacatatcaagattgcgataaaaaatacgttgtgaaagcaatccctgaaccaacttttgattctgaaccttgtgcttccaatcccgaaaacgttgtggactctgcaaaaaaaatcttagatgttttctaccatttttgctatccatactcaatgattgccataatattatgtgcaatttcttcgtctctacttgcggtggagaaaccatcagatatatcttcatcatttcttattggtgtgttacaggctttagtacctcatttgtttgtcgcagtttttgctaacgttgtgaatcaagtgttcgactatgacatagacaagatacacagaccatatcttccgttggcatctggacaattatcatttacagctgctgtcttcattgctgcatcacttttaattatgagcttttggcttagcttggttataggttcttggccgttgatttggaatgttgtattgacctcgtcagtatggaatgtttattcaatcaat

SEQ ID NO: 55322 - DNA, 1564 bp, Glycine max
  unsure (1)..(1564): unsure at all n locations
  Clone ID: PAT_MRT3847_20967C.1
gttcaatacattggccacaaagcacagaactctgtttagtacctgaataaacagagttcaatacattggccacaaagcacagcttacgcgtccgcacactacagcgagacgacgacaataggacggggactcgcagttgtattgttgaacaagggtttctctgtctgcttcttcactttctctcgtttcaatcgaaaccaaaacaaaatcatgggcagaaaattcttcgtcggtggcaactggaaatgcaatgggaccactgaggaggtaaagaagattgttactactttgaatgaggctaaagtccctggagaagatgtcgtagaagttgttgtgagccctccttttgtgttccttcctgttgtaaaaagtttgctgcgccctgatttccatgtttcggcacaaaactgttgggttcgcaaaggtggtgcttataccggtgaggttagtgctgaaatgcttgttaatttgggaattccttgggttattattggtcactctgaacggaggcagcttttaaatgaatcaaatgagtttgtgggagataaagttgcctatgcacttcaacaaggtctaaaagttatagcatgcattggggaaactctcgaacagcgtgaagctggtacaacaacggctgttgttgctgagcaaacaaaagcaattgcagctaaaatatcaaattgggacaatgtcgttttggcctatgagccagtttgggccattggaacaggaaaggttgcaactcctgctcaggctcaagaggttcatgctgatttaaggaaatgggttcatgacaatgtgagtgctgaagttgctgcatctgtaagaattatctatggaggttctgtaaatggaggaaactgcaaagaattggcagcacagcccgatgttgatggatttttggttggtggtgcatccctcaaggcggaatttgtggacatcataaacgctgctactgtgaagaagaattgaaattcgtagttaggaactgataatgctgcctttcaagctgcttcggaaattgctgtttttgagttttggttctgtgctttgtggccaatgtattgaactctgtttagtacctgaataaacatgctttcctttgatctcatccataggcgatcaattggattttgattaaatttctgattgcaaaaatagtgtaactaccataacatttggtgggtaaataatgttgaacttgactgtaaaaaaaaaaaaaaaaaaaaaaaaaaaaaaaaaaaaaaaaaaaaaaaaaaaaaaaaaaaaaaaccaaaaaaaaaaaaaaaaaaaanaccaaaaaacccaaaatattaaccctttaaaaaaagaaaaattcccccctaaaaaaaaaaacccaaaaaaaaaaatnccggggggaactgggcccccgtttttttttccataaaaaaagaaacccgcccccttaagggaaaaagcctgggggccctattgggggaaaaaatttaaatttaattaaaatccccccaaatacacatttccaaaaaaaaaaacttgacccccggggggctttaaggagccgcccacccccctttgagggggg

SEQ ID NO: 55323 - DNA, 116 bp, Glycine max
  Clone ID: PAT_MRT3847_20968C.1
ggagcaggatcattattgcaaactaaaattaggttttattactcatgaattctttgttgcaatgaggttagttttgtcctaatacagatgtatcaattaaattaacgaaggtaatg

SEQ ID NO: 55324 - DNA, 580 bp, Glycine max
  Clone ID: PAT_MRT3847_20969C.1
tcgggataggtgtctctgatcctcctccggctttgtgtctctttgcacgattcctctctgttttctttttcattttttgtcttttgatttctgaagctttgaaagttgtttctgaaaagcaagttcagcttcttgattggatcttgattcctctacggtccaattaatcgttttttcaaacttgcaatatcaaatcttgcagtgtcactcgtctgaatttgaatttttctctgatctttcaggccctttatcactgcaacactttaatttttttgatatatttgttaaatcggtttaagcaaacgcactctgtcccgaaaccgtgttttggcacgaatgttttgaggcaatttcttcgtttgcgacattaacggagtttccatttgtggaggtttcgttccagtaaactcgctcgtgagatctgtatttagttgctgatcttgattttgggcgaatttgttgttgggctacaattttgaattgtctccttcttgaatgtttttgagactgttcgatttcgttgagacgcttgaatgttgattttgaatgtaaattcaatggataaaagcaaattcaatgg

SEQ ID NO: 55325 - DNA, 180 bp, Glycine max
  Clone ID: PAT_MRT3847_2096C.1
aaaaaaaaagaaaaaaaaagagaaaaaaaaaaaaaaaaaaaaggaaaagagaaaaaagggcgggcgaacaaaaaggaccaagcttacgtaggcaagcaagcgaagacagggcggccgcaatagaggcaccaagctacaatgcactggccggcgacgtacaagggcggcactggggaaacc

SEQ ID NO: 55326 - DNA, 1011 bp, Glycine max
  Clone ID: PAT_MRT3847_20970C.1
gctatgtgcgcctccgtgaggcgtcaggaggggggggggcctggttttttcttgtctttttcccctgcgggggctttggttggtcgtgtacgaatgttttattggtatacagactcaaagggtggaccatctcttctctcaggagagtgttggttttatattttcaattagttctgtgggggctcttttaggtgcaatactataccagtatgctctaaaggattatgcattcaggaacttgctattctggactcagttgatttatggcttgtcagggatgcttgatctgattctggtctcgagattgaaccttaagtttggcataccagattatttctttgttgtgattgttgaaagcatagctaaaatgactaataggctcaagtggatgcctatgcttgtgcttagctcaaagctttgtccctcaggtattgaaggcactttttttgctctcctaatgtcaattgataatgttggacttctctcagcatcatggggtggtggctttgttctccacatgctcaggatcacaagaacaaagtttgataacatttggttggcgattttgatccgcaacattttaaggattgctccactttggctcctgtttttggtgcctagagctgaccgcagctcttcaattcttccatgtaaaagcatgaattcagaggtggctatcgacccttcagacaccaaaaatgttgaattggtgtcccttgtacacagtgttgatggtaaatagtggaatgaaaagacattcttttggattctcaattccaaatacacgaaattaccaagccagtgtagaattaaacgtgcaatttgtttggatttaatgtggaaaaaaaataagatgattttgagaggacagatctgtgtagcttatgtagtttgagggtgaagggacatccaagcaagagggattccctaatgaatattaatcggtggtgggatatttatgtaaagtaagcccttggtatatctttatgcgtcgatctcaataattttggt

SEQ ID NO: 55327 - DNA, 442 bp, Glycine max
  unsure (1)..(442): unsure at all n locations
  Clone ID: PAT_MRT3847_20971C.1
naggggggcgcgaagtccatgacaacgacatatctatatctagggtagataacaccggactttctaatgtccgagactatgaaaaacatggatatggggtggaggaatataatgaagccttatatgaagaatgggtgaacaagggcgtcccaccggcattgccagagactgttatatattacaacaagctgttgtatattggctataagaaaggatgcttgggatgaagatttattgacataatggccgtaacagaagccatcctaaagaatgctgggtttcacacatggcatcagataattctgaaggattcacatcttatcactgcaaatggactgtgatacagattacctgcgagagagaatctgatgagggaaggatactgtagtgtaggaatcatgggagaccaatggagctatctgctagagcaccacaggggcga

SEQ ID NO: 55328 - DNA, 577 bp, Glycine max
  Clone ID: PAT_MRT3847_20972C.1
tgtacgacctccgcccttttttttttatttttacacttttcaagaaaagcccctaaatgaacatatggtactcgcccaacaattgatggggggcactgacaggacaccctggaaatcactaccataaaaagcgggtgccacatccagtgactactatgagagagtgatgatacacgtcccagacaccctctcaggcatccacagaagaacccctaacatattgcatcctacacctccttacacatataccatcatgaacactaacacgccttccaaccaaaccctaacttcccactcccaaatttggacccactattacgaccgcttctcccaaaaatctaaagcaactgcaccctcagatcaaacttcccactaccaccctccttgcccttcttcctcttccttccagtgaccggctacataaacatctcctacggaacatacccctgcacgtcctaatcctaaagactacggctccaccgtctgctacccggcggcgttctacttgatcagcctttgccgtggattccaccaacactggatcggtgtcataaaccggcgtctgtgaccgatcaca

SEQ ID NO: 55329 - DNA, 519 bp, Glycine max
  Clone ID: PAT_MRT3847_20973C.1
ccttcgcgtccgcgacaaaatggcgcgccgtcccgctcgttgctaccgatactgcaagaacaagccgtatcctaagtctcggttcaaccgtggtgtccccgaccccaagatccgaatcttcgatcttggccgaaagcgcgccaacgtcgatgacttccctctctgcatccacctcgtttccaacgagtatgagcagctgagctccgaggctcttgaggccgcccgtatttgcgccaacaagtacctcgtcaagaacaccggtaaggagggtttccacctccgagtccgtgctcaccctttccacgtcgtccgtatcaacaagatgttgtcttgtgccggtgccgatagactgcagaccggtatgcgtggtgcctggggtaagcccaacggcactgtcgcccgtgtcaacattggccagattctcatgagcgtccgcactcgtgatgctaaccgtgccatcgccctcgaggctctccgtcgatcccagtacaagttccctggccgacataagatcattgt

SEQ ID NO: 55330 - DNA, 1657 bp, Glycine max
  Clone ID: PAT_MRT3847_20974C.1
gaaaggaaacacgaaattggagcgaaattcattaatgggcaatcaaggatcgaaagctaaaatcgcaatccttgtcaacgtttttttttacagtccccactttacatcacacatatattcaggactctttcatttccctcctttttttttttcttcgtttaattataatctatatcaacttaatttttttaaaatcatttttttttaagtaacacctgcgtcctaatctcagtacttccattccagtattccaatattccatttaaacgacaccgtaacgctattgccagtggttcccgttgtggatcatataaacgtggccaccgtaccgcggcagaggaatattcctcccggaggatttcgatttctccacgccgaccggatacgccgccggcgacggcgacatctgatgtacgcagcggtctgacaccggcgccggagctctatacctccggccagagtcactggcgccggtagggctgcaatacgacgaggacgaggacgacgacgaagcagaggaggaagagatggacgccgatttcgacggaggagtggaaaccttaagcgacggcgatctcggcggcgtcggcggcgagaggaaggctctgattttcagcgatgaaacgcgatcgtattcctcgatgaggttttgcgagatcctcgtcggaggtgatggagacaagagcgtcgaggtcttcagaaggtaattggcagcggaggtgcctcacagaggcgccgcagagctcctctagcttcagcaatagctcggagaatggaatggagcgatcgacggcgaggacgcaggtatggccgccgaggtaacggagcttgccatcggggtaacgaaggagaattttgccgccgtagctacagaggaatttgagagtggatttcggaggttgggaagcggtttgggttggtccgaacatggttggttcgggttgggatttagattcgggtaaagtaaggtccagttttggaagaataataaaatggaaaagagttgaagagaatgtttttaagagagtgaaggtgcttctcgtgccgaattcggcacgaggagagagagagaactagtctcgagttttttttttttttttttagagacaaacacaaagaacaggtattttacatttaactaaagaacttaaaagcttagcagaaaaaaccttaaagtgttactacactaggcaggaagcgtcattcataatcctaagatcagttactagctcaatgaacagaattctcatcactgtcaattctagtgccattggccataggcgacacaagaccacccacaaacctgtatgaggaaggagaaggaggaacttttggagaaaggttaagcatttccaaggcttgtagtctaagctccacagggtagtcagcaacacaaccaattctaggtcctgccccggttgaccatctatgcgaaagttggtgccccaattggtaggattttgtagccttcttggaattgattctttgcaatatcgctttcttcggcacatcagctcttggactctgaagcccacctgagagagtccttttgtaactgccaacagatccaggttgacggtcttacttgattgaggatgccgtgttctcggcttgctcagaaactacaggcttggatatcttaccattgctagaatct

SEQ ID NO: 55331 - DNA, 351 bp, Glycine max
  unsure (1)..(351): unsure at all n locations
  Clone ID: PAT_MRT3847_20975C.1
tcgattacacaaccggaaacacgcggacggcggcgcagacgatagccacagcaaacagcccgggaaacaacaggagcactgagacaacaagcaacaagggcagagagacggacaccccggcagcagagnacacaaaagcaaagcaaccaagacaaaagccaccacacgacancagggggcagccgaagaccgagccgacccacatacgcccagcccaacgaaccgccgaagagaaaaacaagcggaaacagagcaacggacaaangcacggcagaaggaacgacgggcgacacaaacacgggacgaaacacgcgaaaaaccacgcgncgacagaagaagaaaagaaggagg

SEQ ID NO: 55332 - DNA, 1062 bp, Glycine max
  Clone ID: PAT_MRT3847_20976C.1
gccacgcgtcattctaaacttgaacttgttccagtccctctcctcaatattatccctgcgttccctttgcttctcactcctccttttctctctctctacgtttccatggagcctccaccttcctattcctattccccattcccgttctcgcttgagcgccacccacaaatacaaatgcacgatcccatactcttcttcctcttcttcgcttctctctcctctcttctcttcctctctttctctctcttcaagcgcttctcaacaaaaagagaacacaaaaaccatactcaaaaagtgcccagcttgttggaagaggaacacagacccaagaagaagaggaagaaacctaagaagaagagaacccaagctgacgacgccgccaattcgggttcggggctccgactcgaatccacttgtcagtatccgtttacgtcttccagtagcgttatgcagagaaagatcaaacagcagtatgatgacctcgtcaaatgcaaccacttgaagaaactcacactgccgcaggtttttctcaagtcatatttgaattctttgtttgcttcctgtttgatatacgtctttgtttttttcactaatttattacccttttctttttaatatagaaatctgtgctttttaaataaagggtaagaacagttgctgataggaaaaaatggtgtggtatttatatgtcagtgagcaatctatgtatgtgggagagaacagagatgagtttgctgagattacttttgaagaattgttagcacaggagaagaaagattcattttggcaaagaaatgggaaatcaagactaagctcaagctagtaacactactagcttggctgactgtaacctcctgagttagtttagtatgtacatccaatacctgtagctgtgtattgtcacaggaatgctctttttggttccttgcctgtgccaattttggttgttaatggaatatagatgatacaactttgagtttattttagaaatttataaatggaagccagttaaattgaagaaaatgaaatacaccatatataaagaagcaaatcaaatgaaaa

SEQ ID NO: 55333 - DNA, 484 bp, Glycine max
  Clone ID: PAT_MRT3847_20977C.1
gcttcgtccgtttttatagtatgtaaaatctgttttttttttttcttttttgaatgcttttggttagacttaacagaaatggcattagaaaaacccccttcggcccaattgcatttgcactcgtccttggacattgactaatctcaaattagctggtaggtgctcatcaaactctatacaccatcttttactaagttttccattcttacctgggcattaacaaattaaactgagagaataggtcctatcagagaagaaatgtgggaagtaactaaactatgttagaaatccctaaaacctgttaggtcattaggtgtttgaagggatctaattatgctgtatgggcattgaggcatatgaagaatacctaccatacatctaatgcttcccaagcttagctagcgttaacttttgttaaagttaaataaaagggaattccattgagacagttttaaataattcctttcgcgcttgaaccttgaaa

SEQ ID NO: 55334 - DNA, 666 bp, Glycine max
  Clone ID: PAT_MRT3847_20978C.1
ccaagggaaaaaacattgatttactttacgggaagacataccaagcctattgctttttactctgctaaggaatattaatttatctaaatctcttaacaaatccagaattttgaatcagtatcagcaaaatatagaaagcaacatgcatatgcacgtcagtatggctgccacaacataatagctagaagcttgcaagaatgcgtgaaaatacccacattagaagccataaattgaaatacattgaggtgtgagatttcagatttgcgtgccattaaaccacatttctaattatgaatgcatctagtggcacctgcagtaccgttcccttgatttaggttcatccatatgatgagggagtcagagaaccaaaccatgtttgacaattcaatcagcttcaccttggcgcattcgctatgttttctttcattcttgaggttgtctggcaatctggcatacctaactacgagaaattacatgaaaaggccagacaaccttcttctccctgggatgaaacaaagcacggcccaattccatttgtttaatgagacttacacattgagtctcacaattcactttgttgaatgaatccgttatatgctcagctgctgattagactgaccccaaatcctttcaacacccgctgcaggggtttataagttccataat

SEQ ID NO: 55335 - DNA, 936 bp, Glycine max
  Clone ID: PAT_MRT3847_20979C.1
tttttttttttttttttttttttttttttttttattttttttttttttttttttttattttttttttttggaataatggctattactaatgattattaaaatgcagtttatgtacatcccgaaaaaaacggacatgaatcaatgaccgaaccaaatatttgaataaggtttcaagcttagcagcctttgctgctaagtcaaatgtaatgagcaaattctatattgcttcataaattcttcagcaccaaacttttggcatgcaccatgacaaatctccgtttccttcaaattcagcacacatgattctattccgaagcaagcggcatgaggaggaaaaccttgtacagagaattttggtaaatgtttaaacaggaaaaaaggtatttatgagtgcagagctggtatatcttgcaggatttgctccaccacaatgccacaagcaaatagttcagccacaacaagtgcaacatttgcatttaataattcctttcgaccataaagctcgggttccctcttgtgcattgcccatgccattgctggaggaagcactccatagagcactgtcatgcaatagcccccagcaatatctgtggcagcagagaatgcatccggaaatgttgttgagacaaagagagagggagcaactaccattgttgcagctatgacatttattttattcctgccccaccaattttcctttttagtgggaagggaatgccaggttccatttttaagttgctccttgaagaactctgagaaggctaggagggtgccaataagtgatgtacctactgccaaaagtgagaaggcagcaaccataatagaaacaccattccatctcaacctatataacaactaaccggatcaaccacttgttctgcttcagctgcaagaccaagtgcaactgcatcccagacaagcactgccaccagtggc

SEQ ID NO: 55336 - DNA, 1271 bp, Glycine max
  unsure (1)..(1271): unsure at all n locations
  Clone ID: PAT_MRT3847_2097C.1
cttccttgcataaacagatggtttggcttcaactaggacattggacttagcatcaacactggaaacaggatctggtaatgcctgctcagctggtgaaagtgactcgaataactacaaccttaggtcggtcctcacaattgcattccaatttacctttgagaaccatttgcgggacaatgtggctgttatggctcgccagtatgtgcgtaatgttgtgcgatctgttcagagggttgccatggcaattgctccctctaggctcagtacacagttggggccaaagtcatttcctggtccaccagaggctcttaccttagcaagatggatctgcaaaagctacaggctccacacctgcacagagcttttcagcgttgagtccacatctggtgatgcaatcttgaagcaactttggcaccatccagatgcaatattgtgctgttctgtaaaaacaaatgcatctccagtgttcacctttgcaaaccaagctggacttgacatgcttgaaaccactcttgttgctcttcaagacataatgctggataaagttcttgatgaagctggcaggaagtttctctgcattgagttctccaagataatgcaacagggatttgcatatctgccagcaggaatatgtgtatcaagtatgaatcgaccagtgtcttatgagcaggccattgcatggaaagttctcgatgatgatgattccaatcactgccttgccttcgtattcatgaactggtcttttgtctgatgggggaaccatcatttagatactttattatatctattaatttatattttgagtactttactaagatattgtcacaccaacaacgaatgtaactaatgactggatttcatgaactcatggttgtgtgtgccattagattagctttgctttatgcttttaccaaggatgtacctttcttactatataaactccttgttgaagtatagcctacttattcctaaaaataatacttcactggcaaaataaaaaaaaattaaaaaaaaaanataaaaattgaaatactgaaaaaaaaaaaaaaaaaaaaaaaaaaaaaaaagaaaaggggcgccccccaaatatggacccccccaacccgaaaataaatccggaaccggaacctgaaggcgtcccatttttccttataggaattaaaattaaacctgggcaaaaccatggccttaccttttcccgggggaaaatggtttcccgttccaattcccaaaaaaaatccgacccgaaaccttaaaggcaaaagccgggg

SEQ ID NO: 55337 - DNA, 1965 bp, Glycine max
  unsure (1)..(1965): unsure at all n locations
  Clone ID: PAT_MRT3847_20980C.1
gnaatattggtaaagatacaatttcggagtctgcccccggtgtcgttcacctgctgcggcctaggttggtactcccagtgggttggccctgcctggtgtggggggctcctcttctgctgcttggaccaggcccggcacgcattgttcgccacggtgaaaattcaggaacaattattgttgatgaagatcagcaaaggcccaagaggaaacagaaagataagcattatattgactgggaggcaacacttgaagatcaagaaacaggtgctgtaagcaatatatacgaggatactttgtcaagctagatggtcggtgtggctcattggcgacggcttgggtgccaacaggcagttcatcactatattgacttggaggcaacttttcatgaagacccaagtgtagaagggatcaactgtgggagtgcagatgatataaacataaagtcagcatgtagatctttctgacacaattatgcagggttctgctgtcagttgtcagaaaataccttggaatgagggaaatgccaagttagaagacagagaaagttctggcaagaagttaaagacaggtttcggtgggatttatggttctggaggtagagactcttttaatgacagttttacatctcttggaaataatcttggctcctgttcttcagttgaggacaaaggatgtgaggaagcttgtgatgagaaaatcatccgggaggacttgggaaccctggaaagaaccttctttccagttggcacacagaatattaccaccccagaggaaacagaaagatgctcatcatattgacttggaggcaacacttgaagatcaagagcttgtgatgagaaaatcatccgggaggacttgggaaccctggaaagaaccttctttccagttggcacacagaatattaccaactcgctatcagtgatggatagtatgtcaaccaaaggggttggtgagtatgatgaaggatttcaagatgggattcccaatctagagcttgccttagggggaaaaacaaaaccaccaccagctgcgcctaagggtatgctgcctttcttagttggggcagtagacaggcaaaataaccaccctgataacttgggagacaggcaggaggatgaaggtgtcgctgcatctctttccctctctctgtcctttccatctccaaacaaggaacacacaaacgctgcagagcttttgcctgatgggcagcgtgtgaacaacccgtttttcctttttgggagaaaataaatctgctggctgcttatgtgttgcttccaatcatgtaaattatcttatcttgttcctgatggcccagcctgtatgatagatagatataatcttccagcctctctccctacagaaaggagccattgtcctcaacaagagtcaataagtttttttttttaatcctttgttacatacatgtttttatgttagtttttttttgttcagaatgcatagttaacggctgtttgtatatatagagagaattgaagccggcataatttcagatgttacaaggaacttgcgggtgactatttttatggcagggtttcctctgttcctggctccattctgtctttttttcatcgttattcttggtaagcgcttaattattgaacaagttctatactgaaaatgaaactcctgttgctgaaagtgaacttaatgattttggtgtgtggtttgttcctctcgatgattacgaaggactaatctgaatgacaatgccagtgttgtaatgctgctgttttgtttttctgcaatgcgatttgtggcatactggcatatgcattaaacaccgcgttgagttgaaatttaaaccaccaccgttgcaacaaaagaggtgggaattctgtaactcaccagcttctctagcagttacttattttgacatgtactggtttgaggaagtcccccatcaattgattcttctttggatgaataataccagtattcttgggt

SEQ ID NO: 55338 - DNA, 178 bp, Glycine max
  Clone ID: PAT_MRT3847_20981C.1
gttagtgctgcgtgcctccagctctgctgtgtcgtattgcggtcacagtgtcggttgacctggatgtgaagtctactacgcgcgaattgcgtgatgtgaggactctgcatgggcgtgtctcaatctcagtgtatggggaaccgggcaagtcaaggtcctcatggaatagcgccgtggc

SEQ ID NO: 55339 - DNA, 1118 bp, Glycine max
  Clone ID: PAT_MRT3847_20982C.1
ggcatggcactgaaaaaggaagaggaaaacctctcattttctctctctctctctctaaacacagatttcatttccaattctctatctctagaaaatgggaacaacaattcttcgttcccacgattgcctccaaggccggttcctccacaacgaagccttcgccattgccgcatcacgtgtcgcatcgcgaagaaactctaatcctaacaataatagcttcgcctcctccgccaaaccaaaccgctgccggaagcggagtccggtcaccaatcgagaccgccgtcgatctccggcgaaggccaccttgccggcgaatctcgtcatgggacacgttaagatcctgaagcgaggcgagaaattgagcctccagaataataccaaccaaagactcgcggagaacgtttcgatgaagaacgatatgggcctggatttgttattgggctcgacggatcggttgggcccggatccattaaccatgcagaagcatattagggtttcagatgctaacaacaacggcgtgtatgcgggatcggcgttcgtctcgtcgccgcatccaagttccgttccggtgccgggatttctagggcggaacggcgcagccaccagcgatttgcgacggttgctgcgactcgatttggaatgatattatttcggtgtttgcagattatattgtgtacttatgcaatgattaggtgaagatggatgatgattagctcgcatggtctctgacgcgcttcctttattttttcaagaggatagccgcagggtgcgggcacgtgaagaagaaacggagaaagcaatgcttgaaggtttttagggagtggagatttggtgttcggtttctgaaagggggtgttagtttgttagatagtgatgccgttagtttttaaacgctgttaaaagacggaagggtggggttaagaaatagaaatgttggtctgatgcatgtgaatctagaatgtgtagttgatggggtttcgtatgggtagaaagaaagtttgatgcgttgtctgttttaggtggtgtttgtatgatgttcagttctcattatcatgctgataatatgtagttgtgaatctttatattagtaatacaagaatgtttctgatattagcttt

SEQ ID NO: 55340 - DNA, 389 bp, Glycine max
  Clone ID: PAT_MRT3847_20983C.1
ggatctccctgctcactggtcggcgttcgtccttttttttttttttttacattctttttaaagaccattcatcttatcacattttcaacagaacattagacgaccaatgtttaatcgaatctccagatgtgataacaaacaaattgcacaattataaaagaaaccatactcgggtgaatcacgataactgtctatataggtcccagagcttgctggacatcagccttcaaattctccaaagcttcaactgcggagccgcatcgaaccattgttgtgataaattttgcactgggccctttctgactgcggatgacccccttacgaccacatgcctgggagatccacaatgctctaacaggcaccctacgaggccgtcatttatcggattt

SEQ ID NO: 55341 - DNA, 1335 bp, Glycine max
  Clone ID: PAT_MRT3847_20984C.1
ccacgcgcccggtgaagcgcagtggcagtgaagcggaggtggcggagaagggaggcagagaggttttggcaatttctctgttctactggtaagcgaaaatgaattattcagtgcgacgagtgttgccaatgtcaagggttgttcttcggtcctacgccactgtcactgcgaaacccaacgatattccatttcagcccaaacttgctaactccgttaacctcatcggtcatgtccagtccccgattcagttccatgtctctcccaacgatggctacgtctgggcctccaccgttatcacgcgtcaagactcctctgacctctctttctcgattccggttatatttgagggtgatctcgctcatactgccaaatttcatctcaatctaaatgattgcatccacattgctggaaaactcaccactgattcaccccaattggaacacctccacccccaatctaatattcaggttatggtacaaaccctcaattttgttcaacgatatccccaacccaacaccaccacatcaattgatttgaaacctcaacctcaacctcaaccagaacactccatacccagtgcaaagaaaaacccggattcttcttcaccgagtccctggagagaccttctagataatcccatgcagtggcgtgatttccgtgaaagcaaacggcaatggattagtaaaaccaaagcaccctgatttcaaacgcaaggatcgcaattctctctggcttggcaaggatgaaaagtggggttttgcctaaattggaaggacttcaatttgatgttccaactgctatatccaaaaaaggtgatggtggtgagccctgtaatgatttggtgcaaaactatgctaactggtgggataatagattaaataagaggaatgcaaaagctcccgatttcaagcacaaagaaaccggtaaagggttgtggcttgattcttcatcagagtgggttttggaaaaattgccgccacctctgaagcctaaacaaagtgtagatactgaaaggacactggtttcataagcaatggacagtgaagtagaaaatggagtcattctctttgttacacttccatgtaattaacttatgccttcccaagttctgtttttgtgatattttttttttataaaactaagcatttcaaccattcggctactaagcatttgacttgcagtctttacctaggcggatatagatatattagctagctgcttctgatgtgaaaatgcatttatcatcagacagaatttctgctacttctgtacatccttattccgcatatgaggggaagtgtttttgctcaattgatggtggatttcatgttcctc

SEQ ID NO: 55342 - DNA, 392 bp, Glycine max
  Clone ID: PAT_MRT3847_20985C.1
tctggaatggagtctaaaaacagagatggaaggcatactaagcagggaaaagcgcatggatcatggcggcaacgaaatataacagaatcaactaatgtgcatgatgtactggaccatgattcaaactctgaaccaaatgttcagagacaaacagagcatcatcatgatcagaagtctgaagtaagctttgtgaaagggcaaacaaagcattttaatgactctggtgatattgatggttcaaacaattctaacaggaatgatacagctgctttggcctcagttcctgttattaaagatcattcagcaacaagtagagggaggcgggcccctttcagaggacacaggggtgctggggggaaccgtgatgttgatgacaaaaaaaattctgggga

SEQ ID NO: 55343 - DNA, 647 bp, Glycine max
  Clone ID: PAT_MRT3847_20987C.1
cccacgcgtccggtggatacatggctggtatattgtgtgccactgtctctcatcccgctgataacctcgtctctttcctgaacaattccaaaggggcaacggttggtgatgctgtaaagaagcttggattatggggtctgtttacccgtggtcttcctcttcgtattcttatggttggaactctcactggagcacaatggggaatatatgattcattcaaagtttttgtggggctgccaaccactggtggtgttgctcctgctgctgttcttgctcccgcttctgctgcttagcttgcaaaggtgtaaaatctccaatggattagcaagataacacttcgatagttttgtttcagaaacacagaaaaccagcgaatgtagggaccataaatattcagagaacttctgaagttgatagataaggaactttatatatagtgaaagagaatgctacatgtttttgagatcttggttaaggaataaaaaaattagaaaggtttataaaaaaaagtgtcttcataataaatcttaaaactttatgtatatcattttttaatcaatgtcctgataaccctgttttttgtaattaagattaatagtgtagttcactaccgatcgttgaatttaaatttaaacattattttagga

SEQ ID NO: 55344 - DNA, 252 bp, Glycine max
  Clone ID: PAT_MRT3847_20988C.1
tggaacctttgggctgatttatgtgcttgcatggtcgtgagaagatgatagaaggggatctctatactcaatcacgatcgttccttacgggtttgtaacaacgacgagtattagtcctcccgtctctctactctcccgtgttcctattattctacattcattccgacttactgtcgacactgggtctaacaacgaacgccatttcgccgaaaacggaggtatacactacactccgctagatacaatagtacc

SEQ ID NO: 55345 - DNA, 250 bp, Glycine max
  Clone ID: PAT_MRT3847_20989C.1
acccaaaggtgcactcatgctgatgctaagaatatatttatagagtacattattgtataataggactctctctaggtttcatcctaacttactcgcgccttcttctgtcaaatttttctatagtctatacctatatttattttattgactttcatattacatcctttatactttgaaaaccttctcaatacttaacttatttaatcgtcatcaaatacttttttatataattaatactattacttacata

SEQ ID NO: 55346 - DNA, 303 bp, Glycine max
  Clone ID: PAT_MRT3847_2098C.1
aaaaacctaatgcatgcacagtctggagccatctctcccaacgaaggaatctcccaagagtcaaccaacaagggaaatggtaaaaaatccagagtccttctgaagcaagcagcacaacggaaactgaaagtatttttttttcggggggggggaaaaagacatctttcactggaggcaaagaaaaaccaactgcacgaggtcttgcctgtgtcccccaaacacaatggcaagaacccttaaagctctagctcccagagttcaaacaacctggcaagagagccctctttgaaacctcatgaacat

SEQ ID NO: 55347 - DNA, 1133 bp, Glycine max
  Clone ID: PAT_MRT3847_20990C.1
taaacatatttcaagcgtttcaatttaatgcaaaattgtctaaggaacagagttgcaatcagctacaatttcaagctgtcgtcacaacataagtatccatttccctcgacattaactcaaattttggttacagaacaaaaaaatatttgttactaaatactgattctgactaggacaggatagccatgacatctgaggccctcaaggcaatgtagtcagaaccatctttgcccttgaagtcattccctgcatatctggagtacagaactgtattcccaggcatgacggacaatggctttctgttaccttcctcatccagaggccccggaccaactgctatcactgttccaatagatggtttctccttggttgcctctgtgagcaacaaacctccagcagttttttcctcagcttctgcaacctttatcaagactctatcgttcaagggtttaagatccttgacctcatcagtttcaaggataccaacaatgtcatcgtccttcagaataagatgttttgaaccattgaactctacctcagtccctgcatactttgaatgcacaacttgtgcacctgtcttcacactaacatccactttgcacttcccaaccgacttcccttctccaacagcaaccacttcacccccttgaggcttgccttgagcatttgctggcagtaaaatcccacctgcagtcttctcctctgcatccttaattttcaccagtactctatcacccagaggcttaacagtggtgtgcttgggggcaacaacagtggcggctttgacaacgaaagagggaaacgagggttgcgtgagtgttccaattctgacgtgcccagcagaagaaaatcgaagcgctgaaggttgaaacctttcaaatgcaggcaagttcctcaatgatgcagtgatttgagaggttgccattggagccgcccaaaaaaccaaaactgaaaattaaccttggacaacagaaaatgtatcataaacaatgctgttggaatcgtgcattgcattttcctgagtcactccgacaacagcacaaaattgagattttcgttcatgttatccaattgaattatcttaaatttcccgagaaacaatagtttagctttgctaaaataaaaagataaat

SEQ ID NO: 55348 - DNA, 1075 bp, Glycine max
  Clone ID: PAT_MRT3847_20991C.1
agaaaataatatatttcaaacgtttcaatttaacgcaaaattgtctaaggaacagagttgcaatcaactatatttcaagctgtcttcacaacataaatatccatttccctcggcattaactcaaaattttgggttagggaacaaaaaaatatttgctactaaatactgactaggacaggatagccatgacatctgaggccctcaaggcaatgtagtcagaaccatctttgcccttgaagtcattccctgcatacttggagtacagaactgtattcccgggcacgacagacaatggctttctattaccttcctcatccagaggccccggaccaactgctatcactgttccaatagatggtttttccttggttgcctctgtgagcaacaaccctccagcagttttttcatccgcttctgcaacctttatcaagactctatcatttaagggtttaagatccttgacctcatctgtttcaaggataccaacgatgtcatcgtccttcagaataagatgttttgaaccattgaactccacctcagtccctgcatactttgaatacacaacctgcaaacctgtcttcacactaacatccactttgctcttcccaaccgacttcccatccccaacagcaaccacttcacctccttgaggcttgccttgagcagttgctggcagtaaaatcccacctgcagtcttctcctctgcatccttaattttcaccagtactctatcacccagaggcttaacagtggtgtgcttgggggcgacaacagtggcggctttgacaacgaaagagggaaacgaggtttgtgtcagtgtcccaattctgacgtgcccagcagaaggaaatcgaagcgttgaaggttgaaacctttcaaatgcaggcaagttcctcaatgatgaagtgatttgagaggttgccattggagctgcacaaaaaacttatcaaagtgtgccaggaagcttggaaagtaggaggaacagtgaaaagattaatataaaccctaggcaaatttataggaccttagagcagtgcacggtgcaccactccccaatgtcttcttcttacgagtc

SEQ ID NO: 55349 - DNA, 207 bp, Glycine max
  Clone ID: PAT_MRT3847_20992C.1
gccgggccgttgctctcgcttgggttgatacctttcccacactcgaagccatatcatagtcactggccctctaggatgttgcttaggtgaggatcccggcttcaaatggcggaggagattgtcactgctcccaaagggcttattcaaatctggaggagaagatgatccctcaccaccacagctaatgtgttaatggcacaaggagcg

SEQ ID NO: 55350 - DNA, 567 bp, Glycine max
  Clone ID: PAT_MRT3847_20993C.1
aaaaaattgaaaatgagacccttatcaaatgtttaacttaacaatgtttttgtcaaaccaaaattttgatcaagagaaagatgcacgtaaagtattgatataatacattataatttatatttcattataagcataacgctaatacaactagagtcttcttaaaactatcaaaacatgatataagtatctcaattatcagtgaagaaatgtaaaacaatcataatttccaacttattgccttctccaagcattaacaaacttagacattggagtcatccaagagggctagtgtcttcaaggactgaaaattaaaaagagaaagaaagaaagaaaagaaaaacaaaatgttagtttccaaaatgtgtaaataaaaataaataaaattcttatacttataaaaaaaattctagtaattcaagtagtcagaataataacatcaagttaatgatagattaaaatcacaatagtttataagaaaaacatttaagtatttaacatcaataattatgagtttaatgattatataacgacaatatagttttatactattaattaatcttaacataa

SEQ ID NO: 55351 - DNA, 1201 bp, Glycine max
  Clone ID: PAT_MRT3847_20994C.1
ttttcttataaataatcaccatccatattttaccgctataatatctagcagtaaaaaaatgatagtacaactgcaaataatagggagcagaacatgaatctgaatccagtccaagactaaacagaaaggatcttctacgttcctggtagactgtataaagaactgcacttgccaacacaaataatctctaaaatagtatgaactttttaaagtggggtaaaaagtgctgggcaaaagaaaggggacagaaatactgcgagggtggaaataatttacatgttagtttgtttgttactgagaactgctaaaaagttagttctcgcgtattacatccgcttttacctcgatgcccgagaccgcttaaaacccccggctgtggcagctccggggggtctgcaagctacaagttagttacccgcatcatgtgaattgtccgggctagattgtagtagcctccaatcacgctttgcctgactgatgcttttctggattctcttgacctctactagtactaggcttgctgacatttggttggttcattgtctgcttccactgttgctgtgcctcttcgtgactgtgggcctcttgataaggatcagtgaagtttgggatacatgattgatctggatctagtgtaccaagtgagttaagcatattattatctgggtgatttgctccttgcattctggatgaatcaggtgtagcaacatggggcatatggaaaggaggcataggaaaccttggtcccaaatgaacagccgcagttgctgctggcaaagtcgaactagctaacatattgggaaatggcattactggtctgttcattcccattcccatttccatgcccatccccatcccaatccccattcccattggtggcatatactgctgtattccaggaaacatcataggtaccatgccatatcccatggacatcatctgcacttgtaattgcagtgacttcaagtactcaattgcttcatccagcattgaagctttgtcagacttgttgcacctaggtataagttcttgcaaagctttcatcttttcattaattctatctcgacgccgcctctctgagagattatggacttctgcagcacgagatctcttcgtagatgtagaaccacgaacttgctttttagcttccggagattcaaaatcaacatcctttttgcagtgagaccaatggagctggtgc

SEQ ID NO: 55352 - DNA, 458 bp, Glycine max
  Clone ID: PAT_MRT3847_20995C.1
acttctacaccagctaattccaattccaaatttgtcacagccacaggagagactatttatgtaactgctgaagctgaacacagaaacagtggaactagctcttctaagagtagcaagagagtgatgcatcatcagccatcatttgttgaagcacctagggagataccatacaaggagattgtttcagccacgggtaacttctcagagtcccaaagggtggctgagcttgactttggaactgcataccatggcatccttgatggccactaccatgtcatggtgaaacgccttggcttgaagacatgccctgcattgcgccaaagattctccaatgagctaaagaacttggcaaaacttcgccacaggaatttggtgcagcttaaaaggtggtgcactgagcaaggagagatgcttgtggtgtatgattactcagctagcaaatttcttagtcaccaact

SEQ ID NO: 55353 - DNA, 1188 bp, Glycine max
  unsure (1)..(1188): unsure at all n locations
  Clone ID: PAT_MRT3847_20996C.1
cctgggtaaaattgatgtttaaattacttagaaataacatctataagttcatgatacactacgatccgcagtgcaagaatcaggaagatctagaaaatagaaaagttcacactgttcagtattccgttccgttacaatgatatacatgtattaattatggaatgtacaatgaagtacggcacaattcttattacatagaatcactgtatgaagctgtcacctccgcaacaaagaacataattttctcctttggcatttagttcttaacatttttttttccagcattaagatcctgggagggcagcattttcatcgatgtgaaggtttatttaccttccagcttcaatgatccaaaattactctgaactagtgcagcagcagcacgagcagctgcagatgcgcgatccgcagaagcaatggcagcccgtgccttctccagtacatcagaggattgaaatcttgtctcacttttagcatctccagcgggaacattattgtttttgtgtgactgttcgatttcattagtatccaacgaagaattattgttagaagggctcggagcttcaaggtgtttatattcttgcttgtcttgcacaggcttgatagaaggttccgtaatacaaggtgatggattattagaaccatttctgctgggagtatgagaaagcgtagctccagcactaacttgctttgctccaccctacagttaacacgagaaaatcataataaaaatcaagaaaaactgaacagtcttgacaccacagtagaaaagtagacaacaaaatatattggcttaaaaaatctgggaatattagttcataacacttggttaaaatgtataaagtataacacgtaagtcggtgatttgaagatttagattgccctcatcaagaaacaagcttctcaatgtaaagttctgagataacttatttaactcaaaaatatttaaaggatcttgctaactagtgtccctagggattggttaaaaaaactaaaatgagaaagtatttatagtggaaatcatagaaaagcgttaaaaaagtcatggataacataattntgtgcatcccaataaatgtctttcttcttttagttccttaactaatgtgccaagggcactggttagcatttgtcatattttaaacaagcttctcattgtcaagtcctgacgtttatatntaactcatg

SEQ ID NO: 55354 - DNA, 397 bp, Glycine max
  unsure (1)..(397): unsure at all n locations
  Clone ID: PAT_MRT3847_20997C.1
tggcgtnagaacacttcagaaaggggttctctggcttacagctccaccatcttcggggtctccggggtcgatatgcacgacatgctctcctctatctaaacgtttccacccacttaccttccgatctttccacccattctgatactcatgctaaacaacaccagcgctatcataggcaattaccatatcacatcactgaattcggtgctattcaacagtgctcacctgagcattgaagtcatatacgagctttgtagcaattatcccaacagaaccatccttaaaggttatactttgactgaatccaccaatgtttgcgactacaccgactccttgtatgagattacaaggtacaggacagatggactattgtctcccgacacccaagctatgatcg

SEQ ID NO: 55355 - DNA, 1258 bp, Glycine max
  Clone ID: PAT_MRT3847_20998C.1
cacagattcaagctcaaacacaaattcaaactgaaacacaaatggaaactgaaaatagtcatgtaggattgaaggagttccttaatcctcctcctgttgtgcatgatatggatgatgaggaaatgctatggagagcttcaatgactgcgaagatccctgattacccgtttgatcgtgttccaaaggttgccttcatgttcttgacaaggggtcctgtgttcttggcacctttgtgggagcaattcttcaaagggcatgaagggttctactcaatttacgtgcactccaatccatcatacaatggatcacgcccggagagtccagtgtttaaaggtcggagaattcccagtaaggaagtggaatggggtaatgtgaacatgattgaagctgagcgtcgcttgctggccaatgcacttgttgacatctcaaaccaacgttttgtactcttgtcagaatcctgcataccactcttcaacttctcaaccatctatacttacttgatgaactccacccaaaactacgtcatggctgttgatgatcctagttcggttggccgaggccgctacagcatccagatgttgcctgagatctcccttaatcagtggagaaaagggtcccaatggtttcaaagggtggtccacacccaactaagtcaagctcctattcgaattcccttcccagtttttcaagactactgcaaaggttcatgttatgcagatgaacattacctgccaacgtatgtgagcatcaaattttgggaggggaattcgaataggagcttgacttgggttgattggtcaaagggtggtccacacccaactaagtttttgagatcggagattactgttaagttcttggagagtttaagggatcagaaatgtgagtataatggagacagcatcaatgtttgttttctgtttgctaggaagttcgcccctggttctgtgtcgaagctcaccaagattgcacccatggttatgcatttctaatacttccataggcacaaaaacactagttacgagtataaccaattatttcattcattcttttttaccttttaagctttttatttatccggtgtagacttatttcatcaatacagtatgagctatttcattggcttaacggatcttcgtggatggttttacttctactattggattcttatatatcccaatactagtagttctagtattgacaaattagaccagaaaaaggtaattaattggatggaaaaaaaaaaaaaaaaaaaaaaaaa

SEQ ID NO: 55356 - DNA, 594 bp, Glycine max
  Clone ID: PAT_MRT3847_20999C.1
cggcacgcctttttttttttttttttttttttttttttttttttttttttttttttttttttttttttttttttttttttttttttttttttttttttttttttttttttttttttttttttttttttggggggggccccggggggcaaaaaagttccctttaaaaaccccacaaaaaaaaaaagggttcatgggggggggggccaattttaaaaaaaaaaaaaggggggttcccctatggggcccagggggcatgttaaaaactgggggaaaaatgtttaaaaaaaccggggttaaagggggttgtttcgcaccccccaaaagggggacagttttgaaaccaaaaccaaccagggtaatccccccataaaagggcagggttattgggaaccctttaaaaaaaaaaaaaaattggtccccattcaatccagggaaagaaaacattccaaccgggtggaaaaggggaccccaaaccccaggggggcctttggaacaaaaaaaaaaaaaaagtttttgggcccacctggggaagggaacaaccatgggcttaaactaaataggccaagcattgaaaaaattccggcccttgaaaag

SEQ ID NO: 55357 - DNA, 1961 bp, Glycine max
  Clone ID: PAT_MRT3847_2099C.1
gttgcgtatgatgcaaagggggtctagatgggggcgagagaataaggtgttgttttgttttgttgtgtggggttgtgtggatgtgaaactgggaaaatggggagagcctttgtgtatgtgattcttggaggaggcgtggctgctggctatcctgctcttgaattcgtcaagaaaggagtctctcatggttgttttgttgtgttgcgttgcgttgcgttgtgtgggtgtgaagctgggaaaatggggagagcctttgtgtatgtgattcttggaggaggcgtggctgctggctatgctgctcttgaattcgtcaagaaaggagtctctcatggtgaactgtgtattatttccgatgaaccagtggctccttatgaaaggcccgcattgagcaaaggatttttgcttccagaagctgctgcccggcttccatcctttcatacctgtgttggtgcaaatgaggagaggctaacttcaaactggtagaatttgggttggattgaattagttcttggaactggagttaaatctgttgatgtaaaacgtaagacactattaacaacaaccggagagaccataagttacaagattcttattgttgctaccggtgctcgggctttgaagctggaagaatttggggtcactggatcagatgcagaaaatgtctgttatttaagagatatagcagatgcaaataggcttgttgatgttatgcaatcttgtcctggaggtaatgctgttgtcattggtggtggatacataggcatggagtgtgcagcgtctttagtgatcaataaaataaatgtaacaatggtctttcctgaggaacattgcatgggtcgattatttacctcaaagattgcaaactactatgaagaatattataaatcaagaggagttaacttcattaagggaactgtgctgtcatcatttgagtttgactccaatgggaaggttacagctgttaatcttagagatggaaccacgctatctgtggacatggttgtggtgggaattggaatacgtccaaatacggggctgtttgaaggccagcttactttggagaaaggtggaatcaaagtaaatgggatgttgcagtcaagcaacagctcagtctatgccattggagatgttgcagcatttccagtcaaagcagttggggaaacacgaagacttgagcatgttgattcagcacggaaatctgcgagacatgttgtttctgccataatggaaccaaacaaaacgagagaattcgattaccttccttttttctattccagaatcttcacactgtcttggcaattttatggtgataatgttggggaagttgtctattatggagatatgtcaggtagtacatttggagcatactgggtaagcaaggatcaccttgttggggctttccttgaaggcggaactaaagaagagtatgaagccatagccaaggccactaggttaaggccggtaattgaagacttgactgaacttgagagacagggtttgaggtttgctgttacagttagcgagaaaccgatggcctcacccccaattgaggttagggcctcagacctacttttggaaaaaccattatatgcttggcatgctacagctggggttattattgctgcatcaatagctggatttgcatatttttatgggaaaaagcgccacagatggtgaaactttaagaagattaccaattcagggttaagggtgtcaacagattatagacagatctgcaagctgtaacattgataagactaggactaggatattttgacatgtaattgtatcctatccaatttgctggataaccattcttcaattctattgttcatccaggatgttgtacaagaagcaaaatataaatggccatcttttggaagatattcctatagcaaaagtccatgtatcatttaatattcctgcatattcataaaatatcttggttttagtcctaattt

SEQ ID NO: 55358 - DNA, 319 bp, Glycine max
  Clone ID: PAT_MRT3847_209C.1
tgggggcattatttttttttttttttttgaggaaagaatattccattctcttgattatcagggattacaaattggagaaacactgagccctctaatcggcatgaatggcagtaaatacttaaaacataaatttagaatcttacacaaaattaagaacgaggagcggaagaaggagcattggtggaggctctgggagaagttatggggaagagagggagcaagcggatttgagatttgtctttgggagaagggtgaaagaagaaacctttcttgtttgatggcttagtcttgagcttcggaatcgatggcggccttggat

SEQ ID NO: 55359 - DNA, 1426 bp, Glycine max
  Clone ID: PAT_MRT3847_20C.1
gctgcgagaagacgtcgagccgattcggctcgagatttgatttccttccttcgtatcaaaattctatttgggacatctcttctcaaaccaaacagtgccttatttgtgtagtgtgaatgtgtgatggcgagtcgttccttcttaaaaaattggaaaatccttgattttgcttcgttactactgggagagtttacgagaagtatcaaacccataaaagacgtttcttcaacatcattgaccttcgttgaatttaattcgttcaaaacggcgttgtgtttccggcaataccacgacggaaggcccagaggccccctttggaaaggaaaaaagctcattggcaaagaagcgctttttgtcatatcggggtttaagaggtttaacgatgacgaggataagcttcacaagttcatcaaaactcacgttctcagactcttgaagatggacatgatcgctgttctcactgaacttgagcgccaagaacaagtttctctcgctctcatgatgtttaaggtgatgcaaaagcaagattggtacaagcctgatgcatacctctataaggacttgatcattgcattggccagggctaagaaaatggatgaagtattgcaattgtgggaaagcatgagaaaggaaaatctgttccctgattcccagacttatactgaagtcataagaggcttcttgaactatggatctcccgcggatgcaatgaatatatatgaggacatgaagaattctccggatccgccagaggagttgccattcaggattctgttgaaaggacttcttccgcatcctcttttgagaaacaaagtgaaacaagatttcgaggagatttttcctgattcaagtatctatgatccaccacaagagatatttggagcccgctgagaatctcccatggctatggttcatcctggaaggagctggatcttcaaatgactggagatgtaggagttcagaattgaggccgcaatcattttcaagctttgcatggttttggaatggttagtttgttgaccgagggtttacatttactgtttactatccaagtccttgctcaagggagataagcttttggtattgaaactgattgaactttactcagtttgaaacatgtgtatcggcaatgtcaatgctctgtttcagtttcatcatctgtatcgaatgtacaaattattaccaaaggaaaagaaattcgttagtacttttcgccctacagtcttctcgtggtggctgtatgttactttggttaaagaatgaggggaatggggcagttgccattgtatccttatacacactcattttatgttgctaacatttattagttgttggtttctgacataatatttgtcaatttgtgtcttgtaaaaaaacaagcatatttgactaaaaaaaaaaaaaaaaaactcgagactagttctct

SEQ ID NO: 55360 - DNA, 329 bp, Glycine max
  unsure (1)..(329): unsure at all n locations
  Clone ID: PAT_MRT3847_21000C.1
gctgcaagatatatatatatatacagaacaacaanagccacgggccaaactggggggggagaaacatcgctaatttgggggacaacatgtctttagaaaaaaacangggggtnnaaacccntacctctgcagaaaaagagagcagagaccccggctccaaaacgaagaaagcaaaccccggactaaaagggcacaggccctagagagggacgtaaagggaaaagtaggacccaacccagcctgcggatactcaaactcaaacgtatgataacgtntnaaagggatggacggcggatggatgagcagagcagtaccaaaaaaaggggacg

SEQ ID NO: 55361 - DNA, 360 bp, Glycine max
  Clone ID: PAT_MRT3847_21001C.1
gacagcaaagcaattttcaaactcaattacaattcaataaccaaacctccccttggtttccaattcaaaaagaagtggcacttccaagccaaaccgcccacaattcaaccgggggaagggccccggggacgcaattggagactaaagccgctcacatgtcagctcgggacaccggcggtgtgaaaaagccccagcgtttcaggcccgaaactgtggctctgagggatatcagattgtaccagaagagcactgatcttctgatgcgaaaactcccattccagaggctcgtcagaaaaatcgctcaggatttcaaaacatatcttcgtttccagagcagcgctgtttctgctcttcaggaag

SEQ ID NO: 55362 - DNA, 286 bp, Glycine max
  unsure (1)..(286): unsure at all n locations
  Clone ID: PAT_MRT3847_21002C.1
cnnggaattcccggtgtctgacccacnngcgtccgacttattgccttgtatagataatgttcgcatnttgagaaatgatcctaaacgttgactacgcgaggatataccagggagtaggtaagtaggatagtggtgatcttaaagttgagtgatcattgatcaatagtatggctatatacaagggcgtaggattctctgctgtgtatgacagcatcgtatactcagcctatgctgcactatgccgcctatggatcacatgctggcggggacacttgagagagggtcg

SEQ ID NO: 55363 - DNA, 392 bp, Glycine max
  unsure (1)..(392): unsure at all n locations
  Clone ID: PAT_MRT3847_21003C.1
cgagggggaacaggccatcccatttacctatcactccggagttttcattgtttctaacactcgtgcacctaaatagctttctctattcttaaaaatgacaggggggggttcacataaactctctancaaatcctctcattatggtttacttgcatgcccacccttcaaataccaccctacaccagattcaaaatgatttgtcttcatctactactcatatattgactaactgtgttatactataagactaaaatacctttcatgatgccaaataacatgatcaaacaacaactcatctttcacacttacacatcatcattatcttcatcacctatttcatcatatttatctcttaaaaatataaatctttaattcatttttctatctccttc

SEQ ID NO: 55364 - DNA, 566 bp, Glycine max
  Clone ID: PAT_MRT3847_21004C.1
aaccactccagtagtcttgttgccgatcagcataagtaaaaaagtcaccagatagagaaggaaaaccttcaactagaccagatcctatttcaccaggagacgagtaatttattctctctgcttcctcacgcagggttacaaagtagtcttccaaagtaccaaacttggcctctgcattcaaactggggtttgaattgatataatcaaacaacatttggtaatttcggaattgggcttctgcttcttcaacattaatataccgaaaatcatctccaagaggaacaagaagagtattggttcggtacaaagttgactttttcttgtattgatccagtaatttaagagctctttcctgaacattttcctgagtggtctccacaggatactgcccccatgggcattgttcataagcaaaacccgacatgcgtgcaaagtcaaactgacagcaaatagcaggctctgggccacatgtatgaggtatatcatacgaatagaagggcatcatatggacaaatatatcagtggtttcctctgcatcccagctttgacgccatatgtattctaaa

SEQ ID NO: 55365 - DNA, 233 bp, Glycine max
  Clone ID: PAT_MRT3847_21005C.1
cctttttgctgctttctctctgtatatctaccccttcacttctgttccagcaccttccattactccatttccattctcacctgcgcggtgagtgagtcccgagtccgccagtgcaaagcccccggtcttttttttctcagagcttggctatgcatatcgattctctctcctctcatctttctcattcaaggccgtggaaaaaaatggccatgctgaggatatttaaccccctt

SEQ ID NO: 55366 - DNA, 575 bp, Glycine max
  Clone ID: PAT_MRT3847_21006C.1
agcgtcgcgcaatctcgttgaggcaggccacgctcggcgcgcgccagccgagttttgaagaatccatgatctgcaacagaacgcgccgaccttgcgcgaggctggtctcgaccgcgcgcagcaccgcttcatccgtatccgggcgcatcgcaatgccgggcgccgtgtcgagcagcggaaccgcgacgctgtcgccggcgagccccgccaccgcaccgtccttgcggaccgaaaagccgctcgccgtcatcgtgctgaaatggtgcccgcgtgcggtatggggcgtcccgcttccggtctgatcagtgccaaccacgatcgtcaccggcgaggcgccgagcaccgcgcgtgccagaaacagggcgtggagctgggagtcggtgccggacggcgagaacacgacgtcgatgcgcggcgagacctggaggtgtccgcgcagctcttcgcgcatgtcctcgcagcgcgcatcgaaggcaacctcgacctcgtcgaacaggcacttgtgcatcagctcttcgcgcgccagcgcagcgcggtcgtaggccgattgcgagatcaccgacgcggtcgaggag

SEQ ID NO: 55367 - DNA, 429 bp, Glycine max
  Clone ID: PAT_MRT3847_21007C.1
gttttactgcctttccaatgcaggatgttcaggttacaattgactggttaattgcctctcaggaatgtgttcccaggacctatggcgttttatatccacaaaatccttttgggtgaaataggtggatggagaaacggactattccccatggcagcttccgccgtgttaaaagaatgcctgtttgtatacggggaggagcttgggcaaagaatgctcttctgatgaatatgccacatgctgctctttcaaggtggagatatgttgttggagatcttttctatgaagtattctgatgagttctacctaccttaaagggacagactttttttttatgggataagaatatttggctgatgacaccatcaattgggaggtttattcccgcatgtgggtgcacttggcagagatttaggaaaaagttgtattgta

SEQ ID NO: 55368 - DNA, 312 bp, Glycine max
  unsure (1)..(312): unsure at all n locations
  Clone ID: PAT_MRT3847_21008C.1
cangcacgcgtacgtaagctcggaattcggctcgagcntngcnncgnaccagnctcaccganncgnatatctngtngtgtggngcnttcngngnnaaactctgtaaaccatgttggtttancaggacctccntacaggtgatgagcttctngtgacncctctccgntacacaggaaattgagaatggaangnctgtgggaanntgaggggaatgngttgttcaaggagcagttggangtacacatnggtgccnaccctnctgntgannggngnggagaatntcagggaatngnagagccgctgtaaagggcc

SEQ ID NO: 55369 - DNA, 261 bp, Glycine max
  unsure (1)..(261): unsure at all n locations
  Clone ID: PAT_MRT3847_21009C.1
aacccaacaacacatacatactatttataacaccacacgccacaaaatatagcgagtatcatctccaagatacgcccacacttaccctctattctacccgcccaacaccatctacatatactcctcnnnacatgctcaaaatcccgtcgatcacaacccagactcacacttaccacaatcctttctcaccatcaagtcctcctcaacatacaaaacagtgactgatatccttcacacccatacactactaataatgaaact

SEQ ID NO: 55370 - DNA, 490 bp, Glycine max
  Clone ID: PAT_MRT3847_2100C.1
aaataagagagaataaggtgttgttttgttttgttgtgtcgcgttgtgtggatgtgaaactgggaaaatggggagagcctttgtgtatgtgattcttggaggaggcgtggctgctggctatgctgctcttgaattcgtcaagaaaggagtctctcatggtgaactctgtattatttccgatgaaccagttgctccttatgaaaggcctgcattgagcaaaggatttttgcttccagaagctgctgcccggcttccatcctttcatacctgtgttggtgcaaatgaggagaggctaactccaaaatggtataaagagcatgggattgaattagttcttggaaccggagttaaatccactgatgtgaaacgtaagacactattaacaacaactggagagaccataagttacaagattctgattgttgctactggtgctcgggctttgaagctggaagaatttggggtgagtgatcagatgcagaaaatgtat

SEQ ID NO: 55371 - DNA, 301 bp, Glycine max
  Clone ID: PAT_MRT3847_21010C.1
ggcgaagcaaaacaaatcaaatcaacgttcgcataacgcattgctctgcgatcgttgcaattggaagtaggaaagaagaaaacgccactctcagatccaaatccgtttccactctcagatccgaattcagtcatgactggatccacttgagtttcgaaatatgaacccctttttttctcccgcgcgtttgagggacatgattcgggccatacgtgcttgcaaaactgcatcagaagaacgtgctgctgtaagaaattactgtgctgttattcgtgctgcgatagatgaactcgatgctaga

SEQ ID NO: 55372 - DNA, 403 bp, Glycine max
  unsure (1)..(403): unsure at all n locations
  Clone ID: PAT_MRT3847_21011C.1
ccccgagtaaaaacccgcaagccgccaaaaacaagaagaagangccaaaaagaggaaacacccgcggggataccccccgcggacaacagacagaagagcacgggtcagcaccccaaccccccagcagccacccaccccagcgagacagccacccaacacgccacagcacgagaggcggcggagagcacagcttaacaaaggacagcgacacacggagacgacagagagaacgaggccgccaaacggaccgcacacagcaaagcagaaacgaggaggcgacaaagacacacacccagacgagccacgggcccccgacccgaaggccgagacggagaaaaccaaagcggacccaagcgaagaaggagacacagacggggaagcgaccggccaccggagcgcaaag

SEQ ID NO: 55373 - DNA, 278 bp, Glycine max
  unsure (1)..(278): unsure at all n locations
  Clone ID: PAT_MRT3847_21012C.1
ttcgngccgctttcgctagaaaccagaggttctccnttggntantctncgtgcttcttctggaantntngacaggaaaccttcgcatgngcagctgcttcanttggtgtgtgttatgggcangctgggcagcaatctaccgtacagcaaacgatgttataggtctncgtcgntngactnacatcgcnnccntgagactctatgctccctantcnaggtgctntagaagcacttagnagattctgggcatgnactcatncttgnggngccaantnctgc

SEQ ID NO: 55374 - DNA, 2197 bp, Glycine max
  unsure (1)..(2197): unsure at all n locations
  Clone ID: PAT_MRT3847_21013C.1
tacggctgcgagaagacgacagaagtcggggcgggagtctgtctgacgcctcctcccacgtgtccagtaactgctcaacactgacacactcagctaccactctcctctctctagcttcagtaactagcttgccattttgctcaaactcaaagctcaataaatgtgcaaactttgaattgaaaacgtggaggaatcaatcaaggtggcgcaaagagaggagaagaggtggtagagagaaagtgatgggtcaggggctgagttgcagagggagccatgagcatggcctattccgtgctgtgcagcatggggacctagacactgttgcagctttgctacaaacacacccttctcttatgaaccacaccactgtctatgatcaccactctcctcttcatattgccgctgctaatggccagatccaggttttatcttggcttttggatggatctgtgaatccagatgtgttgaatcgccaaaagcagacaccgcttatgttggctgcaatgcacggaaagatcgcctgtgtggaaaagctccttgaagccggtgcaaatgtactaatgtttgatgcttgttacggaagaacctgcttgcactatgcagcttattatggtcattcttcttgtcttaaggcaattctttctgccgctcaatctagtccagtggctgcttcttggttggtccttttttctgtttttgcataaattttctccactgattgattcatgtggtgatttcttatgttggtttttataaaaaaacataaagaagaaaataaattgaattgattgcagggggtttgctcggtttgtgaatattagagatggtagaggtgcaacacctttgcatttagcagctcgtcaaagacggcctgaatgtgtacatattctattgtacagtggagctcttgtttctgcttcaactggaagatatggatgtcctgggagcactcctcttcatcttgcagccaaagnggggatctttggattgcatccgggaactattggcatggggtgcagatcgccttcaacgtgatgcttctgggcgaataccgtatgtagttgctctgaaacacagacatggagcatgtgcagcattgctgaatctttcgtctgctgagcctcttgtatggccatcatctttgaagataatcagtgagcttaatccagacgccaaagagttattagagcgggccctgatggatgcaaacagggaaagggagaaaaacatattgaaagggagtgattactctcttccatctccatcacattctgatggggtagatgacaatatctctgaggttagtgagacagaattatgctgcatctgctttgagcaagtgtgtacaattgaagtccaagactgtggtcaccagatgtgtgcacaatgcacactagccctgtgttgtcacaacaagcctaacccttgtacttcacgtgttatcccgccagtttgtccattctgcagaagcaccatagcaagattggtagttgtaaaaaaagaaagccctgatgacattgatcaagatggtgttgatatcacttgttccaagcatagcaagtcaaggaaatcacgaaactcaaacgagggcggtagcagcagcattaagggattatcaaatgtgaactcatttggaaaaatgggtggtcgcagctctggaaaaattgctgctgaaaatgagtgggaagatgataaacaacagtgatacgatgctgttacttggtgtggtgcttgcgcttatccataattattgcatattggaaagatacggtaacaatttgcttgatcagcaaggcaaaacgaaagtataagaagtaaagggaaaaagaggttcattttattattggaaactaagcaaagtgagtaagattggagttcagggtagtaggtaccaactatcaagtttggttggggaaagaattaaagagatgcatgtcatgttgtaaattgtaactttgttactattatttgggaaagaagaagcatcgcctgcatcgatggttttgggcgtcgtcattgaaatgagaaattctttttctcaaaaaatatataggagtctaagatcatatgaaaatgtattgtgtatttgcttctggtttgtttctttataccaaaatgagcaataaaatacgaaagggaaaggcctgtggttgttgttaaaaaaaaaaaaaaaaaaaaaactcgagactagttctct

SEQ ID NO: 55375 - DNA, 705 bp, Glycine max
  Clone ID: PAT_MRT3847_21014C.1
ggtcgactctagaggaaaataaaaagggcaacaaaaactctctttcccccttttcatctgaatatcatcgtcctttaatccaaatcgcttcgtcgttttactctctaaatcggaagttacaacccgccgccgctgcggcgctcggcgtatctctgccgccgctgctccttcattcgaatctcgctttaacgcgattcctcaaacatcaaccgattcttctgtcctttttctttcctaccttctcttcttttgatattcgcagccggcgattctgtttccggtgagtccttattggaggaggagcgcgcacgattattaacctgtgcatcgttgcttgtcgcggtcccttcccgattaaccaaattgccggaactgttccgctctctgcacgtggaaaggtgagagtcgctcgctcgctcttgcttgcatcatcggttcatggattcgctcattgcgtagtgattcagtttcggaattagggttccgatttcggatttaggtttgttttttgttccgaaggtcgcgctctccaagccttaagggttttagtgacgagcttcgttcagtttgctgctcgatccgttgctttatccctttcgattcggttttgccgttgcttttcggagattaacttgtttttgatatgatgctgatggttttgtgcattgcacggtgttgaaatttgattttgtcgaaatggagttt

SEQ ID NO: 55376 - DNA, 182 bp, Glycine max
  Clone ID: PAT_MRT3847_21015C.1
ggatagtatattattgatcgaggtgtgcactaaatgaatttaatagatttttgataattacttgtcattaaatggggaagaacagcaattttatgttgtggcaaatgaagaacttaaaaatacaggggaatattttttggcccaaaaaaatgttggaggcctgttagccttattaagggccc

SEQ ID NO: 55377 - DNA, 299 bp, Glycine max
  Clone ID: PAT_MRT3847_21016C.1
cctattttcattaaccgccgccttctgatatttgatgacgctcacatggagagatggccggcgacatgctatcgcctgatcaagaacaagccataccccaaggccatgtactgtcgagctgtaccccacccctatagcaggatctactatcttggcatgaatagcctgggtgttgatgtgtaccggtacagcctgcaccttgccactagagagaagggataaagtacccattgacgctaatgaggctgcccttgttgtctgcatcacgtaccttaccaaatttaaaggtgaggattgcc

SEQ ID NO: 55378 - DNA, 735 bp, Glycine max
  Clone ID: PAT_MRT3847_21017C.1
actaattttatatccattgagatattatcttcagaaatttgaacatgtgcaaagaaagctaaatgaaggcaccaatgatgagagtagatcacatggttattagccttatgaaagaggcagagaaaaaccaagaacattggaagaaattattaaagggtttttatggtgaataatatccctgagaaatgggtttttaacgtagccaatctcacctagtgggattaaggcttttgttgttattgtaagataactttagtatatctaataaaaaaaaatctttagttatttttccaaattacaaatcttcaatcaagttctatggagtacagatctaaaaagaattataattaaaagagacttgattgaagatttgtaatttggaaaaataactaaagatttttttttattagatatactaaagttatcttacaataacaacaaaagccttaatcccactaggtgagattggctacgttaaaaacccatttctcagggatattattcaccataaaaaccctttaataatttcttccaatgttcttggtttttctctgcctctttcataaggctagtgaccatgtgatctactctcatcattggtgccttcatttagctttctttgcacatgttcaaatttctgaagataatatctcaatggatataaaattagtatattaattcatgtttggaattatcactttatgattcatttttatttattaaagttattttagt

SEQ ID NO: 55379 - DNA, 2518 bp, Glycine max
  Clone ID: PAT_MRT3847_21018C.1
ttctacgcaacctttttcttttctccaatggcgcctctcttccaatgccaccatacccatcaccccctttttcgtctccgcttctccttacatagtgatccaagattcaggttttgcttggtgccgatgggattctttttcactggtggtgatcactaaggtgatgctgtgagaagtatatgatttggtctttacctcgtgtgcttgtggagtttgctatttgaagagagaggtttatgagtttgacaagtgttggatttgtttcgtttgtggtaaagatatgttcttgggtggagggggaaatttttaattaggaattgaatctttttcccctctgggtaggatggatttgcataataatgtgcagcctgaattgggcaaattggagcaaattgttcatcaatttcttttgaagtgcttgcacatcattttggactcaagggtacctttgttacgcccgcatgatagaagcggtggtgacttgtcgatgggtcctcgcgtgaagaggagcgacaagtggtttaacttggctttaggtgataggccttctgctctggataacttgcacttctggcacaggaatttgatggatccaatgataattgacattatacttgttcatgaagaggctggctcttctgttgagacggttatagagaggtgggttgttcagtatgattgtccccgtgtggtggctcctcaaaccagtgacattactagctcttacaagaagacataccagaagtcaatagtgcttttccgtgctctttattctcaaatgaggcttctcccggcttataagatatttaagcagttaagcacatctagtcatatttgtaattttgatattatttacaaggtctcttcctttagtgatccattctctcgagcagaagggggagtgatagaagaatataatttcactcctgttgaggcccttccaggccgcctttgtatatctgtgaactactgcactgtgctatctgatttcaacctagagtgttcagcttcattgccaacaaaaataattactgattatgttggaagccctaatactgaccctttgaggtctttcccagtcttggataagggtgttagtgccacttcctttccactaagagggaaagcacctccgtcttctatgccacttgatcgccctcatagctggacatgtggcttccataaagcagcaccttttgtacagaaccatcctcatgttggctccccgccggtgtatcgaggttctcccaggccatatgattatccatccccacctactgatagttacggtgtcagattgcacaactatcggatgcagaataggcaaatatctccaagttacgatgagtatcaactctctcctccattctcaccctcaccatctccatcgccacctacatacttctgtggtggcaatccaatgaaaactcgcatgtgctctgaaacagcccctgttactatacctcattcagtaatgggcaaaagctctagaaatctttctcctaatttttcagatcctagtcgaaattctctgccccctttatcccccagaaggactgatggctcatcacaagagtctccatctggaatcaggtcattcaagaaattagaagcttcaaggactggtcaaaagtttgtcagagatagcaaggaagattctgggaggttctcaggattgttatcctcaagtgactcaccacgcattggattttctagaacctcaagtagattatcatttcaggatgagttggatgatggcgacttttcatgtccttttgatgttgatgatgttgatccaccggatgctcaatctagtcagaatgcggatctgaagagtgctgcagagatcacttcaacatcactgccaatggggaaaaaatcacaagatgctgaagttggtgttcttgtgcacatgctcaggacagcgcctccattgcgccaagatccaagttgttattcatcccattccccaaaggctgaacttgagggaggagttgccactgcttctggattcttcatgcctcgaaagacagcggatgcacttgaagagctcaggggttacaaagagatgagagaccttctttccaagagtggcactaggatcctgaacaaacataaagcttaagcattctaaaatagttgagggaggtgatgctgactaaagagtgttactaattaattacagttatactacataacaagcacttcttttgggaagaagaaagatccaatggatttgtgtacatatcctgactgaatgttggttggctagaaacaccatttttataatgaccaaaattatgctaatttgctctcaatctttatagagattgtagttatgaaatgaggaacttgcatgcctagttgttatttggcaatgacaaaggtgggaaaaaagaatgttgctggtgttttgaaagaaaggttgttgaatttctttgtaaaaatgcatgcaggcaaatactgcttgaaatgtatattggcttctttaagataatcagtcactgattatttgttt

SEQ ID NO: 55380 - DNA, 362 bp, Glycine max
  unsure (1)..(362): unsure at all n locations
  Clone ID: PAT_MRT3847_21019C.1
accaggttgcaggggcagttcctaatcccatggcaaacaatcccttttttcctgaaaagaagggcaaggttggaagagtcacagacaggtctttgcctctgaaaaagctacacatgcctttggctttgacagatttaagattactcagggctacttttgtccattcacacccctcaacctcaacctcaagatatacactgacttaactactgcttgcttccactgagagagaaagaaaatgaaaaataggtaaaagagcttaggggctgtgggtgttgccactctggagacaggaaaacctactcaacttttttttattttggtttatgttctgaaannnnctctccatcnnnntctccttc

SEQ ID NO: 55381 - DNA, 235 bp, Glycine max
  Clone ID: PAT_MRT3847_2101C.1
aacaggaacctccttggagtttttaggggaaaaaaacccctgattggaaaaccaaaatttttttttaaaaaaaaacaaaatatttggggctaaattttaaatcccccttttttttcccggaagaaaaaaaaaagacccctttggtgggaacatctttcactagtcttccccccttttcgcaagagcttatattgaacaaccttggggccccccttaactaggtcctgggacaaaa

SEQ ID NO: 55382 - DNA, 1843 bp, Glycine max
  unsure (1)..(1843): unsure at all n locations
  Clone ID: PAT_MRT3847_21020C.1
cccgcgtccggctgatctccacaggcaatgaacatacattgttaccttataagatctggttttctttacagacttgaagtagcaagtattctagttgatatatactcaaagtgtggaagtttaggatatgctcaccagattttaatataatttctctgaaggacaaggatattattatttggagtgcaataattgctgcttatggaaagcatggacatggcaaaatggctgtgaaacttttcaatcagatggttcaatctggagtaaaaccaaatcatgtcaccttcacctctgttctgcatgcttgcagccatgcaggtttggttacgagggtttttctttgttcaactttatgctcaagcaacatcaaattatttcccatgttgatcattatacttgcatgattgatcttcttggacgtgctggtagactgaatgatgcttataaccttattcgaacaatgcctataacacctaaccatgccgtatggggtgcactactcggtgcttgtgtgattcatgaaaatgttgaactgggagaggtggctgctaggtggacttttaagcttgagcctgaaaaactggaaattatgttttgcaggcaaaactttatgctgctgtaggaaggtggggagatgcagagagggttagagatatggtaaatgaggtaggattaagaaaactacctgctcacagtttaattgaggtcagagatantgtgaattgaatatgctcatttagattacaatgtcagcttaacaacatctgccacaaacattgaaattctgtccaaaatgagagtcattattgctgtagttatggaagaccctataaaatgtgaaaggtatttcctttattgaggaggaagtgcctacctttttccattattttaattatgacggagggaaatgtctttgcttcaataatgtttggcatgcatagagttcaaggccgatattttggctccaatttccttgatacacttctgttgatgcacaatagccaataacaaccagtgcctaatgtctgcgacttttcacacacattcatcacctaacaagcttctcagttgctaggtttgtggtttaactgagatggatttttgagtattcaggatattgcattttgctatgattgtctggttgttgttgatcccttagactggtttcaacttcttattctcccattttcttgcaagatgacaatgatgacatattgactatgagggaaaggcagagcagaactagtagctatttcgctaatctgtggcaggaaaaagaagctaggttctaagccaaaactcctgttctcgacagtgttccagactaaagagtcggtgctatttatctctctgatgcagtgatgcttcatagacattatcaaattattctggaaagaaaaaggttgaggggaaaagcaatgagctaacatcagttctggagaaatatatataacccagatgtcatgatagtgacctttcttttctcacattctcttctgggttcttacaataattttgtctcaaatattgggctaatacatgcaaacccaataaacatatagttgtctgtcttttgcccttgtttctttaaaagcctatcaaatcacatagtccaactaaagaatagtgctgagcatctaagaattatagtagtagtctttaagtagtagtctttaacaagtagattgctctattcgtattacaccctctctacacacatgcacactcgccgctgtatttttattttatttacatctaattatccctacaacatttggataatcattatcatatataactatttaattaaatgtagcataaaaaatcttttttttttttatac

SEQ ID NO: 55383 - DNA, 118 bp, Glycine max
  unsure (1)..(118): unsure at all n locations
  Clone ID: PAT_MRT3847_21021C.1
gttggagctaggtcaagttgtatgatgtttctgaaagccatggagatcttgagaggatgtacggtgnaattgatctgctggagacattggagcgcagaaacgttatgaagttccagat

SEQ ID NO: 55384 - DNA, 145 bp, Glycine max
  Clone ID: PAT_MRT3847_21022C.1
ttttaaggcaagggcattgaagaaagattgtcaaaaacgatagccgatgaggcttggcaacattctctgtagactcaagtttacttagtctgtcactgtattaatcttctgaaaatttatgttatcaaattactcttgctaagat

SEQ ID NO: 55385 - DNA, 313 bp, Glycine max
  unsure (1)..(313): unsure at all n locations
  Clone ID: PAT_MRT3847_21023C.1
ggccggccgacgcgtacncttgattatcccaacactttctcttacagtattcacatnatgcttaatcttgggctgagcggtgattatgatgctggtgaaacacattcttacatgcctcctcttgaggactcttatgcaaattctgatggtaccaagatggaataaattgattaaatctgacttaattgcctgttacttttttataaacaatgattgtataaacactctttttactnatgtttatgttttatgaattttccaaattttgaactttggctaattatgtgccgtaatttaatactttctttattgg

SEQ ID NO: 55386 - DNA, 530 bp, Glycine max
  Clone ID: PAT_MRT3847_21024C.1
atctgactaggtctgtggccgccccctattatttttttttgttcaccgaccgctctgactataccaaacaaccacatggcactgctatagatgctctctatgacattccccataaaacatttcacattcatttcatctctttcctttaactagcaagcttggcccacacacccaaccgtccaacaccccatgttcatgctcgtcatcaggagagaggtggcacacgaaagacaaacctctcagaaaaggcctgttactgggcaattcaataataatatcatccggccattgctgtggaggataatccacttggatgctttcactaaccgccggaaagatttcctggccaagtcagaatactgctgggcaaaataagtttggccgcctcagatatggatgttatatgcaaaggctttgtgcgatgataatgtaccatgttaccgcccgcctgacctgccatagagtccctacctggccccgtgatctctgcagggactgtgaaaacatccctgttgttctttgcgggccca

SEQ ID NO: 55387 - DNA, 440 bp, Glycine max
  Clone ID: PAT_MRT3847_21025C.1
tagctctctttgattaaaacgttatgatcacttggcaagccctgctcttggagctctttctccacttagtgagagggccaacaacgactcttcatggctgccaagcgcgcctaccaagtttggaaaagaagttattaattcatatttagagggaggttggtattccgccccccatcctaaatccttgttgtaaacctccttctgatgattgctccccctataatcttttacatatgcgtaccaaggcatcctacacatgaactttattcatataaatatggatattctattttcgccggggctattctctgtaacggtgcattacctgtggttccgtcttttacctaaacaagataaccaggccttgggtaaaagaatccacaccccccataagaaaagtcatcatataattcttcaaattctgctgacgctcccggagc

SEQ ID NO: 55388 - DNA, 381 bp, Glycine max
  Clone ID: PAT_MRT3847_21026C.1
cgaagctcggaacccggcgcgcgctcgatcggagtttccaaactaaccttataatcactaccttttcttcccatgctgactgtctcacctcgtggagggggtctcaccgccaggctgctcgccaaccaacatagccgtcaaaacaaacataacagccgcttacacacccccaacctcttatacacacacgctcaccacaaccttaaaatcactctgcaaatggacaaattagcacaaaactcttacactaatcacatcatcttgagcccacacccattgaagaagaatacagcctctatctcctccttcacccgagcatgtgcacaaagcacttcgaacatgtgcgcaaactccagttgcacttcctgcgctctcacaaca

SEQ ID NO: 55389 - DNA, 333 bp, Glycine max
  Clone ID: PAT_MRT3847_21027C.1
ttcgaaaccagcttcactcgaactaggaggcaaggcacttttttttttttttgatgaggcaaaactagataaagcggttgagcttgatctgatcgcccgattatataacaagggagaaatttgggctgcatgctcccccgtatttgttcaggaagggatctatgaagaaattgaaaaaaagacgggggaaaatgcaaaagcttgggttggcggggatccctttgatactaatggtcaaaaggggcctcaaggtgacaaaaagcaatctggaaaaattcttttcttcatcgcgcatggaaaaagaaaatgggccaccctttttacagggggcaa

SEQ ID NO: 55390 - DNA, 403 bp, Glycine max
  Clone ID: PAT_MRT3847_21028C.1
aacattggttgctttcggttaaactgtgatgtctccgccagtgctgaccataggggaggaggagggtaaaagccacgtcactctgatggtttactgactaaccaccatagaaagtgtgtgtctgaagagcttagaattttgggagctcaacttcgtgcgattacctgatcgaccacttgttgaccagtggcagccattcttctgtgaagagactaaaagcaatctgtacctgacagtcgctgaactcagtctcgggcttccaagaccacagtcttctgatagagatattaatctttgttgctgatgcttaactaaacttgatgaaaaaactttgctgccggtacatacgttgactgatgatcaccatgttgtagacacgactgatggtttggtaaacaaaaga

SEQ ID NO: 55391 - DNA, 346 bp, Glycine max
  Clone ID: PAT_MRT3847_21029C.1
agctaactaggctggggccgcccttgttttttttcttcaaatatggccaatacgccatatgagattgacaaggcacggtccaaatgacaatgacttcgagataagaggaaaaactaggagaagcaggcccaggcactataaaaggccacaaacaaatgcatctcttgtagcgtggaaagagagagaaggaatatgcactgcttataaggaggatctatggaacaggaagcttgagggatggtattcatgagcatgtggaaattggaatcgaatttcatgcttggactgggattgatggcctggacctttacgatgaaccttagtgtacagtctgacaaagctgatt

SEQ ID NO: 55392 - DNA, 1367 bp, Glycine max
  Clone ID: PAT_MRT3847_2102C.1
agcggagctttagcttgggttggttcgggtgtgtgttctgttaccctttcctttcctcttgagttgggttcgggtgacaacacaaacacaaacacgatggtgtgttgatcagtctcttttctctctctttccatttgatgtctctccccaccaaacggtcgggcaccgctggttcctccccgtcgccgccaccccctatgaaaaaggccaagtccctcctcctccactcctcctcctcctccgacgccgttctggacccttcctccacccctctcgacgacgatctccccaatgcccgcgccgccaatctcgcccgcaagaaagccaccccgccccaacccgccaagaagctcctcatcaagctccacaaagctaaaccaacattgcccacaaattttgaggaggatacatgggcaaaactaaagtctgccattcgtgctatatttttgaagcaacctgtttcctgtgatttggagaagctttatcaggctgtgaatgatctctgcctttacaaaatgggtggaaatctttatcaacgaattgaaaaggagtgtgaagcacatatatctgcagcactgcagtctttggttggccaaagcccggatttggttgtttttctgtctctagttgagagatgttggcaggatctttgtgaccaaatgttgatgatccgtggtatagccttgtttctggataggacatatgtgaagcaaactgcaaatgtccggtcattatgggacatgggcttacaacttttccgcaaacatctttcattgtctccggaagtagaacacaaaactgttacaggtcttctacgaatgattgaaagtgaaagaaaaggtgaagcagtggatagaactcttctaaaccatcttttgaagatgtttactgctctgggaatttatgcagaaagctttgagaagccattccttgaatgcacatctgaattttatgctgctgaaggcgtgaaatacatgcagcaatcagatgttccagattacttgaagcatgtggagataagattgcaagaagaacatgaaagatgtttgatctacttggatgcaagtactaggaagccattgatagcaacggcagaaaagcaacttcttgaacgtcatatacctgccattcttgataagggcttcgcaatgcttatggatgggaatcgtattgaagacctccagagaatgtacttactcttttaaggggtcaatgccctcgagtcactggagctggccattagttcatacatcaggagaacttggtcaggcatttgtttgggatgaggagaagataaaatatggcttcatccctctgggattaaggcttctctgacacacatgggagaaagcttttcaagatgagca

SEQ ID NO: 55393 - DNA, 704 bp, Glycine max
  unsure (1)..(704): unsure at all n locations
  Clone ID: PAT_MRT3847_21030C.1
gccgggacctacgcgtcccacggctgcgagaagacgacagaaggggagcatttgttagagcgagacaacacctcagagaacccaaattccgcgtcaagaggttagggtttggcgtttctgcgagaagaagaagagagagcagaagcagcaatggaagcatacggcggcttcatggtcgacgagaaagccgttagggttgagaacgctttccttgatttcctcaaaagcttcaagtctagtagccagcggaacgaactttattacgaagcggagatcgaattgatgaagagcaatgaatccaacaccatgttcatcgatttcgaccacgtcatcagattcagcgacctcctccagcaaaccatctccgatgaatacttgagatttgaaccttatttgaagaacgcttgcaagcggtttgttatggatctcaagccatcacttgtatccgacgatagccctgacaaggacatcaatattgccttctataacatgcccatcgttaaaaggttaagggaattgggtacatcagagatcggaaggcttgtgtctgtgacaggagtggtgacgaggacgagtgaggttcgacctgagcttctccatggaacttttcagtgcctagagtgcggtggtgttataaagattgttgancagcaattcaagtatactgagccaacaatctgcacagatgctaccttgtagcaatc

SEQ ID NO: 55394 - DNA, 421 bp, Glycine max
  Clone ID: PAT_MRT3847_21031C.1
tctttttttttttttttttataaaaatttttatgatgcctttgacatgatttctaaaaaacggactacacaaaaaagctaggtgtcaaggcttggtgcttacaaagccaccactatatttatattgtatgatcaacaaaaaaaagtttgactgtagaggataaaatgggctttcatcgatcggcatatattcattccgtagcttaagataaaaaccggaagacaaatctgttttttcttaggcgaacttggctgatacacacttagctgcttctgcattgggccaataatctaacacaatgttctttgtaggatcaaaattggataccccgttcatatttcgtgactggccttccgtgtgaacactatggattgctttcatgcgcgtccggatatttatcatcattattcctgctcgatcg

SEQ ID NO: 55395 - DNA, 315 bp, Glycine max
  Clone ID: PAT_MRT3847_21032C.1
aaaaaaaacattgggttgtgttaatttattggttgttttttttcccccggacctaaatattccaccatagtttggcataacatgaaaaaaaaaaagaaaacccggggaaaggaaatatggcgggatcaaaaaaacgaacattttacacggcccatttttgaaaatggggtctttaaaaacaaaaaaaaagggggggagggggttattaaaaaacaaggggggcttgtcattttgggcatgtttgggggacaaacaaaaaagaaattttccaacacttttgggggggggttgtttgggaaaaaccgacacccacat

SEQ ID NO: 55396 - DNA, 385 bp, Glycine max
  unsure (1)..(385): unsure at all n locations
  Clone ID: PAT_MRT3847_21033C.1
gaaaatatttcctaattattggcctgttttgtgtattttgttgaatagagttccactactggatatttacaagagaaaaacgacaaaaatgaaaaataagttgaaataaatgtttgcttttccaaaaaaaaaaaaaaaaaaaaaaaaaaaaaaaaaaaaaaaaaaaaaaaaaaaaaaaaaaaaaaaaaaaaaaaaaaaaaaaaaaaaaaaaacgaacggagctctgaagaggtaccaaattatatataattgaccgccacgttatataacatggtcaaagggtaaaaaaagggggggaccaaaaaaaatttggggaaaagcaaaaaattcgcactttcgccagctgnncatattagaaaagaggtccaaaacgatcgtccttccc

SEQ ID NO: 55397 - DNA, 555 bp, Glycine max
  Clone ID: PAT_MRT3847_21034C.1
gtcgtccttttttttttttttttttttttttttgaaaattttttgttttattatttttggtttttttttttttggactttaaagatattttgtttgcccccgcaaaccggggagccgggggacaccaacggaaatccgacccgggcacacggggggaacccaccttgccccaaaggggaggagtttaaactaggggtaaaaagggggataaggggtgagcggggggaaatttttgacccccacaaatccacaaacaagaccaccccgggagaaaaagaaccaacccggggggggaaaaaggggggcccaaaccgaataaaattggagggcccccccgcccatttcgaaagggggaacctgggcgacgacgatcgtataagaaatcgccacccccccgcgaaaggggggcttacagtggggcccccggggggactttgtattaaacaggggaacaggacaacgcggggtggcccttgcccgagtttccctgagaaagatggaacagccggcaacgtctgggaggcgcataacgggcgaaaacaggggttgagcggg

SEQ ID NO: 55398 - DNA, 246 bp, Glycine max
  Clone ID: PAT_MRT3847_21035C.1
cttccataacagagacactactccttctcctttttctccttctctcacaccacactctctcactcacacatattatattatcaattaattaaccattaaataaatgaataaataatctttgtgaagtgaagtttttgacaccgcaaaattccatctgtataaaccactataactaataacgaaccacactttgagtcagataacgattcttgtttcgaatttcaatttcatccacacacttcactg

SEQ ID NO: 55399 - DNA, 272 bp, Glycine max
  Clone ID: PAT_MRT3847_21036C.1
gttggttttaagaaataattgactagttgaattatataaattgtttaaaattggaatacaaactgtatgttttgtgccattctaattaccatgtttcccacacttacctttattttcttgcccattctcaattatttcatgtgatgggggggcactaggaatcttaaaagtgttttagtgaagatccaaaaccaagtacaaaattagtgtggcttaaaacagaagtaggacatacattctatggtattttccatctaatatgctcaatgttt

SEQ ID NO: 55400 - DNA, 614 bp, Glycine max
  Clone ID: PAT_MRT3847_21037C.1
ggaagatcaaatgatacctttttattgccacggaaaacaaatcccaaaataattttgccctttagagttttgatcctataagcctatgcatgagtgaaaaaataatgcctgtgagcatgagtggatggactaacagaactacatatattaactggctccctattgacacctactaaattataccttggagaatcctacttcctcatgcaactgcgaataactgtgttgactgctgatcctatgatcaaaggggagcatcttgatactgaactattggactcccctatttgaggcatgcgaagtgcatcaattgtcaagttgccacatacacttgctacctttgaaagactagagctcaccaaagaggggcttctaggagctagggtatgactaaaagcgggatctccttcttggagacagaataacttgctgcaaagactctgaactgaggctcacaaaggtagtactatcacacaggcaatgcgcggtcccgctgcgggtgggcatttgcgagacaaccgctagccgaggggacatgacttgattattttatgtgaggaggttctgtagactatggactctagcggaatggtgcccacatcattggcatcaga

SEQ ID NO: 55401 - DNA, 375 bp, Glycine max
  unsure (1)..(375): unsure at all n locations
  Clone ID: PAT_MRT3847_21038C.1
gagacttcataagcctctagtaccccttcctttctcacgctctctctcgtgttcggagcggctatagccactgtttaggaaacatatccatgcttcgttcaacatgtttgcaatgtctgtctgcgatgctctctcagagtcttgtcagtcctgtaatatccacgactgatgtacatcataanagctacgagtccccacatccacattctgcaagtcgccccatatgcttacaccttactgatcctccatctcatggtcattgcaacgctacaacctcacatcacaatcgtccacatactccatcaacactcacatgtagacactgtcgctcatcatcaccacaacatcagtctctatcatgctcatctccatcac

SEQ ID NO: 55402 - DNA, 1419 bp, Glycine max
  Clone ID: PAT_MRT3847_21039C.1
gatagatttgtattgttccttcctccttcatgagtcgtctcctaaacattttacttccttcttccaccgtatcgtaggataagaccactcctaacacgttattattaccttttaattcctattttctttctattcttccacattttcttcttttccgggtgttccaattcctattctgatcaagaaattttggtggcagaccctgtgagaaatattaaagacgggccactttcaaaatccaccatggaatccactttcaaagatgctgtgtccaagtttggaggaagaattgattggaaatctcgtcgaacccagagtctggtggaggagagaaacaagcttgcagaagactttagaaaggaagaaattgctgaggaattggaaaacactaagaagctgatagaagaactcaaaaatagcttagaaaaggtagaaaaagatgagcttgaggcaaaaaaagaggttgaacatgtgattctcaaaattgaagagatggagcaagacattgctagtgaagccagtattgaagccaaggcaaaacttgaggctaaaaaatccatgcttactgaagcgcttttggagtttgaattcgttgaaagagaactggactcagtgcgtaaggagtatgcttctatggcgagtggaagggatatagcaatcaacaatgcagaagagactattgcaacatccaagcagattgaaaaggcagttgaagacttgactactgagttgattgcaacaaaagaggagttgaactccacgcgaaccgcgcatttggaagcagaagaacaaagattaggagttgttgatcaagattctcacaatttaaagttggaacttgaaggagtagaaaaggagctccaaagagtaaatgagcaagttttgtcagccagggttctaaaatctaaattggaatcagcttcctccttactgcatgatttaaaagctgaattagcaacatatatggaatcaaaagtaaatgaggaatgctataaagaacaaaaagagaaacttaaggaactaaagctaaacatagagaaaacaacttctgatgttaacagcttgagggcggcttctgtgtcgctaaaatcgaaactagaaaaagagaagtcgattctcacttcccttaagaaaaatgaggaaaaggctttggccgtggttgcgaatctccaagatgaactagagaagtctaggttagccacaactttcattcagatgaaagagaatgaagcaagaaagatgatgactgagttgccaaagaaagttcagaaagcagcacaagaggctgatgaggccaaatcacttgctaaggcagctcaggaagagatgattgaagcccaagaagagcttgaacaagccaaagcccaatcaagcacattggaaaagtagtttattggcaaaacataaggagatagaagc

SEQ ID NO: 55403 - DNA, 226 bp, Glycine max
  Clone ID: PAT_MRT3847_2103C.1
aaaacaacaactttgaaaaaaaacaccaccactttggtatattgaacggacaaaaaatatgcccatatgaacactcgattcaaaaaaatcccaaacagacaaaaaagtgggaaacaaccaccctgttggtctacactacaaaaatataaagctgcgtttcaaaaaagtctggggtcacaaaaaaaattaggtttacaacccggaaaagaaaaacaatcttcctcaa

SEQ ID NO: 55404 - DNA, 617 bp, Glycine max
  Clone ID: PAT_MRT3847_21040C.1
attcccaggttatgaagcaagaaattcttctaatcatacaccaatacattcgttgccaacggaatctagttctcagaggtcacgtccatcttttcttgattctcttaatgtcactagaccttctttggggtctccatttcatcaatctgagcaagattcctcaatgtccaatcatttagaatcaagcagcaatggcatatcaggatctacttatttccataagccgtctgaagagacaaaaagtgcactgatgacaagcactagggaaaatggcatggagaagcagcatgattattactcatcttcacaaaatgaagacttttctgctttagaacagcatatcgaagatctaacaaaagaaaagttttctttgcgacgcgctcttgaggcttctcgaactttagcagagtcactagctactgaaaattcaactctgactgataattataatcaacagaggagtgtcgtcgaccaattgaaatcagacatggagaatttacaagaagatatcaaagcccgactggttgagtttgaggctatcaagagtgaatatacaaatgcacaactagaaatgtatgcagctgatgagcgtgccaagttattggcatctgaagtta

SEQ ID NO: 55405 - DNA, 271 bp, Glycine max
  Clone ID: PAT_MRT3847_21041C.1
cgcagccataactgctttcatggaaataaaagagcataaaaaaaataaaatttaaatttcaggggttgcgcggttgtctattttcttagaattttgttggtaaataatgttatatttaaatgaacaagataaaaccattttgtcttggtatcaatgtggttgatgccaatgtgttatccactatttgttctgttcactgtgtaggcaggggtgataagatgataactgctcagtctttttttttgtagtcaataggaggcttgatgagtgg

SEQ ID NO: 55406 - DNA, 508 bp, Glycine max
  Clone ID: PAT_MRT3847_21042C.1
atttattcttctaatcatacaccaatacattcgttgccaacggaatctagttctcagaggtcacgtccatcttttcttgattctcttaatgtcactagaccttctttggggtctccatttcatcaatctgagcaagattcctcaatgtccaatcatttagaatcaagcagcaatggcatatcaggatctacttatttccataagccgtctgaagagacaaaaagtatgccacttttctcaaattttacaactgcaaatgttcatagttcacttgagcagttgacaaccccttcagttgttgataatgacaatcaaggtgcactgatgacaagcactagggaaaatggcatggagaagcagcatgattattactcatcttcacaaaatgaagacttttctgctttagaacagcatatcgaagatctaacacaagaaaagttttctttgcgacgcgctcttgaggcttctcgaactttagcagagtcactagctactgaaaattcaactc

SEQ ID NO: 55407 - DNA, 497 bp, Glycine max
  Clone ID: PAT_MRT3847_21043C.1
aatgtttgttgaaaacgggcgcgccattgaacggtttgctagccctgaaattataaccctaatgccgtcttcgagacagcgcgccttcgactatttgggtacacggggcattgctgtctcggggcataatagaacgcgcttgttctcactattagtgtaactcacacagaagatggctacaacacatggccgcaccttggcagggcaacgtgctgacaggtctacgtggctaaagcacagcacacactgcagggctggtgctttgcgcaagctgcatgatgaacatacgggagagaggggctcgctattctgctcgtcgagacaccgatttcatcacagacttctccgtgaacatgagatacagctgaaagaaggtgggaatgctacagaagctgcaaatgatcaccgggggaagccagctggtccctaaccttaacgcggcctacatatgggctgtgactacactggaccatgactgaacaggtctggctgaccga

SEQ ID NO: 55408 - DNA, 979 bp, Glycine max
  Clone ID: PAT_MRT3847_21044C.1
aattcggctcgaggaaaaacactgcaactgatagaacactaagcagttgctaccatggtcaccttcaggtttcaccagtaccaggttgttgggagggctcttcccactgaaactgatgtgcatcctaagatctacaggatgaagctgtgggccaccaatgaggtccgtgccaaatccaagttctggtatttcttgagaaagctaaagaaggtcaagaaaagcaatggccaaatgctagccatcaatgagatttttgagaaaaatcctaccaagatcaagaattatggaatttggctgcgatatcagagccgaactggttatcacaacatgtacaaggaatatcgcgatactactctaaacggcgctgttgaacacatgtacaacgaaatggcatctcgtcatagagtcaggtctccatgcatccagatcatcaaaactgccaccatcccagctaaactttgcaaaagggagagcaccaagcagttccacaactccaagatcaagttccctttggtgttcaagaaggttaggcccccaactaggaagctcaaaacaacatacaaggcaaccaagcccaacctgtttatgtaattctcagtcaaccacatttacttcttgacatcttgaggctgcttgattcatttataaacataggaagagcatagagaaggtaatcacatagcaacaaagtacttcactacctgcaaccacagattgtctgcattctttcaagctttgagtattgagttttggaaagtttgtgttttattttgatcatttttgttgagcccttttgcttgctttcatgaatcagctcagggttggttttaaatcaagtggttactttttgttacacatgctggtttttcatttctttaatctttccattctagtgactgaaaagggttttttgaaagtttcattcaaatcgtaatgaacttgattatttccctaaaatgaagatgttatctttgctcgt

SEQ ID NO: 55409 - DNA, 247 bp, Glycine max
  unsure (1)..(247): unsure at all n locations
  Clone ID: PAT_MRT3847_21045C.1
gtcaaaatgcggcaaagtggactatgcacatcaagcatttttggcaatagataaacctgatactgttgcatggactgcaataatatgtgctcatgcttaccatggcaaagcttctgaagctttaaggctttttaaagagatgcaggggtctggtgtaaggccaaatgtggtcactttcataggtttgttaaatgcttgcgntcattcaggtttagttaaagagggagagcagtggttggatatgctg

SEQ ID NO: 55410 - DNA, 410 bp, Glycine max
  Clone ID: PAT_MRT3847_21046C.1
ctcgagccgcgcgctcctgacactagaaagaccttcgttccctccttttaagtagtggtgcctaactggacactccggagaatactgatctattggttgccggacttaatggatgggaacttgatccctgtatcccaactactggtgacggcttggtcctatatcctgtctggaatcacctatggcttgaccctctacttcctctaattgaagaagaatgttactttgctgctaatcctccatctgcatctataccagatcttgaactgctcccaacccatcgccactgtgtgcatgacttccttgagatgattaatagtgtttatcctacctgctacagttgtctatactatttttcatgatgaacagtctttctttgctatcatcattcagacctttgtctatctgcc

SEQ ID NO: 55411 - DNA, 572 bp, Glycine max
  Clone ID: PAT_MRT3847_21047C.1
aacaaaccccccaaaaaattggagaaaaaggggattacctcgccaaaaaaggggctcaccccaaatggggcaaaggggacttaactaccaccgctaacataatggggattacaaacccaagggcctttcagggatttgcccaaaaagggggggccccattaccccgactggtggttttggaaggaaccctgaaaaacaaaacgggaattttggaaaacatccccctttgaaagggggcccccccatttctgcccttgaaagagcaaaaaccctccggaaattagaacttttaaaaaagggaccggttctcggccccacccctgttaaatcgggggcaaaaaaaggtgctaaaaaaaacctccctagataaatcttggcggggaaaagcaaaaatttgaaacccctcgcccttttgtttaaccccaatagccttaaatgggaacaaatcacccttgggatttttaagccccacaattttttccagcttttttatttggagcttttttttttggcactccaactggagccccggcccccccctggccttgaacactaggtcacaaacacaaact

SEQ ID NO: 55412 - DNA, 835 bp, Glycine max
  Clone ID: PAT_MRT3847_21048C.1
gggcatatatagcagtctgcgagaagacgacagaggagggagctagataaggtcacatatatgaacaacatgttcggtcaatatcctttgttttcactggcttctctagccacattccttgtcttaacccacgccgccaccgcgccggagaatcctcctcctccgctcacagccgcggcgagggagttcttggaggcgcacaaccaggcaagagccgaagtgggcgtggaagcactcagctggagcgagaagctggggaacgtgtcgagtctgatggtccgttaccagcggaacaagaaggggtgcgagttcgcgaacttaacggcgagcaggtacggcgggaaccagctgtgggcaggggtgacggaggtggccccgcgcgtggtggtggaggagtgggtgaaggagaagaaattctacgtccgggagaacaacacgtgcgtggggaagcacgagtgcggggtttatacgcaggtggtgtggaggaactcgacggaggtggggtgcgctcaagccgtgtgtgtgaaggagcaggctagcttgaccatttgtttctatgacccacctggcaacgtcattggggagatcccatactgattcttcttcatcaaattatgtttaattaagctaactccatcacctgtcttaattttatcctctgtttagtgtttttacgtaatgtaatgctatttaagtgttggatttgttaggtgtagctgtatgtcaaattgcatggatttattttccatgcttgaatattagttatgagttaacttcgtcttgtatgagtactgatgctgccctttcctttatcaaaaaaaaaaaaaaaaggagg

SEQ ID NO: 55413 - DNA, 987 bp, Glycine max
  Clone ID: PAT_MRT3847_21049C.1
tagacggctgcgagaagacgacagaaggggcggctagaggatattggccatcatttgaaatgtgagtgtattgtaactgatgtgtttggaaggtcaggtgaggcggtatgcattgagacaaaacctgtattgccagggatccctagaatacataagctggagattgagggaagaggatttcataccaatctctatgctgttcatggcatttacagtggtgggaaggaaggcaaaagtagagttcaatggcttagatcaatggttggaagtcctgaccttatctctataccaggagaaactggcagaatgtatgaagcgaatgttgatgatgttggctataggctggtggccatctatactcctgtaagagaggatggagtagaaggacaatcaatttcagtatccacagagccaattgcagttgagcctgatgttcttaaagaagtgaagcagaaccttgaacttggatcagtgaagtttgaggtattgtgtgacaaagaccaaacctcaaaaaagatttcatcagtgggcacatatgagagacgtatcctcgaaattaacaggaaaagagtcaaggtggtaaagcctgccactaagacttcttttccagctacagaaattcgtggtagttatgcccctccctttcatgtggagcttttcaggaatgatcaacaccgtctgcgtatagtagtggacagcgagaatgaagcagatttgatggtacactcccgacacattcgggatgttattgttcttgtgattcgaggacttgctcagcgattcaatagtacttccctcaattcccttctcaagatagagtcataaattcctttgcattgtatagtcatcatatttgatatgggaaactgggttgttgaggccagttctcacattttgcttgtcctgagtgtaaaagtattgttatattaaaagaacagtttttaatgccatgttcattgcaggccattgattgctaaaaaaaaaaaa

SEQ ID NO: 55414 - DNA, 1998 bp, Glycine max
  Clone ID: PAT_MRT3847_2104C.1
gacatctccccgagagctccagggttgcaaaagttgaggggaaccagagctcatctcaacaagagtttcaagcgtgctgtgattctggtgaagcgtccagataaggatctgatccactccgccgcctctcagcggccgccgtcttttgagcatgctcgacccaaaggtcagggagcaggcgaataacattaaagtcactactatcttccctctctctctcgctctctttcgggttaggaccagtaagagttgttgttgtttataatttgaaaacgtcaaggcagccaacaaactaggggggttgttcttcatctgttttgtatggacatgaagaagggatattcagtttccttgacaaaacaacaacataagaaagagccattttttgcagttcatcacacaagaaaacaacaccaatgcatccaagcaaatcatgatgccacagaagaaacaagctcacagcaaaatcaatattccctcaaattggctctttcttccacttcccaaaatactactctactactgcctgcttttgttactttgctgctacttgttacctcaattggcacagcattctctcaccccaccattgtctccaattcttcttcacctttgccaccagcactctctcactccaatgctaataaccaaactttgagacctgctgcagtgctgcaaaagttgaggagaatcagaactcatctcgacaagatcaacaagcctgctgttaaaacaatcaagagtccagatggggatttgattgattgtgttttgtctcatcagcaacctgcgtttgatcatcctcagctcaaagggcaaagaccattggatccaccagaaaggccaaagggacacactcacaccaatggagaaacagtcgtagagagctttcagctgtggagtgattctggtgaagcatgcccagaaggaactgttccaatcagaagaactacagaggaggatattctcagagcaagctctatccaaagatttggaagaaaaccaagacctgtacggagagactctactggcagtggtcatgagcatgcagttgtttttgtaaatggggatcaatactatggagcaaaagctagcataaacgtgtgggcaccccgtgtaactgatgaatttgaattcagcttgtcacaaatgtgggttattgctggctcctttggtaaagatctcaacaccatagaagctggttggcaggtaagtccacagctatatggagacaactatccaaggttcttcacttattggactactgatgcatatcaaacaactgggtgctacaacttactctgttcaggctttattcaaaccaacaataggatagcaataggtgctgcaatttccccaagatccatctataatggcagacaatttgatattggattaatggtttggaaggacccaaagcatggacattggtggctggagtttgggtcggggctactagttgggtactggccagcatacttgttcagtcacttgagaaaccatgcaagcatggtgcaatttggaggggaaattgtgaattctcgttcaaggggctaccacactggcactcaaatgggtagtggccattttgctggagaagggtttagaaaagcagcatattttagaaacttacaagttgttgattgggacaataatttgcttcctctatcaaatattcaccagttggctgaccattccaattgctatgacataagggtgggatcaaacaatgtttggggaacttacttttattatggaggtcctggaaggaatgtgagatgtccatgaagatatatataatatataggtttcctattatatctatttatttatatgaatgtcccctttgttccatttttaggctgttgttgaattataaatttggttctgatattggtcggtatgtaatgttttggttctatacgtaaaaattgtaactttttagtctttagatgagtaaatttaatgtaggaaaaaatttatttttggttccaaaaa

SEQ ID NO: 55415 - DNA, 508 bp, Glycine max
  Clone ID: PAT_MRT3847_21050C.1
aaattaaggaaaaacactttgcaaaagggaaaaactaaggtttgtttaaacgtaaacaagcgaaagaaatctacctccacaaaaaaaaccccaaccagacgaaaaaataaaacccgaagggatcaaaccccccgaaaaaaaaacaccccagggaaaactgggcccaagaacaaacaattatccggggacgagccccaccccccttcaggaagaaaaaaaataaatataataggcggggacagaaggaccgggcgacccaaaaaccaaacaaaacctcccaaaaaaaaaaaattcgaaaacaatcggggggggaaacccccattttagggaaaccaaaagcggaaagacttttgcttggattttcttcccgccctgaggaaacaaacccccagggaattacaccatgccaaccccaaccccggattttcccggcccgcccccaaagggaatcattgggggcccagcaatggaaccaaaacctctcagcgccccagccaatgggggccct

SEQ ID NO: 55416 - DNA, 412 bp, Glycine max
  Clone ID: PAT_MRT3847_21051C.1
gagcacacttaactaccaactacctaagaaactaacaaaatttttattgggcgagaaaacaaggatcgggcgggacaacggggaggaggggggctactcaccctaatagctactcactgaagattcctagggagccctccctttaggtccaaccccaaaaagctgtataatgctgcatatgaatctgcatctagggcagattgggcacctgcagtggccacttggtatggacctgccaatggagatggaagtgaagggggagcctggggatatggaaacgctggtgggcaacctccattgtcttcgtcaaaacccgggggaagcccccttatatatgacgctggcaaaggaaggggttcgtggtatgaggtgaaatgcacagggaatcctgcaagctcagggaaccccggga

SEQ ID NO: 55417 - DNA, 290 bp, Glycine max
  Clone ID: PAT_MRT3847_21052C.1
accagggcaaccaccattaacgagctgaagaagcctgttgtggagaaagaagctccagggcatgccatatgagggcatgcacgtacggcctcgaagggaaccaaaaaattatgttaaccaaattatctggaaccctaatggtttaatggcattattagtggggaatttaaacttactttggtttgggtaccttctttgaaaagaaaatcttgatgaacaataccattctgatgtattggtttccttgaaaagtaatgcctgccttttattttcaaaaaaaaaaaaaaaaa

SEQ ID NO: 55418 - DNA, 129 bp, Glycine max
  Clone ID: PAT_MRT3847_21053C.1
cactacagtctctcttgccagtgatctcatcactgtctaggacagaaccacaggtcacactcacactgtacccagtgcggtgttggtgtgtgacacgagctctgtggaagatgccagctttttgatggc

SEQ ID NO: 55419 - DNA, 1029 bp, Glycine max
  Clone ID: PAT_MRT3847_21054C.1
ccacgcgtccgggagagtaagaaggggtttggggttcttggatgcaaactgcaaagctcaaaagcgacgtcgtttattacgtccaactgaagctcccatagccggagtccctctgctttcggccaacctcaaagcatcgaacaatgggagctgtcaaattgaatcttcgttgttcttcgcaacgagtcgatggcgttgccgctgaacccgaacctgattggaccttcgacgatcttgtttcggaactcaacgctttggagactaagctcgccactaatgcttcttcttccacccaacgttcttcacctctcgataaatcaatatcgaagtgtgggaaagaaatccagagaggtagggctttcgtgttgcgtgccgacgagtttgacatggaggactcagagagcgacgatgatgatcatgttgacagggctttggtagtaactgacagtggcaaacggttcacctgtgatgaactttatctgagtgtcagtgatgatgattctgacattgcctctgtttttgaagtgagaccctacttgatggatgaattgggagaggtcgaaggtgccttgttggagttgacgcatgaacatcagcttagggttaaggatgaaataaggaacaagatctcggcattggagacagctctggtgaatgaaactcagaattctacttcttcctttcttcgggttgagaaatataaagaaacaaggctggacttggataaaaagtttgacactcaatatcagcgtcggattgcagaagcacttgataatcacttgacagctgttcaacgggaccgtgaacttagatcacaaatagaagaaaggaaaataagaagtgatgcagcttatgaagaggccaagagaaaggttgcttttgaaaagcaccagcaagaaaaggctaaagctgaagcagaggccaaacttagagctgaggaagcaaaacgagaagctgagagcaaagcagcaatggaggccaagaaacaggcagcaattgaagctgaaaaaagcgcagcagtagaagctg

SEQ ID NO: 55420 - DNA, 275 bp, Glycine max
  Clone ID: PAT_MRT3847_21055C.1
gggctcccaacgatacaaccgacttgcctgcgatgaccttcgattcagcactcacactgcttccacatagtggccgaggaaagtcagataaagaggctggttgtgaacaactgcagagaataatgcccgcaagcactttaccccatcgcttagcatgtctcacgattatacctgcgcctcctgaacctgatgtcatcatcctaagatcaaccttgctgactgggctaatgatactattgatacttgaacgcattttgactgcacactaacgcact

SEQ ID NO: 55421 - DNA, 470 bp, Glycine max
  unsure (1)..(470): unsure at all n locations
  Clone ID: PAT_MRT3847_21056C.1
gtgagtgtttgcgaatcgngcaaccctcaagagctgaatttgagaatagataataatggctacaccggaccacctgttcaacctccgcaacaacttgtatctcggggcgtaccaagccgccatcaacagtggcgacgtcaccaacctctcccaagaagactccctcgagcgcgacaccctcgtccaccgctgctacatcgccctcggccagcttcagttcgtcatctccgagatccatgacgacgctcccacacctctccaagccgtcaaactcctcgctctctatttctcctcccccgacaccaaggtcgcgccttcaatcctctctgcctaacaaattaacatttgtccaaatatataaattacatttgtcaaataaaaaaaaaaaaaaccctcaatttcttcgctccctgctcatctcgtctcacgtccctcctcaaaatctcgcaggatttcgccatcgcgagtct

SEQ ID NO: 55422 - DNA, 195 bp, Glycine max
  unsure (1)..(195): unsure at all n locations
  Clone ID: PAT_MRT3847_21057C.1
cacaaggaaaggggaacgccagcaggaccggaccaggaagaaacagggcagacccacagcgccctccactccaaaggagccaagagacacacgggagaacaggaggaaagagagagagcccaccccaaccccccaagngaaagaggnnagaagggagcaacccggcccgagagaacaggaaaaaacaagaggagc

SEQ ID NO: 55423 - DNA, 341 bp, Glycine max
  Clone ID: PAT_MRT3847_21058C.1
ggaccatctacataattttattttattggatcaatgataatcattaattatacaagaaattaatatttgatctagttgattggagtacagtagtaatctctctgaaaaaaaatattggagcaaattaaattaagacattggagttggaggaatcttgtagcattattgatgcattaatcagcgctgtcctttaacgcctttgaagccccccacttacatactctacctttttttttatatattctgttcccttatcatctttccactggtaaaactctctctctctctctctctcttacacacacaagcactacaacattttctttgggctctcattttct

SEQ ID NO: 55424 - DNA, 615 bp, Glycine max
  Clone ID: PAT_MRT3847_21059C.1
ggtccggattccccgtcgaccacgcgtccgaagaaggcagcctaacacaccaaacaaacaattctcaaatatatttgctgctacataagatgatgacatcaaagatagcaaacagaaccacaaagcacgtagaatgatggcctattttatggaattaatgtatattgctggtatcacaatacatatgtacattattgacactaacacgtcatcggagcatacaaaacatgttattgtaaaaataaccatcaattacacaaccaaattcacatcacttatttaaacatcattataattaattacaatcaattatatatttatatatataaaaacaataaaacaaaattttctacctacatgttaattgaagcagccctcacacttaacatcctacaacaaataatcaaaacttgagaaaaataattgatatgaactactacttcatctgctcttcatttcaaaaggaacatgagtgatctcttcgtgtttctaagttttcatcaatgattaaaaatacattataacaaaatatttataataaataattttaacattttaaatcactgaaagcaaattaatttctaatataaattttaatattgccaataaactaaa

SEQ ID NO: 55425 - DNA, 271 bp, Glycine max
  Clone ID: PAT_MRT3847_2105C.1
gggaaaaaactaagaaccgcaaattctaaacaactggtttaggcttttttggttaccacatcccaaaatgccaattccttaaaacccttggtttgggaacagaaaaaccttcaaataaaaaaaaacattacttcccctgtttttactagggggggaaacaaacgtttatttaacttcgttctacaagggtggcaagcaaccctaaccccaataggtttagggtttttaggtgccgggggggggaatttttggactatgacactaaaccccc

SEQ ID NO: 55426 - DNA, 218 bp, Glycine max
  Clone ID: PAT_MRT3847_21060C.1
attgtttcgtccaaccccaagaatggttcttcaattgtctagttgcgttcgttgtggtggacgggttagacttcaattagataattattgggagtccaaaccttcgcagctgggatcgataccggccaccaacagagagaaagagtaatcaagtgtatggcgaactgtcagcaatattagttgcgtgtgctttctctggcaatttgtatgcctagcct

SEQ ID NO: 55427 - DNA, 839 bp, Glycine max
  Clone ID: PAT_MRT3847_21061C.1
gcagtcatacgtgacaacaacaacacctgatttcaactgtgtctctttacttgcgagtcaatagtgcaaattcaagccaaagcaatatgctgatacgaagcgagagttgcacagattctactggctcatatgtggtttatgctcctgtggatattgttgctatgaatgttgtcttgagtggaggagatccagattatgttgccctgctcccctcgggctttgctattcttcctgatgggcctcctgcattaaatggtgggcccatgcatgatggtggatctggaggttctctactcacagttggattccagatcttagttgattcagctccaaccgcaaagttatctctgggttcagtggccactgttaacagtttaattaagtgcacagttgaaaggatcaaagttgcagtcatacgttacaacaacaacacctgatttcaattcagaactttcatatacatgtcagaagagcaaattaaggtagagaaagtaatgatcgagcttggagtggtgcctatttcgtttccaaaacaagggcaagaagtcaatgaacgcacctcggagtatcacttcaacgttaggagtttgaagaatcttaggttcgggtattgactttcacttatgaattgaagactaaaatggttccatccagctgtagtattttaacttagaaaaactgcaaatttcggactcgctatttattttagcgtagaattttggagtagtatttgtaggcttgagcaaactttcctaagtgtggttaccctggcttttcctattgtattgtaaacttcatcacagaaagataaaaaaaaaaaaagaagaagcggccgccga

SEQ ID NO: 55428 - DNA, 139 bp, Glycine max
  Clone ID: PAT_MRT3847_21062C.1
acataataaagagagcattacagcacaatgactctgcctctctttttttaaaatcaccgaactaggaagcaaaatgacacattatttcttcttgcctgtttccactctccaggtctactgcctgacgtttgttgagcgc

SEQ ID NO: 55429 - DNA, 268 bp, Glycine max
  Clone ID: PAT_MRT3847_21063C.1
gtgtatcttcgtcaagaccctcaccggcaagaccatcacctttgaggcggaaagctctgacaccgtcgacgacgtcaaggccaagattcaggagaaggaatgaatccccacagagcaccaacctctccttttctccggaaactaactggtggtatgatttaccctagctgactacaacattcacaaggaaaagtttcttcacctcgtcctttgcttccaaggtggcatgtccaacttctataacaatcttgccggggacaccttaagc

SEQ ID NO: 55430 - DNA, 470 bp, Glycine max
  Clone ID: PAT_MRT3847_21064C.1
ccccaaaaaaaaaattaaacattttttgggaaacaaaggaatccaacctcttttttttttttttcttccattttcactccttatatataatgggcattttttattaaacttggggcagcctaaggcttgggatcataatcagcatggggaacaatttttgaccaaaaccaaggggatccccaaactgtttgcattttttaaagggggatgttttttgtctcaggcaacaacatggcaatgaaaatggtcatgatgagtccaaatgccccaaaaaaaaaaaaaaggccaaacttcagggggcaaagcttgactaggaaaacttggccaatcccaaaagggaacagcttgtttacggcaacattgatggcttgccctgctgaacaaacctcaagagggcttttttcattaggccccaacccccctaggggcccccaaaaccatgcaaatgcagcaacaaatgcccatataaa

SEQ ID NO: 55431 - DNA, 310 bp, Glycine max
  Clone ID: PAT_MRT3847_21065C.1
aaaaccattcatttttcaaatttttttctaacaagacgcacgagctggtagcaatcattcattaaagacttcattatacgggccttgttggggctgttagccgtacttcatggccccctaccgcaactgattattgttccctttttgctaggccaagcgtaaacagctcatatacctaaaagacaaggcggccatcttcatgtttagaatgccgcctctgatggcactccagtatattatatccagaaccttggaactttccccaacaagcatcgttttacactctatatcaatgttaactataaaaaga

SEQ ID NO: 55432 - DNA, 1062 bp, Glycine max
  Clone ID: PAT_MRT3847_21066C.1
ggtgaggttgtgttgtgtggtatcatcacagcgaagcacgcctccactactaaactttcctttccctctctctctctctctctctttgttgtgtggaaatgtcgggatcggaggacgagggaggagaagagtacctcttcaagatcgtcataatcggagactctgcggtgggcaaatccaaccttctctcccgctacgcccggaacgagttcaacatgcactccaaggccaccataggtgtcgagttccagactcagtgcttggaaatcgactccaaggaagtcaaggctcagatttgggacaccgccggccaagagcgattccgcgccgtcacctccgcctactaccgcggcgctgtcggcgccctcattgtctacgacatctcccgccgcaccaccttcgatagcgtcggccgctggctcgacgagcttaaaactcattgcgatacgacggtggcaatgatgctagtggggaacaaatgtgacttggagaatataagggcggtgagcgttgacgaagggaaaagccttgcggaagcggaaggcttgtttttcatggaaacgtctgcgttggactccacaaacgtgaagacggcatttgagatggtaattcgagagatatacaccaacgtgagcaggaaggtgctcaactccgaaacatacaaggcagagttatctgtcaacagggtcagcctcgtcaacaatggtgcttctacatctaagcaaaatcaaccctatttttcttgctgttccagatgacctacaatactctgcaacttgctttgtcacttctatttcctttttctttcttttctttgctttattaattaaatgggctcggttggattgttccttcaaaacttgtttatcagttacacctatatagtaaatcaaaatgttgtcttcaatctcaggaaagcgggtataaattgtataattgggttacaaagagcttgtaattgcactgcagcgaatgaaagcggacatccatttatgtcaaattgtctttgttgattattgttacttaaaaaaaaaaaaaaaaaaactcgagactagttctctc

SEQ ID NO: 55433 - DNA, 1559 bp, Glycine max
  Clone ID: PAT_MRT3847_21067C.1
gccgaccgacgcgtccgcccacgcgtccggcgcgatgccagtttgtgttgtgtggtatcatcacagcgaagcgcgccgccactactaaactttcctcactttctctctctctctctgtgagttgtggaaattgattagaattgaaaataatgtctggttcggaggacgagggaggagaagagtacctcttcaagatcgtcataatcggagactccgcggtggggaaatcgaacctgctgtcccgctacgcccggaacgagttcaacatgcactccaaggccaccataggcgtcgagttccagactcagtgcttggaaatcgactccaaggaagtcaaggctcagatttgggacaccgccggccaagagcgattccgcgccgtcacctccgcctactaccgcggcgctgtcggcgccctcattgtctacgacatctcccgccgcaccaccttcgatagcgtcggtcgctggctcgacgagcttaaaactcactgcgatacaacggtggcaatgatgctagtggggaacaaatgtgacttggagaatataagggcggtgagcattgacgaggggaaaagccttgcggaagcggaaggtttgtttttcatggaaacgtcagcgttggactcgacaaacgtgaagatggcatttgagatggtaattcgagagatatacaacaacgtgagcaggaaggttctcaactccgaaacatacaaggcagagttatctgtcaacagggtcagcctcgtcaacaatggtgctgctacatctaagcaaaatcaaacctacttttcttgttgttcccgatgacctataactaccatacgatacaagttgctttgtcacttctattccctttttgttgctttgctttattaattaaatggttccttcaaaacttgttgatcagttacaactatatagtaaatcaaaatgttgtcttcaattttattttaagaaaacgggtatagttttataatgggggtacaaagagcttgtaattgcattgcagcaattgaaatcggacatccatttatgtctctgtgattgttagtttccttgactcgtcgtcttcttctctactctccacaattctcgctctcccgggaataattatttcatttgttgttttcttgtgcatttctccctgttagctgagtattttttctgtatgatttaatactgcgctctctttcttgagaaatttgacttatattagaatacaagaccttggcttttcaattgatttgcctgatgaatgtcatcaatatgtaattttagtgttttttagcctttctatggagatatgctttgccttctaactcgattaatctcactgcccgggctctttagcagtgtgcatgtattgggggggattgtttttagtcaagtagtcaaccagaagttgccttcggttcatgggtttcttttgaattgacgtatatttgtataaatgtaaggcaatgacttgtgatttcataaatgagacccataaaaggggtccatgtgtgtaaactgtgaactattcgatcaagattttagctgccagcttttttattt

SEQ ID NO: 55434 - DNA, 560 bp, Glycine max
  Clone ID: PAT_MRT3847_21068C.1
ggctcgagggcgtttagggtttctcgatcttcgtcaataatcgtcgtctccatttcagtcggggttttagtcttcctctttccaatacactacatacagggtgagggcgtgatctcttggaagcatgcgaacttcatgggctgatttggctgccaattcggcgcctgaaaatgcgggaacctctaactccacagctccttcgcggccggtttatgtgcctgcgcatctgagaaaccgtggaccatcggaatcccctgctccaccacctacatcaaataataataataataataataataataataataataataataataataataataataatgcgggatcacggtggggtgctctgccagccagaaacggatggggtaacagaagttgtggtagttgggatcggcgcgaagtgaatcccttcggggatcaggaggaggcagcagcagcgtttggcggcgaggagcagcaggacaacacgggaattaacttcgatgcgtatgaggacattccggtggagacgagcggtgaaaacgtgcccacggctgtgactacttttg

SEQ ID NO: 55435 - DNA, 1487 bp, Glycine max
  Clone ID: PAT_MRT3847_21069C.1
gtttttgagaaagccaaaggtgtcaaaaaaggaagaggatgaaatttgtgtgccaataaatggtggttacaatgacgatgatgcagacatagagtccttgcttcttcccagaaggttcgggaactctacttctcttgctgcatccattcctgtggcggaataccagggaaggttgcttcaagatttgcaaggaaagggaacacaaggaaggccagcaggttctcttgccgtgcctcgcgagccattggatgcagccactgttgctgaggcaataagtgtgatatcttgtttctacgaggataaaactgaatggggcaaacgagtggggtggatatatggttcagttacagaagatgtggtcactggttacagaatgcacaatagagggtggagatcagtgtactgtgtgacccaaagggatgctttcagaggaacagctccaatcaacttgacagataggctccaccaagtgcttcgatgggcaacaggttctgttgagattttcttgtcaaggaacaatgcattattggcaagtcctagaatgaagttcctgcagagggtggcatatttcaatgtaggaatgtaccctttcacttcaatgtttttgatcgtctattgttttctaccagcagtatcactattttcgggacagtttatagtccaatccctcagtgcaacattcctagtgttcttgctgggcatcacaattacattgtgcttgcttgcaattcggctcgagcaagtggtcaggaatcactctacatgattggtggcgaaatgagcagttctggttgattggtggaacaagtgcacaccctgctgctgttttacaaggattgttgaaggtcatagcaggagtggacatatcattcactttgacctcaaagtcagccaccccagaagatggagatgatgagtttgcagatctttatgaagtgaagtggagctttctaatggtccctccaatcactattatgatggtgaattccattgctattgctgtaggggttgccaggactttgtacagtccatttccacaatggagcagacttgtaggaggggtgtttttcagcttttgggtattgtgccatctttacccctttgcaaagggtctcatgggaaggagagggaaggttcctaccatcatctatgtttggtctggattgctctccatcattatctctttgctttgggtgtacataaaccctccttcaggaagaactcaagattacatgaattttcaattcccttaagtttgaggtagatgaagttccctctgcttcatcttgtagcagcaggtgataccgcgcctatgttgtactagattaaattcaattgtgattatattgccaatcatgcaatttgatgttatcaattgtcatattaatttgatgttatcaatcaccctttatatcattgttcattctgcagtaatgtgataatcttattttgtttcttcaagggggagaaaaaggggggggggagag

SEQ ID NO: 55436 - DNA, 240 bp, Glycine max
  Clone ID: PAT_MRT3847_2106C.1
tttagtatattaataaataaaaaattttgaaatggtgattaaattgacaaatgaagtacaagtaaacattggtatgtgtaatcacagaggagattaagttaattgtggtgagcattcatgaatgaattattccaaagtactacacttaaaatactcagtgaaagcaagagcagttaatcctattatagtaaatattgcatttcacagttatgtatttgaggacatgaaccctttggaatt

SEQ ID NO: 55437 - DNA, 355 bp, Glycine max
  unsure (1)..(355): unsure at all n locations
  Clone ID: PAT_MRT3847_21070C.1
ccggcccggaaaccccggggcgacccacgcgncggtacacccgcggtttacgcacaccagaaaggggaacgagtaaaaaagaaaagacgaaggggcgccccagaagccacgacaaaagggagcgaagcaaggcacccagggcgaaacagcaaagccaaaaagtgcacaagggggaggcggagccgaaaaagacaagggatccggcacgaaaggaagaccatacaccctgcaagcagtgaggcaagggcaacaggaaagcggagccaccagcccacaggcagggcaagaccaaccaagacccagggagccaacaccggaagcacggagaggagcaacacaggcagaaggcggagac

SEQ ID NO: 55438 - DNA, 390 bp, Glycine max
  Clone ID: PAT_MRT3847_21071C.1
acaaaggaaagctcttcaattatgacactaatttacagggtatttagcatcactagtacaaccacttctaaacctaaaatacaaattcacaatttaattcttgtggctaaattttctgataattttctaaatttggcccactaaaagctccaaaaatatgtacaatcttagtttattttacatgattggaacaaaggaaactgatgcaaacattacaaatccaatgaattcctactttagcaaaactgggaagggttaacatcaattcttagtttcaagatttacctgtcaacttttgaaaagacttatcatggttcatcattcattcatcatataacctcaaaaggaaatagagcctctattatttcctacccttgcctcctaaggcac

SEQ ID NO: 55439 - DNA, 302 bp, Glycine max
  unsure (1)..(302): unsure at all n locations
  Clone ID: PAT_MRT3847_21072C.1
aagaaaaactagctgtcaaggttgaaaagctgggaaaggattcactaattaactttgaggacactcttgtgttccgacagtcgatagctgcctaaagctgctgccttgccatgagtgaagtacacacagtacttgctgcagacatgaccaatacgcggggtggactaaaaccaatgatctaagaacagagtatagtccgatcccctatttcaagtgctcgacgccgaatacaacaagacgcatatttttttaatccagatggctcaggtgaataggccccangaacaggttgctgctgatac

SEQ ID NO: 55440 - DNA, 287 bp, Glycine max
  Clone ID: PAT_MRT3847_21073C.1
tttggaaataagggtgatgacaccatcaattatgaggcctttccccgcaagctggtgctgattggtgagatttaagataaagttccatggatagtttcacaagaggactcatttacagcttggacaactcaggtgcgtactacaacaactatgttgcatggtgggggtccatattcgtgtgctatggtgcatgatagcacagggtctacaataccaagtgattgagctattggtgttcagttgacaaccataaacattatgtgcgcatatggtctcacatctggtat

SEQ ID NO: 55441 - DNA, 828 bp, Glycine max
  Clone ID: PAT_MRT3847_21074C.1
gtccggaattcccgcgtcgaaccaccctggcgatcgcttcctctttctctctttaaatacacacacacacacactcactttcttgcttgttctaactaccatgacaacccacattgataacctgtgggtgttggccttggtctcaaaatgcacacaagagaacattgcatggtcactcttgaccatcatggtcactctctggctctccatgaccttcttctgctggtctcatcccggtggtcctgcttggggcaagtactactcctttcattactggaaaaaaacaaccacaaccacaacctcaacctcaaacaacacaaactccaacaaccttaaaatgattcccggtcccaaaggctatcctttcattggaagcatgagcctcatgacatcccttgcacaccaccgtattgctgccgctgctcaagcatgcaaagccaccaggctcatggccttctccatgggtgacacgcgtgtcatcgtcacgtgccacccccacgtggccaaggagattcttaacagctccgtcttcgccgatcgtcccataaaggaatcagcctacagcctcatgttcaaccgcgccatcggctttgccccttacggcgtttactggcgcaccctccgccgcatcgccgccacgcacctcttctgccccaaacaaatcaaggcctcggagctccagcgcgccgaaatcgccgcccagatgacccactcgttccgaaaccgccgcggcggtttcggaatccgcagcgttctcaagagagcgtcgctcaacaacatgatgtggtcggtgtttggacaaagatatgacctagacgagacaaacac

SEQ ID NO: 55442 - DNA, 373 bp, Glycine max
  Clone ID: PAT_MRT3847_21075C.1
cttcgccctttttttttttttttttttattttttctgaactgaaacaaccgaaaacagtgaagggggtatttttaattcccttgaaagtatatacaaggctatgaggacatataacacaaacacccgaaaatacaatggcacacgttcccagccggaataaaaaaaacaaacatgctacaaatataaacggggcctacccgagcattctgaaaaacatttaaataacaaaaggggggctcgaatagtctgttctggtcccacacataaaaacgatcctcgcgcttcaacgttttggtgatgagcattatcgatatcatcaccaaaaaagcgttcgataaaaaagggggtctaagggtacatctccatcccggg

SEQ ID NO: 55443 - DNA, 284 bp, Glycine max
  unsure (1)..(284): unsure at all n locations
  Clone ID: PAT_MRT3847_21076C.1
cagagcaatatgcacatgacttggcatttcatagcatttggtgtancagtcatgatgagactgaaagtgaatctgctcattagtcatagatatgaacatacaccaaactatctattacctataacaaggtacttccctaggttatggaactggttcatctcattggtgctgtcaattcttatgtgtgaagtttccttctttgaaccctagaagattctgatgtaggcactggatcacctgcaggatctagccctataatattgatatctcaaaattgaaagggc

SEQ ID NO: 55444 - DNA, 173 bp, Glycine max
  Clone ID: PAT_MRT3847_21077C.1
ttttatgcctgaatgtgatcacttggcttcaatgccaaaggctttttaacaaaggttggatcatgttgatgtatgcatgaaattggttcaaccaatttcatcatagcaatctgaaggtgtctatcaagtttcagcctgaatatacgatcttctcattaacgacactgacctca

SEQ ID NO: 55445 - DNA, 343 bp, Glycine max
  Clone ID: PAT_MRT3847_21078C.1
gtatggtgtggtcagtgttgagctttttctcagcggggaaatatcggagaaggagggtgtgttattgtctggagaatatttgaggcaaaccttcgtcctttcaaaacgaagcgtcctcccactttttctggaatcaaccattcacgccccccttttactcttcttcttccttttgcgtttactcatcgttgtttttgtttcactcttaaaagcatgttgctttatcgggtttgttggttcttttgaatagagtggttttgaggaaattgggtttctctgtttcgtcgtgaaaaaaaaaaaatgttagctttgctgtttgccctgatcatggtttctgatggtt

SEQ ID NO: 55446 - DNA, 309 bp, Glycine max
  Clone ID: PAT_MRT3847_21079C.1
agcagacaaggtgcagaccagcaatagcagggagcagggcaatgtccatacaagggctaaaagggaattacgcatacctcagtacttagaggatttcataacctctaagaggaaccaccgctgagctggctagctaggaatggtccacgatattcacgttgcagacaagaatatttcagaatcttttccgttagaatcacatcctgctagagaggaattagaaataaacttgtgtaattttgctccctatatatatatatatcatgtaatggaaaacagaacacaagcaataagaaaacctttcctctc

SEQ ID NO: 55447 - DNA, 244 bp, Glycine max
  Clone ID: PAT_MRT3847_2107C.1
atctcgcttacacactcgcgtccgcctaggtgttgtctcactcagacacacgattgctgggattgggtaaggtgataatcgctcagcgttagtctgttctgtcatcaggcatatgttagacttacaagccgtgggagcctgtgaagattcgatgtctgaactatctggatctgcacgtgttctgcatggtcttgctgtcgagtgtaatatatactctctgatgtaatgctgctctagccaaagt

SEQ ID NO: 55448 - DNA, 347 bp, Glycine max
  Clone ID: PAT_MRT3847_21080C.1
aaaattcttgggggttttttatattttttatcccaaactttttttgaatggtactttcaggaaacaaaacacatgaaacccttaaggggaaaatgggggtaaacccaacacagatcattttatagagggcttctccaccccataacccaaccaaatttctctaaaaaaggggggggaaaaacccactctggacttcccaaaaaaaggggttcccgttaaaaacccccccgaaggccccaacaaaaaggggcgaaagggccccttggggggctcaaaagaacggggggcccccccccacattaaccagggggccaaaaaaataaaccctagcgggaacggggggaacc

SEQ ID NO: 55449 - DNA, 144 bp, Glycine max
  Clone ID: PAT_MRT3847_21081C.1
gaaaaggagatgctctctgaagcacgagcccggctggccaacacatttcttatgaatgcaaaaaggaaagctatggagaaacaagcggaggaagcgaggatgccggcttcttcacaaaatagaagcgaattacaatgctgccag

SEQ ID NO: 55450 - DNA, 409 bp, Glycine max
  Clone ID: PAT_MRT3847_21082C.1
gaagaacaaaattcaggtttccaacactaagaaaccccttttcttttacgtcaatcttgccaagaggtacatacagcaacgcgatgaggttgtgctgtctgctcttggaatgggtactgtttctctaaaacttatattttcattcatcagtctttgaacataaaaatcaaattttcttccgtgtctaaattgcgggaaagttattataaatataaaactgaacatttttaattttttaatgctatttactccatatcatgtagcagctagttttgagtccatctgtatattcatgttcatcattaacctagtgtaatcctgtctacaggtataactacgggtgtcacaattgccgaaattttgaagaacaatggacttgctactgagaagaaaatttcgacatcttcag

SEQ ID NO: 55451 - DNA, 381 bp, Glycine max
  Clone ID: PAT_MRT3847_21083C.1
ggctcgagctaattgatgctgtaactgttgacgaaagacacacggaacatgttggtgaccagactggcgacgcacctacaaggcatagctgcagctatacttaatctgttaacgtgggtgctagagactataaggcatgctcagcaagcacacgatggtcagtgggataacatacacgctgagtgagactggtaggaatggaacggacacctgatcctattatgggctcactgatgacaaccctctcctcggaatatgctgcatgtggtggtatggtgactaacctggcgacagctgaacggaacatagccgtggacagaagtcgatatcattcacacagccctgtattgtccgtcatagattcggcaagggcatgaatga

SEQ ID NO: 55452 - DNA, 389 bp, Glycine max
  Clone ID: PAT_MRT3847_21084C.1
aaagtaagtaattctaatgcattggcagttgaaaatatttaggcacaaaaaacaaaataaacgcaaaaacaagtttcctgatcgattgtatctacaaaaccaaatatgcactcagttgccaatgtatctgcctccgtttccacctctagctctggccctttgccatcgccgcatgttcgcgaccctcgcgaagatcttccgaatcaggtacagcttgcgggactggcgagcaatgagattggccgtagaggaactctgcccaagaattattccgtaaccatcttggaaagactccataccctccgtcagaagctgccagaacaatgctccactcgctgcccctcctcttttagcagaagcatatattttgtaatacactgaattgaaca

SEQ ID NO: 55453 - DNA, 369 bp, Glycine max
  Clone ID: PAT_MRT3847_21085C.1
cgcaatcatgtgcgcgagcgggatggctacaatgccgggtttcggggaccagtactagaacgagaagctgataacggaggtgcacggattcaacgtggaggtgttggcggtggactggagcatttcgccgcacgaggtgaagaagaaggtggcgagtggagagaggatagagagttccatgaagaggctgatggatgatggagagaaagggaagagaatgagaagcatggtcaaagagatgcacgagaacgcttggtaagctgttcaagaaggtggttcttcttacgacagtctcacagctatgattcatcatttcaagactctcgtgcctaatcatgtgaatgtgaatgggaatattgatcactgaat

SEQ ID NO: 55454 - DNA, 385 bp, Glycine max
  Clone ID: PAT_MRT3847_21086C.1
cccacgcgtccgcccacgcgtccgcccacgcgtccgaggagaagctccttgccaaggaagcagcccaaagaatgaactagattaagttgcttttacattattaaggttgtcatttttctatatcttatatgggagcatatacaagttaaaatgtgaggttttacttcattttggtagctggtaatccacaaggaccgattttgatcgttaaaaaaaaaaaaaaaaaaaaaaaaaaaaaaaaaaaaaaaaaaaaaaaaactaaaaaaataaaaagaaagaaactctatcaaaccataaaatcgaatattcgctttgctcagataagacaaattgaattaaagggtcagcggattaacaattaactgtcctttggggggcggcgttt

SEQ ID NO: 55455 - DNA, 242 bp, Glycine max
  Clone ID: PAT_MRT3847_21087C.1
aaaagtcgttgtctcagatgacttaagtccatgcatatacgtacgtcatgttccaatctcctcacacagctattcaaacctaacctatcggttgatgctccctaatgattgcatcgagaaaatttctctgcaatttaatccaactgttccgtacaatacttcttccctattagtcggtccaacacttcacaagatcccattaaatgtttccattaatagccgtctatatcaaaccgttaacc

SEQ ID NO: 55456 - DNA, 402 bp, Glycine max
  Clone ID: PAT_MRT3847_21088C.1
gggttggcaaacaagatccaatctcaacttgaacgttagggaacccatcattaggtttagcaaaaacaaagtaaaagttttttttttcccccctttttttttttcacccacttccacctaatatttaaaccggggcaaaattaaacatttttcactttatcaaattctacattggtgaaaagctaaagaatttcaagaaaaaggggtataaactggtgataactcaatccgcccttgatccaaaagaaaaaaaaagacggggccaacaccttcacattcatccaatattttttttaccatcaatcaatcatgggtggcacaaacacaaacagtaacatgttactggcccagacccattaactaaaccccccttttgggccttttttggatggccttgacccc

SEQ ID NO: 55457 - DNA, 414 bp, Glycine max
  Clone ID: PAT_MRT3847_21089C.1
agtcggcggccgccctttttttttttttttcgggcaagaaaagagtttgagtatcaccaaacttgaagttaagctcatacggtggacccggacaataagctgaaacctcctattatgattgacatattctatttatgcacacagacgagagatacatggtcgtcaagccgtacatacatatctacagaatttaatttccatctgcttgcatagaaaactttgaagagaagggacctatactacggcctttatcgatgcgcgcgagggatatggtgtagcatgaacccgtggaagtggaggacgtgcatgggacaacagcaacagcttactgtgtgccttggctattgagctcactgagtgtctaacaaccattatggagagctcgagcactcatgatgtgctaaaccctgattt

SEQ ID NO: 55458 - DNA, 1487 bp, Glycine max
  Clone ID: PAT_MRT3847_2108C.1
ccccaacctatgtccccaaccttacgctacaaataccttccacacactccaccactctcgtgatttcattgcataatccattgactagaaatcccatattttccccccacattaactcacccaacccctctttctaaaaggcctcaaggatacactccggacttaattacgttattttgttagggtcaccgtttcgagatattctaaacttgtactgaaaaatatggagggaaaagaagaggacgtaagagttggagccaacaggtacggagagaggcagccaatagggaccgctgctcaggctaaagactacagagagccaccgtcggcgcctctcttcgaaccgggagagttgtcatcgtggtctttctatagggctggcatagcagagtttgtggccactttcttgttcctctacatcacagtgctgactgtgatgggtgtgttcaaatctaagagcaagtgttccactgtgggtatccaaggcattgcttgggcttttgggggaatgatctttgctcttgtttattccactgctggaatctcagggggtcatattaacccagcagtgacgtttgggctgttcttggcacgcaagctctctctgacaagggcaattttttacataatcatgcagtgcttgggagctatatgtggtgctggtgtagttaaggggttcgagccacacctctatgagaggcttggtggtggtgccaacacaatcgctaaagggtacaccaatagtgctggccttggagcagagattgttggcacatttgtgcttgtttacactgtcttctctgccactgatgccaaaagaaatgctagagactcccatgttccaattttggcaccactgcctattggttttgctgtgtttctagtgcatttggctacaattcctgttacagggactggtatcaaccctgctagaagtctaggtgcagccattatcttcaacaaggaccaagcttgggatgaccattggatattttgggttgggcctttcattggggcagcacttgcagctttgtaccatcagatagtgatcagggccatccccttctcgtcgaagtgatgcaacattgaagatgaattgaaggaataatgcctcaaaaataaaagtagtaactagttgagtccaagacagcattcccacgtaaaagatgttcctatgacttctgctaatgatttactactactactactattaatttatgcataattaatctattcaaatctcatgtatttggagacgcattagaacttgcgcaaaccgtgtggtatgcatcgtttatttctttttttgtccttctatttaacagcttctctgcacaaagcagaaactgcaggtctatatttgctagagtaaattgtataattatgttatgatgttcaataatcagccctctatctatcgtttggatttgttttttgtgataaaaaaaaaaacaaaaaaaaaaatctctagcggccgatatagagga

SEQ ID NO: 55459 - DNA, 235 bp, Glycine max
  Clone ID: PAT_MRT3847_21090C.1
gtgggacgatcaatggtggaaggcaagccagttgagtgttggggcattcttgattttaccagccaggagtctggttggcgcaaattaaacagcaaacaattcattgagaaccttatgggtaagtatagaaaattgggtattggcatgaaggagccagtttggcgtgaacaatctagtatgtggagtcttggggattacaattcgctgtgtaaattacttgaaaatattgaggata

SEQ ID NO: 55460 - DNA, 341 bp, Glycine max
  Clone ID: PAT_MRT3847_21091C.1
gacacatccagtgcagacacaacttactcgtagactcatctcattacaaccctttgtacccgtaggtttccttacctaccgagagtgttccacaaattcatcaaaatgaccaactattacgcttaacacaccatcattaatgatactcctggatatttcaactatccatttgtgaccattgttccaagtgtcaaaaacaagcctctattcttttacgacaaactttacaaatccaagaaaattgctgtcacacatgactaatactctcaccaggatcatgctatacctcactgacattgacctagctaacatccatatggaattcattgacaaaccataca

SEQ ID NO: 55461 - DNA, 297 bp, Glycine max
  Clone ID: PAT_MRT3847_21092C.1
cattgccccctcctaaaccccggaatccggttggggtccacattttacaacacacacaccccacacgctttaagcactttttttttaggggaaaccaaattgaaggccccatgggaacctcttccacacttaacaactttgttcggcaccgtggcggccaaattcccttccggcggggccttttcggtggttgcaaaatttaacttaaccaatttcggctttaacggctgggtgaaatcccccgcgcttaaataagtttcggccgcgggaaaacccgcgaccgtgttggccttaact

SEQ ID NO: 55462 - DNA, 650 bp, Glycine max
  Clone ID: PAT_MRT3847_21093C.1
acattcaagtgtagagaaaaaagcggggggagataggagtgtaaagagaaagtgagactagtgtgttgcctgttcctgggcccaaatagtggcccaatgggaagcaacaacacaacaaagggacttgatagtttgattgatgatggtgaggctcgaggtgataataaatttgaggttgagagagtgaaagaggagatgggtgcgataacgagcgcggtgatagcagttgtaggagttcttctaggttggatcacaatagagatcgcatgtaaaccttgtcttgaaaagggtcgcgaagccatcgatcgaagtctcgatccagattacgatcccgacgacaccgccattcgcgccccactcaaccccaccgccgcctccgccaccgtcaaagccgtttgagaaattgatgtcccatcttctcacgtttccgcctggtattcaattcggtgtctaaatcaaaaggctattttttttctttttttgatgtttgtgtatttgcgcgcttttgatggcgctattaaatggcgaatttaggatataaagtgtgtggagacttgttattatgtgaatggagattgtaatttatctcaaaagttggcgcttttcatgttttcatcatcatagtgaatgtataattgctcacatttgtt

SEQ ID NO: 55463 - DNA, 1195 bp, Glycine max
  Clone ID: PAT_MRT3847_21094C.1
aaacccattcacacttgattacaactgttactaggtttgtgaatgagcccattaattttgtatagaaaaacatttaatatcccattaattaaataaatacagaaacattaaatagtaataactgatccttaattcatattgggacgttgaagatatacacaaattaccataatttatgtgtttttgcaaacctttatatatcaagaaactcattttgaagttatggtatcaagctattgagaaatggtttaagattcaccagtcattcaacgtgagccatgggagcacatcaaagatgaagatgtccagagaaatgctttgtccttttctggggagatttggcaagttcctcctatgttctcagctattaaagttggaggcgaaaagatgtatgagaaagcaaggagaggagaaagcattgaactttcacccagacgaatatcaattttccagtttgacatagagcgtagcttggatgacagacaaaatttgatttttagagtgacatgttccaaagggacatatattcggtcactctgcgctgattttgggaaggctcttggcagctgtgcccatttaactgctctccgaagagattcaattgggcaatattcagcagatgatgcatgggagtttcaagagctggaagaggctatcaccaaaaattatctctaacttctctggtctattgctacctctcatgatgatgagattcagagccatgacatgcacttttcttttttggttgaagggcagtgaaagcggagttttaccttccaaagtaaacattgaaataagcatcttcttaactatgaagtacctgcgtcttaattgcaacgacaagcatcataatctcggccgtcaaatactgaatgttggtgtaacatatagttttattgttaggcctaatgccttttcaaatataaccttgtacttttgtcgctttatatgctatggagcagtatattattttttacatttatagacaagatcgagatagttgataatcggtgttcttgggagatatttgaggtcggatcctgtaagattaatctgaggtctcgtgaatgcttttttgtggaatacaatacttataggaaggaggtaaacttgtggaacataataatagtttcttcttttgatatttgagatgggatcctgtaagattaatcttgtaacttttctatggattcct

SEQ ID NO: 55464 - DNA, 1348 bp, Glycine max
  Clone ID: PAT_MRT3847_21095C.1
taaggatataacatacaattgttagtagttgttctgtttttaaagaaggcattaatttcctgctcatttataacaataccttctgccactcatgtataaaatataaagtatttattgatttcttctatgaattattttcccccttatttccctttttatatatacttgcagattggttgttatgcagggaaatattctgtataggtttccatctttgcagaggacagcttctcaaaagagtaagagaaaagaatatgttggaaggagatgggcagattgggttggaattgagaagtttttcaaggagaaaaaatggcaattcagtataactggaacgtcagagagagcaatggtcattggcctgggtggcctcaatctgtttggagttattattcttggaaccatgttgaaagatatggcagttgcacccagtagcttcattaaatttgtagccgacatatttcctcttcttcagatttatgctggttccttcaggtaatgatcggtatttctattttcaaacaactaagttgttcaaatttttagagaacaatatttggaaaagctggagtgtttctctcactcagctgagactttatataatgcaacaagtacacgaaaaggcattacagcagagaagagtgtttaacaaggaagaaacaaaagataaaatgtaatatctatctaagaattggaaaaggagttgcaaattatctttttgaaggagcatttgatagaggataatgatattgctaattttgagaattgaaggcaatttgttgctgcaaatttaagatgataagttcatgattagtatttgggtttaacttatgttttctttaatgatatacttcctatgcacattaatgtggttgttgatatctatgtaatttacgaaggaagaaaaaattagaaagatggagaaaacttatgaagacatgataaataaaagggtttacttaccctcttggtccttatagttgcaacaactttcctctttagtacttatagtttaaaacatcctattttggtccccctatagttgccatttttttatccttttagtccttgccgtcaagtttcgactatgctttttgaaattaatgtgatgtgattcattaaatccatgttcatctcgaacggcattaggcgactttagatgacaaagactaaaagggtaaaaaaatgacaactatagggactaaaaggaaaactttttacagccaggcagcaaatgggtaattaaagagaccaataaaatgcatttaccttgagtgcttgtatctgtttcactcagtacctctggtactgtatggtttatatattaataatactatttttgccttcc

SEQ ID NO: 55465 - DNA, 372 bp, Glycine max
  Clone ID: PAT_MRT3847_21096C.1
acggctgcgagaagaccacagaaggggccctcttcgttccttgctcgatgcttcttcatgactcaagcaattagcgttcgagtgtgacacttccaatccatttcatgtttcgagtgctttcatgttcatcgtgttcactctctatgttttacctgcctttttaatgtgctttaactggttatttaagcacgcatctcacctactaaatggttaaatgaatttcaaccgactcatttatattggaatctcgggtaatcactgcctaaataaaatcctaccgatcggtcacgcttgtacctttgtttaattaaaaaaagcaaaattattattatatattctaaatatcttggaaaaaaattctaattaaataat

SEQ ID NO: 55466 - DNA, 502 bp, Glycine max
  unsure (1)..(502): unsure at all n locations
  Clone ID: PAT_MRT3847_21097C.1
cttggggtgttgtggtttttttttttttttttttttttttttttttttttttttttttttttttttttaaattaaaggttggtgggatgcctttggaaatcaaaggctggatcaagactcaaggggggccttaaaataatttaaattttgaacaacctttgggggggggggagagccttctttaaacccatttggctggaaacctaactgctgctgcaaggggcccaattttcattcctcccattnaaaggggaaaaaaaaggggggccaccctagaatctaaattcaagaactttgggaacagggaatccctttttaagggggatcggcgggagcagcccccttgggtgggcccccagcctttttgggaagaagaaggttgggaatgttaggcataacaccgccgttggcagtgggaacatctcctagaagctgggtcaacttttcggggttcctcaccgccaattgggtgtgggggggaacaattcgaggttttttgttt

SEQ ID NO: 55467 - DNA, 419 bp, Glycine max
  Clone ID: PAT_MRT3847_21098C.1
gatacgcgctcctataggcttccttagattcttttcacaagcgaacgtaagccttaagcgagacttacatcctttaatgacaaggcttgtacgctacctgaatgatcctgacataactgtgcacgatgcaatgatacatatatggaagtcacttatgaatgattcacagaaaaccatccatcaaaatttacatcatatcattgaatgatttactaatgcattaggtatccaacctattgagctcactttgaggtaccatgtcttgctcttacatacatattccaatgacgaacttttcatgacgttagaaatcatttaattatattatggactagaacattaagtctcatggatcacataaaggaaactgttagaataactgttcaaatattctaccgaactataacttcctttacttc

SEQ ID NO: 55468 - DNA, 590 bp, Glycine max
  Clone ID: PAT_MRT3847_21099C.1
gtggttgttatcaaggaagagacttttgagattgaagaggccggtgaggtctggaatgggtccggtgagtgagttgttctgcaagctgaggactcggagctggtcgagacgcgtgagtgttttgggagcccacgcgcctccgagatctaagttttggagaacgagacgcagcactttggggccgttgcattccacgccatgccacgcgcagaagcggaggccgcgcgtgaggggggagaagtcaaggtggttgttaacgtcggcttttagtttgaagacgaggagggcggttgcgtcggtgaaaacaaagggaggaagatgacggcgttggagtttggagcaatgtgcgtttgacggggccagaagcaggaacagtaataagtgtggatcaatcgccattcttggaccaacctcagaactcaagtgattttcgtgtgttgggatcacactgccaaatgtggatttgtccattgcatacgctacgatacaaggaaagtaggaattcatagctcagaaatcacgtgaaaatcctctctgtaatcagaatctcattccttctataataaatctctgtcccccgatgatgtcgc

SEQ ID NO: 55469 - DNA, 131 bp, Glycine max
  unsure (1)..(131): unsure at all n locations
  Clone ID: PAT_MRT3847_2109C.1
gangngatcggnagtggcggangtngcggacgtgggacccgcatggttgagantgaccccaccctattcttatctccgctttcactgcctccttcttcttcantncgtnactccncctttnctggnggcat

SEQ ID NO: 55470 - DNA, 825 bp, Glycine max
  Clone ID: PAT_MRT3847_210C.1
tacggctgcgagaagacgacagaaggggtgaccaagcctcaataattgggggagcaatagattttgtgaaggaggtggagcagttgcttcagtcccttgaggcacaaaaaaggacgagaaagaatgaagagggtggtggtggtggtggttcttcttcttcttcctcttccactatgttgtgtaagcctccaccaccaccattattattattatcatcaccacatggctatggaatgaggtcatcacctagtgatgaagtgaactgtggagatgaagtgaaggcagaaaacaagtcagaggcagcagacataaaagtgacattgattcaaacccatgtgaacttgaaaattgagtgccaaaggaagccagggcaattgttaaaggtcattgttgctttggaggaccttaggctaaccattctgcacctcaacatcacttcctcagagacttctgtcctttactccctcaatctcaagattgaagaagattgtaagctatgttcagcaagtgacattgcagaaacggttcatcaaatattcagcttcattaatggtgtagctagagaccactagctccaaccttagggagtggtagcagaagaataaaggacgaatcattgcaaggaagatggggaaacggggaacacagggcacccatttcttgtctacatttcaatgagatgtataatgttaggtggtagctcagagattatagatgatgatggtaatgctgaaggaggataaggcatgtggtgatatattatttgctctgctcaaatgtattctcgtgttataattaaaaatgctactatagttttgttgcatg

SEQ ID NO: 55471 - DNA, 1361 bp, Glycine max
  unsure (1)..(1361): unsure at all n locations
  Clone ID: PAT_MRT3847_21100C.1
cccatcaaagggttatcaagaaccgccttataagtgcttcccaaacaccctctccctaatagctccgctgaacgctttcantcagctgcgaacctttcatcagctgctccagcgtgtacacctgcgcctcacccccactcttcgccacctccgctctctttactttctcctccatctccatccgcataaccgccgcgccctcctccctcgccgccgcatcagccgccatcatccccgtcctctcgtccttcttgctccgactcctctgcttcctcaccgccgccgccaagcacgccagcgagcaaaccagaacgaatatcccggccgagaacccaataatcagcgccctccggtcgtggcgcttcttctcgtacggctgccggataattccgttgacgccgtgaacctgcgcgttctggccgagcgcagccgtaggcggcgccacgggtccgaagaaaggctgtgcgggacggcattgtacgcggatgatttcgccgcagagttgagggtttaacgcgaaggaagaaggcggaaaacggaagaccgtcggcgtcacgggaaccgcgccggagaggttgttggcggaggctcggaagattttgagagaggattggttaaacggggggattgaaccgttgaaggagttgaagcttaaaaggaggctgtggaggcggtctagggtggtgaaggcggcgggaataggtccggagaagttgttgtgagagaaatccaagtttcggagacggtggagagagaagagtgagggagggagagaggcggtgaagtggttgttatcaaggaagagacttttgagattgaagaggccggtgaggtctggaatgggtccggtgagtgagttgttctgcaagctgaggactcggagctggtcgagacgcgtgagtgtgttgggagcccacgcgcctccgagatctaagttttggagaacgagacggaccactttggggccgttgcattccacgccttgccacgcgcagaagcggaggccgcgcgtgaggggggagaagtgaaggtggtcgttgacgtcggcttttagtttgaaggcgaggagagcggttgcgtcggtgaaaactaaggtggggagtttggagcagtgggcgtttgacgacgcaagcagcaggaacagtaataagcggactggatcaatcgccattcttggaccaacctcagaactcaagtgattttcgtgtgttgggatcacactgccaaatgtggatttgtccattgcatacgctacgatacaaggaaagtaggaattcatagctcagaaatcacgtgaaaatcctctctgtaatcagaatctcattccttctataataaatctctgtcaccaaaaaaaaaaa

SEQ ID NO: 55472 - DNA, 447 bp, Glycine max
  Clone ID: PAT_MRT3847_21101C.1
gttactgttgaatcgaatggattgggattttgttgatctgaaatacgcatttgacatggctagcgcgattgtttatgactcttacttctaaggtgaccaactagccaatatgaccaccgacgacgtagtcagaccttatcgttgttctagcaactagattcttattctcacacgaagaggtgcagatgaccaatttaggaataggagttgtcactggcagaatgaatgtataatatgagaggattcatctcaatgagcagatgcgctacctcgatggcagacattggggagatattggtaatgaaccgaccagacagatgaagggaatgagtgttgtgctaaagacttatactcgacagacaatctttctacctggtgttgagcttgttgatcctgacatgataaaacccggcgatctagttggtggtaacaaggatagttacttaa

SEQ ID NO: 55473 - DNA, 114 bp, Glycine max
  Clone ID: PAT_MRT3847_21102C.1
ggctcgagcgccagcataagatgacggcctcacagggtcgcaaagctgttttcagagccgcgcggtcccttgtgttcgattccaaagcctcccatggacgagcaagatggggct

SEQ ID NO: 55474 - DNA, 573 bp, Glycine max
  unsure (1)..(573): unsure at all n locations
  Clone ID: PAT_MRT3847_21103C.1
nnnnnnnnnnnnnnnnnnnnaatgataaaaccagccaaaagcccctatccattcacttcacaattgatttatacaaatcagttcccatgtacttggtagaaaataaaagaaacataaaatatcaacattgaagcataactaaaatgccttagtggttaagtgagacataattaagcttgaggtccaagtctcaaaactaactacaagcactttattattattattattttttattaaatgccttagttaataattgtcttttgttctcactccaagcaagcaatacatgtgactagcaacccaggtaggcaagcctttagatgttgggtcccctcatactattgtttgccctcatattagccactatatgttgcaatgcttcttgggtcttgtttgctcttgctcttgagatgcgccctcctatgccttgggcttccttttgggcttagatcctgtctttgatgtcctcatcattccctncttcttgaaaagcatttgctctcaaatcaacttaatcatatgatttgacttccttcgagaaagaaccgctctttcctttaatgcacccatgcc

SEQ ID NO: 55475 - DNA, 255 bp, Glycine max
  Clone ID: PAT_MRT3847_21104C.1
atcgtgcaaatatattactttcaatcacattgatgagggccactcaggggccccattacagcttccattctgaagcaaccttggctctttaaaaccttaaagcaaaaaggtgtttgtgggaagggggaacaatgatctcacattcatggggtaaaaaaccccttcaagattactgcactcgcaatctttttttacatctagggaaaatacagacaaattggttatcactctcctcataaaaccttatgggctatt

SEQ ID NO: 55476 - DNA, 137 bp, Glycine max
  unsure (1)..(137): unsure at all n locations
  Clone ID: PAT_MRT3847_21105C.1
ctntatanacagatgnanagaaataacatattncattnagcttctatatgctcnctatnactagtnatttcgggttttgaccaggggttgtaaattananccncatctctanntattcgntcgagtaaaatacgact

SEQ ID NO: 55477 - DNA, 617 bp, Glycine max
  Clone ID: PAT_MRT3847_21106C.1
ctcaaatattttgcaatgctacaacagacatctctggagatattcctgaaagtgctggtgagctgagccagtatgagaaagtgattgaaacgttaacaactctgtttcctgtgtgggtcgtcttgggggccattgtcggcatttacaaaccaactgctgtaattactctgattttttcagctacgtacatggttgattggaaatatgttgattaactgctgtcaagttatggctatattccaggtaacgtggttggcgacagatctttttagtcttggcttgggtttcctcatgctctctatgggcttgacattgacatttgaggatttcagacgctgtctgcaaaatccgtggactgtaagggacaataactgatatttaaagaaaaaaatatttatttgtttctccttttaaaatatatttttttttttttgcaggtgggtataagggttttcttgcacaatatttaattaaacccatgctaggctttgccattgcaatggtactttttgttattacctgagcacttccatgcttcactatctctttgcttcattttagatcaattcttgaaatgtggttatgtcctctttatttttatattgcctcctaagaat

SEQ ID NO: 55478 - DNA, 560 bp, Glycine max
  Clone ID: PAT_MRT3847_21107C.1
gcggtcaaagaataatctcacagcaaaagtttcttcttaagataacaaaaacaaaaaaaattaggaagtgcgttcactctgcaagaaagacgacagaaggggacggaaatgcagaaagtggagtttgttactgtggggttccagcgttgagaaaaacctaattaacgaaccaaaaccctaaaatctggaaaaatggaatcgagcgttctggaatggctgggcgtggagataattggcgtgatgagccccgtctcgatctgcatgttccttgtggtcctactggtgtactccctctcctcgccgtccaccaccgccaccaccatcgccaccgccgccaacctcgtctacgctgagaacccctccgacaccgccgcgcagaagctcgagggcgcggtcctcaacgccgtcgtcttcatcgtcttcatcgcgctcgcaaccttcctcctcgtcctcctctactactacaactgcaccgacttcctcctacactacacgcgcttctccaccttcttcgtcctcgccgacatgggcggatccatcctactctaccttctggaacg

SEQ ID NO: 55479 - DNA, 345 bp, Glycine max
  Clone ID: PAT_MRT3847_21108C.1
cttttcttttttttctccaccctcagccgaaaccccctattgaaagaccaagagtccttacaatcctaatttcgaagtacagagccactacatactaagtgaaattaaaacgactgaaagaaaatgagatccacagagtccggggccaacacagaaacatgaactcctataattcactgacccaataaaaattgccgtcatccattcaaagcttaggcagaggccagagcacctctcttcctgggtgcagcgtcgggaccctctctgagagccgtcttgaatctgtggggaacgttacgaaagaacctgatgcttccaggtggggggggcttcatcctaatggcc

SEQ ID NO: 55480 - DNA, 309 bp, Glycine max
  Clone ID: PAT_MRT3847_21109C.1
acccaaacaacttttttcaccttaaattttcattggttttttttgggatgtggcctgaaaatacaggaaagccccaaaaattgcaatggcagatccaaggcctttaaaaggccgaaccggattcctgaacaccaaaaccgaagacacaatccccacctcttttttaattgggttccccacaaagaaagtcaaggggctaatttcatcaagggcttggtaaaatgattgtgtataaaaatggtaaaaccccccagacaccaacccccaagtttaaaatgtggatgctttgccaaatacttcaattgcctt

SEQ ID NO: 55481 - DNA, 204 bp, Glycine max
  Clone ID: PAT_MRT3847_2110C.1
ctaacagaaatgggaaggacggagaaccagagcacgccccgacacaacccggcaccaaaacggcaacccagagcgcgcagcgaaggcaaacccgcaccaccaagcggaagggaagggcccagccacgacccaaaagaggaaacaccgggacgaagaacaggacaacacacgcggggaagaaaccaccacaaggccccgcaaaaa

SEQ ID NO: 55482 - DNA, 507 bp, Glycine max
  Clone ID: PAT_MRT3847_21110C.1
gaggactataaacaactacacgctacccctggtacctgacttctgtgaaaacatcctattggtacctgtgacatgcttgggtattttaataacatgaaggcaagcgggtccaagagaaggaaagatcgttcaccatgtctatcacttgatggaggtccctccactaccattgaaaggtactccccattgtatcaaaaagagtgtgtcagcgtgaggttcacattctaactaccttatcgataacctgggtgcgaaatattcccaactcgctctgaaacggaggaacgtgcctagcacctcttctcgaattctgaccttgtgtgtgtccaaatacatctgggcctgcctaggattctgtccaccggtgcatgggaacgcttgagattccgtacatagggatgcctggtgtacttctgactaccccactatggaacaactgtgagctgtaatattctatgcgtaggacatcacctgggacaactcccctcagtcgtgttgcttacagaa

SEQ ID NO: 55483 - DNA, 288 bp, Glycine max
  Clone ID: PAT_MRT3847_21111C.1
ttaattcttagctcatctttttctcttccacgaccactaatgtggagtttattagaaacacatcaaaaagaaggttacaaacctttcaatttaatatgaaacaactctcaaagatatgattccatcttccagggcacagcaaaactttttcctacagggatatttaaacccttcaaccctaccatcaatattttttcttcatctccctaccaacacaaaaatttatgttcagatgtgctaactaccgcaccttagatactcatcagtggggctccatctatctcaaaa

SEQ ID NO: 55484 - DNA, 257 bp, Glycine max
  Clone ID: PAT_MRT3847_21112C.1
cggacgcatggaatcgggtaaaccccatttcaccaagaacccttcctgaacttagcgccagggctgcacctcgtgcttaagcctcatctgaggcacctgcttctgcactacaaccagtacctgcaccaagagttgctcgaacagaaccacctatggaagctgctgctccaatgccataatggatgccccctggctctggtcttgcacaaaatgacgcgaggaatcctacagctgatactggaacgcacagaatgtga

SEQ ID NO: 55485 - DNA, 446 bp, Glycine max
  Clone ID: PAT_MRT3847_21113C.1
aaaagaataacataggaaatctcataacagaaaatttattgcatttaaaaatcttaaaaaacagataaaaagaaaccaataataattgtttatactttttagatcaacatacttttttttttactttatttgagataaaagagtattaactacattaaacaagtgtcattaaatgacccgtacctcacttatgtatgtttggctgggatgatgaaaataataaagaaaatgaaaataaaaaacatatatttgaattaaaataggacgtaagtcatgtgagtctcatatgaaatttatattatttttttctgtatttatctttccccctaaaccaaatagagtcttaatgtgggactggattcacttatttagagaaagtcttaaatatgaatatagtcatgtaagtttatttattttttcaatttttttccttctaatttttttta

SEQ ID NO: 55486 - DNA, 278 bp, Glycine max
  Clone ID: PAT_MRT3847_21114C.1
ctgctcgctacgcgctgtgtctctctgtctctctcgcactctcactcgctcttcatcgcacgcaaacacagagttactgactcaacgatcttcggatactcttacgtcttggtatatgagctcgaatgcgagacccactcgtggtggcacgggattaagacacgcaaacgaaatattgctacgccgctggactctgcagcagtctcggatgcagaggtccagatttatttggataatgctcgtgatctggaacttattgctaagagtattggatcttc

SEQ ID NO: 55487 - DNA, 394 bp, Glycine max
  Clone ID: PAT_MRT3847_21115C.1
acttaaaggaaaaaaggcccttccaattaggataaagggagacttttatcccacctgatctaaaaccaaaaggaaccaaccattcctgggtccaggggcacggaaccaaacctttacccctttttattgaaaccagttaatttaaaaataaaaccttcatttataatcaatcctttccttcttaataatttaccgttctttcacccaaaacttcttaatatgccttcccaaaaccgctataaacctaacgagcttaagaaaactttcctttttaaatcccttgaccaacataccagaggaacaagggccctttggtctaacataaaatcaaatttgggggaaaggcaaaaaaacacctcagcaactacagggttggggatgatcatgcatacag

SEQ ID NO: 55488 - DNA, 315 bp, Glycine max
  Clone ID: PAT_MRT3847_21116C.1
gcacagcgtacgcctatgcgtctgaaacaaagtatgaacctttagtcgaaagagcacggatccgagtgaattagctatcatcacagatgctgccatgatctcagacttcatttcatacgtgtacagtcaacagagctcagctcgataccgctgacatagatatggacgaatttgtatagacatctggtctatgtaatcgatgatgtacgatgatttcgcatcaaggttcaccgtatatatacttgacaataatgtcttatatatgctagattatgtcgattacactgtacaggcatattataagatatatctcta

SEQ ID NO: 55489 - DNA, 348 bp, Glycine max
  Clone ID: PAT_MRT3847_21117C.1
attccacaactcgggaaattggattcaattgacacctaccttcaaataatcaagaagtattactataaccctgatgccttcaacggggttttccgcattaactaactctttcttttagttgccaaggagacatatacattacttacctcatctatacctggttaaaattgctctcgataattagagaagctttatgggctatgactcttttttgccataggcaagcggccagagaaataaatcattcaccccaacactaaggtaaattaccgccaccacaagggactcatttaagctatgttatgaatgtataaaacaaatcactatctatgaatttttgacattttt

SEQ ID NO: 55490 - DNA, 354 bp, Glycine max
  Clone ID: PAT_MRT3847_21118C.1
ccacaatacattcctcagcaataacaattagaaggttctaagacaaggtatatacattcttgacaaactacttgcgggtttatgaaatttattgagcatggttaccacaggctatttaccaaaacacaaggtgttacattagaattcagtgcaaaggaatatactaaagctgggcgctactctgacctaaccaggacgccgagagttacaaaagctcaaagtaaaataacctgtgcaatccacaaggtgagcaagatggtgctctcagagattgatgaatcacggcgggggtgaaaatatttatcctgtcaaaactgtgagtttaaggaaaaactttggacagttttttaacat

SEQ ID NO: 55491 - DNA, 404 bp, Glycine max
  unsure (1)..(404): unsure at all n locations
  Clone ID: PAT_MRT3847_21119C.1
aacccagaaacanacaagcccnangggaagcaacccgnnaagggacaanggaccacnggccncnanganggggggangaccccncncaaagnngcnncacanggnnnngnccgngcaccaccnncgggcaganggcggagaaagnngagggagggacaaganccaaaaangcagcgngcngcannnangnngacccgcangggacgaaanggcnananggngccacnnacaganccaaanngcgacgacncnncncanngncacaggaacccnacncnganccaaaacnncacggnngnngcngcnnnggngcccncacccannnacacanngaacccanaaaccgnggaannganccccccannggnngggaagggaacgnngagaagnggaagagggaaggc

SEQ ID NO: 55492 - DNA, 398 bp, Glycine max
  Clone ID: PAT_MRT3847_2111C.1
aaaagattactcccttacatataaaaacgttgctaaacacatacgctgctaattaaacacacttgcatgtggacacaaccagcacttccaccaccaccatcatcattatcaaattgaaattcttgtatcaaacttattaattataatcttttcataatcctagccttcagaccattcttcatgagaagaacaatggagtggcttggagtaggagaatgcccttccaccacctggaatcgatactttcgcaaaatagaagctgccaccatcttcatctgaacaaaggccaagtcctttcccaagcagattctgggtccagcattaaaagcaatgaatttgtaagctggtgcataaacaacctctcccctctcagatatccatctctctggcttgaactc

SEQ ID NO: 55493 - DNA, 289 bp, Glycine max
  unsure (1)..(289): unsure at all n locations
  Clone ID: PAT_MRT3847_21120C.1
caaggancaacagcagcagcngcagnatcgcgaagtgnacattggnttngnaacaaccgcggcgagaagcagaatannaatcgtgcattcgaagaaggttctanaagaacaacanacaccgccaccgccaccaacgccgatgccgatggagctggagctaggttcaacanctatccancgatccttcaacacncnctacangcgccacgcggnggantcgctcgacgaattgcctgacagcttcagcntcaccgacgcctccattccctggcnaccccatcgtnttngc

SEQ ID NO: 55494 - DNA, 253 bp, Glycine max
  unsure (1)..(253): unsure at all n locations
  Clone ID: PAT_MRT3847_21121C.1
cggacgcgtgggaaaaaaaaaaaaaaaaaaaaaaaaaaaaaaaaaaaaaaaaaaataaaaaaaaaaaaaattctttttaaaagagccttcctttntgaggggcccttcttaaggacccaggtcttcgctatcgcgtgacttcttttattattgcctcctctatagttttacctagaccgaattttttcgaccgcggtttttgaaaaaatctttgtggtaaaacccttaattctcccttgcttaactgcctttt

SEQ ID NO: 55495 - DNA, 541 bp, Glycine max
  Clone ID: PAT_MRT3847_21122C.1
ttttcttaagattttccgcaaagggcgggtttatatatcctattctacactattaatctactcaaccataaaactactatgaactatgaagccttgccatgactttggagctcaggtaccttgtaaagctggctgcaatatagggggaaaaaatgtaacgcactcttaaaaaacgagaaaagatcccctgtttacttatctctccatttcttgcattattaagtctttgagaaaataaatgttacccgaggatcctttgccttaaaaaagcaatgttctaatcaaacgaatctttaaagacatccgagtttgagctttcttcatttacaattctggttgcagcaccatctgaaccctcctcactcatagcatctgcctctaaaccctcctcctcattggatgcaaatgccaatgccattggcattgtcatcttcaagaagtttccgaatcctcatacctatcctaatggctaattcctcccaccaaatcccttactccatctgttgggggcaccattaaaacctattacccccgtgtcctt

SEQ ID NO: 55496 - DNA, 538 bp, Glycine max
  Clone ID: PAT_MRT3847_21123C.1
tgcatggtttgagtgataaagattttgttttgagtggtagtatctctgcagtttgaaaaggagcagaggacattttaacctggtgaggagagcatatcgcatggtttttggacctatgaaaaggggtaaaaggatactaaaatgacattggaaaatgttattaaaatggattgtatggtgactgatatccccaaaaatttgttctttaaccgagtccaactgcattgcgtgtgatccatgtaactaacctcacttggtaggataaggctattgttattgttgttgttagtgagttttttaaacttaaaaaagcaactttaaaataaatattttttatataagtatttttcaagcaacaggtagaatttgcttcttaaaataagtaaaaaaactactttattttaagcacaaacagtttagacaaacatattaaaaaataaaaaattgtttattttattaaaataagcgcatatttcaacaaatagtttaaacaaacacactatctttgcactttttttgtggcacattcctatgtttt

SEQ ID NO: 55497 - DNA, 471 bp, Glycine max
  Clone ID: PAT_MRT3847_21124C.1
aataatgcattcctctttatgttcagatgtactgatagtctagaatcgctacatttcctatgtatagatactcagtagatcttaatgctagtgatcatagctaagccaatatctcccataggataatataccctttcacttattcaaagaattgatggatatgccttatacatgattagtcacagaacacaaactgtggaagtggaagaactcgctcacaacgccctttgaaagattaccccgtacgatcgaatcaaacgagcccttatggaataaatattcagctgctccgtgaaccttgaggtactgccttattcaacggatgatcacttactcggtcaccagcacaggcaatataagcattaggttcggcattaatgatatcccccaacgtgccaaaactcgcaggtacccccccagttgtgggcgacgtaagttcggatacatagaataactacatagtcctttgat

SEQ ID NO: 55498 - DNA, 390 bp, Glycine max
  Clone ID: PAT_MRT3847_21125C.1
ggctcgagcatcaatgaccttctatcttttttctctctaatgatctgtactctatgacgttggcccccatcaagttgatagggctacaaattctgatatggtatcaaaggtctctactctgcctatggctgacgagagctgtgacatgccgttggaaatgcaagatgcatcgtatatccatcctgcatgataaaacagccacgaaggaaacaggctttgaagaaaagaattaaccttggctccaatgcaccatcgttgtttctcattatgcggccactgacatgaggaccttatggagtattgcctttgactacagcttcaatttactgggagtttgggtataaggctctacatgtacatttgcacaagcaccaccgtccttgcttttac

SEQ ID NO: 55499 - DNA, 808 bp, Glycine max
  Clone ID: PAT_MRT3847_21126C.1
cccacgcgtccggaatggcaatgcgtgtgtctccttcagcttcaagtgcactctctctcctaaactgcaagcaaccacctccagtttcatgcatccgtgtaccttgtctctctcgctcctcgccgccatcgctctcctacaccttcaatcctcttaggtccttcatcggtcacggcggaagcagaagcccagggtttcgtgtccattgctacgctcctgctcctctcactcctcccaatctgcaatggatctctaccatttcctcagtggttttgatactggcgagaggcaccgcggtgccgaaatcgtatattgttccgttgtttgctctgcaagcacctgcaggtgtcgtttcctggatcaaaggtagatatggtgtgtggacagcattcttggcacttctgattcgtctattcttctatattcctggtgaacttgagttgccatttctggcattgctcttgctgatggtagctccctacgaggctatgaaattaaggtatacaaaagaaggtgctgtgatttcattattaatctcggtgtatctggctttccagcatttctcaagaacaagcttacaacaatcatttgaccaaggttcaattgttgccaccttagctgtcatttgtatcactgttgtatctttgttgcttctaatctgagttggctttgaaatgatgtacacagtacactaattgtaaataagaataatagttgttggagtgatgatattaaaaagttatgggttatgttggatactcagtcttgtacttttcacttgttaattcaaataatgaagttggaatcc

SEQ ID NO: 55500 - DNA, 612 bp, Glycine max
  Clone ID: PAT_MRT3847_21127C.1
gattccaacttcattatttgaattaacaagtgaaaagtacaagactgagtatccaacataacccataactttttaatatcatcactccaacaactattattcttatttacaattagtgtactgtgtacatcatttcaaagccaactcagattagaagcaacaaagatacaacagcgatacaaatgacagctaaggtggcaacaattgaaccttggtcaaatgattgttgtaagcttgttcttgagaaatgctggaaagccagatacaccgagattaataatgaaatcacagcaccttcttttgtatacctgaggaagaaagatgttgaagcattttattttactttttgaaaaaggtataaagaggctgacagcccaaagtcccaaaaagatggacttgcttaccttaatttcatagcctcgtagggagctaccatcagcaagagcaatgccagaaatggcaactcaagttcacctagaaatgaaaaagacccagaagaaaatgtttctttccttcaatgttcaatcattatccaacaggtgcgaaaaacacaagacacaacttatttttcttattacacttcaaaatcagggatttctttctcatgtttcg

SEQ ID NO: 55501 - DNA, 812 bp, Glycine max
  Clone ID: PAT_MRT3847_21128C.1
gtcaagaatggcaatgcgtgtgtctccttcagcttcaagtgcactctctctcctaaactgcaagcaaccacctccagtttcatgcatccgtgtaccttgtctctctcgctcctcgccgccatcgctctcctacaccttcaatcctcttaggtccttcatcggtcacggcggaagcagaagcccagggtttcgtgtccattgctacgctcctgctcctctcactcctcccaatctgcaatggatctctaccatttcctcagtgtcagctctcttcacttccttctctctctatttcaaccttttactttttcaattccgctatttattctgaaaattgaatttcatagactacgcacttttaatattatatatattaattcttcgcttattttattccactgattgacaatgaaagaaacatattatcgaataattatttatttctgatcttcgattatttcactctggctctttattttatttgctgaataatgcaaaatttgagatgtggctgatgatggatattcggaacattgtttgtagggttttgatactggcgagaggcaccgcggtgccgaaatcgtatattgttccgttgtttgctctgcaagcacctgcaggtgtcgtttcctggatcaaaggtagatatggtgtgtggacagcattcttggcacttttgattcgtctattcttctatattcctggtatgttctcttatctatcacgtgaaatttaggaaatattgaaggagaaacaatttatacagtagatctaaaagtgtaaaataccccttttatagccctcattggaat

SEQ ID NO: 55502 - DNA, 226 bp, Glycine max
  Clone ID: PAT_MRT3847_21129C.1
aatcttttgggcttttgtattgttcgcagcacggtgcactgattcgttgtcttgcggtggataattgactggttatgacactcgacaaggaatcatgcttgcaggcttaagacatcatcaaagaataagtcaagcttctctacaagcgctacaagatcactgctttctccttgctcagaaacatcttccatgactgtgctgtatcgagttgttgtgcttcactgtt

SEQ ID NO: 55503 - DNA, 247 bp, Glycine max
  unsure (1)..(247): unsure at all n locations
  Clone ID: PAT_MRT3847_2112C.1
tgcaatagagaagaatggggacttggcgttgtttttcttcttttatcgcaccttggtaaccttcgggctatttgtcgaaatccgtaaggccgaaggaagagcaatcaaaggagggatatcnttaacaattgcccaatggtgtgttgcattatgtcttgcaatgtggcttnttcccacaacctttgcttgnggtggaataagcttgaagcattcaaatgcaataaggccacaaatgaagttctattac

SEQ ID NO: 55504 - DNA, 277 bp, Glycine max
  Clone ID: PAT_MRT3847_21130C.1
ggaattcattaatttcggagtattccatgatcaggtcactgactactggtgctcaataatgcataaaacttactaaaattgatcattatctactccctttaactgatatcagcgcttgtcgcacattctttgtattataagcgttatgctaccacaaagagcttagtaaatccatcttatagcgcacaacactcgctgcattatctttcattcaaggaggattaattacatcatcgctggccccaacacaaaaaatatgtcacactatggctcttat

SEQ ID NO: 55505 - DNA, 151 bp, Glycine max
  Clone ID: PAT_MRT3847_21131C.1
ctgaggatctcaggatgccatttgagcgctattgttctatgaatgatggggtgaacggaaaattactccactcattctactattaccattatcacatccttccatctttctatgtactatttatttttaaccataaaagctagagcacaaa

SEQ ID NO: 55506 - DNA, 454 bp, Glycine max
  Clone ID: PAT_MRT3847_21132C.1
atttgaaattttgaatgaaaactatgaggtttctgaattgaagactaatttggctagcctttcctcccttgcttctctggctcgttaaatggtgtagtgacctcacttttctattaaataaggttatcgttattggcccattttgttttgaatccagtaattcaagctgtttctgaatgcttggttagctggaaaggagctgtttatccttcgggtgtacctgataaaacttttgcaaaattaggaaatgaaaatagggatacctaactcctcctcactggcagaggtagccgtctttcaagacaaaaatttgcagaacataacaatagggatcctgctgaaagcagaatacaattattatttcatcagcaaataaacttgtacattgatgtgtaatgataataacaaaaggtacaagttatacccaaaaatagtaagaaagaagttcattagc

SEQ ID NO: 55507 - DNA, 456 bp, Glycine max
  Clone ID: PAT_MRT3847_21133C.1
tggcttggaacctttgggctgatttatgtgcttgcatggtcgtgagaagatgatagatggggatgcccaaatggagcctcaaaccggtggtgagccctttctctctgaactcgtgatattgatgaactctatcaagtggaatcctgtacctagaaaacggtcccaggcggaatagtctttttgagaggaagcgtagtagtcatcgttagtacgaggagaaggagaataattggcggcgtggttctcggaggagtagtcggaatcacgtcttgaccccatatcgacgacgttttcggatctaagactcttttaaacgcggtctccgcaacgagtaccggtcccacagtacccgtcgttacatcctacgcgacgggtaagtcgcatctcgcgtgtatggaggtccatgagacagactatgacgccatgcgtatacccggacccctaacatatagctct

SEQ ID NO: 55508 - DNA, 584 bp, Glycine max
  Clone ID: PAT_MRT3847_21134C.1
ccacgccgtccgcagcaacaacaacaaccaccacaccaaataaccttctcacgtctacagagcactcatccaatcaaaccacaccacagctcctcaccatgctcttaactctccaaaatctttgattaatatgaaggtgtttgtctacgaccttactgctaagacaacacggattggctgacgaacgagaggtgcaccatacatttggttgcgtcggagggtgcaatacacagggctttgttgaccacctaggttcgtacgaccgacccatactacgctgactatttcttagtccacgtttacgggtattgtgacttcagcaccgcgaatggcttccccgcgattggccacacgcgctccctcatcatgcacgcgagaaacctcatgttctcagagctccccttctggaaccgaaacagacgctacaaccacgtgttagtcgactctcacgattccgggtcgtgcttacacaccctgcaggacttgtcgaaggctgatggcgcgtcatagatagagacgaacttgatcgtgctccaaacattcggcgatgggtgcgatcacccgtgccacaagggcgaccacgt

SEQ ID NO: 55509 - DNA, 472 bp, Glycine max
  unsure (1)..(472): unsure at all n locations
  Clone ID: PAT_MRT3847_21135C.1
ggtcttttgnngcattatgnncttatttgatctttttgtttttttttttgttttttttttttttttttttttttttaaaagggaaaatgaaaatggttctttgtttacctgcccttttttcttaaaccagagggagggtattaaaaaaaatttttgaaggaaaaaaaaggggggcaaattttttttttttgggaaaaattttaaaagggcttaaaatttttgaaggggcccccccccccactcctttttggccgggcccaaatcctttgttaaaaattgtcctttttgaaagccccttaaattttggacttttgaaacacataaaggcccaggctcaaaagggtgggttttttcaatttttttggtgcccccccccccctccccgggcaaataaaaggtccaaaaagcttgggtttttttcaacagttgattaaacaaagggccgccctttgataacctttcccccgggggg

SEQ ID NO: 55510 - DNA, 133 bp, Glycine max
  Clone ID: PAT_MRT3847_21136C.1
ggctcaaataaattagctgagcgagagaactcgaagcagtgtgacgaaaatgaaggaccttgatttttatcctgctacaatattcgtagcatggcaaagccatgcgtacgatatgttaactcttacaatgaac

SEQ ID NO: 55511 - DNA, 160 bp, Glycine max
  Clone ID: PAT_MRT3847_21137C.1
acaacaaaatggtgtgtgaacagttcggttcggacaacgatctagccaacagaatacggtgttttggccctcataccactgcgaccaccatcatggtggatgcatgtaacggagttcagtacctccatgccatgaaggacgctgttcttgctggctttca

SEQ ID NO: 55512 - DNA, 341 bp, Glycine max
  Clone ID: PAT_MRT3847_21138C.1
atttattcttatcttatgcaataaataccttgtaaccaagtggatatcttttgtaaatgttacggcatttctggtgccatacatcaatatatcttttttgctttaaaaaaaaaacaaaattaatggtcctcaaaacaccacagtacgcttccataaaaaacaaacagatttagttaacttttgtagttctggttaattataagttgtatctcactccaagggtggtacctcatggctaggaccctaacactttgattggggaaaggatgttagaaaaaggaagagaataaattagtatgacagaaagtagctttcttgctctgggaggagggggaataggt

SEQ ID NO: 55513 - DNA, 307 bp, Glycine max
  Clone ID: PAT_MRT3847_21139C.1
aaacctgaggagacttatacctcagaaggagagggcccttttcgctagctcgaatagaaagacacagacagcgctatttacttggtggggtatcatcgcacctctcatcgctagatacttgtgtttttttttgaattcgaggggcagatcctaaggcatttgaatttgggctattctcggaacggctctgttctcatctataggcaggtaagattctcatagcactagaactgaaattttcaaacattttgcggcacttgtttgtaaagagagagaggtgcttgccagaaatgcagcgacaacattc

SEQ ID NO: 55514 - DNA, 470 bp, Glycine max
  unsure (1)..(470): unsure at all n locations
  Clone ID: PAT_MRT3847_2113C.1
atcattgtgttgggcaaagcattttcgaagaaattacgtggatttaggccnatcgccctcatattgcactagtttgctctactccgacacaagtactactagatcagtagtgagattaactgaggatcactgcccaatcttcggagacatatgaggtatttgcacatgctggatgcctatgatctgatgttgtgaacccttctgttaacttgacaagactcatcatttgtggctatgaccactgcctgggctgccttataggggccaggactctcaggcatgacggatgagatgagccttcctacaggagcactacgctagaggacatgacatctgttattgacttctatcgtgctaatacgcactataaggctgcttgatatccagtggacaatagatccatactttatggaaccgttcttgcgcctggtggatgcgaggctagttttctgatgcgggcggccacctta

SEQ ID NO: 55515 - DNA, 286 bp, Glycine max
  unsure (1)..(286): unsure at all n locations
  Clone ID: PAT_MRT3847_21140C.1
ctaacganttacagcagctgantcagcngagcatngancaactagnagggtccatcacagagaaagtgacgantgtnatgtcntgncatcctggcagtccagcttcagtcanagaggcaatctcagggacttgtagttcctcctnagcctctggttggtcctggnccctccggtcntcgggtgancacaaatgggatttgngtggatccctcaggaancgancctaagncgggtgactctganaggttcngcntgtacntagaagtagatcctgcncgcctgggtg

SEQ ID NO: 55516 - DNA, 172 bp, Glycine max
  Clone ID: PAT_MRT3847_21141C.1
tttatttataccaatactacaacaaataaaatggggaggcattttgatataggaaagacagtactatactattctctcaatttctcaataccatactaattacaaatatataccactatcaatagaaattttttggtgtaactgctttataatcatatttaacattcttact

SEQ ID NO: 55517 - DNA, 335 bp, Glycine max
  Clone ID: PAT_MRT3847_21142C.1
cttgcactattcacccgtgtggactactgggcacagtgtcacggttctgccacccggagcctaaagccttatctctttatgccgtctcgaacaaacaaactctgggcaggagaatggtctctggaacctcgtggggaaatcttggattcttcgctgtatttttacagtacctaaccgttaccctatcatctccgaggatttgctgagtgtggggtggctcaaggatctcccaccctaggtctgttactatcactgtataccaaacgctccccacacaactagaataagtctttgacctcccttgcgaaaggttctatggatgcttttcttcccct

SEQ ID NO: 55518 - DNA, 214 bp, Glycine max
  Clone ID: PAT_MRT3847_21143C.1
cggtctttctttttcgactcacacactctgccctgccgccggcaatttcctcggctccggcacccaactctgccgacgaccacttgaatcacaaccacggtcacgtgtttttccctaggtgtatccagctcttcgcaattcatttttactcgccctggattgctgaacttgccctattgtatgaaatgaccgcttagttgtgatcactgctaac

SEQ ID NO: 55519 - DNA, 288 bp, Glycine max
  Clone ID: PAT_MRT3847_21144C.1
aagtgttggatgcatttctatttctaacttattattgagcttattattattgctgagaaagaaaagaatggcaaagctaataaaattctttgagttgaacacaggggccaagattccttttgttgctttatgcactctgcaagctgagcctgacgttcgagccaaagctgtcaccacagccattctacctggatacatgcatatcgatcgctgtctatcttataacaatcaagcatatatttgatctggtctctagaagattttcgattatagcatggtgaagcgtaa

SEQ ID NO: 55520 - DNA, 397 bp, Glycine max
  unsure (1)..(397): unsure at all n locations
  Clone ID: PAT_MRT3847_21145C.1
accccccaaatttggcccaaaaaatggatggattctggccgcccaaaaaaaaagagcgggttttgcataaggggcaaaccgccatacccctttttttttttcctccccatggggggggggccctatcctaatagagcccaaaattcggattatcaaaatcaaaatatttggggcaaaggcttttttttggagcgtttgaaaaattacctagtccccaggttaaacattgaggaagggggggcttttggaaagtttcctgaaggggaaaaactaaaagctaatttcccgtaaaaattgggcccttttgttggggcatccacggatttgcttttaaaaaaaaaaaaaattttttcttcttcttcttctnctttgggacaagataagccgaaggcttttt

SEQ ID NO: 55521 - DNA, 323 bp, Glycine max
  unsure (1)..(323): unsure at all n locations
  Clone ID: PAT_MRT3847_21146C.1
ggttggtaccaagttttcagccgtgacaaancttcatcgaggagcttgagctcacacaaggtaagtattctcctcccaacacgatttaattcatatctaaggttcaaccagttttgaacttgaaccacttgattaagagacacaagccattaaccacttgtgtcatagttgttggttgacatttctagttaaacaatgttaagtgtcccttgctgaatatatattctcgtgtagtgttattctctattattcggtcagtgatagactagtatgtatatgagatttgtgtaactttgccacaacanggggatncaanaaaggat

SEQ ID NO: 55522 - DNA, 371 bp, Glycine max
  Clone ID: PAT_MRT3847_21147C.1
ttttttttttttttttttttttttttttctatgatttttttatatctcctgtcatctgcctataactacaaaaaaggccggggtcggaaggtgctgatcacaactgcgacaggaggcacgcccacaaaaaaactagcagaaaaacgaaaaaaaaaaaagaccggacgctaaaaaactcccctcaaaaaaaaaagagacggaacggcttaccccccatgctaaaaaaaaacgggggaaaagccctcccagggaaacacgaaaagaaaaagcttttaacccacccagcaaaaaaaaggaacataccagggttagaggaattgaaacccccccccccccaaaaaaatgggaaacccccccccaccccgagggat

SEQ ID NO: 55523 - DNA, 471 bp, Glycine max
  Clone ID: PAT_MRT3847_21148C.1
gctggtcgcgtgggttgacaccttccgcaaaacccgttccaacaatgtgcaaagtaaccaagcctctcaaccttctgtaatttatgtggaagataataataattgccaggaaaaaactatgaacaaacaaacacaggctgaagccaaaaggggtttggcgcagatccgcgacccatttgcaaaatatgctgctttagcttaaaaacaaagcgcgaactcttgaatcaaaggagggggtgaggctgaggctctgagacctactcagtcttttgcttgtgaaagggctgctgttttctttctttgtgcgattgagaaaaaaagctataacatggggggcttatgactcggaccgcgatttatcggagcgtaaataaaaggcctttttatcagtacacggccaaagtactctctctgattctgaatcatagtcatcaatgcaaaccacagtaggacaacagcaacaaccccacc

SEQ ID NO: 55524 - DNA, 120 bp, Glycine max
  unsure (1)..(120): unsure at all n locations
  Clone ID: PAT_MRT3847_21149C.1
gtcccggacctcccggcgtcgaccccacgccgtccgccaagacacctgctgtnnagagaaatcaagcccaagaacaggagaactacgggngcctggagggcctgatgatgagnaccatag

SEQ ID NO: 55525 - DNA, 565 bp, Glycine max
  unsure (1)..(565): unsure at all n locations
  Clone ID: PAT_MRT3847_2114C.1
gtgccgcctgcttgggggggggggggggacgaacgcaggcgtagaaaagggggggagtagcgatggtcataaaactgcaggaggtattggttggagggtttggcgatcgcgggagtacggctcgtgcgatagtagcacaaatgccgaaagcggttggcgaggttagccgcaaggtattgggctttgcgcgtaggcactcaacactgcgacacgagttaaatagaggcggaacacccatagcactacgaagaatacaagtagtgttggttgcagtagggttaataagtatattggggtgtggcggcagcgtattactaatactgtttgcaaaggtgcggccgatgggtactgtaataactagaataccggtgaagagaattccgtgccaactgctagaatatgcgtgaaaactagacagacaacttaatggaaatctaacggtatgccaagtaatactagccctactattagtgcgtaacatagatgtcacaggngtaatgccagcgttaaggaaccgtattacacgcctactggtggggcaattgggtgtaaggctaccccagaa

SEQ ID NO: 55526 - DNA, 152 bp, Glycine max
  Clone ID: PAT_MRT3847_21150C.1
ggggggtttagagctcccttcaaaaaaaaaaatgtgacagaaaggtggtactatttagaaactggaactaccataaactcaatggcacaaccactgaagaccataaacatagtatgtgtgccatactaaataaccatcagctatatctaaca

SEQ ID NO: 55527 - DNA, 369 bp, Glycine max
  Clone ID: PAT_MRT3847_21151C.1
gaattttgattctatcaagcacagcttttgtcagttttctattgaccttttcggtggaggaatcttagttgacaaaactggagattggatcacacttatacaaaactcttcaattagtatcttgtagagagttgctgtttggaagaatggttgctaaatggtcatgattgtcatgtctgggaatgctgtattcataatggtgttattgttccttattggtacaagttttcttaacaaacatctacatttcagatcttcttgatgaatgtaagtgtacaaaattttatccacatttctgtgaattgactttttctaattgtggttatgtgcgtcctaattattcgtttcgaaatgcggagtttttattgg

SEQ ID NO: 55528 - DNA, 576 bp, Glycine max
  Clone ID: PAT_MRT3847_21152C.1
aaaaaggggggaaataacccaatttctttttttgggggggggacaaactcgaaaagcaaaataccccttggcacaaacagccttgttggctttttcccccgggtctttttgttcaaaaaagccaaatcacacaaaccccccccctacagcccttggccaaaaggatatgtcaaactttggggagaaatttttaattaaagcaaaaggattaaatttctgatccccaaacccccatccaaaaaagggcaacaatccccccccccaaaatacatattatagcatccccagtacccccactcaaaaaaagcccatttttactcaaaaaattcatcatcttcgccaggaaggggctgactaacagctgaaaaaaactcaccttcggggtggggctgggcagctaaaacaatttgaacttcggggggacccaatgcaggaaattccacaaagggcaagttaggaccacctgcaagtttcctggccaaaaaaaggaaaggcttctcaaaattgaagttgctcttcgctgaaatctcaaaatactgcaaattcttcttcctgggggaagggaacctgctttgc

SEQ ID NO: 55529 - DNA, 944 bp, Glycine max
  Clone ID: PAT_MRT3847_21153C.1
aaacaaaaatatctcacgggaatcgaattttaaaacaataaacaccttatctcaagtcaacaagacacgtgacttatctccaacatgggtcttggtgacttatctccaaagaaaaacattctatcaagtactccaatcctttccaagccacgaagcaacatgcaaaactttcaacaatctctgacaataatgcctaaatgtaccaactaaattctgttcaaaacctcaagaaatacaatagaagttcttatattaacttaagcaaaatttcaaaatgccacaattctgtttgacatggaaattaaaataccacgagaaccttaaagccttctaccccttctaccactctttctacgtgtgctatcggaaggaatgggggtcacatcctctatgcggccaattttcattccagaacgagcaagggcacgaagagctgattgagcaccaggaccaggtgtttttgtcttgtttccacccgtcgcacggagcttgatgtgaagagcagttatgcccagttccttgcatctggcagcaacgtcctgtgcagcaagcatagcagcatagggagacgattcatctctgtcagccttaaccttcattccacctgtgatgcggacaagtgtttccctcccggacagatcagtgacatgaatgaaggtatcattgaaggaggcaaagatgcgagcgacgccaaagacatgttcgccatctctaacagctgggcccagagtcacgttttcttcctttggctctctaacctttcttctcgacatggttgcaatgcggtgaagggcttcggagattggatgaactttcttcggcgtttaaagttgctgctgcagagtgaggaatggcggcaccgtttcgtttttatatctaccaggtgggattagggttttgcagagtggtgaactgaaatttacatagttaaccctaaaccttat

SEQ ID NO: 55530 - DNA, 653 bp, Glycine max
  Clone ID: PAT_MRT3847_21154C.1
tttcaaataatcctactgattctcctctttttccttccctcgccgctttgtgctgctgctgctgcaaaacctagggttgagccttttgctcaggttttcagcgcttctttcttacaatggttctacagaacgatattgatttgctgaatcctccagctgagttggagaagagaaagcacaagctcaagcgtcttgtgcagtcaccaaactctttcttcatggatgttaagtgccagggctgcttcaacataacaactgtgtttagccactctcagactgttgtggtttgcggaaactgccagactgtgttgtgccaaccaacaggcggacgggcaaggttaaccgaagggtgctcttttaggaagaagggagattgaatggtttgttaaccagacttttctttgtcaatgattgaaaattttcggttgttaggtttttgaaatggaatccatttccgttatggtatattaattttgttaaattgtaagacaatatctctctcagccttccacaagacatagtagccaatgttgaatttttctttattaaagtggatgtggttttgttcgacaacatttactaaaatcaatatggtttagtttgatggttatttttacaataacatgttttgtatgctctgatgacgtgttagt

SEQ ID NO: 55531 - DNA, 1779 bp, Glycine max
  Clone ID: PAT_MRT3847_21155C.1
ttctaacacaaaatttttgccaatcgctacagttacgcatggccagtaacaaaaatatctcacggtaatcgaattttaaaataataaaacaccttatctcaagtcaacaagacacgtgacttatctccaacatgtgtcttgttgacttatctccaaagaaaaacattctatcaagtactccaatcctttccaagccacgaagcaacatgcaaaactttcaacaatcttctttaacaatgatgcttaaatgcactcaactaaattctgttaaaaagttcaagaaatacaatagaagttctgatattaacttaagcaaaatttcaaaatgccacaattctgtctggcatggaaattaaaataaagaaactccagacatataccacaagaagtttaaagccttctaccccttctaccactctttctacgagtgctatccgaaggaatgggagtcacatcctctgcaaaatcaagaaacaataataagtacttcacagtacatgccaaatagatgaaatcaatcagaaaacaaaacgggggatatacaatgaataaagaaagaaaaaacaaccattgggagtaaacaaggtagataaccaacacactaatgtgaaaaaaggacgtatgtaaacacacaataaaaggacaataacaaggcatttgagtaacaggcaaaaaaaaattgaattatggttttcttaacaaggcagatacctatacgaccaattttcattcctgaacgagcaagggcacgaagagctgattgagcaccagggccaggtgtctttgtcttgtttccaccagtggcacggagcttgatatgaagagcagttatgccaagttcctgaacaaaatcactgaaacagctaatcagaacaattgaccagtgatacttgcatctggcagcaacatcctgagctgcaagcatagcagcataaggagacgattcatctctgtcagccttaaccttcattccaccagtgatgcggacaagcgtttccctcccagacagatcagtgacatgaatgaaggtgtcattgaaggaggcaaagatgcgagcgactccaaaaacatgttcaccatctctaacagctgggcccagagtcacgttttcctcctttggctctctaacctttctcctcgacatggttgcaatgcggtgaagggcttcggggattggatgagccttcctcgccgctttgtgctgctgttgcaaaacttagggttgagcctttttttgaggttttcagcgcttctttctcacaatggttcttcagaatgatattgatttgctgaatcctccagctgagttggagaagagaaaacacaaactcaagcgtcttgttcagtcaccaaactctttcttcatggatgttaagtgccagggatgcttcaacataacaactgtgtttagccactctcaaactgttgtggtgtgcggaaactgccagactgttttgtgccaaccaacagggggacgggcgaggttaaccgaaggttgctcatttaggaagaagggagattgaatggtttgttaaccagacttttctttgtcaatgatttgacattttcggttgttaggtttttgagatggaatcaatttcagttatggtatattaattttgttaaattgtaagacaatatctctcagccttccacaaggcatagtagccaatgttgaatttctctttattgaagtggatgtggttttgttggatatttaattttactgaaatcgatatggtttagtttgatggttaaaaaaaaaaaaaaaaaaaaaag

SEQ ID NO: 55532 - DNA, 1594 bp, Glycine max
  Clone ID: PAT_MRT3847_21156C.1
gaaaataaaatttgtcaaatctggatataaaataaaacaaaagttatgtatttctacatagattataaataatgaacatgcatgaaagtgttctaggagtttaggtttgatacaaattgtacagtcttaaggagaatttggcaaatctaaaccgcgttaaatatacattaattatgcacggtggctatcgcttataaaataatataaactatatacatacatacatacataatatataactatatatcactaaatgaatgatatatataacacttagctcaactgctcaaggtcaaggtagataattacctgctaccaagtagtatggtacccatgcatgaatactagattcgcttctcgagacaatagatggctaaaagggacttgctgctaaaagaaaaaaaaatgctgccacttgtggcctactcgctcagagtatgcagaaaataaagatgcatgcatgcccatgcattttctctgctccacttccacatgatcatcagcatcaaataattctctcatctgatgcgcattcccgggggtacaatatctccaagcaacccttcatccgtggaaggctgtgacggtgacgatccatcagctggcatcataacacttgatccttctccagtttcatcctgtgcttggcatggctgagaaatagtgctcaaagtattattattataatcatcattctctctgctgggtaattgaatcggataataaaactgtgacattgttggagccaactggcccgcaaatgcagcttcatgactaatgattccccctcgaggaaatccaactgtgtgatgacagtgttgcccttcatatgtggtaatcacaattgttgggtcctcggaagaccgttcaaccctcttcttcaccgtgcatttgctgtttgtgcaccggtagtagctcctagggaaaggactatttttaactgccttctgaccatacttccgccatctgcagccatcctcaagatgatcaacttcacgtcttggtcataaatgcaaaccgtggctgccgtattcgcttttgccccttgtttttacgtttactcggtatctcaagcggtttatcgtcggagacggtggatttctccggtggatcctcgctggagctggaagaaatcgattggttgttcgaccgcgacggcacggcggcgaccggttcaatcgaatcggtcagagaggactgaaccggcttccacaatccgtcgtcggtgccgatccggttcggctggtccggttcgaggttccacacgaattccctgagtatgctccgctctctgtcgccggggaacaggtatgcgccgtcggagtcatcggcggcgagtgtccaactcgtgtcgccggcgaactcagcatctgcggttggatcggaggaggctgctctgtctttgtcttccattcatgaagtgcgcgcgcgaattttgaagtgcgaacaagaacgcgatctgtgttaattgtgttgaaggaaatttgaatcgaattctggagaatttgaagagaaaacgcggagagattgaggtgagagagtgagaatgagagaggagagagaaagttagggtttttgtctgggtgagggtgag

SEQ ID NO: 55533 - DNA, 293 bp, Glycine max
  unsure (1)..(293): unsure at all n locations
  Clone ID: PAT_MRT3847_21157C.1
cggatctttgtntcnttcaatgacacnttcattcatgtcactgatctgtctggganggagacacttgtccgcntcactggcgngatnnncgttaaaggctgatcagagatgaatgcatgctcnatatgcctgctatggcttgctngcgcaggatgttgctggctaggatgcaagggaactgnggcataactggctcttncatatgcaaggcttccgtggccacaggtnnganaacaagacaaanacaccagnttccnggtggntcaatcagntcttcnagcccttgctcggtt

SEQ ID NO: 55534 - DNA, 237 bp, Glycine max
  Clone ID: PAT_MRT3847_21158C.1
agtttcagactatgcacaaatattttactatttttgttgcactatttgcctgccatggttctcttttcgctcatgggaggcagataaaaccattgaatcaacattcctcgctaaacacaaaccctatacttgctccactaagcagaaccagcattaaagtaattgaagcaccaattgtcccaaaattcaaattttctgatgtcgactctggagattcaggtgcagacccatgcaatg

SEQ ID NO: 55535 - DNA, 406 bp, Glycine max
  Clone ID: PAT_MRT3847_21159C.1
gctcgaagggaacaaatatgctatgcgcccattgccataatactatattagagctgctggataagatgtaaactcatcaacaacctacgtggcttgcaacggatcttcacaggccatcagtggatatactctggatacttggatggaagacaaaacgtgctacattttttcatcgataacatccttattacacaataggattgatttgattctggataggaaattaaggaaatgtattgctatctcttctgctataattttgcacactgaagactgtaatttgattgttagtgggcgactcataagattgggcacaagatagttatctcattgtaaccgaaattgtaacttccccccttatctttcttacgatatatgttaataagattgggttcacatcgttact

SEQ ID NO: 55536 - DNA, 482 bp, Glycine max
  Clone ID: PAT_MRT3847_2115C.1
gtatatttacagtgtccaacaaaatcatcatcatcatcatcatgcaaaaccttagtcgcatggacaagccaaaaaccatcacacactacgtgttgataagctccgccgacgatactgtcgctggtttcacgagcactctcgccaagtccctggaagaccagggattcccgacgagagtgctcgtggaccaccgcgacctgaagaaagcggagattgagacagtgagggtgttcatcgttgtgttgtccgaacactatgcaatttgtccgtttcggttggataagctggccgagatcgtcgatgggttaggtgcccggcagcgggttctcccggtgttctactatgtgcccacgtctgatgtgcggtatcagactggtagctatgaagtagcattgggtgttcatgagtactatgatgaacgtgaaaggttggagaaatggaagaacactttggaaaaagctgctggctttggcggctggccc

SEQ ID NO: 55537 - DNA, 197 bp, Glycine max
  Clone ID: PAT_MRT3847_21160C.1
aggcgactgcttatgatatgtaattcgctttctttttggaagcatatgagtgtggggggaggtgttttatccaggaatctgtccatttacatatatacacggatgcgcactcctgatgatcgtaatgagaactcccttcctactcgtcgcgcgttgtgttgaaaaagaaactctggcaatctacgcatgacccaaca

SEQ ID NO: 55538 - DNA, 249 bp, Glycine max
  Clone ID: PAT_MRT3847_21161C.1
ctagagtgatacgaatgcatctgcagacactacgaacgctcctctggctctccaaaatggtaactcccaggtaaaagacatcccaatcgggatcgggagggatattcaccgcgaagcagttcaacactccaagctctatctaacgaaattcacgggtggcaaacaggaagggcccaaaaccagggtgtgctaactgctgaagaaactgatagacggtacaaaaagcatcggcctggtgctgaaaatgat

SEQ ID NO: 55539 - DNA, 421 bp, Glycine max
  Clone ID: PAT_MRT3847_21162C.1
cttgtgtgtttgtgagtgattactaatcaaaaagtcaatcaaggagtttaaaagcaaagtataaatggcttcaaccactgctggaaaggtcatacgctgcaaagctgcggtagcatgggaagaaatcaacaaagcttttgaatacatgcttaaaggggagagcctgcgttgcataatccgcatgactgaatagaatttatataaacaactactttgagtattggaaataaaataaattaaaatgaaatatacttgagcatgtatgtagttgtggtcactgtaacaaaacattcttgagttttgctttaaatttcatagggaagttattgtatctcttgtaaatctcatgcgtttgtaccaaataaaacaagcttctcatgtatgctgtatttttatacaagtatgtatgcataatactcct

SEQ ID NO: 55540 - DNA, 174 bp, Glycine max
  Clone ID: PAT_MRT3847_21163C.1
ttttgtttttttttgttttccagaagaagcatcataggcataactggtaatactagcacaaaaaaattgcatgtgtgtgcatctgcgagtgctggcaagagagaagaaaattcttagaaagtttgctatggaaacccagactggggcagtcaaccagtaaaagcaaaacgccaa

SEQ ID NO: 55541 - DNA, 418 bp, Glycine max
  unsure (1)..(418): unsure at all n locations
  Clone ID: PAT_MRT3847_21164C.1
tggtttggttgatgatggtcaccgttattttagtggcatgagtagtgttttttctgtaactcctactatagagcattatggatgcatggtggatctccaggctcgtgcaggtttgttggttgaagcgcaggatttgatcaggagtatgccaatggaggccaattctattgtttggggggctttgttgggaggatgtaggttacataaggatacccaattggctgagcatgtgttgaagcagctgattgagttagaaccatggaattcgggacattatgttctcttatnaatatatattcagcaagtcatcgttgggatgaagcagaaaaaatcaggtctagtttgaatcagaaagggatgcagaaattacctgngtgtagttgggtgaagttgatgggtcgttcatgaattccttgta

SEQ ID NO: 55542 - DNA, 1203 bp, Glycine max
  Clone ID: PAT_MRT3847_21165C.1
cttgattggaaattttcactccttgtaatggcgagatggttgtccttggagctttgcttagaattgaacttttcatcttttattggggtgtagcattgaattgggttgatgtgcaatgcagagatcacggaaagctcttctggaaagaagggctatacagaaggctacaagtgggaggaactatgtctatctgtataaagtttctctgtcgttggtttttgttttgtggggtctggtcttcctcttcagcttatggacaagccatggccatggttatggagatcatgaatctagagaagttccagttggtgtatcaaattggaatgaagatgaacacagacaatgtaaaaaatctaattctgctgatgaatatttaactaaagagactgatgatgtctacattccttctgagactttctcctctgatggtgctaaaactgatggtttaatcagtgagtcactttccagtggagaaagcataaatcgtgtagaaacgggtgataaagaaaattatatttctcctgatacagaggagcatgaagttgagagatctgaatctgctgtgaagcatcaaaatgatgtgcagaagtataatcacttgtctcaagcaatgcctcttggtcttgatgaattcaagagcagggcaattggttctaaaattaagtcaggtactaatccttctggaagtgtgatacatagattagagcctggtggtgctgaatacaattatgcttcagcatcaaagggagccaaagttttagcttctaacaaagaagccagaggtgcctctgacattctaagcagaaacaaagacaaatatcttcgaaatccgtgttcttcagaagagaaatttgttgtcatagaactttcagaagaaaccttggtaaaaacaatagagatagctaattttgagcaccactcttccaatttcaaagagtttgaattatatggcagtttggtatatccgacagaggcttggattttccttgggaatttcacggcctcaaatgtgaagcaggctcaaaggtttgttcttgaggagcaaaaatggatgcgatatataaaattgaatcttcaaagccactatggttcagaattttattgcacactgagcatagttgaagtttatggggtggatgccattgagagaatgctagaggatttgatatatgctcaagataagccatttgcatctggggaagg

SEQ ID NO: 55543 - DNA, 505 bp, Glycine max
  Clone ID: PAT_MRT3847_21166C.1
cgttctttttttttttttttttttttttttttttttttttttttttttttttttgttatgaggaacccaatgcattttatgatccaaaaaccaaccagtttttttttaaacacaaaccaaaaaacggggtactgtctcatcaccctccccctcatctttaacaaatttgccacttccacgattcaaagctagtgttaacaaaaaaacaacatctaacaacccttggggctcgatttcgatgattggctccccagtctcaatggtgaatggggcaaatgctccctttccgggcataatttttccaataaaggggaaaaccaaacccaattgggccaatcttcccacaaatagcttgttttgtttcctgaatcccattaaagggccctaaccaagaccaaaagcttaccttaagcccttgcctggaggaataacacccgcaaatgtgggtttgtgataaacaaatttttcaagggcaccctaaacccgaatggtttcttcccggggg

SEQ ID NO: 55544 - DNA, 490 bp, Glycine max
  Clone ID: PAT_MRT3847_21167C.1
catgtttgagccttttgtcgttttagaggaaaaccgtctcaaaaaatggactacgaagccaggatcaaagcttaccgcttcgtggcctactccacggtgtccttctccatcatttcgctgctgtccgtttgcttcactttgcctatgcttcaaaattacgtgtccaatgtcgctcagaacatggacagggaattgagtgcttgtcagggttctgcaaaggacatttggtcggaagtgaaccaactgaagagcatccccgtggtgggaggaaatcgtacggcgcgtcaagcggacggatacggaggaggaggcggcgcattgtccggcggaggaggaggaggaggtggctcgtgcagtgaatgctgctcaggcggaggcccgggcccagcaggtcccccgggaccgccccgcaatcccggaaaccccggagcacccggatcaccaggacaacccggaaatttgtttccgttcatgcgacaagctacccgct

SEQ ID NO: 55545 - DNA, 577 bp, Glycine max
  unsure (1)..(577): unsure at all n locations
  Clone ID: PAT_MRT3847_21168C.1
aggagaatatcattgtccagtgctaaacaaagttttcactgaatttactcatattgtggcagtgaagaccacaggaaatgtgttctgctatgaggctgttaaagagttaaatattaagacaaaaaactggaaggagctcctcaccgatganccattcactaaggatgaccttataaccattcaaaatcctaatgcacttgacagcaaggttcttctggattttgatcatgttaaaaatagtttgaaagttgatgatgaagaactacagaaaatgagttcagatccaacctataacataaacatgtcgggtgatataaagcaaatgcttaaggagcttggaactgagaaaggaaaggaaactgcattgcatgggggaggcggtggcaaggcacaaaaagaaagagctgctgcacttgctgccatcttagctgcaaggtcacgtgttgaagaagattccaaatcaaatccaaataaagaggtcaaagtttctcaggcatttagtattgtagatgctgcgtctgcctcagtacatggaagaagtgcagctgctgctaaagcctcagcagatgataaaact

SEQ ID NO: 55546 - DNA, 292 bp, Glycine max
  unsure (1)..(292): unsure at all n locations
  Clone ID: PAT_MRT3847_21169C.1
gagtttctgagataaccacttttctctttgattcatcaatggcaaccgcgaggnccgtgaangatgtttcnccttaagnnttnnnnnaaggtnangcntccaatntcaagcgttcnggnaagatggagttcctgagtggactgatattgtaaaancagcaaaatttaaggaattggctcatatgatccngantggnatnatgttagggttgccccantggcaaganagattnatttgaaaggcggcttggtgttggggtttccagaggntctatggtggaagcaagagaaag

SEQ ID NO: 55547 - DNA, 377 bp, Glycine max
  Clone ID: PAT_MRT3847_2116C.1
atcccatcatcgaccagaacagcagccatggccaagtcaaagaactcgtcccagcacaaccagcggcgcaaggcgcaccgcaacggtatcaagaagcccaagacctcaagatacccgtctcgcaagggcaccgaccccaagttccgccgcaaccacaggcatgctcttcacggcaacgccaaggctctgaaggagctgaaggaaggcaagcgcgagacggcataagggtacggcgtttgactgttattgtggattacatgggaggacggcacgcgatgctgcgagggttacgaatgattcgaacggacgactcggccgctagacgaccaaattcccagggaatgaatacacacactacatcaattcttctctagagt

SEQ ID NO: 55548 - DNA, 367 bp, Glycine max
  Clone ID: PAT_MRT3847_21170C.1
tttttcttttttttttttttttttgggtgggtttttctttttttttgttttttttccaaacaaacgggaacttaaattttaaaacccctccacctgaaaaacaaggttaaagtaaaacccccccccggccataaaacccggaaccatcatatccccggggggttctttaaccaataattatcagataaaccccacctccatacccgggtttttcccctgggaaaaacttttcccatcaatcatgattggggcccccaaaagctgccccaacattctgaagggaaaacccccaaaacactaaggagattgccccccccctgtggggaaaggagaacttccccaaaaaaaattgtatttttaacccccg

SEQ ID NO: 55549 - DNA, 379 bp, Glycine max
  Clone ID: PAT_MRT3847_21171C.1
gggtgccaaacctgaaggtaataatggggttccaaaccccaaccaaaaaaaactttgagggccacacaaactaacccacttaaaaacccaacctaaaaagcaggattacccgggcaaaaataaacggaagaaatcaaaaaccaaaggctttccaaaaaaaataaaattccgattgggccaaccaagtaaatggaaaattaaaaaaactttactgaatggcccccccaaaacccttgggtgaaagccaacccccgtaaacgaccaaaacccaatcatatcccggaggagctatggccttggatggaggcccccctaagcccaaatccgaagttaccaacgcggatctgaaaccttatagccttttaataggggcccccaa

SEQ ID NO: 55550 - DNA, 454 bp, Glycine max
  unsure (1)..(454): unsure at all n locations
  Clone ID: PAT_MRT3847_21172C.1
nagctaatttgactgtacacagcgtaccacaaggtccgacagaagtagaatcacaacacaagcgtctcactatacctgacgctatctctagcatcaaggatgagtctctctctatgttctgtctttacaaggactggtcagatttaacgtgaacacgtctcacattacgtttgtcctgttctcgcgaagaggcaattcaccaggaacaaggatcaaaactgccgagctcgggaaacagcttctaacctcaatttattcaaaggtagagaggaaaagcgcgttcatctaaaatgaatagctattacctccaaggtgccccagactcgttctactgtagaacccacattatcatactagtgccaaacctgaggactagccataactggagaataacgaacctgacaaggtacacccgctaatcaataaattcacacactggaagcaaacatagaag

SEQ ID NO: 55551 - DNA, 794 bp, Glycine max
  unsure (1)..(794): unsure at all n locations
  Clone ID: PAT_MRT3847_21173C.1
cttgttaatataaaaaaaataaaaaannaactgacctcatacatgtccccttcgtttaaaatacatttcttttgtcttggccatcactattactaatattggtggtttaatcaccaaatgacgatgatggagtagagttggggtaatgaggttgaggttgatgatgatcatagttgtttgtgttgaagcattgccccacctcttttcatcacccaaacactatttgttgccattccaatttggtaaattcttcttctttttttgtctttactggttaattgattctcttcctaagagcttggaattcaaaggatagttttttagcacctgcacctttggggccatattctcaagataagggcatttttgtcttaaaaatgcatgtgcacaacacatgacacacttgttatgttcttgaccgatccggaaaagtcaaaatgagacaccgtggcgcgccagaggaaccaccgcaaccccaaccttcatttcctcaccggaaaaagaagcgcaagcgcagagccaccgccaccgccaccgtcggttccacttccgtttccttcgaaaccagccacaccgatgcccctgaccagctcaacactcacattcatgacgctgctgttgcgtgcgagcagagtaaagccaccgccgccggcgacggttttcgtttcggtgagctaaggcagagaagcgtgaacggtcgcgatagttttgtagatttggcagttacggcagttggtgacggttacgtgacggagacggtggaatcgttggagctaaagcgtgttttggctcgt

SEQ ID NO: 55552 - DNA, 222 bp, Glycine max
  Clone ID: PAT_MRT3847_21174C.1
acgagccgtcgtttttttttttatttttttttttttttttttttttatttttgtttttttgcttttaggcgggggtttaaccttattaaaaactattttatgagattgtcgcaaataggggggtggtttgaattcttgattgaatttgacaaccggctccaaaagatagtacacaaaaccatatgataaaaacccaaaaaagacgcgcaaagaaaaatggca

SEQ ID NO: 55553 - DNA, 259 bp, Glycine max
  Clone ID: PAT_MRT3847_21175C.1
ctatctttttgtgcgtcttttttttttttattagatgaactttgccttaatattgaatgcacattctgtaacataggatatcttgtatagggttgaatttgggagggagcttccctgtttcttgatatttgttcatgcatttgtttctcttggttaattgctttaaaaaaaaaaaaaaaaaaaaaaaaaaaaaaaaaaaaaaaaaaaaaaaaaaaaaaaaaagaaacaaaaataaaaaaaacctacatgcaaccgccgc

SEQ ID NO: 55554 - DNA, 367 bp, Glycine max
  Clone ID: PAT_MRT3847_21176C.1
gcggacacacgtgctgccacgcttccgggtgaaaggaaagccatttccaatccaatacgcgcaggataggaccctgttggggatacacgcgtacaggttcataccgatcaacttggctcatgggtagtcatgagaactaaattgccatatatgatgcctttaaatgggacgcattcggcagtgggtttcctcaagatgttctgtcttgtccccatatcatatgcagcttatttcctgcacagtcaggtaatatatgctacatcttgtgatgccaacattggtgtttttgatgctgatagcttgaggctcagatgtcgcattgcttcatcaatatgcttgtcaccggcagctttaagtggaagtcaag

SEQ ID NO: 55555 - DNA, 400 bp, Glycine max
  Clone ID: PAT_MRT3847_21177C.1
gttctagatcgctagcgagacgcccttttttttttttttttatgcataataacaaaatatagcattaaattaaccaaatcgaagaaggtcgcaagcataatttaagtcacaggaaatagcctgactataactcaaatccactcttgcaaatctaaactattccaaaggctagtctttccaaatgaacatacagacttacaaccactagcagtatcctaaaaggcccttccgagttctcagctgtccaatggtccatggcaacctagatgctgatcatgtcacaccatacatgcactatgtctttctcagactcgatcttgagatactcagaacgactaagctgattgaagccccatttcctgctaacaataatcctgtgacaaccagggaactggtactt

SEQ ID NO: 55556 - DNA, 116 bp, Glycine max
  Clone ID: PAT_MRT3847_21178C.1
ctcttgtttccgcccacgggtacgatcggtcgtccgaccactcatccggtcgcagccgctcgcgagacgaagctgcaagaatgcggctcccaaaatcgagttttccgagctccatt

SEQ ID NO: 55557 - DNA, 518 bp, Glycine max
  Clone ID: PAT_MRT3847_21179C.1
tcgatctatcgctaggaatgtgccaggtgcctgtcaccgcaaacggagctaggttagccagcggactacaaaaccagcaggcccggttgtcaatgcggctgttaggtagagccaggaattaacaagagccaaatcacacagttatggtaaggcagattaagaagtaattggtgccgccacgccaactgacgggccaccggccgctaactatggtaacgaagcagttacactatagatagtaaaagttacacacgatgcaagtgacgtaacaactaatgaccatagtagtacaggtgtgacaatggttaggaacggttgtgaaggtacgaatatgacaaactacttcgcacggccaacaatacaagatattaggcggacacaagcataaattgtaaaaaattactcagaggaaacaagggaccatagtaggcagatacaagcataaatgatggcaaatgaagcaataaaagagacacaagaaggtgcacgtttaagtataatatacgcgccgcagcttc

SEQ ID NO: 55558 - DNA, 757 bp, Glycine max
  unsure (1)..(757): unsure at all n locations
  Clone ID: PAT_MRT3847_2117C.1
aaaacttccatacaaacattagatgtgcatgtttacatgaaatatcaggaaattcatttaataactcacggggtcctcatcaaaactttatgccagaatgtctacatagccatttacttgaacaatgatggcagaatctcgtttagataagaacaatgatgacaaaatctccacggaggaacatctattcttgtttaatgactgggtctttctttcctttaccagtctttgccacctgattgattgtacacaagtgaaaggggacaaagggtgaaaaagttacagacaaaagaaagaaaaacattagcaagcctcttcagttcaggtctccatgtatatttctcatggacaatattcaagaggctaaatttgaattatttcaactttcaagactaaccgtgtatttatgaatatgaagtaaaaaacagttaaatattaagacaaaacacagatcaccatcatagagcagagggaatatgaagaaaaacataagaaagccttcagttcaggtctccatgtggattcctcaagaaaatatcagaagaacgaaagttatatttttttcatcatcatgatgaggctaattcgattgatttgtgctatttacatgctaaaaaccaacagagtacctaaaagttaatcatacacagcaaaactaanaacttagggtgtgaaagttgatctagtcaagtgtacaggagatttggttttgatgtcacacaatgactacagaaaatccaattcgatgtgatctttg

SEQ ID NO: 55559 - DNA, 491 bp, Glycine max
  Clone ID: PAT_MRT3847_21180C.1
cccgcgtccgcagcggagaaaacgcaaaccttctgtgtcgcaagtcatgcgattatatggcatctctccctagcgtgcacagcgatctacgaaggtggggtgaaggggttgagggtctcactgagggagaaacgaatcgtgcctctacatgacgacccatgcagcccgatcactcctctagtgcatgctgtgcagcctactatgatcctttgtctgaaaggggggctgatgggatactaccttagacagaaaaagcattccaagacttgtgacgggacaatgaggttgcagatcgactgatcacggggctacaaatgacccgcagcttatcagcactagctggcaatggctctctagacccggagcttttacagcaaaaagccagcctgctactagttcctacacaggctacactgaatgatcacatattgtggcaggaatgacggataatcacttggtagatgaagaacttgatatggatgcggagcatc

SEQ ID NO: 55560 - DNA, 358 bp, Glycine max
  Clone ID: PAT_MRT3847_21181C.1
gtaacgggtgttttgggtagagctggtgggggtctagggacggataacaagagaggttgcctaagtggttttaatttaaataagagaacacatatgtcactctaccggaactgtggggtgctgtgaacagccagaatgcgggctgtaacctaggtaccttgatggggaaagaggaccttacacttaataaagatctcgttcttgggaagcgccccgcctggggctctcgacccttctttccagggggatagggagatcaacgagcatgttttgacacactattccatagagtgctagtgcgcgaagagagcaatctactgagccgctcggttagagtctctatagagacactagaact

SEQ ID NO: 55561 - DNA, 2385 bp, Glycine max
  Clone ID: PAT_MRT3847_21182C.1
cactggttctcttcctgatagtattgtgaatcttgggcagctcgggattcttgattttcataacaataagctctctggggagcttcctaaggggattcgttcgtggaagaagctcaacgatttgaatttggcgaacaatgagattggtgggaggattcctgatgagattgggggtttgtccgtgctgaattttctggatctttctagaaaccggttttcggggaaagtgcctcatgggttgcagaatctgaagctgaatcagctcaatttgtcttataatcggttatccggtgaattacctcctttgttggctaaggatatgtacaagtctagttttctagggaatcctgggttgtgtggggatttgaaggggttgtgtgatggtagaagtgaggagaggagtgtgggttatgtttggctgcttcgaacgattttcgttgttgccactttggttttccttgttggtgtggtttggttttactttaggtacaagagtttccaggacgcgaagagggcgatcgataagtcgaagtggacgttgatgtcgtttcataagctgggttttagtgaagatgagattttgaactgtcttgatgaggataatgtgattggaagcggatcgtccgggaaggtctacaaggttgtgcttagcagtggggaggttgtggctgtgaagaagatatggggaggggttaggaaggaggtggagagtggggatgttgagaagggtggtagggttcaggacaatgcttttgatgctgaggttgaaactttgggtaaaatcaggcacaagaatattgttaagctgtggtgttgctgcaccactagggattgcaagctcttggtttatgaatatatgcctaatggaagtcttggtgatttgcttcatagcagtaagggagggtcgttggattggccaacaaggtacaagatagctgtggatgctgcagaaggcctctcttatctgcatcatgactgtgttcccgcaattgttcatagagatgtgaaatctaacaatattttgttggatggggacttcggtgcgagggtggctgattttggagtagctaaggcggttgaaaccacaccgataggaactaaatccatgtccgtcatagctggctcttgtggctatattgcaccagaatatgcatacactcttagagtgaatgagaagagcgacatatacagttttggggttgtcatactcgagttggtcactggaaaacaccccgtggaccctgaatttggggagaaagacttggttaagtgggtgtgcacaaccttggaccagaaaggtgtggaccatttaattgactcaaggcttgatacttgtttcaaagaagagatttgcaaggtcttcaacattggactcatgtgtactagtcctcttcccatcaaccggccttcaatgagaagagtggtgaagatgttgcaagaggttagcacagaggaccaaaccaagcctgccaagaaagatagaaagttatccccttattactatgacgatgcctcggatcatggaagtgttgtttaatgaagacttgcaagggttggactatttgatgatcctgaaagggggagttcgaagcttttcttttactataagagccatcttccctccatgttttccgcgcatgctttgctttacaaagttgactaaagaaaagagaattagagtataggatttttttcagggtggaaaatagaggcttgaggagttgatgttttaccctataaagtatgtcaatatcaagaagcttccctaccaaagttaaattggtgttcgcattacaaacttatattcagaaatcaaaaaaatgattgtggttatttccatcgttaaaaagtttacttttggagtagatttaatagaaagactttttagctgactctggcatgggccaggggagttttaaaattgcaatatcaatgagacaatgacttccagtttaaatgctttgactatggtccgcataaaaatttacttctcacagtgctcaatctcaggtatgtgctgggtacagctataggagttgagttaatgaggtggttaggcaggccttgtccttcgtggaccctcttgtttaattgcaggttccatctatttgtgttgcctactagtctggtctacccttacttctgtctgtgataaatgatgatggggtatcatatcaccgtataagggtatccatttgtataatgatcagtcagtggcagtgcattatagtaatggtcttttagctgaatatagcatattggaatcttgccaaatcttggctggaagatggctcttatagacaaagaaacgctgctaactccccctttcatgatcatcgaatagtccaacccttgcaagttttcattaaacaacactttcatgat

SEQ ID NO: 55562 - DNA, 252 bp, Glycine max
  unsure (1)..(252): unsure at all n locations
  Clone ID: PAT_MRT3847_21183C.1
cttgtgtnnagtgcaactngagcttcacncnctttgcaagagagggnggtngtgagtgagntggatggngtgatacacagnacagtggangtgaagggcatnaaaatgcacatagcagagaanggagagggtccagtggtgttgttcctccacggnttccctgagcncctggtactncatggacgcnancagactctcactctcagtccctcgctaccgcnccgtcnctcncgatntncgnggtacngtncc

SEQ ID NO: 55563 - DNA, 510 bp, Glycine max
  Clone ID: PAT_MRT3847_21184C.1
gttgttgttttttgagcacatatgtggccgatcctttagggtcaccattgtctgcattatgagttatgtaatccgacaaactgactggaagaaaataaataatgaagaagagagatgatactatgtactgaggaggaacaagagagccaactgactatgaaatgatctactggaatgatcatactgggattgcgtactactacggctgttgacccttcccactgcagctccaaagccttgaggcatatccaagcactgtgggagcattccattggggagtgctcagtcgaagtgatagagcaatgcaacaggaggaagctgaacattaggtatgccatgtgatatgccaggacgcattcttctgactgccccaaaaggaatgtacgtgagattactacatgctaaatgatgacttgcgccatcaaacctctggggtataaacttctacgcatcataccgatgcttgcgatctactccaagtagccatgcatgtacaatcactttagtcgt

SEQ ID NO: 55564 - DNA, 218 bp, Glycine max
  Clone ID: PAT_MRT3847_21185C.1
caaccatgaccgactcataacaagaccttgttcaacttctcaacagacctttgggggattggcagaacttaaacctgaatcttcccttttcaagtgatgaagcaactgctaatatcaagaaagatagttcttatttgccgtcacgtgttcaaggattgggcatcggtttaccccatttgagaactaataaaaatgggaaacaaaaatctttaaaagac

SEQ ID NO: 55565 - DNA, 416 bp, Glycine max
  unsure (1)..(416): unsure at all n locations
  Clone ID: PAT_MRT3847_21186C.1
cccacgcgtccgcccacgcggtccgctggctcgtatttgtggtcttacaatgaaaataagtccagactcctgtccaatacatgttggggggtggctcaccnttttttttttttctctctttttgtgcctttgtgtctggtttatatttggttctgcttggctgtgcctttttttgtttcctttgtcttttagtcttctttttgtgctctttttgtactttatttatttagtattctgggttttttttgattcattttttttctcctgttttttgcacgctttttggttctcttattactttgtgatgtatttcttttgtttttttttgggttttttttttatttttctttttttgtctctatttttttcgtcttctattatttttcgttttccttttgttttgccctttttttctt

SEQ ID NO: 55566 - DNA, 462 bp, Glycine max
  Clone ID: PAT_MRT3847_21187C.1
tcttacttgagtacaacactacggttgttttgttctgtcatcttaaagcaagatatgagttcatcaggaattagagcatggagtggtggaggccttgaaagaccagggcatatgcaggtggaaccatgctttaagatcagctcaacaccatctcaaaacccattttggctcattctctcaggctaacaggctttctgcttctgctatgctctccacaacactaaaacatgagaagccaaagcaatcagaggagtccttcagaaatgtcatgtacttcagctgctggggtcccaactagatactataaggccagcaagaaaatattctttctctttcaatttctagaaatcaagcttagtcttaaggaagatgagagttgagatttctggggctgactcactgtatagtattcaaagattgccaaattttgataaatgatagtgttgagcattgccaaatttt

SEQ ID NO: 55567 - DNA, 551 bp, Glycine max
  unsure (1)..(551): unsure at all n locations
  Clone ID: PAT_MRT3847_21188C.1
cgacatgctcatttggcattatttatttgataaaatgatctcttgattacatccaacacaagtgatatacgatgaaatctagggaaataaacaagaaaaacactagacatgtcaaaggaacactaaattcagatcacttgagaaggaacttttgcaaccaaaaagcagagaacttggggtatcttttcaagttgttcttgtaatccacatatatgagcccgaatcgaactgtgtaaccagcatcccattcaaaactgtccgaaaatgaccatgcataatagcccttcaaattaacaccttccttgatcgcttgaagaaggaatttaagatggccatcatggtatctaatccttatactatccttgcgggcttcattgactggtattgagtcattccttgattcagccatgcctaaaaaaattaagaaccaaaaataattaatttctaattaactaatcaattacttgcagttaagctagtgtttcataanactatgcttcatgtcacttattgcatcagctattatggacaaagaaactagatcagtacag

SEQ ID NO: 55568 - DNA, 753 bp, Glycine max
  Clone ID: PAT_MRT3847_21189C.1
aattaattcctatcattattttttatcacccgattaattctttatttaagaacctaattgtttctgtactgatctagtttctttgtccataatagctgatgcaataagtgacatgaagcatagttttatgaaacactagcttaactgcaagtaattgataagttaattagaaattaattatttttggttcataatttttttaggcatggctgaatcaaggaatgactcaataccagtcaatgaagcccgcaaggatagtataaggattagataccatgatggccatcttaaattccttcttcaagcgatcaagtgagaaagtgaaatggatttctctatctatacatatatttggttcataataaattgttaatttctggcaatattttttttcctttctctttcagggaaggtgttaatttgaagggctattatgcatggtcattttcggacagttttgaatgggatgctggttacacagttcgattcgggctcatatatgtggattacaagaacaacttgaaaagataccccaagttctctgctttttggttgcaaaagttccttctcaagtgatctgaatttagtgttcctttgacatgtctagtgtttttcttgtttatttccctagatttcatcgtatatcacttgtgttggatgtaatcaagagatcattttatcaaataaataatgccaaatggcatgtcgaagttaaaaaaaaacccccttggaaataaaaatttaaaagcatgg

SEQ ID NO: 55569 - DNA, 266 bp, Glycine max
  Clone ID: PAT_MRT3847_2118C.1
attatcatttgaaaatttacaaagcatgaataatttttagctttttccttttaacaatgtatatggtcgatcaactgatactttgttaaaaggactaagctcaaaattattcagaatcaagctagagcagagacatttttcaggatcagacaagggattaggcttttttcatattcaaactaagtagagcaggattcgatcatagtgtacatgatgtgggtattgcattagtcattagtgcatgctgtgaaatatattctttgagg

SEQ ID NO: 55570 - DNA, 270 bp, Glycine max
  Clone ID: PAT_MRT3847_21190C.1
acccctatctcatatcttattcatttccctttcttgaatcattttaagctcatttccatttttcccttatctttatttcaatattttgttctgtttttgttattcattcgggttaatttcgattctatgcttatctgcgagatgagatatcatataagttgattggcctcccattcataatctgaatgatctcatgaagactaattgtcacaagaaaaattcgtctaataataagtactttttataccattctcctttcgattacatcat

SEQ ID NO: 55571 - DNA, 340 bp, Glycine max
  unsure (1)..(340): unsure at all n locations
  Clone ID: PAT_MRT3847_21191C.1
gggtcgacccacgcgtccatacagccgtcagtacgagcagcgaaagggaggcataaggggtcaagttcacatggagtggtacaggtggaatgcctggcagtcgtagagacttcaactcagcacagcatatggggatctcgnacatgtcatatgacatgcccttatgactgccatctgatcagcgctctaacgtctgatgattaactatagtgctagtgcgattatataagatccaacgtcagggaccttctccgtctaaacccatggataagagagacgcttatgcagtaactgagctattccctcatgactgagattctcggtacatctgacattgtct

SEQ ID NO: 55572 - DNA, 1344 bp, Glycine max
  Clone ID: PAT_MRT3847_21192C.1
aaaagacgaaaacgaaattcaggaaaccatcttcgtacgcactacgcagcatagctgttatcttcttccccttcccctctcgtggcaaacgcgccgcaaatgacagaacgagcaactccaaggatccatcgacacagataaaagagtattccctcgctccctccacagttctagggttcacttttgaacacacgttgccaaaccccggttcatccaaatccaaagtcataagaacaagaagatgggtgtgggcatatcatttctgatagcactaaaagcaacaatcctcttcttatgcttcgcgtaccttaaaaacctcggtttcactctcttctccctccccttcctctactcttcgctgatctcattcttagtctcaatcgcatctcacccttccatcaaccttccaatacttctcggcaaaaccaccgacggaagcttccccctgttctcactcataatcttcagcccttacatctacttcgtcagaatcttctctctgctccgaagactccgaagcggagaacctgcttacaccgaagtccacgagggtctctatgtcggtggctggccatcgtcgcctcagaagctgccacctggcgatcccgccatcgttgattgcacgtgcgagttcccgcgtgtgaaggatttcactacggggttgccttaccggtgctttccgacgtgggacacgaggtcgcctcaacccgctgatatcgaatccgctgttaagtgggcatctcgacagagagaactaaacaggcccattttcgttccctgtgcttatggtcatggaagaagtgttgctgttatgtgtgccctgttagtagcactaggcatcacagaggattggaagaatgctgagaagctgatcaggcaaaaacgaccttacatccggatgaatgctctccatcgcaaggcacttgaagaatggtccagacaccgattgtctgcaccaaagaagtagagacatgagcgtgggttccttgagttaatctgattcttttagtcattcccagtatgattgttttccaaacagtggcaaatgcagaaaaactaaaacatagattctcctcgtgtctttactttattagcatcctcgttttccttgaatccaaaatttaatatgtgcttcccaattgttccgtagtcagcttcttctgctttgatcaagttgaagctgatgagtggaatagtgggattacatactatgagaagctgtaacatctatttacataatttcattgtgtatgcccatgaaaaaaaaaaaaaaaaaaaaaaaattaaaaagaaaaaaaaaaaaaaaaaaaacccatgattccaagggtagttagttggtaagcc

SEQ ID NO: 55573 - DNA, 413 bp, Glycine max
  Clone ID: PAT_MRT3847_21193C.1
tacggctgcgagaagacgacagaagggggtacctaaaaaacctcggtttcactctcttctctctccctttcctctactattcgctgatctcaattgcgtctcacccatccatcaaccttccaatacttctcggcaaaaccaccgacggtagcttccccttgttctcactcataatcttcagcccttacatctatttcgtcagaatcttctctctgctccgaagacttcgaagcggggaacctacttacacccaagtccatgagggtctctatgtcggtggctggccaccgttgcctcagaagctgccacctggtgacccgccatcgttgattgcgcgtgcgagttcccacgtgtgaaggacttcactacggggttgccttacttgctgcttttcgaccgtggtacacgaggtc

SEQ ID NO: 55574 - DNA, 163 bp, Glycine max
  Clone ID: PAT_MRT3847_21194C.1
ctcttatggggggtttttttaaggcattttctcaaaatgcccccgcccgtccataaggataacacaggaacaatggaaggaacatcaaactgttaatagccacctaccctatatagggaactgacaagaggagcgggcctgaacacacttgccaccctttacc

SEQ ID NO: 55575 - DNA, 436 bp, Glycine max
  Clone ID: PAT_MRT3847_21195C.1
ggaccacggtagtgcttaccgctggttgcatctagaacactacgctgacagacgacactgcacaccaagagcgcggacggatgctaccgctcgacttcggcgatgtccgctgtctctctactggaataactgacccaagtgtcttgcaagggactcaggaaagctgcgacaaagattgtggatccaccctgtgtggatgacaggagcggagcgagctcctaaagctctttgaaccgtgcatcattatcacctgagggcagcggaggatgactcagatagatagctcatgatcatcacggtgaagtaccagctccaagcggtcgtgtcgcgtgatatggatgacatcaacgatcctgtctacactgacatcgatgtatcacccatagagaaggtggacccagctcctgacgctttggacactactgagactctttgc

SEQ ID NO: 55576 - DNA, 233 bp, Glycine max
  unsure (1)..(233): unsure at all n locations
  Clone ID: PAT_MRT3847_21196C.1
gaaatatanctcttaaaagagttgctgagtccactgcaaatgtcgatccacctgtgctccatagggacagcagacgtaccatgcttttgcatgattcattcgaagatgatttctctaaatttctaaagtttctgtgtgcaagcatcggatccttaggtgtcacacatgataatcgtctacacttgaattttgcgcataagcgattcgcttttgtcgtggccctcatactccag

SEQ ID NO: 55577 - DNA, 538 bp, Glycine max
  Clone ID: PAT_MRT3847_21197C.1
aaaataaaaagataacataaattaaaaggtatactaactttcatcacccccgtataacaataaataccttattcgtgtgttttgacacaactattagttatgctattctatttcctgggttaaaacatggtagaaaataaattacaaagaccaacttgccaattacaaacagcaggtgatatactcagtggtagaaaatgtacttgaccacagagaaggcaatggagatgtcctgggacagctgaatgtcacacacaacatgttcattcccatttccatgattacaaaattgttgtaggagaaaatctctcattctcgaagaacttgaaaaaagttcattattttctgattcaagaattatttttcagaaactcatggttcctattctcacatttacgtcatgaatctcactgagaggtgcacaactatgatttaagattattttcagaaaaacaagaagtaaaatatagtaataaaaactttagcttagataattattggagattattttagacaattgaatcctatggagtttatt

SEQ ID NO: 55578 - DNA, 110 bp, Glycine max
  Clone ID: PAT_MRT3847_21198C.1
tttcgttttttatgtacaaacacatcaagcaaactgaatgttgcttgtaaaagtaaaattaggtacttatttgcacggggcatgtaaaattggcttccgttcttttctgt

SEQ ID NO: 55579 - DNA, 410 bp, Glycine max
  Clone ID: PAT_MRT3847_21199C.1
tttttgtttatgggaaatgaataccgtcactcaattttttttttttgtactggttccttggttgtttttatttttggtttggaatatgaaatcaagaacaagcacatgaagaaaacatacaagactatatctagatagccgggagtcattatacctctctcatggatgaccaaaaaataagagtgagggacctcacagaatagaaccggccgaacttttcccataagggaaaagcaaaccacccggctggtcgagaagtagacttgtgtgcctaaccaaaagcctgagactgtgggcctgcactgatagggctctgaatgtgggggctgccagaaagtacagcactgaagctggctgatgcaaccccccctgaatcggaccattaagctcgggagaagggggggagaccc

SEQ ID NO: 55580 - DNA, 381 bp, Glycine max
  Clone ID: PAT_MRT3847_2119C.1
ctaaaactaaatacccattggatgagttacatttcttccgaggttgctcctctaatatgcctaatattttctgcaatatcaattgctacattatttctttatgttcaaaaaaacaatattttttacatacaaaaaacataataaaactctagtgttttttattccccaattataattctaaattcaaaaaaaggacactaatgagtataatcttatcatcatactatgtactaatatattccattacatatgttctaataacaagcaatttattttttacacttaacactttatcaagtccattttaattaatgttcatttcaatttccatttttcttattaatacatttgttctttatttttaacaaaattatttatttt

SEQ ID NO: 55581 - DNA, 351 bp, Glycine max
  Clone ID: PAT_MRT3847_211C.1
agcaacctgctgtgctttggttcaggagcgcttagcgaaaacgcttaaccctctccatggaaactgccaaggacagcatgcatcatgccattggggactacgccgagggcgggcctggctgtgccacaccgtcgggagcccgcttggtttggaactcactctctcatccacccatctccaccagacctaaccactaccctctctgccatcacattaaacagaactttacggccctgaagcgtatgaaaagctgccttctacacaattccaggctacttacccgaccactggaaggctgcataattgcgccagaggtgacatgaagcaatgcaagaacaagcgacggttacg

SEQ ID NO: 55582 - DNA, 416 bp, Glycine max
  Clone ID: PAT_MRT3847_21200C.1
cccacgcgtccgacccgcgtccggggggagcgaatctctctcccttatcaatacagtacctagtacatgtagtaatgggtttcaagcttgcaaatctagggtatcactcatcgatcccgtgttctccaagcccttgaaagaccggtcgagcttcccgcttctcaaaatggaccaaatatggtttacggaatctgacaactcactcattgaaacccttgttggcatacaacgacacggacgttgatcatctcgacaacagctcaatgctgctgaacgatgctgttcaagtcctgcaacgggcaccggaaatacctgatccgcaaaaatcaaactggaaccaggttctctggcatctaatggtcaccacatgaccaggaactgcatcccccatacagagaaccttcttcgctgttgac

SEQ ID NO: 55583 - DNA, 298 bp, Glycine max
  Clone ID: PAT_MRT3847_21201C.1
atgtttcgctgctattgatgtggactatgcgttcctcgtaatccaattaattaagaacgaaagtattaaattataaaaaaaagaaaacaatacaaacaacaacaaaaaaaaaacacaaaactaaactaaatcatacaagaaatacaaacaaaaatctccctcgctctcgaacgctaaccaacaactatgtaaattaccaccgcaacaataacgcacttcgcatcaaattagacctcaaaatctggcattgtactcagttgcgattattcgaaatagtatcgcgtggaataatatctat

SEQ ID NO: 55584 - DNA, 897 bp, Glycine max
  Clone ID: PAT_MRT3847_21202C.1
gaaggtaagggggtgtggtcggtcatagacactcggaaacctattaaaatttcatttggaaaagaatctgccaattttgcggtgtgatatttaggttggagagaagaaaagatgccgttgaaggtgttagaggcgacagtgtcgagtttcgatgtggtttttgagaagttccgatcagaggctccacaaaacaaggccaatctcatcctcttcttggcggacaatgacccggctacctctctcagctggtgccctgattgtgtgagagcagaacctgtgatatacaagaagctggaggcttcacctgatgacattgcactattgagagcttatgttggagatagaccaacatggaggaatccccagcatccatggagggtggatcctaggttcaagctcactggggtgccaacgttgatccgttgggagaacaacaccgtcaaaggtcgcttggaggatcatgaagctcaccttgaaaacaaaatcgaagctcttgttgctgacaagtgacaaatgattgccagtgcaatgtcatagttggtatacatatagtttaaataatgtatgctgtactcttatcagcaatttgtccctctcatgcttataattttgctgctgaaacataaaataaatgatgagtaccaatggtgacaagggaagtctataaatcaatggttggtcttacattgtgcttttttgtttgtttgtggttttggacatcatatttactctctaatccttgataatgttcagcttgctgtgtatgtaaccgaagtcaacttgaattttgcaccagataccaatgtggttgtggtgtttctgcagactgaaaaatagtttcactgaattttgaggcaaaatttataccttcataaaaaaaaaaaaaaaaaacctcgt

SEQ ID NO: 55585 - DNA, 221 bp, Glycine max
  Clone ID: PAT_MRT3847_21203C.1
aaagggggctcgagctcgagccgatatgtttctagcagttccactcacttttatgttttatatatcgccgcctatctcaggagaagcgcgattattttcccatgtgtgtggacattaataatatgatggaggatatgttgtcaatttattcttatgcggtatggaattatttaaagtgatcttctttcttattcaatatattctttcatcaccctaattta

SEQ ID NO: 55586 - DNA, 408 bp, Glycine max
  Clone ID: PAT_MRT3847_21204C.1
aaaaaaaggcccaccatttttttttatttttattcagggcccgaaataaaaaaggtttttgggttcaagggcaaaaaacacccctttagttagccccacccttacaagggaaggggctagtgggatcatcctgggggaaactataagcatgggggcccctttgcttgaaaaatctggaataatcagggggcacacagctcccggaattgcaacagtcctggtcggttttaaaaacagggcaagggttgttgcaccctccttgagtctttagctgactagggcactgcccgttaatgtccgcagggcaccttatgccacgtgtgcccccattcgaggttggactaaagcccatgggcacgttaaaaccgcccacgagggagatgtcaaaaaagtccaaattgctgaact

SEQ ID NO: 55587 - DNA, 518 bp, Glycine max
  unsure (1)..(518): unsure at all n locations
  Clone ID: PAT_MRT3847_21205C.1
ggtacangcctgcnaggtaccccggtccggnnaattaattcnnccgggtnncgacganngctcactanngtcggnncggccgcnnccttttttttttgttttttgtttcttggaaggagaagtccgctatcttttcgacatagtgtgatatacctacatcatgaggaatcactcatagtcaaacccatgctcaccctcatagcttatatcatggggatcgaatttactaccctggggcataccttaccttgttccatagcgactgcttttttatggcatcacagatcaacaattcagggacatgtccatagcacttcctatgccgcatcatgctgtgtctcattttgcctccccttgacttgcagctatatcgacactgcataggtacactgccctcctacatgactgaatataagttactaaagcttgtatttgcttgaacacacactgattaccactgctttgtttaatacactacagtagtacccgactatatatcatgtgtctccatccgaggt

SEQ ID NO: 55588 - DNA, 946 bp, Glycine max
  Clone ID: PAT_MRT3847_21206C.1
acgaggttagtccccgcttctgtagctgatactatgacacaatattacatgacttccgctgctggaaccttttgttacattgatcctgagtatcaacaaacgggaatactaacaacaaagtcagatgtatattctctggggataatgctacggcagataatcacagccaagcctcccatgggacttgctcacatagttaagaaggcaattgaaaagggtaggtttgaagagattcttgaccctgtggtcactgattggccagtggaagaggctctatcatttgccaaattaccattgaagtgctcagaactcagcaagaaggacaggccaaaccttgcaacagttgtgttgccagagcttaataggttaagcgaacttgaattgactttacacaatgatcaagttttttacagtagtgaaggtatgatcaatagctatgccgcttgccctcccacacctccaagaagtcattactctgactcagagacgttatatacgatctagccatctaagttcgtgtatggacttactcatcatgtacaaaacaatcataatgtaatccatgcaattcaaattgttcaagaattttcaactgaaaggagtcaaaatcaagacaccaatacatggtttctagaattctttccagttggaaatctttttttcccttaacaattgtaatttttcatatgattttgagtaactagctaggaggtaatatctaaggatggtgttggggaatttaaagctactccaagaaaggaatattgcagctgttaaagatggaagatgacagactaagagcaccaaaattcagaaaacgaatccatgaagcaaaaagaaatcaaattataaattattcaacttggaaaatgaagcatgtctattgtataaattctctatcaattttctttcacaaacaatgatgtgtgggaagttcgttcaaaaa

SEQ ID NO: 55589 - DNA, 181 bp, Glycine max
  Clone ID: PAT_MRT3847_21207C.1
tgggttgttttatcactgtagtatttgattaattaatagtaactatgttagttcatcagttcactttgcatggatagatgctactagggaaattaaagttatcctcctttcgccttgggacctttcttgctccgttgagtatgtagaagtattgcagatttaaaatagaaacttgcgatgc

SEQ ID NO: 55590 - DNA, 493 bp, Glycine max
  unsure (1)..(493): unsure at all n locations
  Clone ID: PAT_MRT3847_21208C.1
acgttcgcattccacgccgtacgtnaagctttggatgccttctaaaacggccgcccaaccccccccccccccccgacaacgacagacacgcgcaacatattctctcccacataaagagtatccataccacacgtcataagtcacaaatgaccattaacaccttacataacacccaataaattgcttagctaaaacaacaacataaatgcattcaaaaaaaaaagaagttatctatacactctcattgaaacatgattattttaattcatgcttcctctatgcaaattataaaaacattacatatacaagactgctcacacttacgcaaaacaaaccaatttattattaagtttctacattttactacccatatttggattactctcactttttaatatattctattatcaaacgaatattagactttgctccatctctctgaacacaccattattatattatggtttacatcacttacaacatctagcaagat

SEQ ID NO: 55591 - DNA, 500 bp, Glycine max
  Clone ID: PAT_MRT3847_21209C.1
tggaaatacgccccggaatcaccttgagaatgcccgcgcccaccgacaccgcgaagtggtcgcaggccaggcccacattgcctttggacaggctcacggcattgcgcagcagctcggcgtattccgggatggcggcggccttgagcagcagcgacgggttggtggtggcatccaccgggcgcaggcggctgatggcttccaggtcgccagtgtcgcagaccacggtggtgaattgcttgagttgttcgagcttggacgtcatgagtggcggtccccaggaaaagagtgaaggtagctgttgtaccatttccggggcgccctgtttaccgcgcgtgcaaacctgtcgcggccttaaggcttccaggtctgcacatcctgcgcatccaccgccttggcgtaaggcgtgcctgtcatcaccgcgattttcttgcgaaatagcgccaagcttaaagttatgaaaagcattcgataaatactctttcgatctgagcttagggcgc

SEQ ID NO: 55592 - DNA, 277 bp, Glycine max
  Clone ID: PAT_MRT3847_2120C.1
gatctattctgttctttggcacactggcacaaaatgtgactgttacaagggcccaactatgatagatgcacttgaccatataactgagtgcaataagccatatgacaagcaggtcaggcttacacatacaggatgtgacaagattgtaggtataggaactgtgccagcgggacatgaagagaccagtgtttggaacaacagaatggagatgactgtggaacactctgaactgacaactgaagcaagctatgtagagatgaagactcaatatttcaca

SEQ ID NO: 55593 - DNA, 298 bp, Glycine max
  Clone ID: PAT_MRT3847_21210C.1
ggctcgagcgaaaacgcaaacacccaagttttccctgtctgaggccgagcagccgcgcccccggggaaggggaagcaggacaagcaccgaacccacgcagcgcaaaacgagggggatcccgcacgccccgggacggcgagggaacaaccagaccgcaacaacagcccaggggggtggaccacgcccagcacggaacagacccgaccgagcaacacggaggcaaccggcaaccacaaagcgagcgacgacacaggtagtagaacgagggcctgcaccgacagccacgccaacgcccgca

SEQ ID NO: 55594 - DNA, 270 bp, Glycine max
  Clone ID: PAT_MRT3847_21211C.1
taagctcggaattcggctcgagataaagcacaactatatgctttcaataatggaactgctgatgtcaagatcacaagattgagtgcttggagcatgaagaaagcccaaatacattgaaagtaagtagagtgggagaaatggaagaacgatgaaagctgatgatgacaatttttttttacttcttctattaatgcctccaaatatcattaacgcaacaataatatgcttgccattcctcttaaaaaaaaatataaaattataaataataat

SEQ ID NO: 55595 - DNA, 844 bp, Glycine max
  unsure (1)..(844): unsure at all n locations
  Clone ID: PAT_MRT3847_21212C.1
accagctcaccagctgggcctccacctcaaagtccaatccacaaacacacacaaccatttcccacggtttaacccttctcaaagacacacacgaaacccttcaacacatcctccaactccctcagactctagaaaccctccgaagccaccctctctgggtcgagaagcttctagaagacttcctccgcttcggcgacgccttcggaatgttccaaacttccatcatgtctctcaaggaagaacactcttccgctcagatggccatacgaaaacgcgacgagtccagggttgtcgcctacgtaaaggctaagaagaaaatttccaaggaaatggaaaagctcgtgtctgtcctccgatgtgttcacgtcacacaacatcagcaacattccacgctgcaggttccatcttccgttgtggacgctcaactgagacacgtcatcgcggatgttatgagcgtgactgtgtccgtttccgttgcgctgttcaacgggattggagtgtcgtttgcgtcacgaaggttgtcgtggacgcagatggtgaggttgtcgagaaacggtgggagggagaataataataaggagcatgaaggcattgaagagcttcgaaatggggtgggaatggaaaggcttcagaatctgaagaagaagggtgatgaagaggtgaggttggttctgaagaagatgcgggatttggaggaatgtgtatgtggcatcgaaactgttaccgagaaagttttcagagctttgataaactctcgggtggcgctgcttaacattcttacccttacacagtagatacttcttgtatttttttttaattaaaaatnnttttttgaagaaaagat

SEQ ID NO: 55596 - DNA, 302 bp, Glycine max
  Clone ID: PAT_MRT3847_21213C.1
tgctcggtattcggtttgagtgttctctctcggcctgactccctgttcgtccttcatattggccggttttttcttctgggccttgagctcttttctcctccctgggtacaacctcgtacagcgctcttggatgaaggctatcagtggttttgtctctatgttatactgcctgtcagagatcttccgcttgctgactgaatgattcactttttccatccggcactgttcatgaaggtgcttgtcaaggaatatactggcgtactttgcgaacgtaggtctccaggttgcttttttttaggggg

SEQ ID NO: 55597 - DNA, 1085 bp, Glycine max
  Clone ID: PAT_MRT3847_21214C.1
cctccagttctcggtccggatccccgggtcaacccacgcgtccgacaagctacagcacggcactactactagcatcaccctccaccattgacgcgtcctttgcttgctccgcacgtcacttcgcgtttttctcagattcactctcgccgtcgcagatcccaaccaccatggatggttacgacgccaccgtcaggctcggcgccatcaacctcaagcacggtcgcgccgccgattttgactccgcctcccccgacgtatccgtctcctctccggtcacgcgccagaaagccgccgccgccaagcaattcatcgagaatcactacaaaaactatctccaaggattgcaggatcgcaaagacagacgcagagcgcttcagagaaaagtgcaggagtctcagatatcggctgaggagcaggaggaaatgatgaggaacttggagcgccgagaaactgagtacatgaggcttcagagacgtaaaattggaatggatgacttcgagcagttaacggtgattgggaaaggtgctttcggtgaggtgaggttatgtcgtgctaaaggtacgggagagatttttgccatgaagaaattgaagaagtcagagatgcttagtcgtggacaggtggaacatgttcgatctgagaggaacttgctggcagaggttgatagcagatgcatagtcaaactccattattcattccaagattcagatttcctatatctcatcatggaatatttacctggtggtgacattatgacattgttaatgagggaagatattctttctgaagatgttgctcgcttctacattgctgaaagcattcttgctattcactcaatacatcaacacaactatgtacatagctttcagactttggcttatgtaagcctcttgatgataagtattcatcaattttattggaaaatgaagatcttactggtcaagaatcaactagtgaaacctgaagcatattctggctctccttggttgatgccaaaggagcgattacagcattggaaacgtaatcgccgcgcattggcatattcaactggtggaacttttgaatatatggcacctgatgtttgc

SEQ ID NO: 55598 - DNA, 2142 bp, Glycine max
  Clone ID: PAT_MRT3847_21215C.1
cggatccccgactctacgtgccaccctaccggcactactagcatcatcctccacaatttgacgcgtccttttgcttgctccgcacgtcacatcgcgttttctcagattcactctcgccgtcgcagatctcgccgcagatctgaacaacaatggacggttacgacggcaccgtcaggctcggtgccatcaacctcaagcacgatcgcgccgccgatttcgactccgccaccgccgcccccgacgtctccgtctcctctccggtcacgcgccagaaagccgctgccgccaaacaattcatcgagaatcactataaaaactatctccaaggattgcaggatcgcaaagacagacgcagagcacttcagaggaaagtgcaagaatctcaggtatcggctgaggagcaggaggaaatgatgaggaacttggagcgccgagaaactgagtacatgaggcttcagagacgtaaaattggaatcgatgactttgagcagttaactgtaattgggaaaggtgctttcggtgaggtgaggttatgtcgtgcaaaagatacaggagagatttttgccatgaagaaattgaagaagtcggagatgcttagtcgcggacaggtggaacatgttcgatctgagaggaacttgctggcagaggttgatagcagatgcatagtcaaacttcattattcattccaagattctgatttcctctatctcatcatggaatatttacctggtggtgacattatgacattgttaatgagggaagatattctttctgaagatgttgctcgcttctacattgctgaaagcattcttgctattcactcaatacatcaacacaactatgtacatagggatattaaaccagataacctgatactagataaaaatggccatttgaagctttcagactttggcttatgtaagcctcttgatgataagtattcatcaattttattggaaaatgatgatcttaccagtcaagaatccactagtgaaactgaaggatattctgtctctccttggttgatgccaaaggaacaattacagcagtggaaacgtaatcgacgtgcattggcgtattcaactgttggaactcttgattacatggcacctgaagttttgctcaagaagggctatggaatagaatgtgattggtggtctcttggggcgatcatgtatgagatgcttattgggtatcctccattttgttccgacgatccaaggatggcctgccgtaagattgttaactggaaaacgtgcctgaaattcccggacgaacccaagatatcagctgaagcaaaggatctgatctgtcgcttactatgtgatgttgactcaagactaggaaccagaggaatcgaagaaataaaggctcatccatggttcaagggtgttcagtgggacatgctttatgaatcagaagcagcatataaacctacggtcactggggacttggatactcaaaattttgagaagtttcctgaagtcgatggcccaccatctgtaacagcaactgttggaccttggcggaaaatgctgacatccaaagataacaatttcataggatatacttttaagaagtcagacatccttaaatcacttgaaagttcagatgcagatatcagagtaaacggatcatcgaaaaccccttccttgattaccttgttaggtcggattgatttgcaagacaccatcataccagaaagtgagcagaagccagaagcttgaatcaaactaactttttttacatttactcgattttgtattctattctttatgcttggcgtttgagattgtagatgacaatgttagcaagcatattcatagttcaattacagggaaagactgggcactggagtaaggtcattgatcatggtgtggttaataccatgcagctctgttctactgctcaaaagatgatactatccttgacataagtgagacctgtgctgttcatatacagattcatttcaatctccagaaatccaatcatttatgctgttaagtaatgaagaaattttgtctattatttttgtatacagatattttgatcatttttttgttgttgcaacgaatagtgtttacatatatgcgtggtcacaccctacacatcctactaagtactaatatatggtttgggggg

SEQ ID NO: 55599 - DNA, 630 bp, Glycine max
  Clone ID: PAT_MRT3847_21216C.1
tccaaagataacaatttcataggatatacttttaagaagtcagacatccttaaatcacttgaaagttcagatgcagatatcagagtaaacggatcattgaaaaccccttccttgattaccttgttaggtcagattgatttgcaagatactgtcataccagaaagtgagcagaagccagaagcttgaatcaaactaacttgttttacatttactggatcttgtatgctattctttatgcttggcgtttgaagattgtagatgactgaatgttagcaagcatattcataattcaattacaggtcaagactgggcactggagtaaggtcatggatcatggcggggttaatatcatgcagctctgttctactgctcaaaagatatgatgctatcctttacttgttgaagtgagacctgtgctgttcatatacagttccgtttcaatctcctgaaatccaatcatttatgctgtaaagtaatgaagaaattttgtctattctttctctttctttttatttttgtatacagatattttgatcattttttttttttttgcaacaaatagtgtgtttatatatacgttgtcacaccctccccatcctattaaaggctatatatatatggtttgggggg

SEQ ID NO: 55600 - DNA, 577 bp, Glycine max
  Clone ID: PAT_MRT3847_21217C.1
ggctcgaggacagttttaccatcagttttttccaaaaaatttggttccctttgtgcattggattgcaggccaggctccatttcaaaaattatgggagatgagttagaggaaggggaaattgcagtatctggtgattctcacatggatcatcaacagtcaggtagttggatccatgatcgtgatgagggcgaagatgaacaagttttgcagcaacccaagattaagcgcaaacgtagtcttcgtgttcgtccccgccatgccatggaaaggctcgaggacaagtctggcaacgagattatttctcttcaacgtggagaatcatctcttttggcagattataaatatcaaattcaaacaaggattgatccagaatcaaaatcatttggagactcgaatgccagcaagcgtgataagaatgaatcatcattaacatcattaaaaaataagcaaaagttatcttcaaggaaagtagctaatacatccaaattacatggatcacctaagtctaatcggttgaatgcacatctgctccttcagaggatggtaatgaacaccccagagaaggtgggaggggaag

SEQ ID NO: 55601 - DNA, 306 bp, Glycine max
  unsure (1)..(306): unsure at all n locations
  Clone ID: PAT_MRT3847_21218C.1
ancgncactactgtncngtnnacgcttcgtgtaatgtcttgctgngagngcaacatnaagtgcacttgaanagttgaatnngantgggcataaanntgcatgttgcngatanaggatagggtccattgntgttgttcctcnatggntttcctnngctctggtactcatggcnccatcagattctctctctcagtccctcngctancggantggtcncgatntcgagtacggtgannagangcanancttaatcagngtcactgttcaatagggtaccntngttttatncttgtgtcacaatttcnt

SEQ ID NO: 55602 - DNA, 221 bp, Glycine max
  Clone ID: PAT_MRT3847_21219C.1
acaatggtgcattattctcaaacatctgagaacacttctaggtcctacattaaaacatgggagctccactttaatgattataacttcttggacattaattatctcattcatcctgaacctacattgtcaaatgtttaaaactctgtgtattaccaccattcttaacattgcccaagcgaactccatttccaccacaatacacatatccttattcttcacta

SEQ ID NO: 55603 - DNA, 353 bp, Glycine max
  Clone ID: PAT_MRT3847_2121C.1
attctgtggtcgtccttgttcgtaaggttggcgaaggcttatggtgggcagtggccagctgggtcagtattcccatctccaagcttatagggataggcgcctgggagctcttctcaggaatgaaatctatactccctcacgcgtaattgactcgggcagatcaaggaatatatgatatggagagcccttcgtagataaattacggcgccagtttcattgtattccacacctagcaacaggatccgtgggtaaaagcacactaccacaaggcttctggaccaccaatagtgatgaggttgtaggttcctaatcgatcgctgaatagagaccctacgcccactgatttcgtcttt

SEQ ID NO: 55604 - DNA, 178 bp, Glycine max
  Clone ID: PAT_MRT3847_21220C.1
ccttctgaggtttgaatagggtgggccaagttgttgttttttcgttaggaaaggctttttccactatccattgcgcactctggggcttttgggtccccttgtggctgctggctagcttaagctatgctccctctgtttcggccacaacttgaaattttcagggaaatgaagtgaacac

SEQ ID NO: 55605 - DNA, 363 bp, Glycine max
  Clone ID: PAT_MRT3847_21221C.1
cggttgcttttgcaagcaaagacccttgacattggggaggttggccaaaatgctttttgttcataccctcgttaatgatactctgaatcagtttaaaaaacgtataattgaaggttatcatgccacacaagagctcacaacagacgatgctccgttctgtgatttgacagcatagactgccacacacgaaccactgccacagctcttattaatgcagcgagggctgtgggggagcatcttattgctgctaatcctatcgagctagctgttggaaatatctgagaggcgtgtttggaaattaataagggaagaggatctaccctttgaacaactgctattgatagattggggggctcaaccccc

SEQ ID NO: 55606 - DNA, 263 bp, Glycine max
  Clone ID: PAT_MRT3847_21222C.1
gcttcggcttgttgggcgagaacggtgccgggaaaacgacgacaatatccattgtaactggactgatcacgcccacgtccggtaccgccactgtcgtgggacacgacatccgtacagatatcggacaagtccacctcaacatcggaatctgcccacaattctccgtgctttgggacggtttgaccgtggaggagcacttgttgttctacgccagactcaaaggaattccaagaagcaccgagaaatcacacgtggaccactgt

SEQ ID NO: 55607 - DNA, 2096 bp, Glycine max
  Clone ID: PAT_MRT3847_21223C.1
gatggttgccaagtgaaccaagggctcgaggcgagaggtacttgctcacagatatatttttttttttgtctccatcattttctcgagagctttcagtttctgtggttcatctttcttcttcttaatctttccccccctctctgtaacatcccgcttctctgaatccctttctgctaatcatctgtctttcaagctaagattttctggggtacttactcacagatatattttttttttttgtctccatcattttctcgagagctttcagtttgtgtggttcatctttcttcttctccttccctcccccctctgtaacaccccgcttctctgaatccctttctgttaatcatctgtctttcaagctaagattttcgggtttgtctattaattcaccaagaagcaaacttagaaggatttttcgaaagccaggtgttttcagaaacgagatccaggttttattgtcgaatttcgctagtcaaattaattttcataattatttttttctttgaaaccagccaagagggttatttttgatccctcaaagctaatttctctctctctttttttatttccgggactgaagaggttgtctatttgaaatctccttcatcctttcctttcttgtagaaaactttttaaatttttttgtcagtgggtgttttaattaaccacctgttcttcaagttttagaaagacgcaggttgaattaattagtatcatggcagctttgatggatttttacagcagcagcccagagtttcaacttcactcagatccattcaggggagaactaatggaagttcttgaaccttttatgaaaagtccttctcccaactatttcccttcctccccctccctccctaatctttactcaaacgggttatccagcaacacccaaagcttaattggcttcgggcaagcgcaacccacatctcttgtgggcctgaaccacctaaccccatctcagatctctcagatccaagcccaaatccagatccaggcccagcagcatcagaatcgcagcaacaccctgagcttccttgggccgaagcccatccccatgaagcacgcgggcatgcctccgaagcccacgaagctttacagaggggtgagacagaggcactggggaaagtgggtggctgagatcagacttcccaagaaccggaccaggctgtggctgggaaccttcgacaccgccgaggaagccgctctggcatacgacaaggccgcgtacaagctccgaggtgacttcgccaggctcaacttcccaaacctgcgacaccagggttcctccgtcggtggtgatttcggggagtacaagcctcttcattccgctgttgacgccaagcttcaggccatttgcgaaggcctggctgagctgcagaaacaggggaagaccgagaagcctccgaggaagtcgcgttccaaactcgcggagaaggttgtttccgacaaggagaacaacaactcttgtaaggtggaagctgcgtcctggtcgtcggaaggttcttcgccgctttcggatctgacgtttgctgacgtgagcgaggctcagtgggaaggtgattcggataattataatctccagaagtacccctcttatgagatcgattgggattctctgtgaagtgtcctattatgtatggtctagtctaggtcttagtgtctcttaggtggctgctactgcaatggagtttttggcaattgcagggctagtactattctgtgtataatctctctaccttgctcacagctggtttttttcttgcttgaccagggagaattagtccgcttaatatgtttttcaagtgcatcgctgtaatctacttcaatttcatcatcttataaaatatattattctactaaaaaaaaaaaaaaaaaactcgaaacaatgtatacactcttcattcttcaacatagcatgcaggtctatacaggaaatacactctgttcaacagctgacattcaatgagctacatgacgtcggtcacttctctacgatgttaatcttttttcccactataacactatgtttggtttggaaaagaaagtggaaggaaagaaagtggaagtaaagaaagtgattcgtgaaggct

SEQ ID NO: 55608 - DNA, 1779 bp, Glycine max
  Clone ID: PAT_MRT3847_21224C.1
ccacgcgtccgccgccacgtgtccggacgcgtgccgagaggtacttgctcacagatatatttttttttttgtctccatcattttctcgagagctttcagtttctgtggttcatctttcttcttcttaatctttccccccctctctgtaacatcccgcttctctgaatccctttctgctaatcatctgtctttcaagctaagattttctggtttgtcttttaattcaccaaaaagcaaacttagaaggatttttcgaaagccaggtgttttcagaaacgagatccaggttttattgtcgaatttcgctagtcatattaatatttcatcattttttttttcctttgaaaccagccaagagggttatttttgatccctcaaagctaatttctcattttcttttccgggactgaagaggttgtctatttgaaatctccttcatcctttcctttcttgttgaaaagtttttgtttttgttttaattaaccagcagttcttcagttttagaaagacgcaggttgaattatcatggcagctatgatggatttttacagcagcagcacagagtttcaatttcactcagatccattcaggggtgaactaatggaagttcttgaaccttttatgaaaagtcctttctcaaccccttctccttcaaattcttgttttctttctacctcttactctccttcccccaacaactactctccctccctatactcaaacgggttatcatccatacccaacaccacccaaaacttaattggtttcgggcaagggcagcccacatctcttgtgggcctgaaccacctaaccccatctcagatctctcagatccaggcccaaatccagatccagaatcacagcaacacgctgagcttcctagggccgaagcccatccctatgaagcacgtgggcatgcctccgaagcccacgaagctatacagaggggttcgacagaggcactgggggaagtgggtggctgagattagactcccgaagaaccggaccaggctatggctgggaaccttcgacaccgccgaggaagccgctctggcgtacgacaaggccgcgtacaagctccgaggtgacttcgccaggctcaacttccccaacctccgacaccagggttcctccgtcggtggtgacttcggggagtataagcctcttcattccgccgttgacgccaagcttcaggccatttgcgagggcctggctgagctgcagaaacaggggaagaccgagaagcctccgaggaaaacgcgatccaaactcgcttctccgccagagaacgacaacaacaacgacaacaactcttgtaaggtcgaagctgcttcctcctcttctgaaggttcttcgccgctttcggttctgactttcgctgacgtcagcgagccgcagtgggaaggtgattcggataattttaatctccagaagtacccctcttatgagatcgactgggattctctgtgaagccgtgttttcttagtgtcctatgttgttatgtaagggtattaatcttcattatgtatggtctagtctaggtcttagtgtcttctcaggtggctgctactgcaatggagtttttggcaattgcagagccagtcttagttaattactagtattctgtgtataatctctctctaccttgggtcatagctggtttttttcttgcttgaccagggagaattagtccacttaatatgtttctcaagtgcatcgctgtaatctactacttttaattataaaaatatggatttattattgtacaaaaaaaacacc

SEQ ID NO: 55609 - DNA, 382 bp, Glycine max
  Clone ID: PAT_MRT3847_21225C.1
gtaataaaaccccttatcatacattattcccatgacttagccagtggtttctaataacaaattaaaaccaaacaaattagcacaatgtaagaaaaattcattctacttagaatgaagagtgcatggttcccggtactaagtggaaaaccaccatcgaagagggtcaaagacatccaaaattaccttcaaaactactgggttacatctcaaggaaccacttgaaaagcctatggttggcattagagacaaattttagcaacacatcttttgccattcaccaaggaaatgccttcagactcgtgggtttgtttcttgaaattactactttagcatcagcagtcaattgagacaatctaaaagcaacaaattatctctgaatgat

SEQ ID NO: 55610 - DNA, 1384 bp, Glycine max
  Clone ID: PAT_MRT3847_21226C.1
tgccggttgtcgcctacgcctccgcgtccgtgtgtgtccaactcagtagtcaacactaggcactctctattcccattcattgcagaagaagatggaggctcacccctacgtcccacgcgatttgcacttacccggctacgctccctgcttcctttccatgtccaacattctttccgtcttcgcctcctcctcattgctcatcgtcactctcgtctggatcttctctggacgctttaagaaaaccaaagttgatagagtgctgatgtgctggtgggccttcacaggtctcacacacattattcttgagggttattttgttttctctcctgagtttttcaaggataaaactggcttctacctggctgaagtttggaaggaatatagcaaaggggattcaaggtatgcaggaagggatgcaggggtagttactgttgaaggaataacagcggttttggagggtccagctagccttctagcagtatacgctatagctactgggaagtcatatagctacatacttcagtttgccatttctttgggccagctatacggaactgctgtttattatataacagcaatcttggaaggtgataatttttctacaaactcgttttactattatgcatactacattggagcaaatgcctcctggattgtaatacccttgatcattgccatccgctgctggaggaagatctgtgcagcatttcgagttcaaggtggccagacaaaaaagcctaaagttcgttgaaggaaacattttcaggttattggtcttagagatcctgagctaataatgatgttttggggtagttgagataggagagattgttgtaagaattgtgacattgattctcttaaactgcatatctcagggagaaaaaaaaaatcccagtgtcatttgagaaggtgatgtttttaattttaagttttgaataagtattttcctatcattgatttgaaattgaatattgaatgttagctggcagatgctagaatatagacaccagcgcttttgctctttgtagctacacttgttttccttaattttcatttggaaagaaaaaataaatgacctcagtgttgtgttttaggtgggtattttatttgttttctgtcgtatatagatttttaaataaaagaatagtttttttttttaaacactagaaagtatagaaaacattgaatcagatcgcaaagccagcaaatccttgtcttcattcaacaattccaagactctctgaaacctaacatggagcctatattcttgttctgttagaatattcggagaacatcttgtgatgttgtaattgtatctgagaatatttttactttctcattacactattctagttatccttgataaattgtgagcttattaagc

SEQ ID NO: 55611 - DNA, 1045 bp, Glycine max
  Clone ID: PAT_MRT3847_21227C.1
caaagttgatagagtgctgatgtgctggtgggccttcacaggtctcacacacattattcttgagggttattttgttttctctcctgagtttttcaaggataaaactggcttctacctggctgaagtttgtgagtttctttggcattgaacaatgatattgttcaaatttggagtacccttcaaggaatttgcagtttttttagttgatggaagttttttaatgaacaaataacagggaaggaatatagcaaaggggattcaaggtatgcaggaagggatgcaggggtagttactgttgaaggaataacagcggttttggagggtccagctagccttctagcagtgtaagttgaaaataaattaaacaaaggaccaagagaactaatgctatgatgctgctactaatgatttttatttttttgctcagtttgactctgtattgcatgttttatcttctcattttttcacataactgtttgtattaccaatatggatgacagatacgctatagctactgggaagtcatatagctacatacttcagtttgccatttctttgggccagctatacggaactgctgtttattatataacagcaatcttggaaggtgataatttttctacaaactcgttttactattatgcatactacattggagcaaatgcctcctggattgtaatacccttgatcattgccatccgctgctggaggaagatctgtgcagcatttcgagttcaaggtggccagacaaaaaagcctaaagttcgttgaaggaaacattttcaggttattggtcttagagatcctgagctaataatgatgttttggggtagttgagataggagagattgttgtaagaattgtgacattgattctcttaaactgcatatctcagggagaaaaaaaaatcccagtgtcatttgagaaggtgatgtttttaattttaagttttgaataagtattttcctatcattgatttgaaattgaatattgaatgttagctggcagatgctagaatatagacaccagcgcttttgctctttgt

SEQ ID NO: 55612 - DNA, 452 bp, Glycine max
  Clone ID: PAT_MRT3847_21228C.1
cgggtgtttcttcttcttcttcttgttttttatattataggcgaagaccctttatcagagcaagtgctggagcaagcccatgtgagttcagtagcctgaactctccgctggagccacgttccatggggggaagttcctcagtgctgttcttcagaaccaccctcagatgttccatgtggctgttggggaggagctgaagctcttggctgaggatcgtgatgcggcacatgcccgcatggtgcttggttctgcctccgatgaggccttgcttcacagtgtttggtcttcttaaagatgatggcatcacactatcacaggatcaatagaggttactgagtatgtggctgcagttcttacagaaattaaagacttcatttgaggagggtttgaaagatttgccacagctatttgaggaacactcagtctcagacatcagatacttcagtttcaca

SEQ ID NO: 55613 - DNA, 206 bp, Glycine max
  Clone ID: PAT_MRT3847_21229C.1
cccgggccgacgcacgcgtacgactacacccttaccctctgtttttttggctttctacgaaattattttatattgtggctctgtctctgtgacaatggcgaaaaaccgatgcaaagggcttgaaaccggaaaaaccactgcatcgaacaacgacaaagacgaggataaaaaaaggcctgtctgtctttcataccgagctgagatcc

SEQ ID NO: 55614 - DNA, 220 bp, Glycine max
  Clone ID: PAT_MRT3847_2122C.1
ctataacatcctaatttgttaaaaagaagcaactgcctcattcggaacatataaagggtcactctgctctctctcgcggctgctacccttctcttacagataataagaagtcaatattcaactcataaattaaaagtaccagtgatcaaagtcagcaacaattgattaattaaggacccgtagagaaggctacaatggttgttagatctaccttctccaa

SEQ ID NO: 55615 - DNA, 405 bp, Glycine max
  Clone ID: PAT_MRT3847_21230C.1
ggaccaagatcacgatcatattcatattctctagctcccacaaactccttttccatttgccttttggcttatccaaaataaaaaaccaatcgtgggttccgtcaattctcaccccatgtcagaaaagtattgttgcatggtcatgagaatcaacgtcgactgcaattcttgttgcagaaaattaaggaggatcattctaaggatgaaagcgatagagaaccatatgatagagaagcagcagcgcagggtatttgtgtttggcagatttgaaccaggggatgttgcaataaagataaagaaaaagatgaaccgaagagttgagatccttgaagttcaagaaatggagggtgaagctcaaaatgaaggagaatagaaactagatagaagagagaagagagaatcatg

SEQ ID NO: 55616 - DNA, 2436 bp, Glycine max
  Clone ID: PAT_MRT3847_21231C.1
ccagaaaaaacaaaattataactgcttacatgtcacatattacatgtttacaaaaattaaaaacatatttttacctttttttaattcccaataattctactcaagttacaattaagaaaggggggtctctaactatatgaataaaaattaaaactgggatttgcggggctaaccccttgttaaaaccaactcctccttgaaaaactgaagtatctgatgtctgaaactgagggttcctaaaatagctggggcaaatctttcaaaccctcctcaaatgaagtctttaatttctgtaaaaactgcaaccacatacacagtaacctttattgatcctgggatagggggaggccatcatctttaaaaaaaccaaacactgtaatggggattatcacagaacaagtaaaatattttttcataaggacattctttgtcactatgtaaaatctctttcttcattgctttcttcggacaccaaccaccattaattagaggttatgcaccctcaacaaaaacaaagtgggggcaggcgacctatctttattttccatggtaaatatctgccctgtgtggaatttcattctcgacacttaaaagctaaaaccaaaacttacagtgaataactttgtactatttaaaatatctataatctatcaacttaaacaaagttcaagcactagaactttacattatatatagagtaaagatgtgccatatatacaatataaacataacccaacacttcaaagctaaaaccaaaactcactatatatacaaggagaattcgctcgacaacttaagaatttatttggcaactagtgcctttatactactcagtcatccttaagcttatatacattgtcaatgtaatcttctgtctcccacaggaaagatccaaaagcaacagcttccaagactagtctcttcaagctagaaaatgaagtcaaaataacatcatcattctcaaccgaacccgattccttgttgttaaaaagagcacaactataactcccaaccaaattcacagcctccttagacctcaatctggcacatctctgcaatgatccgggatgaaagctcataacataacattttaagtcctcaatttcctcttccggccttattaacccttgccctaagcccacgcgtccacccaagtgtccgaagatggcgtcttagaatacataggttgacttatcacactcagtatgaccaaggtgaagatcatgactagttaacgttgcttttcgttcaatgtggttactcaatgattctgacttcaaaaagtaaccttataatatggaggcaacataaactcgggcaagtaagaattgtctaacttgggttgttgcccaacactcagttacactagattttgctctcaagccagttacagtagttatgtgttcccttatcatatccaaaacttccaagctatgaatagactctagttcccagtccttagaaggcaatatctctagcctgccattataaagcaaactagaaagctttgcaacaatagggaccatgctcgcaagaaacccctctcaaacatcagcaagtagctacagctttctacagcaatttgaaattgaaattcgtttatttcgcgcaatagcaccgtggctcaacaagacctcaaaggcacctagactcacatgggcttgcagcagcatgtgctctgataaaggtgctccgccaatggaataactaacgggaatacgacaataagatgaagaaccagaagcagcacaagaaccaccaccaagatcaggtcctgagaagaatctgaagttgggtttgtgagatgttgaagggaggggaaggagagtagggtgaggttagtggaagatgcagttttccataaaaccaaaagaaacgaaaaagcgggaaaatgagtgatttgttggttgatgacaagatgaggggggagagatttcggaggcagaaccaagcaccatgcgggcatgtgccgcatcacgatcctcagccaagagcttcagctcctccccaacagccacatggaacatctgagggtggttctgaagaacagcactgaggaacttccccaccatggaacgtggctccagcggagagttcaggctactgaactcacatgggcttgctccagcacttgctctgataaagggtcttcgcctataatataaaaaacaagaagaagaagaagaaacaccaccaccaccaagatcaggccttgtgaagaatctgaagtggggtttgtgcgaaattgatgggagagtgaggagtgttgggtgatggtagcggaagatgcagctttccatcaaacaacaacaaaagagagttaaaccgtgaattgtttgttagatagcaataaggttggagagagcttttgcgagagtgagagaagagtggttggtgttactactgtgtgatgtggtattgtgtccaaagaaagtt

SEQ ID NO: 55617 - DNA, 446 bp, Glycine max
  Clone ID: PAT_MRT3847_21232C.1
ccggcccttcagcccctttttttagcttataaaacccggggttgggtgctttttaaattgggaggttaaaacccccccctaggccccccttttttttcccccctttttttccaaaaaaatttttttaccccgggggggggaaaaccccctttttaggaaccaaaatctcacccttttccaaaggggggggccaaaaaaaaccttttccctttttttcatccccaacaaaaaggaaaaattttcccgctggggtttgggggaaaaaaagaccccccgttttattaaactttgaaggatttttaggaattgggtccggtttctttttaaaaaggaccaattccggaatttttttttttttctttttttacccccagggctcaagcccaacttttaaaaaacccccaaaggttttgggaaaaaaaatttaattaagggggggccccccc

SEQ ID NO: 55618 - DNA, 179 bp, Glycine max
  unsure (1)..(179): unsure at all n locations
  Clone ID: PAT_MRT3847_21233C.1
ggacaagcaaagacggagagcccccccccggngaacggaacgaaagcgaaggagccaccaagagaacacacaangganncagaaaaaaanccaccggagccgngcaggnggacacaacccaaaancgcnnnccggccgcaggcgaagagggccaacgcaagcaccgggacacggacaac

SEQ ID NO: 55619 - DNA, 355 bp, Glycine max
  Clone ID: PAT_MRT3847_21234C.1
ggctgtcggaaagaataagaggatttccaagggaaagaagggtggcaagaagaaggccgatgatccctttgccaagaaagactgttacgatttcaaggcccctttcctcttccatgtcaaaaatattgtacgttccctcatctctcgtacccatggaaccatgatagcatcctaatgactcaaacatcgggtttttgaggtcttattggctgatctccaatgggatgaagaccactccttcagaaagattcgtttgagagctgatgactttcaatggaagaatgttgtgactaacttctggggaatggatgtcacaactgacaagttgaggtctttggtgctacaatggcgtact

SEQ ID NO: 55620 - DNA, 165 bp, Glycine max
  Clone ID: PAT_MRT3847_21235C.1
tttcctccacagtgagacactaaaagggaagaacaagaagaagagagaaagaagaacataaaagacaaaggagccaaatgctggtgcccttttgaactctaaattggaggatcaggtcacgcaatcgaagatctcggacctccatatatacccttcatattcaat

SEQ ID NO: 55621 - DNA, 189 bp, Glycine max
  Clone ID: PAT_MRT3847_21236C.1
aggtagaatacacaaccaactgccatgatccactcgctaaggtaatgaataacaggtctggcattgtcgctagtttgctcaccactggagatgccatcactgatacccaggcgactgttgatgggccatcagccaaggactggagatgtagaagtctgcttcacatatcatcactcctagcaccatgga

SEQ ID NO: 55622 - DNA, 313 bp, Glycine max
  Clone ID: PAT_MRT3847_21237C.1
cttttgggtaggggaaggaataagttcggacagattggagttggtaacaattttgattgttgctctcccatgctagggaactttccccatgatcagaaagctcaaacgatctcatgcgggtggagacacacgattgctgtcactgaacgtgagaattgttatttttggggaagaggaccaattggacaacttgggaatggagaaacccttgaccgcaatgttccaacaattattgaggccttcagtgttgatggaactttccggacaagaccatagaattccttaaaaccttatccattaatcaaggaaaatc

SEQ ID NO: 55623 - DNA, 169 bp, Glycine max
  Clone ID: PAT_MRT3847_21238C.1
gactcggttctacgattaatcatgccaattcaaacttgataatatttcctgatttttaactaatgaatggaaactattaccattattggtatttgttaaaaaaaaaaaaaaaaaaaaaaaaaaaaaaaaaaaaaaaaaaatacatgcaactcaggggccgccggtttta

SEQ ID NO: 55624 - DNA, 377 bp, Glycine max
  Clone ID: PAT_MRT3847_21239C.1
ttggatcctatacagcggacggcccgtccttttttttttttttacgacttacgaaactatggcgaccatgaatgatccaatcgtgcccatatgaaatgataaacatcctcactatgcatcagtacttgaattcaactagctgtaagcctgagaacctgactgattccgcatcaatactttgagtcagcttgcttcaaagtataaagaaatgtcctagggtactcaggggcacatatgtacgcactaaatggatccataaactattctaaattagtgtgatgtatgccaatcgatccgagtgggtagtaacacttaccaaaaagatctgattgagtatcacctgacgttctgatatgaatcaaggaggccaactgctt

SEQ ID NO: 55625 - DNA, 616 bp, Glycine max
  Clone ID: PAT_MRT3847_2123C.1
aactattctttttttttttttttttgcctcaacaaacagaaaggcagtaccaactggagtaagagcccgtatctataggtactaggaatgaggccacagcttccccagatacacgcccccctgacggtggatactttgtccttgcttcataactaaatcgaagaatcaggggcttaagttgcatacttagttcccacccaggatgaaagaacttaaacttcgcatgatggcgcgattcaattaagatccccatgggggcgctacaaaaaccttgtcataggaagaaaccttttattgattgggaaagactaagagagaatggaaggggctaacagctctaacggcctatctcatcctgcaagagcaactggatacgagtcagccgggggatgaatatactcctcacaaacataattgcaagccaattttcgagcgtcgctggcgagcctataagccacactattggccttgttggagactgaaacaaaccttgcttccaagctaaaaggacgccgctacgtccttataaggtccaccacaccatagacagggggattgggcttaacccctttctccaccgtgctcaccacaaagacgctgactgactccacaatta

SEQ ID NO: 55626 - DNA, 437 bp, Glycine max
  Clone ID: PAT_MRT3847_21240C.1
tggggggggggttgtttttatacttgaaacacactaatgtgaacacaatcattggcgctttatttaaaagtgtaacttttacagactccctactgttgcctaggggctctcggcaggcaattttttgaaactattactgtttagaagaatgcggaatcccttgggggttgcggctctagaacttagaatttgctttttaactccaaagctaattgccagtaaatctactggaaaaacgagcacctgtctaaagaaaaacaattttcttacctttcccaaaagctgtgcgaattctttgggtgattggtgaggatcgattgttaactgcacaacaaaatcaaacgctggagggtaaaccacctaaatcactaccccttgtgaactgttcatactactgcttttgctggtggttgtctcacaggctgagcacctttgca

SEQ ID NO: 55627 - DNA, 419 bp, Glycine max
  unsure (1)..(419): unsure at all n locations
  Clone ID: PAT_MRT3847_21241C.1
ttcttttttttttttttttggaggaaccatgaggatcnnnntaatgcctgctaaggaaattgggccaaccaaacctgtttcgtatgggctttgccaccacctttaacactgtgttcttgaaggagttcaaccaggccaatttttaaaggcccttttaccttgggaccacctctaataaaattggggatttactttaccccctcaaccctaacagtcctccaaaaagaggggtctgggggggtttttaaaattcaagcctttggggcctgtttttcctttgccttcgggattcttaagacctttttaacaattctttggcttttaaactaaaaaggctgggttaatcctttcctttgcggcccttccagattaaactcccctttttcccggtggccagccctccggtttttgggtaacct

SEQ ID NO: 55628 - DNA, 742 bp, Glycine max
  Clone ID: PAT_MRT3847_21242C.1
gcttctgccttccaagtgctgacagtaaatgcgtgcaccactaccaccaggctaatcttgaacagagtcatcctttcctttctggggtaacagctcttgggaggcatccatatttagtgttaaggaacccagagccttgtacctgctagacaagtacttgactgttcttagacttctttaactcgttttgagagagtgttttaggttgcccaggttgtcctttgttaatatctccttgtctttgtctacttagctaggatcatagtacataccatactcagcttgtttagtttaatagttactctctggagtcaatagaagatttgcatgtcagaaaagtgtatcacaggaactaatataattttgtgattgttaacatgggctctgtagtcagttctgggatcatattttaatgtgatctttgggaaatgaatgacctagtagctatagtttcctgcaaactgtagaaaccataagtctaggcattggtgtaaggattaagttatatgtaatacagctgcaaaataaaattttctttcatctcagaagggggatagtaaatatatatctatctcttaggatgctgccctttaacatgtcagctggagtcttttgaagagattgtatgcttaaagttttcttttctttcttacactgtagctgtctttagacaccagaagagggcatcagatctcattacagatggctgtgagccaccatgtggttgctgggaattgaactc

SEQ ID NO: 55629 - DNA, 304 bp, Glycine max
  Clone ID: PAT_MRT3847_21243C.1
gctgcactgaccgtaataaaaactacatccttcttctttctatcttgaagttgctaagacaggcatggagcggaggactgtgcacaatatggtcggtttcagggtaccactattgcttaatctaattcttgcaacccttgggttagtgccattcttccaatacagatcttcgtgtgatgctcccacacgtgatggcacgctcattcgaccaaactcaagagtttatgctaataatgcacgaattggttctgacttacatcatacttaatgccctctacaagcactgacactccctatactaatt

SEQ ID NO: 55630 - DNA, 257 bp, Glycine max
  Clone ID: PAT_MRT3847_21244C.1
gatggttctgttcctgcagtacaagtttaaaagaaaaatgaatcaacaagtgttgtatcgtgtagagcagtacaaagcttacaaaattacaataggcgtggcacatacataatattttatttaccactgagaatgtgtttggctcttatttccatttgttggcaacgatgtcatcctaatccacaaccctctgggagtagccccattcattgtcgtaccaagcaatgaccttctccatgatatttcccatgacgatg

SEQ ID NO: 55631 - DNA, 414 bp, Glycine max
  Clone ID: PAT_MRT3847_21245C.1
ggttgtcgccagacaaaatggaaacggttaatttgccaaccaaaacaaacatacaattgctcattgtatcatatctgggcctgaaacattgaaaaacaggtccttcccctctttaacagaaaccatttgcaatgaatatattgaatccaccctttctttttttttttttagaagaaagcagaccccagatatttttcaaaacctttttgattaaccattgaaatatggttaggagccttttcaccaccactttatgaagctggcgagggtatattttaaaactctacagccttggggatctcgggggggggggcacatctgatcaatggcctatttacaccttcaaaaaaagggaggagcttgatctcaggaacgccttttttggaaaccaatctgggctgaggttcctttaca

SEQ ID NO: 55632 - DNA, 255 bp, Glycine max
  Clone ID: PAT_MRT3847_21246C.1
ccccctaatcccctttcatttcactcaccgtcacctgcaaggcgactacacacaaggactccagttaaatgccatacactatgaccctagaacattaaaaatcttccactctctcctgtccaatgatacgataccccaactaatctttatacgtcaaaacattttataatcatctgaagacgacgttattgaatttaagttgttcacaaaagaacggtttcattccaaaaaaaacgatatgctcttttacaaatc

SEQ ID NO: 55633 - DNA, 317 bp, Glycine max
  Clone ID: PAT_MRT3847_21247C.1
aaatcacaaattttattagaggtggactgatgttaattgggctgttattatgtggcttgtgagaactctttctagagcaagggtgaaagttgacgacaatgccataacgatacaacatggtttgtctcactttgtgtttaacagttaaaggtatggacaatgggcagcggctgtactggatccatgcattgcgccctcgtatatgctacaagtgagctattcgatattgtctaactaaatgcagctgactggctctctaagaaacaatcttcttgactgaatcaatgcccagagcgtaactacatgttatatactct

SEQ ID NO: 55634 - DNA, 373 bp, Glycine max
  Clone ID: PAT_MRT3847_21248C.1
actacgcgttcgactaaaaggtgcactgaaaggggacgagggtgagggctatacggaaggaacatctgttggcacatctgaggggtttcctcacgagcatggacacaaaagtggagagagaggcgaaaggagagatggttatggggatggagaaaagacgacatcgattgcgggaaccgctgacaacgaggcttacaacgagctagtgaatggagttgatacaagggttgctacatagtgtgccacggattggaccatggctgagaaaataactcgtggcaaaactaacgaccaatgtaacactagctgacttactatgtttcatatggaggaccatcatgaggtcctgcagaaggtgaggaatattatgagg

SEQ ID NO: 55635 - DNA, 453 bp, Glycine max
  unsure (1)..(453): unsure at all n locations
  Clone ID: PAT_MRT3847_21249C.1
tcaccggttcgtagttctnatttttagaggggctcatagtcctgaagcatggaagcatgtgccaggtggttttctcttgctattaaagatcaagaccagattttgtttcatcagaaacttattttgctgttcaattgtatgtctgagcgaaaccctcagttgcttcttccccacttgatgaaaacatgtgctgatcatggtgtctacttcaagaaggcactctttgtacctggtttatcagtgtatcacaaagttggatcccatgctttaccagcgacagattctgatgttgacctgtcgtggcagcttactctacaaagagtgtgggaaaatctcatgcaagggaacaaagacatggaaatgagtgccagcaattgtgaacacagtgccgtgttttcctcattgccactggttctcaaaggcttagggacacggtgcaacaaaaccattctg

SEQ ID NO: 55636 - DNA, 259 bp, Glycine max
  Clone ID: PAT_MRT3847_2124C.1
cacgcgcacgcacgcttgcgatagctctcgtggcgggtcgcggcaaacccctctgcccagtttatattctttggcacagctcaacctttgtttgtgttgctcatatgataacacagtcctatcacccttgtacgaagatattctcgtggttgcatatgcgtatgtacctggcaagataccaatggatcatattgacttaaagaatttaatatctgatggctaatgtttcccttatgcctgccacagatgagcagcagtc

SEQ ID NO: 55637 - DNA, 2165 bp, Glycine max
  Clone ID: PAT_MRT3847_21250C.1
ctctttgtttcattcacaattcaaacctcaatcgccatgtctgaccaagaacacccccatggccatgtagtggagtgccgaaagtaaaattatagctgaagctttaaattttcatgcccttttttctgtcgattttgcaaaaggagataatgggtcctccaaatcttcgtcagtgactccgtatgaagaagcattggatgccttgtcatctttgatcactaaacgcactcgtgtcggtgatgtcaatatggaggaacgattcaacgtgctttataagtacctaaagatgcttgatttggaggaggcgatttcaaatatgaagattatccatgttgctggcaccaaagggaagggatctacatgcaccttcacagaatctatattacgcaactgtggatttcgcactgggcttttcacttctcctcacctaattgatatccgagaaaggtttcgtttagatggtgtggaaatctctgaagagaaatttttagtttatttttggtggtgttatgatagactaaagttgttgcgtggcaatggctctcaagtcaggagacaactgatggagaaaataccgaaatcactcaaagaaaatactgatgacaatgttccaatgcctacattttttcacttccttgctttacttgccttcaagatatttgcagcagagcaggtagatgtttctataatggaggttggattaggtggaaaatatgatgcaacgaatgtggtcccaacacctattgtgtgtggtataacctcccttgggtatgaccacatggagattcttgtcgggtttacctccatttgctggattctactaatagggaatactcttggagaaattgctggtgagaaagctggtatcttcaagcatcggattccagcatttactgtgcctcaacctgatgaagcaatgcatgtactcagagagaaggcttctcagttaaatgtacctcttcaagtggtaaccccattagatgccaaattgctaaatggttcaagactagcgcttggaggtgaacaccaatatataaatgctggtcttgctattgcattatgctctacgtggctgaaaatgaatgggcatcttgaagactcgtacttgaaacatatacaacacactttaccagagaagttcataaaagggttaacaactgcaagtttgcaaggaagggctcagattgttcctgatcagttcatcaatgatgaaataccaaatgaacttgtcttctttttagatggggctcatagtcctgaaagcatggaagcatgtgccaggtggttttctcttgctattaaagatcaagaccagattttgtttcatcagaaacttgataattctaacttctcaaaccaagtagtgaagatgcacaatggtgaaactgtacagaagaaatccacacagattttgctgttcaattgtatgtctgagcgaaaccctcagttgcttcttccccacttgatgaaaacatgtgctgatcatggtgtctacttcaagaaggcactctttgtacctggtttatcagtgtatcacaaagttggatcccatgctttaccagcgacagattctgatgttgacctgtcgtggcagcttactctacaaagagtgtgggaaaatctcatgcaagggaacaaagaaggcaagagtaataattctgctcctgaagaattaaacatggaaatgagtgccagcaattgtgaacacagtgccgtgttttcctcattgccactggttctcaaatggcttagggacacggtgcaacaaaaccagtcaactcgttttcaggatctgactgcaaaatttgtctggttgatgcatcaggtccttgttactggttctatacatcttattggtgacatgttgaaattagtcaagaagtgattcgttgggctacttgaaagattggctttcattcagattttttaagtaccactatttgagtccatgaaagtgctgttacacttggttcaaaagctgttgacagaaggttatcaatataataactacattcttgattgtagacattgatgcatccattacattggtttaaatcagcatcactctggctacttcgtgggtctttcaactttcatttcactgtaattgaaaataaaggtggattaagggacatgaataaagaataacatctatcaattttctt

SEQ ID NO: 55638 - DNA, 1919 bp, Glycine max
  Clone ID: PAT_MRT3847_21251C.1
aaaagtaacaaaagcagaacaaatgtgaataagcaaaacagaagcagactaatcttacatattgatggcaaacttcacatttagggtgtgtcaattccttaaaacaggtttttagatcctcttcctccttccgagatctagcacaatcatcctgatgacatcaagaatgttactcaatacttcttcaacagccacagttatgaacatattgactccgtatgaagaagcattggatgccttgtcatctctgatcactaaacgcactcgtgtcggtgatgtcaatatggaggaacgattcaacgtgctttataagtacctaaagatgcttgatttggaggaggcgatttcaaatatgaagattatccatgttgctggcaccaaagggaagggatctacatgcaccttcacagaatctatattacgcaactgtggatttcgcactgggcttttcacttctcctcacctaattgatatccgagaaaggtttcgtttagatggtgtggaaatctctgaagagaaatttttagtatacttttggtggtgttatgatagactaaaggaaaaaactgatgacaatattccaatgcctacatattttcgtttccttgctttacttgcctttaagatatttgcagcagagcaggtagatgtttctataatggaggtaggattaggtggaaaatatgatgcaacaaatgtggttcaggcacctattgtatgtggaataacttctcttgggtatgaccacatggagattcttgggaatactctgggagaaattgctggtgagaaggctggtatcttcaagaatcggattccagcttttacagtgcctcaacctgatgaagcaatgcatgtacttgaagagaaggcttctcaattaaatgtacctcttcaagtggtaaccccattagatgccaaattgctaaatggttcaagactagcgcttggaggtgaacaccaatatataaatgctggtcttgctattgcattatgcactttaccagagaagttcataaaagggttaacaactgcaagtttgcaaggaagggctcagattgttcctgatcagttcatcaatgatgaaataccaaatgaacttgtcttctttttagatggggctcatagtcctgaaagcatggaagcatgtgccaggtggttttctcttgctattaaagatcaagaccagattttgtttcatcagaaacttgataattctaacttctcaaaccaaattttgctgttcaattgtatgtctgagcgaaaccctcagttgcttcttccccacttgatgaaaacatgtgctgatcatggtgtctacttcaagaaggcactctttgtacctggtttatcagtgtatcacaaagttggatcccatgctttaccagcgacagattctgatgttgacctgtcgtggcagcttactctacaaagagtgtgggaaaatctcatgcaagggaacaaaggtattgtttgatcacatacaaattatatcagtgccgtgttttcctcattgccactggttctcaaatggcttagggacacggtgcaacaaaaccagtcaactcgttttcaggtccttgttactggttctatacatcttattggtgacatgttgaaattagtcaagaagtgattcgttgggctacttgaaagattggctttcattcagattttttaagtaccactatttgagtccatgaaagtgctgttacacttggttcaaaagctgttgacagaaggttatcaatataataactacattcttgattgtagacattgatgcatccattacattggtttaaatcagcatcactctggctacttcgtgggtctttcaactttcatttcactgtaattgaaaataaaggtggattaagggacatgaataaagaataacatctatcaattttcttagc

SEQ ID NO: 55639 - DNA, 1879 bp, Glycine max
  Clone ID: PAT_MRT3847_21252C.1
atggctcaaggtatttcctttcatctcacgtataatgggtcctccaaatcttcgtcagtgactccgtatgaagaagcattggatgccttgtcatctctgatcactaaacgcactcgtgtcggtgatgtcaatatggaggaacgattcaacgtgctttataagtacctaaaggaggcgatttcaaatatgaagattatccatgttgctggcaccaaagggaagggatctacatgcaccttcacagaatctatattacgcaactgtggatttcgcactgggcttttcacttctcctcacctaattgatatccgagaaaggtttcgtttagatggtgtggaaatctctgaagagaaatttttagtttatttttggtggtgttatgatagactaaaggaaaatactgatgacaatgttccaatgcctacattttttcacttccttgctttacttgccttcaagatatttgcagcagagcaggtagatgtttctataatggaggttggattaggtggaaaatatgatgcaacgaatgtgttaatattggaacaagctgatgatgttttgatttttcaggtcccaacacctattgtgtgtggtataacctcccttgggtatgaccacatggagattcttgggaatactcttggagaaattgctggtgagaaagctggtatcttcaagcatcggattccagcatttactgtgcctcaacctgatgaagcaatgcatgtactcagagagaaggcttctcagttaaatgtaacgcttggaggtgaacaccaatatataaatgctggtcttgctattgcattatgctctacgtggctgaaaatgaatgggcatcttgaagactctgactcatctgcctgtatgaagcaacacactttaccagagaagttcataaaagggttaacaactgcaagtttgcaaggaagggctcagattgttcctgatcagttcatcaatgatgaaataccaaatgaacttgtcttctttttagatggggctcatagtcctgaaagcatggaagcatgtgccaggtggttttctcttgctattaaagatcaagaccagattttgtttcatcagaaacttgataattctaacttctcaaaccaagtagtgaagatgcacaatggtgaaactgtacagaagaaatccacacagattttgctgttcaattgtatgtctgagcgaaaccctcagttgcttcttccccacttgatgaaaacatgtgctgatcatggtgtctacttcaagaaggcactctttgtacctggtttatcagtgtatcacaaagttggatcccatgctttaccagcgacagattctgatgttgacctgtcgtggcagcttactctacaaagagtgtgggaaaatctcatgcaagggaacaaagaaggcaagagtaataattctgctcctgaagaattaaacatggaaatgagtgccagcaattgtgaacacagtgccgtgttttcctcattgccactggttctcaaatggcttagggacacggtgcaacaaaaccagtcaactcgttttcaggtacttttaattcatggttaccctggagaattgtgaatgttgaaattagtcaagaagtgattcgttgggctacttgaaagattggctttcattcagattttttaagtaccactatttgagtccatgaaagtgctgttacacttggttcaaaagctgttgacagaaggttatcaatataataactacattcttgattgtagacattgatgcatccattacattggtttaaatcagcatcactctggctacttcgtgggtctttcaactttcatttcactgtaattgaaaataaaggtggattaagggacatgaataaagaataacatctatc

SEQ ID NO: 55640 - DNA, 205 bp, Glycine max
  Clone ID: PAT_MRT3847_21253C.1
gactgctaccaaacctgacactggcattgagattgctgttaaaagacttaatcaatatggcatccagggtcacagggagtggttggctgaagtcaactatcttggacagctttctcatcctcatctattgagatagattgggttttgccttgaagatgaacatcgccttgtcatctacgaatttatgccacatggaagctgggaa

SEQ ID NO: 55641 - DNA, 333 bp, Glycine max
  Clone ID: PAT_MRT3847_21254C.1
tcctgaattcccttatcgacccacgcttccaaccaatcctcaatacacgattcacctacattttttaatcatccaaactaaacttccccaacaaagatcttttcacacctaatctgtcatactaacaaattaaccacaccccatatctcacctatgaactatctatcaccatacatcatttaaaacctatttactactagataaactaattacactatataactaaatataattaaaaccactcaatcttataacattctacattatacaataccatttcattaatacatcaacaaaacttactctattaatcttacacataatccaaccaca

SEQ ID NO: 55642 - DNA, 255 bp, Glycine max
  Clone ID: PAT_MRT3847_21255C.1
caagagtttgtggttggtctggcaatgaaagcttgccatgttcttcaattctttttgcgcctgagttttgtgctatctgtgtggctcttaattatacctttcataacattctggatatggcgattagcttttgtaaggagtttaggtgaagcccagaggttattcttaagccatttatcgacagcagttattctgactgattgcctccatggtttcctactttctgcaagtattgtcttcattttccttggggcc

SEQ ID NO: 55643 - DNA, 267 bp, Glycine max
  Clone ID: PAT_MRT3847_21256C.1
aattcggctcgaggtttcttcccatggtagaaagcatcatgagtgaatttatcttttttttagccttgtgtcaccacctcgttttatatccacaacacatacggggtgaggctctcacatcacttagagttactactggctgatgcttcccccatttgagcgtcttatcttctttgaataccccaaccattccatcatatttttcgtcaccattttttcaaatatcaaactctctttttccctcacactccaacactttttaccttt

SEQ ID NO: 55644 - DNA, 324 bp, Glycine max
  unsure (1)..(324): unsure at all n locations
  Clone ID: PAT_MRT3847_21257C.1
tgggttttggagatgattgttgggggggnttgagagtnannttaaattaaactttnnanacttctacacaaaatcanaattgtctcanaagaatcaanaacttatcgaanatcctatatctcacctcttanagggaacgaaagaccttgatctccctactaaatactccctttcctttattactcaatgnatanctagcttctggaaacaacaccagncctactggaagaatccaccacataatgncatcccantattcatgggannaattataagagnnattnnaaaaccnattttctggaaaaaaagaaatcaaacanatac

SEQ ID NO: 55645 - DNA, 1133 bp, Glycine max
  unsure (1)..(1133): unsure at all n locations
  Clone ID: PAT_MRT3847_21258C.1
cccacgtcgtccgccaaactcgaatctctgctattttatccctcctttgatgattatcatccctttcctatctctatgtttatggggacgaaaggtgagacgggaggcactgctacttggtaattaaggttgttgacagaagatagagagcacagatgatgatatgcatattatataatatgtagcagggaactcatgatcaattgtgcatctcactcctttgtgctctctatacttctgtcatcaccttcagcctccatttctcactattccccctctacaccaactgttagctagtgtagtatatacttcgtttctatctactggaactataattcatatataaattactttaataagcctgttcatatataataatttgatgttcaccctgggtatttattacctagctagctagttttctcttctaattgcagattttaccattataccatacaaggtttttaaaaaactgctgggaatgcaatttcggccgcaaggtcatatggagtgtcagctactgcatcgcgattacaattggatccacaatttgttatcagtttaaaaccttcaaaccatattctcctataaatattaatttgcttgtataaatggtgatggctattaacctttgtattttgcagtcagacgtgaactaccgctgtggctgttgaatactacgaatctgtttgttgatggtaggaggaggttagaatgagaaactggtcaagggtttaacttttgtgcaagtgcaattcattccgtaatatccctcttgttcaaaagcttgtatttaatttgctacggcctctctgacataataagagagggctgttctttttcctattaattttctttactatctataagattgattaaatatttgagcaatattagatatgtattactttcataattcatttgtgcttcgctatcccaagaagaatgtactgtaacttgcttcttggaagaaggaccacatgcnattggaagttgtggcagggggattgtgaagaaatatatggngtccaaatccaaactgaccatgacatattgtaggacatatatatatatacttaattgctcagtattctttcaagtcaatacccacactcagtcttgntcactgacta

SEQ ID NO: 55646 - DNA, 370 bp, Glycine max
  Clone ID: PAT_MRT3847_21259C.1
gaaccttttatttgtcactaggcgatcactctgttcttcattacataggtttttattcttagtgaacgactagtgcttgtctctatattatccttgttatagtaaaaagtttttatttttttatacacacacattattcaatccccaattttagtgcgtttcttgcagtttcactcataatagcttattgcctcttgcagattgtcccctcgaccctcgagaaggtgtagtcaaattgcatcccctttctcatcacgttggaaaatcccattggttgtgttggaaaatgacaataagggaggagttccacagggtggcacctctaggaagtgactctatgtgtggcactcttggtgtaacaccacacctg

SEQ ID NO: 55647 - DNA, 795 bp, Glycine max
  unsure (1)..(795): unsure at all n locations
  Clone ID: PAT_MRT3847_2125C.1
aggttctgggccggaattcccgggtcgacccacgcgtccgcattaaccaaccaatcaaaatcacccttaggatacactattgttcagtcgacactgattcgctaagaagaagcagaagcagaagaactgcacattccagtgcagcagatcgaaacttttcttcccttccctttcaccatggccgaatttctggatctcgaatcccaagacggcgtgcgaatgccgtggaacgtgatccctggcacgaagcaggacgcccaaaacgccgtcgtccccgtctccgccgtctacactcccataaagcacttcacctcgatgccgctcctcaactactcccctctccggtgccgcacttgccgctccgtcctcaaccccttctgcatcgtcgacttcgccgccaagatctggatctgccccttctgcttccagcgcaaccacttcccccctcactacgcatccatctccgacgactccctccccgccgagctcttccctcagtacaccaccgtcgaatacaactccgacgccgtgggccccaccaataccccctccgtgcccccagtcttcctcttcgtcgtcgacacgtgcgtcatcgaagaggagatcgggttcctgcgctcggcgttagcccaggccgtggagcttttgcctgagaactcgctcgttggactcattaccttcgggatgtttgctcatgttcacgaattagggttcggtggcgtggccgagacttacgtnttaagggatctaaggatggtaccagggacagttgctcgagcanatgagtttttttgc

SEQ ID NO: 55648 - DNA, 511 bp, Glycine max
  Clone ID: PAT_MRT3847_21260C.1
tcgcccacgcgtcccacgcgtccgcccacgcgtattcttctctgctattttatccctcctttgatgattatcatccctttcgtatctctatgtttagggggaggtaacagtgcatggggtgtagaagaataggggaaaagatgagaaggaggcactgctacttggtaattaaggttgttgacagaagatagagagcacagatgatgatatgcatattatataatatatagcagggaactcatgatgaattgtgcatcttactcctttgtgctctctatacttctgtcatcaccttcagcctccatttctcactattccccctctacaccaactgttagctagtgtagtatatacttcgtttctatctactggaactataattcatatataaattactttaataagcctgttcatatataataatttgatgttcaccctgggtatttattacctagctagctagttttctcttctaattgcagattttaccattataccatacaaggttttt

SEQ ID NO: 55649 - DNA, 1982 bp, Glycine max
  Clone ID: PAT_MRT3847_21261C.1
cggctgcgagaagacgacagaagggggacaactgacaaggaggcagttccttctacaaacaaaatagtatatggggcggtagatagataggctacaagtaaacgaagcaagataatttcttcctacttaacaaaaagatagtaagagccatacggtatcttatcccataggtcaccatgatccttccattagaagttgcaataacgtgatagaaatggctttgagatacactttcttttatggttagctatatattctgaacccgatcccccctcaccagacttttaaatcacataattcttttttttatttcttggtggaaaacagattgtgcatctaattccaaattcacccataaaaatacttccttttgctcaccagccatatgtgtatgatggaaggagatgagaatattcaagcatcaacaaagggaaaaaatgtggaaagcttcaacagcttggaggcaccaaggaagaaaagcaagaagatagaaaacaagaggaggtttagtgatgaacagatgaagatcactagaatgcatatttgagtcagagtcaaagctaggtcgaaagcagcagctgctcggaggcaccaaggaagaaaagcaagcctcgccaaaacaagaggaggttccaaaacagaaagataagatcactatcaagcatattagagcaagagtccagacaactcaaagatgaatatgacaatttagcatcaaggtttgagtccctaaagaaagagaaggactctttgcaattagagttgcagaagctaagtgatttggtggtgacatctcaagatggtggaagggaagacaaggatggcaaagaaaacagcatagaagatggtggctcaggcagtggatacagcagttggaagcctgaagcaaaaaaaccaaggttttcaaatgatgagggtttggaggagagaataggtgtgtactcagatgaccaaaatgagaatagcatcataaggggtgttgagaaatctgaggacaaaggacaccaacttctcagaatggatgatcatgatcatgcagatatgccattggcatcacttgaaaaatggtatagtggtgtggaccctagtggcatcttggaccagtcatgtagcagttctcaatggctagatttctggacttgaaaaaaacaagcgagccacactttgtgctgcatctgcatgtgtgatgttttgtttcctccgagagaaggaacaaaagattggttgattggttggctcttgtgctgccagcaggtccaaaacattccagcctagccaagaaactcgaaggaagttttgtaggcttgatttgataggcgagagaattaagatagcctcactcaattcaattgtgtagagatttggaaaaaaacaaataatgtgcaatgtctctgtctgttcatgcttgcatgcctttttcctttcccaaccctttgttggtgttctttcttcttcttttttttcttttcccacttcaaggggttagttaatctagaacctctttatatttcttaaaggggtctctcttttatcactttagcttattcccatattaacaagtttgatccttatagcacgaccgagacacacaaaaataaaacttaatgaacggtgtgaatgagatattgctcgcttttatcactttagcttattcccatattaacaagtttgatccttatagcacgaccgagacccacaaaaataaaacttatgaacggtgtgaatgagatattgctcgacttcatgaagcagtgaagatgttaatttcaagttcttagcttctcttatgggccaattctgtgaatggaaagaatgtagcatattttcctacttggatcaattttgtttaataggacagaatttcagtatatggaaatatgtcccataataaactgcgaatactagatcacgcaacgcaacattttaagccctaagaactaaatttgaaggataatagcaagtcctgaaagggaattctttcc

SEQ ID NO: 55650 - DNA, 322 bp, Glycine max
  Clone ID: PAT_MRT3847_21262C.1
acgcggcatgagagccagcttaaaaatttatttatcagctaaaatgaataaatgtgctccagagagcttccactgaagaataagcgcatgccacattcgatcctgataaaacgctatggccatagacctctgaaaaaaaattgaggtaaaaggctaatgcttgaaaaaaaaaaaccgagttagagtggtgtgcgatattgaaggtcggaaagaggataggtgctgttctttggaggaaaccctttatgatgaccggggaaagcgcgcctaaaaagcgcttgggacaatgatcactactaattgagtgaatcaccaaagaggg

SEQ ID NO: 55651 - DNA, 143 bp, Glycine max
  Clone ID: PAT_MRT3847_21263C.1
cttactcctacttcttagtgacttcccatcatctattcgaagctccaaattgtgatggctctaaaggcattgaggacgccatcagacaaatactatctcgaatgattataaatcgaccgttgtacacaaggctccgtcttata

SEQ ID NO: 55652 - DNA, 477 bp, Glycine max
  Clone ID: PAT_MRT3847_21264C.1
ggctcgagcttcacttacttgtccacaatatctaatgtattttcgtaacaaaccaagcccaacagaaacttcttcactcttagggtctcatggcatcatttcagaacgtagccagctttgagccatggatgctgatgccacctgtcaccgattcatggctagcacagttattccctacgaacgccgatgccctaaccagggctctgcagaagactatctacggcgctgctctgactcaggacaaccacctgactccgtatatgcaccaaaccaccatcaccgccggctgccccaccgtgtccagcctctccaggtccgaccagagaatcagcgccgcgccgacgagcagcgcctacgtcctctgggaagatctccaagatgaactcgcgcgcctcgaagcgctcgcatgactacgttcatcaccagccacaggtggtgcccgcctctgttaactctgggcctgacaccaggcgttct

SEQ ID NO: 55653 - DNA, 169 bp, Glycine max
  Clone ID: PAT_MRT3847_21265C.1
ctcccactctttgattgggaattttctcattttctccttttttccttttttttgttttcttccgagagcaaggatggtttttttcacccttggtcaaggtttatggtaagttgggatttggctcaaggcttgtaaaacggctggacatgatatatgtccggacgcgtgg

SEQ ID NO: 55654 - DNA, 372 bp, Glycine max
  Clone ID: PAT_MRT3847_21266C.1
ctgatgttaaaaacccatttttagtagtgataccctttattattagtcaaattgtattaaaagttacaaaattataaatcaattttattaaacaagaagtgtgatttacaattattttataatttttaataaatgttagttaataataaaataattaaaaaatatgtataaaagaatacatttctaacatttatctttaaaacatcatgaacatattttactaaaagcatactaaaacattttacaagtaccaaaaataaatattttcaatttaatagggagtgaatagaagaccttccagaagcacgtgcccattccaatgtcctcttgtatcattgaagagaaatgaaataggcttctatttatttcctc

SEQ ID NO: 55655 - DNA, 638 bp, Glycine max
  Clone ID: PAT_MRT3847_21267C.1
accaacaacaaacaaccttctgcaaacaaacacccttcaacactcgtacactgcgcccaacagtacccggagtactagattaccagcttctttcttgcggtgtttcttcttcaatttcttcattattcattgtttttttactttctactctctttctctcgctctgcttcagtgagtgtactatatagataagataacagacgggggttgggtaattgtgttgtctccgatgatgggtaagcctaaccctaaccctgccccggaagaagaaaagagtctccgggacgagctgctgggtcccatcctgctcggagagcgcgtgataaaactggctcaggaggcggagtcgccgaaggtggactgcacggagctggcgcgtaaggtgcaggtggtctgcgataacctccgctccgtggtgcgcgtggtgtctggaacccagtgcgtcaacgagcgcccaatccgccgcatcgtcggcgaggtcgtcgaaaaacatagagcgcacgttagccctcatccgcaagtgcaagaagcacggtggcgtcctccgccaggtcttctccatgaccaccaccgccgactgcccctaagtccggaaacttctagaattttgacaaggagacgtggtgtggctactcacc

SEQ ID NO: 55656 - DNA, 477 bp, Glycine max
  Clone ID: PAT_MRT3847_21268C.1
ggtgaggtgtttttacaaaataaaacattatgccataaaaaataaaatcgattcacaaatttgatatttcagcacaaaaatagcttctcttcattaaccctactacttatatccaccagaaacctaaccaacagtaatttcgaggacatctgggcgaggaaaaactaaaaactatgaaactaataatcacctatgggctaggggaacacctgaattaccctttgaaagcattataagcagaaccaaatatatcagtgtacggaaaagggacccgaccatagaaaaaaaaaaaaatctctttagaacctttgtcacaatcacgagcgataacctttctcagcccctggcaccagttccctgcctttccaatttgtgggagaagaacttgggggcgaacatgttgtcctcgaaataatccttgtaaggggggtcctttggaacaagcctgcgaaacttgtcgaattgttgatgaggttc

SEQ ID NO: 55657 - DNA, 440 bp, Glycine max
  Clone ID: PAT_MRT3847_21269C.1
atattgctgggtcgacttgcgttctagtcggcggccgccctcttgttttttaattggttgttacctttttttgggtacattttttttttgttacatttaagcatttaatgaattttgaggaaactaatacctgaaaaattttataacttattctagatctataaccaggttagttatcatgttgactacctaccaaacctaattattttttacatgaaggactatatggggaaaagtttaaaaaacacatgattatgcgttggacatgaaaaaaaaaccatcacaaatttaacggatatgagatcttagaaatcgactttacatggaagagatgcgcctaaaatttaactgatactaaaattcatcttatatttattaactatttttcataatattgggaagaagaaaaatttaaattttacaaaaactagaaatcgcgt

SEQ ID NO: 55658 - DNA, 346 bp, Glycine max
  Clone ID: PAT_MRT3847_2126C.1
ctcgagccgcagaaaatgaaaggcttaaagtggagatatcatgcctctctcagcaagtagaacaaaaagaaatgttaagaaatgacttggagcttatgaagaaatcacttgaggaatccgaggctcggttacaaactcaaacagtggaaagaaatgagctggtgagtgaaattgctttgttgaagaaggaagcagaaaggtcacttgatgagctaaataggatgaagaatctcaaggatgaaaaagagatggcaggtagagtgttgcagtcagagttagaagcacttagagctcaatacaatgacttgaaaagttctcttattgaggatgaggctgagaaagaaaa

SEQ ID NO: 55659 - DNA, 493 bp, Glycine max
  Clone ID: PAT_MRT3847_21270C.1
atcctaggttgtcaaactctagatgtaaacttgtgtagcttccgtagactcaactcatagaattggcttgtaaactctttgtaaagttgtaagagtttacctaatgtgaaaaacaatattaaaaaacttgttaatgacatatgctcaacaagatattaacaccacaataatttaacatttaaacttgataataaagaaaaataacaagctaaaatgataaagtcaggtagtacattagtactaaataagatcaaactacgtaaatgaccgaatcatatataaattaataaatacataagttactaaagtgaaaacatttaaataagaaactaatttcttcaaatccattgaagccttggtaaaattcttttattgtgtggtcaatgggtggcaaaaaatacattggaatccaaatttgcttcttgattcgagagtttatgtgagtttacacgagtttacccagaaaaatctgatggagttaactcgttttatc

SEQ ID NO: 55660 - DNA, 357 bp, Glycine max
  unsure (1)..(357): unsure at all n locations
  Clone ID: PAT_MRT3847_21271C.1
cccggcgggggggcggcgcctggncctctctgtgttccccttgcgcgccatcctgtgattctcacttgcccccttcccttggccgggcncccgctgggactttacggcgctggttgctatagggggttaccatgcctttgctcgcattctctcccgactcaggactggtggggaccctgtttcggtttcttctggtattgaaggatggtgagccttactccgttgtcgtgctgcccctgttgctggattctttgcctgtgttggggctggagctgttcgctcgcgtggtggagctctctcaggctccgaccttcctgcttgtgtttttccccccttgcccctgggtgtggggtcctt

SEQ ID NO: 55661 - DNA, 244 bp, Glycine max
  unsure (1)..(244): unsure at all n locations
  Clone ID: PAT_MRT3847_21272C.1
aacactttctcatcttccctttcccagtttcacnncctacctccatggaaggntctgtcaacgaacgtacttcattttgggaagattggatatggatgcaatcatnacanganaagangcnnganncntnctccctgcngcnacgngatctactcangcngncnctgtnatancgaggcngcgagcttgtagacnaancccttngatcgccangagcncgatcgccaagatgttaaacaagnta

SEQ ID NO: 55662 - DNA, 551 bp, Glycine max
  Clone ID: PAT_MRT3847_21273C.1
ctcaaaccggcgaaaagagtgaccatacggcaacattatgagggtatatgaaacaaccagcctgctggtagaaagcttgaatgctagctgggcgattaacacatggcttacgtgggggagcacggaggcaagacatgtgatcaatgtgtcaaaaataatgcctgtgcttcagggagatgtgcacagggaacattcgatcgtgagaagcctgagcgaaagagaaacttgttaaccacatggtcttgccttttacgtttgagctttacgttcacttgcatctatgtcagaggtaaaactatcagctgatgtagttctagataagtgttcatatctttagtgcgattttttggaaattcaattccaaaagctccagaaaaagaagctgctgttaggaataataactaagggggcggccgtcgactagcgtgttcggggaccgatctttgatgagacggctgatgcttgtgaagtctcgtgattcgcgacaatggtcttttcataagacctgccggctgcgtggcacttactttgccctgggtggaaaatgaatg

SEQ ID NO: 55663 - DNA, 244 bp, Glycine max
  Clone ID: PAT_MRT3847_21274C.1
cccacgcgtccgatctaatctgctgcctgggtcttcttcagcttctgatgctcctaaagctgacgttgctagcaagaaccttcgatcgctgctatgtcatgcagaatctctgattcactaacttcttaaatgtgcacgatgtgcaacttttaagagtgtttcttggcgaattacaatcactatgtacatctactgcattcgctgaaaatgaagttcaagatagcagatgtgatgagtcattatc

SEQ ID NO: 55664 - DNA, 154 bp, Glycine max
  unsure (1)..(154): unsure at all n locations
  Clone ID: PAT_MRT3847_21275C.1
ttgcacgagcgaggtaggcgggngaaaaacaaaacatccttaacaagactctcactgttcaaaccacaacccgacaggccccaagcccaaaccgcgtgcgacttcgtcaaggaaaacacccaggacacggagggaagccccccagaccatttac

SEQ ID NO: 55665 - DNA, 748 bp, Glycine max
  unsure (1)..(748): unsure at all n locations
  Clone ID: PAT_MRT3847_21276C.1
gtctcaaattaaaatgacaaacatacaacaacatatttaaacagacacgaaaattattcgttatgatgtccgtgatgacgtgaggatgcacatggtcgttcccatcttcgtgctgctctatcaggatttcttctgccccgatgtctctctgcttcaacttggtcagcctcaacagaaaattggtgacgtaaatcaacacctaataagtcattcatatcatatattgctaagggtacattccattgagtacctaatggagcactaggtgttggaattggaatatcatgttgttgtgaaggagtcatagtaggccatgaaaaattaggatgtgtttccgcaacaccaccaaacgaatgttcgcttgcagaagtattagtttgatgaccttcaaaaggatactgatacatttgtgtcagatactgagaaaatgttgatggtgtataatacattccatggccacgctttttaatctgtgggtagaaatatgatttcacttcaacagcctcccttcatctacctatgccttgagtttcaacacttgacgggagaatatgaaactcttgtgccgcnnnttgatgctttgttgctagaccatgtgacacaaggtcagtgattctctcttgctcttcgggataaatgattattttatccacatacggcacatgatcatcaactgtccatttattcttcccttnnngagacaccatgtactgnnannnnctctgcacttcacctcatgtcgtttcat

SEQ ID NO: 55666 - DNA, 403 bp, Glycine max
  Clone ID: PAT_MRT3847_21277C.1
ggctccgaacctttgggctgatttatgtgcttgtttatctgcttgtttatctgcttgcatggccctcagaagatgatagaagggggtagttaagggaacgacaacttctaacccctcgagtagttaaatatctctctctcgctctctgaaaacctctagcccgtagagaaaactcgaactacgctgcggcaagtgcacgctgatgactattcctcgcgcgatactcaacgcaattattctatctatgtcgtcactactgcttaagatcgtagtgcccgggtctagagcattgatcctttctagcctaaattcgacgagacaatcgttactacgaacgatcccaacgagttcggactatccgtcttaatcggaccgcactctggcggtattaaacacacggcta

SEQ ID NO: 55667 - DNA, 205 bp, Glycine max
  unsure (1)..(205): unsure at all n locations
  Clone ID: PAT_MRT3847_21278C.1
nctnntncatagtncgcaggcgtangtcagctcggtattcggctcnagcgctnacctcngntgcngngatgattgnntnnntgactanagnttctcctgtnttctcagctgtggnntnangctnnaggtnttatactgcagagtatatnggtcgnacggcgtntcncnctgctngcaggcgntcnacntggccncgctcntgncn

SEQ ID NO: 55668 - DNA, 490 bp, Glycine max
  Clone ID: PAT_MRT3847_21279C.1
gtaatgctcggaattcagctgcaggcaggtaagacagttttggaatttcaagctatggagcacaacgctagcgttgtcctggcttatgctcacttacgagaccggactgcgcataagtttgttgatgagctatttataaagagacgagatccattcccctcttactctgcttccttcgtagattgaaagataatatacctgcatggccaccaagcggatgctaagagaactcacggacctctggaaagaccccttaacctattgcagatccggttccgtatcggaacatatgaaccattgggcagcaactaaaatggatcccccatatagcccttgtggagtgggtgtatgtctagctagctattaatatacctccacatgatccatgcaagccacccaaggtattgacctaatgatgcccaagacaatgactactattctgaacttgattacatatacttgacgaatattgaacctcattgtgtctata

SEQ ID NO: 55669 - DNA, 177 bp, Glycine max
  Clone ID: PAT_MRT3847_2127C.1
gaactacatgagagtgcacttacgtagtgtgtgggagacaaagagagatggctaagtggtgcatgttggtgttggttcgtgctctagctctggctgtggccacgagttccatagatgcacccgatgatgttggtctcaaggactacgatgacattcatcagctatttctggagttgg

SEQ ID NO: 55670 - DNA, 518 bp, Glycine max
  Clone ID: PAT_MRT3847_21280C.1
tacggctgcgagaagacagaagggaatcagaaaaaatatgttgaaagagatgaaagaaaatagtgaaagattgattgaaagagatgattggaatgaatgaatatgtttcatgccaaggtcacatatttataatttcttgatgactcaagtcaaaacttgtaactcttggcagttcctttaaaactaattacttaaaaagttatgacttttgaaagaacctttagaaacaagtcacttgaagaattgtggcttttggaaatgaatatgggtaatcgattacatgtttatggtaatcgattacagctttgtaaatcagtttgaaatacaatgctggctactggtaatcgactaccagagagtaaaactctttggtaaaagattttgtgaaaatttcatgtgctacccaatgttttgaaaaacctttttaatacttatcttgattgattcttgtcttgattcttgaatcttgatcttgattattcttgaatattgattcttgaaacttgatttttgaaaac

SEQ ID NO: 55671 - DNA, 427 bp, Glycine max
  Clone ID: PAT_MRT3847_21281C.1
ctcactgtcaattaatctcatgcatatatgtgattaaatttcgaacaataatatatattggcatcatcagcattcatttaggctcctttccaaaatgtaattagttttagagaagccctaaagtagtcgtgtttaaagtgagggatttgttttagaaagaaaaattagacatgtgtcaatctttaatgagaaaatcatgaaaatatattttaattatttgatttattttgcacatgcatgtttatattttttctagtctagtatctcatatatatttttttatccaaattaatcatattcaagtcgaataaaatcattatttgattaaatcgaaataacttcacacatcacatgattcatgtgtttggtgtgacgtatatattgaatataaataattgattttcccacttcccatgttggggattgt

SEQ ID NO: 55672 - DNA, 332 bp, Glycine max
  Clone ID: PAT_MRT3847_21282C.1
ctcctaagctcctcgcatattatctctctctctctaaaatcacaaattacaaaattccttccattttctctctaaaaccgtcatgacctccattgcgcctcttgtcctccctatctccaacccccaaaccaccgcgggaacctccagtgcaggcggcggtgccatcgaggttccaacgaacaacctggccttcggcgatcatcaccctccgcggttctctcttggatcctcttcggggccccaacaatgccgtcgccaagtgacgcgcctcctctgcgaagaagcgtgtggttattacggataaggctcgcgtcggtgttcaagaacgacgt

SEQ ID NO: 55673 - DNA, 421 bp, Glycine max
  Clone ID: PAT_MRT3847_21283C.1
gaggcgaattataaatgccctaattttattgaagggggcccatcatgttttttttatgcttctcataacaaactccattcactcactttttgaaccccaaccaaccaaccacattattctgtttttgaaaaggaaaggggaagggtttcgaaatgatttccttaacaccacaatccccttaaccaccaccccggaaagaaaagaagagaaaaaaagggccaaacccccccccaaagaaataaccccaattcagagtttaaagcccggggtcaacgtcttttaaaaaagttgaccccatttggcaataaccacgggcttggaggtcctgcccgagctggatcccacctttttgatgtccttgacaacgtttaatcctttgatgacctgtccgaacacaacatgctttccggtgagccacttt

SEQ ID NO: 55674 - DNA, 498 bp, Glycine max
  Clone ID: PAT_MRT3847_21284C.1
ggctcgagcttgaatcacaacaacaatccatacttcaacacataccagcatggctgaccaatttatcctcggacgacccatcggcgaaggtgccccgggcgagcacggcgccggcaccggactctctggcggacacggcatcgcgtctgccgcgaacacccagtcgggcaagtacgccgaggaggagcgatcgggcttcaacgccggtctgggcggagagcacgcctcgggcggcatcccgcacggccactctggctcggcccaccccatcgccgacaagttcacctcgggctcgcactcgcacaccgacggctccggtctcactggcagctcgggcggaaagctcgacaacagcctcgacaactacggtggccaggccggatctggctcgcacggatcgcacagcggcgcccttggagccggcgcggctggtctcggtgctggtgcgctcggcgccggcgcggcgtctggtcaccgcggacaggaggccgtgagcgg

SEQ ID NO: 55675 - DNA, 238 bp, Glycine max
  Clone ID: PAT_MRT3847_21285C.1
ttctttgggttttgtaatattaaaaaagggcaagtaaaacagcacaataacgatgtcttccacacatttagccaacctatgaacctcctttcccaaaaactcttagaaacactacacatgatgccagaatatacctatgccgaagttatacctcaaaacgtctagatagactagcatatccccccaattcacttatacacttatctttaagcgcacctcccacaatataacgacgcag

SEQ ID NO: 55676 - DNA, 1102 bp, Glycine max
  unsure (1)..(1102): unsure at all n locations
  Clone ID: PAT_MRT3847_21286C.1
tagactttcttcttcctttgtgattgttccaaatccaattatggcatttggactcaggacaaagagctttgggttcatagaaggagaggctcatgagtttgtgggtgcacttcaatggtggaaccagattgatgactcagatcaatggcagagaggcacttactatgccctttgtgccgcttatacgttggtctcctttgttgccctggtgcaactggtacgaattcaaaggagggtacctgagtatgggtggacaacgcagaaggttttccatttgatgaattttgttgtcaatggattgagggctgtcctttacggtattgacagaagtgtttttcggtttatacagaaatgtttttgcaattagaccaaaggcactagagcaggtgctaatggaggttcccggtcttctgtttttttctacttatgcattacttgtcttgttctgggctgagatatatcaccaggccagaagtgaaccggcacagaaacctaggccttcttattcttgcttcagggctgttatttacttgatacaggtctgccctttgatttacatgagtgtaagcagaactgcagctggtttgggagctgcaaaactcttccttgcagttatatcattctttgctgctcttggatttttattgtatggtggaaggttggtttttcttgttgagacgctttcccattgaatccagaggccgtcaaaagaaactttacgaggttgggtctgttacaagtatttgttgcacttgtttcctgataagatgtgctttgcttgcattttctgcatttgatgagaatgcagatcttgatgtcttggaccatcccattcttaacctagtgtactatttgttggtagagattgttccatcagcgctggtgctcttcatattgcgtaagctgcccccgaggcgagtttctgatcagtaccaccccattagatgagttgtgcattttaaatcctctctgaagccagcattctgttcctttttttttccttttcaatagatcttcttcatcagtctgagttggtgcataactgttctgtatatccataatttcatnnnnncaatnngtgccgtnnnttctctaaaataca

SEQ ID NO: 55677 - DNA, 784 bp, Glycine max
  Clone ID: PAT_MRT3847_21287C.1
tgcttgattcaggaatcatgaccaagataaagcaggcttctatgattctggtcaagatgtatatgaaaagagtgacaatggagcttggatctgctcggaactcagacaggtctagtcaagaatcccttctgcttcagggcatgcattttgcatatagagctcatcagtttgctggtggtctggatgcagaaactttgtgtgcttttgaagagataaggcaacatgtaccaggacacttggcaggttctcgagaacttttggctggcatagcatcatcatgagaggcctttaatatgttatactttcttttccttatgtccaatgttcaacaatattaaccattcggaagaaataagaaggaacatgaagagattctgaaaatagtacattacatatatagtggttgagcaagtcaagtggttagtctgctattgttcaatggttacaaactagcagcttccctcatcttgctctgtggataaaatcttcacagtcgttgagcttaaatagttttttcccccaagctagacccgtctactttctaattatgtaacaagaacaagaagctttgcatgtataggtgcatataattaacttctacttagaattgagttgctgtaataaactacaaattttacagtcaaaaaaaaaaaaaaaagggcggccgcccttttttttttttaattggattttaatcgcatgatttttgttggatgggattcaaactatttttcccttctgatatgaacgttgctttaagcattatgttatttgcgttattttc

SEQ ID NO: 55678 - DNA, 253 bp, Glycine max
  Clone ID: PAT_MRT3847_21288C.1
accgaattccaattcgacccacgcgtacgcgcgtttgcaatccttcgccgtcatgtgatcccatgagaacgaatagtatgtcctgctaaggacggggtatcacactttttcctgtgcccgcatgcccatctaaacactgtcttgactagagcagccacatcgacgaatccaaccatctaagtgctattcaagtctaaacacacacacttgaacttattaacttatcacatagaccactcctataccctatcgc

SEQ ID NO: 55679 - DNA, 901 bp, Glycine max
  Clone ID: PAT_MRT3847_21289C.1
gtaaaccttgcctttctgataagaactggagttgttgaaattagcctgcataaatagatatcatacttaattacacgaactgagttgtgagagcttgggtcatagttatgcatatacagattatctatgttagagaattgaaagtgaaatttccaatttgcagttataaaacctgattggatgaataataaatatgccatgtctgcagataaagcaggcttctatgactctggtcaagatgtatatgaaaagagtgacaatggagcttggatcagctcggaactcagacagacagtctagccaagaatcccttcttctccagggcatgcattttgcatatagagctcatcagtttgctggtggtctagatgcagaaactttgtgtgcttttgaagagataaggcaacatgtaccagcacacttggcaggttctcgggaacttttggctggcatagcatcatcatgagaggcctttgatatattatactttcttttccttatgtccaacgttgaacaacattaacatttggaagaaataagaaggaacatgaagatattctgaaaagagtacattaaatatagtggttgagcaagttaagtggctaggctgctactgttcaatggtttaaaactagcagcttccctcatcttgctctgtggataaaatctttactcatcgagcttaaatatttttttccccccaagttagacccctctactttctaattatgtaacaacaagaagaagctttgcatgtataggtgcatataattaacttctactgagtactgagtttctgtaataaactagaatttttacagtgatgttattgaaaagtaaagtccaaagtattcaaagacttgattatcaatgaatttttcataaattcatctcttatatt

SEQ ID NO: 55680 - DNA, 103 bp, Glycine max
  Clone ID: PAT_MRT3847_2128C.1
cgtacgaagcggtaaaatggtggcttcaaaaggacgcattaattgaggtccgaccgttatggactagctagctgtaaatgccgaagcccgaggacatggagaa

SEQ ID NO: 55681 - DNA, 387 bp, Glycine max
  Clone ID: PAT_MRT3847_21290C.1
ggctcgagctgctggctttggcagcacaggatttctactaggattccatatggtgaagacatgctcggcgcactactgtgacggccactgcctgattacaaccgcgtctatggtaactctcgaaggtaatactgctgactaaggagggaccggaatctatcccagaggatgcagagccctgattaacactgctgaatactgactaatatgtgatgtcagatgcatgcgggaaaacttctgcattccatatgactacgtctaggacaatgactacgttgatgccatcgtgaacacctgcgacactaagagcgtatcttactcatgacaatgccaacatcgctattggctcggatgacaggtggatactgtcgatcccgttatagtgga

SEQ ID NO: 55682 - DNA, 384 bp, Glycine max
  Clone ID: PAT_MRT3847_21291C.1
acgagtattggcattataaatatttactagctgtacatgcgatgttgatactagtgggttgagttactccaaaaccaactcaccaaaattccgggtttgtgggacctggcttacaccctgtcaattactagtattagttcgagtttagtaaagtcaaatgaaaacaagtattgaaagagtgtctcaaaaaaaaaaaaaaaaaaaaaaaaaaaaaaaaaaaaaaaaaaaaaaaaaaaaaaaaaaaaaaaaaacttttttgttggaaaatttttctttggcctgggaggggctgggggattggaaaccaatgttattaactttcccaaccttgtttatggaccatccaaggtaccacttcctgttacccctagaaacctggacctt

SEQ ID NO: 55683 - DNA, 158 bp, Glycine max
  Clone ID: PAT_MRT3847_21292C.1
atttcttcttatctttcgtattcccttcgcaagtgagagatggagcaaatactgattcatgggactctacacgccaccgtcttcactgttgataggctcaatgctggttgtggtggggcaatttttttagcaagctcaagcataactttgaggagact

SEQ ID NO: 55684 - DNA, 159 bp, Glycine max
  Clone ID: PAT_MRT3847_21293C.1
acacccttccgaaataatttattcaattccaaccttttaaatgacagcgatcaacctaacaatccaaggagggaaatatacaaatcacaccctcccttcatacttctcaaataatatcaaaataaatcgccttctaacatcccacttctcatttattat

SEQ ID NO: 55685 - DNA, 223 bp, Glycine max
  Clone ID: PAT_MRT3847_21294C.1
gaaccgagaacttgaaataacataaacataggagtggacgtgagtaaccatgaggaccattgcaacaaagcgtgaatggacaccatcatttacagaacctaataaagcaacgccgcggacgttatagccacatcactatgctagccagaggatgctcttctgtgacatattgagcaccacggttcacataacagggtttgccgggcacgtaactatcatatac

SEQ ID NO: 55686 - DNA, 533 bp, Glycine max
  Clone ID: PAT_MRT3847_21295C.1
ctctctctggctcgagaaacagtggatcttgaagcttattcaccacctcgagagcttcttcagatattgcctcctaaatcatccattagagggtcagattgtggttcacaaatcggacctaataatccaaagtttgcatcgggaatgcaagctcttttggatctcatttttgcagttgaggggtctgtctcagaagctgcaaaatatcttgggttatccactggggcactgtctcggttaatcctatctgatgattcacttagaaaggaagtaaacgatctgcgggcaacaaagggtatgaagcctctcaagtagaagcactcaactttcattccttatgcagaagaaaattctttgaacctgtatgaggcattttcttcattaaagaattgaggtagacaatgaaaaatactgaagctattgagaagaaagggggcaggttgctgaattttcagattgtagagaactcattctacaaaactcaatgagtatgttgtagaaagctggtgccttaaggtgtactagaggagcat

SEQ ID NO: 55687 - DNA, 440 bp, Glycine max
  Clone ID: PAT_MRT3847_21296C.1
acgcgtactgtaagattcggaattcgggtcgagcactctcccacatatggctttcttatagacctcattcctcctaacatatggtccggtcatcgggaagctaatactatggaccggctcaaacacaatctcaccacctaattggctgatctctacaccgacatccctactgctatagagtgtgaatctgcataaatgcagttcaatacacagaagatggcacagaccatagggaggctggctgaaaaaacaccacacgttggctaaactgacaggggttggctagtaaaaaaaggctcgacatatcagataatggcacctgatgatcttcatgtctgttcacagctatgagcagcgaacgtaactgagataattaccgggccttactctggtgcctataattatatacagcatacactgaaacggatatatgatagtgt

SEQ ID NO: 55688 - DNA, 637 bp, Glycine max
  unsure (1)..(637): unsure at all n locations
  Clone ID: PAT_MRT3847_21297C.1
ccggctcgacccacgcgtccgngcaattttatcaggaacgggttatggtgtggcggaacagagagggattccgggtgttcaatcttatctgactcaatcataccttgatgtcaacaactttgctcttccttttctccaacaaaatggtctcttctttcccctcaataatcaatgcactattcatgttatgtttcttccttagttattgtaaatgctaactctatttctttgggtttagagcacttttagattctcaaaagttttgtttgttgaaatttttaaaaggatctgctgtttgttttgctgcttgatccctcaattgatttttttttcttttcaaatttggtattggatgagtataatgagacaatttgcttatgtgtaagattaagagaatataagtgggttggaagggagcaagatttttcatttgtaagtatttttgtggttcattggatttgaagcaatgacataaatgatggtgggtgagattcagcagcatgtacgcaacagttagtttgtacggtatacaagtgccattttttataatgtaatgttgtacaccttactgaattagaacttggaatgcttcaaagatttttgaaagaccaattgatggaaacaagcatttcttggc

SEQ ID NO: 55689 - DNA, 461 bp, Glycine max
  Clone ID: PAT_MRT3847_21298C.1
ctcatgcgtcatgaattaaagagtagggtcccgcaccttttgccaaccaggggtaaacgagccccgttgacgtgcagagactaacatcgtttcctgcaccttttgtcatcctgacccgtgaagtcaggtgacatgcggggcaaccttatggtcccgcaccttttgtcaaccagaggcaagcgagcacattgacatgcggggaaccatttggtctcatacttttttcacattttgtcatccagaggcggcgggcccgatgacatgcgagggaaccatttggtcccgcatcttttttttcactatccagagacaatcaagtccggagccccgtgaattgattgcccagcgctgttcatccatcctccaccatcaagtccgaagccccatgaattgattgcctagcgctgttcatgcctcctccatcattgagtccggagccccatgaattgattgcctagcgc

SEQ ID NO: 55690 - DNA, 663 bp, Glycine max
  Clone ID: PAT_MRT3847_21299C.1
cagtcctctacaggtttgctatttttcttctttttgcatgtccaaaataaggatgaagtttcagatcatttttcagggcaacatttaaatcatctggtggagtttgttcatttccacccacccagagggcgagactaggatgatttctgagaagcttgactgtgtctcttgcacaaaacaagaaaaggtcatggtccagtggaccatttggatttgatactgggataccccgtccatcaacatccccagtaatccagaactcttgccataccaaaagaccataataatcacaacagcgataaaactcgggcctttcagcgagtccaccaccccagcatcgaatcatgttaaaattcatatccgcatgaaacttgatatctgtttcgtatcgcttctttgaaagtcgcagtagcccatcagacaatatccagttaccccctcgtataaaaattggttctccattgactttgaacaatcttccaccagtagcaacatcaatatggctttcaattttgcggaatccaaagtgatggttccatgaatcagattcaccaaatcctttaacatcaatgctaataacaacattgtacaaagattgcttccccattccattttgccaccataaattcggcttgtagaagaaagctcaggaaatgtatattg

SEQ ID NO: 55691 - DNA, 449 bp, Glycine max
  Clone ID: PAT_MRT3847_2129C.1
cccaatcacgtaatatctccatattccaccaaaaatgaatatcagcatcttctggactctctaactgttatgttccttcaccacctcatacctaccttcatccatcacttatttaatactccataataaaaataaccctcttgaaaatgctgccacatattatatcttgtcagacataacatcatttgatggaataagatcaaccccaactttaaattaaatatgccctctcactgtgatacaatctctcaatgagctctacaaatggattgcaacaatcatctcgtccccatatcgaatccgttttatcgccgaatgccatcctttgagccttaagttcgattcatttccacttataatgctgtctgttggaattcctacctaatggtctcttttggaagatctaccacaaagacccttgctttgttttaaaaaaaatttttgtttta

SEQ ID NO: 55692 - DNA, 205 bp, Glycine max
  Clone ID: PAT_MRT3847_212C.1
acgaccaataattccaattcatatatgaacatccatgccttcttattgctcggaaatggggaattggaattccccggggcaatcccatcacatttgctttggcttcatgataggggctattaggaatcaaatcattcccattccaatctgaacatttttgccttcttattccttggaaatgtcgaattggtatttcccacgggga

SEQ ID NO: 55693 - DNA, 387 bp, Glycine max
  Clone ID: PAT_MRT3847_21300C.1
aaacgatctaaacatgcaaatttttgttaagactttaaccggtaagaccattaccctcgatgtcgagccttctgactccatcgagaatgtcaaggccaagatccaagacaaggaaggtatccctcccgatcaacaaagacttatcttcgctggtaagcaactcgaggatggcagaactctttctgactacaacattcagaaggaatctaccctccacttggtcctcagactgagaggtggtatgcaaatcttcgtcaagaccttgactggcaagactattaccctcgatgttgaaccctctgactccatcgagaacgtcaaggctaagatccaagacaaggaaggtatccctcccgatcaacaaagacttatcttcgctggaaagca

SEQ ID NO: 55694 - DNA, 222 bp, Glycine max
  Clone ID: PAT_MRT3847_21301C.1
tgaattaatgatactatggcatgtttcagtggcagtctgcagttttctttcctttgaaagatgttagtggttggcatgtttgattgggtatgattatggaatttttatttactcaattgatgtatccgaaatatgttgtttttacaggataaaaagtcaatccagttggggcctgaagacaatttatatctcgagggatctgcttttgaacgtgttcgtaaa

SEQ ID NO: 55695 - DNA, 273 bp, Glycine max
  unsure (1)..(273): unsure at all n locations
  Clone ID: PAT_MRT3847_21302C.1
ttcggccaaccgttccncacaaaacttcggatgaagagaggcaagagtcccttattgggaaggtccttgcgttttgggaagaacctaagaaccaaggtaaaaaattgttttggaaagtccaccttcgggggaggacctgtggggaagttagtgaaaaagcggtttaggaaaaattattaccctgtttggggcagaagctttattcctggttccactttacttgtttaaggatgcaaggggtaattttttccctccgtttaattttttgacccc

SEQ ID NO: 55696 - DNA, 1732 bp, Glycine max
  unsure (1)..(1732): unsure at all n locations
  Clone ID: PAT_MRT3847_21303C.1
cgagtttccagtataggagagcaggataaaatatcacgggatcgaattgaattaagatatttgaaaagcaaagctaagaagaaatgagaaaataaaaaggatagcatatcatatgatatcagaagtgagtgtctcataatggaagcataacagcgaagtgatccaaagaagaagaaggatgcaggagaactactcataccaatcgtatccagattccggcgagtcctcaccacgatccagagagatagacttcgacaaccctcctccatgggacgaccaaaactacaaagccaagttcatgtgcagctacggcggcaagatcctccctcgctcccacgacaaccagctctcctacgtcgccggcgagaccaaaattctcgccgtcgaccgctccatcaagttctccgccatgctcgccaaactctccgccctctgcgacgccccagacaacaacaacctcaccttcaagtaccagcttcccggcgaagacctcgacgccctcatctccgtcaccaacgacgacgacctcgatcacatgatgcacgaatacgatcgcctctatcgcgcttccgctagaccctcccgcatgcgactattcctctttccctccgatactcttccttcccctccacctgctgcttctgctccacacgattcggttatcaaacctaataacgtcgattttctcttcggtctccagcctcagccaccacctattgatgtcaaattcaatgatccgctgccggagcccgtggcgccgccgccggagcatccgttgcgattcaattttaaccctgcggtctcggatccgagcgcgattcagcgccagttgcagcaactgcaaattgcggagaacgagcaagctgcgcatcggaggaagggtgaggataattaccccgccggtgattactacgttcaaaaagtgcctgagaagttccccccaccgaattttctggcaagctcgccgggttattggcctgaaaaacatgtttccggcgacgtttatcctccggctgtgacggctacgtccggcggaggggaaccgtcggtttatatggttccggcgccggggacgttctatcatgcaccggttatgcggcctccacctccagcaactcagggatactacaccgtgcaacgaatgggttccgataattaccgtgaagcgccggtgtacggcggtgttccgccgccaaaagcggcggttccggcgagtatggcgccagcccagcagccgattaaggctcccgcgtatacggaaggattcggaatggttcggccaggtgggatagtggataatactggtgttccgtacgcgcaggtggcgtacgatagtggaagtgggagacaggtttattatactgcgcccggtggtggtgtaacgcacgctcctccgtaccatggggtttttccgcccgtaaccgctgatatgagactgggaggggtttcgtttggtcaggatgttaaagtcataagcaagcttacccaaggttcagtctgatcattatcgaacaaaaaaataaaaataatagttcagtgtgattatgattatggttatcgctaaatatgttttttttttttgctatcttgttcgtaatcctatttatgtaataggaatactattagcttttagtttttcgcttgctattgttgtacacaatgttgccgatgatggttataacttataccatgttattcctatggttttgtgtggncttcttactgtgctgca

SEQ ID NO: 55697 - DNA, 1426 bp, Glycine max
  unsure (1)..(1426): unsure at all n locations
  Clone ID: PAT_MRT3847_21304C.1
tactctccctcatcctcttttagcactcacacttctctccaacctgtcttgcagtgcttgtatctttctcaaagtctgaaccaatggctctttgggattgtcatcataggatgaaacttcagactcaaggttcttcagatctctgtagttacaagctgcttccctgagtgcatctactttttgttctggccattgaggaaaatgttttagcactgacctttcatccaccaatgaagatagttccccatctagccatttgacaaatgattccacctcagaaacatctgcaaaagaggtggactctacctccttaattaagaaactgatgaactccccttgtctttgaacttctgattttatagctgagagataagttgagcggttttcaatttcctcaatcatgtttctggtgaatgctactgtgggaattccattggaatgtattctgttttccatgttagcatccttttgtgttagggaacgatacaattcgattacttcaggcacacggcgcagagtttttaacccaaccgatgataattttggtggtgttggaggtggtggtggtgctattgcttgctgcactttaagtcctttctcttttttatgtaaaggaagaaggagggtgggagaaggccttggtggcggagctggtgttactattgctgctggtttgtcttttttaggtgttgtgtctttgaaatttggatttgtatgcacattctcatactgtgaactcttttcacctgtgattacctgaactggtggtgctttatgttgttgatgtgcttctgaattgttgttgtcatctatggatttctgtatcttcttccatagaacggatttcctctccatgttgtgtgctttaagtgaaattatctgtgactttaaccgaactacttcttctctgagttcctgattttccttcagtagtaactcattccttgccatgtggacttcaagttttttcttaagagatgtgatgatctcagactcattctcttcctgtagcattgtctccccttccctcgtcggaaagatagctattagatggttaccaatttgatagcttgtttttcttctaaatttggtcttgcttttgaagtanggttggtctgtaagagttaaatatgctagaatgcccctgaagatgcttgcgatggctttatggccctgatgagaacantngtcttgataaggatgctttggaccttttccaccactttaatgcactttgctctagngactcattatgatttcttttggggcgcattttatgggggattggagattacttgggctttgtggcagtgctagtttgtgatagctggccttagagtgccctgtttggtacaacccttaattcttggggcagtttcctctccttcctgcttttgattttggctcntctttgtggggtgagatt

SEQ ID NO: 55698 - DNA, 214 bp, Glycine max
  Clone ID: PAT_MRT3847_21305C.1
cagacgcgttgggcgtatagttgtctggatgagttttaatacgatcaacgtaggccgtactcatggtttatctatttggcgcattctgcttatataagaaataagagattcttttatttaggatttcatgattgcgttagcttgaacttaaattgtgtatctctatgatgctattgtgaataggtgggggaattgcaaatcacagtaatgtgaa

SEQ ID NO: 55699 - DNA, 882 bp, Glycine max
  unsure (1)..(882): unsure at all n locations
  Clone ID: PAT_MRT3847_21306C.1
ccacgcgtccgattttgtctctctccatttcttgtgttgtatatatcatccaatgaagagagatcaaattgcgatgtgttaggagaatagctgtatgagtataaatatgaagacgtagaaagtatggtcttgaatattattttactaaacctcttctcatcaatctatctatctcatgtggacaagcgagtgctccatgttccgcaggctcctctgcacctctcttccccgtctttcaaaaccccaatcttcaagctccttaaccattctcaactcctcactcacccaaaaacaaaaacaaaagcccttatctccccaaaccatcaaatccttctcctcttccaaaatgggggacgcgcgaagacccttattcgtcccaatccccactttggaaaaagcagaacgctccgacctcctccgcgccctagaagcttccatgggctcccctttcagctccgagcctctctctccaaaccctaaccctctaatcatcgtcatcagcggccccagcggcgtcggcaaggacaccctcatcgcgcgcctccgcgactcccgccgcgccctccacttcgttgtcaccggcaccacgcgcccccgccgccccgccgaggtcgacgggaaggactacatcttcgtctccaaggaggagtttctcgggatggtggagcgggaggagctgctgcagtacgcgctggtctacggtgactacgaggctgtgcgtgtggaggcgctcagcgagtttctggtggaggcggggaccgcgcaccggaggacgaggcgcagacggcgatagaggagtcgtgcagagacacggtcctctncagcaggcgaatcctagtcacgagcgctgagtcgagcgcgagcgcgcgacacgtacatagt

SEQ ID NO: 55700 - DNA, 434 bp, Glycine max
  Clone ID: PAT_MRT3847_21307C.1
gggggaaacaaaatggggggcattttttccctaaaaaaaaccccaaacgggaaaggggtctgtttccattttgtagcagagtttcccctctaaacttcactaaatttttttgccaaaaaaaagagaactctttagcttggggggcaagaaactttttgttaccagatggaaaaaggggagaaaacgttttccggaccccctggtgcacctgtgggtacaaccagaattttccgagcgctaccggtgggggtccccattttccattataagaggtgtattaagatcatgcccaaatggggtgacatattctgccggggggaaactgtaacccctttaaaataccccagaacataaaaaggggaaacatatatggagaagcccggggggcccaaagggagggcccacccacattgtttggggggggctttatggcc

SEQ ID NO: 55701 - DNA, 199 bp, Glycine max
  Clone ID: PAT_MRT3847_21308C.1
gcgtccggtagatattacctgcacttggtatttttcttgctgcattcagctgctcattagggggcgggtagagtaaaagacgtatcctccttacacattgttgacaactatgactatcttccacctagactcattcgtgacaaaaattacgatctcttctgatgccttgctaagaattaccaaacttgagaaggaaaga

SEQ ID NO: 55702 - DNA, 1169 bp, Glycine max
  Clone ID: PAT_MRT3847_21309C.1
ggggtggagctcgagccgcttgtgatcatggacgtctcttattcatgcaatgaacaacaagcacccgagatcgttttctttgatttggaaactacagtgcccaaaaagggtggagagcgtttctgggttctggagtttggtgcaattgtggtcacaccccacaaactcaccgagattgagagctacaccacgctgataagacccaaagacctatctgtggtgtcagtgaaatccagcagaagtgatggaataactcgtaaagctgttgaaaatgcaccatcttttgaagatgttgcagacagaatattcagtatcttgaatggaagggtgtgggcggggcataacatccagagatttgactgtgttcgaatcaaagaggcctttgatgatatcaataggccagcaccggttccagttggaatcattgattctcttggggtcctaactgagaagtttggaagaagagctggtaacatgaagatggcaacactggcttcttattttggcctgggccaacaaaaacacaggagcctggatgatgttcgcatgaacctggaggtgcttaagcactgtgcaacggtgttgtttctggaatctagtctaccaaacatgttgcatagcaaatcgcatggatctcccagcgttatgacgcgaagcagaagcaatgggaaatcaccctgcaaggaagagactagcagaaaatctcccccagctacgttaggatatcagaggacagtcccctatgctaggggaagtttgggaaaggtgaccgaaagtgtgaagggattgttgtgtaaagcacaagggcaaccaccacttcaacaactactcaagcattctcattcattactaaggtgaaaaaaggcctcaattggcgattaggaagagaagagaagaaaggcctcacgttttggttttgttgatcgctggcaaattgaaaggaagaagtccatgcacaagatgccaaaatgttttttcatgacccatctccacgtgtttcaagaaaccgagtggcagcccaaattcatttgtgtatatagttcgattatttgatctacatatgctccaaattcatttgtgtataagcatacttcttcaatgaaagatgctaataacacaagcatttgtaagtgaaattaaaataatattaacatcaatattttcacaaa

SEQ ID NO: 55703 - DNA, 2207 bp, Glycine max
  Clone ID: PAT_MRT3847_2130C.1
ccagacgtccgcgcatttgtgttgcaagaactggctgctgctatctactttcaaccgaaccggggagtactttgtttcttttatttcttcctttgaaccgtccggttcgttgcgaaccgaatatcatggcagctctgttaccttgcgcgccgaacatagtctatggtccgttgttggggaaccggagcacgagccacctcccgcaccgacctcactcccatgctttctccggttcgaccaccagacactttcttcgcggttcgcttaccgtcgcccggttcggattcaaacccgatttcttgcccgagccggatgaagctgaaggcgttctcagagaactgttcggccgagcggagggacttctttacacgattgccgatgccgccgtttcttcgtcttcttcttcttcttccgatacggttgcggcttcctatgccgccaaacagagcaacgattggctttccggaattgccaattacatggagaccgttctcaaggtactcaaggatgggctttctgctttgcatgtcccgtatgcttatggttttgcaattatactgctcacagttcttgttaaagctgccacttttccattaaccaaaaaacaggtagaatcttccttagctatgcgaactttgcaaccacaagtaaaggccatccagcagcgttatgctggtgatcaggagagaattcaacttgaaactgctcggttgtataaactagccaacattaatcctctagcaggatgcctgcctacactcgcaacaataccagtgtggattgggctatatcgagccctttcaagtgtggcagatgaggggctccttactgaaggcttcttctggataccttcccttgctggtccaactacagttgcagctcgtcagaatggcagtggtatctcttggctttttcctttcgtggatggtcaccctcccctcggatggtcagatacattggcttacctggtcttgcctgtgttgctggtcgtctctcagtacatctctgtccaaataatgcagtcatcacagcctaatgatcccaacatgaaaagtctcgagccgaatcggctcgagcggctcgagatgattggttactttgctctctcagttccttctggtcttagcctttactggttaacaaataatatattgagcactgcacaacaagtatggcttcaaaagttaggaggtgctaaaaatcctgtgaggcaagtcccagatgatatcatgaagaatgacctaacacaggttcagaagtcaatgtctaaactaaattccacaacagcggaagaagccagactaagtgagaaaacatcagaggggccacaacctggtgaaagatttaagctaataaaagagcaagaggcaagaagaaaacaacaaagagaagaagaagaagaaaaaaggaaagccttggaagcagcagctagagaaactaaagtagacaagacacttgaggaaacagttgaagtggagaatcaaactggaggtgatttagttgttgaaaaatctcggtctttggcttcagatactgatccctccatatctggagtagtaaatggtaatccattaagtaaagacttggagggaaatcagaattctacatctacatctgagacagaaaataatgaaggttctgctcatttcaacaatgttgagataaacgagaaaattttagacaaggaaccaagagaagtattaacaactacaaccaccacaaacaaacaacctcctgcggaagagacaaaggattgactatctaaaagagattgatctgcttggagattgactggcccagttgccatctatatgccatatgggaaacgcaacctccctttcaatttggggtctgcctggttaaagactgtacattgccacagaaatggtggaatgaatgagattcaatgtttctatattggcagagggagtgcttggatttgatggctgattttacagccatatagtgctagtttgtattatactctttttatcaattttcattgacaaagatggatgaattcccattagaacagatgtttcacaataccctttatagtcagcttgtcatctttggtactaaaaaaaaaaaaaactgtaatggttcaacaaatgcaggcctgggtctgtatatcccggagaaaccgtgataggaaaatatccataatgcttttttttctccttaaaatatcgtcacgtaacagaact

SEQ ID NO: 55704 - DNA, 289 bp, Glycine max
  Clone ID: PAT_MRT3847_21310C.1
gggaatctcttactatgtgacggattgttattgaaaactcatgggtgcataaaattttatcatgacctcgtttgggcaaaaaaaaattgattttttcaaatcagagtaatggttttttaacatcatacccgtttattgacacattgctaacacccgatatttatttttgtttgtgtcacaacctttcaccattcataatatctatatgggctctttttgcacgtcctcacaaagggtttaatgggattttggagcgtgaaacacataacacggattgggggttagcctt

SEQ ID NO: 55705 - DNA, 242 bp, Glycine max
  Clone ID: PAT_MRT3847_21311C.1
ggaacaaccacaccacaataaccgcaggagctagagggccacagcagcaggaggaacatcaaccagtggagaagcatgcaaatatagatagggaacgtatcccagaacgcgtagaccatgccaagggcgccagagcaaagggaatacaagaggtcacccatgacatatcacacctgacaagtgcagaaaaacaacgagccccagaagagcagacaccagaaaaagaacaaaccccaacagac

SEQ ID NO: 55706 - DNA, 798 bp, Glycine max
  Clone ID: PAT_MRT3847_21312C.1
ccacgcgtccgaaaaatattaaaagagaaagaaaataatcaatacgacaactttgcaattttggtggtagaccaaggtaggtcaattgccatggacattggtggtgaagtggaagagaccgtgagagagttgaggcaatacttcaaaactggaaaaaccaagagtgtgacatggaggaaaaaccagctcacagctctcttagaccttgttcatgagaatgaagatgctatatttaaggccctccatcaagatcttgggaagcaccctgttgaggcttaccgtgatgaggttggaggggtagaaaaatccgccagcaatgctttgagctgcgttgagaaatggatggcccctaaaaagagtgatatcccttttcttttcttcccagctaaaggagaagtgttgtcagaaccacttggtgtggttctcatattttcttcttggaacttcccaatcatactgacattggatccaataattggggcaatatctgctggaaatgttgtagtcataaaaccttcagagcaatctccagcaagctcttcttttcttgccactaccattcctcgctacttggactctaatgccatcaaggtgattgagggaggaccagatgtctgtgaacaactactgctacaaaaatgggacaaaatattcttcactggaagtccacgtgtggcaagcgtagtcatgtctgctgctgcaaagaatttaactcccgttactctagagttgggtggaaaatgccctgccattcttgattcccttccaaatccttagagttaaagtgggcagtaaaag

SEQ ID NO: 55707 - DNA, 480 bp, Glycine max
  Clone ID: PAT_MRT3847_21313C.1
gataagaattgcacatatagcgaagctcgaaaacacaagcagcatccaaattacaacacataagcataaaagcgaatgcaaaagaaggatttggataaaaagtaggcgtaggagagagtgaaattgaggtgtaactctggaatctaggcctggggctgggactcgaagggaatggaaagctcatcgggctggggctcgggcctgttggaggacctcttgggaacggggagtgcgagaaaggccttggtcttgctgatgggcctggtcttctggagctggacgatgtcgccgacattgaattggttatcgcattgatttgaggcagcaaactcggcggggcccagtgggtctgagtcaccgccgaactgggtttccagagaaggctggagccatggccatggccgttcagaaatggggttgagagctgcacaagccacattttcttatctcccccccttctgtcgtcttctcgcagccgta

SEQ ID NO: 55708 - DNA, 941 bp, Glycine max
  Clone ID: PAT_MRT3847_21314C.1
gaaggtggatcaaaagccatattaaacattttatcaaacatatttaaagggtgcaataagcaatattaaaagcttttacgataacagagttaaacaagattcatttctcaatttcactcattcatttggtttgcaccaaattgtccactctaagaaagtcgcactcgtactttatttctgtatggaattaaacaagaaaatttcctcaatttagcgaatcccggaaattaacaccgagcatcttatatcagaaaaccctcagaaacactaaaacaatgatgaatgaaagaaaaacacgatgatatatgatagcagtcagctagaatgataagaattgcacatacagtgaaggtaaaaaatagagcagtaacaaaatactagcagcatccaaattacaacacataagcacgaaagagaatgcaaaagtaggcgtgagagagtgaaattgaggggtgactctggagtcttctagggctgggactcgaagggaatggaaagttcctcgggctgggcctcgggcctgctggagggccttttgggaacggggagtgcgagaaaggccttggtcttgctgatgggcctggtcttctggagctggacgatgtcgccgactttgaattggttatcggggtcgtgggcctggtacttcttcttcttcctcacgcgcctcttgtactttgggtgaggggccagccgcaccacctccactgccaccgtcttgtcgctggtggagcacaccactctcccctgcattgtcttcatcgcattgatttgaggcaggaaactcggtggggcccagtgggtctgagtcaccgccgaactgtgcttggagagaagggtggtggaatgaccatgtccgttcagaaatggggttgagagctgcacaagccacattttcttatctctatcactgcccccttctgtcgtcttctcgcagccgt

SEQ ID NO: 55709 - DNA, 2018 bp, Glycine max
  Clone ID: PAT_MRT3847_21315C.1
gttcagttgttggctgttccaccgtccggggaaaataaacagacaaaacaaatccagcatacgctgacaaactacaacaattttcattttgttcttgttctttgaattattccgtcgttttctgctacagcgtacgagacgacgcagatttagttcggattgttcgattgcgatggctaggaagatgcttatcgatggtgaagctgaattggctcaaggtggtggagaagaagtgtcgaattttgacttcgacttgtttattattggggctggaagtggtggcgttcgtgccgctagattttcatccaattttggagctaaggtggggatttgtgagcttccatttcatccaattagttcagaaacaattggaggagtcggtggaacgtgtgttattcgtggttgtgttcccaaaaagattttggtctatggagcatcttttggaggtgatcttgaggatgccaggaattatgggtgggagttgagtgagaaagttgacttcaattggaagaagctcttgcaaaagaagacagatgaaataaacagattaaatggactttacaagcggatgttatccaattggggggttaaattatttgaaggcgagggaatagatagttggtccaaatgacagtgaggtgacacaattggatggcactaaattgtcctacacagcaaagcacatattgattgcaactggcagcagggctcaacgtccaaatattccaggacaggagttgggtataacatcagacgaggcactaagtttagaggatcttccaaaacatgctgtggttcttggaggaggttatattgcagttgagtttgcatctatatggcgtggcatgggttccacagttgatctagttttcagaaaggaacttccactgagaggttttgatgatgaaatgagagctgcagtggcaagaaatcttgaaggcaggggaattaatttgcatccaaggaccaatttgacacagttgatcaaaacagaggatggcattaaagttattacagatcatggtgaagagctgattgcggatgctgtactgtttgccactggtagggctcctaattctaagaggctgaatttagaaactgtaggtgttgagcttgacaacactggagcaataaaggtggatgagtattcccgcacaagcatacctagcatatgggctgtgggtgatgtcacaaaccgaatgaatctaactccggtggccttgatggaagcatcgtactttgctaaaactgtatttggtgggcaaacaatcaagccagactacagtaatattccctatgcagtgttcagcattccaccactttctgtagttggtctcagtgaggagcaggcaatagagcaaaccaatggggatctgttggtttttacatcaaccttcaatcctatgaaaaataccatctctgggcgacaagaaaaaactgttatgaagcttgttgttgatgctgagacagataaggttctcggagcctcaatgtgtggacctgatgcacctgaaattatgcagggtattgctgttgcgttgaagtgtggagctaccaaggcacagtttgatagcacggtgggaatacacccatcggctgcagaagaatttgtaaccatgcggtcagtgacaaggcgcgtagctggaactggaagtgtcaaacccaagaccaatttgtaaaatgtttaaaacgaaaatacgatctgcttgatggttgtgtaaagatgcaaatgacttcttttggtgaccttcccattatagtatagatcacaaacacatctgtttttctttcccaataaaatgtttgtttcttttttctttgcgaatttcattttatttaaaattgtttgatttgttgccatatcagtttgattcattggcatataatgtaagaacgagtgattgccgttaattgtggtgcctttagtttcatagaagatatattggagatcgaagaatattttttcttgtgtattatggaacgattggcacatttatttatttatgtgaaggctgaat

SEQ ID NO: 55710 - DNA, 779 bp, Glycine max
  Clone ID: PAT_MRT3847_21316C.1
gggcaattcaccgaaccctcaaaattatgatggggcaacttaaatcagaaaaccctcacaagtcaaaaacactaaaacaataacgaatgaaataaaaagacgattatatatgatagcagtcagctagaatgataagaattgcacatatagcgaagctcgaaaacacaagcagcatccaaattacaacacataagcataaaagcgaatgcaaaagaaggatttggataaaaagtaggcgtaggagagagtgaaattgaggtgtaactctggaatctaggcctggggctgggactcgaagggaatggaaagctcatcgggctggggctcgggcctgttggaggacctcttgggaacggggagtgcgagaaaggccttggtcttgctgatgggcctggtcttctggagctggacgatgtcgccgacattgaattggttatcgggatcgtgggcctggtacttcttcttcttcctcacgcgcctcttgtactttgggtgaggggccagccgcaccacctccactgccaccgtcttgtcgttcgtggagcacaccacttttccctgcatcgtcttcatcgcattgatttgaggcagcaaactcggcggggcccagtgggtctgagtcaccgccgaactgggtttccagagaaggctggagccatggccatggccgttcagaaatggggttgagagctgcacaagccacattttcttatctccccaaagggatcgataactctatctcttccccttctgtcgtcttctcgcagccgaaagaaaaa

SEQ ID NO: 55711 - DNA, 832 bp, Glycine max
  Clone ID: PAT_MRT3847_21317C.1
ttccatctccaccaccacctccgtatgtctacaagtccccaccacctccgccatatgtttatccatccccaccaccaccacctccatatgtttataagtcacctccacctccaccttacgtttattcatctccaccaccacctccttatgtctacaagtccccaccacctccgccatatgtttatccatccccaccaccaccacctccatatgtttataagtcacctccacctccaccatatgtttatgcatctccaccaccacctccatatgtttataaacctccatattattacacatctccaccaccaccctatgtctacaagtcaccaccaccacctccttcgtatgactacaagtccccacccccacctcctccatattattaaaaatctccactgccaccatctctctggcctcctccagcatatgcctataagtaacaatttccttcattaccttcaccacttcctccatatattactacaagacttcacttccacaattcccaccatcacatcctccagcatatgtaacattacgtctacaaatcacccctgccacccgtgtattaggctaggagttaaagctatttgaatttatccattaaataagattcaacattgttgcagtttattagcgagcattcgttaataatatatggtctgcgctatagcaagagccatgcatgttatggatgtgcccatatgttgcactattatatatatatgtatcagagagtgttaattcataattaactttgttttaatttcttttatcacatttcacagtgtcatattttgttattggttggtgttaggtttccatttcc

SEQ ID NO: 55712 - DNA, 276 bp, Glycine max
  Clone ID: PAT_MRT3847_21318C.1
cgaccgactcataccatatgactaacaacaaattttctaacatttctgcatcaataccaatacaattccgttgatagagatttttaaaacagtgtttcgcccatcaaagtcttgtttccaccaccaccaccaccaccacaacaacaacaacatgcttttttcactaggcttggaaaaagtaacttttttcacgatcttatcaacacaacgtttattcattgcctctgcatacttccacctaaaacctatgttttctcctttaccctaaacactttc

SEQ ID NO: 55713 - DNA, 260 bp, Glycine max
  unsure (1)..(260): unsure at all n locations
  Clone ID: PAT_MRT3847_21319C.1
ggangacgaatttgangaagttgcnaatgnctctactaatgangatatggagaatatgntctcggaaacttatgatctaggcatngnnganganttcaatgtcctaganaacgagtttgagcngttggngatgttctctgaagctcnagntcattctgttcaggatgatcctaanactggaaaagggnctcctcngantncttaacaaggatgcnaangctnctcggattaactngacaccaanntcaccgagggaangg

SEQ ID NO: 55714 - DNA, 354 bp, Glycine max
  Clone ID: PAT_MRT3847_2131C.1
atcttctgtattgattgttagacaaaaaataaaaaacaaagggacgggaaaaatatgggaaaaaaccccacaaagggggagagaaaacaaaacagaccaaaaaagataacaaaaccaaagaaacgacaggaagggggggaaacagcaagaacacagcaggacaaggggccaaaaaggccccagaagagcaaacgccggggaacaagcgggggggaaggggggacctgacttgcggggaaaaaaccccggggagagaacgactccgcgggaaaaaatagacccccagtaggattaggggggggccaaaaaaaaacggcccgagctggcaaaaaatgggccggggaaaagacgggg

SEQ ID NO: 55715 - DNA, 552 bp, Glycine max
  Clone ID: PAT_MRT3847_21320C.1
gggaaaggggggaaaaattttttaacccaaagctagggggaaaaaaaaacctttccacaaaaaaaaaaaaaaaaaggggggccagaaaaaaaaaaaaaaaaccaaaaaggaacaaaaaacccccccacaaaaaaaaaagccccaaaagaaaaagggggcaaacccaggggaccacccccatttttcccccaggcaaaacgggtaaggggaaaggccgggcaaaaaaaaggaccaaaccccccgggaaaaaaaaaacccaaaccgggggggggaaggcccccaaaaagggggggggaaaaaaaaaaaacccaaaattttatggggccatttcccatcccaaaaggaaaaagcccattatcccccctaggggggaaaccaccccaaaaaaaagcggccccaccacccgaaaaggggggaaaaaacaaaagcggccggagggaacccccttttagggcccaaattttcacggggtaaacccgggaacccgggggaaaacccggaccaggcgggatccaaaaaagaaccaaaaaagcgcgggggccccccccggga

SEQ ID NO: 55716 - DNA, 283 bp, Glycine max
  unsure (1)..(283): unsure at all n locations
  Clone ID: PAT_MRT3847_21321C.1
gccgccgcttttttttttttttttttttttttnnnggaattttttcaaatccatctgaattcataaaggtgtgcatcaacattgtattattccaactaaactaccacaaattcagtcaccacatatttatccacatgctgaaaacactcttccattaaatactctgtctatttagtccacctaacatcaaactataatatatacactatttccccacttctttcaatattaacatccaatttatcataaacttcacatcacaaaacataaacctgaaacttat

SEQ ID NO: 55717 - DNA, 368 bp, Glycine max
  Clone ID: PAT_MRT3847_21322C.1
cgacccccacgcccgagaaattgttctctttactttctactttgtacactatgatctgagattggttggatgttgggttactgtaatgttcgcacgaataatgttgggacctgaccagactttctttggatctatttaagcatggcactaatatttgcctttcaactcatcacattcatagtagtgcgaaatctatggcagcttatgtcgcagccgatcccataaagatcctgagctgaagataggagatgagctacttaagacagacctgctgacgcacaaatatattatgtattacagatatcgaaatgtgattaacccttttgacaattctcacatttctatgaggggcactgctattcctgtcc

SEQ ID NO: 55718 - DNA, 548 bp, Glycine max
  Clone ID: PAT_MRT3847_21323C.1
gaagtaatccacccacgggtttcttggagttgtgatcaactacgttacttctctcttggttttcttcatcttccaccttcacctggtttacttccttcgataattaactttatcaaaatcaaactttgatgttcttgcttgtcttaattacttctctgtcgtttgacgaatagtattacactattgtctgggaattttgttcctttcctcttttctgaattccgtttctctgaaaagaagtttatcataaacacgttggaatggcaaggaactacttcaaacaagaacatgatcttgagaagagaagagctgaggctgctaggattagggagaaatacccagacaggattccggtaattgtggagaaggccgaatgaagtgacatcccaagtattgacaagaagaagtaccttgtccctgctgacttgactgtaggacagtttgtctacggtgatcgcaataggattagattaagagcagaataggctatctttatatctgtgcacaatgaccttcctcctactgtgagccatcatccttgccttata

SEQ ID NO: 55719 - DNA, 338 bp, Glycine max
  Clone ID: PAT_MRT3847_21324C.1
acataaaaaataaccttaaaaactcggttcaagaatgtggggaaggttattttattattaccgaagaaaccaaacccagggaaagccaattcaaaaatcggtgatgccatttgctaccacttaaccaaatgaagcttttttttcccatcaagataccagttgggtggtttcaacccaaggaaaaggaaaatttgcattttaattccttaacaaaacccctgttgttaatgaggcttaaattgccacccaccctgctttaaccggtgcctttaaccgggggtttaaaccccatgccaaattcaaccaggtacctgtccaaacctggttgttggaaaccc

SEQ ID NO: 55720 - DNA, 406 bp, Glycine max
  Clone ID: PAT_MRT3847_21325C.1
ttttacgcgtccgcccacgcgtccgagcaaatgtaaataaaaaagacagagaattcgttcttccgcctctattggctctcaactttccccagaagggactttctatcttgcttttctctatcaccaattaagtgtcaaattgaattgaaccacacatacccacatgtccattttgcatttcctcttgaattgggtcaaatgcggtctcactttgctgagaacccagtgaaaacccttgcacctttgacgccaaaagctgcagagttgagggagattcaccacaaatcctcacaaccatggaagaagccactgagtttcactctgaagaaaacaaactgcctgtggcgaaacattagaaaaagaaggctcaaaacaccggcccatcttaaaggctcggaagattttt

SEQ ID NO: 55721 - DNA, 1584 bp, Glycine max
  Clone ID: PAT_MRT3847_21326C.1
cgtccccttatgccaagggcctctgggtccgcttgcgcagatgttgcgttttcaccgcccggggagagctcggatattgaaacaaattatggttctaagataagtgttaaggctacagcaggaccagttcttggacctccatggcaacgtccagagaatgggtatattgttacatccccacaaggccaattgtctctctactacgaaccccactgtgtatataatcaaagtttcactgagaaggaaagggcagatattgtgataacaccagtcataaagcagcttttgcccaattttaccttggtttcgggacaagaagatgcagtgaaacttgcaaagctgcttcaagccaagttcattgtgccaatgaaaaatggagacctagatagcaaagggcttcttgcaagcttaattagtggtgaaggaacagtggaatcatttaaggaacttttattaaaagaactaccagatgcaaaggttgtagaacctaccccaggagtaccagtggaaatttcagcaaattaaagctgaagttatttttatcccctttgcccccccacttcttaatttttctttgggggtcaaatggcacaacagtgttttcaggcaaagtatacactctctatgatgcaagacaaacactttttctcacatcatgattacttcttcccctatataatatatgtgtggtagtttataagctatatgtgtgatatatcaaagttgtttgttagtatatctttgaactgcacttctattttatgtatataaaaaagaaacactgagtagtaaaaatctacaaagttgggtatgatatgtcttcttcaaaaaaccttgttctgagagaacaaatccacacacaaaaagatagggacaacttgaatgttaatctaatcaaaatttatttctcaacttagtttaagattatttctatttaaacctcctatctggatactattctttccttaatgggctttgttattttcactggtttttgttgagtttcaaggacattttttaaaaattggggtgtgaacttgacaaaaatagatgtgaggatagaatagtccttccttaacccagataaggttattctttctgaaccttcctgtagggccccttcctcaatcctaaaacaatgcagagttgttattgaccccaacacctttgttattggtccctaccaacattcaaaatatttaaaaatatcctttctcacaatgtccaatgaaagcacacctttggttgcattagtggagatgtgaaaaatattgtgtaacgaaagtgtgattttgttgtacattttttttagcactccacaagtgcaatagaatcgtaattttattatgtgactaggtttgcgaaataaatgcttaataggatcatgattttattgtgtaagcgggaaggcaagttctgtaacataacaggatcgtgattatgttagattgccacaaaataaaaataataaatgaaattatggttttttttgtgtaatttgtacaatgaaattgtgattctattgtgttgacaaatataaaaaaaaataaaaaatcctgtgcccaagggagagttacatgaagg

SEQ ID NO: 55722 - DNA, 447 bp, Glycine max
  Clone ID: PAT_MRT3847_21327C.1
gggatgagggagtatatgagacaggggaaaaaaacgagaaccctccacaatgagaagcgagcgtttagtcatttacagagttgcggagcaattggggattcctttcaccctatagctatactctcagcctaacttgggccccccgggcatacaaaaaagaaagaaaaagctaaacccattatcgttatggggtcttggtatttgagtactggacaggcctcaacctcaattcctggggcgggtgggcaagtggccaatgggcaatgggccaattcacttccccaccatttgagattatgggcagcattttgcgggggaaagaatattaaaacacccataaaaggtgtgcctgcgtccagggcgtgggagagtacataattggacttctgccaccagcgtgtgtgtgggcggaacacaaagtaattgaagatcatcggggcgcggggg

SEQ ID NO: 55723 - DNA, 366 bp, Glycine max
  Clone ID: PAT_MRT3847_21328C.1
caacgtcggacacccatgaggcggatggacaccccactgatctgcattgatctgcctcagattgtacttaaggaatctggcttactagaaagaggatgcatattgattactttggtgctaaatggactgctgcatccaagaaatctgggatagcggctgaagctgcagcataaatattgtgcacatgcttactcaggcgacttcatttttacctaacacaatgcatgaaccaggcatcaaagaccaagataaacctgtgggtgcatccttattccccaaaagaaagcagattagagctgtttcaactgaagacacgattaaacctactgaccaaggtactgcctcacaagttttcacgcctgggcc

SEQ ID NO: 55724 - DNA, 299 bp, Glycine max
  Clone ID: PAT_MRT3847_21329C.1
actactcatgctgtcatcaacggcagattcgctgacctggcagagctacaccattacatggatcgcggtataccaaaggagctagctaatgctaagccacttgttcaagaacctgacccgtcttaattacatacaacagccatgcattcattataatccttaccttgtaacatgtttaacttaatactatatgaacatctgggcaattgcgcactgacaaatagttcacttatctgcacttgaaaatgtgtcaggttatgtcctcaccatcataatggagactactgtgagatgaacta

SEQ ID NO: 55725 - DNA, 189 bp, Glycine max
  unsure (1)..(189): unsure at all n locations
  Clone ID: PAT_MRT3847_2132C.1
agtcgcangcacgcgtacgtaagctcggaattcggctcgagattntnacttcnacaacacnnggtatnagagcgnaganngagntctnangtggaggaaacanagtanatctgaatgctgaggtnnctnctngaacccaaatgaaatagagctacagnttgtnatatntctattgaggaatttctcaag

SEQ ID NO: 55726 - DNA, 236 bp, Glycine max
  unsure (1)..(236): unsure at all n locations
  Clone ID: PAT_MRT3847_21330C.1
tctcgagccgattcggctcgaggttcaatatcctagtacaccgtattcaagaatttaagatatcactatgatgagagcgcggttcccattactgttgctgggagttgttttcctggcatcagtttctgatctcatttgcgattcgaaattggaaaagcagaaccccagacaaacaagagtcactgaagnagcaatatcgagaaagacactaataggaaccaagcaagctacgcacg

SEQ ID NO: 55727 - DNA, 402 bp, Glycine max
  Clone ID: PAT_MRT3847_21331C.1
ctgtttttaccttttgctatctgatatatatatattttatctaccttgctgctgctatattttatgtttgtcaccagtttcacttacggcaacatacacaaatggtccaatgaaaacatcatcatagtcctgaagtggctccaataccttaatcacatcactcatagttggccttgcatttgggtgatgactcaagcatttaaaagccaacatagcaactttcatggctcctttcatgggaaattgcccctctagtctacgatctatgatattgtacacctttttctgatctctcaacaaaggccttgcccattccaccaagctcttgccttcattcgaccgagatttatccactactcgtcttcctgtcagcaattccaacagcaccaccccatagctata

SEQ ID NO: 55728 - DNA, 436 bp, Glycine max
  unsure (1)..(436): unsure at all n locations
  Clone ID: PAT_MRT3847_21332C.1
tggggacactgcgagttcaggtccatgcaaactgtcgcctgagaaggatttacttctctgaccgcctctactctgaagaggaagtccctccagagttcaaattgtaccttccaatgcagattagactttagagatgccctcatttggatgactagttctttttatgtttatcttttattgtaaagtgtatgttatgagtctctctctgtttttttttttttggtaaaatctcaccttgtgcttgtcatcatgcagaaatcatgaaaaaatgggagtttggagttgtagcctggagaaattgatgtgattttatatgcttactacatatagttctactagttgactttattctaaactttgtatctatgttgtgctagattaatattgctcgctccagtaccatttaannannnnnnnnnnnnnnnnnnnnnnnnnn

SEQ ID NO: 55729 - DNA, 284 bp, Glycine max
  Clone ID: PAT_MRT3847_21333C.1
ttaaaaaaacttttttataataaaataccctaccctccttttgggcccaccctgagtaaactttcggagttggatatgtccctcccaatcatcccctttgcttcctttgaataaaccaaacattaggtcccattccacaatttgaaaagactacctcctaattaatccttcataattcacgagaaggatgtacaactccaactccaactccgccataattaatttataaaataaaaaacctgaaactcagactcacttcttgctttctatatcacaattcactc

SEQ ID NO: 55730 - DNA, 189 bp, Glycine max
  Clone ID: PAT_MRT3847_21334C.1
actcattatagatacagacatatagactttcattgagctattgcccactctatagtttgagctgtactaccaacaacatcaccaagaccctcaccgatgccctaatgtccatacgacaacatactagctactacactcaggtcagcaaggcgactttcgccgaaaccaaggccggcttccttttgatcc

SEQ ID NO: 55731 - DNA, 224 bp, Glycine max
  Clone ID: PAT_MRT3847_21335C.1
cttgagccgctggaaccgggattaactatcatgatgcggatgcgtatacttgttcgaagactgcaccgtgaaagaaagagagtggacaacggtttatgcgtacttgtgaaggcactagggtgttctgaactgatcctctccctgagtctggcactgtatgatcatcgtgctccccatattatacttgaagaaacgcttgcatcttgtctgttctatgataactt

SEQ ID NO: 55732 - DNA, 224 bp, Glycine max
  Clone ID: PAT_MRT3847_21336C.1
tgttgatcaatgatgatcggaagtaagataaatggaccaatgtgatacggggctagacctaattacacacgtaagattaattacactgatacgatacaaaactgatcgaggcatgtatcatggcttctactggataataatgtagacaatgaaggaaaaagtgcaatgaagggggccaatgatgattgaagattagataatgggtataatttaatgtgtaacta

SEQ ID NO: 55733 - DNA, 503 bp, Glycine max
  unsure (1)..(503): unsure at all n locations
  Clone ID: PAT_MRT3847_21337C.1
gcttcttcaaaatctaatggtgaaaatttatctactaggaacaaggaaggttagttgtccccaccattattaagtttcagtttgttatgtgtcttcacagacaaatgacaaataacaagaattgttgaagccattgatgtttcctatgggcgtctgacaccataaggtactttttgcaggaaattctggagattcagtgggtaatgtctcttaattcttgtctagttcaactgcttgtgtttgtaattatttcttgaaaaaatatggagatttaatgagacaaggcaggtttcttggatagcttctcatcacctgaggagcctcaatgctgatgtggaggctttttcttatacttgaggcatgaggcattcacctctgttgtatcatgaactcaaccaaaatgacacattttttattctctttttgtgaattgaatgtgcttggatttggttaagacaaagggatangtggtctagagttagtttgaatctctggcatgactt

SEQ ID NO: 55734 - DNA, 311 bp, Glycine max
  Clone ID: PAT_MRT3847_21338C.1
gctgttagactcgcaccggcaccgtcgccgcactagcactagaagatgagtagtgctactaatcaagctatagaacaagatgttgaaactactctacggaaatatgtttcaaaaacaagaaagaaagatgtctgacggtggaaattatgagatcaagtgcaacatttgtgaacttacattcaagttcatgagatcaagtttcagataagtgattatatatatatatatatatatgtatatatatatatatatatatatatatatatgtatatatatatatatatatatatatatatatatatatatatata

SEQ ID NO: 55735 - DNA, 356 bp, Glycine max
  Clone ID: PAT_MRT3847_21339C.1
gcggccttctatgaaggaacaacatgcataggttctgggtgtgatcttggagttctgcgatgatcaaagtctcccaggctgtacaagatctttagaaattgctaggatggaagagaaatccaagattgggaatccggtaaaaataaaagttaaaccacataaccagcatgtgagcgactctccagagctcgcatgttgttgatcatacaggaataagaaattcaagaggtggtggtactaaacaaaacaggctgatgtgccagggcaatgcaagttccatcttacctttcatttggtcacaagaaagcattcgcaaatgcgggtattacacgtagattctctgaactttttgctct

SEQ ID NO: 55736 - DNA, 342 bp, Glycine max
  Clone ID: PAT_MRT3847_2133C.1
ctacaatattcatattttcgacaagaccctcacctacatgaccatgagccttgatgtgaaaggttctggcaacatagacaactgttaggtctatatccatgacaaggaatgaaacctcatggcccagcagcatgtcatttttcaccgaaaagcaactccatgatcaccgaacccttgatgactacaacattcatatggagagtaccctacaactagtcctatgtctctgtggtggcatacaattactcggttggactatcaccaattagactatacacttagaggatgaacgctcagacacaatcgatagtgtcaagggctagatccataacatgtatgata

SEQ ID NO: 55737 - DNA, 271 bp, Glycine max
  Clone ID: PAT_MRT3847_21340C.1
attcccttgtcgaccgactcgtccggcttgtaaagatatataaactactacctcttctcttaatcctctaattcaaacttacatagatggttttcaaactggggctgtgtacaatcttccacataaatctcatttttataataataaataatctcctattcctatcttaaaatctccaaccctatctccacatttacaattcaatatcctactaattcaatattctatcaaaccctttactgatcttctatattctccttatcctactatt

SEQ ID NO: 55738 - DNA, 481 bp, Glycine max
  Clone ID: PAT_MRT3847_21341C.1
ccgcctgaataccgggccgcccacgcgtccgcccacgcgtccggcaccccacattgagtatctagtccgtaccaaccaaattcctcgcgaaaggccccagcagaagtacccatcatggctgttagttcttggtgctggcacccttccatttggcaccttgttcattgagctcttctttatcatgtccagcatttggatgggtcgcgtttactacgtctttgggtttctcttcgctgttttgatccttcttgtggcggtttgtgccgaggtatctctagttctgacttacatgcacctgtgtgtggaggattggaaatggtggtggaaatcgttctttgcctgcggttctgtcgccatatacatctttttgtactctgtcaactatcttgtgtttgacctcaagagtgtgagcagtcctgtgtctgcaactctttacttaggctactcactcttcatggttctagcaatcatgctatctaca

SEQ ID NO: 55739 - DNA, 788 bp, Glycine max
  Clone ID: PAT_MRT3847_21342C.1
acatggaagaaatgtagcttaattttgagggtaaacttagttgcatgcttttgaactatattgttcgcctgttttgtttgttggtcttggcgacagattgctgggttggtgtgcttagctttcttttcaaaacatctagcagtaaacaaggaaaggaaaccctttcaaaagcatggccgtgattctaacaaaggaccttcgtccatgattactctagagcttaactaaggaaaacaagtttgctgaagaaaaatgtgaaggaagaaagtcatttctggcggttgtaattgcctctcttagtctgcgtcaccaaaatttcttggtgttttgcacttgaagcattctgtcctgttggcatagttatgcactccacagccaattctagtgcaaatccagtcaccagttttccaccctggagggtaattgcaatcagaaccatatcctccagagccatccatgtttcccccaaatctacaagagtaaccatctttcaatgcaccacatctaaagcagcttgatctgctggcaaagttgtgagctccacagttcatggcagtgcaataccagtcccctgccaaggtttcagtcgagttgtatctgtaagttgttgggtcagggcctccaaatttagggtatgcacaactttggcatgcatcccttttcttgaaatttatgtgctggcaagcaccacacatccaatctcctccagaccagctcatttttccttgtggaagagtaaacgattatagaagtgtgacgcaagcaaaggtttgttgttcttagctcgt

SEQ ID NO: 55740 - DNA, 1278 bp, Glycine max
  Clone ID: PAT_MRT3847_21343C.1
gttggttatgtctgagtttctttttgttactcaattatattccgcgttgagtagcacttggtgtggataggatggaaagctttgtgtaactgatgtggtgcgtcctttttgagttgctatatatttcatttcgtactgccgtgaagtaacagcactggagccattccattttcactctttgtaatactaatcttgctttggttctgcatatctgtaccccttaccattgttggtggctactttggagccaaggcaccccacattgagtatccagtccgaaccaaccaaattcctcgcgaaattccccagcagaagtacccatcatggcttttagttcttggtgctggcacccttccatttggcaccttgttcattgagctcttctttatcatgtccagcatttggatgggtcgcgtttactacgtctttgggtttctcttcgttgttttgatccttcttgtggtggtttgtgctgaggtatctctagttctgacttacatgcacctttgtgtggaggattctctatttctgactaacatgcacctgtgtgtggaggattggagatggtggtggaaatcgttctttgcctctggttctgtcgccatatacatctttttgtactctgttaactatcttgtgtttgatctcaagagtttgagtggtcccgtgtctgcaactctttacttaggatactcactcttcatggttctagcaatcatgctttctacaggtacaattgggttcctctcttcattctggttcgtgcattacttgttctcttctgtcaagttggattgaagtctcaacgctctcacaaattaccattactgagaaaagatttcatcaagaggaccctttgaaatgttcaattttatatgttactgtatttcagttcattattttgttagggaaaatagtaaatttagtgcagctactgtattctgttttgcttaactcatcgctagatattaaaaaaattattcattgcatgatgtagttagtaattcataagttccttggcattctgaagcatgtaatcttattgttggtagttgatgtttggaactgtaattcagatctttatggccttgcctgcgaaaattccaatttcaataataaaaatatgatcgcaagtaacaagttgcgcttgataaaaaaaaaaaaaaaaaaaaatcacaattaaaaaaacaaaaataatagaaatacaataaaaaaaattaatataaactcaatttaaaaagtaaactaaaataataaactattggggggggcccccct

SEQ ID NO: 55741 - DNA, 408 bp, Glycine max
  Clone ID: PAT_MRT3847_21344C.1
ggaataaaaagaattgcatatgaagcttttttttccaaaatttctacaaaacatagtaacgggttacccccataaatgggaaagcccgggattctagttggaaaaggggggctgcctggaaatgtttttagggtcaagcccccaatgggtttcaccaaagatgatgccgggatttaaaaaaattctggccgggctctttttaaccaagttggggggcccaaaatctttgttgaagcccactgactggcttcctgaggggcaaattttgggggggatgccttggactatgctatatcaaaggggggagattctgcccggaatcaagaaatggttatatatccgggtagctccaagggggtcatcaatcccattttctataagggaacaaatcctgctagctggactttt

SEQ ID NO: 55742 - DNA, 177 bp, Glycine max
  Clone ID: PAT_MRT3847_21345C.1
caatttatttttattctcctctctcccttttgttttggctatgtgtgggcaggtggccagggggtcaagtcaatgttctaattcttactgacttcctctcatgtcatcttggtttttggtttccttgatgtcaatcagtgctgatgctcaataacagcaacaacttcaactgcaaca

SEQ ID NO: 55743 - DNA, 394 bp, Glycine max
  Clone ID: PAT_MRT3847_21346C.1
aattcggctcgagtggagggtgagctaaacccagatgggacctgagtaaatcaatggagacttgtcagcatccaacaagtagaagaggttaaatgcttagcaagaattatcccaatttgggcagcagggattcttagtctcatttccatgactcaacaaggaacatttactgtgtcacaagcaatgaaaatgttccgtggaacaacccaagcttgtttcacagctcagcaacaatggcttctatcccatgcatcacccaccaccatcaccccatcacttccaaccccaataataataatgccttcccttcaccgcacgtctctgcctcaaacttggcctcacggtttctgggcacccgaagaagagttgggtcgcacagcctcacctctagaat

SEQ ID NO: 55744 - DNA, 1441 bp, Glycine max
  Clone ID: PAT_MRT3847_21347C.1
cgtatcgcggatcgtgcccacccgagccaagtgccgcagcagcgcgctgtttggtcccaagacaaccgtaagtaactgtgcaggaagaagatccttctcacccaaaccaaatgccgcagcagcagcagcagcagcgcgctgtttggtaccaacgcaaaatctaacccgcattcctctgtgtcatccaaacaacccctccgcctcagatctcgcctcgagaacatggatcagttgtcggcgatcagcgaggacctggccgagatcgacggacacatcgccgacaatttccgcgccctatcaaatggatttcagaagttggagaaaattaaggattccaatagacagagcaggcagttggaagacctcaccgagaaattgcgagaatgtaaacggcttattaaggagttcgataaagaagtcaaaacattggagaatagctttgatagagaaaccaacaaaatgttgaatgagaaaaagcagtcaatgatcaaagagttgaactcatatgttggtttgaaaaagcagtatgctacaaatattgagaataaacgaattgaactctttgaggggcccaatgaaggttacgcagaagaaaatggcttgctagcatcctcaatgacaaatgaacagctaatggatcatgggaatcggatgatggatgaggcagggctatgcatcgcaagggggaaaaaggtagttcaagacacaataaatgttggtacagatactgcagcagctcttaaggctcagacagaacaaatgagtagagttgtcaatgagctggattcaatccatttctctatgaagaaagcctctaaattggtcaaggaaattggtaggcaggttgctactgacaagtgtataatggcgcttcttttccttatcgtcattggagtaattgcaatcattattgtaaagcttgtgcacccagacaacaaggacattcgcgacattccaggactagctcctccagttcagaaccgaagactgctttggagtcacaattgaggaattaaaatgaacatagtgatgactgatgagcttatgacaaatgcgttggggacactagagattaaaatgaacatgtttatgacttcatcaaattgatttgatgctctttggtttgatggtgatgacattggctgctgctgttgctagaaacagggttgccaacaattgagtttgttattacataaaagagaagggttggttggcctgaggcatgatatagaacgtgggtctctaagcatgcacatttgattttttctgaaccatttttctaaataggttccgtctatcgaatcatagggaaagccaaacaaaagagccctctgagattatttgttgtcaattttgtaatatacgctcgcttttactgtaaaccttcagttcttaaaatctacctggtatcatcagtattatcaatttataatataagcac

SEQ ID NO: 55745 - DNA, 548 bp, Glycine max
  Clone ID: PAT_MRT3847_21348C.1
ggctttgtttatcacacaagataaggcctaatgtgttaggataactaatcttggtgtttggagtgcataacagagagcagaacactatctggtcatgtactctcatcaggtgatttctgtatgatacccctactataacccttgtacacctcttctgctttaggactgttgccttattttgttacccgtaagcttacatccctctttagagaccatagttgtcactatcatcaattttggaatactttttattgagaacataccatttctaacttctgtgatgctttctacgcttctgatggatttattcttaatcttatacaaatttcaatggatctgcatatttttccaaaaaaaaataaataggtgctagttttaggctaactaaaaccatcatctttaaattatccagtgaacaccagcaagacccaactgtttgatagtgtcttgctaaacagtctagtaatgctgatttcttttgatcccatgagaaaaatattactctttcctttattttcctcttttttatgatttcttaatccatatct

SEQ ID NO: 55746 - DNA, 701 bp, Glycine max
  Clone ID: PAT_MRT3847_21349C.1
ctctcactccattatggggtttagagtgtagggcgaaacctagccttcattcatgtcttccgcttcttctctccctccctcccctctgtcatcttcctcgtcggggacttcttggaagcagttttcgaattcgatttctcaaaatttacgtgcgacaaattaacttctatggcttcaacaaggtgagcctgtgatcaagagttatcatcttcatcactttctatttagtccattgattccgcagaaatatgcctctgttgaagatcacgattatgatacaactactgaagcgtatcgcgtttgggaagaaaagaccatctccttattgcgttggcttcaatcgaccatttctggggatatgcttccatgtgttattggttgcaaatcgtcgtggcagttatgggattgtcttcaatcgcattttcaatctcttactcgacctcgtgttcgccagcttcgcaacgaactccaatggctttcccttggtaatcgctccatcattgattatcttctttatgtgcagaatcatgttaatgaactcactttaattggtgaatcaatggcttcttcatctaaatctgattcttgacggtcttccaaatgagtatgactcatctgtcttggtgattagtacaagatttgatcgtctctcaattgatgaagtcggaactattttgctatagcatgaattgcgcattgaa

SEQ ID NO: 55747 - DNA, 688 bp, Glycine max
  unsure (1)..(688): unsure at all n locations
  Clone ID: PAT_MRT3847_2134C.1
gaaatgaaatcctccccctttttaagaaaatctttctaaaaatattttagataacaacagattagacaattttataggtaaaatataacatggtcagagtgagttatgcgagagctgtgttttcaaaaaaactggttcaaagggggcttgtaagagagctcccccaaaacttgagcattagaaattccatttatcagatcatagattattgtttcttgtaagagcatgacttatcccaattacacatnnngatatgaaggctaatagatcgccttaagacttggaaatcatggttattttattctatgcaggaaagtgtcatctatttttaagtcggaactattgcttctagcctaccactggggatctgtattgagggggaggtcaatatccactgccatgaactttcatcttcatccttttaagcatcatcatattcctgagaaactggctcgctggcctattttggttgggggtatactcttaaccaacctcttgtgatgctcagtgattttttgggttatcaagtcagtttgtatacttttttagctctagttatataagccaagaggcaaaaaaaaaaaaaaaaaactaccaaatactaatttatttagtatgatcatagtttgtgctcatgagttatccttatatcatttgacgaatgccaacgtagcattacttgtgcgag

SEQ ID NO: 55748 - DNA, 513 bp, Glycine max
  unsure (1)..(513): unsure at all n locations
  Clone ID: PAT_MRT3847_21350C.1
ttccttttcgtcatcgcagagaagaacagagagagatccatccatcaattccaatggccgatcagctcaccgacgaacagatctccgagttcaaggaagccttcagcctcttcgacaaggacggggatggtctcttttctcagatcccttttctctctctctttctctcttatttcattagatctcattccagtctcgtttttctttattacccttttgattattttgttaaatttttaatcttttttcctttgggtgccttctcctttcactttttgctccttgatgtttgtgggtgtatgtatgaatgaattggatttgcattctcgctgaaatctcccctttttcccgttttgcccttgctttcaactgtgaatcgagatttgatttgtgggtgtttgatttctcgatcagaaatttggaatttgcttgtgtggatgtgacatttggtgctacantgttggatttacaaataactcaatataggatgggaaaaatataaacttccacccc

SEQ ID NO: 55749 - DNA, 1913 bp, Glycine max
  Clone ID: PAT_MRT3847_21351C.1
gttgaatcatgcgcaccaagttaactccaaagggcttgttggagttggtaaacgaattgtacatgtagaatcattgctgcaattagaagccgcggatgttcgtattattggaatctggggcataggtggtattggtaagacaaccattgcacaagaagtttataataaactctgttttgaatatgaaggttgctgttttttggctaacataagggaagagtcaggaagacatggaataatctcattaaagaaaaatcttttttcaacattattaggagaggaatatttgaaaattgacacacctaatggattgcctcaatatgttgagagaaggcttcatcgtatgaaggttcttatcattcttgatgatgtcaatgactcagagcaactagaaactttagctagaacagattggtttggaccgggtagtagaataatcgtgacaactagagatagacaggtgcttgctaatgagtttgctaatatatacgaggttgagccattaaactttgatgaatctttatggcttttcaatttgaacgtctttaagcaaaaacatcctgaaatagagtactatgagctatcaaagaaagttgtcgattatgccaaaggcattccgtttgttcttaaacttttgggtcaccgtcttcatggaaaagagaaagagatatgggaaagccaattagaaggacaaaatgtgcaaaccaaaaaggttcatgatattattaaattgagttataatgatcttgatcaggatgaaaagaagatacttatggatattgcatgttttttctatgggctgcgtctagaagttaagaggataaaacttttattgaaagatcatgattattcagtggcttcgggattagaaagattgaaggataaagctcttatcagtatttctaaagaaaatatggtatcaatgcatgacattataaaagaaactgcttggcagattgctccccaggaatctattgaagaccctagaagccaaattcgactatttgatcctgatgatgtctatcaagtactaaaatacaacaagggtaacgaggctatcagaagcatagtcgtcaacttgttgagaatgaagcaattgcgattaaaccctcaagtatttactaagatgaacaagctccattttctaaatttttatagtgtatggtccagcagtactttcctccaggatccatggggcttgtatctttctcaagggcttgaatctttgccaaatgaactaagatatcttaggtggacgcattaccccttggaatctttgccttcaaagttttctgcagaaaatcttgttgagttgcacttgccatatagccgtgtgaaaaaactttggctaaaagtaccggatcttgtgaatttaaaggtccttaaactgcattcatcagcacatgtaaaggagctgccagacttatcaacggccacaaatcttgaaataataggtctccgattctgtgtagggttgactagagtgcatccatcagttttctctctcaaaaagcttgagaaattggatttaggtggatgcacttcccttacaagccttcgaagcaatatccatatgcaatcccttcgctatctctcccttcatggctgcttagaactaaaggatttctctgtgatctcaaagaatctggtaaagttgaatttagaactaactagtatcaaacaattgcctttatctattggatctcaaagcatgcttaagatgctacgtctagcatacacttatatcgagaccttgccaacaagcatcaagcatcttacaaggctgcgacatctagatcttcgatattgcgcggggcttcggactctaccagagcttcccccatcacttgaaacactagatgtccgcgaatgcgtgtcattggagactgtaatgttcccttctattcctcaac

SEQ ID NO: 55750 - DNA, 346 bp, Glycine max
  Clone ID: PAT_MRT3847_21352C.1
attatcgacaagcgcatcaccccgcgctttatccgctatgttcgctgggacctctgcctgggcatctttcgggtggtgctcggcgcggttgcgatgatgagctttgccgcggcggtctttgccggacagcccgaattcggcaactacaccgacgcactcggcaccgtcgtcgggctggaaaaatacgccggccggcttcccgcgatcctgttcgctcttgcgttgctcgaggccagtattatctggtgccgtggtcgtatcgttcgggactgcctttgctatcggcgacgtgttttcgttcaagccctctttgctttgcaggccgaaggatgcaaaggggtttatt

SEQ ID NO: 55751 - DNA, 405 bp, Glycine max
  unsure (1)..(405): unsure at all n locations
  Clone ID: PAT_MRT3847_21353C.1
gctactaataggaggccgggctcacccttcnatttcgcatttttattttttgtaacttcttataaaactaagaggagggggtattttatcctaccctttaaaagtcccaccaaattttgaaaaaacacctcgttgctttacacatgaaaataaaattgcaaacttaaacaccaaaatatttcgtttaaggatgcaatgctgcccattccctccacaacggttccgcggtgacccaatgtccacatcccactgaacaagccataaagctgcattcaccaccatgaagagagtgttcaacttctgcccccgttttttctatccctgcttatataagttagtgaaacagggaatggttaattgattcctgcaccgaaaacacttgcaggaacaaaacttgagcgcttc

SEQ ID NO: 55752 - DNA, 423 bp, Glycine max
  Clone ID: PAT_MRT3847_21354C.1
tcctctagagcggccgctttttttttttttttttttttttttttttgccaacaaaagcttgtcttaattacaaaaagtcaacaatccaagcctgaagattatcgagttatgacggataaaaaccaatgtcatgatatgaatggctctataaaaacttcactttctacaaggaactaaaattaagcttacactttgaaggatttatcattaaatacaggcagtacattaaaaggttgataaaacttgaacagacatgtgccccactatttcttgattttttaaccacatgtacccttgcggcaaaaactgtatttgaacattttacaataatcttttacatattgaggaattttttgaccaaccctgatcctgaaaccggtaaacttaattggaacccgtgattcattcagctccaactttaaa

SEQ ID NO: 55753 - DNA, 756 bp, Glycine max
  Clone ID: PAT_MRT3847_21355C.1
ggttctattaaatacttcacactctaataccaaaaggcaaaaatattcatactagaatcccctcttttcccaagtgttttccttttcttattacttaccaaacagttctagttcaagtgcaaaagttctaccaacttgcttactttactactgaaaaagatgagcaatgaagttcgttctttgcatgtattcttcatccctttcttggcacatggccatatcataccaaccattgacatggccaaactatttgctggaaagggtctgaagaccacaataatcaccacaccccttaacgtacctttcatctccaaagccatcggaaaagccgaatccgaatccaacgacaacaacgtgatccatatcgaaaccatcgagttcccttatgcagaggctggtttacctaaaggctgtgaaaacaccaactccatcacttccatgcatttataccctgcgttcttcaaagcacttgggttactacaacacccctttgagcaacttttgcttcagcaacacccaaattgtgttgttgctgatgttatgttcccatgggctactaattcttcagcaaaatttggagttcctagccttgtgtacgatgggactagtttcttctccatatgcgccaacgaatgcacgaggctctacgagccttacaagaatgtttcttctgattcagaaccctttgtgattcccaaccttcccggtgagattaccatgacaaggatgcaggtgtcacctcatgtcatgagcaat

SEQ ID NO: 55754 - DNA, 124 bp, Glycine max
  Clone ID: PAT_MRT3847_21356C.1
ctcacttgtaagcacacttcacactgaggctgcagcactggaccaccatgagcgagggagtcaattgagaggcaaagggctttttggccgacaagcacagtgctattgggaacgctacaaaacg

SEQ ID NO: 55755 - DNA, 476 bp, Glycine max
  Clone ID: PAT_MRT3847_21357C.1
gaaaagtgtattttacattataaggaacaggaaaagaatctggaagatcagatcacagagaatctatcattattgactgctgctgaaagcaaactttcagaggctaaaaagcaatatgatcaaatggtagagaataaacagttagaactatcaaggcatttgaaagaaatatctcagagaaatgatcaggctattaatgatattaagaggaagtatgagttggagaagatggaaattgtgaacaaggaaaaagaaaaggctgacaaagccattgcagaaattgagggaaagtgtggccaaaaaattgaagaatgcaaagaagaacaaaggcagcagttgatgcgcattcaagatgaacacacgttgctcgttactcaaatgaagcaggagcatgacaagaggcaagcaagcctcatagctgaacacaacgaacagctaaagcgtacccaactgcaagctgaaaatgaattgagaga

SEQ ID NO: 55756 - DNA, 1530 bp, Glycine max
  Clone ID: PAT_MRT3847_21358C.1
tctacgtcttcctcactcacgacggaactcaccgattcaaaatcgttgagcacggtggctggcccacctgggtcgatgatcgcactctttacttccaccgtcgaggccaagaccactggtggagtatttaccgagccattctcccctccaacgctcctttttcagttgactcggtcttcgtcgaacgagtcaccccaccgggtctccacgcgttcacacccgccacttcccccggcaacaacaacttcatcgccgtcgcaaccagaaggccaggctccaattttcgtcacatcgagctattcgacctcgctagtaacgaattcactgagctgactcggttggtctcgcctaattctcaccacctcaacccgttcatctcgcccgattcaacccgggtcggttaccataaatgcagaggagaacccaacgctcacagtaccccacagtttttcctcgagaatgttcggagccccgtccccggtctaactctcttccgcttcgtcggttctttcccggttttctccccctccggcgaccgaatcgcgtacgtcgagatgcccggagtttatgtcgtgaaccgggacggttcgaacctgcgtaaggtttccaacgcgatggcgttttcaaccgcttgggaccgggttcgacccggtgtcatctacaccgcaattggagaaacatttgctccggagagctcgcaggttgacatcgtgtccatcgacgttgaccatgaaaacagtgtgaagaggttgaccctggacggaaaaaacaacgcgtttccgtcaccctcgccagacggtaaatggatcgtgtttcggtcgggtcgatcggggcataagaacctttacataatggacgcagttgatggtgagaagaaggagcttcgaagattaacggagggtccgtggactgataccatgtgcaactggtcaccggatggagaatggatcgcttttgcgtcggaccggcatgacccgggtagtgggagcttcgagatctacctgatccacccgaacggaaccgggttgaggaaactgattcaaagcgggtcgggtggaagaacaaaccacccgtatttcagccccgatgggaagagcttaacgttcacttcggattatgcgggaatttcggctgagccaatctcgaacccgcaccactaccagccgtatggtgaaatattcaccgttagattggatggttccgggatcaagaggttgactcataactcgtatgaggatggaacacctgcttggtcccccaagtatatgccgccggtgaatgtgccaaagggaggaccctattgctcttttgatgattgtcattggctcaacaatatgcccatttctactgctttcggtgtgtctaaggctaagcctcagtgtgctgctctgtaatcattttctatgatactacgtcgctaaatgtgtgtttaataggtctccagagacagaggacataggttcagaatttgattgacttacaatattatgtaaggcaatatataaataaaagggtgagttcaaatgtcca

SEQ ID NO: 55757 - DNA, 297 bp, Glycine max
  Clone ID: PAT_MRT3847_21359C.1
cacattcaataacaccattagaaccacttcggggagtggtgatgctgccttctttagctttcactccggctcatcatagagaaagccatgccccagacgaagatcattgacgtgctgtttgaccacacactccaatgatatgataattgagagagcttgtaaagcctgagcctcaaagagttgaaatcgatgatcacactatgcaaatataagaaacacagtacccgaaaacctgctgctataaagaagaccttcatacaagcaaaacaatgaaagtacaattcatcaagcctccct

SEQ ID NO: 55758 - DNA, 304 bp, Glycine max
  Clone ID: PAT_MRT3847_2135C.1
atcaattcgtctcgtcatgtttgctagacagatcttccggccggccaggacgttgcaccagcaagatctccgttacgcatccgagccgcccaagagcggaggcaacaatggtgtcctctacacatgtattggcgctgctggtcttgctggttcctacctatacatgatgggcggtgaagctctttttgggcttaaaggaaatgcgccgtccttagaagagtccaagaaaatccccgcttctaccgacggctcggtcaagaatgctttcactgtatgcgaccagggctttggatcatttgtgctt

SEQ ID NO: 55759 - DNA, 301 bp, Glycine max
  Clone ID: PAT_MRT3847_21360C.1
aggcccaggttattgatctaagcaaaagaaacaaaaaaacaagcagccagagaacgcgaaaggaaggacatagcacagccgaccgaggaagcgccaacaccgacacggacaccggacacgaaacacacgcggacaccaggagcacagaaaagaacacaaatgggaacgaacccggggggacaagccggaacggacacgggcacggacgccggccggaccccagacacgacacgggaccgaagagcccgaagctccaaaggaggccacaacccgggacaagggcccaacagggacagaagat

SEQ ID NO: 55760 - DNA, 739 bp, Glycine max
  Clone ID: PAT_MRT3847_21361C.1
gaattcggcacgatggattgaacaagatgttgagctaacacatggacatatgcgtgtactgcgattggacattgttaacatgtcataagagcaattgctggctttgaaagagaggatgggtactgtgagcacagctctaacagaggaaacactatcagaatgcgtaaagaaaagtgtttaccagtcctcaccatctgacaaagaagctgagagatgcaaagaacataaggatgatacaacacgtcccattttgcaggaggaatatgtggctgcagaagaagtggggagtttgcaatgcgagcacatgtatcatgtggcttgcatacagcagtggctacagctaaagaactggtgccctatttgcaaagcatcagtggcacagtcaaattcatcaccatcctaatgatcccatcaattgcaatgttaggccagacgagggagactgatttctttgtacccctcttgctgttcatttttttcttcatcacttttgtacaaaatacagttgctcctcacttatttttattggtcatttgtacatagccaatattttcattcccattatacaataatccaagccattggcctgatatagactggaacttcttgatcattatagaataatccaagccattgctggaacttgttaatctgctggtgcaatgtttttcagccttcatcttatgttccttttttttaatccatacataaagaagcactaaggaattcggaaggaaaa

SEQ ID NO: 55761 - DNA, 179 bp, Glycine max
  Clone ID: PAT_MRT3847_21362C.1
ggcaaacaaaaaaaggaaactatgaagcaaaatccccccgccaaagttccaaacatttaaaattaaaaggggcctctaaaaataaaacttagggggtttacttggaatacacccagggcagttcagggaaaacaaactgggcccttttggcaagggctaatagaaacccccccgtccgg

SEQ ID NO: 55762 - DNA, 718 bp, Glycine max
  Clone ID: PAT_MRT3847_21363C.1
cttctagatcgcgagctagaactagtcttcatttctccacgcgtccgcgggcgcgtggatgaagctcccttccctactacacaacaaaccctcttcttcttcttggccctgccaccaaccgcgaaccctctctttccgaacccaaaacgacgccgcattcaaaaccatcaacgccgcttacttggacacgctggagagctccgaaacttccttcttcacagtctcccctgactccggaagcttctcaactgcctcagaacaagattctagaagaccccactcactagactccgtcattcgcggcttgcgttccgaccgcttattcttcgagccagacgagacaagctccatattagaggccaaaccaccaccaccaccaccaccaccaccatcaccaccaccaccaccaacaacaacaacaacgttgccgttcaaagacagcgttgtcatgtccgtggactctcaggacccttacgtcgatttccgcaggtccatggaggagatggtggaggcgcagtgcgtcaaggactgggagggtctccaagagcttctgtgttggtatttgaaagtcaatggaaaaaccaaccatggctatattgttggcgctttcgtcgatttattggtcgggttcttcttcttcttcttcctcttcctctttctcggtttcttcttcttctaataataataacaactcccaaatagtatctccttcttcccc

SEQ ID NO: 55763 - DNA, 447 bp, Glycine max
  Clone ID: PAT_MRT3847_21364C.1
agggaatggaaatggaaagaaaaactctaaaatagaataacatgaatttagccctccaacaatcgaatacttgggaatttacttgaaaagaacaattttagagcctcaggtggaagttcacatttttttttgaaaccatctgaagtcaatgaagcagcatggggggagaggaccacattatccaatggaaagagctcgttgggaacattaggctcatttttaaacacatccaagccagcaccccttattttattttccatcaaacaccgcaccaattccttttcatcaattaaagctccacgtccaacgttgacaatagctccatttttccccaatgccaacatcacttccctgttgattaagggccttgattgctcgttaagggggcaacaaagcacaaggacatcactattaccagcaagctcaacaactttagaataaaaaggg

SEQ ID NO: 55764 - DNA, 1886 bp, Glycine max
  Clone ID: PAT_MRT3847_21365C.1
ccacgcgtccgggaatctctctctctctctctctttctttccctttttcactttctcattcattcttattagtatttctatttcacttcaccaacccactccaccgtttcccctttccttccatgctattatggcttcatcttccatcaaacacactcaccaccttaaccgcacaaaactcttcatgaaagaagaaacccttttgaaaaagaagcatcactatcccaaaatcatacgaatacgtgtcaccgacgccgacgctaccgactcctccagcgacgacgacgagccctccatgtcctccacgcgccgcagagtaaaaaacttcgtcaacgaaattaccatccaaggcggcggcggtggtggtggcgacgttaacgttgtttctaagaaaagaagattcaagtccggtgccggagctccgttatgtcggcggaagacgggggcgaagaagttccggggagtgaggcagcggccatgggggaagtgggcggcggagataagagacccgtcgcgccgcgtccggctgtggctgggaacctacgacaccgccgaggaagctgccattgtgtacgacaacgcggccattcagctgcgtggcgccgacgcgctcaccaatttcataacgccgccgccggagaacagaaaaaccggttactgctccggcgaggagtctcgcaacaacgacgacttgcgttcccccacttcggttcttgggcgctgttcggtgtccgaggaagctgtaactgcaaacgacgtatttggaggctctagtgagtgcgagtattcatgcgtttcggagtcagtgtttcctattcctaacgaggtggtgtttgactttgaaagcacgttagatatgtttgatgaagggattaataatgttgtggcagagactagtatattcttggcggaggatttagatttgggttttacgagttggcatagagagtgtgataatttccaagacattgggggggatttgtttgtttgggatcctcttgtcgctctttgattgagacacagacaccattctctcgtctttgtaattctattgccaacgaaaatgggttgctatcagttttgtttcttttgggggtttaggcaaaaaccttgtgtctaaggagaggttttctaattttttattctagcagtatatgtttattaaccactagttgtaaaaccgtgcttcccacggtgttgccgtctttttgtttcttatataaaattatgtctcataaaaaaacccacgcgtccgtggttctatttgtttgatggccatcttgcacgtcctgatcttattgtgttcaagtgacagacaaatcagaacagggaagagagatttgaaatgtaaatgccaagtgaaagtgaaaagtacagtccagttttagtgatctctttaatttatttgttcatagattaatatgatggtgtatgattgcttttctatttattgtggcatttttgtgttgtaccctgttgttgtgtttgcaataagtattagtaataaagcagcaaattcaatttcaaaaaaaaaaaaaaaaaaaaaaaaaaaaaaaaaaaaaaaaaaaaaaaaaaaaaaaaaaaaaaaaaaaaaaaaaaaaattaaaaaaaaaacaaaaaaaaaaaaaaaaaaaaaaggggggggcccttttaagggatccaactttacgtcccgggccttgcaaggtaatagtttttttttggggcccccaaaatcaaattccggggccggggtttaacaacgccggacttggaaaacccttgggttaccccaatttaatcccttggaaaaaaatccccttttccccagttgggtaaataacaaaaaggccccccccattcccctttccaaaaatttgcccaccctaaaggggaaagggcacccc

SEQ ID NO: 55765 - DNA, 394 bp, Glycine max
  Clone ID: PAT_MRT3847_21366C.1
aattcggctcgagaatactcaatttaaatataccagaaagagatcaatttacatcaacatgagtaactttttcagttaaataaaattaatgacctatttccgtcgttaaagtataaaaacaaaaaataactctaaaaatattattcttggtataaactcatcgaactaaattgggatttgtgttggtggaatctgaatctgcagttctgggacttcagctggggaaagaaaactaatgcccacaatcaaggaagagctggatcgtcgccaacttctatacagcctcctcatgccagttatgaacctttatgtgcccggcttggacaagggaaagggcctatactttttgttcgtgaagtccgaaacaaggaccccgggtgggttactggcccgt

SEQ ID NO: 55766 - DNA, 1338 bp, Glycine max
  Clone ID: PAT_MRT3847_21367C.1
cccacgcgtccgcccacgcgtccgtacggctgcgagaagacgacagaaggggatccattttttttccttcttcaaacatcacaacaatgtctccattttctctcttcctcttcaccacattgctatcttttctcggcgccgccgacgcgcgactcaccttggacttctacaaggacacgtgtccgcagttcagccagatcataagggacaccgtcacaagcaagcagatcgccagccccaccaccgccgccgccacgctccgcctcttcctccacgactgcctcctccccaacggctgtgacgcctccatcctcctctcctccacgcccttctccagggccgagcgcgacgccgacatcaacctctccctccccggcgacgccttcgacctcgtcgtccgcgccaagaccgcctttgagctcgcctgccccaacaccgtctcctgcgccgacatcctctccgccgccacccgcgacctcctcaccatgctcggcggccccttcttccccgtcttcctcggccgccgcgacggccgcacctccctcgcctccgccgttcctgaccacctccccacccccgcaatgcccatctcccaaatcacacaaatcttcacccaccgcggcttctcaatcgaagaattcgtggctctcagtggggcccacaccgtcggattctcccactgctcccaattcgtcaccaacctctccaactcctcctacaaccctcgctacgctcaggggcttcaaaaggcttgtgcagattacaaaactaaccctaccctctccgtcttcaacgacatcatgacgcccaacaagttcgacaatgcttacttccagaaccttccgaagggtttgggtgttctgaaatctgaccatggtttgtatagtgaccccactacgagaccctttgtggagacttttgcgaaggatcaaaatagattctttcaggtttttgctagggccatgcagaagttgagtctcttgaatgtgcagactgggaggaagggagagatcaggcgcaggtgtgatcagattaattgattttatttatttattttttgttgtttgaatttgataatgagatgagattttataatttataatgagaatgatacctctgttgttgatgaatttgatggttttgaggttgattatttatacatactacatagtgtttatgaggtggaaagtgaatgggggcattggggtatttagatttgaggagttattgttgttcttcgccctcttgttctttggataaatgatgagtctgagtctggttctcgaatgtaatattataagatttaattaataaaatttctcattttgagctctcaaa

SEQ ID NO: 55767 - DNA, 511 bp, Glycine max
  Clone ID: PAT_MRT3847_21368C.1
aaaacaaacctactcaggctttaaaacccttggaaaaaaatggtccaatatataaagcccattttttataataaaaaaaccccaaatccggggaaatttttaacaaaaatatactcgttaatcaaaaaatccatggggaccaaccctgttttatggccaataccaaccggaaaaaaattaccgaaaagggttaaaacccggatgggggcgctggaaccctttaggaaaattccaaccccgataagtcctaaaaaaataccggggaaggcaggcaactttgggttgtttaaacaggtcatttaacagattcagattaagagcgaaaatttgtagttttatcagaggaaaaaaaaaccgggaaaaaggcacctttgggttgtttaaacggccaataaacaaattcaaatttaagagctaaaatatgtatagttttatcagaggcaaaaaaacacccaaaaaccataatttttttaaaatattaaaaatcccattacttcatataaaattaaaa

SEQ ID NO: 55768 - DNA, 198 bp, Glycine max
  unsure (1)..(198): unsure at all n locations
  Clone ID: PAT_MRT3847_21369C.1
gcncgatggcttncgncaaggtgggtttagagaagggaccgtggangccngaggangatcngaagctcttggcttanancgangntcatggccatggcagntggcgtgctttgccngnncccngctggncttcagnggtgtggcaagagttgcnggttgagatggncnaattatctaaggcctgtcnttnagaggggt

SEQ ID NO: 55769 - DNA, 136 bp, Glycine max
  Clone ID: PAT_MRT3847_2136C.1
cacacacatcacctttatattagaaaaccatccttttcattcacttatacaacatcaaacggacagggctaattatgagcagggggggcatattacaactatccacaaaacacttgctctatcttcttataccaat

SEQ ID NO: 55770 - DNA, 709 bp, Glycine max
  unsure (1)..(709): unsure at all n locations
  Clone ID: PAT_MRT3847_21370C.1
caaagaccaaaatgagttctattatgtatcaaaagatgcagaggattcagatagaaataatgataccaagtggtggttgcctacacctaaggttcccgcaaacggtttatctgatgcagcaagaaggtttgttcagtatcagaaagattgtgtgaaccaagttcttaaagcagctatggccataaatgctcaaactctatcagaaatggagatccctgaaagctatattgaatccctacccaagaatggaagatcaagtcttggggacttgatctacaggagcattacagatgattttttcgatcctgatcagctcctatcagccatggacatgtcatcagaacataaaatcgtagatctcaaggacagaattgaggcatccattgtgatttggagacggaagatgaaccaaaaagatagcagcaaatcagcttggggttctgctgtgagtatggagaaaagagaaatctttgaagacagggccgaaaccatcttacttctcctaaagcatcgttttcccgggactccccaatctgcattggatataagtaaaatccaattcaatcgggatgtggggcacgctgttcttgaaagctattcaagaatattggaaagtttggctttcacagtgctgtcaagaatagaagatgtactccttgcagatcagcanactcaaaatccatcacactcaggaacaaagagcagcatt

SEQ ID NO: 55771 - DNA, 380 bp, Glycine max
  Clone ID: PAT_MRT3847_21371C.1
cccacgcgtccgatccaattacagaatgtctggcatccaatcataaaatgtcatgtacggtaaggttaggttactgacttctgtaattactaaagttatatatctaggaggatttcttataatttgacagagtaaaaatctgtatagtgagaatatatgaaaatgagaaatgtttcttggacacctcatatgctaatatacacctagagagagaaaaaaataatgaagaaaagtgatggatgtaatatgtatttgatgtgacaaaaagagagagataaaaacaaataaaaaatctcaatcaggtgtctaaaatattggagtgtctaactatggaaattaaactatgtaatagagcatctttggttaaagtaaacattttt

SEQ ID NO: 55772 - DNA, 828 bp, Glycine max
  Clone ID: PAT_MRT3847_21372C.1
aaaattgtcacatggaaatcttctcatacaaaaacgaagattgaaatttaaattttcagcagtactagttgttattagtgttaaatttcacggttcttcaacaagtatacaagatacagagagtacctgagagaggatattacatttttgctctctaccgacaagtattataacaatacaaaattagtaacacgagctgaaacttctctttgcagtgttctccctgttctataaatcactttctcttccagaaaacattgctaaattgggtaggtgtgtgcatactattggtttaatgtcttgtgatatgcaacagatgttgaagtcttcagcagctcccttatggccattgttgcataacatgaagcaggaagagtaaagctcaattttagagcgatttgggaatcttgagagctggagccactgagagattcgtcgtgtggtaattttatttcctcacctgcaatctcactataattctcaacctttacaacatcattggagctctcttccagactaatgcaatcaaaggcttcttcatttttcccatttgctgcacccatttgtttgacaatgcccataggcttatacttgattaactttgttctaaatctggtctctaccaatgcaggatgactaaagctaaattttagagcgatttgggaatcttgagagctggagccaatgagagattcgtcatgtggcaattttacttcctcacctaaaatctcactataattctcaaccttttgcaatgtcatcagagctctctaattctctaatgcaatcaaaggcttcttcatttttcccatttgctgcacccatttg

SEQ ID NO: 55773 - DNA, 2024 bp, Glycine max
  Clone ID: PAT_MRT3847_21373C.1
tttttttttttttttttagatgcaattctttaaatattttgcatattacttttcaatcaaaattagaatttcatctcaataatatgactgcctatagtaacttttttttaataaattactgttaaagctactctctattgatgattgtgcatccatgatacaacaaaaaaaaacgagggaggaaatgctcagtaatagcataaattgggtacagcttgccatgttcatagtatataagttgcacagtcgtgcacagttcaaccgcgggaaagtcctggggatcaatatcaaacacaattgaagtgcattgaccaaccagatcatggaacaaattgctgcaacttatagaaagactaaccaggaaattacgaactctctaacagatgtttgtaaatctaagagaccatggcattggtttcatcttcatcagcttctcctgtttcattgaacatgtactgactttggtactccattaggtactgtgttgatcttttgacatccaaaaacagattgtaaacccgatttatatcatccaactccactgtcttcccctttcgcttttggcatgccaatgcagctgctgtgattagatgaatagcatatctcaaagatgtttctacacctattttggttaacaaacactttgcaccttcactcatgtctacgtcttcctcttggcatctgatatccagaatcttgcgaatttcatcctctgtgtaaggttgggtagagatgatgagaagtcggtcaagcagatcaatgggaatcccatgtggggatttgtaatttgttcccctgatagttgtgatgcctctgttggtagcaacaactaatatgggagccatctcattctccagagcccgattaaggaaagaaaagcactctatgtcaagcatgtgcacctcatcaatgaaaagaacaccaggcacaatctctgcctttccttcttctctccactctgccactttggtgtcaatttgctctctgacctcagcacgaatttcacccgtatcccctgtgaaaagagccagaaatccctgtgttctgctattaataacatcaatctcatgaagcgtaacgcaatgcacgacctccttcctcttctgcaactccccatcgggacactgcacgaacttcacctgcggccccatagcgtcaaagtccctcgaccgcgaaaacgatcgtccgagcttcgtaatcttcccggacgccttatcaatcgcaataacatcgccgctgctcaccttctccttccccagcgcttcaatcatcttcgcgccgaggtcgtaaaccgtttccatctcggtcgacttcagcgtcagcttcccggtcttcgcagcggcgccagccaccgcgggacggtcgatttgaacctcgacgacttcgccctcgatgacttcggtttcttccttgatgcggacgccgatggccttgcggaaggcctgggtgagggcttcggttttcgacatctcaagggagaagatttcgctggcggcgatcatggcgaagggggtttcgaggccgagggacttggccatgcccatggcgatggcggtcttgccggtgccgggctggccggccaggaggactgcacggccggcgattttgccgtcttttatcatctggaggatcacgccggcggccttgcgggcggcggtttgcccaaccatgccgtccgagacggcgcgcggctccagggaggagtccaggccaaggccgcggatgtgggagtgcgcgcccacgcgctctatgcgggtcagatcgcggctctcagagagtttcagctccgccattgtagaaacaacgaagacggtgcgagggagaaagagggtttcggggtttgtttagggttttgatgaaggtttggactcgggagtgcgcttgtgcgacacttaagttaccggacgcgtgggtcgacccgggaatccggaccgggctagactgtacatatagatgtataggaagtatgtatgtgtaattataattttacaaaacttatgttaagaaaactaaaattaatataa

SEQ ID NO: 55774 - DNA, 184 bp, Glycine max
  Clone ID: PAT_MRT3847_21374C.1
ttactgatcaagttataaacgaaaatgcgatcagttgacattataacagcacaatctcaacctttccacaaatgcggtagacattctcactctgccttaagctaggtgctaactttgtagtgaacttacagactgcaattggtttttcaatgatctacaaagatgcagactgcctgaaaaccga

SEQ ID NO: 55775 - DNA, 373 bp, Glycine max
  Clone ID: PAT_MRT3847_21375C.1
agatggaaagaccataattttgaaaagtacctgaaatatgataagcccaatgaggattggctgtgtatcaaacccaaagcttcgatacagatcaactgaattttgcactagtgtatatcctccaaattgtagaagtgtaagaatctacaacaatatatcaaagcattacaaataatcttatactcaaatattgcaatgcctttttccgttaaacatttaattataattaaatgtaactatgaggtattcaacacataattcgcaaggaactgaagctcaaagagagagtgttgaccataattcacaaggaattcaacacatgtattagcttccctataaatatgggacaacttgaaaagcacccttgtaagct

SEQ ID NO: 55776 - DNA, 279 bp, Glycine max
  Clone ID: PAT_MRT3847_21376C.1
cctacgcgtactcccaaaccaacatacacctttcttctcaaaatggcctccacacctacaggaaccgggaccctacccacgctatcttatcctacacccttctcttcttaccctacgcacctctccgtcaaaccctcctccctccaattccccaatctcttccaccgtgccgacaccacactcctcaaacgcgtcaccttctacctcaatcaggcgcacggaaaaatcaccaagctcggcgaccaaatcggcatactcacgctcgactaggccaaaaac

SEQ ID NO: 55777 - DNA, 282 bp, Glycine max
  unsure (1)..(282): unsure at all n locations
  Clone ID: PAT_MRT3847_21377C.1
ctggacgtgggtttttgaaggctacaggacaaagaggttgaaganggaagaagaggnaaaganannnnnnnnnnnnnnnnnnnncagcatgagaggaagtttganacganagttgaagagnagaagggttttggggaaaaggctgaactcgagggaataacaagagtggtggtgggaagagagtncagcaaagaggagaaacaaggaagancaagagagaaagtagaggcagaganagcaagatcaatngaganaactagagttgaagctanaggaagannc

SEQ ID NO: 55778 - DNA, 331 bp, Glycine max
  Clone ID: PAT_MRT3847_21378C.1
cacaataacaaacaacacactctaatagttcttctttcctcacttacgtcgacctcacaaagtgacaatggaccccatgagtctgatgcgcaccggagccctcctcgccagcggcgtctaatgactcgtgcgcgtgctgggcccctccgagccaaacggcagacgcgccagcaatctttcctgcggttgcatctgggccgagaaagctcaagacaaatactgacaggactggaccgtgttgtgacggccaaaagagatcgagaccgccgacaaaggacccgacttagtgcacaccgtatacaatctagtcacaaacatctacgagtggggg

SEQ ID NO: 55779 - DNA, 368 bp, Glycine max
  Clone ID: PAT_MRT3847_21379C.1
gtgtgtggtttttttttgtgttcttgttcgcatttttacttgcccaatattgaaccgggctacttgaccgcattctgccaaaattgggggggcttggcttgtacaaacaatactgggggcgatcccagaatgccctttaaacacgcctcctattgaagggcccacgcattgctagggcgtatcccttgtgagattttgggccctctgatggcgctccctgctttggggatctccttctgggcaggtggggcctgtgaccgctcccccatgggggcctatctaaaggaccaccccttactaataccttaggaacaacattgtcgaaccctccgggaaacttgtgaccatgtagacagacggctgtagcc

SEQ ID NO: 55780 - DNA, 196 bp, Glycine max
  unsure (1)..(196): unsure at all n locations
  Clone ID: PAT_MRT3847_2137C.1
aatacttttttctttttaaagctgagcattanctcacgcggcgtgttatttgtgacgtgctctacctaccatactcacactacattatcattgaatacaaagttcagcaataatatcctcaatacacctataattagtccatttaaggaacataaccacatataacttatctttggtttcaacacaatataaaatt

SEQ ID NO: 55781 - DNA, 840 bp, Glycine max
  Clone ID: PAT_MRT3847_21380C.1
caaatccaaaccaaatggtttaagcctatcctctcagactctcctatctcacttgtattaggcccaaacaactggctatggcttggtgctataatctcgtcatcctttctcatgttcctcctccttttggggattatcactcgttactacatatatccaattgaaaataactcagatgaagtttatcattggacctttaaggttttgtggttcatgtttctactttgtgcagtcatatgcatatgttctagtgcagtttttctttggtggaagagacaaaactccttggaaagtaagcaaatcatgaatgtagaatttccaacaccaacaaggtcaccagggtcatggatttatggctcagagagagaactagaaagtcttccccaccagtctctagtgcaagcaaccaatgtgcattttggtgcaagacctgatctcaagaaaattctttttgagtgcaaagacaaagacattggagtcttggtttctgggccaaggagcatgagacatgaagttggcaaaatctgtgcttccggtctagctgataatcttcactttgaatcattcagctttacatggtgatgtgtatcaatatggctgtttatatgttttacattttctgattggtctgttgttaaataaattgtgaataatatttattgtttagtgtaagcccgtttgtgtgtgtttgtgagtgggcgtcatgtgtaatattgagtggaagtcatgaaacaaataaacttgcaaaaagtatatactgtatcttttttctgttctgtatgtacatatataagtatgttttaaaaagttgttcaacaatgatgcaaaaagttgtttttt

SEQ ID NO: 55782 - DNA, 1363 bp, Glycine max
  Clone ID: PAT_MRT3847_21381C.1
cccacgcgtccgtacggctgcgagaagacgacagaaggggaatccgaaacagagagagggaggacaccatggccaacaacaacgaagaggaagaggaagcagtggcgccaatggtgaagttgggttcttacggtggtgaggttcggttggtggttggtggggaggaatccgctgcggaggagaccatgctgctttggggtattcagcagcccacactttccaaacccaatgccttcgtctctcaagcttccttgcaactctccctcgactcttgtggccactctctctccattcttcaatccccttcctcattgttttgagattttggacttttgtttcaagggaacgcctggagtaactggagcagtgatgtgggacagtggagttgtactgggaaagtttctagagcatgctgttgactcagggatgcttgtccttcagggaaagaagattgttgaattgggttctggttgtggattggttggccccttttgggtagtgaggtcattgtcactgatctgccagataggctgaggctactgagaaagaatattgagaccaacatgaaacatgtttctctacggggttctgtaacagcaactgagctcacatggggagaagatcctgacccagaactcattgaccccaaacccgattttgtgataggatctgatgtagtgtacagtgagggggcagttgtggatctgctagaaacacttatgcagctctctggacctaatacaacaatatttttggctggagaactccgaaatgatgccattcttgagtacttcttagaagctgcaatggataatttcactattggccgcgtggaacaaacgctctggcaccctgattattgcagcaatcgtgttgttatttatgttctagtgaagaaatgattgttgagaatatgatgtttagttgtcttcaacgctaggaacatgatgtccatattgtgaatcaagaatttaaccatattttctttgttagccctcaagtattttgttattttctgtccttgtgagtttggtttggtttgatgagttccaaacaatgccatattgtgacattttaatgggacggaatgctgaagatttagctgcgaattggaactctgtacaccaagacttagctaagctgtgttaaaaccaatatttaaataatgcacttacaaaaaaaaaaaaaaaaaaaaaaaaaaaaaaaaaaaaaaaaaaaaaaaaaaaaaaaaaaaaaaaaaaaaaaaaaaaaaaaaaaaaaaaaaaaaaaaaaaaaaaaaaaaaaaaaagggggggcctttttaaagaaccaaattttacttcccggggtttgcaaggaaaaagtttttttttggggcccccaa

SEQ ID NO: 55783 - DNA, 346 bp, Glycine max
  Clone ID: PAT_MRT3847_21382C.1
gagtccactcgattttagaatttgacgtgtctggtgccttgacctgtactgcattgtgccccttcgctgacattgcagatatgtttttagtgctgacgcatcgtggtggggagatattcactacccttgaggggtgttctgctactgttcggtctggtttcatcatgaaaggcagaatatgtgaagtgtcgcgaccgtaacgcgtcactgaatgtctaatgcagtgacgtgttgaagctaatgtcactcaaagataagataggccagatgacacagattgaatggagtgtcgccacacctgatgtgatgatcatgtacttcaattggactgtgctcagtaggggat

SEQ ID NO: 55784 - DNA, 177 bp, Glycine max
  Clone ID: PAT_MRT3847_21383C.1
gtggggggtggattgaaatggaaattcaacgcccagagagtctaatatatgattcatctgtcccccgtttcattgagaatacacgtgcacacatgcttgacgagggggggctcgcaaagtgcacacgccttatgtaattttattgatctttctctaagtgctgttattataatatat

SEQ ID NO: 55785 - DNA, 898 bp, Glycine max
  Clone ID: PAT_MRT3847_21384C.1
acgaggccaaaaaaagagaccgaacgcccctcaaccaccatttctagacacattaccctcacaaagtaagcaatggcataccaaaactacaacaactatgggtggcgatgcccctctgacgagtaccaagtgtacgaccccccagtagaggcaacatatcctaggcaaaatcatcacaagaagggtcatgtggcattcagaaccaactatgaggattctatagctgaagtagaatccaacgttgaggctcgagaacataacagcaggttatggaatcacagtgcttacaaaagcgtggaccaagaggctgaggcgtttattcagtatgagcataagaggatggaattagccaggcttatgtcaacaagggctgtctgagcctctcttgaaatatatatatatatattatcataggggcttcatgtgcattgttacatattattgtgtatggttaatttgttgtatccttaaatggttaaaagattttggggtgagacttttatgataaagttttacgaataattcatccctcaatttttttagctctccttttaagttggtatcaaattgactcgtagcactattacgcccacatctcatatcataattaaatagtctacaactgaagtactactagggactttccttttttcttcttccctttcctctatctttatttcacctaaataaatgcaccaaggcctcacactcatatggcgtgttgtaattgtttcagtcctctcctttcaattttcttagagttataattggttgttggcttgttgctatagataattcccccaattgcagtatgttatttagaatgcaaacaagaagcaatgatacgttatagaaaatcgtgtgttctaaataaattgcaattaaaatttgttatttt

SEQ ID NO: 55786 - DNA, 368 bp, Glycine max
  Clone ID: PAT_MRT3847_21385C.1
gggatgattattaatggaaacccaaaagagcttttgaagccatggacgtgccagtcatttctctattgcgtgctcatagatacaagccgggtgaggtgtcccactgttcgctatgtataacatatgctcgctccgacacacatggatatactgtatcctgcggcgtaggcaccatctccattaggtgagacgatccgcggtggagagaaataaacatactgggggtgtgctatatgcctatcgccctaatattagacacgacactcgcttcatagaacacttacaccgaaggaatcgtcacttgcgctacaagaaatccatatatgggaaacctcacgagtctgcctaggcctagaggagacgacttt

SEQ ID NO: 55787 - DNA, 350 bp, Glycine max
  Clone ID: PAT_MRT3847_21386C.1
gtatctccaagaacaataacatatgctactctacggatggaacttgaaaggaagtgctacattgagccatggagagagaagcgagaccctggtcaatacttcatctgataatctgaaacaagaatgagtgagtgagaacaaacaaagaaaggaacgacagatggtgggacctagatagctacattgacacatgaaaggaaaagggaaaacacgatgaaggtgcggatgatgacggaaataataaaaagaaacaggataagaaggagaaagagaaggatcacaaaaaggaaaagaaggataaataggagggtgaaaaagaagattaaggacaggatggtgctaaggaagtg

SEQ ID NO: 55788 - DNA, 253 bp, Glycine max
  Clone ID: PAT_MRT3847_21387C.1
gtactatatggactacatggcaacacaatacaagcttgaaaagggggctataggttatggctcctattctacactctcaatgatggacaaacactaccataatggaatgtcagccgaataagcaattgatctcgcatactagtgcattatggaaatcagatccatgcttgtagatgcgccgcccatctggggtgtccaaatcccggacaaggattgtgcaagatagtacgcatggcgcgagtcagccaaggat

SEQ ID NO: 55789 - DNA, 372 bp, Glycine max
  Clone ID: PAT_MRT3847_21388C.1
cccgggaaaaaaaggaggaccttgaaaaaaaaccaaccaattatgggaaaaaaacccaattatgaaacatgggccgaggggcccttaaattaattaagctggggaaaaaaacaaaagcttgtttcccgggaaaaaaggggtctaaacaggggctggaaaaaaaaaaacgggggggggagaaaacattttattcaggaatggggtaaaacataaggagcaaccacccttaattagggttggcaaaaaaagggcggcaaaggggggtaaacaacccccaggaaaaaattttccctttcgggaggcgggaaaggaaaacctataaaagggaggggaagcaatctaccgaaacccccccccaaaagcggggcccca

SEQ ID NO: 55790 - DNA, 144 bp, Glycine max
  unsure (1)..(144): unsure at all n locations
  Clone ID: PAT_MRT3847_21389C.1
ggcgggggaaggcgggnnnncacnaaacgcnaacccaccacgancagcgngttacactacacatatcggcgaccccccctgactaacaggaccatatctctgcacagaaaatgatccaaacccatatatactaagccanacaaa

SEQ ID NO: 55791 - DNA, 397 bp, Glycine max
  Clone ID: PAT_MRT3847_2138C.1
aaaataacatgagatgacacaaatttgtatttgtacacgaatatattacattaattataaactctccggtctgcgctacagtgttgcaattattctcatttcacaatcctcttattcacatcataaaaatgaatgaaaggggtgaaaaaaatagataaatataaattcacatctataatacacaatatgatttttcttataaaaggcgaaactgatgtgaattgaatgtagtatactaataatttagtgaaatgtaaatgctttaatggaactgaaccaagcttcagtttcactttcacacagttttagcggttgcactgctgcgctggtcttattttccttttgccggcgttgaaggggcacgccgtctgaaccggcggcaccatgcagttatact

SEQ ID NO: 55792 - DNA, 398 bp, Glycine max
  Clone ID: PAT_MRT3847_21390C.1
tttcgctatcgcctcaatacaaagacgctcaggctcagatggcaacaaatttgttttacttgtcacttgccgaagtagaaactcctaaccggaccatggttgaatcttaaaatccctcaatctaaaatagcacttcccaaaatcacagttgtaggaaccattctgcgtagtgatctattggcaaattttctgacagagggcaattttagagcaagcgtagatttgcagcgcactcatagtattaaaggaatgattaaaatggcggccacatgcggtattactgagaatacaggtttcgcattagcctgtgctatgaatagttcctttacggggcgtgccagttctgacatatacaccatctgcttctaagactgataattatcgcatcctgcttgcgc

SEQ ID NO: 55793 - DNA, 387 bp, Glycine max
  Clone ID: PAT_MRT3847_21391C.1
acacgtccgcctgagcttccattgtgctcactcatttctgacaacaaaacccgggggatatgaatcactctgggcacaagcattacctacaaggcccacaaaaacggcatcaagaaacccaagaggcatcgccacactttcaccaaatgggtagactatctatctctctctctctctctctctctctctctctcttttatgtttttgggttctcttttactctgatacatatgtatatttattttcgggtaatttaattatgcttgttttaacaaaataaataaatatatgcgtttgtgttgttggcaattggtgtacatggatcccaagtttctgaggaatcagaggtacgcgaggaagcacaacaagaagagtggtgaaacagac

SEQ ID NO: 55794 - DNA, 364 bp, Glycine max
  Clone ID: PAT_MRT3847_21392C.1
tttttctttttttttttctttttttttctttttaccggaagatccctttttcacacaaatggatttttttttctctttactaacaaaccacaccctttataactaacacctaaaaacccttcttttttttaaaaacctcaaaacccttaaaatatttttcccaaaaaccacccctccattgtggtaaaaaaccaaatcatataattttccccctttttttacacattacactctcacaaaataggtgctctacaacattttttaaaaacatttttcccacccttcttcaaataattttactacaaccctttgaatctataacccccccccttaaaatcccttcctaattaattcaacccctcca

SEQ ID NO: 55795 - DNA, 850 bp, Glycine max
  Clone ID: PAT_MRT3847_21393C.1
gagaatcacaatttatgtatttttctttttaatatttaattaaaataaatttcaattcaataaaaaactaattttataatggtcaacgataattatttgacagtcaaagtattgatttggatggagggaccaaaatcacttttttttaaagggggactaaatgtctcaatttaaaaatagggggaccaaaatcacttattgacaaaaataaggggactaaaattgcattttagcctttatatttataaatcattcagaacacaaaataagctgaatcaaactggattttattttatttctcttctctttgggttttcttcctgaacaaacttggtctagtaggcttttaatatctatggcagagcagtttccagtaactttgtaattactaatgctacacttcatatttcagttagcattgtccttggatattttcagaaacactgttgttgtgatgttcttttatgctctgatatcatatgaaaagagtatcaaacatttaactgatagaactgcttgaagcatattgctaacgtaatcaagttccacctgagattttcatgatgctcttgctttctctgggttttaaatcatgagacatcttaattctgtgtgctctgcaagttgagttgtcgcaattacaacaatctgaaaattatgaccagtcctgacagcacttacagggactttcatcttcgtgaattctggctttatttgaatcattgttatcatatctaggggaagataaagtaaaaaattcaaattttaatctaatattttagaataagaaaccattagttgagtgttcgtatttaaattcaggatgttatgtttagaataagataccatt

SEQ ID NO: 55796 - DNA, 458 bp, Glycine max
  Clone ID: PAT_MRT3847_21394C.1
ggaaatcataagattctatataataaagacaacatatataactttatcctataaattacacacaacaatttcgagctttattctataaatgaagaatatgaaaatcgacgggctatgggaacttgggcctaccacgtctggccagaaaactatcggctgtagatgagtctatgctattaaagtcgggcccaatggtgaggttgatcggcttaaggctcagttagtagctaaaggatacactcagatctatggctttgattattgatacttgctatcctgtagctaaaatcaccattgttcgactggatctcgctatggctgccatgcgtcattggcctctccatcgacttgacattaaaaatggcttccttcatggtgatcttgaggaggaaattcatgtgagacaacctactgaatttgctgctcagggggagtatggcctagtgtgcaagctacac

SEQ ID NO: 55797 - DNA, 912 bp, Glycine max
  Clone ID: PAT_MRT3847_21395C.1
acctatataaatagcaccccttcgaatcggtattatatgtatgccaataatgagagagaataacaatgagagggagaaaaccttcacaaatagaaaatattatacttatttttttgggtataattgggttgtgggttgagtgttttataaacacatggcaagctacatattgaattggtgccattaatttagttacaatcatcattggtccccgtgatgacaaagttaccatcattgtccccaatattagacagcagctccgatgctacatgccttgaacaaaattgattggtatcagtgtaactgatctgagtgtgttttcttcttttcaacaaggaatggtttgaacatcattagtattccaagtgcttcaactatgttcagtacaaagaacaccatatgggtgcctgggaggaatgaagcatccatccgcttttgtgaccaagttaatactgcaccacctgtagcagggccaatagctttgaaaagagacatggctgtcatagaaatgccattagctgcccccctttggtgttgttccactgctcggttttgcagaaggaacaaactagttataatggtgatggacataatattcttcagaattgaagcaatacttatcactatgtatagtgccaagcctgacaacaatgctatgaaggggtagctttgcaaaagtggtatggttaacatccctgagaagcgggcaataagaataggtccactagctttttccacaaatgggtataaggtaagttggtaaataataagtgcaagacctgaaaacttgataagtcattcattacgcaaaatatctattctgcaataggaattgtaccatgtcaaaattttgataaaagtatataactaaaggaataaatgtaacttgtttcaagtggtcggacgcgtgga

SEQ ID NO: 55798 - DNA, 519 bp, Glycine max
  Clone ID: PAT_MRT3847_21396C.1
gtgggtttttttttttttttttttttattttttttttttttgtttttttttttttattttttcctgttaatccttttttgttcattttgggagtttacctacaaaaaacatgcgcttgctgggacggggggccaagcagacccaaaaaaatgaaaaaaagggggggggccataaaaaggaggcggacaagaagaggacccttacaaaaaaaaccaaggagagcaagggccccgacctagaactagacaaggagaaaacccacaggcaaaagcgggcagagccacaacgcaagcatgaaaaatgcccaaccaggaaacccccgccgagacaaaaaggcagccagagataacaaatccctggccggccccaaagaaccaagggggggcggcagcagaggagaaaagaccacacaaaaccaggggcggcataaagaaggcttcaagtgacataaacacccaagcagattgaaagaaaggaaacaattaaaccaaaacgcccggaaaacccccccctggcgaa

SEQ ID NO: 55799 - DNA, 340 bp, Glycine max
  Clone ID: PAT_MRT3847_21397C.1
gttatacctgaattgcatgacattgtccaaaccttcctcaattttaccttcttcctctcctatagacattgtccaaacctttccacaaccaaacaataaaggtatacaagggtgatggtgtgtgcctgagatgtgcatttaaggggaacaataaaatctttaagcataaatacattaatcaaaatactttttctttataacttagatccctagctgaagtgtcctgccaacaagatctgagtttccaattctaatcttgaacacgccaaagtagaagtcataagtcacaactacacattctatgccatggtgcctatggatggctatatatttcatactt

SEQ ID NO: 55800 - DNA, 212 bp, Glycine max
  Clone ID: PAT_MRT3847_21398C.1
gctatctcctcttaccaacctttactgtctttccatttattcggtccatgcagatatctggaaaccgagctataacactaatctaatatcctaactcaccattaacattaatattgtcagaatcaacaacaaaggtcaccacatctatacgatccacatacacatactcatgcatgccaatgatactctcatctacaccacatctacattaa

SEQ ID NO: 55801 - DNA, 143 bp, Glycine max
  Clone ID: PAT_MRT3847_21399C.1
taggagagtcctgttaccgatcaaggcatggaggcattgtcaaatggcgtgttcgattttggcgaaagttaaggctaagaagcgtaaggtggttacaccctgagggcggcgattggaagaggaggactagacggtcagtcgct

SEQ ID NO: 55802 - DNA, 839 bp, Glycine max
  Clone ID: PAT_MRT3847_2139C.1
gcatataaaataacagggtgttaatccgagatagttgttcaaggccaacgacgccctagaccaagctcttgcggaatcccctaagcctgccaaaaagatgaagtcatgctaagaagagaagcgcagattccgatgcggcggatgcaccggcggacggaccatccgacgactccgtccgcggacgcgtgggctgaaatcgcggaagatctggagagggagcgaacaagtacgacttcacagtgaagagtgaaggggaagacgtgagtctgaagactaaagtcaacaccgcaagcatagtagggacattgatagatcaagatccattcgtggcatataagataaacagggtgttgatgccgagagagttgttcaaggccagcgacgccctagaccaagcacctgcggaatcccctaagcctgccaagaagaagaagaatgctaagaagggaagcgaagattccgatgcggcggatgcaccggcggacggaccatccgacgactcggaagatcagaaggctgccgatcaggacagcaacggagtcagcggattgcacgtgagattggtcatggtcttgttcggtttaattatgggttttttggttctatgatatcatgtcgctagtatacagctcaaagcctcaaagattcttttctttttctctatatgtcaaccaaataaaacggtgccaccgacatctgtacctatttattgtttctttgttttcagtgtgggtagatccggtttgtgctacctgccagctgggatctgcatgtgtgcatataaacacttttcaattcattagatttagatattaattaatattgccctctcatgtccc

SEQ ID NO: 55803 - DNA, 259 bp, Glycine max
  Clone ID: PAT_MRT3847_213C.1
gtgaggacattttatatatttgtattgaacatcaaaggaaaaggcattcatctgatcaagtagaaggcaagtccaaagatacccaatttgacaataggaaaacagggcatatggtcagaagcatgcaattgcagccaaatgtcaaggctttagagacaagagatgtagatgaaatggttctgtcaaactggaagtctcaaggaaccatgggtagcatgtcagtgcttaaagaccgtgagatgttattttcaatgattca

SEQ ID NO: 55804 - DNA, 346 bp, Glycine max
  Clone ID: PAT_MRT3847_21400C.1
cacacacacccaaacctcgatcatattcttctttttaccggcacagagctgcacatagcgggtcatttgtaacatgagagtattccacgaataatgttttcgatatcatccacaccgctgttaacagcacaaacgtactgataactgcaccatcgacttaatgtatcgctaacaaactgacacaactaagcgtcctcttttcatcattctatggagaaacaacatcctgcaccacaaaagcaccctcgtgacttataggactcgacagatcatagatacaaagagactatctctgtaaataacacttttaatacttgtactttaacaatcattgaagctacttttc

SEQ ID NO: 55805 - DNA, 355 bp, Glycine max
  Clone ID: PAT_MRT3847_21401C.1
gatagtgtactcacacacgcttcatttttttcgcgtccgttcactcttttccagttttctacgttccctcttcttcttcagtcattcaagcgtatctcagttccatcctcgtttcgttaaccttctaattcattccattcgtcacttccttttcaaccgaagcttttctctgatcatcgcagagataatgaatggtggattggggaaacgtgactgcggaggatgtgatcgacgcgctccgcaatgtcgattggtcatctccgcggcgcatgctgtcggcattcttctcacgattcactgtgcccagatcttcgtcggattcgagaagccgcctcaggtgcaacctctactacta

SEQ ID NO: 55806 - DNA, 243 bp, Glycine max
  Clone ID: PAT_MRT3847_21402C.1
accgctgccagaagacaacagacacggaaaaaaaccggcacttttctaattttttgaatggaacatactacttgagcatgggatcatatgagcgggggcgcgggtacaccattattagagtgatctctaaaatcaactaatctaaactcaaaagtcttattcttaagatccgaaaataatgtcttaaaatcttggatctaactaacaacaacaattacctccaattctctctgaatgaaaact

SEQ ID NO: 55807 - DNA, 1773 bp, Glycine max
  Clone ID: PAT_MRT3847_21403C.1
gatagcaggaaccatattgctgaagtacttgcagcaaatgatgttgattgtgatgacttggaaaaagtaaaccatgctgatactatgctactcagtaattgcattgaagagattgtagcgtctgcaatttctcaccacctgatggagactaaacatccagaataccgaaatagaaaattagttatatcacacaagagtttgtcccatgtattgaatattttccaggaaagtgaaagtaatctggagaataaagattcaaacaaggaggatgctcttgcaacaaagaaagatggcgacaatgagtttgagaagcgcatgagagcagaggttgtgcctgcaaatgagataggggttacatttgaagatattggtgcattggatgatattaaagaattacttgaagatgtggtcatgcttcccctcagaagaccagacttattcaaaggtgggcttctgaagccttataaaggaatattgctttttgggcctcctggtacaggaaaaacaatgcttgcaaaggcaattgcaaatgaagctggagcaagcttcatcaatgtctcaatctctaacatcacttcaaaatggtttggagaagatgaaaaaaatgtccgagctctgttttcactagcagctaaggttgccccaactattatctttgttgacgaggttgacagcatgcttggacagaggactagagtaggagagcatgaggctatgaggaagattaaaaatgaattcatgacacactgggatgggctattaacaggacctaatgagcaaattttggttcttgcagcaaccaacaggccatttgaccttgatgaagctatcataagacggtttgagagaaggatcttggttggtcttccatctgttgagaacagggaaatgatcttgaagactcttttggctaaagaaaaacatgaaaatttagacttcaaagagctggcaaccatgacagaaggatatactggaagtgatctaaagaatttgtgcatcactgcggcttatcgacctgttagagagctaatacagcaggagagaatgaaggacatggaaaagaagaaaagagaagcagaaggccaaagttctgaagatgcttcaaacaataaagataaggaagaaaaagaaattaccctgaggcctttaaacatggaagacatgagacaggctaagactcaggtggctgcaagttttgcatcagaaggatctgtattcggctcgaggaagcactgaatgatttgtatggtgaaggaggttcaaggaagaaacaacagctcacttacttcctttaaattgtggaatgctacttttatttttggatttgtgaccattcatcctcaatgatacatacctttaacaaaggaaggattccttcatcagagatgttgaactcaaagcatgcccaaatttctcactatataccaatgtcatagagatatcatgattcccagaaaagcacaagttctaccacacatatctattctctaaaggacgtgtggatcgtcatgcactatgtttgggaatgggttctcggttttcatttgggttgtctacaaacaaatgagcacctgtattaggggatttatattatgtcatgcatggttttggaagatgcaatggctttgtaggaagtaggaatattttacaccaaacattttaggtatgctgtattatataatcagaaatttgtaaattgattgtgcaactgtactgcttaataattaaaattagaaagcttctatcttatctaattgtaactgacaactttat

SEQ ID NO: 55808 - DNA, 242 bp, Glycine max
  Clone ID: PAT_MRT3847_21404C.1
agcgagcggaggcaggcaatcagttaactcattcggaacgagacatctttcacaggagaacgatggtcaattacgttcatgattactctagcattacggactctagctaattagggtacgcctgtatcatctgcacaggtgtttgaataatggtgaactaactccgccgatcgcgcccaggcacccagggtgtcgggggacggactgaggcttgaatgccttcacgctgagcgtcagcattt

SEQ ID NO: 55809 - DNA, 2195 bp, Glycine max
  unsure (1)..(2195): unsure at all n locations
  Clone ID: PAT_MRT3847_21405C.1
gacttgaccggaattcctgtttcgtcttacgcgtccgactcaattaaagaacggngangccgatgggtcagaaaatgaagaaggactatagggattagggaagcatttatatttatttatgaatgaaaatgaaatgagaacagtaaagccgttggaaaattaatcaatcatagagttaggttttggtttggtttggcagaagaaagtataacggagagaggcttgagtttgtttggtttttcttgcttcctttggtgtcattgctatataatactaatactccttccattcccttcccacacaacattgatttctgagattcagatgatggcgagtgagtcgcaaaactgggtgttcatggtcactgcacagacaccaaccaacattgccgttatcaagtattgggggaaaagagacgaaaccctcatcttaccgattaacgacagtatcagtgtcactctcgatcccagccacctctgcaccaccaccactgctgccgtcagtcccaatttcaaccaaggcgaccgcaacaaatagagtgaaactctcgttgctttactacttcccgccaacatcacttcgccctagaatctgcattgagagagtggcaaaatgtggcttattggaaagtctacgagatttctctttctgggggcaggtaccagagctgttgaagggagatacgttatcgtgctcctgccacctccagaaattaaagataatattccatcacaaaagaggattggggcaaattgcatgtacacattgcttcgtacaacaacttccctactgcagcaggactggcttcatcagctgccggttttgcatgccttgcttatgcccttgggaagctaatgaaggtcaaagaagatgaaggccagctatctgctatcgcaaggcaaggatcaggtagtgcttgccgcagcttatttgggggatttgtcaagtggataatgggaaaatatgataatggaagtgatagacttgcggttcaacttactgatgaaaagcactgggatgatcttgttattgtcattgctgtcgttagttcacggcagaaggaaacaagtagcaccactggaatgcgtgagagtgttgaaacaagtttgcttttacaacacagggcaaaggaaattgtgccaaagcggatattgcaaatggaagaagccattaaaaatcgtgattttgcatctttttcgcaattgacctgtgctgatagcaaccagtttcatgcagtctgcctggacacatgcccccctatattttacatgaacgatacatcacacagaataatcagcatcgttgaaaagtggaaccgttcagaagaagctccccaggtagcttatacatttgatgcggggccaaatgctgttctaattgcacgcaacaggaaagctgctacctctttgattcagaggctgctttactacttccctccaaattcagatgacctcagcagttacattattggggacaagtcaattgcaaaagatgctgggatcaatggaatacaggatgtagaagctttgccgccacctccagaaattaaagataatattccatcacaaaaatacaagggggatgtcagttacttcatatgtaccagacctggaaggggacctgttttgctttctgatagcattcaagcacttctgaacgatgaaactgggcttcccaagtaagttcatgggaaacattctggtggttgatctattcttcgttgggcttcactagcaggctttttgagcccaaaatattttgactagaggaccctttcaaggaagcacatgctactcgtggcatgatgattcgttactcctagttcgcagtatgtgtttgtttaggtatctgtaatttttgtttcagatctagttgggctattttgttggagaaaaataagtctcgctcctttttttgaattgagcaaaataccttcaattcatttgagcttgcgagttaaacttgtcagtttttatctgaacaattctccctactttgctatattttgatcaagtgttccattttattccaatttcagacctagttaggctattttgttggagaaaaataagtctcgcttcttttttgaacaattcatttgagcttgcaagttaaacttgtcagttttttatgtgaacaattgtccctactttgctatattttgattaagtgttccatttnnttcttattgtact

SEQ ID NO: 55810 - DNA, 793 bp, Glycine max
  Clone ID: PAT_MRT3847_21406C.1
ggcgttactattacgtctgtgattagatgacaagtgtggcacagttctttccttttactattgctggtgcattttctcttcagaataatcagcattgctgaaaagtggaaccgttcagaagaagctccccagggccaaatgctgttctaattgcacgtaataggaaagctgctacctctttgattcagaggttgctttactacttccctccaaattcagatgacctcagcagttacattattggggacaagtcaattgcaaaagatgcggggatcaatggaatacaggacgtagaagctttgccacctcctccagaaatcaaagataatattccaccccaaaaatacaagggggatgtcagttatttcatatgtaccagacctggaaggggacctgttttgctttctgatagcagtcaagcacttctgaacggtgaaactgggcttcccaagtaagttcatgggaaacattctcgtggttgatctattcttcgttgggcttcactagcaggctttttgagcccaaaatattttgattggaggaccctttcaaggaagcccgtgtgctacccatggcatgatgattcgttccttcctagttcgcagtatgtgttcgtttaagtatctgtaatttttgtttcagacctagttaggctattttgttggagaaaaataagtctcgcttcttttttgaacaattcatttgagcttgcaagttaaacttgtcagttttttatgaaaacaattgtccctacttttctccaacaaaatagcctaactaggtctgccatttt

SEQ ID NO: 55811 - DNA, 2585 bp, Glycine max
  Clone ID: PAT_MRT3847_21407C.1
gtcggtgttggcgtccgaggagccttcaatttcaaaaagtctcaaccaaacaaagcagcagcaacaaaacacaacaacaaaagttggtgttactgtttattgttgttagtgtttgtgttgagtctctcaactctcataagaggtccctctttggagtcccatggttgctctctcttccgcggagttcaaccactgctccaacggcctctttctctctcttcccttcctctctcctcagacccacccttttccacttgttaaggtttctctttgcagcagatcaagtgacttgggagaagggagaaaagtggtcctgagttctgactggttcagattcatggtatcgtgtgccatatggtgtgtgttttctttgtcaaatataacgtcgttaagcttgttcaaagattttgactctgaaatggaaggttttgttgtgtaagtgagaaaaaacaaaggttgacctttgttttattttggtgaagaggctggttctgtgtcttgaactgcaggtttaacaattcaacaagagtattcaacaagagttttgttgaggtaagcaaattgagtagttacttgttatatttcttggtttgttgaggagggagggaattggtatggctgttgccaatagcaacagcagcaatgaaccttgtgcttcatacaattgttacaaagtagcaggcttgactgagaccatattggacataagtcacatctctaatttaaaggatcggtacattctcggcgagcaattgggttggggacagtttggtgtaataaggacatgttctgacaagttgacaggagaggttttggcctgcaaatcaattgctaaagataggttggttacttcggatgatttgaagagtgtcaaacttgagatagagataatggctaggctatccgggcaccccaatgttgtggatctcaaggcggtttatgaagaggaaggttttgttcacctggtgatggagctttgtgctggaggggagctgtttcacagattagagaagcatggatggttttcggaatctgatgctagggttctctttaggcaccttatgcaggtggttttgtattgtcatgaaaacggggttgttcacagagatttgaagcctgagaacattctcttggcaacaagatcttcctcatctcctattaaattggcagattttgggcttgcaacctacatcaagcctggtcagagtttgcatgggttagttgggagtccattctacatagctccagaggtactagctggtgcatataaccaggctgctgatgtgtggagtgctggtgttattctttacattctgttgagtgggatgcctccattttggggaaagactaaatcgcgaatttttgaagccgttaaagctgcctccctgaagtttccatcggaaccttgggatcgcatttctgaatcggctaaggatttgatcaggggaatgctctccacagacccatctcgaaggctcactgcccgagaggttttagatcattactggatggaatgcaaccaaacaaatcctgaacagctaagtgaatgtaaaatccgaaattgtgaagaatggaatgctggtggcagctcattctctgcctctttaatgtccaggagtcaggacatcagttttggtgccagctcacctacttgtgacgctcaatcacctacattcacttgcagatcatcattttcctcttttttggtggaaccagtcactccatgtctagtttctggtgggttttcattcaagagtgcaggcgattcccctgatttggaattttgttctcccgttccctcaatgcttagcttttcattcctcagccccagttctgttgttgagcaaaagagttgtaaattagagtgctcagctaacatggcagatgtaaatgcaattgctggagaaacaaacttgggaaaattgcttatgctacaagattctcctctttgcgttggacgtgaggttaaagaaacggatcgcaagcctgtagaggccaaaagggcaagcggaatgaatggacataaggtattgggaatccacagcaagagaaacaggacaattggactaggtgagtgtgagcaacttgaccttatggtgactgaatcagtcattcgttggtcatcatgcactcaactacctacatctttgagatcatctcttgtctgctaagcggatagaagacttgacttgttaatcggattgcttcatgccgtgcctaaattgcagcatacttgacgcaaattttgctcagctaacgcattgtatatgttttccttatttgcgttgttgttaatgttaactgtcttctggctggtgcaaagttttgtttagttttggtagtggcttaatggtgtgtctgattgagaagtggtactatctaatttctcactttcttgtttttcactttttctcctccttttttccgtctcatgttatttgccttgagtgtgagtaaaagcctgacggcattcattcagcctggattgtaaatgaagttgatcttgatgtatgctccagttgtcttaatctgatgtattccagtcatcttgatgttccacccacgcgtccggttctagatcgcga

SEQ ID NO: 55812 - DNA, 981 bp, Glycine max
  Clone ID: PAT_MRT3847_21408C.1
gagaacagtaaagccgttgcgaaaattaatcaatcatagagttaggttattgcgtttggctttggcacgaagaaagtataacggagagaggcttgagtttgtttggtttttcttgcttcctttggtgtcattgctatataatactaatactccttccattcccttccgacacaacattgatttctgagattcagatgatggcgagtgagtcgcaaaactgggtgttcatggtcactgcacagacaccaaccaacattgccgttatcaagtattgggggaaaagagacgaaaccctcatcttaccggttaacgacagtatcagtgtcactctcgatcccagccacctctgcaccaccaccactgctgccgtcagtcccgctttccaccaagatcgcatgtggctcaatggaaaggagatttctctttctgggggcaggttccagagctgtttaagggagatccgtgctcgtgcttgtgatgttgaggatgaaacaaagggtataaagatcacaaaggaggattggggcaaattgcatgtacacattgcttcgtacaacaacttccctactgcagcaggactggcttcatcagctgccggttttgcatgccttgcttatgcccttgggaagctaatgaatgtcaaagaagatgaaagccaactatctgctatcgcaaggcaaggatcaggtagtgcttgccgcagcttatttgggggatttgtcaagtggataatgggaaaagaggataatggcagtgatagtcttgcagttcaacttactgatgaaaagcactgggatgatcttgttattgttattgccgtggttagttcacggcagaaggaaacaagtagcaccactggaatgcgtgagagtgttgaaacaagtttgcttttacaacacagggcaaaggaaaatgtgccaaaagcggatatttgcaaaatggaaagaagccattaaaaaatcgtgattttggcttcttttt

SEQ ID NO: 55813 - DNA, 185 bp, Glycine max
  Clone ID: PAT_MRT3847_21409C.1
gtttgctggggcttctgatacggctggtccgatggatatggcggtctagtttgacatcgtcgacgctgatacgttaggattggatcagttcatgactgtcgggtagtagtgtattaacgtcaaggataacatcggtggtgtacggacaaagacggcaagttctgtatcacctatgcaggatggca

SEQ ID NO: 55814 - DNA, 214 bp, Glycine max
  unsure (1)..(214): unsure at all n locations
  Clone ID: PAT_MRT3847_2140C.1
cgnatctaagcaccctgatgactgaacggcctggtggttatccatggatcaaaacgtgaggagcctttgatgtcttgacggccatctgcggtgatgcttctataaggctccaacgcgcgacttccttgcccagacaaggttccgaagatacctgtagcacttagccgtaacttgtggtccgaggtctaaactggtccagacttgtagcagtatt

SEQ ID NO: 55815 - DNA, 526 bp, Glycine max
  Clone ID: PAT_MRT3847_21410C.1
atgagtcccacaaaatccctatttttcttcctcagacccgacatatacacttatcttctctgcagaagctatgtctaagcctaaggtcttcttctgcatgaccatcaacgttgaatctgctggccggatagggatgtcagctctacgactacgtctctcaccgcaccgtcaagaacttccgcgcgctttgcaccggcgagaacgacgtaaggcgatagcggcaagcccctccactaccagggctcgaccttccaccgagtgatcgcgagcatcatgtgtcagggtggagacttcaccgccgagagacggtcatcgctgattgaggcggatttatgtggccatgtatcgccgagcaacaattgcagaacaacttcaccggttccggaatccgctccatgaagcaagcatgttcctgcatcgacaaattacataccttcttgtgcaggccataacacatcaatgttgtcgatgactagcaatgcaggtgtttcgtcttcagtcatctgcaagatgagtacgttaggct

SEQ ID NO: 55816 - DNA, 425 bp, Glycine max
  Clone ID: PAT_MRT3847_21411C.1
tcggttttttcttcaaaatcacattcacctcgaccttcaccttctggggtgctttctttacttctacttcttcaacttttgttttcgctatggactcgaaaaaccctgcaaggtttacgctggggaagcacccgacgctggctcgagaaccacgagtcctataatcctccaaccaaacccatgtgacaactggtgatcaggtgcgaaggtcgatgtactcggcattcgaaggcgcatgagcattgaaccctccaggcgttggagtctgcagcgagtgtgcaccacaaggacatctatccaccgcctgctcttcatggtgcggcgtgtgacggcttcactgaagctgatgatatatggctccaaaagggagctgcagccgaccccaaagatcgatgggggagcacgccacttgcagatgcttattt

SEQ ID NO: 55817 - DNA, 179 bp, Glycine max
  Clone ID: PAT_MRT3847_21412C.1
ttttgaaaaatcaaagaggggaaatcccctggacaaaaatttcatttacactagaaaaggccccaccagtgaaaaaagtaaatatacaataagtttagcatgaaaaaaatacatgtgaaattcaggttgtcttcatattgcttgaatgaaattgctatcaacgcaactcataccaaaaa

SEQ ID NO: 55818 - DNA, 324 bp, Glycine max
  Clone ID: PAT_MRT3847_21413C.1
tcgacccacgcgtccgtatttattcagtgattctacagaagtgcctaggtcaaaatgggagctgcccactttctatatttaattatgctttgttggtaaacagtaacctaagacctactttagcctataaacaaccaggcccaaaaaatcctaaacaatattctaggaaggcttctcgagatttgtttgttcaaaaattctgttgggaatctgctgtttatcacaattgccggatatatgctaatgatgggaggctgctttgttattgtgatcggcggaagcttgaatggtgccttagtcggggtctgtggggggcttgttggt

SEQ ID NO: 55819 - DNA, 1006 bp, Glycine max
  unsure (1)..(1006): unsure at all n locations
  Clone ID: PAT_MRT3847_21414C.1
gggtggcgcacgcgtccgacggctgcgagaagacgacagaaggggaaaaacatggtggcaggcgagcgatggaagaagaagattttgatttcgagaagaaggtttcgataaaggaatcgatgtcgatgtcgatgtcgacagagcttgatccagccaaagttcttcttttgcttcgtggtttcctccaaattcagcaacgcagggccgaagcatattctaagctcaaaagtgggttttctgactacatggcctctggaggggaattggcttacaagcagctctgcagtgaaatcacaatagagtttaacaattgctcgaaaaaagtccttgaaatggagtcactgtttagaagccctgattactgccgagttgatctagcgcagctccttagagctgttcaagatcaggaaaagcagaaacttcaactgactgccaccattcaggtgttaaagaaagccggtcgcccatctgaacgtctggtaagccatgagaattgcaaatttacaaagccagcagagcatgagtgcgttcatgttcaggagattacagaagcttctgggactgaagaagctgaagcagatgctgagtatgacaatgctctaaaagaagctattagaggtgtccaggatgctgtcatggccattaatgaacatctagaagaagtcagatatgaaattgctgcccttgaagcagagtgattcttttccagcatatttactaaaacattattgacttcaattcatattcagatcatataatcatttgcctgtgaatggataggttcagacacccagtgctaacaaatatttttatgggtctgcaacccgtggaatgtatatagacaccctaaaatgaagttcatgaattttgtccctttttctccggcgacggctctgggcgcatcgccggcgattttagccttcggtctctcccgcaggcgaggttgctgccgggggcgtagggcctcttcctagacggagatcaatcccacttgtgaattntgctg

SEQ ID NO: 55820 - DNA, 349 bp, Glycine max
  Clone ID: PAT_MRT3847_21415C.1
atgcaaaaataatctatacttgaggctattattttttattaatgcaataatggtgaatgtagattattacaagcaacagtcaaagaagaggaaagggtaactgtgctcataaaatatgctgccactcaaaatgaggacaaatatgtgagaaacagagatttgagctttcttatatcatggaagcaatgttgaaaaaaaaaactataggcggccatctataaaaatctgctgaagcggggacagaattactgaactattcctgctacctgaccaactgtacctactgagagaataattaaaacttggaatggacaaagtgatagctgccaacgcgtgaaaattgtgatga

SEQ ID NO: 55821 - DNA, 169 bp, Glycine max
  Clone ID: PAT_MRT3847_21416C.1
aacaggcttcctggtgctggtgctttacattctagtagcgtgaagtacgtttcggtgcgctgcgttcacattcacgggtgtgttaatgctcttacgacctttaaactttaaggacactttcgtcttcttcactctcaacctcaaccacattgacgacgttcacatcagt

SEQ ID NO: 55822 - DNA, 2046 bp, Glycine max
  Clone ID: PAT_MRT3847_21417C.1
ctacccactctatcactgctcgagtacggctgcgagaagacgacagaaggggtatgtctcatgtcttgctcaaccaggtgaaccagttggtgtattagcttctcaatctgttggagaaccggcaacgcagatgaccttgaatactttccaccttgctggtcgaggtgaaatgaatgtgacacttggaattccacgcttgcaagaaatcctggtggctgctgcacgtgatatcaaaactccatttatgacatgccccttgagacatgataaatctatgaaagatgctatttgtctcgctgataagttgaagaagattactgtagctgacataattaagagtatgaaagtttctgttgtaccagtaacggttcttggtggtcaagtttgcagtatatataaacttgtgatgaagctatataaatctaaacagtatccagaatacactgatattacccttgacgactgggaggaaactctaagggttaactttgttagagagttggaggatgccattcaaaatcacatgacattgctttctaaaattagtggcataaaaaaattcaagactgatccacaatcaaattattcaaacagctctgaagatgctcacagcaatggatcagaatctgagaaaaaaggtcaaaataatgatgacgacgatgaagatggtggtggtgttgaagacactgaagggtatgaagatcttggatcagatgcacaaaagagaaaactacaaggtactgatgaggttgattatgaggatggtcctgaagaggaaacacatgatggtgagctgtcagaggaaattgaaggtgatgaggatggcagtgatgttgatgccaatgagaattataacaatgtgacagatgctaataattctgaaggacttgaaaaaccctccaagtccaagactattgatgaaaaacaaaatttgaaacgagaaaagaaaaaatctgaaccagcaacaaaaaaatatgacagggcaatttttgtggaagccaaagggaagcattttgagatccactttagatttactggtgaacctcacattttgttaactcagattgctcagaggacagccaagaaggtttgcatccaaaattttggaaaggttggtgaatgtaaagctattacatgcaaagaaagtggagtaatctactatggtaaagatggcagaaaaagggatgagatttcagcctcagagaaagaacaaataccagcacttcagacatcaggggtacattttaaaacattttgggagttggaagatgatctggatgtgaggtacattaaccacgcgtccgtgcatgctatgctaaatgcttatggggtggaagcagccagggaaaccatcatcagggaagtgcagaatgttttcaagtcttatggtatatcagtaaatatccgacacttgacactcattgctgactttatgacgcacactggtagctatcgcccgatgaacagaacggggagcatagcagactctacatcccctttcatcaaaatgtgttttgagacggctggcaaatttattgttgaagcagcttatcatgggcaagtggacaacttggagacaccatctgctagaatttgtcttggtttgccagtgaagatgggaactgggtgccatgacttgatacagaagctggagatatgatctggctggcttgttccttcagctttagacttttggccctcacatgcctggaggtcatgccaaattttgataccataattattgtgttgtgcgactaaatgccaaaatttcatggccatttttatctggcttcaaagtaattttgtttggatgtagtagtagcatagtttgaaatgccattcctcgtcccatatctatacataggtggttttcatggggccttgattttcccatttggtctgaagtgtatgttttcacctaatttaaatatttttgctccaaaataatggctcctatcccatcaagtgtggttggttatatcaatcacatgatgctatcgggttttctttaaatatttttactgttttgcatatttattgacgatg

SEQ ID NO: 55823 - DNA, 753 bp, Glycine max
  Clone ID: PAT_MRT3847_21418C.1
ggtccgggcacgagacaacttccaatttattacacagtattactcagctaagctcttctttgaatagcaaggaagaaaaacctgaagaaaactctaccctctttgtttaaggattaacctgctcatttcttcccaagatttttctttcaaaatgaagccctcttttgtggtctctcttctgcttttgtcactcctccttgcaaaaactcaagggattcgtctagggaaagtgtcttcagcagttcagcaacagaaacaacatgatggagaaagtactttgttgaaaagaagtagcactgatactgaggaagcttctctctgcaaagacaacgcatgcacaggaaacataaagaataggaaactcgttaacactcccgtttccacagcccaatccctctccaagaatgtggaagagtccaaggttgacccctcggtaaatggcaatactagaaatgtgaatacattgagcacttcgaagcacaaagatgtccctgaggagcactaccatgaccttgtagagataactgagatggactattctccagcaaagagaaagcctcccatacacaactgagtctagggatgatcaactagaaaaaaaactaacaaagttccgtatattaggataataaaataataatagacagagatgttggacagcattgcagaaaatgctgcagtttttttggcctatgaatgatttgtacattattatccaatcacaccttttttattgattatgatatatatttt

SEQ ID NO: 55824 - DNA, 267 bp, Glycine max
  Clone ID: PAT_MRT3847_21419C.1
cattgctagctaccgtgagctagctcaacagctgcaatggtgaccaccaattggctagaagaatccgagactctttcctactggccagacctataagatgcccaattggcctaagatgtcgaatacctgctaccgaaaagatggattccgtgcttggaattcgagttggagcacagattctagtaccgggagcacaacaggtcatctgcatactaagagggacgctactggaccatgtggaagctgtctatgtatggctgcactgat

SEQ ID NO: 55825 - DNA, 426 bp, Glycine max
  Clone ID: PAT_MRT3847_2141C.1
aaccacaaaaaaattattttccttgtttcactctgtatgggcccatagcatttccacgggtacaatttctccaccccaagtatctacaatgtgaataatgattcttcttctacacaaatacctccggctaatgggtcatcagagaccaccaacaacaggtataggacaaaatttggggtatctgatcctaactctctgtagggggtttttgttttaccaccaaatcatcagctgagtagtattcagctttgagccggttcatataggaaggattatgccctcctgtgtcagttataaagagactaatcaagtttctggcggtcacgtatccaaaatgttggtttaacaacatgaagagaaccggtccctcttgtagaatccatgcaatctggagaattcctcaaagtccagtagctcagatgggga

SEQ ID NO: 55826 - DNA, 297 bp, Glycine max
  Clone ID: PAT_MRT3847_21420C.1
gcagcctcgtattccttcctctgggttgatgcctgcaagtgatgttcttattcgtgcaaaggaggttagtctactttggtcccccctccctccaaatggttatggttgtttggcaatcaccatgtaatattgcctgactatttttcttgtcgtaaagttacattagaacactattcatgcggaagcttttatagtacttccaattagagttcaagagttttatatatccttttgactttcatattctaaatataatctctccatggaatttcttggttgcagattttgccccaaaca

SEQ ID NO: 55827 - DNA, 549 bp, Glycine max
  Clone ID: PAT_MRT3847_21421C.1
gcccgcctttcccccccctctagccccctctcttcttctttctacccctcgtatattgtccccttcattcttcgtgcttcctctaccatggggtgtggttcgtgttctgtgccctctctacccagggccgcggggtgtgttccgctgcctcaccctcctgtgcctcacgcgttcttcctttaacttgtgcgtctttttttgccagcgtgcactgcttagtgtttttagctttcaacgtttaatttgagcgaattaataagccaaaatggtgatgctgggtttgcgagagcttgtagtgactctaaaatccaaaataaggtctttgaaactgaagaaaccttacgataagatggagaagagtgacagcatgagagtggagataagaagcaggaaggccagaaagcttattgaagagaccctcaaaattgctgattcacctaagtccaaaaccttcaacttatgatggtatacatatgctaccttatgtttagttgtatgtattggtaaaacccttcaataataaaggttctgctcttcatacaaaaaaaa

SEQ ID NO: 55828 - DNA, 451 bp, Glycine max
  Clone ID: PAT_MRT3847_21422C.1
aatggtaacacgcattttttttttataaattgttcagtatataacacatggtagacctgcccagcttaagacttttagccctactgggccttcacgattacttgtgaagaaaattgcggagaacccttttttggccgaaggaacttcatttgttcagcggggccaacccttttggacggattaatgagagtccatgaccgatgatactgatgacgaggtttccaagtttaagctggcattcccactgataccaaatatagatatttgcgtgtgactgaagagcatccattcctaagccttcttggatatcctctcttgacaacaagggatgccaaatcacaaggggacccgatcgtcaaacggaagtgtttgtcgtgacagctgtcctagggcggagcattcaaagctgtggaccggtgaaattgacttttctttcttgcaaacatagaga

SEQ ID NO: 55829 - DNA, 540 bp, Glycine max
  unsure (1)..(540): unsure at all n locations
  Clone ID: PAT_MRT3847_21423C.1
tcgagggnccggccgggcccggcatatatgcaaatgaattaccaaatccctcaaaatttttgtttaatactagtggattttgagctagttgtttataaagtcatcaaaggatcgtcttgaacatatattctcctccacaatggaaataagatgtgtagtatctgagccggaacccatagagcaatggtcatatggccccaaggagtggaacgtttataagagaaagccaaaacctagtgagatggaatgagtttataaaaaccattggtcgacattggaacatttccgatcgagattgttcttccctaatatctttgccactaccgtgattaatgtttccttttctgtttagtttgagttaaggttcctataaaatgtcaatagtttctttcatgaggctaatagtaatgtggaaaaaaaggaaaaacagtccttaatcggcatatatatctagttccggcttgaagaaagcccatgttttgtattttttttattttgtttgttttataatgcaatcttaaataatgtgagtttaggtag

SEQ ID NO: 55830 - DNA, 295 bp, Glycine max
  Clone ID: PAT_MRT3847_21424C.1
aatgtatccaccttggtatttaatcaattaccttgcgatactattctaagtaattactaataccatcgaattcttcatatattttttttaaaaaaagattcaagtaatgttctaaatcaaatgcacgtcttttaccaacgggtttaaaaaaaacgagggcgcagttaaacacaggtaaggaaacatcttgagactaaatcattcaaaattttcaaaggcggatatttcattgactcaataaaaggccggtaaactttggcaaaaaccacttttacgactcggaatccccccaaaa

SEQ ID NO: 55831 - DNA, 282 bp, Glycine max
  Clone ID: PAT_MRT3847_21425C.1
tacggctgcgagaagacgacagaagggggagttacgaaatcgcagttccagcagagcagcaccactaccatttctcagttttgatcgaactcattcttttcctcgaccacaatgctctctgcatcaggttcccggatcggatcgctcaacccgatctcgaaccgctctaacaacaccgcctgcgggtcgtcgtcttcggcctcggaagcttctggagatccgaagctgcgttcggttgattaccgggcgttgttcgcaccaccgtctgctacgacggcggat

SEQ ID NO: 55832 - DNA, 341 bp, Glycine max
  Clone ID: PAT_MRT3847_21426C.1
gccgcccttttttttttttttttttttttttttttttgtctgaaaaggaacaatacatcttcaccgggctagtttcagttacaagacttgaaaaactattttccaatatatcagtgtccttttctcccaaaaaaggttgctcatcgtgttgaatttcaaaacctcaaacaataaccacattttcctagagacaacacaaatttcacttatacaacacaagccaacgtttttgacaatccataaaatgtctcgtttcaaaacctacaaaccttatgagaactttaagacactgattttagctttcccactcaacacaaaaaatacccacttcttctggagcc

SEQ ID NO: 55833 - DNA, 295 bp, Glycine max
  Clone ID: PAT_MRT3847_21427C.1
cttgctgtttcaacttcaacgcgcttcggggggatcattgatatctcttgaaaaacggcacaagaaacctttctattcacatctgaatctgtaaacgaggggcaccctgacacgctgtgcgaccagatctctgatgcagtacttgatgcgtgccttgaacaggaccctgacagcaaggttgcctgggagacacgcactcagaccaacatggtcatgggcttcggagagatcaacaccaacgccaacgtagaccatgaaaagaatggttcgcgacacattgcccgcgaaggtggat

SEQ ID NO: 55834 - DNA, 263 bp, Glycine max
  unsure (1)..(263): unsure at all n locations
  Clone ID: PAT_MRT3847_21428C.1
gatgtctaaaatgcaaaacaacggggccgactaacgatgccaattcttatgaagttgaaaggaggaaattatattgcacttgcccgggtgtgggtgcatgaattatactatcaacacnaattgtttgcgtctgtccttacacaagcccttaaaaaacatccttctgactgaaattgtctccggtcgtggcttctatgaattttgtctataaaaataattgcttgctctgttacgacccaaacccaatttctaaaacatttaac

SEQ ID NO: 55835 - DNA, 206 bp, Glycine max
  Clone ID: PAT_MRT3847_21429C.1
tagtgacaacaaagacaaaaataacagacaactactttacaaggacattattcacgctatatgctaaaatgctacagaaaatggaaaattgccgcaaaaatttttaagaaattccaaaacaccatagtaaatgtcaaaaaaacattttgattcttgtaattttggtgatttaaagcatgaatagaaatatcaaagtgataatataa

SEQ ID NO: 55836 - DNA, 1277 bp, Glycine max
  Clone ID: PAT_MRT3847_2142C.1
accgaaacgtaacaatgccaacactctcatccaaacccccctttaccaattacccggtcggcgccgccgcggccaccacccttctcttccttttcttcgccgtcggaatttccacggtcctcgctagcaaccaccacgtcatcaatttccggtccccgaacctcttcccggagggcctggcgtgggacccgacagcgcagcacttcctggtcggatccctccgccaccgcacgatctccgccgtctccgacgccggcgtggtcgaaaccctaatctccgacccctccctcccggaaaacgtcaccttccttggcctcgccgtggactcccgcaacaaccgcgtcctcgtggcgatccacgccacggagcccctccctccgttcaacgcgctcgccgcctacgacctccgctcccgccgccgcctcttcctctcccccctcccctccgccgccggcgatgacaaacgcgccaccgcgaacgacgtcgctgcagacttcaacggcaacgcctacgtcaccaattctgtaggaaactacatctggaaggttaatctcaacggagaagcttcgattttatcaaattccccgaagttcaccgtacaccccgtggtacgcgacacagtgtatagcttctgcggcctaaacggcatcgtttacaacaacaagggctatctattggtggtgcaatccaatacgggaaagatgtttaaaatcgataaggacgatgggactgtgagacaagtgcttctcaacgaggatctaatgggcgctgacggagttgccttgaggggagacggcgtcgttttggtggtgtcctttagcaaattgtggtttgtgaagagtaatgatgggtgggcccagggtgcggtgtttgacaagattgaccttgacgaggaggggtttcccacttcggttgtagtgggggagagggacagggcgtacgtgctgcacgggcgtgtgatggagggcattttggggaattcggagagggagagttttatgatagaggaggtgaagtcgccgaaggagagtgagggggagaatgtttggttgtatgttatggttggaattgggttggcttatttcttgttttggaggtttcagatgaagcagctcgtgaagaacatggacaagaaaatcaactgatgatttgttgtttggaaacattgtactttacgctcagttttttttgtttgttagatttgtagaagtgaaatcatattatttatatatgtgcctttgaaattatcgtattattggatgttttttcttcaaaaa

SEQ ID NO: 55837 - DNA, 378 bp, Glycine max
  Clone ID: PAT_MRT3847_21430C.1
agcgcggaaggcggctcgagagccaaccaagcccttattacatttttctttcactcccgaaaacacactgtgctgtgtttttacactaagacacccccaccaccactattgctccctttactttaaacatacttatttttcacacctcacaaatcttataaataatacttctaaccctccaaacagaactcaccagctataattgccaacattactaattactcatctcacaacgataatactattaaaataaacctatccctacttattcaaaaatgactaaaatttcattacccaaaccatttaacatttctttattcatctaaataccaatcactcttattattacacataactttccttttgaaccaataaatt

SEQ ID NO: 55838 - DNA, 721 bp, Glycine max
  unsure (1)..(721): unsure at all n locations
  Clone ID: PAT_MRT3847_21431C.1
ccacgcgtccgggcgaagactcgaagcgctgagaaagccgcgcaagtagatgcggaggacagaaccgatggcctcgaaataatttccatcggttccctctacaaaggatcctgggataagaagtactggaccacctctaggggaaaagatcggtatccatatccagttggttatcaagctgttagagcttataacgggaccacttataagatggaaatttgtgaaggtgtcaatggccctagatttttgattntcttctgatgatgggagttcatcttctgggaaaactcctgaccaagcatgggaggagtttcagaagaaaggttgcccacgaatcaagatttggcatgggaagagactttcatctaagatggatggcttggagctttttgggttcaaaaatcagtttatccagaggttgctccgggaactggtgacagatgtaaatggaatagcagagcggagcttggtatccccaaacatttgtgatggggttactagaacagatcatgataattgcacaaatgtaggcacatatcctgatttactaacttgcctcggaaaaccacgtgttacagggaagagaagcagatgtgaacttaagaataaaaaattaaatgtacgagctagatctcagtctccagaactgacatgtagtagaccttcaattgtacagaatgagaagagtcttggtcagaggagttctacaatccattatggt

SEQ ID NO: 55839 - DNA, 101 bp, Glycine max
  Clone ID: PAT_MRT3847_21432C.1
gtgtggttactagaaagtagaagccgggcacggatgttcgattataccacaaacccaacttgtcctcaaaggccatgtaaatgcctagccaatgaacggcc

SEQ ID NO: 55840 - DNA, 723 bp, Glycine max
  Clone ID: PAT_MRT3847_21433C.1
ctcaatttctcttttgattatatgaattatcctatatatttattataggaagataatttcttggaatattttggaactaactagcgcaactgttattttattttaatttttattacttgcaaaaagaactctttttttaacaagaaaaaatatcatcctctcttctaaataattattaatctaatgaaattatataagtagttcaatatccatcaatttggtctttgggttgagatattttactaacattgaagaatttttcaatacttgaaggaatacgtaacatgatttcttatactttagactttagagattacgtgtataatttcattaatttaagtattattgaagacagaagatgatatttcgcggactaaattcatggtttattcaagaaaaaatgcatcattattaatgtattttgaaagctttctgaaattaaaagttatcatgctttattatgttttctcttttttcctttcagtactgtttcccttttctacaagtaagaagtttaaacagggtcatcagtaagaaaatattttcagaaaagctatgtgaaagaccagtttactacttgctttcaccaaggttcacaaggattatgctgtgtctagactcgatccttgcgagggtcataaaacaaccgggaaggttattttttttagggtaaattatttatttgattcctataatttcatgattgttacttttttaggtatt

SEQ ID NO: 55841 - DNA, 265 bp, Glycine max
  Clone ID: PAT_MRT3847_21434C.1
aggaaggactgattagctagcttccaagatctctttcttgaggctctcagggatactaaggcttgacttagctagagtcatggacaattcatttctcaatctcactgttgatggtttccttaacaccggagctggcacagccacgcgagcagttgctgtagatactcatcatattatctcgaaacggtctcttgtcagcaatacaacatgcctgttccagggcatatcctaagccatgatcttaagaaaacgttgaagaagatgt

SEQ ID NO: 55842 - DNA, 1467 bp, Glycine max
  Clone ID: PAT_MRT3847_21435C.1
ttcttgtttaacactgtattcttcaaattgtgactcttttattactattcttaaaatttctctgggatgcgcatctttatgattgaactatatcaagtgtcttgattgcatataagattatcttttgtgaattttcttgattaaaacaatgctttggaactgatgtgatcacaaaatgtaaccacgtgatctataaacctcagtcaaagtgcttcaaatgagcagtgacataagatatataatatttggttgctctaacttttggatgacttggacatttcttggtaatagtaattggtgatttaacaagtgtgtttttctccattcttttaaaaccctttctgatatgtgaattttgagctttttcttcttgctaaagacacagcacgatgacgatgaagataatggtagcgataaagcgagtggtggactacgccgtgaaaatcagggtgaaggcagacaagacaggggtggtgagccagaacgtgaaaatgtcgatgaaccccttctgcgagatcgctctcgaagaagcccttcgcatcagagagtctggcttggcctccgaggttgtcgccgtcaccatgggaccctctcaatctctcgacactctccgcaccggccttgccatgggagctgacagaggcatccacccccacccctctgatcgcgctggaagaggccctccgcctcagggtgtctggcttggcctccgaggttgtcgccgtcaccatgggaccctcggcaactgtgcaattgctgatgattgcaatcaaactgggcagatgatagcaggactcctcaactggcctaagggacttttgcttctaaggtggtccttgacaaagagaaacaggttgcacagtggacaggaggttgacgatggtattgaaaccgtgtgtctgaacttaccagcagtaacaacccaggtgataaggctgaaccaccccaggtatgctactcttcccactttaaagaaggtggagcctgacccaatgaaaaagttcatccggtggacttagatgttttttgaatttgatttttcactcagcaccgatctgagactgaaccaaccaaggtatgctactcttcccaacataatgaaagcaaagtcgaaacccataaaaaaattcactccggaggagttgaatgtagaaatcaaatctgatttggagatagttcaagtcacagaacctcccaagagaaaagcaggggttattctttcttctgtggatgagctgattgacaaactaaaacatgaagctaatgtcatctaattattctcttcttttctataaattacttctcaccaaaggatgaataatatggtaccaacattctgatacttgatcaaatgactcaataattaaatactgttcctttttatttttttgtatttatcgtatatcctacatctaaatccaatcctgacagtcgtctggtgaatgagaaccactgttttgtggagat

SEQ ID NO: 55843 - DNA, 381 bp, Glycine max
  Clone ID: PAT_MRT3847_21436C.1
tacggctgcgaagacgacagagggggatggcactggggactatgtgaaactgagggccaacaccgacaacggttctcctccgggtgcggcggtggagctatctccgacgacgctaagagccgacgggtggtatagggtgttattggtggtgtggttaatatgactgacgttcctggctgcgggtgagctactatggggcggaccctatttcagagacaatgagattattcctgctataaattggcagacaaagactttcatgactacagaggcaagggttgcagtgaatgcatctatggcaacagttcgaaacctcattatgccgtctacgccttccgtgagggtggcaggaatgacattcggctatggattagggtactg

SEQ ID NO: 55844 - DNA, 312 bp, Glycine max
  Clone ID: PAT_MRT3847_21437C.1
aacgaagaccaaataattaacccatcactacacagagagcgataatgggattgattaaagatggcacaaatctcaagggtctctaccgggaacctcaaagatttatggagcactatcctgcttatccatcattcatttctcgaactgttgtactattgggggaattcaagccatgcataaagcccgctgttccaaatccaacaaattagagcttcgtttccgtcctgaagacccctattgtcaccctgcatttggggagcttctgacaccaactctctgcttttgaaaatatccaacacaataccccaccac

SEQ ID NO: 55845 - DNA, 465 bp, Glycine max
  Clone ID: PAT_MRT3847_21438C.1
aaataacaaaatagcttataagaaaacttataccaggggaaaatttaaaaactaccttgaactatttatctatactataagttctatgtctgcctttacatatttcatttcttttggtggcttaaaaccaaactttccttttttaaaaaaaaaaaaagattctagagttacaacaacgggcaagtgttccatgactacccgataaagaaggaacaattacaaaggaaggaaggaaagcttaaacagctctaaaattgagagagaccagtatttttatatgttactcatcttcttggggtgtagagcccaattttgacttctgattgctagaaaacttaacacccaccgtttgaacctccgatagaatatactttactgagacctgtttggacactaactgctgcagctgctggtttgtaattataactttgatcctctttatgcctccacccggctttaaagatt

SEQ ID NO: 55846 - DNA, 435 bp, Glycine max
  Clone ID: PAT_MRT3847_21439C.1
gaaaaaaatcccagggggccccaacccttggaagaatttttattgccgggacccttttcccacaaaaatttttggccaaaaaaattttggctggccagttttttgcctagtataaaacccccccctttgggggggggggggcaatttctggggggggccccccccccctttggaagttggatccaaaaaaggaaaatgggggggggagggtctttttagaggggtgcacactgggccccccccggggtttcccccccccaggtaaaaatagtttttaccccctccctaaccccccccgattttatttttgggtgagcttttactaaccaaatttggggcccccctttttcttttgctttaggaccctcaacccccccgataaaatttgccccgggggccacaacccgcaaggggtgggggggttttcccaattca

SEQ ID NO: 55847 - DNA, 285 bp, Glycine max
  unsure (1)..(285): unsure at all n locations
  Clone ID: PAT_MRT3847_2143C.1
gcatattcaacccctcgtttgcnataatggaaacggnatggtacaaggctggttttnctgganatgctgcaccganggctgtgttccntagnantgtggggcgtccacgtnacactggggtnatggttgnnatngggcagnacnatgcgtangtncgggacgangctcaatcccaagangggnattttgactctcaaatacccnnttgcncntgganttgtgagcaattgggacnacatggagaanatctggccatcacactttntcacaacgagcttcntgtgg

SEQ ID NO: 55848 - DNA, 1236 bp, Glycine max
  Clone ID: PAT_MRT3847_21440C.1
tacagctgcgagaagacgacagaaaggcagctgaaatggcacttttctgcttgtacattttatatatgcatcctttttcaccggtgtttatattgcagcaagagttttttcggaagctgatggaagtattcagaatgtgtgaagacttggaaaatattgatggccttcacatgattttcaaaatagtcaaagggattgttctgctaaatagtccagcgatttttgagagaatttttagtgatgactttatagtggacattattggtgccttcgagtatgatccagaggttccttttgttcaacatcatcgtaaattcttaaaggagcatgttgtttttaaggaggccatacctataaaagatcccgttgtgttgtcaaagatacatcagacatatagagttggttttttgaaggatgttgttctggcgagagtcttggatgagggtattggtgcaaatcttaactcgataatacattctaacaatgcctatgttgtctctttgttgaaggatgacagtacatttatccaggagttgtttgctaggctaaaatcgcccaccacctctcaagaatcaaagaagaacttggtttatttcttacacgagttttgtagtttgagcaagagcttgcagatggtccagcagcttcggctttttagggatctaatgaacgaaggcatctttgatgttgtcaccaatgttttgcaaagtcaagacaagaagcttgtgttaactggaacagatatcctcattcttttcttgaatcaagatcctaatcttctgcgatcctattttgttcgactggaaggatttgctcttctaggacttttggttaaaggaatgttaacagattttggagagaacatgcactgccagtttcttgaaattcttcgcaatttattggactcatgcacattctacccgataaattttgaatgagttgtattttattatatctgctgaattaaacccatattgcatttgaatggtcatcatgacacagcctgttttgctgcttgtcttttaagaactaattttgttaagcatattaaaagaactggtgctgcttccttttcctccacttattttggaagtgtacagtagccttctgtggaattatttttccctagtctgttatgaagtatgtgatagtggccctaattagatcttttaacttagccttactggaaacacctgaataacaattggcacatgctgcatactactttcggcccct

SEQ ID NO: 55849 - DNA, 271 bp, Glycine max
  Clone ID: PAT_MRT3847_21441C.1
cgaatgtgcaaaacttcgtaatgagctgtaaactgggttattgtaaagcgaatatgacgtcctacgaacactatgacgctgcatcacatgcggtaccatggccatgccatcgcgcacgctaccaactgttccctttccgaatgaaaactacctctggttagcattcttgcctggtaaaatgcgcaaggtctatgcttgctagacaagcacacatcatcactgccctttacaaccattcctgacgagtgcgttgaaccaacacaagactaca

SEQ ID NO: 55850 - DNA, 260 bp, Glycine max
  Clone ID: PAT_MRT3847_21442C.1
cttacgcgatcgtctatacctcgtctgacacgtcctcgacttcaaacgttcttggacggcaagcgagtcatcctatgtcgactgctacgctgcctcggcatggctatcggaaggcatagtggacaccctgaactgtggctatacatatatcaccaggtggcggtttaaagacgcactttagacaataatgatattattgacacccatttctatagcctaaatggatatctcttaatggacgaaagctataggtttaaccg

SEQ ID NO: 55851 - DNA, 381 bp, Glycine max
  Clone ID: PAT_MRT3847_21443C.1
tggaaactgaaggggtttgaaactgccctactttgcccgtggttatttataaagcactaactcggcttaagttttttttaccaccaaaggggggttgtgaatgggggcaggaccttgttgggctttagcattagaaaagctgggaggggaatttaagaatcaaaggggggggttttaagggtggggttattaacagacctccgggccattggttttgttagggggcaccaccaaaggttttttccaccaaccaaatgttgagggggccaaagcccagggggttccagggttttagatttaacatccccagggaaccaagaaggttgaaggcggccgtccacagaaggcatttagtactgggtggcccaaagcaataccacc

SEQ ID NO: 55852 - DNA, 755 bp, Glycine max
  unsure (1)..(755): unsure at all n locations
  Clone ID: PAT_MRT3847_21444C.1
cccaagcgcgccgtgaggctcttcgacccgaaatccgaacccgaattcggtttcaatctcagagagagagagagagagggagagagagaaacactgacctagctcgcagaatcgacaaccacttctcactcttcaatcgcaactgtgtctttgatgggtccgaggtatgcaccaccagacccaacactccctaaaccatggcggggtcttgtggatggcaagactgggtatctttacttttggaatcctgagactaatgtcacccagtatgagaggccatcctcaagctcagcttcccagtcaaagttttcttcagtgcccagctcttctgtccaggttcaacaatcatctcaagggtcgcaacgtggtcgtagtcctgatttcagtgataggtatgatcgaaatggcactggtgggtcaaacgacgctggatcccggaacaatcagagttccaaagggggaagttatacttctcatgatgtttcaaatggaacaaatgttgctggcaatggtaattcttctgtcagaggtcatggggcttcagatgctggagctggactatctgctgagtcttatcgacatcggcatgaaatatctgtgactggagacaatgtgcctccaccgcttgcatcatttgggtcaactggctntccatctgagcttctgagagaggtgcgatatttgctcctggggaggagctaatgtcgtacgctgtggtgccctcttttttggggctagcatttagtttggacttt

SEQ ID NO: 55853 - DNA, 205 bp, Glycine max
  Clone ID: PAT_MRT3847_21445C.1
gggggaaaggaaggtattttgaaacaaagcaccccaacccaatagcttattcattagttcccaaccattaattcccatggaagccctcccacagaaggctaaaaaacgggatgaagaaattttaaaaaacaaaaaccaaggggaaggtggtttagagccaaccaatcattgcaaccccccccattggcttattccttaggcccca

SEQ ID NO: 55854 - DNA, 2236 bp, Glycine max
  unsure (1)..(2236): unsure at all n locations
  Clone ID: PAT_MRT3847_21446C.1
ttttaaatgtttgtttgaatagctcccctaagctcaccgaacaagaaaaccttggtaatccagttatcatatcgaagtgataataaactgccaatggtattaatggcgangcttccaatcagccgtctgtgacatgactgactattgaatgtgttaaatccacgcgtccgctttcgttcccttttcgccccttttacgaagcgcgccgttagtctctgcgacccgaaatccgaacccgaattggtttcaatctccgagagagagagagagagagagaaaccctgacctagctcgcagaatctactgccacttctcactcttcaatcgaattgtattgctggtttccttgctatggctgccacagcaactgcatctttgatgggtccgcgctatgcaccagcagacccgacactccctaaaccatggcgaggtcttgtggatggcaagactgggtatctttacttttggaatcctgagactaatgtcacccagtatgagaggccctcctcaagctcaactgcccagccaaagtcttcttcagtgcccaattcttctgtccaggttcaacaatcgtctcaagggtcgcaatgtggtcgtagtcctgatttcagtgataggtatgatagaaatggcagtggtgggtctaacgaagctggatcacggaataatcagagttccaaagggggaagttatgcttctcatgatgtttcaaatggaacacatgttgctggcaatgttgattcttctgtcagaggtcatggggcttcggatgctggagctggactatctcctgagtcttatcgacatcggcatgaaatatctgtgactggagacaatgtacctccaccccttgcatcatttgggtcaactggctttccatctgagcttctgagagaggtacaaaatgctgggttctcagccccaactccaattcaggcacagtcatggcccattgctcttcaaggtagagatatagttgccattgctaaaacaggctcagggaaaaccttggggtatttagttccggcatttattcacctcaagcgctctggcaataactccaaaatgggccccactgcattggtactttcaccaacaagggagttggcaacacagatacaagatgaagctgtgaaatttgggaaatcatctagaatttcatgtgcttgtttgtatggaggagcaccaaagggtcctcaactgagagacattgatcgtggagcagatattgtggtagccactcctggtcgcttgaatgatattcttgagatgagaagaattagtcttaatcaggtttcttacctggtgctagatgaggcagacaggatgctggatatgggttttgaacctcaaattaggaaaattgtgaatgaggtgcccaatcgcaggcaaactctaatgtttactgcaacatggccaaaggaggttaggaaaattgcagctgatctgctagtcaagcctgtccaggtgaacattgggaatgtagatgagcttgttgctaacaagtctattactcagcatgttgaagtattgccaccaatggagaaacaaagacggctggaacatattttgcggtcacaggatcaaggatcaaagataattattttttgttctaccaagaaaatgtgtgatcaacttgctcgtaatctgacacgtcatttcggagctgctgctattcatggggataaatcccaggctgagagggatcatgtgttgagtcagtttcgaactgggaggtctcctgtgctagtggccacagatgttgctgctcggggactggatatcaaggacattagggtggttgtcaattatgacttccctacaggagtggaagattatgttcataggattggaaggactggaagagctggagccactgggctagcttacactttctttggtgaccaggatgctaaatatgcttcagatctcatcaaagtcttggaaggtgcaaaccagaaggtacctccagaacttcgtgatatgtcatcacggagtggtggtgggatgggtagatccagacgatggggttctgggggacgaggtggacatggtgattctggatatggtggaaggaataatgactctggatatggtggaagaggtaatgatgcaggatatggtggaagaggcagtgattctaattatggggggaggaatttgggagtgaaaacatttacttgtggttgactggttggaaagaatacaatgataggtgacagaattctggattttt

SEQ ID NO: 55855 - DNA, 644 bp, Glycine max
  Clone ID: PAT_MRT3847_21447C.1
ccacgcgtccggaaaataataattttacgagagcaattgctcccatagtcaccaatgtgcctccactcattattattgttattagtgagatggttaatttgtagatttagttaagataagggagaagcaagagttaaagttgagttgtacgttcacggcatgcagatgaatgtatgtatgtatgtatgcgcgcgtgagagagaatggatgaataatgctagttccggccactgattaatgagtaattaggcgttaatgcaaactcaaatgcatatgattatgattatgattatgatgcagcccctccttatacatagagcattcaatggctccaaaatttaacggaataacactttgtaaccccctccttcccttactctttctttttcccaaacttataaatacacacattctcaaccccttttataaacatacgcgcattcccccacattctctctctctgtctccgatatgggctttgtctttgtctccgaccacgatatcgttcctcataccttcaactcatctttttcctctgctcaagtaaaccacactcacaagtaagctcttttcttctttctgttttgcttttactatgattgatatttctcctttcgaggttgatagcaactttctttctttct

SEQ ID NO: 55856 - DNA, 330 bp, Glycine max
  Clone ID: PAT_MRT3847_21448C.1
aaaaaactgtactcaggtggggatcaataagaataatactatgtaagtaattcaacacgtaattaagctggacttattacacatgtagtaaaaaaaaagggcaacttaggagatactaaatatatggggtgcatagtatacgggacagtacacatctttgggggaacatattatatgaacatgctatgtcactggtgcgaagagttaacagatagttgcacccatagaatagaattagcccttaggagactttggtgacacaatagccaggtcttaaatccggattgttctagttcaagacctagactagaacacttaatgcccatggat

SEQ ID NO: 55857 - DNA, 188 bp, Glycine max
  Clone ID: PAT_MRT3847_21449C.1
gaactggaaaacccgggccgacccacgcgtacgaccattcttactccaacacttcttacctttttctaatatctataaactattgcacatatctgtctctttatatctctctctacctcaacataaaactaacttacagtaacattctctacaaattataaaaatctaactactactaaactttcaaa

SEQ ID NO: 55858 - DNA, 169 bp, Glycine max
  Clone ID: PAT_MRT3847_2144C.1
cagcgtagatgttcaatgcaatccaacttttaaatagagcagcgtaaggaaaaggcgcaggcctcggtttgatttttgctcatccactattcttttcccaagcaaaaatggttcatccaggaaatatgtacttccaccaaattttgagggtcctggctctattacaccc

SEQ ID NO: 55859 - DNA, 398 bp, Glycine max
  Clone ID: PAT_MRT3847_21450C.1
tctagctatctcgatcgaactgtccaaggtcctgtcactgtgcagtgttgtagtaccatagcttatacctctccgcgctagctgagcccaccaagcctactatacaggttaagtaaacagcatttacggctaaagcacctactatgccaatggcgaaccaaccatacgtggacacaacgcaacctaccttatcagccaatggccctgctatagttgccgtgtaggttagttggtagccacccggggtaataataatagccctaagcgtgtttaattacagacatatacgcaaatgtcagcacgtgctaaatggaatgcaataacattgtgcgtacagattaatacgaatttgcattagccaaccgtgtacaggcaagataaccgcccgtaggtacgat

SEQ ID NO: 55860 - DNA, 250 bp, Glycine max
  unsure (1)..(250): unsure at all n locations
  Clone ID: PAT_MRT3847_21451C.1
aaggaggacaagaagaacaaaccgacacaaagatctagtcctagctagaatacaaacaggggcgatctcaccttcaagaggacatcgncatggcaaggnacttgnttcttgtgntattngcagtagncaccctantccatggatcagcagcccaaacacagtnacgtggtcaggnatnncccgggatggntcatacctaantggnagnanagccnactacnacngntgggntttcnannaaaanctngat

SEQ ID NO: 55861 - DNA, 408 bp, Glycine max
  Clone ID: PAT_MRT3847_21452C.1
acccggtaactttggaaaagcgcactggataaccaaaaaaaaaaggtcatatagggaaagcccccgtgacgaaggcacgccctctttgtgccggggcattaaaatcttgggaaaaaaaaggggaggcgcaaccaagcaagagaggctccgggcgagacgataaaagagtttgacttatacgaggcccgacaattccatgcccggggactaaaaaaggggatctatggcgttcgccgaaaaaatgaaccttgaatgcccaaagcttccaaagcccgaagccttccccaaatggctccaagggcccggggctccctttttcaacgaattattcttgcacccaagcttgagtccccctgtttaccgaaaaaaccctcgtggggtccaaaggagatccaatggggggggttg

SEQ ID NO: 55862 - DNA, 356 bp, Glycine max
  Clone ID: PAT_MRT3847_21453C.1
aattctcggtcgagatcggctaggttgtcttcaattccacacagatccctcacttatcttccctttgaggattcaacggtcctcgcctttgcctacgtttccgtgactgatatggctggaggtgccattcatcaaatatagctgaggacactccaccctcggtttactaacccttccttgtagcacccatagtagcataaaaagatgatgctggctctactggcagattagccttaaaagcacttgcaataatcgtagccggattgtcacgacttttcacgttttcaacaatggcttcacctgatgaagcttaacatggcctgtcttgaccaagctatacatggcctaacaaggga

SEQ ID NO: 55863 - DNA, 855 bp, Glycine max
  Clone ID: PAT_MRT3847_21454C.1
ggctatagacttgccgcttttttttttttttttttttttttttttttaatagatcaaacagaaattctgaatattattaattatggatctgagaacaaagtcatttcatgcataattctagttattccataccattcttgttatttaggagtctgaaactacttcacgcaaacaagttcaatacaaagaaaagaagcatatactcattgagaaaccaaagctctaatgtggatgcaattcatgcctttgagggtgattcactagagctggcagccggagtatctttccctgtaagtgcctctagcgtcttgtgaaattctgttgggagaggaggaggtcggtggagaggaacatgcttgggaactggtgcatcattctcaatcacctcacattcataatcatctggaacaccccaaggatcccactcgatcatgtaggaaatgagcttgagctcgtcctgagcctcttcgatgagctcctcgacctggccgcagccgaggcgtttctcgatgttctcccagtcctcctcctccttgcacacgccgagcctgtgcttggtgaagctctccacggccttgcggtacccttcatcttcgggaaccttctggatctctttcagcgtcttgctgtacagcccaatcagcacctccctcgcgttcggcaccacgtccagccccacgatccccgtcgaagccttcaccttcgccatcaacggccgcgccaccgcacgcagaaacatctttttactctcactcactctcccccaaaagtctccctctacaacgttgctgttccgagtctgcgaggaatgtgtgtccccttctgtcgtcttctcgcagccgtacggacgcgtgg

SEQ ID NO: 55864 - DNA, 568 bp, Glycine max
  unsure (1)..(568): unsure at all n locations
  Clone ID: PAT_MRT3847_21455C.1
acgaattcgagctcggtacccgggggatcctctagnagtcgaccctgcagcataacagtaatactgtcctgcaatattagtgtacttcgaacgctttctaaccctgaccttctttcatttggaccttgaaacctcatattatacacccaccggcatgatgctcagatacacacgacagtgctcaagaagaaggcttgatattcctatattggtgacctctacactgccacagctgcatagagaacatcaatttatcacacagatagatggaacatggtatatacagcctactttcccatcttggtgacatggacacgcaactggatggtcaaagaaacagacacacatcgatcactagggcctcggcaattggaggaaaaatgtgtctacgctctgtgatggtatctaaagcagtgtgccaaaggaccataaaagatcgtacagtgatgtcactctagtcaatatgtcgcattagatcgcgttactacgtctcttgcattaatgaaagaccacgtgcctcgtcgcccaaaggctctccgatatgcgaaagtatgtgctagaggatgtt

SEQ ID NO: 55865 - DNA, 342 bp, Glycine max
  Clone ID: PAT_MRT3847_21456C.1
cgagaaggctggttccgacctcacacaagacttgatgcggctacggcactatctgaagctgactacactagcgcggctgcctcatgctgcactggtcgaactggctagcgagctccactgggcttgaaccgcgtctaagctcgatgcttagttgccaatgtaaccttctgtggcaccagcttgaaaaagggtattgcctggagggctcctaacggcaagatttgctctggaaggttcaaaatcgatgccgcggaaaaagagattgttgagaaacaacagacagacaaggacagatggaaaggtcttgcctatgatgtttcagacgaccagcaagacattaca

SEQ ID NO: 55866 - DNA, 360 bp, Glycine max
  Clone ID: PAT_MRT3847_21457C.1
tctgaatgcgggtttattaaatctacattagttggtatactcccaggggtctggctgacgacagaataggattaagagctttgaaattctggcacaaggtcttattgtctaatagaatattatgactgatgggggtattactatgcaattaactcctgaaagcttatgatacttggatttgtatccacaactgaaaatgtccttattcaaaaatccttacattctcttactgactgctgtaatctgcattcttggtctcctaatcatatactacactgttttgatatcacttgctcttttatacaatattgatgattttttagtattttatatacagcattttatttctataaacaattt

SEQ ID NO: 55867 - DNA, 328 bp, Glycine max
  Clone ID: PAT_MRT3847_21458C.1
acgttacaatctaccagattccacatctcgccggtgcgggtctaactgccaacatctcgtatcctagctatcatgccatctggcacatatcatcagtcttctcctgcgatacctgccagatgcctacacgctcagagagctgtgaatatgctatcttcacaagtactggttagatacctccatcgctcacctatacagcgctaacttgaactcgctcaccatctgaaaccagaagatcactggatcagcattaggtatggagatattccggagcttaacctgcattaaagctattgattactatttcttccctgaaattacattctaa

SEQ ID NO: 55868 - DNA, 439 bp, Glycine max
  Clone ID: PAT_MRT3847_21459C.1
cccggcaggcaccggcccggaaaacccgggccgacccaccgcgccaatagcaccccgaagcacggagaagaaccaggggggacaaaaacgcacggacccgcgagacaaagccaagccagagacgaagaggttgggcacgcaagaatggccaaacactcccaaccaagacaaagccagacgaacaaagcctggccctgcagagaggagaaagcgacgaacaccacacgcaaagggaagaaacacagaacccgaaaaccaactgggagaaagaagacacccacccaggcaaaacaaagaaagaacaaaagaggaagccacgcgcaccacaaccaaggggtgggggcacacggacaaaggaaaggaaagacaccaccaaagaaggacagagccccgaagagccacgcaccaagaaagaagcccacgagggagaagagaagcg

SEQ ID NO: 55869 - DNA, 212 bp, Glycine max
  Clone ID: PAT_MRT3847_2145C.1
gcggatagatagggttttcatagaccgggtgctaaagatgaggcaaaaccatgagaaggctagacgggcttacagacccaaaatggaggaggcgacttgaccagacgacaagtctgagaaggcaaaggccgaagacaatgacgatgacgaagattcggacgaggacgaccgtgatgaccacgagtggagactgcgatacaagatgaaagagc

SEQ ID NO: 55870 - DNA, 298 bp, Glycine max
  Clone ID: PAT_MRT3847_21460C.1
gtgcatggctgcggtgagtgcacccgtggcacatgcagctgtcacgtgcgggcaggtgacgattagccaggccaatggcatgccttaccttcccaaggtagaagcgctcgtgtagtgatgctgtaaccgagtgagtagcctcattgccagcgccgacaccaccgtcgaccgccacacggcttgcaactgactgagatagggcgccagccacatctgcggctttaacgccaacaacggcgtgtgggttcctggcagatgcggagtgtgtatccgctacaacatcagcacctgctccagc

SEQ ID NO: 55871 - DNA, 487 bp, Glycine max
  Clone ID: PAT_MRT3847_21461C.1
gggaaaatatatagttctatgattttttttctcatttaatccctttgtgcatatctctcttattcgaaactttcaatacatgagaggatgcacatgccgcaagaggatactcttaactaactctcttaaaatactaaaaacgaatggaaaacaaagacttggctgtggaaggtgatgtttagtgcaattttttgtgaaaatgttaggtgtttaacctactaaaattactcttgatgtacaatcctgatgtctgaaaattatgtgtgctaaaaagcctctatgtgcgctcacaattgacttaagtgaccatgccttaagcctacaaacttgcttagtacccatgctcaatataattaacgggctttgagtttggcttgcgctaagtgggcaatggagcattgagcgtgcttttatgcaacttctattctcctgttcatgtattcaaaaagtctacagaatataacacaacactatcattctttaacat

SEQ ID NO: 55872 - DNA, 106 bp, Glycine max
  Clone ID: PAT_MRT3847_21462C.1
cttttgctaaagattgtggtttattggttgtcggcaaaggggaaaacaacattcacttcgcatgctcaaaggaggttggtggcatgggaagcctgtgatgtgctat

SEQ ID NO: 55873 - DNA, 832 bp, Glycine max
  unsure (1)..(832): unsure at all n locations
  Clone ID: PAT_MRT3847_21463C.1
ggtgntttcgtccgacggctgcgagaagacgacagaaggggaaaagaaggttaagtgaaaagtgaaaagtgaaaatggacttggaagcagtgaagaggtacttagagaaaggaggagaaacagcatcggcggtggatgggttgcctccgaggtttctggaaccgttaataatgaacgctcttaaggtcgatctcatcgaaactggtcgcgttgtctgctccatgaagatacctccgcgtttactcaatgctgggaattcgttacacggtggcgccatcgctgctctggtcgacgtggtggggtccgctgcgattcccaccgttggatattcggctcccaatactggggtttctgttgagattaatgtttcgtatttggatgctgcctatgccgatgaggagattgagatcgaggccagggctttgcgtgtagggaaggctgttgccgttataagcgtggagttcaagaagaaaaaaactggcaaagtttttgcccaggggcgtcataccaagtttcttcctctttccagtaaaatgtgaaggccaaaatatgcacagaaataaatggttcaatgttggttcgcccttatatgtggcaaatatatcttagtgccacttcttattaattttccagtatttcacccagttacttcatgtgtgattaccttgaattttctgtaccagttcttattgttctataggggcagttccttcgttgttaaaatggcgaggccatgtgttctccgttgttgttctctaccttttgattttgaatgttataatttatatttataattgacctaagaaaaaaaaaattacttaacctttttttt

SEQ ID NO: 55874 - DNA, 1308 bp, Glycine max
  Clone ID: PAT_MRT3847_21464C.1
aaggcaagcaaaatcataatcagttggattatgtcggtctgcaaagattctctctttcgctgcaacattttcacgtgctttttttaacataacatttaagcacatcaatcaatatcccacaacattattactactgtatcattattgtgacctatggagcagcaagagagagctagcagtgcaagctttcaacatccaaaacaacagagagtttttggctttagaagctgaaggaatatagttatcacaatggggagagctccatgctgtgagaaaatggggttgaagagagggccatggactccagaagaagatcaaattctcatcaattacatcaacacttatggccatgctaattggcgtgcactgcccaaactagctgggctattaaggtgtggaaagagttgtagactccggtggataaattaatcttgtgataattacacaattgcgtgcagatggtcggctatagcggcaaggttgccagggagaacagacaacgagataaaaaacgtgtggcacacccacttgaagaagaggctgccacaaaattataaacaaagccacgaccagaaaaaaacgaagcaaaaaacaaccaaagttagatgtggacgcctccaaatcaaaccaagacgccaaactagaacaacaacaagagcccgtgaataataattttccctttcatgcatcgaactcagaggacatgatgccactatctcctccacaatgttctagccacatgtcctcctcctccctcaccactagtgacaacaacggtagcattaacaataaccatgacatgtccttaaatgttaatgatgatatcgacacgccggagacggacgcgggggtggacgaggatttctggtcggaagtgttgtcgtctgataattccggtgagacaacaagcggatttccgaccattgactatgatcatcagtttctaccgatgtctcctctaatgaccgaagaaggggtccttatagatgctagttcgtcgagtgtgtgcgacgacggcatggacttttggtgcaatgtttatgcgagagctgaggaatttacgcagttattggaattgtgatgttagttaatgttgctcttaattagtagaggccaagtccttcattcaacggaaaacaaaagatcatgtcattgttcttctattgtttggacttgaattaatttcctagatagaaattaataaagtgtgtccattacgactgttactcgatgtgattataataaagtgtgcgtgttcattgttcgtaatattcagtggagactgtcaagcttttatgttaaacaatt

SEQ ID NO: 55875 - DNA, 376 bp, Glycine max
  unsure (1)..(376): unsure at all n locations
  Clone ID: PAT_MRT3847_21465C.1
tcctaagccaatagctttaaacaaacagagagacagagaaagcagtgaaagggtaatacatacacagaagaataagaagtagttgtagatgttttcgaaaccctgcacccaactctaacaagagaagaagccttcttcagttcatcaccaatggatccgtgtcccttcctgcgtcttatgatagactctctggctctcaatctttccttcgccaccaaaccgccacctgtctccggcgtccaccctttcaccacttcatgcttntgcaaaatacgcataaacaactttccctctcaaacctcgcttctttcactctcttctttctctttcgcgcacgcgcggcccgagaccgcgacctttcggccgggctttcacc

SEQ ID NO: 55876 - DNA, 263 bp, Glycine max
  Clone ID: PAT_MRT3847_21466C.1
aaagccgggagcccaacccataatttaaacattgagctctgatgctgctttgactagacgtgaagttggtataccaagagaagcgcccatggacctagggaaagacctttgtgatccagacttgaggctcatttacatttgacttattctctcggaaactcataaagcgttctatattagccgctgagttttaacaccttctctggacactcatcatatagtctatgtttggcccaacttcttttgataaggtccattcttta

SEQ ID NO: 55877 - DNA, 406 bp, Glycine max
  Clone ID: PAT_MRT3847_21467C.1
ttttctcagagcacgaggcgatctgcggcgcacttatcgtattaaaggaatgaataaaatggcggccacagtcggatttcctgagaatacaggcatggcattcgccctgagctatgaataggcccttcagggggcgtgccagatctgatatttacaccatctgctctcaagactgtgaattatggaaccctgattgcacaaaagcaatgactatgtcattgaatccaaacccgacttctgcgacctcgaacatggaatctctgaagcgcaccggatttcattgtgatatcattcgtgtcactggatggactgtcactccaatgccggatgctaaagtgacaattgattggtttatttcctgtcaggaaagtgctcccagcacctattgtgttttttatccacaaaa

SEQ ID NO: 55878 - DNA, 403 bp, Glycine max
  Clone ID: PAT_MRT3847_21468C.1
cgttcttttttttttttttttgaggcaaatttttttcttttttgggttttgggggcttccgaacaaaagggccgcctaaatttcccccgcggcaaaaattttcgctccctcgggatcggcctcctgtaaacaccaaaaaaccgtccagcgggagaagagtttgggcccagctccgagaccagtatttgggggtgcccacctcgccctgaggccgaagcaaatgaaccccctggcttccatccaagcagagggtgaaacaacttgggcgccatgggaggaacattggccggtaccggggccataaaaaacactatctgttcgcgcacactatgccttatcttccgactaaaaacggcgcgaggatcaacaatgcttccctatctggggtgcaggatttttaaag

SEQ ID NO: 55879 - DNA, 228 bp, Glycine max
  Clone ID: PAT_MRT3847_21469C.1
ggacttcacaatttcatcaaggtggtgctaacgaacataatattgctcttgacttctttgccagagacattgtcacgcaagtgtgtgaatatcactcttctattgagagtaggctttgagatgcaaacatatgtgtttgtttcctatattggaactatatgcatcatttaacgatgaactattacagtcatgagatgtagtaccagggtcagatggatcacatgatga

SEQ ID NO: 55880 - DNA, 364 bp, Glycine max
  Clone ID: PAT_MRT3847_2146C.1
ggagactggcaatctaacttgaaataaaaatcatgttgcaatttaactctaaataataaataagagaatccttgtcattacttgactgcatgtcctcggcttcactttttaatacattgccaaaaaaaaaatcgtccggggtccaatttacaggggcaaaccctgaaatcttcaaatccaattgcaggaagtttgaaactttgaatctccaaggggctaagttctagttctgatcccaaggaaaaatttatttttcagttaattttctaaataaagcacattgtgcagtccaacagaatgggggggaaaatctgaatttttttttttaaaatgaagcaatttttttaaaacaaaaaattgaagt

SEQ ID NO: 55881 - DNA, 697 bp, Glycine max
  Clone ID: PAT_MRT3847_21470C.1
gaccagggtatcatgttcggatatgccaccgacgagacccccgagctccttcctctgaccgtcctcctctcccacaagctgaactcggccatgaccaaggcccgcaaggatggtactctgccatggctgcgacccgacaccaagactcaggtcactgtcgagtacgcccacgatggcggtgccgtcgtccctctccgtgttgacaccgtcgtcgtctctgcccagcacagcgaggacatcactaccgagaagctccgcgaggagatcaaggagaagatcatcaagcaggtcatccccgagaagatgcttgatgacaagaccgtctaccacatccaaccctccggtcttttcatcatcggtggtccccagggtgacgccggtcttactggacgtaagatcatcgttgacacctacggtggttggggtgcccacggtggtggtgctttctccggaaaggactactccaaggtcgaccgttccgctgcctaccttgcgcgctggatcgccaagtcactcgtgaacgccaagctggcccgccgcgcactcgtgcagctgtcatacgccatcggtgtcgccgagcccctctctctcttcgttgagacatacggtacctccgacaagtcctcggacgagctcgtcgagattgtcaagaacaacttcgaccttcgccccggtgtcattgtcaaggagcttaacc

SEQ ID NO: 55882 - DNA, 405 bp, Glycine max
  unsure (1)..(405): unsure at all n locations
  Clone ID: PAT_MRT3847_21471C.1
ggggggaggaanatgggaaggtctttttgaggctataactggttatggtttgggtggatcttccatggctctgtttggcagagttggtggtggtatctataccaaggctgctgatgttggtgctgatctggttggaaaagttgagagaaatatcccagaggatgatccaagaaatccagctgtgattgctgacaatgttggtgataatgttatatcccctactcatcagttctatgggcattattgtctgtttgattactactctctttgcaactgatttctttgagatcaaggctgtcaaggaaattgaaccagctctaaaaaagcagcttatcatctctacagtactcatgactgttggaattgcaattattagttggattgctctgccaacatccttcacaa

SEQ ID NO: 55883 - DNA, 383 bp, Glycine max
  Clone ID: PAT_MRT3847_21472C.1
ccactcgtcctcggtcgccgctttctatctcactcatatcctatatacacattactctttatccatatcatcaaagggatttccataaggtccatattttaccatcaatctacctgtctgattcacatcctgactccactctctcaacttacgctaaactctcacaaacactatcctcaatccaatctctcaaacttcctaagcttgctattcacctacttgcactctcaaatccctttatacctaatacatccccaaattgccaattcacatatacttgctacatcaaattcacacccttatctaacactgcttactgatacatactgaattccattctataatcgtacaatcaacgaatacacatcgacatattacatcta

SEQ ID NO: 55884 - DNA, 755 bp, Glycine max
  Clone ID: PAT_MRT3847_21473C.1
caggacttatggagggtcatgccaagcctgattatgccacctgcgtcaaaatttctactgatgcatccatcaaggagatgattcctccaggtgcccttgtcatgctcacaccactcattgttggcatcttctttggtgtggaaacactttcgggtgttcttgccggggctctagtttctggcgtacagattgcaatatcagcatccaacactggcggtgcttgggataatgctaagaagtacattgaggctggtgcgtccgagcatgcaaggaccttgggcccgaaaggatctgaaccgcacaaggcagctgttattggggataccattggagaccctcttaaagatacttcaggcccttcactcaacatcctcatcaagctcatggcagttgagtcgcttgtcttcgcaccattttttgccactcatggtggtctgcttttcaagatcttttgatttgagggaatgcaaccgtacttagggtagagttttctatcaatttatcctatttttgtcggagcctgcaggcatttttcttttgtatcaataccctctccacctttaggggtagctcttcaaattatcaggacttgaaatttgttaccaaatgtagtagtagtttttgccaaagtgaattttcaattaaccagcttttggacttttcatcgagttttttaaccaatcattaattattaatatataagttaattttatttttgccatgttaaaagaagatgataaggtctaccccaattg

SEQ ID NO: 55885 - DNA, 2732 bp, Glycine max
  Clone ID: PAT_MRT3847_21474C.1
cgcgtccgcccactcttccgttagactcgagcttccctcacacgttctctgtgactgcctctgttccgccaagcgcagcattttcccaccgttcaggccaccggctgagttaggtttccggcgaggatgggtgctgctctgctgtcggagcttgcgacggagatagtcgtgccagtgtgcgccgtcatcgggatcgtgttctcgctggtgcagtggttcctcgtgtcgcgcgtcaagctcactcccgaccgcaacggaacgacgtcgtcgccgcgcaacaacaaaaacggctacggcgacttcctcattgaagaggaagaaggcatcaacgaccacagcgtcgttgtgaaatgcgctgagatacagaacgctatctccgaaggtgcaacatcctttcttttcactgaatatcaatatgtggggatcttcatggttgcttttgcaatactgatcttcctttttctgggctctgtggaaggcttcagtactaagagccagccctgcacatatgataagagcaagctatgcaagccagcccttgcgactgcattgtttagcactgtatctttcttgcttggtgctataacttcagtcctatctggtttccttgggatgaaaattgcaacctatgccaatgcaaggacaaccttggaagccagaaagggagttggaaaggctttcattactgcatttaggtctggtgcagtgatgggtttccttcttgcagcaaatggtcttttggtgctctacattaccatcaatctcttcaagctatattatggtgatgattgggaaggtctttttgaggctataactggttatggtttgggtggatcttccatggctctgtttggcagagttggtggtggtatctataccaaggctgctgatgttggtgctgatctggttggaaaagttgagagaaatatcccagaggatgatccaagaaacccagctgtgattgctgacaatgttggtgataatgttggagatattgctgggatgggttctgatctttttggttcatatgccgaatcatcttgtgctgccttagttgttgcatccatttcctcatttggaatcaaccacgagttcactgcaatgttatatcccctactcatcagttctatgggcattattgtctgtttgattactactctctttgcaactgatttctttgagatcaaggctgtcaaggaaaattgaaccagctctaaaaaagcagcttatcatctctacagtactcatgactgttggaattgcaattattagttggattgctccatccttcacaattttcaactttggcgctcagaaggaagtaaagagctggcagctgttcctctgtgtgggtgttggtctatgggctggacttattattggttttgttactgagtactatacaagcaatgcttacagccctgtacaagatgttgctgattcctgccggactggagctgcaaccaatgtcatctttggccttgctctgggatacaagtctgtcattattcctatttttgccatcgcaatcagcatttttgtgagttttacttttgctgcaatgtatggcattgctgtggctgcccttgggatgctgagcaccattgcgacagggttggctattgatgcctatgggccaatcagtgacaatgcaggaggtattgctgagatggcaggcatgagccatcgtattcgtgagagaactgatgcccttgatgctgctggcaacactactgctgccataggcaagggatttgctattgggtctgctgctttggtgtctttggccctatttggtgcatttgtgagcagagctggaattttgactgttgatgtcttgactcccaaggtctttattggactcatagttggtgccatgcttccttactggttttctgccatgaccatgaagagtgttggaagtgcagctttgaagatggttgaggaggttcgtaggcagttcaacaccattccaggactgatggagggtcatgccaagcctgattatgccacctgcgtcaaaatttctactgatgcatccatcaaggagatgattcctccgggtgcccttgtcatgctcacaccactcattgttggaatcttcttcggggtggaaacactttcaggtgttcttgccggggctctagtttctggtgtacagattgcaatatcagcatccaacactggcggtgcttgggataatgctaagaagtacatagaggctggtgcgtctgagcatgcaaggaccctgggcccgaagggatctgaaccacataaggcagctgttattggagataccattggagaccctcttaaagatacttcaggtccttcactcaacatcctcatcaagctcatggccgttgagtcgctcgtcttcgcaccatttttcgccactcacggtggcctgcttttcaagatcttttgatttgagggtagagttttctatcaatttatcctatttttctcggagcctgcagcaggcatttttctttgtaccaatataccctctccacctttaggggtagctcttctaattatcaggacttgctcttcaaattatcaggacttgaaatttgttactaaatgtagtagcttttcgatttttcacccagttttatatgataattcgtaatttaattatgaatcaattattaaatattataaaacttatattttaaaaaaaaaaaaaaaaaaaaaaaaaaaaaaactcgagactagttctctctctc

SEQ ID NO: 55886 - DNA, 447 bp, Glycine max
  Clone ID: PAT_MRT3847_21475C.1
aaaaaaaataataatggatttttatatcataacttgataattcaaattaaagcaacccaattttaacccgatctataaacactcctaattaaattagttcccttttctagcaaccccaactttaacaaatagattaacactcttaattactcgtttgaacttttaatttacatctgtaaaattgtctcattactcgtttgaacttcaaatttacatctctaaatttgtcctgacaggctcacaccgtgcgctatacaacctctctagttgctcaactactcgagccagcccaatttgattccccaaattctgttatgctgtcctgaacttctggagttgcttcccatagatggtgtctaagtgaactttcttgcccctccactccttctgtgtgaaggatcctgcttaaatccagggacttatcagttaatccactatctttgctac

SEQ ID NO: 55887 - DNA, 1137 bp, Glycine max
  Clone ID: PAT_MRT3847_21476C.1
atggcagagccatcaaagaagagaaagggatcatcctccaccgctaccgctgctgcccatcgtcgtcacggcccatccggagcacccacagcacctattcctccttctttgtcatctccaagatcatcaacattgttttcatccgatgatcaacgtctacggtacctttctcagttttcttctagaataatcttagaccctaagtatctagacgtagagttctttaatgatgaaacgtttgattgctatcaagtgtttcaaaattctggtcttgttgatttcatgtcatttaaattgccatattatcctgaacttgtaaaggtcttctactgcaatttaaaaattcaggatggtattattatgtctgaggtgcatggtacttctatggtcattgatcagtcacttttcttttctttgactcatttacccagtcaaggtgcaccttttgagggcaccattgttgatgactggaaattcgattattcgagtcatgatgctcgtcgcatggtctgcaatgatcaagctgacatgaccggtaggttgttggccgggtcattaacttttgataatcgcatcatgcattatatcattgttaggattttgcttcctcggtcttcaaatttagcacaagcctctgaggaggatttgattcttatgtgggcttttctaaccggtcgtcagatcgactgggcccatttggttcggtaccgaatgcataaggcattacgggccaatgcacctcttccttatccacatttgattactctgtttttgcgtcattttcaaattccgcttgatgatgaaccctttgttcaagtcaagcgttcctttgcaattggtgctggagcagtgacctcctttgggtatcgtaaagatcggaatggacaatggctgaagaaggatgcactccctcctcaagatgaacgtactccttcacctccccctcaacgtgaagattccgcactcatgaatgaagtcctctccgaattacggggtcttcgttcgtatgttggtgaccgctttgactcgttagattcacgctttgccggtatggacattcgtcttacacagcttgaagaggatgtcggatacattcgtcagagttttgatcttccaccacctcctccgtcttcttag

SEQ ID NO: 55888 - DNA, 382 bp, Glycine max
  Clone ID: PAT_MRT3847_21477C.1
aagtttgcaaaaataacccttcattttatttcatttcaaattaagttttgaggcaaaattgaagcaaaactcttggctcatttgattgaacaggatgtgtgagttgttgtaaattatttaacactttgattctcacggataaaaaaaattaaaatctaacccaactgaaaactaaacaagaatctttttcaattttacttttgtagtagactttgggagcctcccaactgaaaattaacccaacatgctcttcatctctttgagtaatgctagataggatgctgcgcatgcatgcacaattgtatctatcatctatgattgacatgtgagtgtttgttatttccagggtttgagtggtgtagatggagaaggaagaagctta

SEQ ID NO: 55889 - DNA, 445 bp, Glycine max
  Clone ID: PAT_MRT3847_21478C.1
ggcttctatctcacagggccttcttctcaccactgccatgcttctctccaccaccctgctttatgttgctttctccaggccttcatttcaaattcaccactctaacaaacccaccttgcgctcttgcttgtattcaggtaaattcctttcatttttctctctctagaaactagaaactgtttgctaaaacaattaattctacactattcaacgattaatttcttatccaaaattcattagattttgattattgttttcaaaataactattacaaatgctctctctcttcttccttttttttttaaaaaaaaatcatgttattcaacatttctctcaattttacattatgttggatgcgttatatgtaccattttttcatcaactggttaaacaatcttatttagttgcatattgaaaactcaaaacagcagtttttaaaacacac

SEQ ID NO: 55890 - DNA, 403 bp, Glycine max
  Clone ID: PAT_MRT3847_21479C.1
ggctcgagcccgcgttctggcaacttttctcttttctgcctgctgccacattggttattctgcgacacgcgacagtgactcaaatcaccattcattcttttttcacctttttgcaacaacgctatggcacgaaaatcccttcctatactaaagcacctacttctctcgcgggggatcccatcccgattcgtgacgtacatgcaccgcccgggcgacgagtcttcttaggctgtagacgctgatccctggcgacagtatcagtccgatggagacggtcaccgcgtagcaggtcatggaggccatgcatgcacccgtatacttggagaagttcgaggtccacagccacatgaaggccgtgccgactgaagtcctcgattcgatacggtagaacatggtctgtctc

SEQ ID NO: 55891 - DNA, 449 bp, Glycine max
  Clone ID: PAT_MRT3847_2147C.1
tgattcgagttcgactgccaagtagttcatcaaagtgcttatgtataagtcgtttctataatcaaagggaacataaagttaaactttcagctgcaccagcatctggttctctggcccctgcagtttcacttacggataatgcgctgaagcacttgaataagatgaggtctgaacgaaatcaagatttatgtttaagaataggtgtcaaacagggagggtgctctggtatgtcatacacaatggattttgaagacagggctaataaaaggccagatgattcaattattgagtatgaaggttttgaaattggtgatgataatgctaattatgtttttaggtggtgcctataaaagaaatgtttttatgtggtagaaggttttggttcaatgtttatatacatgagtgattttaggcttttagcatgtaaaaatgtctttacacagcaaata

SEQ ID NO: 55892 - DNA, 740 bp, Glycine max
  Clone ID: PAT_MRT3847_21480C.1
attcgaacaatagtaaacattttctgcaagcaaaccaaagcaaagcaaagcaacttttcccagaaagtttcaacgtgaagagcgcagatgattatgatttaccatgaatgaaaaagtcaatataaggaagcgaacatggaagaagagaaaaaagtcatatcagaagtttcagtgacaaaggttgttgaggaggcggatcataagaatgaaagcattaaggagacaaatggagacctgccaagtgaagtaaagaaagaagaggaagagaatgcctttgatggagaattcattaaggttgagaaagaagagaattccattgatgataagtcccacaaaactgaaagaagctcagattctcctagcagagaatttctagaagcccaagagaagatacaggaactcgaggttgaactccaaagactaacagaatctttgaagacctctgagcatgaaaatgatcagctgaagggagagatctcagttacaaaggagaaattggaggaaagtggaaagaaatatgaagagctggatctgagtcacaagaaattgcaagagcagattcttgaggctgagaataaatataatcagcagctcagcactcttgaagaggcgctgcaaagtcaagaagtgaagcagaaggagctttttcaagtgaaggaagcatttgatggtatgaaccttgagctggaaaactccagaaagaggatgcaggaattgcaggatgagctacaactttcagc

SEQ ID NO: 55893 - DNA, 1234 bp, Glycine max
  Clone ID: PAT_MRT3847_21481C.1
ccacgcgtccgccggattggctgttaccagggccccaccaccattgtcttaatgctcctaaagaaaaaaaagaagagatggtcttctctcatctcctcctacattacatacctcattctctctctctctatctctttctcatcattcatcacacaccatcttcaccattttcccaattcaaacaatactaaacattttctgcaagcagcaaagcaacttttcccagtcaatataaggaagcgaacatggaagaagagacaaaagtcatatcagaagtttcagtgacaaaggtggctgaggaggcggatcataagaatgatagcattaaggggacaaatggagacctggcaagtgaagttaagaaagaagaggaagagaatgcctttgatggagaattcattaaggttgagaaagaagagaatgtcattgatgataagtcccacaaaactgaaagaagctcagattctcctagcagagaatttctagaagcccaagagaagatacaggaactcgaggttgaactccaaagactaacagaatctttgaagacctctgagcatgaaaatgatcagctgaagggagagatctcagttacaaaagagaaattggaggagagtggaaagaaatatgaagagctcgatctgagtcacaaaaaattgcaggagcagattcttgaggctgagaatagatataatcagcagctcggcactcttgaagaggcactacattttctagaagtgaagcagaaggagctttttcaagtgaaggaagcatttgatggtatgaaccttgagcttgaaaactccagaaagaggatgcaggaattgcaggatgagctacaactttcagcagatgaggcacagaaattcgaggagctgcataagcaaagtggttcacatgctgaatctgagggaaaaaaggccttggaatttgagagactactcgaagaagccaaactgactgcaaaaggagtggaagatgagatggcttcccttaaggaagaattgaaaggagtttatgataagattgctgaaaatcaaaaggttgaagaagcacttaaaacaaccacagctgaactctctaccatccaggaggagttgacactctcaaaatcccagctattggaagttgagaaaagactgtcttcaaaggactctttagtggacgagttgaccaatgaattaaacctgataaagacttcagaaacacaggtaaaggaagacatgttagcact

SEQ ID NO: 55894 - DNA, 304 bp, Glycine max
  Clone ID: PAT_MRT3847_21482C.1
gggaaaaactttcttgccagcatgtataatctcattttggtcaggcttgaacccaaacttttcctggaacttaatttttccatccttatgttttgcctcatgtaaaggagactgatctttcaattgacatggagaactaatacttttgaccctttttggatgggaattttacttacaacttggattgacattggtggccccccaaactggatttattgccttttttctttcttgggaaggaggagcctaaaaaaaattaatttttgttttacccagaagaataaatttgttttgggccgggagg

SEQ ID NO: 55895 - DNA, 347 bp, Glycine max
  Clone ID: PAT_MRT3847_21483C.1
ataaaaagaaacctaatccaagcagcgggtgtgtttgggatagttgaaaaaaaatctgatcattccaatatttgattatatatgcaatctattatagttaaaatcaattatgattagaattaacttttatttgagtatgggtgctgaaaagggattttaagataatctatttcgtattgggcaaaaataaaatcaattttacatagtaattataaaaaatgggacttagttatttaattttgttagtaaaatataacttggtgactccaatggacctaacttgtgttgctggaagcaacagaatcatatgatgtgggggttctattaaaggatggaggcgattggat

SEQ ID NO: 55896 - DNA, 433 bp, Glycine max
  unsure (1)..(433): unsure at all n locations
  Clone ID: PAT_MRT3847_21484C.1
atcctttctccgttgatgagacacagctgtgttgagtgaatcgcgatggagaacaagaagtgaaaatggagatgagcattaatcggagcagcatcagccccaatatccgcgaaacccaaggacccattattccagccgttggcatcgccggcaccgccaggctcatgtggttgaaccataactttatggtccacgtggacagccatgttaccgttgattccgtgttcctcgacgtcattgatcaggaaaacaccttcgagcttgaagtcttcaccgcagcgacgtangggagtgagcaacgaggtgtataaatatgtaagcactcactaggaactaggagttactaatgcaaattgatttgttctgcaatggaattcgatttttttaacacacattctaaagggctgacggtctagaggatccaagcttacgt

SEQ ID NO: 55897 - DNA, 503 bp, Glycine max
  Clone ID: PAT_MRT3847_21485C.1
aggaaatcacacatgaccctcttgttgagtatgctctgactatttgaaaatttccacacctctctaattgtcgcaatgatgtgtgaagtgtgtgtgagggtaaaaaaaaaaaacaaaaaaaaacaaacaaaaacaaaaaaaaaaaaaaaaaaaaaaaaactacaaaacaaaaaacaaaacaaaaaaaaaaaaaaaacgggcgccccccaccataagaccccatccccccctaaattaattcctacccggacctcaaggcctccccatttttcctaatgaggagccgcattaaaccttcgctaaatactgggcaaagctgttccctgcgaaaaattgttacccgaaaaaaattcccaacaaaaaaaaacccggaaccataacttcaaacccctggcggcccaaagagcaggccacaccaccattactcgggatgcccccactgcccgttttacaagaggaaaaccttccgaccaggctaactaaataatccgcccaccccccgg

SEQ ID NO: 55898 - DNA, 338 bp, Glycine max
  Clone ID: PAT_MRT3847_21486C.1
ggcttggaacctttgggctgatttatgtgcttgcatgtcgtgagaagatgatagaagggcatggtcgtgagaagatgatagaaggggaaccaaaaaagagtcaacaattaatgtactgtcctggaccactcagactcaaagaatcagctaaaatacaaaaaaacacaaaaaaagacacaccacagtaatcgaatcaccgcgaagtacaaaagaataaagactccacccaggcgcaaagtaacaaaaacacatagacaaacgaagaggcgagagaaagagagaaaaaaaactaacgacacagaacctcaacacgcaaaggctcacgggccactctacaa

SEQ ID NO: 55899 - DNA, 426 bp, Glycine max
  Clone ID: PAT_MRT3847_21487C.1
aaaagcaaaaacaactaagcaacagacatttttggaatcatctggaatccaaatttctatacataaaaagtacagcattgttctgcccaagttttattttcatttttttttataagcaagcagcttactgaagttttctacctttttgaagcaaaggaagatgcccccaagaaaaagggtaagtaatcaatgaaacattccaaggggatctcactcaggttttttaattatatttggaaaaaccacagtccttgttttttttatttggggacagcatttatccgcaggaggacttaaattctccataggctctgaaaaagcttttattttttttttaatcccggggattggaaacttcataacatccttatttttaatgggaaaaacagcattctgcaataatgattttaaaactccctccaattt

SEQ ID NO: 55900 - DNA, 607 bp, Glycine max
  Clone ID: PAT_MRT3847_21488C.1
gggggggaacagtaactaaccactaacagggttaaacttcgggaaaattacagggatgctgacgtagctcattaaatgaggaggtccaatttgattaggggaaggggacaggattttcggacagaggatttccgtccggggaaatgccaaatttccatttctcatttttttacaatgaaaagagtattgattgaaaaaaaaaaaaaaaaaaaacccccggaaaaaaaaatcgaaaaaaaaaaaaaatttgtttccttcaaaaaaatagatgaaccgggccaaaaaaaaaatcctcatagcaaaaaatttgctacgggatttttttttgacctttgtttcatccttggaaaacttccttgaacttccctaaaatgaaaaaaacatggtttcagccctttttcaagcaaatttttacccagaaaaaggttggctatcttcacttttgggcttttcgaaacatccaacattttgtttttttttttcaggggcacataaatctactgaatcttggttttgggagggcacatcaggtttttgtttcaacaaatttgataaactttcacaaaatttatggaccccttttaaatctccggaaaattttgatatt

SEQ ID NO: 55901 - DNA, 504 bp, Glycine max
  Clone ID: PAT_MRT3847_21489C.1
tttttgttgttgcaaaacctcatggataaaacaacttctggggaacaggacatgtctagagtattaaagaagggtggctgctttttggaaggaatattacattggacgatgctttctgtataaaacaaccgggtcaagcatcattgctgaggaccctctttgtagggatgacagcaaattggaaacatgctcttcaaggggctttttagcatcttgcctgcccatattaccaatatgcacgttttactggcggcagcttatcttactcctgcactgccttgttgcactctggctgctaagcttaccatttcctgaacagcctggtattagttttagacatgagaaacagactgcccgaagtggcaaaccatcagcccccttctttttgagaaggactgatgacatgcctctctaaacattcattttttctgtaatcaaccggtgatcgagactgaacgtccattcatgccctggaccacagcttggatagaggggttgttcagg

SEQ ID NO: 55902 - DNA, 265 bp, Glycine max
  Clone ID: PAT_MRT3847_2148C.1
cggggacagaaagactgaggagaaaattacagaacattttccaacacaattacacaaccgaatcaaaccctctctttcgcgccggagctgcgtttaatatcttacactccatagattattcttctctttcattatactgttctcttttcgatttgacggaacagtacaagagtgtgaggatcagttaacccatcttcatatgtagtcactaaaataatgtattctcactatcacactagctgccacactcctgaacgctccattc

SEQ ID NO: 55903 - DNA, 280 bp, Glycine max
  unsure (1)..(280): unsure at all n locations
  Clone ID: PAT_MRT3847_21490C.1
gtacgacctgccaggtatccggtccggnnaattcccgggtcgacccacgccgtccggtgcacacctacgtgtacacagaacggatgtaatggatttttatctttgcttgactctgtctaacaactctgtttgatgggttgcgtatctcggtcccttggagaattaaagctgtgaccgccctctccctttggttcagagtctgctggctcctctcccagactagactgcatcgatttctttaatctgaccacagatgtgataagctatgcttttaactcct

SEQ ID NO: 55904 - DNA, 253 bp, Glycine max
  Clone ID: PAT_MRT3847_21491C.1
cgctcgagccgaatcggctcgagcagagacagggcttggcattctcaacggtggaaggacctcagctagttagttaagcagcctagttttagccctattacccagcacatggaatggaaggtaggggatgggagtttaattaacttctggaaggacaaatggttggggactggttctaacctggatcagcagtttaaccagatgttcctcatagtagacagcagaatagtaagatttgtgatatgggtagctt

SEQ ID NO: 55905 - DNA, 215 bp, Glycine max
  Clone ID: PAT_MRT3847_21492C.1
ttttagcaaacagaaagcgctgtttttcagaggtggaagaaagaggaggatatggggtcattctatttgttccctaaaggactacgaattcaacatttgttggacagacatgttcaacggcccaatacaggggcaggaacattctgattttgtttcctgaactggtacattggacatgatgaaaatctgtacggtattcacataatcaaattttt

SEQ ID NO: 55906 - DNA, 525 bp, Glycine max
  Clone ID: PAT_MRT3847_21493C.1
aataatcataaattatataataaatttgacaaataccaatttattaccatgtttacaaatgatttagtacatataaaaatatcaaaggcaactcgtgtcagtcgagtgtatcaaaaggaaaattttcactttcaaggtagagagtagaaattccgtgacaaatcagactttttcttcttcattctgtatctctctttctttgttttccctagattatgtgctggggaagggatagcaatggaccactccatatctttatttttttctccacatcaatgttgtatcatattcaatactagtggaccatgacatattatttaagtccttgcagcgcattgaagttttatggtattaaaccatcttctttagtcatgatctcagggatagtcaccagctttaaacaataaagtcggctaagctagcccatagaagagccatagaagtaatgacaatgatcataacaggtgtccatttcaacgcaatcacctcaaggcgtggggaacaccatattgtggattcaggcag

SEQ ID NO: 55907 - DNA, 118 bp, Glycine max
  Clone ID: PAT_MRT3847_21494C.1
tccactcgttcgaagactacaaaaaggcccacgaatgccgttaactattggtgtaaaagggctggtgtcctactcctactgaacgcccctacaaacacaaagaatcctgaagcgcaaa

SEQ ID NO: 55908 - DNA, 295 bp, Glycine max
  Clone ID: PAT_MRT3847_21495C.1
cacgtcttaccttccgagacccttttcttgaaggaaactctactccaccaaaaccttgccttttcttggtgaagaagaacaagaagaaaaataccaataataacaacaacaataataataaatatattattgttgttattgttattaaaaattatgacggatgtgctttagttgccttcattcataagctgatattgtttttcatgtgaacatctaatcaatatccatgtctcatttccagtcaacattatcaacgtttattgtgttggagatcattaaagcatacacttttctt

SEQ ID NO: 55909 - DNA, 506 bp, Glycine max
  Clone ID: PAT_MRT3847_21496C.1
ccctccaaatcccttttatttaaaaataaaaattaaatccaaaggaaaaaaaaagattttaaaagaccccaattaaaaaaatttgaagggggaattaaaaagttttttatttttaaaacaatttttttccacccggccccggaaaaaaaaaaggcccctcgggccctgaaaaactcccttaaaaaggacctctgcttccccaaggaagggcttggaaaaaaaaaaaaattctttgaaaggggggttattcggggtaaaaaaacccccgaccccaacaaaaaattcccttacccgccccatttctaaggaaccaaaaaaccccttccccccaaaaaaaaaaggtattatcgggccccccccggaaaaaggacccgattgggattgttaaaacaacccccccaaacggggacccctggcaaaaggattttgagaacctttatcgagaacaaaagcgaatggggcaaaagcctcaaattccgggaagggggccaattcccattttaatt

SEQ ID NO: 55910 - DNA, 282 bp, Glycine max
  Clone ID: PAT_MRT3847_21497C.1
cgtgtggaaatcttgcggaggctgttggtgacctcgcaggctcgggcagtggctccaggtggagccaccaggctgacagataaggcagtgaaggactattccgcttaccgtccttcccttcttctttgggccctcgtcgatctcatttacaacatgtttaagaatgtgcctaccagtaacacagagggaggctggtcctgctctctcgctgagtacatccgccacaacgacatgcccatctacgaagctgccgacaaagccctgaaaaccttccaggaggag

SEQ ID NO: 55911 - DNA, 463 bp, Glycine max
  Clone ID: PAT_MRT3847_21498C.1
cccacgcgtccgcccacgcgtccggctaaagtaagtgaagctcagcatctgaaacagagtgtacaatcccagaacaaaataagagtatcaaatatgtacccggatttgtgcttgaagaagcttgatataaagagaagcctcctgaagaactgatgcggtgtcagtctgcaggatattcagaaagccaaggccacactttcttaaaggtgtttattatgctagtaagaaatgaaggatctagtttttgtccattaggggttagcaatgatgactcaccttgccaaaaggtgaaaccaacttttgtagagttgtaattttattgctaagcttctgatttgtcatcataggcacatgcaactgaaggcaaaaaaaggggcatttttttaggcttacggttaaaatgaattacctagtgcctaatttaatcagcaaaacgaaaaaaaagtaactactattattatag

SEQ ID NO: 55912 - DNA, 790 bp, Glycine max
  unsure (1)..(790): unsure at all n locations
  Clone ID: PAT_MRT3847_21499C.1
cagaaacgttcactctccaaaaaggagagtgagcctttgaagatataacacagaaaaaaagaaccagctaatagggaactgcatcgacactatggcagaagatgacatatatacacaagatgggaccattaccatctccaaaaaacctgccaacaagaaaaagactggaaattggaaagcttgctattttattcttggaaatgaatgttctgagagattggcatactatggtatgagtacaaacctggtgaactatcttcgggagcgtttcaaccagggaaatgcaaccgctgcaaataatgtcacaacctggtcaggcacatgctacatcacaccattgattggagcctttctagctgattcatacttgggaagatactggacaatttccagtttctcaattgtctatgttattgggatgatactcttaacattgtctgcttctgcccctggactaaagccatcatgtgatgctaatggttgccatccaacatctgcacaaaccgcaacttgcttcatagcactctacctgattgctcttggaactggtggtatcaagccatgtgtctcagcttttggtgcagaccaatttgatgattcggacgagaaagagaaaataaagaagagctctttcttcaattggttttacttctctattaatattggtgctcttgttgcttcctcagtgttagtttggatacagatgaatgttggctggggatgggggtttggagttcctgctgttgcaatggtcattgcaattatatctttctttggtggtagccggctn

SEQ ID NO: 55913 - DNA, 626 bp, Glycine max
  Clone ID: PAT_MRT3847_2149C.1
tacggctgcgagaagacgacagaaggggagaacatagcagctgaaacccacgggaaacaaacccattcataaatgatagacaaatgagttgtttgagaaattgagtgtgagaagaggaataagaatagatattgcaatttggaagggatgaatctaaggccattggggccattggttaggatggctgtagttatatttggtggagtggccactttgaacttggcttctgctgctaccatcaaagtgcttcggtttgcgtctgagaagaaacgggaaaaagttgcgttgccgtgtagggtttgtagagggaaggggttttatatatgcaaactgtgcaatgggaactccaccatatcttggtcaccaatgttcgaccctattgcaattaacccctgcgtttgtccgacttgcgaaggaaacagagttcaacgctgtttgaactgtcttggaaaaggctatgattgacctactatgactgagatattgagatggatactgaaacagttcgtgtaagggtagggtatgcctgattatgcaagtgactagctctatgaaatatattcttttttgtcaataaaaaaatgtatgcttgctgagaaaatgtaagacaaggaagataatttcat

SEQ ID NO: 55914 - DNA, 238 bp, Glycine max
  Clone ID: PAT_MRT3847_214C.1
attgattataaataaaggattacttgtgtgtcaacagatacaattaacaataaacacataatatagtacaattacttgtagattaattaaagggtatgggacaggattttctgtaaattaaaaagtgaatggttgttgtttaaggagagaaaagaataactgaagagcaaagaattcaattcaaagatttgcttgggtcaaaaactaaatttgtttaatgtgtctaattgtattggtg

SEQ ID NO: 55915 - DNA, 2811 bp, Glycine max
  Clone ID: PAT_MRT3847_21500C.1
ctaagtatttattgaggccgaagcatgatgaatctggtctacctttgttattttgtctgtgattgatatgggaaccaaacaaagtcctctgctccttaggtcaacctccaatttgtccgcacattcctgacgtgacaccagctgagtatggggatcattaatcgtgctaaagtaagtgaagctcagcatctgaaacaaagtccggatttgtgcttgaagaagcttgatataaagagaagcctcctgaagaactgatgcggtgtcagttttgtgcggagggattatctctgaaacttcttttgcttgatgccatttcggttccatgattgtaattttgcttttggaattgcttttcacttttttccacaaggacatgttgtcagtgtactcaaatggacgctttcttgcatttccacatactccttcatactgagaagggtctttgtcaagtaacaatgattgctgagaaatttctttgctgcttgggatggcaaagagactacctgggtaatgattgtagtcataaatcagagactgagactggcttggctgtgtatggactccttgacctaattggctgtaattgttgaatattctagactccatgttgaagccattgatatggaagtcaattagatcgttcatatgcatggagccttctaaaatttcaaactgagcttcatcatttccatagcagttaaacctagaagaaactgatgataaaagagcatttctcatctttgcaatatcaatggaataagaactagcttctgacatgttgggcaaattggcacccatactagctctacacgtctgagctaccaaggctatgaggtcaggcttcttctgatgaaggtaaaactttgtgacagtcctgttacctctcttgacagttgctctatccagaattagttcaggttctttgcctcccataacaccatcggaatctgtaggaaggaaatttgaaactggtgcttcaccaacatgtcttttaagctgtgaaacatgaaaaacatcatggattttagacccctgtggcagcttcagcttgtaagctacaaccccaattttatccttgatctccacctttgactcacccggcaaataaggaaggtaaattggaggaggctggccaaacataacctcataaggactgcactgtatggaagtgttatggttggtattgtaccaccattctgccagcggaagccatttagaccactcatgaggaacatcacaacacatacaactcaagaatgtctctaagcatctattcaccacctcggattgaccatccgtttgtggatgataagctgaagagagttgtagctgaaccccttgaaaggccatcaaatccttccgaaattggctgacaaagataggatccctatcactggttatagagtctggaaaaccatgtaacttgaacacattgtccaagaaggattgagcaacttcaatagcagtgtaggggtgtgttagggacataaagtgggccgccttacttaatttgtccactaccacatagatcacttgttttcctttggaatttggtagaccttcaataaaatccatagtgatatgctgccatatcctctctggaattggtaagggttgtagcaaacccgaataggaagatttgtcatatttacatttatccttggtcatgcctctccaatatacaattgatttcaacctcttcaatgtggcttccctacccgagtggccactagtaggaccagcatgtatccattgtaacaaatccgtctgtaaagttagatccttcctaactaccaatctccctttccaagagcgtatgattctgttcaacatgttgctttccggtatgagagttgtgattgtttgacagtctacggctttgtgtcgggatagggcatcagctgctaaattttctcttccctgtttgaattcaattgtgaaatcaaattccatcaatttcaccaaccatttctgttggaaggatgtcgtcaacctttggctcagtatatattgcaggcttttgtggtttgttctgataataaagtgagtattcaatagataatgtctccacttttggactgcaaagactactgctaacagttccttttcatatgtggaaagtgattgttgttgtatatcgaggactctgctaataaaagcaattggatggtgattttgcatcagcacagcaccaatgccataacctgaagcatccacctcaaccacaaacaccttagagaagtcaggtaatgctaatactggtgattgaatcagactatccttgagggattgaaatgctgcttttgctttgttagaccagtggaaattatttttcttcaacattttggttaaaggccttgcaatcccaccaaaccctcgaacaaaccgtctatagtaccctgcaagtcccaaaaatcccctcagctgtttcaaggatgttggttggccagttcttgacgaccatgatttttgcagggtccaaggacacaccttcttaaaggtgtttattatgctagtaagaaatgaaggatctagtttttgtccattaggggttagcaatgatgactccccttgccaaaaggtgaaaccaacttttgtagagttgtaattttattgctaagcttctgatttgtcatcataggcacatgcaactgaaggcaaaaaaaggggcatttttttaggcttacggttaaaatgaattacctagtgcctaatttaatcagcaaaacgaaaaaaaagtaactactattatcatagtttacaacactaaattctattcataataattatgtactagtcttactctttgat

SEQ ID NO: 55916 - DNA, 650 bp, Glycine max
  Clone ID: PAT_MRT3847_21501C.1
ccacgcgtccgattcaatttacaattgtgtcacttggtttctatgatgattatctgtctattcatttatcttaagaagtcaactaattttttgtaggagagtgagcctttgaagatataacacagaaaaaaagaaccagctaatagggaactgcatcgacactatggcagaagatgacatatatacacaagatgggaccattaccatctccaaaaaacctgccaacaagaaaaagactggaaattggaaagcttgctattttattcttggtattggtttcttttattttattttttttgttaatttttatcttagaaactatgttgtctaagcttacataatatgtctgaagtttagtacatatgcttgtactaaaatttcaggatcctaagatgttgagtttttaattaaaccatgtgtggcaggaaatgaatgttctgagagattggcatactatggtatgagtacaaacctggtgaactatcttcgggagcgtttcaaccagggaaatgcaaccgctgcaaataatgtcacaacctggtcaggcacatgctacatcacaccattgattggagcctttctagctgattcatacttgggaagatactggacaatttccagtttctcaattgtctatgttattgggatga

SEQ ID NO: 55917 - DNA, 488 bp, Glycine max
  Clone ID: PAT_MRT3847_21502C.1
gcgaccactactgaccgctatggtctatacatagagaaagagagactgaactacaagaaaagcacatctgatttttaggaaaaactactatgctgtagagtcaagtagctgtattgtattgctcgttcaccgatgcatgtatacgaagctacaagaattgaatgcttacagaagcaaatctaggtccctgaacatgcttgcgaaatcccgggtgtacttctttgtcccgaccatggtggaaacgaaaagataacactagcatacggcctagaagcacttgggtacgtctgtgattcacaaagccagtaaggaggtacaattaccttttaactgtaccatgaaagactcaactgatggttctacttcacccttaatagactggcaaaacttagacactatgtcatggatcaggggctacggtatccgtactggtctaactatccctagccctcctacacagactaccctggatggactaaaatctcctg

SEQ ID NO: 55918 - DNA, 324 bp, Glycine max
  unsure (1)..(324): unsure at all n locations
  Clone ID: PAT_MRT3847_21503C.1
ttggtgaatctatcatcatgctaggtctccgacttgcttgatntagtgaaacctcgtctagagctttctctctttataatatgttgtcgctggtattcgctaccgccgcagtattattatcttgagtgatgatacctgctagaaaacggctgtgtgagttatgaatcattgggaatagttattagagacccctatatactatcctgtaggtgcctaaggtaggggcgtggagcaaacatgctgggtgccgttgtaaacactggcatgcgtgcggggctaggtggggtatacgcctttggttggggttattgatggatatggggg

SEQ ID NO: 55919 - DNA, 291 bp, Glycine max
  Clone ID: PAT_MRT3847_21504C.1
gagcgcgcgcccttttttttttttttttttgaacggaaagtctttcttttctgcttgaaagcgaagacattatatgcatgagattgtctcctctctgtggactagctgcaaattcaatatgcaagtaggggatatgtatattcaccctcatgaaatagaactgcaggtatgctttgccaatgagaagatgctcctctgcagcctaaagccatgtctgaaaaatggcagagagggttaaaggggctcggccagctcgaagttacttaggaacattcacgaaccctagttttc

SEQ ID NO: 55920 - DNA, 319 bp, Glycine max
  unsure (1)..(319): unsure at all n locations
  Clone ID: PAT_MRT3847_21505C.1
cgaagttttgtattcggctcgagctctacttccagaagattttattttcccctgcgcacaagggaaacggggggggactttaaaggncgcaagatctaattctgccgacaagactcaaccgttcaagttcacattactcccatcgatgcaaccctctacagagctgcaatccaaagcggtgctttaacacgtacctacgatgtttaagcgtccacggatggaaggcacgactacctttggaaaggagttcctaaggctagccgagaatgataattggattgtacatccaagctctgcttgaaatgcacccacccaagca

SEQ ID NO: 55921 - DNA, 413 bp, Glycine max
  Clone ID: PAT_MRT3847_21506C.1
tttagaattttaatccgctctctgatccaaccttgtctgtaccttctttcttcataatattaaggaatgcacacgtgaacaatgtgtggatgatcatcaggagctgagaaagaagggatctattgcaaaagaacactagagtccattctgtggtgagagaataaataacttagcttattgcataacacagttctgttagacggatacatataagttattattgcgttaacagctaatctgacttgtcgaagaatgtcattgttcccacggtggcggtgtacgcacgacagcgactgctgctgcagcatagcgagagctaccgtaatgcgtggtcaccgctcatgggggatgctgtgggcgagaccatcgccgtgtgctgctgcttctcgttcagtctggccaacattatatac

SEQ ID NO: 55922 - DNA, 497 bp, Glycine max
  Clone ID: PAT_MRT3847_21507C.1
acacgttttcatgtatgtgctctggtggaaatatctctagatctgtttgtatcataccatcaattgcctacgacgttctctcaggttcagtatatggctgcatattggagacaggaaccgccaatgacaccagtacatgttctaatgtggaaccgtgtcgatgtatgagcgcggcaccctctcaaggtataaactgaattatcaatagatgactcagtagatctcattcaataacgtccacgttatggtagtcgcgtatcccaatccgcgttcagcccgcttctatacgagaacccaacaagcagaagccttgggaagcccaagcaagctttctctcatacattgtcaaccaatggaccaagcaaaattacgctccatgtaaatgcaaccatatcacttaacatctcctttctatgccccttcgactaacacatatatacttcactcccttgtatggattcacgccctcgccgaggccacggctttggcgtggatcg

SEQ ID NO: 55923 - DNA, 338 bp, Glycine max
  Clone ID: PAT_MRT3847_21508C.1
gcttaatcgatcatgatgtcactacacttatacatcatgggagacgagaccctttacatggttgagagctctggaggcgtggtccagcaccgcggtttttgtctctttctcgaaacgtaactggatgtaaaatacaagccttatgcgcaggaagaggtcatcgtcgcggagtttcaataagtgactagtctcagtccaaggagcgatcaagctcatcctcttagataaagcttcaccgatctgacagcaggtctagctctgcaagcttgttttcatttattttcttcgattgcataaacatgagagctatctgacttgatcaccctgaaagggataac

SEQ ID NO: 55924 - DNA, 606 bp, Glycine max
  Clone ID: PAT_MRT3847_21509C.1
ggctcgagtctgcatcattgaagcaatacttgaaattcatcaaagcagaggaaagaaacataaacaaaggtgcattgcaaattaatcacggagatgggtggaagaaagtggagcatcttggtggccatcttcatcttacttcttgctatggaagctgtcattgctcaaggtcaaggaaatggaaatggtaatggtaatggtaatggtaatggcaaggataaggataaggaagagaaggagagggagaagagggagaagaaggagaaaaaggaaaaggaaaaggagaagaaggaaaaagagaaaaaggacaaaaagcaacgtgatgaagccacaaattatgacaagctgtcatctctgccaaccggccaagaaagagggttctgccgaacaaacactacctgtgagtttaagaccatcgtgtgtccatccgagtgcgcatccagaaagcccaagaagaacaagaagcagaaggcatgtttcattgactgcagcagcagcacatgtgaagccacttgcaaggttagaaaagccaactgtgatggatatggtgctttgtgttatgatcctcgttttgttggtggcgatggtgtgatgttctacttccat

SEQ ID NO: 55925 - DNA, 971 bp, Glycine max
  Clone ID: PAT_MRT3847_2150C.1
aattcggctcgagcttcaccactttctcaagatgcaattcatccttggagctcttaagggtgtgcaccaatgcactggaggaagttgagaagtcctttgtctctcaaatccaagattggtcctcacataattcaatttgttggaaaaggagactgcaaagagaccaaaaagtggatgaatatgtatggcaggatgtcaccttgttgaaggcaacactgctggagacaagagcaaagttgctagcaagaggggggcgtctagacagtgccaaggaactgtgcagaacatgcatcagtatcagaactgtgatgcttggccataaccatgcacagacgttggctgctcaagagacattagccaggttggtgagaatgaggagtaagatatgagtttgttcgttttgtgtcttctactttactgttaaacttcatacaaaacaacacctgtagtgaaaaggtgtataaatgttactatggcaataagcatcactgtgtatgaatgtactactagtgttccttatctgcctcctcaacaaaaaagcattactgtggcaataatgttgttcttgttagaggcatctactgtaatgttggagaatatgatagtgccaatggaaaatctagtagttaccttagtatgttgctgctcttcgattgaatttgcattactctactgcaaattatcaatcaataaaaaattcattagtagaattcagctgaggttttctacaatatctacatcacgtggacatatctacaacggttgatgaatttaaatgaacaccctgaagacaagtggtgaacaaaattgtgttcaactggatgcaaacccacatgccgtgcaagtagataaagaaaattgttttagattttatttaattagaactacatgtttcttatgtattgactttcaaagttaagaacaatccaataaattacataattcttagcttctgagattttttccccctt

SEQ ID NO: 55926 - DNA, 296 bp, Glycine max
  Clone ID: PAT_MRT3847_21510C.1
cgagctgttatgagagagccgaataccagggagcacgacgaaccagacatgaacacaaggtatcagcatttgagtaccactaaccaatggtgattttgctaaaggaaaagatccgactatggatagagaaaatgtatcatgtgctggtgggggacagacatcaagaaacacttcaactacaatgctggaatcaggtgggcaaaacgacagaaggtgaaatggggagtactgtggaaggaagacttacgctgctcataacgaaaatcagccccaagagaaaaaaatactgcagggaa

SEQ ID NO: 55927 - DNA, 255 bp, Glycine max
  Clone ID: PAT_MRT3847_21511C.1
cttgggaccatctggtccatccgcttcacctcggatggccagttcatgtacatggctgaatgtgctgactttgtgcacatctacgacgtgatgagtgactacgacaaaaggcatgagcttgacttctttgtcgagatatccggcacatcggtcagcccatacactgacacgcttttcgttggtgtgtgggataggatgtatgggggcctgctacagtttcgccgcctgtacaactactcgtatcttgactccctg

SEQ ID NO: 55928 - DNA, 320 bp, Glycine max
  unsure (1)..(320): unsure at all n locations
  Clone ID: PAT_MRT3847_21512C.1
tttgtttaattaacaacaaaattccaataccatttggattgcttcttgggcaaagggancgagccagctataacagtttataatcgggggagcacttgttctgctcatcataaaagtgcattggccagatgtcacgcggcagngagtactganaggaaatgtaagacgntcatcagtttcagtagatgatataccccttngcttcatatgagtgctcagcctgtgtttgtgcaaatggagttataagagcacagggaggctaaagggaatttctggcccgtagattcttcgtccggcctgattcatgtgcaaatgcaaga

SEQ ID NO: 55929 - DNA, 208 bp, Glycine max
  unsure (1)..(208): unsure at all n locations
  Clone ID: PAT_MRT3847_21513C.1
agccgcancaggcaccccagaaggangganaccagccccgccgcagcgggacaaacaagacacagaaggacccccagcaacagacacgggaagcaaacccccagacaaggacacaacgaaaaagccgccacgacacagagaagactttttaattaatttgtggattttattccgctatctggttattgggatctatgttggattagcc

SEQ ID NO: 55930 - DNA, 225 bp, Glycine max
  Clone ID: PAT_MRT3847_21514C.1
gtaaggcaagaggagatttgtttctggggatggtgaagagatgacattgattccgggaaccagtgttgaagaggcttacaacaagctaatagttgaactgtgcgaaaagtagttcccacattaggattggcattagaatgatcccaagagagtgaaaaaacttccacgatcgcaaaatgttttagacagaacctacagacgcgctagcttcactgattctcccta

SEQ ID NO: 55931 - DNA, 219 bp, Glycine max
  Clone ID: PAT_MRT3847_21515C.1
gtcagcggagacgttcgactttccttcagagcgctgctctaatgctacagcttgggctcttatactctaaatggtggataatcgcttccgatactctctctgtaccctcattatcccttcatgtctcagcgaaacgattcaccgaattcacaggtctctgcagatcaacatgcttccctcacttatctagataatcctcagaagatttccagtctgtca

SEQ ID NO: 55932 - DNA, 277 bp, Glycine max
  Clone ID: PAT_MRT3847_21516C.1
gacaatataacgctttataatgcgtaatctctcctttctcccttaacaccgttacactatcgttcttcgctgcttcgctgaatctcgctacgccgaaagcacacatctgacaccataaccgcctgagaaccggttgaatcgcaagggcgctggtgctggcacgaagcaatcgacgaaagctgctaaagatactaacaagccacagagacctccaagcgctattcgtcgttttcatggtacgacttcagatagcagtttaagaacgagcatcctaaca

SEQ ID NO: 55933 - DNA, 391 bp, Glycine max
  unsure (1)..(391): unsure at all n locations
  Clone ID: PAT_MRT3847_21517C.1
aaacaaaatgaaaaaatatctaataacgccacccgacntaacgaaaatggggcccttacaaattaattaccacccataaaacaatattaaattccacatctctctcaacaaaacttatatgccttaaaaaaataaattacttcttttatttatgacaataaatatatataaacaaaatattatttgaatcaagtcaaaatctatataaacctcacttaaaataaccttttttgatcctcctattgctctataataagaccactttaaatatacctccaatattactttcctttactttttgatacatttatatactcattctacccaacaccatgtcattgacccagaaaaatcattcaaacttattaccctagcattaactcttttcaca

SEQ ID NO: 55934 - DNA, 1120 bp, Glycine max
  unsure (1)..(1120): unsure at all n locations
  Clone ID: PAT_MRT3847_21518C.1
ctttgttgaagcagataagaacgaaattaactggtgcagaggagaagaataaagctgatctgggtggcagcagggatcagaaagttacacacagaaaaccccatccttcaaagataagaaaaaggctcagaattggtttcagagacaattttcaagaaccatgagtcatgattatgacgcagaaatggagcttgccacattttttgctgctgctgcattcgcaattttttcactagagggttcactaattccacagcaaaagaaaaagagggagacacctttgaccagaggcaaaagcaaagtggatgatacaaaacctccaatttctcagtttggtggcacatcaaggcagttctcagtggatttgaagaggcctgaaaaaaccatgacccctgcaccatcaatgaggaggagttcaacttttggtgaaaaggtgaagagtagcactgatggtaaaaaacctgagatccaagccccaaaaaggactacaacttttggtgatgagcactcggtgaacactggtgaaataaaacctgagaccccactaccaagagttgctccaccagttcatcagcaaatgcctttaaggccaccgccacctccattgccaccaccgccaccgccaccaatcaggcagacttcagcaagaccaggtaccaatggaacaaaagcagatgcctgggagagggaggagttggaaaagatcaaagaaaggtacgagaagttgttggaaacgatagattcatgggaaaagaggaagaaggcgaaagcaatacgcaagctaaataagcatcagcatagtgaaagtgaacggaaaagggcgaaagtgttgaagaaatatcaagataagatgagctatattagtcaaattgcagggggagcaagagctcaagcagaggaaagacgaaggagttaagtgctcaaagcaaaagagaaaaaaaatataattagaacaacgggcaaaattccagggccatgctcttgcttctaacaacaccaattatatatatgtacatattacataacatcactaattaaagtttgggtataacaaaaagaatatgtaattaattatctgttttacaattctgtgaaaaanaaaaaaaaaaaagagaaaaat

SEQ ID NO: 55935 - DNA, 236 bp, Glycine max
  Clone ID: PAT_MRT3847_21519C.1
atgtgtcttgatagaagggtacataggaatgtacgtactggttacactcataactcactagggcggatatgtagtgattgcagtctggtgattgatcaaatgctcatgacgatgtctgtaggacacatgattggagatcattgcgctagtaccatagataggacgagctcttgagcactacgatgatcttgtaggatgttctgctacgtctcctcattaaacatgatcttatgttt

SEQ ID NO: 55936 - DNA, 355 bp, Glycine max
  Clone ID: PAT_MRT3847_2151C.1
cctacaccttctaatagtggttggaagaatgttgggatgatggctcctttgatgcttcctggccaacagatgggggagactatggtggttattctgatgattgtgcagaatatcaggatcgtcaccaacggtggcagcatcgttgaccgcggcgtcgacctatgctgcagcgccatcggcgctgctactgttgcacccactatagcctccatccaattgatcattcctaccattgctgctgccaaggctggtggtggtgaaaggactactgatttaagtgcaatgttaacagtaccaacctcgtgacctgccgtagtagcttacgatcatgcatacgatggggacactgactggg

SEQ ID NO: 55937 - DNA, 208 bp, Glycine max
  Clone ID: PAT_MRT3847_21520C.1
taccggttcgagaagaccacaaaaagggggggcttaactgaacacactgcggtttaaatgggggcggggacaaaaaccctgacttctaaccgtttttttttcctttcacctttttagcagatcggtacaaagacttcataacccggaaatgcctttcaaaaagggccttgagaatggaaagggtgcttaaatccactattgccaaaaa

SEQ ID NO: 55938 - DNA, 396 bp, Glycine max
  Clone ID: PAT_MRT3847_21521C.1
acggctcgaggtgtgaacccacgctaataccaggttgcagatccgtggtctggaggggaggttacgacgaatctctgggcatgcggcgcggcccaacaggccagaaagcattacacaactccgcaaacggaggcctacatgatgatgccaacgaaaaccgagcccgcatagatgtgggccacaaagaaggaggctacgtctacgtcggcggttacaaggaaacccaccagcaccgatgaggtccgtaccctctggatcggagattaaaaggactggatggactaatagaatgagtacacctatgctaggaaaaacgtgctcagtgggttcaatgaaaatcattcggaacaaacaaactgagaaacctgagggataagggttcatagatgccactag

SEQ ID NO: 55939 - DNA, 366 bp, Glycine max
  Clone ID: PAT_MRT3847_21522C.1
tccactcgttcgtacaagggtcagtttagatggttctgcggtatagagtttaaaaatggggaaggacacaattgctcgaaagagagagatggtacgttcgaaactcaaacccaaggcttggaataaggaatgtgatgatgatgacgatgatgggacccataagctcactcccgatcatgatttggtccggcatccgatcctaatcgatgatttcaagtgctgactcgagactaacgaaatatacgtatccacggtgtcatcctgtacaaacgagctgacattgcagtttttcttgcagaggcagccgtcggtggcggttgccgactctgcgacccgtgatcttaggcgtattgtgcggcttgaatg

SEQ ID NO: 55940 - DNA, 1901 bp, Glycine max
  unsure (1)..(1901): unsure at all n locations
  Clone ID: PAT_MRT3847_21523C.1
cattgggaaggaaaactctgagttaagttgcagagacacacgttaaccctgtgtgaagcctctgtgtctccacctgcattattcaacacacagtaacagcactggtagtagtagtagtagtgtttgtttgagagagagagagagagagacaacaagcaacactgttgatgcacagaaggaagaagatagactacacaatcccaagggaggactgatctgaatctgaatctgattcccaccatttactttttacaggctatagagccaagagcccaaaaatccctattgttctgactgactatccatttaggttctttggagttttctacaaataaagaactcagcctcatttccgggagtactctctggacaattatatgcagtgctctttttgagaaaaacagtgttaggtggggactagctactaggaacaactgatccaagccaaaggggtagatcagctattactattcctgtaaaataaatgcatatattatatatgtaccgtgtggagttttagtcttttacatagtgagtgagagagagaaacaaaaagaaaagagagagctctttcattntcattcctttcaagggtttaacacaaacttcttattacttttgaaactatgatagggtttggagggaacagttgcagtgagctttctgagatggacatgatgaacatggaaactaataataggaagtttctttctctgcctctcagtaacaacaacaacaactctggtaatgcccaaatgcgcagtagtagcgataatagaagggtacctgtcactagcaatagcaatatcgctcaggaacatcactacagccaccacaaccccaccgacacttgcagtgtgagggataaaatcatggcacaccctctttttcctcgtctcttgtcctcttaccttaattgcctcaaggttggagcacctcctgaagtggtggctagcttagaggagtcatgtgccaaatgtgagtccttcaatgcatcatcaggaaggacaggtggttcaataggtgaagatccagctctggaccagttcatggaggcctactgtgagatgctcattaagtatgagcaagagctcactaaacccttcaaagaagccatgcttttcttctcaagaattgagtgtcaactcaaagccctagcagtttcatcagattttggtcaaagtgaaacatcttcgcagaatgaggttgatgttcatgaaaacaacctagattctcaagctgaagatcgtgaactcaaagtccagcttttgcgcaagtatagtggatatctagggagcctcaagaaggaatttttgaagaagaaaaagaatggaaagttgccaaaggaagctcggcaacagctacttgattggtggaacaggcattataaatggccatacccttcggaatctcaaaagcaggcacttgcagaatccacaggcctagatctgaaacaaatcaacaactggttcatcaatcagagaaaacgtcattggaagccttctgaggatatgcaatttgccgtgatggatgcaactaactactacatggaaaatgttatgtgcaagccatttccaatggatggcatgcctatgcttctttaactcaatcctctactagaatattcaaaagcttagccgagaaaaccctatctattttaagttgcctaggtcgccaggttgctatatataatgtgtcattgatgaatgttttactttaaattgtagaaagcaggatgaaaattctctgttatccctgaactgcaatctatgtaagtgagcgtgaatctaactatatgctctattatctacactgtttgtggagatcactagagatgttgtgtatgtgttgtttcctaatttaatgaaaataatttgttttccatatggaaaaaaacacac

SEQ ID NO: 55941 - DNA, 834 bp, Glycine max
  Clone ID: PAT_MRT3847_21524C.1
aaaatcctcttacagcagcatttgtaattgtcttgttttcctaccctcaaaattcgttcgttcttctgtttttccttgtgtgtttctttcaatcttgtctaaagatagtgtccactgtttgtgtatctcagtgattaaatgtaactgcaatctcttcatcttgttcttcttctttgctttacttgaatctgttcttgttccttttttaaggttccttgcagaaaaatgtaattttggtttcagattaagatacccttttgcttttcaatcaatgcccaaatcctcaaaagtcttctgaacattccccagcatgttctcagtgatggaatctcgttaatctatatgccagattcccatcggggtccagctacctcaccttttgacctttctgttctgttgatgaacattcttctcagtgcttctaaattgtagcaaatgcagattgtgatgatgggtttccgttagttaggtgttggattgccctccatagctatacattcaaaactgaattttgattaaccttagttttgagtgtattaactgtaccatgtaactgaatgctgccaatctgcttctactgtattgtttctgggagttagtttggcctctatagatagcatatggagggtaaagtagagaaaggggtggttttggatctaggatttgtcatgagtgagcgctagccttcattttcagtggagagagtgtctactcttctctaagtgttgactatagcataaattctcaaatattctttgagtttctcttgaatatgtaaagccaggtctatttgttcaattattgacttcttttgttactcataacaatacaccc

SEQ ID NO: 55942 - DNA, 1231 bp, Glycine max
  Clone ID: PAT_MRT3847_21525C.1
cccgaatctacctagctttttccgcgtccaaaaaatagaaaaaccaaagcacaaaaaacacatgtcttaatagaaaagtcggcaacgattgatggtttgtcacaccaccgaagaaggcttcaggaatctacatagctttttcctcagagcgttgaaaattcccagactctctcgcttcctcaaaatttcgccctctttcattcaattctcttctctgctcttctcttctgttcccaccttctgatccatcatccctcgttttctccgaacaatggctgctggtgtcactgtcaagtccgaggttctagaatcttctccccctgaaggagtatgttccaacacggaggaaaaccacctggttcagaccaatttgtctgatgggtcacccaacaagtctgtgccagcatctggacttaatgcagtgattcctagtgcaaatcagcttaccatcttctataatgggagtgtttgtgtctatgatggaatccctgcagagaaggtgcatgaaataatgcttattgctgctgctgctgccaagtctactgaaatgaagaagattgtgacccaaactaccctcatttcacccgttccctctaggccttcttctccacatggaatcactaacaatattgcttcctcgcagaagagttccatctgcaggctccaagctgaatttccaatagcacgcaggcattcacttcaaaggtttcttgagaagcgtcgtgacaggcttgggagcaaggcaccttatccttcctcatcaaccacaaaagtggctgacaacatagagaacaacttctgtgctgacaatgcaccagaactggtttccttgaaccgatctgaggaggaatttcagccaacggtctctgcctcttgagcataaccagtgtttgctccgttctatgttgtgtgatagtgtggaagactatgagtatgaatgtagaatcacagacactgatgtaattgtattaggttatgaagtctgtaactgtgttttatatgtaacatagctactaaacctgaaatggtctgtaacagtgtgacttgaaagttgtgtgcatctgtccacgtctaggaagtatgctatgtgttttgatcactctatagtaaactgttattcttgtatgagactatgtggacaactgattatctattgtgttgatgttccaacttctatttttattaaaaaaaaaaaaaaaaaaaaaagggcggccgctctagaggactcaag

SEQ ID NO: 55943 - DNA, 251 bp, Glycine max
  Clone ID: PAT_MRT3847_21526C.1
tgcaaagcgagattaggatttttatatcattacgaccactttgtgcgacatatacccattcgagcggtcaaagaggaaaaaactctcaaccggggtaaaccccaaagattttgcacatcaccctagggactgggaacaggctacctttttttcggttagacgccactaactatcagcattgctcggctaataggagtgacccatgctgagaacgagcgaaatgagatcaacctgtgctacgctccctctaa

SEQ ID NO: 55944 - DNA, 567 bp, Glycine max
  Clone ID: PAT_MRT3847_21527C.1
gaattcggcccgaggttttcttcttttaacaccaagacaaacataaaacattcgcttcaagtctctccactttctctggcttatggttatggccatgctaaacacatgacatgctgagattataagtataaatagtgatatttcaggatccaagaagcaattctacagaaaattctctgtttcagcttagagttttactcttccttctctaatggatcgtggaaatgaatgacttcactggcagtgggcaccaacaagaggagcagcattgcagcaatgaaagttcagataggaataagttattgatgaacaaacaaatagttttgatcttttggagaataagaaaaaaatacttcaacaaaatttctgatgcattcatcaatcaataacttccacaaacaacttaggattgagggagagaattcgttcacacgttttcaggatatgataaacaggcgcatgaatgattagagctgaatggaattgctgcattggctaaatagtactgcgtttgttacttcacacgcacacataaaaaaaaagtgtgattatttctttgttaaaatt

SEQ ID NO: 55945 - DNA, 1132 bp, Glycine max
  Clone ID: PAT_MRT3847_21528C.1
cccacgcgtccgaaaacacatgttttactaaaaaagtcggcagcgattgatggttggtcacaccaccgaagaaggcttcaggaatctacatagctttttcctcagagcgttgaaaattcccacactcgctcgcttccccaaaatttcacccctttcattcaattcttccctcttctctgctactgatccatccctcgttttctccgaacaatggctgctggtgtcactgtcaagtccgaggttctagaatcttctcctcctgaaggagtttgttccaacacggtggaaaaccacctggtccagaccaatttgtctgatgggtcacccaacaagtctgtgccagcatctggacttgatgcagtgattcctagtgcaaatcagcttaccatcttctataatgggagtgtttgtgtctatgatggaatccctgcagagaaggtgcatgaaataatgcttattgctgctgctgctgccaagtccactgaaatgaagaagattgggacccaaactaccctcatttcacctgttccgtcaaggccttcttctccacatggaatcactaacaatattggttcctcacagaagagttccatctgcaggctgcaagctgaattcccaatagcacgtaggcattcacttcaaaggtttcttgagaagcgtcgtgataggcttgggagcaagacaccttatccttcctcatcaactacaaaagtggctgacaacatagagaacaacttctgtgctgacaatgcaccagaactgatttccttgaatcgatccgaggaggaatttcagccaactgtctctgcctcttgagcgtaaccagtgtttgctctattctatgttgtgtgatagagtggaagaccatgagtgtgcttgtagaatcacagacactgatataattgtattaggttatgaattctgtaactgtgttttatatgtaacatagctactgaacctgaaattgtctgtaacagtgtaacatgaaaattgtgtgtatctgtccacatctaggattgtttgctttgtgttcttatcagtgatcacccatattaaactgttatgcttgtatgagactatgtgaacaactgattatctattgtgttgatgttccaacttatatttttatgac

SEQ ID NO: 55946 - DNA, 540 bp, Glycine max
  Clone ID: PAT_MRT3847_21529C.1
tttttttttactaaaattaccaattaaatggtggtcaaattcatttaaagcaaattcatctaaataccaaaatcttcctttgtccttgttagcaacaacataaaattttccatcagttactttactcttatcttcaccttcagccttctttccttcgttatttgctttattattgtcaacacattttttcatatcttttgatcactttccttggcaccatagtttcagacgcatttttttttacctgttttggagagaacgttactatcaccggcatgttgatcagtgttattttgttcttccgaatgaacttcataaaaaatggtcaatatcttactttgcttctgtatctgtgtcattatggggatctgaacccataggtggaaggattttttcatgctcttttaataagccaaaatctgccgcctccaagattaaaattagtcaatgtggaaagaaaaacaccaaaagaaaagaaaaccataaaccttgtactaatccataatttgcatatatatttcatatcctattaagaggggg

SEQ ID NO: 55947 - DNA, 721 bp, Glycine max
  unsure (1)..(721): unsure at all n locations
  Clone ID: PAT_MRT3847_2152C.1
catctcccagagtttgctatgnngaaaaaagaaaagataaatatgtttccatacctaccccaagaaaagaagagaaaagaccggtagataaaagtagaaaacgaagaatacgttaagttctaccaagctattcaatttaactgggtaatacatcaaataaaacttaatgccgcttccatggggtctatcttaaaagggnnttgcgcggggttttaactcactccagccataactttgcgatggagttctttgtctatgtagcttttgccacgcacttaaaagtacaagttttggggacgtaatggtatattcatatataccagtcaagaaagaaacgcatagaattcggtaaaatattaatattaatttatccatatcaagcatgcatctaagttgctaacatttgtcataaaacaaatggaatagtatattggatattatatataaaaaaacgaatattatataatatattccaaggaatcagaatattgctcacaaacatagagcgtgaagacantgagatttcgtgtaccctatatacccctatgcgataataaaatgagtccagcatatatatactnnaatgcttctaagtaacacttcggatcaattggtatttggtaacatagagtaatnnatgaagataaatnnnnntgtatacatnnatcatnnnaatttgatacccggatctacatctaattaaaggcatgcnnnnnnnnta

SEQ ID NO: 55948 - DNA, 960 bp, Glycine max
  unsure (1)..(960): unsure at all n locations
  Clone ID: PAT_MRT3847_21530C.1
ggttttgtcttctttgctctgctccatgtattatggacatttggagagacatgtaatatttccatttcttgaaaagactcttgaaagtggcagttgcatagagaataattttgggcaaaccaattgtgatgataaagtctcatcttcctgttacttgctaatgcgatttattgatgatttcctttttatatcaacatcaaagaagcaggcagctagctttttctccaggctagaaagaggatttcgtggttacaactgctacatgaataacaaaaagtttggtgcaaactttgatgtagaacatacatcagactctccattgaacagggtttatgtgggggaagatggtgctacttcatttcttcaatggagtggtcttcttatcaattgttccactatggaaattcacgctggactacaccaagtacttgggtagccatttaagctcgacacttactgtttgctggcaaggtaaaccaggcattaatctcaacgagaagctgcgtctctttctaagacctagatgccaccctatattctgtgattcaaatataaattcagcagctgttgtgagattaaatatttatcaagtatgtttgttgtgtgcaatgaaattccattgttatattcgggatctatctatcatgtgcaaactccacaaaagattttgttcaaatattatacaaaggtccttgaggtacatgtaccagatgataaagaaacaaatgcactccataagtcttaattcagatattcagccgattcttgtattggagaaggaagaagtagaattggcttggatttcatgctttcgtacaagtactgaagagaaagcaatcacaacataaggagttgctgtcaantttgaggtcaagggtgtcatcacatagaatatctgagagtgtctcacctgaactgaaatatgcaattaataccaagaattctctttgctatggaaca

SEQ ID NO: 55949 - DNA, 992 bp, Glycine max
  unsure (1)..(992): unsure at all n locations
  Clone ID: PAT_MRT3847_21531C.1
ggggaaaaagacaataattctttctttctcctaacctaagcggaggagtagtagtagtagtattagtatcaattcccattctcattcatttctcccacactgttctattttcaaaactctttccatagcacttgcttcactctctctctctctctctcgcgaccagcaggaggtgccatggcgggtgcgatgggtatgaaggtcgacaagattcgccaaatcgtgcgtctcaagcagctgatgactcgctggaagcacatcagcctccgccgccgctcctccgacgagccctccgccgtgcgacgccctccctccggcttcttcttcgtgtacgtgggccccgaacgcactcgcttcgccatccccgcgcgcttcctcaacctggctctcttcgagggcctcctcaaacaaaccgaagaagagttcggactccgaggtaacggcggtttggtcctcccttgccaagtcccgttcttctctaacgtcgtcaagtacctccacaaggacgaacacaagtacggaagtctctctcttcaagacttcgttaacatgctttccgcctcctcctccgattcctgtaaggaaaacgtcgccgtttttgctcctctgctccagaaagcagaggtttgacattctcgattgccattccgattcagatttcccctgttttcgtttcttagcctctctgaattttgtaaatgaactcaggaatttgtaaaatctcttttttgcccccctgtaaaggaatggggttttttggtttaactcaatcttgaatccattcccccaaaaatttaagtgggtgggttcaagtaaaatgtctttaacatagtcattaggctttttgggttatctttcactatttgttacaacgcatgcccagtttcatgataatccccaatttttagtgatcaatgaagatttttccgcccnnaaaaattaaaaaaaaaaaaaaaancagcggcccgctctagaggatgccagacgtacgc

SEQ ID NO: 55950 - DNA, 479 bp, Glycine max
  Clone ID: PAT_MRT3847_21532C.1
gaaaagaactgaatatgaaattgacagtggagatgaagaatcggattgaagttgtcgctgttagatagagacagagtgacctcggagtttgctaaggaattgcaccctatggatgtgataaagacgccatatatctcatctcgaccaattccgaacgtgcaggctgaccctctcgttcttctcagcattgacgtcatcttcatcagtgtctccaatgacacttgcaagcgcctcttcggcctcttgctctgctcctgcttctcaggctccgtcaacgccatcaaccgcttcgccgtgccctttggagaagatgacaccgatcctagcatctgggctcttgaccacatttaccatgaacttatgttttgcatggcttaaagcgtaagtgcagatgagcacgctgtggtgaggtatggaactggtccagacctgctcgagactgatcgtgacgttctcgggttaattgatgacgatggtcc

SEQ ID NO: 55951 - DNA, 418 bp, Glycine max
  Clone ID: PAT_MRT3847_21533C.1
agactcggaattcggctcgaggaaagacttctcgtcaccgtttgaggcctcttcaggacgagaacgcgaccgaacagagcgggtgcactcgaggttacttgcttcaagaagtgttgatgccgctggtactcgagtgtctttcatgtacggatctactacgccttcagtcaagaatcaaactggtgccaagctatctagtggaatcatgtcaccggttagaggacatagtgaagaacagcgaggtgagcttcagaaaggccgctaacagctctgctgttcccaaaggagcatgagctacagcaatactctgttgtcaacagaagcgacaacactgttggaaaggctgcattgtcagctgtagatcggtcataatccggaaccaatcaagtcttagtgctaccgatattcggagaatgac

SEQ ID NO: 55952 - DNA, 347 bp, Glycine max
  Clone ID: PAT_MRT3847_21534C.1
gttttccccaacaaacagctccagtacattgcttttagatgcctgtacagcggtcaaaatcggaaccacattctcagggaatcgatcttcccaatataggtgtgaggtcctaacattgggcttgaaatgcgtgagatctgagcgggcaaaacaaaccttatggaccttgagattaccttattgacaatccccaacaaaggtctaacagccttttgacatttctcttggggacatcctcccaaggattctgaaattggtggcaatactctcatgccaggcatttctgttccacaggctactgccagatcttctgaaaatgcggaattcctctgcatggatcctggaat

SEQ ID NO: 55953 - DNA, 431 bp, Glycine max
  unsure (1)..(431): unsure at all n locations
  Clone ID: PAT_MRT3847_21535C.1
ttgattctggtgctcgcgccgatgaggatgaggatgaggaacaagataaaccttgtttgtattacacacgcccgcctcttaaaacggaagagcatatgcctatggattatgaggttatggacccctattaagagagcgaaaaagtgagaatttgggcttcgaggacttaagattaagaacctttttttttgcgggtctacagtgtcgaaactctctctataaccgatgtggtcgaattcgcgtgcttcagaggtataaccaacgctctccacaacttgagaatattcgacactactcgatcatggagtttaactcgcnacccaacaccatacttctccccaaccatgctgacgctgattacctcatcgntatccttaacgggactgccattctttccttggtgaacaacgacgacagagactcctacagac

SEQ ID NO: 55954 - DNA, 484 bp, Glycine max
  Clone ID: PAT_MRT3847_21536C.1
atgattgtaaaggaaggaaggcacgagatgaaggttttgagattggatgtttgtttgattttcttccttctacagagaaaaagttgatggctggttgaagactttttaatcattatttgtgattaacttatctcacattaattaacaattaccaaaccgtgacttaactcactcctggggaatatatgtgtagtagcttctggattcaaagctaaattatgaaatttaagatgtttgctagtaacaactttcttacaggagtttgggaagcttattgggcagtgtcagtgggaagaaaggtcgagatgtatgaatgaatgaagagaagaattttgagattttgagaatttgagagtaaaatttaagcaaaacggaaaggggtccaccttgggtagttattggcaaacacaatcttgatgcacttaagttatactgatgatggaattgtcttttaattgcaacttatatcttgtcctctctttgt

SEQ ID NO: 55955 - DNA, 302 bp, Glycine max
  unsure (1)..(302): unsure at all n locations
  Clone ID: PAT_MRT3847_21537C.1
gcctttggccggtgatgtttttatagntttttattctgaggagcgtgctagaatgcataggtctggttggcaaaggaaatatgaggagtaccctcgttaatatttcttgctccatgtcaatccaactacttaccatgattccaaggaggttccaccgtgggttgaaatgccagtaatagtaaaagcagattttcattgcccccgtttatctgctattcttccctaaaaacttaactttgctcaagttttcgaaaatgtgtcaatgtggtgctggcctatttctaatctgatgtgacttgcac

SEQ ID NO: 55956 - DNA, 561 bp, Glycine max
  unsure (1)..(561): unsure at all n locations
  Clone ID: PAT_MRT3847_21538C.1
gacgaacgactatagtattatgacttggctacatactatatgaatgtattgtacaacaacccgaagcaccggtccatatccctccgtccaccgtcctcatactgaggaccgagtctcagtcatcttcgccaacaccaaagccaaagctgcgcctatcctccactctttacatcctccgaggtacctcactccgtatctcataatcgcctcagggagatttgaagggttattaaacaaggtcaacaatgaacctctatcctccgagtccagacgggctaattgatcttgatatgagctctcgggggatttgatcgatgtaaaagtccacaatgtcatgacagcgacaaagacgctaatcggagcgtatatgctcggcgtgtggtttggaaaatcgaggacttttagcagttgaatagcgtgagaggcggaacgtaaactcataggatcgtcgacccattcccggagaatgaacagtacactttcaatcttatgcgggccaaatttacctgaaatagcgtagatgtccttcaaatggtaattcacgcantgaaagcgagatga

SEQ ID NO: 55957 - DNA, 494 bp, Glycine max
  unsure (1)..(494): unsure at all n locations
  Clone ID: PAT_MRT3847_21539C.1
aacaaagtgaaactggctggtgtgttttttccacagaactactctgccaagtgtaaaatgaaggatccagaggagcacccagtgaagtctagaaggcctcttcagaaatctgcagaacgtagaagaaggtgcaggagaaggagccagtgcaagatagagaaaatgcaagaaacggaacttgattcacaccttggtttctcttctgccacttgcaagagtcttgtgtttcatcaaaggcctggctttggccaacttggtactaagtgtgtcatcaaagctaaccactttcttgcagatatatcagtttctgacttgagccattacaatgttataataacacctgaagtcacttctcgtaaaacaagcaaggctatcatagcagagttggtgaggcttcacaggaacactgacttagccacgaggctccctgtgtatgatggagggagaaacctntacactgccggtttgctttcttttactacaaagtgttcaat

SEQ ID NO: 55958 - DNA, 1444 bp, Glycine max
  Clone ID: PAT_MRT3847_2153C.1
ctggacctcgggttgagcgcgccgattcgccccgtgcgctttgcgttcgatctgttctagaccttctcttctctaagcactttactttttttttcagccatggagtttcattgccttccaatatttctttatctcaatttgatgttgatgacagccaatgctgcgttaactcctagacattactgggaaacgatgcttccaagaactcccttgccgaaagcaatcacagagctactaagccttgaaagtaggtccatatttgaatatgccgggaatgatgaccagtcagaaagtaggtccatattaggatacgctggctataatcaagacgaggatgatgtgagcaaacacaatatacaaatcttcaacaggttgtttttcttggaagaggacctgcgtgctggcaaaatattcaacatgaagttcgtcaacaacacaaaagccacagtcccgttgctaccgcgccaaatttcgaaacaaataccgttctcagaagataaaaagaagcaagtgttggcgatgcttggcgtggaagcgaactcaagcaacgccaagatcatagcggagaccattggtctttgccaagagcctgcaacggagggagaaaggaaacactgcgcgacttcgttggagtccatggttgatttcgtcgtttccgcgctcgggaagaacgttggtgctttctcaacagagaaagaaagggaaactgagtctggaaagtttgtagtggtgaaaaatggggtgaggaagttgggagatgataaggttattgcctgtcatccaatgagttacccttatgttgtgtttgggtgtcatctagtgccaaggagtagcgggtatttggtgcgcttgaagggagaagatggggttcgagtgaaagcagttgttgcgtgccacagagacacgtcaaagtgggaccataatcatggggcattcaaagtgctcaatcttaagcctgggaatggtacagtatgccatgtcttcactgaggggaatcttctttggcttccaaattagattaattaccatatacatatttgtccttgttctatccttaaataagtggaatcacctgaagaattgtgcgtaatgagttgtttgtctttgtggaaattgttatctgtcttgcatcaccaaataggtatatataaaataacaggagcgtggtatttgttgcacaaaaatggatttcaaccgatcaaaaaaatatagcctttaccaattagaagggtttggctttgttagcaaataataaaaataaaatatcttgatggacaaatggttgctaagttgattaagattgtggcagaataccaagtcaatgaatagtccatcacaagcatcaaaagaaaagataatgattccttgaaaatagaaagcactttgtgctttgaattcaaaatgcacactgcagagttgttggaggttacaagccagatctaat

SEQ ID NO: 55959 - DNA, 413 bp, Glycine max
  Clone ID: PAT_MRT3847_21540C.1
tgacagtctatttgcgaatctggttagtgttgtaaagtacccctctattacgtgcttcagttggttatatgtgtgttaaactgaaagtgcttttgattgaatgcgtctcattttttgttgcggcaccctttaacagaattcaaatttttttttccctctccatcccttttgttgatttggagaaaagcttctccaaaagtgagaatgcatttccctttctgttttaataaatatctgaggctgagaagtctgacttccttttttattctctttatacatttcagttatctgtggtaacaacataaagaatatatattaacaataataataatttaagtcatattccgcataacagtgtcctatctgtttttgcataaccttaaaagttgcccagtattatatattgctttagt

SEQ ID NO: 55960 - DNA, 561 bp, Glycine max
  Clone ID: PAT_MRT3847_21541C.1
atcaaacttaagttctcccattccttgacttttacctaccaaaattctgattagaatctacatattgcttgagttaattgaatgtcaagtgtattgcaaattacttgtatacttaatacttgttgaattgttaggtgactttggtttgagtgtttgttttccattttcattttctgaaaataatttttatttttaaatttttaagatttagaaaacatgtatcaagaaaaaagtactctaaggtgttattgtgttttcactttttcagaaaaaggctaaacgttgatttgttgttttcagtttttggctgtttttgaaaaaaattcagagaaaatgttttctaagtttcaagcaaacatatttttattcttttttgtttgttttctttgaaaatgaaaacagaaaacactcaacccatctaaaccaatggtcaagcaatattagccaaggttttcttatgtaatgggtgttacaattagaacaaaacacatgttctcctaatatctagaatacctcagtttggtgtctagatatgaggatgtatatccctatgtactagta

SEQ ID NO: 55961 - DNA, 374 bp, Glycine max
  Clone ID: PAT_MRT3847_21542C.1
cctgccggggaaccttgatttttgttttttttccaagaaagaaggacccctttaagagggcgccttttttaactaatgaggttaaaaatgggggaaagggggtaaatgttaacccaacccggtcaattgtgttaacaaaagccttttcagggccaaattggttggggtggcccttttttttttttaccattttttggggccccttacccttttggggatgtttccctccaacaaagggcggagccaacaaaacccattcaattgggtggttaataaaatttttttaaaaatttccttttatgggtggccaaaaagggaagcttttaatcctggaccccctctgatttgaaatttgggggccaaatccccgggtt

SEQ ID NO: 55962 - DNA, 492 bp, Glycine max
  Clone ID: PAT_MRT3847_21543C.1
gaaatagttacaatttgtgatggatgacttgtactatgcaggtttcagcacagatgacaattctagttcatccaatgattttttctgggataatgagggactgaatgatgtgagacagtttcaattttctggagtagaagatcatgaagagtatgggggaattgactcattttactcaaattttgggttcttcccagatgatccatcagaagaagggtaccttctatccactaatcaccaaaagtatcaccaaatatttgatgattatggactattggatgataaccttcagtttgacatggtatctccaccactccaatttgatgaacaatatagaaccatggttccattgtgtaactcaacaaaggacatgccacactcaactacccctttagcctcacttgagatcttgaagagctatggcaaaggcttcaagaggttttggaatgaaggcaacaacaccatgcagccaattgatgatgagactttggc

SEQ ID NO: 55963 - DNA, 469 bp, Glycine max
  unsure (1)..(469): unsure at all n locations
  Clone ID: PAT_MRT3847_21544C.1
agccacgcgtccgcccacgcgtncagccacgcgtccgtacggctgcgagaagacacagaagggggacaccacaatgtaggggttccacctagaaaacgtcaattgttaagtcttacctacaacaaatactttgtaatataattagtcgatcaaagtgtgatcatacctagatagaggggtgtgttgaaagtcccacataacagatagtcatgagaaaaatgagacatattaaagtctcacatcgaataaagatagtgtcgaaataaattatatagatgaggagtaattctcaccttacaagttgattttgtgaaaattgcaagtgtgagatatgtgtgataatgtgacgtgagaaggttaattgaagaacaaattcagtagtttgctcttgcttcattttcgagttatactgaaccaatctcagacaagctccttccagatttgctttctcaggagcaacatgtttcta

SEQ ID NO: 55964 - DNA, 282 bp, Glycine max
  Clone ID: PAT_MRT3847_21545C.1
tctcggaattcccgacgcgtgcgaccctgcgggaggactacgactacacacgggactatagctcaagagcgtcgtcaataaacctaagagcgtgaaatttccaacgaagaacgccaaagctaaaaagtcaacgattgtagagagctgtacttcaccgtcatagtgattatgtctttcaggttgaatcggatcataagtcgatatattaatagaacaatattgatgaaacttcctttgatagaaactttatcaacatatcttttttagcatctaaccagaccc

SEQ ID NO: 55965 - DNA, 346 bp, Glycine max
  Clone ID: PAT_MRT3847_21546C.1
ttggtgtgtgggcacacactgaagacgggcaggcccaatgcatggaaacttaagaggcggtgaatacgagcaggacagggggaaatgaatacgcgttcatgaaggaagagcctatgagggacgaaccatcagaaccggtcggagaggatattacgatcgaagatctacgatagcacctgctggacggagcactgttccgtgttaacggcggagacatgggtggacaaggacctggagcttgccacctgggacgcacatacggcgacggccggaaacccacgccgttcatgcccacccaaattgtagatgctccagatagaccccgagatagaaatcattatgaacc

SEQ ID NO: 55966 - DNA, 306 bp, Glycine max
  Clone ID: PAT_MRT3847_21547C.1
ccgacccgagcggagatacttttattttttgtggtcaccccaatccctggaaaacctgattccgcagtcaagaaaagcctaacacatcagccaccgcacacataagggcttgcgacaagcaactacatggatatgattggcacggcgtttgagccatgggatccgaaaaaaacgggcaggacccaacttaataggccagcaacacaaggacctaatggaagattaccaggacgaacaggagcacgcaacttgcagcgcaacgaaacacacgcccgccacaagcaatgaatatgagaatgcgcggaa

SEQ ID NO: 55967 - DNA, 187 bp, Glycine max
  Clone ID: PAT_MRT3847_21548C.1
gggaagccaaatccttaaaaaatagcacacctattcacttaaatatataggggcagccaagcggagtttagcaaacaacttactatgaatcattccccaacaacaaaccgaatcaagcagagtaaattcagaccaaagtgcacaatcaacataaaccctaacctttaacattaatcgacaaacaaac

SEQ ID NO: 55968 - DNA, 1446 bp, Glycine max
  Clone ID: PAT_MRT3847_2154C.1
cccacgcgtccgcccacgcgttcgctcttcttcagttcggtggagggagggagccgtagcagcggaagctctagcttgggtagcgaatcacaatggcgagaggattaaagaagcatctgaagaggcttaatgccccaaagcattggatgcttgacaaactgggtggtgcatttgctcctaagccctcatctggaccacacaaatcgagggaatgcctgccactcatactcattttgcgaaaccggctgaagtatgctctaacataccgtgaagtcattgctattctgatgcagcgacatgtccttgttgatggcaaagtcaggactgacaaaacataccctgctggttttatggatgttgtatcaatccctaaaacaaatgagaacttccgcctgctgtatgacaccaaaggtcgattccgtctccactcagtcagggatgacgaggctaagttcaagctttgcaaagttcgctcagtgcagtttgggcaaaagggtatcccatacttaaatacctacgacggtcgcactatccgctacccagaccctctcatcagggctaatgacaccattaagctggatttggaggagaacaagattgttgatttcatcaaatttgatgttgggaatgtagtcatggtgacgggtggaaggaataggggtcgtgttggagtgatcaagaacagagagaagcataagggaagctttgagactatccatgttcaggatgctactgggcatgaatttgcaactcgaatgggcaatgtgttcaccattggcaagggaacaaaaccgtggatatctcttcccaagggtaaaggtattaagctatcaatcattgaggaagctaggaaaaggattgccgcccaacaagcaactgctgcttaaatctttaggatatgaatagactttgagtgcttggtagtttttattcaatgtttttggtttgtaatttaatttgtcttttgagattttatccgttgaattttgtctcttaaatgcactatagaacttttatcgcgtctgctatattcatgaaggaatctttccatttcctagttttgatgtagtttagttggataaaattacttaagtccccactctaaaatgtcttaataataactcttgttaagggaccgtgttggtattgaatgttatatgcgtactatcttgaatgattcaatgcaaaaaaaaaaaaaaaaaaaaaaaaaaaaaaaaaaaaaaaaaaatataaaaaaaaaaaaaattaaaaaaagggggatgcatctaaaatggccctcctatagggaggccttaatttaaagtcacagctcttcgatttacaaccctaagtttggtgaactccctggcggttactccaacgtagatggctttgcaacacattgcccttgccaaccatctggcgttattcccgaataggccccctttcgaaagctcgttgcaaaaa

SEQ ID NO: 55969 - DNA, 253 bp, Glycine max
  Clone ID: PAT_MRT3847_21550C.1
ccctaggtctccttacacgatacacatcttcatcaagaccctcaccagagagaccatgactcttcaggtggaaagctctgataccatcgacaacgtcaaggcccagatacatgaaaaccgaagcgaattcccccggatcatcaacgtctcatcgtcgccggaaagaagttcgaggaaggtcgtagcctcggcgactacaacatctagaaggagttaacgcatcacctggtgcttcgtctccgtggtggcatgc

SEQ ID NO: 55970 - DNA, 703 bp, Glycine max
  Clone ID: PAT_MRT3847_21551C.1
gacatttaagtttaaacgtgttcgggtagtaaatattaaagccactaatgctgacaaagatcagctgcttgccattgctttagatgctggagctgaggatgtaattgatcctccaacttatgaagatgacactgaagaggataggtattataaaattgtaggttcttcagagaactattcatctatactatctaagctgcgagaggagggcatagattttgagcctgataatggttccgagcttctcccaaataccccggttgaggtagatgatgaggctatggacttgaacaaggaacttatgagcaaattacttgagcttgatgatgttgatgctgtttatacagatcagaagtaataatttttatatgtttaaaagctgttcagcagacaactcagggttaatcttcgacactgggagttcctatcacataatgtacggtctttttgcaaaaatgaaaataggctctaaaaattattggggatttctcaggtgagaaatttgtagatctgacacatgcactatctaatcttttttcctttttttttaagggtggccagaggaatgctttctggaagggaagtttattttgaaattatttgattcaaaaccgaggatatttaaaccatgtatcgtcttatatgacaaactacaaagtccaataataatgaaacaaagtaaatcttgattccttctggttgg

SEQ ID NO: 55971 - DNA, 160 bp, Glycine max
  Clone ID: PAT_MRT3847_21552C.1
agcgaatgactctggttatcaccagctcgcgagccataggctaaatacacatgcagtgatggaaccatatgccatggcaaccaatacgcatctcagagggctccaccctatgtatgaacggcattatcctcactagcaggacaccataaaatgtcaaggg

SEQ ID NO: 55972 - DNA, 430 bp, Glycine max
  unsure (1)..(430): unsure at all n locations
  Clone ID: PAT_MRT3847_21553C.1
gactccacgccgtccgcacagatgttaaaggaaactntagtaaaagtagataatgaaagctgttgtacaagaagcagttataaaacccagactctctcagtccggaagtcagttttgacagacccagataaagtcaggaagctgcagnagagcggagaggtctttgttcaggatgacttgtgtgttaacatggtgggagaggtgggcaagtgtggggagtgtggantaggaaggctgggtatggataaggacaaggagaaggagtgtggtgtgttttgtgggtttttggagttgaggagattacaattgaataagggtggtgtggtggggggtagaagggttgttaaggggaggtgtgggtgaggggagaagggttggggtggggggtggggttgggtgggagggggggggggggntggtgggggggggg

SEQ ID NO: 55973 - DNA, 236 bp, Glycine max
  Clone ID: PAT_MRT3847_21554C.1
gtggtgtctccctctgtattactgggtatcttttaatgttatttctggacctttcagcctgtccaaagaatatatttgaagacactagacagatatattctttggacaggctgaaaaggtcaagaaagtaaaactcagcacataatttgtgtggtgtctccctctgtattactgggtatcttttaatgttatttctggattttatcttctataaaattgtccctatcaaaacatag

SEQ ID NO: 55974 - DNA, 257 bp, Glycine max
  Clone ID: PAT_MRT3847_21555C.1
ttaactttatgggggcatttttctttttgtccgcgttgtaaaccatcattctctaagagtgcaagagcgctgtattaaacacccatcagattgttttacagcacacttaaagggactctgagagggaaaccagtttcaacaatatgcactgggagatgttcattgaggcccttgcatctgtcattagaacgcccatgaacctggctgttgccgcaaaggtgtacagctggctgaatgacaccaccgactatgcttgg

SEQ ID NO: 55975 - DNA, 725 bp, Glycine max
  Clone ID: PAT_MRT3847_21556C.1
cctcgtgctccttctccgccccattcttctccctcccttgcttctttctctttcgcttccaccgtaacacaaccctcgttgttccgtgttctggcgaaacgacaccgttttacacttcctcttctcggcacagaatctagcaggttgttgaaaatatggccaagcatcatcctgatttgattatgtgccggaagcagccagggattgccattggacgactgtgcgagaaatgtgatggcaagtgtgtgatctgtgactcttatgtgcgtccttgtacacttgtccgagtttgtgatgaatgcaactatggatcatttcagggtcgatgtgtcatatgcggaggagttggaatatctgatgcctactactgcaaggaatgcacacagcaggagaaagatagagatggttgccccaaaattgttaatttagggagtgccaagactgatttattttatgaacgcaaaaagtatggttttaagaagagatgatgaaggtagattactgaggcatttgtatttctctaaaacttttttgtatgtgtattgtttggatataagaaccataggatgtgaaaccttgagcttgtaaacttttttatggtacaattatgaatcatgatataataaatgcttgactagtttgctactggtcaaaaaaaataactctctcttttttatttaaatataaaaatttatattaattttatttattttaattataattta

SEQ ID NO: 55976 - DNA, 633 bp, Glycine max
  unsure (1)..(633): unsure at all n locations
  Clone ID: PAT_MRT3847_21557C.1
tcgtccacgcgttcgctttcgctttcaccgtaacacaaccctcgttgttccgtgttctggcgaagcgacaccgttttacacttcctcttctcggcacagagaacaggattgtgagctatggaggttgctgaccttttgtcactgtagagctttcattccatcacagccattttccaattcggagaatctagcaggttgtagaaaatatggccaagcatcatcctgatttgattatgtgccggaagcagccagggattgccattggacgactgtgcgagaaatgtgacggcaaggtcgatgtgtcatatgcggaggagttggaatatctgatgcctactactgcaaggaatgcacacagcaggagaaagatagagatggttgccccaaaattgttaatttagggagtgccaaaactgatttattttatgaacgcaaaaagtatggttttaagaagagatgatgaaggtagattactgaggcatgcgtatttctttaaaactttttgtatgtgtattgttcggatataagaaccggatgtgaaaccttgagcttgtaaacttttttatggtacaattatgaatcatgatataataaatgcttgactagtttgctactggtaaaaaaaannnnnnn

SEQ ID NO: 55977 - DNA, 369 bp, Glycine max
  Clone ID: PAT_MRT3847_21558C.1
gttcaacaaggtctgaggggcggtaatagccattctcaaacttagacaacagttgaaacacaagggccaagaaataaataaaaaattttaggatacaacacaaggaccctttaagaaccttcttttaccttttgtcctctcccttaagcaggccatttttatctctaccatggatttgatgtttattcagcgataacagtaaataatcattgacaacaatggtattttcagcataaaaggagtgaagttctaatatttacagcataaaatgcaagtgacagaggacgtttcaaagggatattcattaacaactagcaacacgagttctttgtcggtgctgagtaggatatgcatatgttctttcaacaa

SEQ ID NO: 55978 - DNA, 497 bp, Glycine max
  Clone ID: PAT_MRT3847_21559C.1
cccacgcgtccgctttcgcttccaccgtaacacaaccctcgttgttccgtgttctggcgaagcgacaccgttttacacttcctcttctcggcacagagaacaggattgtgagctatggaggttgctgaccttttcttctgtagagctttcattccatcacagccattttccaattcggagaatctagcaggttgttgaaaatatggccaagcatcatcctgatttgattatgtgccggaagcagccagggattgccattggacgactgtgcgagaaatgtgatggcaagtgtgtgatatgtgactcttatgtgcgtccttgtacacttgtccgagtttgtgatgaatgcaactacggatcatttcagggtcgatgtgtcatatgcggaggagttggaatatctgatgcctactactgcaaggaatgcacacagcaggagaaagatagagatggttgccccaaaattgttaacttagggagtgccaagactgatttat

SEQ ID NO: 55979 - DNA, 359 bp, Glycine max
  Clone ID: PAT_MRT3847_2155C.1
ctgggattgaacactgtttagacttctgaacgtcaacggctatgaggggcttattacattagcagcgatgactcattctctttccatgcaccaacttgctcaaaaaccccttcgtctcaactattaccctgataaccttgaaaacatcatacccttcggatcagaccccactcagtctcaacccataccaccctatccacatacatcccaggctgctgatgctcaggctccgtcacttccttacagctattaccctatgagatagaacacggatgagacctccaccgagtggaacccagttatcccctaatcatctggggaatcaacattccccaccatagacgttgcgaggctcattc

SEQ ID NO: 55980 - DNA, 2286 bp, Glycine max
  Clone ID: PAT_MRT3847_21560C.1
ttaacaatttccgactttggagtctttgaggtcaggtcacacctactacccgtttacttcacccagtcagtcagtctatgggcaactgctgctccgacgtcgctggcggccaatctgccatcggcggcaccgccgccggccacctcaatccggccaacgctcccaacgacgccgtcgatcgcttcctcaggtctcgcggctacaacggcctcttctctcagatcgagctgtcgttttctgcttctggcttgcgtgatcgggatgtgctctccaagagtgatccaatgatggttctttatgcaagaggaaaaaatgcagcactcacagaacttggccggacagaagtaattctgaattcattaaatcctacatggattactaaacacactctcatatataattttgaggttgttcaggttttagtgtttcgtgtgtatgatgttgatactcagtttcacaacatagatgtaaagatgcttaagctagaagagcagcaatatctaggtgaggcaacctgtgcactatctgagataattacaaagtttgaccgatcaatgacattagatttacacagaagagaagattctatcagatctacccagtcccaaaactgtggaaagctcttggtgcatgctgaagaatgtgttagttcaaagactacaatagagatgattctcaggtgttcagatttggaatatagggatctcttctcaagaagtgatccctttttattgctatcaaaagttgtggaaggtggtagtcatattccaatttgtaaaacagaagttataaagaatgatcacaacccaatatggaagccagtgttcttgaatattcaacaagtaggaagcaaggaaagtcctttgattatagagtgctataacttcaatagcaatggcaaacatgatttgatgggaaaagtgcaaaaatctttggtggagctggagaagctttattcaggtggccaaggagaaaattttatttcgtctgctcctgcgggtcataattctcataacaaggtgttaaaaagccagttatttgtggacaaattttctgagagtatccaatatagtttcctggattacttggctgggggatttgaattgaacttcatggtggccattgattttacagcttcaaatggaaatccacgccttccagattctttgcattatattgatccttcaggacggccgaatgcataccagagggcagttttagaggttggggaggtgttacagtattatgattcagacaagcgatttcctacatggggatttggagcacgaccaattgatgctcctgtctcccattgtttcaacctgaatggaagcagccattgctgtgaggtggaaggcatccaaggaattatgatggcatacacgagtgccctgcttaatgtttctcttgcaggaccaactctttttggacctgtcataagcaatgctgcactgattgccagccaatctgtagcaaatggtggaagaaagtactttgttttgttaatcatcacagatggagtagtgactgatctccaagaaacaaaagatgctctcgttaaagcatctgatctaccattatcaatccttattgttggcgtaggaggagctgatttcaaagaaatggagattttggatgctgacaaaggagagaggcttgaaagttcatctggtcgcgttgcttcacgtgatatagtccagtttgttccattccgtgacgttcaaagtggagtttcagtagttcaagcacttttagctgaattaccgactcagtttttaagttacgtgcggagcagaaatatcctaccaagcctctagtcattcattttatttttcaatcaacgaattcggctaaagagctgaggaactgttgctttgtgctaataaacggctcaagaaaggttcgcctgctagctgtcttatccaaaggatatgtctgatcgacccttatgattagcatttccttttcttttttgtgcacgtgtccttttgggatttcctaggtgattggtttttggtttgtctgaaatagtaacaccacacattgaaatccaatgatttcttccaaatgaggacaaagcttagtccttctgtccacactttatgaaatgatttgtaatggagatccaataatttggggatgtctttagatagcattaccaatacaagagactatgtatccaaaaagaatttcagaaaaaaagaaaaaaaattttttttagttacttaatcattttcccattttgtctgggcgagggggggggggggggggggggtggatggcggc

SEQ ID NO: 55981 - DNA, 1132 bp, Glycine max
  Clone ID: PAT_MRT3847_21561C.1
gccactgcagttgctccgtatcacattgaacaatgatgattctggggataatttgagtgatacgacaaccccttagcttcaaatggaaatccacgccttccagattctttgcattatattgatccttcaggacgaccaaatgcataccagagggacctacactttttggaccggtcataagcactgctgcactgattgccagccaatctgtagcaaatggtggaagaaagtactttgttttattaataatcacagatggagtagtgacagatctccaagaaacaaaagatgctattgttaaagcatccgacctgccattatcaattcttattgttggggtaggaggagctgatttcaaagaaatggaggttttggatgcagacaagggagagaggctagaaagttcatatggacgcgttgcttcacgtgatatagtccaatttgttccatttcgggagcttcaaagtggattttcagttgttcaagcacttctagcagaattacccgctcagtttttaacttacgttcggagcagaaatatccaaccaagcctctagacatgtaaaaactgtacataaagaagttttctattcattgatcattgtgcaatttcgaggtccttttttttcagttcttcaatcaacgaattcggctaaagagctgaggaactgttgctttgtgctaataaacggctcaagaaaggttcgcctgctagctgtcttatccaaaggatatgtctgatcgacccttatgattagcatttccttttcttttttgtgcacgtgtccttttgggatttcctaggtgattggtttttggtttgtctgaaatagtaacaccacacattgaaatccaatgatttcttccaaatgaggacaaagcttagtccttctgtccacactttatgaaatgatttgtaatggagatccaataatttggggatgtctttagatagcattaccaatacaagagactatgtatccaaaaagaatttcagccccgctgaagtctatttttttttagttcattaatcattttcccattttgtcttatggctgttaaggctcattttaaaggaaaatgaataagacggaatttgaaaattggaaattagtttgatataatgaatgtt

SEQ ID NO: 55982 - DNA, 511 bp, Glycine max
  Clone ID: PAT_MRT3847_21562C.1
ggctcgagctagaccctgttaataatattgttcagcaaacaaactacatgggtcaatgaggccactgtcaattgcccatttggatttactgattgtcatcgcttacataaaatgtcatgcttttaatagctattattctcatcaatcagatgtacgattattgcgtaactcttcatttctgtagagtgatccaatgatggttctttatgcaagaggaaaaaatgcagcactcacagaacttggccggacagaagtaattctgaattcattaaatcctacatggattactaaacacactctcatatataattctgaggttgttcaggttttagtgtaagtttaaatattgatgtttttacttctaacaaggcagagcattttgttgtttcaccatgaattattttggaaaatttctttcttaacaggtttcgtgtgtctgatgttgatactcagtttcacaacatacatgtaaagatgcttaagctagaagagcagcaatatctatgtgagg

SEQ ID NO: 55983 - DNA, 414 bp, Glycine max
  unsure (1)..(414): unsure at all n locations
  Clone ID: PAT_MRT3847_21563C.1
cccacgcgtccggtccaattaagataaaattcaaaacttagtacaattaattcgaatgaacagaggcggtggcttccatattacgattcaagcaccagtgaacatcgcactgatcaaatattggggcaagaggaatgaggaactcgtccttccgctcaacgattccattgctatcacaattgatgagctgagcgccaccacacacatcacaattgggcccgatgtgagcacggactcggtgacattgaacggagtcggcattgacatcgccggcagtgcgnggtttcgaaacgtttttcagcaaattcgtgaatactcaaacagaaagcgaaaactgaagggcgagcatgcttcaaagggttggcacaccaagaatgagtcgagcacaaattttccgacctcggcaggactcgc

SEQ ID NO: 55984 - DNA, 708 bp, Glycine max
  Clone ID: PAT_MRT3847_21564C.1
ttcgagacatgactctcggcaacggatatctcggctcttgcatcgatgaagaacgtagcgaaatgcgatacttggtgtgaattgcagaatcccgtgaaccatcgagtctttgaacgcaagttgcgcccgaagccattaggccgagggcacgcctgcctgggtgtcacacagttgtgtaaagtttgttagacgagtggtgtatgtaaagtgaaacagttgctggaaattatgtctgagttcgatttatgtgttcattgagaactgctaccatatgtgatatgaattgtttgatttattacaaggttctcctggtcctgactaaagatatatatgatggggcaagacttgatatttgtatggaacaattttatagtgagttaactattttaatatatactgacattatttgtgtgaaacatttcagtagaaagtcatgattatgcattgtttggataaggatcatgtatatcttacatgctccttctctcggatagcaatataagattcccataaggacttgggggaaaaaaaactagtactatactacaggccagcagctatggttgctccacaggccatagattagtagtttgttacctatggaatagcaatccaaagatttgagcattgtttaaaagtgatattctaatctctaatttcttaggtgcccttctgtcgtcttcgcagccgtactcgagccgctcgagc

SEQ ID NO: 55985 - DNA, 1361 bp, Glycine max
  Clone ID: PAT_MRT3847_21565C.1
catgaatagtggcaagggagaaaggagttatgcaaacaactccatgctacaaagaaaattaatgattaaaggcaaacatatactagaagaaactataacgagattttatagcaattattctccaagctgcatgaaagtggcagatttaggttgttctgtaggaccaaatacacttcttgtgatatcaaatatcattgacattgttgataccacatgcacccgcttgaatcaagaaccacccacgttccaattttatctcaatgatttgtttggaaatgatttcaataccaccttcaagtctcttcctgatttctataaaagattggatgaagataagggacacaagtttggttcatgctttattaatgctaccccgggatccttccatgggaggctctttcccaataattccataaacctttttcattccgccaacagtttacactggctttctcaggatccattattggagtttactaaggaggcagaatcatttaacaagggacactgtcatatagttagcacaagccctccagctgtataccaagcttaccttaagcaatttcaacaagactttaaattttttttgaaatcacgttcggaggaacttgtgccaggaggagcaatggtcttattgtttcttggcaaaaataaaactcatagaagaactggttgggaaataattagcctagtactcaatgacatgctcttggagggtttgattgaagaagaaaaattggactcctttaacataccagtgtatgaacctacagttgaagaaattaggcatgtgattcaggaagaagggtcattctttcttcaacaattagagattttaatcttgccttgggatgaaggcttaaatgaaggtgttgatgcaaatataaaagcccaattcatggccaaggtcgcaagagcaataatggagcctctcttgtctgcaaagtttggaagagaagttataattgaagtattcatcaggtatgaaaagaaacttgcgcaactgatggaagtggagaaattggagtctactacttttgtgatatccatgacaaaaaatgcttgaagaggtgttgctcaatagaatatttaaatactagtttttaatttcttcctctgtgaacctgttttgttctggtgaaataaagttaaggcgtatagaagaggctgatctagttcaagcttaagatctatatatatattagtatgtcacagatcataaaaatgaatcgtaatacctatgtttctacttgaaaaatatgagataaaatcttataattaagtgcatagcataatatcagatgaacacaatttggaaaaaattgaaaataaaggggaaatgcttgaaacaaattgaaagg

SEQ ID NO: 55986 - DNA, 2375 bp, Glycine max
  Clone ID: PAT_MRT3847_21566C.1
tcgatcaagaagggataaaaagccggcgatgtccagttctgcaccaaggaataaagcgaagccgggtaataagaatcagaagcctcgtggatggaaccggggttcttctgggaagtttgagtctgcggtccagtctgcttcaccatccactgcgaatgctatgttgatgaaagattgtgagttgctgttgaaacggtgagaagcaaatgagtatgcttgggttttcaacacccctgtggatgtggtgaagttgaatcttccagattatttcactattattaagcgtccaatggatttgggaacagtaaaaagcaagttagctgctggagaatatgctggtccactggaatttgctgatgatgttaagcttacattttcaaatgcaatgaactataatccgtctgggaatgatgtccatctcatggctgataccctcaataaatattttgagttgagatggaaagcaattgagaagaaactgccaaaaagtgatgttctgccaatacctgcaaagccagacaatagtgaaggtgtaaaaactaaaagacaagcgcctccttcaaaaaagaggaaaattgcctcattaccccctcaacctaaagttatgccacctacaaagaaggttatgtcggatcaagagaagcatgatctaggtcgagaattggagtctcttctgggagaaatgcctatgcatatcattgatttcttaaaagaacatagttcaaatggtagagaatgtggagatgacgagattgagatcgatattgatgatctcagtgatgataccctgttcacattacgaaagcttttggatgactttttgcaagagaagcaaaagaacaaagcaaaagttgaagcatgtgaagtagaggtgttgaatgattctggaccaagcaattcctcattgcaaccatttaaaggtaatgatccagcggatgaagaggtggacattggtggaaatgagccccctgtgtcaagctattctcatgtggagattgaaaaggatacaacttacagagtgaacaaaagcctaagcccaggcagctcaaatgatacagactctgatagttcttctgatagcgaagccgatgatgttaaagcaagtccagcaaatgtagcaaaggcaccagaaaatctgggttctgaagctcagttggatgaaatgaccatggctgctgctactcttgaaagaaatcaatctgttagtggcttagatcaacttgaggataactctcagcataagccaagttcttttgattctgattgccaacaagatggggacagtgctccaactgagagacaggtctcacccgataaactttatcgagctgctgtattgaagaaacgatttcttgataccatcttgaaagctcgagaaaagacactgacacagggtgaaaagggggatcctgagaaattgcgccaggaaagggagaaactggagatggagcaaaagaaagaaaaggcaaggctacaagcagaagcaaaggcagctgaagatgctcgaaagcgggcagaggaagaagctgctgcagaagcaagacgaaaaagggagcttgagagagaagctgcacggcaagcattgctccagatggaaaagactgttgaaatcaatgagaattctcgaattcttgaagatttggaactgcttagagctgtacccactgagcaattgccaagttctgtagatgagacgagtcctgcacactctcaggatggtctgggtagtttcaagtttgggagtagtaaccccttggaacaactaggattatatatcaaagccgatgatgaagaggaggaaggagagccaccctgtattccaaatcctgtaaatgatgtagaagagggtgagattgattaaaagttatgcacatattgtatgataaattgaggatcgaagtatacttaatcttgatcccaaaaaagttcccaaattaatgcattaacataagtgggacgaagcatattttcttatggaagcattcagcttctagaagggtaatatattcagttttgggctgtgatggcaatagaggaacagtttgaacagaaactaagctatgtttggggctgtttgcaatgaaaatagaagtaatacatcaaccttcttgtttttatcaatactggctggtggctagaggctaaagcatcgcatcccttcgtagttcgtatgggttatgttgtacaaaaaaaatagaatttgggaacatacattgttgtagctccatctttggatacttcgcacttgtatttgtgtctggctattcctttattaacttataattttggttaaaattttaagggatgtttcatcttcagacattgtaaacgtttaggtatacagcgtaagttaaggaaacaagattaattgtccc

SEQ ID NO: 55987 - DNA, 221 bp, Glycine max
  Clone ID: PAT_MRT3847_21567C.1
gaaaaatgtttgttttgcagttaagattactaggttgcttctctttctatagtttttagaatttttattgtagtgaataaataggttgtgggtgcaaagtgataagaatgctacttttgatgtagcatggaccagtgcctgtctcttgaatattaaatgattaagttatgcaatacctagaagttcgaggtgtaatatgatttattctgagctctactaat

SEQ ID NO: 55988 - DNA, 226 bp, Glycine max
  Clone ID: PAT_MRT3847_21568C.1
tacacacgttcgaacttacatagagtatccaacagcttactcaatgttctggcactgggcagttccgactctctagcgcaccatcgccactgtggtagctacattcactgttctcaagatcatgacatggctagaggacctgcaactccatcagtggctttaattgcattgctcgcttcctttcgtaaattcactatatgcttctatgacacccattttgcactaa

SEQ ID NO: 55989 - DNA, 251 bp, Glycine max
  unsure (1)..(251): unsure at all n locations
  Clone ID: PAT_MRT3847_21569C.1
cgaganccaaaagatttttcggttcaaactcgcaggaggaatgtgcatgcttaaacacattactgcctaatcttacccttgcattacaacgttttactgccaaacacatccttaaacacatgactgtcaaaggcaaatgtaatcaaatctttctaaaataatatttaaaaaatccttccctaaatcaaacgnnggaggattaatgctttggaaattgaatgtccttcgtcatgctaatgtttggcctttaa

SEQ ID NO: 55990 - DNA, 314 bp, Glycine max
  Clone ID: PAT_MRT3847_2156C.1
tctggccagcaagagctgctaccgtgagaagtgctccacagatgcttgtccagagcctgagtattatgtgctgaagatgtcctctagtcaaactgctgtgtgatgctgacattatgcagcaaagaagtgagtcaaccactgagaaggaatgatcagtactgaaaggggttctgtaatcatgttaaagaatctagtataggagctagcattatcatgctgagaaagctgctttaataatgcactgaagatactcaaaagtttttgcatccattggaatgcactgaagaaaagctgtccttcatgtgagggttccc

SEQ ID NO: 55991 - DNA, 313 bp, Glycine max
  Clone ID: PAT_MRT3847_21570C.1
accacacgtccgacgccgatgctcaacgcacggacttgatgaccatcacccgggttctgcggaaccaacaatgcatccaccctgagtctcgtggcgatttctcaatcttgctcagtcacatagttctcgattgcaagtatctctgctctgctgttaacaaggcgggtcttgctaagcttatagcacttgcaagacagacatatgttcacgtctaacagcatatgatactggatgtcctttccaatgatgtctttatcaaggctttcgtcagtattgtacgaacatgcatcttgtagcttgaacaatatcagga

SEQ ID NO: 55992 - DNA, 202 bp, Glycine max
  Clone ID: PAT_MRT3847_21571C.1
aaaaccctaatccataaattttcttattggattattatcctcattaaccaacccggttaccaaagaaagataccgccacctggattgggccattgggggtccccaaaccccccagccgaccaaaccaaaaccaacccctttctttaaaggtgggagaaattagaaacccccaccattagggcttaccttttttttacctttt

SEQ ID NO: 55993 - DNA, 129 bp, Glycine max
  unsure (1)..(129): unsure at all n locations
  Clone ID: PAT_MRT3847_21572C.1
tcggannaagatgccntcttcgctgattacgctgaggctcaccaanagcttnctgagcttaggntncctgaanncgaagcaacgtnntngggattgttggagaggnacngtgcccataatatttctctc

SEQ ID NO: 55994 - DNA, 498 bp, Glycine max
  Clone ID: PAT_MRT3847_21573C.1
ccacgcgtccgtgctgttgcaggaggaacaacatatttgttattccatgctgttggatatatctggcagacctcaaactgttttctgacagcatcatattcgcttacattgcgtcatgtaatggatggtgctaagcaagccaccaagcctgggaatttgaatgagctttcaatggtattactgaataatgttttttttcgctgccatcgggaattattcttgtgcttggtttgaatgaagtggagtaccttttggagacgtctctcttaaggatgcctgagttttagctggtcatcaatgccagtggagttttggggcttggaatcagctttactttaatggtgttgctgaataatgttctttcactgccattgggaattatccttgtgcttggtttgaatgaagtggagtaccttttggagaagtctctcttaaggatgcctgagttttggctagtcatcactgctagtggagttttggggcttggaatcagcttta

SEQ ID NO: 55995 - DNA, 545 bp, Glycine max
  Clone ID: PAT_MRT3847_21574C.1
gttaattgtatttgcttttgtttaagtatatatctaatagtgtctttcaacaatacacaagcttaaccattaaacaaaagtcatacaataatgttattaggatcagtgtttgaaaaatcaggtcattctggtcggtcgaaccggtcgtagcaccaagtggtctagggtagtcctttgctgaccatgcacgctccccaggtgcttttaagttgttgtatgtgcaaaggttgaatttgaaattgaaaacatttgcttttaggaaaatacaacaaaaaaaatggcccttttaaaggtttgaacttgcatctcctcaaggttattttaggagtatcaaccaccaggcaacttatttaacaattacatgcacaaactaacacatatacatttattttgatttttatgttgattataccagttcatgtggtccaaccaatgatcgagtgtctcgaataatttgatttttaaaaccatgatttggattgaatatataagcagtaatgtattcatgtaaattgatttttttatttgagtaaaattcattttca

SEQ ID NO: 55996 - DNA, 598 bp, Glycine max
  Clone ID: PAT_MRT3847_21575C.1
aacaaactatgctttcttttgattgtgatcagtgggttgaagttcaggaatatatatcttgtcagcatatactatgctattagcctaaccccaaaatgtccaacaatgagtcaatcagcatgaggcatatttagtatttctattcattgttaccacgaatgtaccattactattttgatagtatttaaaggctggcaaggcatggcatatgaatcagtagagttactgccatcctgttggagaagaagtgtaacccaaccagcgaaagaagaaagtagggatacgcaaaatcatattttgaaaaatcgaaccattatttgctcccttgtagaacagagactccgtggaggcatcaacattggccctgagaattctattctcccttttcagctcgtcaacagcagctgtgagcttctccatagctgcttgtaatgaggatattatctgcaaggtaaggtcttctatgtctgactcctcttctactgatggaggttcaaagagaatgccctcttgtattaacaattcctctagtaacttcacatcttcaactttcaagtttcccctcaacttgttcaaaattctagcacttgactcatct

SEQ ID NO: 55997 - DNA, 200 bp, Glycine max
  Clone ID: PAT_MRT3847_21576C.1
aaaaacaaaaggtaaagaaataacacaataaacaaaaaaaaaaaaaaaaaaaaaaaaaagtgcttctctcagacgacttaagtccacccatgtacgtacctcatgcaacaatctcctcacaacgctattcaaacctaacctatcgattgatcccccataatcctccacatcgcgaaaatttcgctgccatttaatccaac

SEQ ID NO: 55998 - DNA, 1688 bp, Glycine max
  Clone ID: PAT_MRT3847_21577C.1
ggctcgaggttttcactaggtcagaaaaagggatggtgttttacatgtgagtttgaatatctaattcagaaggcgaaagaagggatttctccactttcaccaattgggatattatctaagatacacaagattggaagccatcttgggcgtgggaaggaagaagatgctcatgaatttttgaggtgcgtggttgatacaatgcaatctatttgcctcaaggaagttggtgtttcaagtcctttggcagaagaaacaactctagttggttacacctttggaggttatcttcgatctaagataaagtgcttaagatgcctggggaaatctgagaggtacgagagaatgatggatcttactgttgaaattgatggggatattgggactttggaggaagctcttggacaatttacagcacctgaaatcttggataaagataacaagtataattgcagcagatgtaaaacatatgtgaaagccaggaagaagttgacagtgttggaggcaccaaatattcttacaattgtattaaaacgatttcagtctggtaacttcgagaagttgaataagtcggttcagttccctgaggtcctgaatatggctccatatatgagtggaacaaaagataaatctccattatacagcctttatgcagtggttgtccatttggatatcatgaatgctgcattttcaggccattatgtctgttatgtgaagaacatccaaggagaatggttcaggactgatgacagcagggtagaacctgttgaattgtcgagagtcttatcagaaagggcatacatgcttctttatgcaaggcactctccaaagccactgggtttagtaagtagcaatgtaatatcttctgctggaaagttcaagagggggaacctggaagccattcctgcttcttctaagacaagatcaaattccatggctacaagcggcgagtctccctccctacagcagaagcatggcaagtaccctaactggaatgatggcgatgattccttaagaaatgattttgcatatccagaagaatggagattccagtatgggggaacaaatacaatggtggattcttctagtgaaagttcacttttcagctcttcagatgcaagttcttgcagtactgcaagtatcaaggactcagccagttctgctgatttctcggattacatatttggtgaggtgggacccagttggtatagccactatgggctttcatctaacatgggggcttcttcctcccatgataacttggatacagatttcttagttgatagtagtggtgcaagtagaaggcgccggcaggactcagaagataaagcagttttgtatgctaacaaaaacaaaaatcgtagtggcagtaggggagttgaccttaaaagatatatcactgctaaccattatgacaaaaattctggtgtacatgtgagaagaataagtggagatgcataagctcaaacgttttattgagtttgagtttagatataagcaatcatcttggatatttttggtgtagtgaagaaaattagtgtttcgctaatccaaatagaatgagggttcctgttcaatgttcaccctctgtactcgaatgattttatttattcaatagtatatatagaacaactatcaacaatgtgagaaaacgaaaaaagaaataccttgagtgataattcaccagttat

SEQ ID NO: 55999 - DNA, 1088 bp, Glycine max
  Clone ID: PAT_MRT3847_21578C.1
ctttcctctccttttccttccaaaccctaatttttgctactgcttatttttattcatcgcggacgcgtgggtttacgggcagaaacatttggtatcccaatccctgactggggtaagaaccctaggaagatggctgaagctgttgatagggtgatagtacctgactttcagcctaagaaagatgtgaaaatagtgacagatgagaaggccaccagtctctctacagcttctatagatgatgcagcggttattaatgatctagtaatcaagttagagaggtgccgggcaaatctttcaccagtgttcaggatgaaaccaatccaatttgagaaggatgatgacacaaactaccatatggatgtgattgctgggcttgccaacatgagggcacggaattacagcattcctgaggttgacaagcttaaagccaagtttattgctggccggatcattcctgcaattgcaacctcgactgccatggcaactggtcttgtctgcctggaactctacaaagctttggatggaggacacaaagtcgaagactacagaaacacatttgctaacttggcactacctctgttttcaatggctgaaccagttccaccgaaaattatcaagcatcaagatatgagttggacggtttgggatagatggattctcggagacaatcctaccctcagggaacttctagagtggctgaaggcaaagggcttgaatgcttacagtatttcttgtgggagttgcctgctctataatagcatgttccctcggcataaagatcgaatggacaaaaaggttgcagatctggcaagggaagtagccaagtttgaaattcttgcgtaccgtcgccatttggacgttgttgtggcatgcgaggatgatgaggataatgacatcgacatccctcagatatccatttatttccgttagtaggttgctttcatcttgatagaggtgtgtttgagacttaggtgaaaaacgacagcatgtttgactctcatgcttcatattcataattgatacacaaaggcaacattatgtcaaatttcatatatgaattgaaaaagcaactttggttcctcgtgtta

SEQ ID NO: 56000 - DNA, 239 bp, Glycine max
  Clone ID: PAT_MRT3847_21579C.1
ggggtacattacagttacagcccttttcaaactatgtggggaacttaccccattggcggcttataacagactgacccttctaaccaattttaataacaacacccttttgacctattttaacacccggcccttaatttcccttttttaaatcaatccgaaccattggacaaaccgttaaatacccacctgttcctctatgattaccaacatgtcctatatagagttgtataatagcttaa

SEQ ID NO: 56001 - DNA, 1228 bp, Glycine max
  Clone ID: PAT_MRT3847_2157C.1
gagcggcaaagagaagaaaaaagaaaaagccaaaattttcttcagttcggtggaaggagccgtagcagcagcggaagctctagcttgggcagcgaatcacaatggcgagaggattgaagaagcatttgaagaggcttaatgccccaaagcattggatgcttgacaaactgggtgggactgacaaaacataccctgctggttgtgcatttgctcctaagccctcatctggaccacacaaatccagggaatgcctgccactcatactcattttgcgaaaccggctgaagtatgctctgacataccgtgaagtcattgctattctgatgcagcgacatgtccttgttgatggcaaagtcaggacagacaagacatatcctgctggtttcatggatgttgtatcaatccctaaaacaaatgagaacttccgcctgctgtatgacaccaaaggccgattccgtcttcactcagtcatagatgacgaggctaagttcaagctttgcaaagttcgctcagtgcagtttgggcaaaaaggtatcccatacttgaacacctacgatggtcgcactatccgctacccagaccctctcatcagagctaatgacaccattaagttggatttggaggagaacaagattgtcgatttcatcaagtttgatgttgggaatgtagtcatggtgacaggtggaaggaataggggtcgtgttggagtgatcaagaacagagagaagcataagggaagctttgagactatccatgttcaggatgccactggccacgagtttgcaactcgtatgggcaatgtgttcaccattggcaagggaacaaaaccatggatatctcttcccaagggtaaaggtattaaactatcaatcattgaggaagctaggaaaaggattgccgcccaacaagcaactgctgcttaaatctttaggaaatgaatagactttgagtgtttggtagtttttatttaatggttttggtttctaatttattttgtcttgaaattttatccactgaatttcgtctcttaaatgctctatagaactttttattgcggcttctatgttcatgaaggaatctttccatttcctagtattgatgtagtttagtcggataaaattacttaaagtccactcaaacgaaatgccttaataattacttagtaagggatcatgttgctattgaatactgtattgttatttgcgtactatcttgaatgattcaacgc

SEQ ID NO: 56002 - DNA, 724 bp, Glycine max
  unsure (1)..(724): unsure at all n locations
  Clone ID: PAT_MRT3847_21580C.1
atcattccagcaattgcaacatcaactgccatggcancggggcttgtctgcctggagctgtacaaagctttggatggagggcacaaagttgaggactaccggaacacatttgccaacttagcactgcctctttttccatggcagagccagttccgccaaaggttatcaagcatcaagatatgagttggacagtctgggacagatggattctaaaagacaatcctactctaagggagcttcttgagtggctgaagtcaaaaggtttgaatgcttatagtatttcatgtggaagttgtctgctctataatagcatgttccctaggcacagagaacgaatggacaaaaaaatggtggatttagctagggaagtggccaaggtggaaataccttcttaccgtcgtcacttggatgttgttgtcgcctgtgaggatgatgatgataatgacattgacatcccccaaatatccatctatttccgttaggttgttttcgcccctataagcatcaggtgtgtccgagacttgtctttagttagaaaatagaatatgttggaccttccagtttcttattcataatggttaattggttacacacaagacgacactgtccaccgcagtccacagcacatttcatatatgaattgaaaagcagctttcgttccttgtattgtatgttatatcatttgctctaatttttttaatacaccttgtttcttgagatgatg

SEQ ID NO: 56003 - DNA, 1566 bp, Glycine max
  unsure (1)..(1566): unsure at all n locations
  Clone ID: PAT_MRT3847_21581C.1
agaagacccatctttgggagagaaaaaatggtagtagtagcacctgtcctgtcgtcactcggaaacgaaaccctagaatactagcattgcaaatccataaatacccctccctcttagcctaataaaacccacgcgtccgcccacgcgtccgacgaaacgaaaacactttctctccgattcttagcatccaatcagaggttccatttctcttccttctttcgcaccgaagttccaatcggtaaattgcttctctctttcgtcaatcttcattccttctctctgaacaataactgtaataacgctcatgctgcgtgagctagggttagggtttttcctcgtcgttgttccgttactcctttcgcggttttttggttttgacttcgatcctcttcgcgatcgagacgctaattcttggttcttcttcctgattgcttttgttcttgtgctcacgatcgcgtttcgtcgcagctcattactgcactatatgcttccaactaagagaccttgcgaaggactggttgcagaagaagagatcgaccacaacatcaacaacaacaacaacagcaacagcagttctctcaagaagaaacggattgccgccggaaccgccgattcgacggtgaagaacgacgaaagcaccgtccggagcttcaacaacagcaacagcaacaacagcagcaacagcggggacgcgagtgagggagcgtcggatatggctttgggcgaatcgaaccagccggacatcgatgaggatctccacagtcggcaactcgccgtgtatgggcgagagaccatgcggaggctctttggttccaacgttctcgtctccgggatgcagggtcttggcgttgagattgctaagaatctcattcttgctggtgtcaagtcagtgaccttgcatgatgaggggactgtggagctgtgggatctatccagtaactttgtgttttcagagaatgatgttggtaaaaacagggcagcagcttctgttagtaagctgcaggagctcaacaatgcagtggttgtacaaagcttgactactcagctgactaaagaacacctttccaatttccaagctgttgtttttactgatatcagtcttgagaaagcctttgagttcaatgattactgccacagtcatcagcctcctattgcctttattaaaactgaagttagaggcctttttggttctgtgttctgtgattttgggcctgagtttactgttgttgatgtggatggagaggatccccatactggcattattgcatccatcagcaatgacaaccctgctcttgtatcctgtgttgatgatgagaggctcgagtttcaggatggagatctggttgtattctctgaagttcatggtatgaaagagttgaatgatggaaagccaagaaagataaaaaatgctagagcatattcattcactcttgaagaagacaccacaaattatggtagatatganaaaggtggtatcgtcacacaagtcanacaacccaaggttttgactntaaaccactcagggaagcgctcagtgatcctggtgattttcttctgagtgatttt

SEQ ID NO: 56004 - DNA, 4964 bp, Glycine max
  Clone ID: PAT_MRT3847_21582C.1
cagaaccacgagccttgggggctcaaaaatggtagtagcagctgtcctgtcctcactcgaaaacgaaaccctagaatactagcatgagcattgcaaatccataaatacccctccctctaaacccaataaaacccccaaaatccaataacaaaaccaaacgaaaacactttctctccgattctcagcatccaatcagaggttccatttctcttgattccctctcacccaagttccaatcgctcactactgcactatatgcttccaactaagagaccttgcgaaggactggttgcagaagaagagactcacaacaacaacgacaacaacaacaacagcaacaacaacaacaacaacaacaacaacaacaacaacaataacaacagcaacaacagcagcagcagcagcagttctctcaagaagaatcggatcgccgctgccagaaccgccgattctacggtgaagaactacgaaagcaccgaccagagcttcaacaacaacaacagcaacagcggaaacgcgagtgagggagcgtcggatatggctttcggacgcgtgggaaaagcacacacactctctctctctctctctccgattcgcactgtccaatctgtgattttattctttccttctctcaagttctattcgcttactgcactatatgcttcctagaaagagagtgagggaaggaggagtggttgtagaagtagacagtgacgctaccaccaccaacaccaatagtgctgcggcgtcgtttcccaagaaggctcggatcgggagctttgctgcctgctcgggtgccggtgctgcggattcgccggtgaacgtcagcggccagggattcagtagcggcggcggcggcgacaacagcctcgggaactcggtcggaggaatggctttggggaattcgcacccggcggagatcgacgaggatctgcacagtcggcagctcgccgtgtatggccgggagaccatgcggaggctctttgcgtccagcgtcctcgtttcggggatgcagggtcttggtgttgagattgcgaagaatctcattcttgctggggtgaaatctgtaaccttgcacgatgaagaaaatgtggagttatgggatttgtccaagaagacgacagaaggggagaagccgtatcttgggtcgagcaaagcggctggaagttgcacttggcaagaacagggcagaggcttctgttagtaagttgcaggagcttaacaatgcagtggttgtactaaccttgactactaagctgactaaagaacacctttctaatttccaggctgttgtttttactgaagttagtcttgagaaagccgttgagttcaatgattactgccacagtcatcagcctcctattgcctttattaaaactgaagttagaggcctttttggttctgtgttctgtgattttgggcctgagtttactgttgttgatgtggatggtgaagaaccccatactggcattattgcatccataagcaatgacaaccctgctctagtatcctgtgttgatgatgagaggcttgagtttcaggatggagatcttgttgtattctctgaaattcatggtatgaaagaattgaatgatggaaagccaagaaagataaaaaatgctagagcatattcttttactcttgaagaagacaccacaaattatggtatgtatgagaaaggtggtattgtcacgcaggtcaaacaacctaaggtattgaactttaagcactcagggaagcactcagtgatcctggtgattttctgctgagtgatttttcgaagtttgatcgcccacctctactgcatttagcattccaggctttggataaattcgtttctgagatagatcgcttccctgttgctggttcagaggatgatgcacagaaacttatatctattgccagttatattaatgacagcttaagggatgggaaattggaagacataaatccaaaacttttgcgataatttgcctttggttctagggcagtattgaatcctatggctgccatgtttggtggaattgttggacaagaggttgtcaaagcatgctctgggaaatttcatccactttttcaatttttctactttgactctgtggaatcactccctacagaaccgcttgaccctaatgatttaaaaccattgaatagtcgttatgatgcacagatttcagtttttggacaaaagttacagaagaagttagaggatgctgaagtttttgttgttggatctggtgcattgggatgtgaatttttgaaaaaccttgccctaatgggagtttcttgtggtcagggaaagctcactattactgatgatgatgtgatagaaaagagtaacctaagtaggcagttccttttccgtgattggaatattggccaggccaagtctacagttgctgcttcagctgctgcagctataaatccccgtcttaatattgacgctctgcaaaatcgtgttggccctgaaactgaaaatgtgtttcatgataccttctgggaaaacttgagtgtcgtgattaatgcactagacaatgtgaatgcaagactgtatgttgatcagaggtgcttgtatttccagaagtcacttcttgaatctggaactcttggggccaaatgcaatacccaaatggtcattccccacctaacagaaaattatggcgcatcaagagatccacctgagaaacaggcaccaatgtgtactgttcattcatttccacataacattgaccactgcttgacatgggctcggtcagagtttgagggtttgcttgagaaaactccagctgaagtaaatgcatatttatctaatccaaatgaatatactaatgcaatgaggaatgctggtgatgctcaagcgagggataacttagagcgtgttcttgagtgtttggacaaggagaagtgtgagacttttgaagattgtattacatgggctaggctaaagtttgaagattattttgctaaccgagtaaagcaattaatttatacttttcccgaagatgctgcaactagtactggagctcctttctggtctgcaccaaaacggttccctcatccactgcaattctcatcctctgatctgggtcatcttctgtttttgatggcagcttctatattacgagcagaaacatttggtattcctattcctgactgggtgaagcatcctaagaagttggctgaagctgttgatagagtgatagtacctgactttcagcctaagaaagatgcgaaaatagtgacagatgaaaaggccaccagtctctcatctgcgtctatagatgatgcagctgtgattaatgatttaatcgtcaagttagaggggtgccggacaaagctgcaaccagagttcaggatgaaaccagttcagtttgagaaggatgatgatacaaactaccatatggacctgatagctgggcttgcaaacatgagggcacggaattacagcattcctgaagttgacaagctgaaggccaagtttattgccggacggatcattccagcaattgcaacatcaactgccatggccacagggcttgtctgcctggagctgtacaaagctttggatggagggcacaaagttgaggactaccgaaacacatttgccaacttagcactgcctctcttttccatggcagagccagttccaccaaaggtcatcaagcatcaagatatgagttggacagtttgggacagatggattctaaaagacaatcctactcttagggagcttcttgagtggctgaaggcaaaaggtttgaatgcttatagtatttcatgtggaagttgtctgctctataatagcatgttccctaggcacagagaacgcatggacaaaaaaatggtggatttggctagggaagtggccaaggtggaaataccttcttaccgtcgtcacttggatgttgttgttgcctgtgaggatgatgaggataatgacattgacatcccccaaatatccatctatttccgttaaggtggttgttgtcgtcctatcaggtgtgtccgagacttatctttagtttagaaaacagaatatgttggaccttccagcttcatattcataatggttagcaaatctcacacaaggcgacactgtccacctcaattttgatcacatttcatatatgaattgaaaagcaactttcgttccttgtattgccagcatgagggaatggcattactgctttcctgaggttgacaagcttaaagccaagtttattgctggccggatcattcctgcaattgcaacctcgactgccatggcaactggtcttgtctgcctggaactctacaaagctttggatggaggacacaaagtcgaagactacagaaacacatttgctaacttggcactacctctgttttcaatggctgaaccagttccaccgaaaattatcaagcatcaagatatgagttggacagtttgggatagatggattctcggaaacaatcctaccctcagggaacttctcgagtggctgaaagcaaagggcttgaatgcttatagcatctcttgtggaagttgcctactctataatagcatgttccctaggcataaggatcgaatggacaaaaaggttgcagatctggcaagggatgtagccaagttggaaattccttcctaccgtcgccatttggatgttgttgtggcatgcgaggatgacgaggataatgacatcgacatccctcagatatccgtttatttccgttagtaggtggctttcttcttcatagaggtgtgtttgagacttaggtgaaaacgacagcagccagcatgtttgactatatttataattgatacacaacggcaacattatgtcaaatttcgtatatgaattgaaaaagcaactttggttgtgttacttttttccatgcttttgggtctttatcctaaccttacctatttattgggatgctagtttatgttaaaaaaaaaaaaaaaaaaaaaaaaaaaagggcgc

SEQ ID NO: 56005 - DNA, 392 bp, Glycine max
  Clone ID: PAT_MRT3847_21583C.1
ttcttttttttttttttttttttttttttttttttttttttttttttttttttgtttttttttttttcttttttttttttttttggggaaaaaaaccggctcccttaatcgaaaaaaaagaggccagggccaacaggctaaaaccccccggggcccaaaaaccggggaaaatgcccccccccggacaaaaaaaactttgccctttttgaaaggggggaaaaaagaaaaacccgaaaaccgggggccccccaaaggagcccacgccccaaactatacgggggggcagagctgccacaaagggggccccctttaaaaaaaaacctccccccctgacaggttacgcccagggccccaaagcccccggcacaaaggccgcccccatagggggcccc

SEQ ID NO: 56006 - DNA, 243 bp, Glycine max
  Clone ID: PAT_MRT3847_21584C.1
gttctcttttccttttgaaaatgatctcttatattagagcaatatttatagagggtttggtgcaacattaaggttgttgccttgtgactctggttatgagttctaatagaagaagcatcgtgtttcatgggagtaaggttgcatatatctaaccctccaaaatgggtggcaacctaggaacttttttttacctagataatcttttgttgttgctcagctatttttcttgtgtatttatgcaga

SEQ ID NO: 56007 - DNA, 254 bp, Glycine max
  Clone ID: PAT_MRT3847_21585C.1
ccaaccttacagacccttttattgcgacacctaaactctattaacgtgcccgcctaaattaaaacaactggccggcgaaaaccaacgcgttaaccgagaaaaccctgtcgcaacccaactcaatttccttagatgacataccccttaagacgcctgccccaatagccattaggaccagacggacagcctttatgaacaatggcacaccccctatggcgaatcatacaccccctcgagcggggcattaaccccca

SEQ ID NO: 56008 - DNA, 382 bp, Glycine max
  Clone ID: PAT_MRT3847_21586C.1
agtgggctaacaggataccctaccaaatgacctgcttgcctctgtagtgctggctggcacacttataacaaatcttatcccagcaaaacatggatacatgggtggagacgctgcactgctacctgcatcaaatcaaagactagaaagccaaatgacggtcttgaatacaggtatgccagagacagtgcctcttcaaactgtcaataggcaatgtacatctgcacttcatgcgggctctgacatagctgcttatataaaatctgtattctatgaaattagtattaagactctattggagtgtattacaatctatcatttaaatcatcttcccaacattaacccaggaatgaaaaccctagcatagacgcacgatagtatattg

SEQ ID NO: 56009 - DNA, 277 bp, Glycine max
  Clone ID: PAT_MRT3847_21587C.1
gcacgaggggaatgtttaggtttgttcttatcttaattcgaaccatacttgctgcacaactgaagaaggaggagcaagattagcatgttgaagtgtaaacttcagcctaagaaatctcattattgttatttatagttctgggaatgacactaagaaatctcttattattcttggttaatgagggaagaccattacgcgcagagactagtagagataagaaatgcttaacagtaatgtgagaattaaactcatttttttttatcataaattcagtgtg

SEQ ID NO: 56010 - DNA, 537 bp, Glycine max
  Clone ID: PAT_MRT3847_21588C.1
tactcacgtcatcatcctcaacctcaacctctccgagccagcgagcgagaaccagactcaagaagaaaacgtgttgtgttagtgttacccctttctctttttctctctttcttgaatttggcgcgtgcgtttcgattcttcttccgaatcagagggattctggatttcttgttgaagatgcgacgctcttctgcatccaaaaagtcgggtcaatccaattccactcccaacgccgccgatctcttccgctctgcttcaagtaaggcaagctcgaaggaatcagaacgaattgatagtctattctattcatatgccaatgggtctaccgggttgattgaggttatggtgattgacatgcttctcttcaagtatatcatgtttcccaatgttggcaatggacactcacctagatgccatgaatcccttcacagtgtggcgtggactagcttttagcttgtgatgtaagtgtggcagtggaaaccagaagctcaggcaatgggggtgctctagtttcttctccatgttttggaattacat

SEQ ID NO: 56011 - DNA, 1328 bp, Glycine max
  Clone ID: PAT_MRT3847_21589C.1
ctttactgcataatcatgatttaatttatttgacttgatgttaaaactcttgttttgatttgtcatatatgttttttttgttgaatttcattttgccttcaattggaggtttggtgaactctggattaccatgactattgtcaagttaaatgcaatcttttaaaaatgatgctggtagactcagtctaaagaagaacaagaacgacagcttcttgaaatgatatagaagtttcaggtgcctacatcatattgataggcttgtttgcccttcaacgttatggcacatacaaggttaaattctttacttggtgaacatttgaacccaacaattcttaaagcaaaacttaaatgagactgtgtccggcaccacccctcagcacgcgtgcggcgcatccacgtcatcaccctcaacctcaacctctccgagcgagaaccagacacaagaaagaaaacgtgttgcgtcagtgttacccctttctccttctctttatctttcttgaatttggcgcgtttcgattcttcttcttccgaatcagagagagtctggatttcttgttgaagatgcgacgctcttctgcatccaaaaagacgggtcaatccaattccacccccatcgccgccgatctcttccgctccgcttcaagtaaggcaagctcgaaggaatcagagcgaattgatagtctattctattcatatgccaatgggtctactgggttgattgacccagaaggaattgaaacactttgtgctgatatggaggtggaccatacagatgtgagggttttgatgcttgcgtggaaaatgaaagctgaggagcaaggatattttacattggatgagtattgaagaaggcactaccagacctagacaaagaggttaggaggccatcgaacttcacagatatctattcttatgctttccaatattggttcaaaggagggaaatttaaaatctttgatatagaaagaatttttgagatacttactgactatgatcctgaacttgcctggcccttgatcctggataatttcgttgaatggctgcgagaaaagcaaaaatagccgataagctggctgattctctgtaactgcaaccattgaaccccttttaagagaaactgtcggattctgcaactaaatcagatagatgccttgtggctccgtttattgtacttaacaagttgttgtttttttgttggcccagtttcttattttgggcagaaaagcattgatatatagagcatatggtgagtgacatgcttctcttcaagtatatcatgtttcccaatgttggcaatggacactcacctagatgccatgaatcccttc

SEQ ID NO: 56012 - DNA, 210 bp, Glycine max
  unsure (1)..(210): unsure at all n locations
  Clone ID: PAT_MRT3847_2158C.1
tgttgttgggattgttgtgctactngcttccaatgctgttcagatacagtggggcctcaactggtctcactggaaacccttcactccacttggcaagaacttctaacattgggatggtgattggatatgtagtctacattggctttcaactggggacacccaagccggtatttgaaacccaaaaataaggtgaaggatgggaagaccggg

SEQ ID NO: 56013 - DNA, 108 bp, Glycine max
  Clone ID: PAT_MRT3847_21590C.1
ggcctcgtgatatgcaagctgctctgtcagctactggcacacggagcgccagatcttttatggttctgggcaggacgacataaagtgtgagaccatcacccatccagc

SEQ ID NO: 56014 - DNA, 422 bp, Glycine max
  Clone ID: PAT_MRT3847_21591C.1
acggtttggtgaactctggattaccatgactattgtcaagttaaatgcaatcttttcaaaatgatgctggtagactcagtctaaagaagaacaagaacgacagcttcttgaaatgatatagaagtttcagcaatcgtacaagcataatttttcagcttcaagtaaggcaagctcgaaggaatcaaaacgaattgatagtctattctattcatatgccaatgggtctaccgggttgattgagtaagtgtgcttcatccaagactgtttgttttctttcctccattcaatatgcatatatcaaattgcattatcctgttgttgttttcttaattcaagtttcaaaccttggacatggatccagtggcagatctaggacaatctatttaaagaataaaaattaacaagtattatcatgaaaagag

SEQ ID NO: 56015 - DNA, 1014 bp, Glycine max
  Clone ID: PAT_MRT3847_21592C.1
tcagtctcgtttttctcaaagggcagaggccaaatgtgttctctgaggagatgggctgcttcactctgcatgtggtgtgcttgattatagagccccagagttggccttcaattggaggtttggtgaactctggattaccatgactattgtcaagttaaatgcaatcttttaaaaatgatgctggtagactcagtctaaagaagaacaagaacgacagcttcttgaaatgatatagaagtttcaggtgcctacatcatattgataggcttgtttgcccttcaacgttatggcacatacaaggttaatttctttacttggtgaacatttgaacccagcaatcgtacaagcataatttttcagcttcaagtaaggcaagctcgaaggaatcaaaacgaattgatagtctattctattcatatgccaatgggtctaccgggttgattgaactttggagatcgactatctctgaaagcgattgtctctcatataaaatgttaaaaaagctgtattggaaaactctatatagccacgcgccacaaggttggctgcaaataaaatatgcaattttttttatttaaaaattcgttgaatggctgcgagaaaagcaaaaatagcctgataagctggctgattctctgtaactgcaaccattggttcgtgtgttcctgaattgttttaaacaattgtgcatcgctcttgtgtctgtgatttttcaaatttgccttctaacttgtgcaaattggtttgttggcagaaccccttttaagagaaactgtcggattctgcaactaaatcagatagatatgccttgtggctccgtttattgtacttaacaagttgttgtttttttgttggcccagtttcttattttgggcattttaaacacagaccattattacttctgtttaaattttccattatatggtataggcgcagttgaggctagatacaagttttacgttgtgatccctgccaatgcctacctcatttgtcagacataagagcttttatagg

SEQ ID NO: 56016 - DNA, 499 bp, Glycine max
  Clone ID: PAT_MRT3847_21593C.1
cttttcttggtggaattcaaaaatatgccactcccatgatgcccctagatgaagaaattctttctaaggttgcacaagacatggttgaggaatggattgattgtgttgatgaggatgattcctttgaggaagtttctttaagtgcaccacttaatggtgtcgaggggctggactatctggaaagaattcctgttgccacatttgagggtttttctcacgtgctttcacgcaaaaatcgttaaaaaggcaaaaggagattcgttttttgggatggagcatagacgacattgattccaggaaccactgttgaagaggcttacatcatgctattagttgcacttgagaaaagtgttcctacattgattggcattgaatgtcccaaggatgagaaacttcctcgtcgcataatgtttgacacacctaagacgcgctgcttcactattctacccatggagtttaatcatttggttcgccagaagctttatattgtgtgaggttc

SEQ ID NO: 56017 - DNA, 566 bp, Glycine max
  Clone ID: PAT_MRT3847_21594C.1
ggctctagggctcgagaaacaattctattataattctggcaggctcgtgagttgtatatgacatgtttctctgtgcacccattgttcttgtctcaaagtaaaagtgtgtgtatataaaagaggtccctcttctcagttctttgaaaacctcaacaactcaacacgttgcctctactctctgcagcttttaatttgtttgcaggcacacaaccatggctgctctctccaacggccacgacgcttccttcttcaagatgccctccatcaagttcaccaagctcttcatcaatggagaatttgttgattccctttcagggaaggagtttgaaacaatagatcccaggacaggagaagtgattacaagaatcgcagaaggagcaaaagaagacattgatgttgctgtcaaagcggcacgtgacgctttcgactatggtccatggccccgtatgcccggtgctgaaagagcaaaaatcatgatgaaatgggcagacttaattgatcagaacatcgaggaaatagcagcattggatgccattgatgcagggaagttgtaccattggtgcaag

SEQ ID NO: 56018 - DNA, 512 bp, Glycine max
  Clone ID: PAT_MRT3847_21595C.1
ctcgtgagtcgtatgtgagatgtaccttttctctgtcgactggttgttcttgtctcggagttaagtgtgcgtaactctgtatatataaaagaggtcccattctcactttttcgaaaaacacgtttgcctttgatcttcttggctctactgcttttatttgcagacacccaattaacgatggctgctctctccaacggccacggctcttccttcttcaagatgcccccaatcaagttcacaaagctcttcatcaatggggaatttgttgattccctttcagggagggagtttgaaacaagagaccctaggacaggggaggtgattacaagaatcgcagagggagcaaaagaagacgttgatgttgctgtcaaagcggcacgtgcggctttcgactatggtccatggccccgtatgcccggcgctgaaagagcaaaaattatgatgaaatgggcagacttagttgatcagaacattgaggaaatagcagcattggatgccattgatgctggaaa

SEQ ID NO: 56019 - DNA, 1642 bp, Glycine max
  Clone ID: PAT_MRT3847_21596C.1
gaatcgacaatttcagagttgctccgatttcctcatcgtggggcaccatcaattgagttaacaatctttgttccatttcggcatgaaaccctaattcactcgcttctcgatctcgttagagcaatctttccacgctcgtcttcgcgctccatctgtacaagaagatccgtcacgagcgttggttatacgatggatgggaacaaggacgacgcgttgaaatgtttaagaatcggcaaagaggcgatggaaagcggcgatcggtcacgcgctttgaagttcgtgacgaaggcgcgtcgcctcgaccccactctccccgtcgacgatctattgtccacgatagaggtggatgcaggggatcaggcccccgccgccgaggcggagggccccacgaagcccactgatcaaccttctatccgccggagggccaccggggcggctgcgaccgtctcggccgggccctcgtcggcctcgtcctcttcggcctcgtacaccgaagagcaagtctcaattattagggaaattaagaggaagaaaaacttttatgagatattgggattggagaagacttgcactgttgaggatgtgaggaaatcgtacaggaaactgtctcttaaggttcatcccgataagaacaaagcccctggtgccgaggaagcattcaaggccgtttcaaaggcgtttcagtgtcttagtaatgaagagagtaagagaaagtatgatgtttcgggtgaggatgaagcggtttacgagcagcgtgcggcaaggccggcggcccgaggttataatggttactatgaggctgatattgatgctgaggagatattcaggaacttctttggaggaatggcccctgcagccaattttggaggattcagttttggaccagctggtttcaatgggttcaatggtcataggcatgctgctgatcatggttctggtggttttaatgttcgcgctttaattcagttgctgcctgtgctgctgattgtgttattgaactttttgccttcatcggagcccttgtactcgctttcgaagagttatccttatgaacatcggtttaccacacccaagggtgttaactattatgtcaagtctacaaactttgttcaggagtatccgttggggagtgatgaacgatcaaaaattgaagagagggtagagagggagtacttcagcattctccgccagaattgtcatttcgagttgcagcgtcgccaatgggggtatatccgggaaacaccccattgtgatatgttgcggaagtttgaggtggtgaattgataagttgaatcaaggtcctaatttttaatattgtcttgccttttgttgtagatgcagtagctttttcctgcttgtgatattattatagaatgtacaatttatttttcactcccatatagtgaagcaagtttacaataagccagccgctttgttgggattgttatctttcaaatttcatcaaatatctctatgatggatcttcctttactaaaatcattcattacaagaggcatgaatgcatggcctcacttatgtacctaaatttgtgttttgtctgatgtgtattttatgttcaactgcacaaggtggtacaatttatttttcactcccatatagtgaagcaagtttacaataagcc

SEQ ID NO: 56020 - DNA, 459 bp, Glycine max
  Clone ID: PAT_MRT3847_21597C.1
ggttttatttacctctttttctgttgtgtgtctgacgtttcaacaacctgcataagaagctgaagctatgatgggtagacttgcaccattatcagaagaacccatcaatgaagaaaacgaaggctacaacaatagtaactcaaagaaaagccttcagtcatggaggaactggaattggatcaagactcatttttcccttgcctttaacaaaaagtccaacctcaagatcctccttagtgtcttgggttgccctttatttcctgtgcctgtccaccccattctacctcttaatgaggtgtcatcttccgaacagtatatcatacatcactttagggctgcaacagggtgtatgaagttggaggggacagtgaagaaagtgttcacaacatggaaagtgacaatggatgtggtggatgagcttggatccacaagtggaggcattaatttggagaaagggtg

SEQ ID NO: 56021 - DNA, 390 bp, Glycine max
  Clone ID: PAT_MRT3847_21598C.1
cgctcgccaggacatcagaggtcctagttttggggacactcacatggatgtatgaccatgaagggatgactggctactcatgacgctctccatttatgaagctgatgaccagtcgcagttgcaatcacaaatgggacgtgtatctgctaatggagataattatgcatgtctaggtctcataatgtataataacaaacagcttaacagtgaggaactgctcatgctgtgggactctgggctgtcccagatccatagccatactacaaaggcatctactcttcttgtgatgaccatactgatcacagacaccgctctggtggtaattcattgagacaccttaagataatgggacttgaacacacagggttgcctttgccatctgatacagtg

SEQ ID NO: 56022 - DNA, 368 bp, Glycine max
  Clone ID: PAT_MRT3847_2159C.1
cacacatctcacaggggttgtgcttcgttgagccgtgatgaaagcaattaatgagagaccattgctatgaacgcaacacctatcacggcttcggacttggtttcaacaagtatttttcaccgttccaccctttaaaaatcattgatgaaatccggtcatgagcatagtgagatcctggcatgcgggtaacctactctcatagatggaactgcacttgtcatggtggcggcgcccttggcactcacaagaatcgttagagctgttctgcttgagttatctagccatatgctattgccattataaactcctttcgataccctgataccatattagaacaagctgagctggatatgaacaatgatttgatc

SEQ ID NO: 56023 - DNA, 280 bp, Glycine max
  Clone ID: PAT_MRT3847_215C.1
ttcccggtcccggaaataatattcccggggtccgccaggcttacttattccggggcgcggcccttttttttttgtttttgggtttttttttattttttttttttttttttttttttaggcacacggcatgacatcctattattgtattccaaacgccaattatattaattaatagcaggcggggcaaaggaaagatgagcaataattatgacacagacattgggtgagtatatttggagaaagaaaaggaagggcaatctaaaaatatataatctcaatc

SEQ ID NO: 56024 - DNA, 1021 bp, Glycine max
  Clone ID: PAT_MRT3847_21600C.1
tgctagaaatgagctacaacacaaagctgatgtgattcaacgtaagtttgtaataacgaaggctttactatgtaaggcagatagatcttcttttgaccgccttcatcaacagatatacaagctagaattagagcaaaaacgtttagaagaggatgtttttgtttataactcgcttcaacaacagcttaaactgtcaccagcctaccagaagatgcttgaacttggagcttgcatggagaaggaaaaatcaagtgaactgggagagaacagagatgatgattttgctgaaatttcttttgaggaattgttagcacaggagaagaaagattcattttggcaaaaaaatgggaaatcaagactaagctcaagctaataacactactagcttggttaactgcaacctcctgagttagtttagtatgtacatccaatacctgtagtagtgtgttgtcacaggaatgttctttttggttctttgcctgtgccaattttggttgtttatggaatatagatgatacaactttgagtttattttagaaatttatgaatggaagccagttaacagatatacaagctagaattagagcaaaaacgtttagaagaggatgcttttgtttataactcgcttcaacaacagcttaaactgtcaccagcctaccagaagatgcttgagcttggagcttgcatgcagaaggaaaaatcaagtgaactgggagagaacagagatgagtttgctgagattacttttgaagaattgttagcacaggagaagaaagattcattttggcaaagaaatgggaaatcaagactaagctcaagctagtaacactactagcttggctgactgtaacctcctgagttagtttagtatgtacatccaatacctgtagctgtgtattgtcacaggaatgctctttttggttccttgcctgtgccaattttggttgttaatggaatatagatgatacaactttgagtttattttagaaatttataaatggaagccagttaaattgaagtt

SEQ ID NO: 56025 - DNA, 871 bp, Glycine max
  Clone ID: PAT_MRT3847_21601C.1
gcttatttcttccaaacttcgaagccaaccgacacgtcatcgaaccgaaaaactacttccatagcctctctctccttcgcgtagcagagttagtggcattcaatacttgtgaatgaaaagctccaacgattctcttcaatcctccgactttcctaggaatggcgacaccatttcttgctggccttgctgtagctgctgcagcacttgctagcaggtatgggatccaagcttggcaagcattcaagtcacggcccccaaaacccagattgcgcaagttctacgagggtggtttccaatctacaatgacaaggagagaagcagcactaatattaggcgtcagggaaaatgcaactgcagacaaggtgaaggaagcacatagaaaggttatggttgcaaaccatcctgatgcgggtggaagtcattatcttgcttccaaaataaatgaagcgaaagatgttatgcttgggaagggaaggggaagtggatctgcattttaacacatttgttgcaatgtcttaattctggacattacccgatttttataaatcctcatgaaatacattgcatagtaactctgtttcgaggaattcatttaatttgtaaatattgtggcctgctcgtgatttctttccccttgtacgtgcattgcaaattcagacttctcaaagctgcttatttagttccggtcaaatattacaataaagagtggtaatgaaatactgtggtccatgggagaagtgtgttgtactatttttcttctttattgttattagtatgacttaaccaaaccgtctgtatacttgtattacaccttggtaacttggttaattggtcattgtttcgaatccggaagcattataattgcatatgt

SEQ ID NO: 56026 - DNA, 332 bp, Glycine max
  Clone ID: PAT_MRT3847_21602C.1
ggtgggaaaacaaacggggtttttttactattttgctcataacttaaaagggccccctaaataatccctcctggaaagaatacataacttttttaacacccaaaaaaaaaaagtttacgtttttccaaaccattttgccctgaatggggggaattaaaaacccctcaaacctccaaaagttttaaaaaaggcaatttctaacccaaagaatcacttttcctatacatttttttacagcttttaacaatgctttgtttcggctttggtttcccctggcttggaagcaggggggccaaatttttgaagccgattttatcggcttgttttatttt

SEQ ID NO: 56027 - DNA, 482 bp, Glycine max
  unsure (1)..(482): unsure at all n locations
  Clone ID: PAT_MRT3847_21603C.1
gattaaaaaaaccgacggcataaagaatggctcatctgttaatattgaatgaaataattacaataagtcaataactgattcggtttacttgttacaagatattcagagaaatgtaatatgttaacttatgtcccatcttagtagaatgttaatgttgttgtcatgccagcgagaattctgcgtcattttcaaagacatggcaagagagaaggaacacgcgtggttgtgacaaaatgatacaagcattcctcctcagaatgcttaatcaaagtgatggtatagaatcaccataggaaactagatcttgcgctagcaattgctaccaacccctttgacaaccagaaaattcaaaaagatgctgacaaatataattgtagaacgaggcanatagtangttctttttgcacttcctacacctnaacatccaagaaaacaattatctctctgtcatagcccttccaaattggcctgcttggtgacgt

SEQ ID NO: 56028 - DNA, 391 bp, Glycine max
  Clone ID: PAT_MRT3847_21604C.1
ctcagacgagagaacagaagggggttttcgacagaaagcgtgctacgattgggactaacagaccacctctgtctcataaaatatataccaatgcatgttcaaaggctggtatgacagtaagcttcttacgcagcaagatggacctgaccagtataatatttatgatggccacaatggaccatctactgctcattatgattcatataccacatctatgagaacttagatctctaaagcagacatagacttatagtgagattaacaaatttatacccggtgaggagctactgaacataaccctattgatcaacattaccatgcacgctttgcagttaggaccataaggctcgcatgtcagtactaatagtataaggacttgcggtatgactat

SEQ ID NO: 56029 - DNA, 769 bp, Glycine max
  Clone ID: PAT_MRT3847_21605C.1
tacggctgcgagacgacagaaggggtgggatttagctgccagtaaaacacacgcggaactcatggtggagaatctaatacttgaagttcttttaggtaatctacttgtttgcaaatcagagcgggttactgaaattagcataggaattattgggaaccttgcctgtcatgaagttccaatgaagcatataatctcgacagaaggactgattgagataattctggacaaattgtttatggatgatcctcaatgcctatgtgaaacatgccgtttgttgaccgtgggtcttcaaagtggtgaatctattgcatgggctgaggcattgcagtctgaacatatactatgtcaaatattatggattgcagaaaatacattgaaccttcagcttttagagaagatcattgggcttattttagctatattagaaagtcagcagaaagttgtggatgctatccttccacctatgatgaagcttggtttggcaaatatattgatcagtctcttgacttttgagatcagcaaattaatgacagaaagaatacctgaaaggtactcaattctcgatttaattcttcgtgcaattgaagccctgtctgttatggatgatcattctcaggaaatttgttcaagttcagagctctttcaactattatgtgatctggttaagttcccagataaagttgaggttgggaactgctgtgttactgctgctgttctcattgcaaatatgttgtctgatgttgctgatcaggcttcaaagatttcacag

SEQ ID NO: 56030 - DNA, 946 bp, Glycine max
  Clone ID: PAT_MRT3847_21606C.1
aaaatccaagctggggcagcagtgatccctaaaaatggactggaaaaaagcaaaatacattttaaacatttaacatcactatcatgattcagtaatttccaggttcattacatcatcaccttaatcatctggtatgcatttaaattaaaaataatcccattaaaatccaagcctgtctaaactacccgcctaaggaaacaaaactcgtccatgattcatatatagtaaaccacaataagctgacatttagctttccacttaattcattaaatcatagtcatccaatttgtcattgtactgaagcacctttctctttattttggatgaatccacccatgtaacgaagtcttccatgtttctagttacaaggaaagccgggtctgtaactgtctctggaccaactcgtatatgcccttgctcaatgtacgtgacagcttctttcaagtgctcagcaaattttagtctcaccaaaacagttgagagcctacgcctacagaaggatgacacagttaaacgttcgcatagtgtgatgctttgcctggttggaatcacacccatgttgtagagtttctccaaaagcttatcagtcatatcaacccgaaaaggatcctttgggtccatctgtttcaatatgtttactaacttctgaaccatatggcataaacctgaatattttttgtaatcgtcccgtccagtaacatggtagcgttgcataatgaggttctctctgtgacccccttccctcttccattccaaaaaattaaccttcttcaaaagcttcttttcatgaaactttagcttcctcattgttcttcacagtaaaatgttttccttggtggcttgtcccagctaacttgcagagaggcgacgagagacagagagactagggctaagaacggcgacagcgccaaagagcagccacccacgcgtccgcccacgcgtccgc

SEQ ID NO: 56031 - DNA, 267 bp, Glycine max
  Clone ID: PAT_MRT3847_21607C.1
gtgctgcttttacgactccgtttcgcacgcatcagacgtgtagccgcagagaagcaaatcaatggagaagggaaagggagtcatcggatcgggaggacgaagatggggcgctggcttcgcccacagtaccacgacacgcgagattcccgatcctaccggaaactcccgcactgggatcgatcaggacgattcaacgcacagaagccagaagaaggccccggaacccaactggcaagcccacaaagctcgggaggccgcacacgcccc

SEQ ID NO: 56032 - DNA, 391 bp, Glycine max
  Clone ID: PAT_MRT3847_21608C.1
tacctaaggctcggactttggttcgtgaaaaaaattaattattttttttaatttttttttattaaaaaaagggaaagactgccacttaataatataacaccaccacaacttttaatacaaatcaacatggggtcttgaacggcccataaaaatataacccggaattatattcggaacttaaaaaaaaaaggcaacctttttaccagaatcctaccctttaaatgggaaaccttttttttcccacatattccaaacccggtgaaaaacccatgcttttctatttataaattgatcaaagaactcaattcgaattgtttgccacccggttacattgaataaactattactcccatgatattaatggcggggccgggatccgtttttagggcct

SEQ ID NO: 56033 - DNA, 217 bp, Glycine max
  Clone ID: PAT_MRT3847_21609C.1
ggctcgagatgaggctcaatgattggtttttctgctgttaataatgcacttacagttgaagatttggaggcattgcatgtgtgtgtttaaaaggttcagtatctgcctgattgaggatcactctattcacaatgaggaccttcaattgtcactttttcataccccatatgagaaaaatctttccctagatcgagtttatgatgttttccaccaaaaa

SEQ ID NO: 56034 - DNA, 3130 bp, Glycine max
  unsure (1)..(3130): unsure at all n locations
  Clone ID: PAT_MRT3847_2160C.1
ccacgcgtccgatttttagttagcacacagtaaaagatagtgttctctctctctttttcagtcttttcctcaatcaggggtcatttccttattatattatagtgacagtgtttggcctaaacgagattccccacattcttctgcaacatcaaacttgtccttcctaaaaaatctcacattctttcacctctgttgtgtctccaacaataacatatacctgttaacgtgctctactgagtggatgacggagaaatgtgagcaacgactgctctaggaatctcacctcctggcccttaagtaattagccaacatggcgctgggaaagaattcccgaggtgaggggaggaagttgtcgaactactgttcaacggtctctgtcgctgtgttcgttgcattttgtttagttggtgtatggattgtaatgtcatccattgttccaattcagaattcagtcattcaggtatctgagactgataccattaatgatgttaaaaatgtagcaagtgattccaagcaatttgaagacagatctggtgatatatcagaagaatcaacacagggagatagccagactaaaaaatctcagagtggtgatagccatccagaaaacctggatgaccaaaagggaattgaaaaagtgtctgataataccgaggaagaaaaccaggaggctgttggggacaactcagatgaaaagaatgatttggaggagggtctggggaatactattgaggagaatgatcaaatgaggaatgtcaagccgagcactgacgagaaggagaaagaatcagatggaagcttaaattcagaatccaaagaaacatcaaatgatcaaattcatgatgatgaacttaaaggatcaatggaaactttagatgaaaaagaatctgacaagagcgcaaatgataacaaattagggacagaaaagagtaagggtgaagtcacacaacaagatgagatggttggtgagactgaggaggagaaaataaagaaaaatctgcattcagagacaacacaaagtactggagggagtaacacagaaagccatgaaaacaatccagctttaaaagaagtttctattactggtaccccatcagaaactttgattgaaactagcactgaaaatggaacatggtcaactcaagctgcagagtcacagcatgagaaggaatcacagaagtcttcggtttctattgacagcagaacatatgactggaaactttgtaatacaactactggatcagagtacattccttgccttgacaattggcaagcaattagaaagcttcagagcataaggcactatgaacatcgtgagaggcactgtcctgatgaagctaccacttgtcttgtttctctgcctgagggttatagaagcccaattaggtggcccaaaagcagggaaatgatatggtacaacaatgctccacacacaaaacttgtcgtagataagggtcatcaaaactgggtcaaagttactggtaaataccttacttttccaggtggtggaactcagtttaaacatggtgctcttcattacattgaattcattcagaaatctcttcccaaaattgcatgggggaagagaagtcgtgtgatattggatgtntggtgtggggtagccagctttggaggctatctgtttgaaaaagacgttctgaccatgtcatttgctccaaaagatgtacacgaggcacaagtgcaatttgcactggaacggggaattcctgccacattaggtgtcatgggcactgtaagattaccctaccccggttctgtctttgatcttctccactgtgctcgttgtagagtcccttggcacgtagaaggtggcaagctgctcttggagcttaatcgtgtattacgccctggaggttactttgtatggtctgctactccagtgtaccaaaaggatccagaagatgttgagatttggaaagcaatgggtgaaattacaaagtcaatgtgctgggatctggtggtaattgcaaaggacaaattgaatggagtggcagcagcaatatatagaaaaccaactgacaatgagtgctataacaacagaataaaacatgagccaccaatgtgcagcgaatctgatgatccaaatacagcctggaatgtatcactacaggcttgtatgcacaaagtgcccgtagatgcatcagagcgtggatcaatctggcctgagcaatggccactgaggttggagaaaccaccttactggatagactctcaggctggtgtttatggaagagctgcatcagtggaattcactgctgattacaagcattggaaaaatgttatttcccactcgtatttgaatggaatgggtatcaattggtcttcagtaagaaatgtcatggacatgaaagctgtctatggaggctttgctgcagcactcagagccctgaaagtgaatgtttgggtaatgaatgtggttccaattgattctccagacacactgccaataatatatgagcgtggattattcggtatttatcatgattggtgtgaatcattgaatacttaccctagatcatatgatcttctgcatgccgactctatattctcaacacttaaggaaaagtgcaacatactggcagtgattgcagaagttgataggatcctgagaccagaaggatatttggtcataagagacaatgttgaaactattggcgagatagagagcatggctaaatctctacactgggatattcagttgacatattccaaaaatggggagggattcctttgcattcagaagacattctggcgtccaacaaaggttgaaacagttgcatcagccattgcatgattaggagacttcagcttcaccatctcaacaaggctggcacactcctttgttttggcagaatacgtcttcttttacttctatggttgtattactagtattaaagagtgacacatttacttctctatgtaatatctatttattatttattattatttaatgtaaattcgtgctttattattcatctaacacccctcttactttatgttattttgttgattcaattaaaaaaccaaaaaaacaggggggggggggcgcggcgttacccctctgggggccccaccaaagactctaaaaaaaaagaaacccccccccccc

SEQ ID NO: 56035 - DNA, 603 bp, Glycine max
  unsure (1)..(603): unsure at all n locations
  Clone ID: PAT_MRT3847_21610C.1
ccacgcgtccgcggcgacacattagaggagtgcacgtgtggtgctcgggccgagaccggctaatggcggtaatgtaaaaattactaaaagaaaacaaaaattaattaatgtaaaacatggaattatttaattatttttgcacagtttgggaagtgcccaaaaagaagaggtgaaggagcgtttggcagagcagagcgagagggatgggtcttctatgctactacttcttctcttcccactctgtagtgtagcccatggtggtacggtccttttggttcaccatcttcacctcttttaacttccaagccttcttgctgttttccatcattattctctgatctcccttctcaattattttncttcaacccacccacccacccattttcttcaactctttgtcaggcttttttttactactgccactgattttgtagtagtttgtttcaagtagtcgtagtcgtagttgtagtggtccgcactgtttggtctttgattggtctagattcttttttggggtcttcattgtttgcttgatttaacccccccttttggagctcccagtaccaagtgaaagaagctcgattatatgttcatgatgggagg

SEQ ID NO: 56036 - DNA, 126 bp, Glycine max
  Clone ID: PAT_MRT3847_21611C.1
tcgcccattttttcgaccagcgttcggtattatactattatatttggaaaaccctgaggtttgataagtgggaaggaattacagggactaacaacgaggatgcaaaagataaattacagaatcgat

SEQ ID NO: 56037 - DNA, 538 bp, Glycine max
  Clone ID: PAT_MRT3847_21612C.1
gacacacatagtagctattatactctctagagtaattgcggaatctgctagaattttctaataatggcgaaagacgttgagcaggtcacagagcaaggtgaatactccgcgaaggactaccatgaccctcctccggcaccgttgatcgacccagatgagctcacaaagtggtccttgtacagagccgccatagctgagttcatagcaacactcctttttctttacatcaccgtgttgaccattattggctacaagagacagagtgacaccaaaatccccggtaacaccgaatgtgacggcgttggcattttgggcatcgcttgggccttcggtggcatgatctttatccttgtttactgcactgccggaatctctggtgcgttcaccataattatagtttttttcacaaatcgcacaccgaacataatatttttatatacacacacacataaattgaaggacaaaagttaatggtttatgaaaatttgggtatatttaataatttacagggggacacatcaaccctgccgtgacattc

SEQ ID NO: 56038 - DNA, 187 bp, Glycine max
  Clone ID: PAT_MRT3847_21613C.1
agatgtcagaacactacataacgacacatctaataacattccacatagcggtatttgggacatagtgcatcaccttcatacttacattcattatcccatgtttaaactaaacaaatatatattattccactaatcattatacctttcctctataatactacatctaattctatttctcactatattt

SEQ ID NO: 56039 - DNA, 2350 bp, Glycine max
  Clone ID: PAT_MRT3847_21614C.1
cccacgcgtccgggctgcgagaagacgacagaagggggagaacattgagaaaaaaaaaaataaggagcacaaggttgcagtgtagggtaaggcgcagcatgggaccatgcaagcgaaatcaagctaatagggcggcaaaaaaatacgctaatcatgtcatccttcccacataggcacatacgtacaaaaccttgacaaattaattattaattccactcattacagcactcttccttaaataccatcatctttcttcacaccacacaccacacaccacacacatagtagctattatactctctagagtaattgcggaatctgctagaattttctaataatggcgaaagacgttgagcaggtcacagagcaaggtgaatactccgcgaaggactaccatgaccctcctccggcaccgttgatcgacccagatgagctcacaaagtggtccttgtacagagccgccatagctgagttcatagcaacactcctttttctttacatcaccgtgttgaccattattggctacaagagacagagtgacaccaaaatccccggtaacaccgaatgtgacggcgttggcattttgggcatcgcttgggccttcggtggcatgatcttcatccttgtttactgcactgccggaatctctgggggacacatcaaccctgcggtgacattcgggttgttccttggacgcaaggtgtctttggtgagggcgttgttgtacatgatagcacagtgtgccggtgcaatctgcggtgctgggttggccaaagggttccagaaatcgttctacaacaggtacggaggtggggttaacactgtcagcgatggctacaacaaaggtaccgctttgggtgctgagatcattggtacctttgttcttgtctacaccgttttctccgccactgatcctaagaggaacgctagggactctcatgttcctgtgttagcaccacttcccattgggtttgccgtcttcatggttcacttggctacaatccctgtcactggaaccggcattaaccctgcaaggagtttcggaccagctgtgatcttcaacaacgacaaagcctgggacgaccaatggatttactgggttggaccgtttgttggagctgcggtggctgcaatctaccatcaatacattcttagaggttctgcaatcaaagctcttggatccttcaggagcaacgcttaattaaaaaaaaaaaaaagtcaagtttctccactacctaaattatgatgatttggtcctgtgtcacccaaaacaagaacagtgtttcagttcaagtctgtctacaggtccctctcttttggcttttctgcttacccgtgggtttgggggaaaagccaaataccgtgggctcttgaatttgtagataagaatgcttttatgtcaagggtgtatttgtatcccttttgtttttaatttcttttttcttccaagtatttatcatcatgtgttcacttttatataatgtggaggatcattagccaagttttctttttgcctgtttcattcgaaaatgatgtatattcatcatcatcatgcttccgcacaaaaatttatcactctataactttcgatctacttctgcataaaatttatcactcgttgcttcagttcaaaaaaaaaaaaaaagattgaacaaaacttttatacttttatacattacacacaagcgattgcccctcctttaacattttaccaaggacaacttaattggttgagttgatgaaacaacaaaaacttttcctagttaggcgagacttatagagggataatcagcaacctccattccaaatgcctgtgtagcctccgatgaactaaacagaatacttctgacatttttcattctactttcttcatttcttgtagtgtaggtaggtgaacagagtaacttctgaattcagagaagatgatgacttccgaattgaattccatgagtagccatgtggcgagtcatctttatcaaaacttcaaacctgagaaaatcctatagcatcacatcttctaactgtaatttccaacactttgggtccaattcagcctgaaactctttatctctccattcaaacacacagccacgtgattctacatgtctgataagtagctgaggtaacagaggtcttagtgaaagatgaagcttcacttttgttagccctccacatgctaataaggctgcagccagtcctcctggaaccaagccttgcaggtgaagcccagtaaacctttgaaggcagctgatattagcaagtgacagaagccccacatctgtaactgagctatatgacaaatttatctgtcttagattttgggagaaatgagctagtgcaatcatcccac

SEQ ID NO: 56040 - DNA, 422 bp, Glycine max
  unsure (1)..(422): unsure at all n locations
  Clone ID: PAT_MRT3847_21615C.1
gaactgcggtagcccacatttctcggttcctccactttatattattgtttcaaaatatttaattctattattgacagtgtcttttctctctagtgtaatatcattgaagaatagttttaattgaacatgtttgatgctaaatctgcttaaattatttgccccctcaagtcatcatttggttacttttctttgttttggttgccaatgcttacttttatctttcttaatattcaggccaaatacgtatgtgttgatggagatggaacagttcctatagaatcggcaaaggtttgttaatttccgtatacacgagttttcttggtattgtgtcaatgaagtagcattagtgttggtagtaatgattgggttaaagcccaaaatgtattttgattaaacctaaatgcangctgatggtctcaatg

SEQ ID NO: 56041 - DNA, 213 bp, Glycine max
  unsure (1)..(213): unsure at all n locations
  Clone ID: PAT_MRT3847_21616C.1
gggnactagccctctcttttcatcatcgcttcaattaacacttcctttcgttgtgctcctctgattattttggtggttgatggcgtgggcgaataatcgaggtgactcaaacactgcatcgtttatgagtacgttggtggtggtgttctacgccgatcctcatcctgtcctccctttcttttcctttttttatctatccctccttttctcttc

SEQ ID NO: 56042 - DNA, 2190 bp, Glycine max
  Clone ID: PAT_MRT3847_21617C.1
cccacgcgtccgaaagtgctaatttatatgtagagcagccgtggcatgttgtctctcctacatgtatgaaaaacaatacaagaatgccaaaaattgaggcttcactgaataatactgatttacattttactcctaagaagaaagatcaggaggaattctatttttcagatagtcattttatggattgtgatatttccaatttcttggtctctgaacaaggtaaaatgacatcatctgatctagaatcacatttgatgggagcagagaaaactgggccttggtggcgcactgcgggaaaagatgagttggcttccttagttgctcggaagtcacttgagcatattgggaattgtgatctccctcatccccagactaagcatgttagtccgagacccccctacccgaagggtgttgaccatcatgataagactccaccatctttgaaccgtaaaactgagactggttcttcctatgcagatggttatacaactgggatatccacttctgactgttcatttcaggattcaagcaagcattccagttccagccacagcaaagactctagctcaagcaccgaaggttgccaaataaattccgagaatggtagcatgtctgagttgttgaaagctttgtgtcactctcaaacaagagcaagagaggctgagaaagcagcgcagcgagcttacagcgagaaggagcacatcctgagtctcttttttcgacaggcttcacaactctttgcttacaagcagtggctccacatgctgcagcttgagaacctgtgtctgcaactcagaaacaaaaaccagtcatttctaaatctctttccagcatccttaccctgggacccatgcaggggaatgctgcttaagaaaagtaatagcaaagctaggaagaggaggaatagtaacaaaagatgtgtgattgcaaagtgcgttgttgctgccgtgggattaggcctcgccggtgccggtttgcttcttggttggacaatgggatggatgtttccttccttataaaggacattgactaacatcaattgcgggcttctgctatgcttttctggaatttgagttctgttgtgctgataagattcatacaagtggatatatgatgttatccacggtttccgttgccatcatttgtaaatattcctcataaatttgagaccatttgttgtatatatttaagaacatagtgcagaaagatccactaaataggaaaaggcttagttgttgtagtgcagaaggaatacgtttggtagatatgtatattgtttgctttaaatatcaaaatgtacttagctacttgaaatatgtacaaggccatatgtagtcctttattatttttttgtgtcactctcaaacaagagcaagagaggctgagaaagcagcgcagcgagcttacagcgagaaggagcacatcctgagtctcttttttcgacaggcttcacaactctttgcttacaagcagtggctccacatgttgcagctcgagaacctgtgtctgcaactcagaaacaaaaaccagtcatttccaaatctctttccagcatccttaccctgggacccatgcaggggaaggctgcttaagaaaagtcatagcaaagctaggaagaggaagaatagtaacagaagatgtgtgattacaaagtgtgctgttgcttttgctgtgggattaggcctcgctggtgctggtttgcttcttggttggacaatgggatggatgtttcctcccttataaaggacattgactaacatcaattgcaggcttctgctatgcttttctggaatttgagttctgttgttgtgctgataagattgacacgagtggatatatgatgttaaacatggtttccgttgccatcatttgtaaatactcctcatacatttgagaccattagttgtatatatttaacatagtgtagaaagatccacctataggaaaaaggtttagttgttgttgtagtgcagaaggaatacgtttggtagatttgtatatattttttgctttaaatatcaaattgtacttagctacttgaactacttgaaatatgtacaaggccatatgtagtcctttattaatttttctttgatctgagagtagtctctgccttctcttaaaaacttgaacttggccatctcttacaaatactaatagggtacttaaagtttgcccatgctatcatgc

SEQ ID NO: 56043 - DNA, 311 bp, Glycine max
  Clone ID: PAT_MRT3847_21618C.1
gggttttaaattaaaatattttctagtacacacccaaaatttctacaaaaagacccctggcggggaatctagcatcgaccgagatcataagtcaacagataattctagcgccagcggatcattaagctttaaagggaattatgaagcagcagtagcacactcctcaccggggaacttttaatacctgcccaaagcgccatgtaacttatgacagaacgtaggggcaaactagatacaatgagtgggatagctcggcacatgaattcacttaccactagacctcctggaaggcctatgcacagtacaggaac

SEQ ID NO: 56044 - DNA, 799 bp, Glycine max
  Clone ID: PAT_MRT3847_21619C.1
cccgcgtccgcttaacattctggataagtaattcattgctccattttcctgtctgatttataaatcataaattgaataaatcaagtcatgtcattgccaaacacagtcttattaatttatagaataataatcccaatgaatattttttagcaccacttttcctttcacacccgcgaccatggtattctagttaacctcagtaaaaggagaaaccaactccagttcaaacgagttttgatagatacacaagattggttttaatagcaagcttatcgcattaggaaaaaaaaataccgtagttgcaacaacttactatatctgctaacatatttattctaaacactaaatgcatgtttagattaaagcttgtaaatttaagtttgagttaaatttaagttagtaaattgagtttgcaaaaataacttagtgtactacgaaattgagtagttttcagacaaaattttagttgcacatagttttgaggataaccaaactatgtttagcattcaaaagtactttttgaacagttaaccaaacatgtcctaaatcattatacattaacaaattcctttattaaaaaaagtttaaatatgatttataatgttcatagtattaagttctggattattagtttttaaaacatttgatctataaggttagttttatcaagcggcaagtcaatcgtgtcgttcacatctttgcaagagcacctcgtttctatgctaattactgcattttttttattttaacctgtatgtatgatcttattttgaatgaaatgcaataagttatttctagt

SEQ ID NO: 56045 - DNA, 296 bp, Glycine max
  Clone ID: PAT_MRT3847_2161C.1
ctcacgcgatcgtgtgcacctaacagctttagtagcatcaatcccaccgccgcaaagcgatatctaatattttagaataagaaatgatgacggggggatatacattctgaataaaaaataacaggggggaacatgttgagggaaaccaacccatgcagagtaattcttctactgacctgaactatatgggacgacactcgaccataccggatagtaggactatggaaggtgaacctattgctgggagtacttatcttgagatcatggggatgcttagacagatcgtgaaagctgaa

SEQ ID NO: 56046 - DNA, 2340 bp, Glycine max
  Clone ID: PAT_MRT3847_21620C.1
actagtaaggggcaggcatctctataattcatatcattcaatatatactggtgattggagaagatataatgcattgagaacttaaatcaaaaccttaatgaccaaaactccaaactagaataaaggttaaacatttaacaaaaatacaaattgtaaaattctcagcaaacaatacttaatttttccttgatgccatctactaataagcaaacataaatcctagaatgcatcatcagttctcaaagagatgttcgatcaggcagcaaccacaatccgcccagcaacttggtcaagatcccttcgaccactagaagtgattttcctacctccttttgtatcaatctcaacaatgctcatgttttgcaactgttgcagaatgtgtctggcaattgcaccgctgctcttgcagaaatgtgggggacggcttccatttcttttgcttccaccatagatcctctggaaagcaccaacaccaagaccacctctcaaatagatctttcttgccattgaggcagccctaatgtagtaccagtcaggatcatatggagccaactccttaaattttgctgtttttacaatatcggtccactcaggaagctccatcttgccggaacgcttgaggtgggaagcataagccttcacgaaatcgtgaggcgaaacatccttcacggtcctcgcagttgccattgatgaatcaaagagaaaactagttatcttggacaattgaggcagccctaacataataccagtcaggatcatatggagccaattccttaaattttgctgtttttacaatatcagtccactcaggaagctccatcttgccggaacgcttgagatgggaggcgtaagccttcacgaaatcgtgaggcgaaacatccttcacggtcctcgcggttgccattgatgaatcaaagagaaaagtggttatctcagaaactcaatttctctctgcgtaggccaagctgacattgctgttcctgacattgactgggatatttccgtggagagttcacaaattgattgggacattggaactgtagaagaaacggaggataatggtaatggattgggtccatatgaaatcattaatgcctctgatatcggatctgatccaacaatatcaaaccaagaaataggatcacatgcagatatatcttgggatattagtgtggatactcctcaggttgatgtcattgatgatgataatgccccaactgtagtgctggagaatcagacttctcttccagattccctatctcaattgacaggaaacaaggaagaacggagccagcttttagatacggagtatagaaataagattcttgatgatctgtatgagatgaaatcctttttaaatcaacggttggctgaattgaggaatgaggaaactttgtccctgcaacatcaagtccaggcagttgcaccctttgtactacagcagtatgctgctgatgctatagaaacaatgcaaaatgatatttctttggcaatttcattgctgacaaataggaagacaagggatctgattatgattcttaactccaaaagatttctagacagactagtcaattcattagaggaaaagaaacagcatgaagtcaagttgaaagagggattgaaggacttggctgctaaacgtatggaactgcaaaattctttatcttcatcatggtcaaagcaagatgtggctgtggcaaaaacaaaagagctgaaaaaactatgtgagagtacactttcatccatgtttgatggaagaccagttaatataattggagagatcaatgctattttgactagtggcattggagcatgaggaagagaaatttcctcgatgatgatcaagcctttaggtggtggatagtagcggctggccaaaatagctgaagataaatttgtttagttcttattttttacattacctgttcatttctgacaaagaacagtgctttgacaatgccaagggtacatgcgctgataattctcactgaatgaagtaacttttggtacttggtcattcaaaaaaaaaaaaaaaaaaaaaaaaaaagaaggggcggccgcgagggagcaactctttgtcgttctcgttgttaaccttggagtaaagcaagaaaacgggggccccggcttcgagcgcaattcttcccccccccgccctccgggtcttgctttgcgcaccccgccccttgcttgtccctcccgtgctttttctatttttccaaaattacccctaacaaacttacggattcgtaattcataaacttgtgaatttgtaatccacaagcttaaggattggcaatccgtatgtatgtgcggattacaaatcttttttcaaaaaaa

SEQ ID NO: 56047 - DNA, 688 bp, Glycine max
  Clone ID: PAT_MRT3847_21621C.1
ttccaaactgcaataaaggttaaacatttaacaaaaaacaaattgtaatattctcagcaaacaatacttaatttttccttgataccatctactgataagcaaacataaatcctagaatatgcatcatcagttctcaaaaagatgttcaatcaggcagcaaccacaattcgcccagcaacttgatcaagatcccttcgaccactagatgtgattttcctacctccttttgtatcaatctcaacaatgctcatgttttgcaattgttgcagaatgtgtcttgcaatagccccactgctcttgcagaaatgtgggggacggcttccatttctcttgcttccaccatagatcctctggaaagccccaacaccaagaccgcctctcaaataaatctttcttgccattgaggcagccctaacataataccagtcaggatcatatggagccaattccttaaattttgctgtttttacaatatcagtccactcaggaagctccatcttgccggaacgcttgagatgggaggcgtaagccttcacgaaatcgtgaggcgaaacatccttcacggtcctcgcggttgccattgatgaatcaaagagaaaagtggttatctcagaaactcaatttctctctgcgtaggcccccttctgtcgtcttctcgcagccgtcggacgcgtgggcggacgcgggg

SEQ ID NO: 56048 - DNA, 462 bp, Glycine max
  Clone ID: PAT_MRT3847_21622C.1
agttacttgcgtgctacgctaactttactaccatgtggcgatttgcgctacttgatgttggaatttattcgcattcaaaggaagcgttatatagaagctacaactacaggagcatttgaatcgggttcgtggaacaaacagcgtcgtactattcgggattctgttctagacttcactaggtggaaactggacagtggattacggaccgcacgctttttacttcaccaacctaaaccgaccacgtaagttattttcttctttttttttgtaccgaatgagtcataaacctgttattaaccatgattgatgcgaagctctagttgtttccaattggcattgctctttttttggtcgaagaaagatccatcttggggaggacagaaaaaaaaagaaggtaaattatgcagaaactctgttatgttgatatgaacctacatttggtatatgtctttctcaccggct

SEQ ID NO: 56049 - DNA, 420 bp, Glycine max
  Clone ID: PAT_MRT3847_21623C.1
gggatccaggggtatcctcgggtgggaaaaccaacaaggacacaacagcagaatgaccaagtaccaaaagttacttcattcagtgagaattatcagcgcatgtacccttggcattgtcaaagcactgtttgtcagaaatgaacaggtaatataaaaaataagaactaaaagaaatttatcttaagcttttttggcagccactatcctccgatgatgatcaagcctttaggtggatagtggctgccaaaatagcttaaggcttgatcatcatcggaggaaatttctcttcctcatgctccaagtccactagtcaaaatagcattgatctctccaattatattaactgggctcccatcaaacatggatgaaagtgtactctcacatagttttttcagctctttggtttttgccacagccgca

SEQ ID NO: 56050 - DNA, 1024 bp, Glycine max
  Clone ID: PAT_MRT3847_21624C.1
gtcccactcactctcacttcacaatctcgcaactaaacacgcactctgcattcattgaattatctcaattctagaacttcaccatcacctttgtcccaatccccaatcctcctatttaatttggtgtccctaaatcaccatgccaacttcactttccaaattccatgcttcaattcaaaattaacaaaaattaaaacacacccatcatcacttttcaacactgattcttcaaattcttggatctgactctgctctccacagttaccaaagctacgttctttggtgctaagttcaagatccaatggcggttgctacaagaggagctagaggtggatctagttttcgaagcttgttctcgttccggatcttcatttctgccatgttttctcttctcttcgttgccaccctttcggtcctccttaccaccaacccctccacatcgaacgatgaccctgatcttcccaccactggtaatgcatacgtgcatagaacctttttggcattgaaatctgaccctcttaagacccgagtagatttgatacaccaacaagctaaagatcacatagcactagtgaatgcctatggtgcttacgctaggaagctcaagcttgacatttccaagcaattgaagatgtttgatgagttggcacacaatttttcggatattgcgtcgaagacaacctataagacatcattgtttgagtccgatggtccaattgacgaggatgtgctgaggcagtttgagaaagaggttaaggatagagtgaagattgcacggatgatcattgttgaggcgaaagagaattatgataatcagttgaagatccagaagttgaaggacacaatatttgcagttcatgagtcacttgcgaaggcgaagaagaatggggcgttggcgagcttgatttcggccagatcgattcccaagagcttgcattgtttggcgatgaggctgatgggtgagaagatttcaaatcctgagaagtatagagacgaggagccgaagctggagtttgaagatccc

SEQ ID NO: 56051 - DNA, 279 bp, Glycine max
  Clone ID: PAT_MRT3847_21625C.1
cttaactgagatcgcaagcggaccaccttggatttctttattaaaatctgcctgcgaaccatgactttattactacctggaaccgtatgatcacatagaatgttgacatatgaaacaatgttactggcatgctgaacatggttccaccatgcgatagccaaacatacgagctgaaataggagttcaggtgatggacagctgctgatgacttgcatcgactagattaacgctaatgcaggtctgcatgatagctagaaatgtcaccacgcgagtactgag

SEQ ID NO: 56052 - DNA, 388 bp, Glycine max
  Clone ID: PAT_MRT3847_21626C.1
tttttgtgatatgcaaattgataattggggggggaattaataaaatgatgtacatctccagtctcattatattgaatactatatccccactacaatgctgtaattcagtcaatggaaagttcctacttacaactcaatataacatatatgaaagaaaatatatcaggaaaaaaaaacggaatcaatgagttactgatgcagaaaacttgctttcctgcccaacttttacatcctatagcctaggagggctattttaagatccctttcgcgaatggtcatctaactaaagttctataaaattcaaaatattcatcaaataaaaaaactagttgtaatgcaaaagagttgttaccgcaagccactataattgaatcatgccaccatttgc

SEQ ID NO: 56053 - DNA, 322 bp, Glycine max
  Clone ID: PAT_MRT3847_21627C.1
ttccactttttctttttggaggaaaatcgaaaaaaaaggatccgtgaatgatgccttttttcccagatactgactttaatactaaaacagcaaaaattaatgaggctcgttaattactatgtgccggaattgtgcatatcgataaaggtcgactatattcaatgaggcaaatcctcggctatgaatataattggagtcctgatattctgttggtttgctactaatgacgttggcaattaaaaacattaaaggaaagcatcaacctcttttttatatcctacaaatcaaacacgaagacaaacacaaaagtcaggccgggagt

SEQ ID NO: 56054 - DNA, 302 bp, Glycine max
  Clone ID: PAT_MRT3847_21628C.1
cgttcggcggctgggagaagacaccggaggggggccgaaaccccgaaaggctaattcctttgggggggggttttccatcccaaccggaccctattattatcattccccctttcggtttcttggtcctctttcaagttcagggaggaaaccaaaaccgaaaccccccttgtttggttggcgggcgggcgtggaattgaccaccgatttggttgggcttccttggttgattcccgatccggaccttttaacctatttggagccattcgggttccgcagttctcggagctggcttttcctgcaat

SEQ ID NO: 56055 - DNA, 276 bp, Glycine max
  unsure (1)..(276): unsure at all n locations
  Clone ID: PAT_MRT3847_21629C.1
ctcgagnnccgcatatttanntatttatttnnattcaagtctatgtctcttgagccgccattttatacctannaaataaaacgtttagttagatgaacctcttaagaggcttgtccatgancttttcatgnttgaggtatgaaaaactgggttttcgaccaatattttcttggtgaatgacctcggtgagggagggaggatgtgggggccaaaaagagncttcgcatntgnaccatatttatnatttaatttaattcannagtctatttgctttga

SEQ ID NO: 56056 - DNA, 184 bp, Glycine max
  Clone ID: PAT_MRT3847_2162C.1
catagagaaagcgcggtttcagctaaaattttctaataaacggatgggacttacaggaggatacatagcaaggattatggtaagttaataattaccgatacccacaatagaaaccttattcagacggatatcagctcgctaggtgctcctgatgcaaaggcgagatagtggtgacaacatcatc

SEQ ID NO: 56057 - DNA, 871 bp, Glycine max
  Clone ID: PAT_MRT3847_21630C.1
ccggtccggattcccgggtcgacccacgcgtccggacagaggacgagccctaactaacataacctctgtctccgaaaatgagtggtcacataacgaggaggaacagtgcccctcacaaacgccctccctcgttatccaagaagctccaaaacggaagccttagcgaacctcccagcaaggcttcttctccgccacctcaagagtttgatgggggagaaagaacagttaagaagcttcggttgtcgaaagccctcactatatctgaggtcacgacggtttctgaagcgtgccggagaatggccactcggcgtgtcgatgctgttttgttgactgattccaatgctttgctctctggaatcatgactgacaaggacattgctactagagttatagcggagggtttgcggcccgagcagacgatggtgtcaaaagtaatgactcggagtcctatatttgtgacatctgacatgctagctttagaagctcttcagaagatggtccaaggtaaattcaggcacctccctgttgtggaaaatggtgaagtgattgccatactggatatcaccagatgtctttatgatgccataactaggatggagagggctgctgagcagggcagtgccattgctgctgcagttgaaggggtggagcgccaccggggtagcaatgtatctgctagtgctttgatagaagcattgagggaacgcatgttcaagccttccctgtcaactctaatgggtgaaaatacaaaggttgctattgcatcacctgcggatcctgtctatgtagcagcaaggaagatgcgggacttgcgtgttaattcagctgttattgtgtccttgtcgggaaccaagattcagggtatactcac

SEQ ID NO: 56058 - DNA, 403 bp, Glycine max
  Clone ID: PAT_MRT3847_21631C.1
tgttgaccgtcctgttcttttgctagtgaccgctttcgtgactgctctgctggatgcctctttgttcgctggatctgccgctcgcagccttgctgcactccaaggcatactttgtcgatgggctgttgtaagatggctatacaacccaacactctacattcccctcggccccatcctgtgcttaatgccctctgctatgcgcgggagggcttgcgacctcgtccgcggccagaggattgcttttccaacgccacaggcacttaggaaaggaactgtgggtacttcactgggcccttgcccaaagaacattggctggacttcacccccctgacacctgcacgtcaccgcgcgcactcatctaaatgaactcggtccaatggctgaagaacctgctcggacaccc

SEQ ID NO: 56059 - DNA, 442 bp, Glycine max
  Clone ID: PAT_MRT3847_21632C.1
tcctcgtttttttttttttttttttttttttggggttttttttttttttttttgccccaaaaacccctcaagaaggaattaccccacccattgaaggaagattttggccccattttaaggaagctaaagagaaaggggaaaaccccaatttgatctttcggccttgaagagggcgccaagaatgtcaactttatttttcacccaaatggaaagggaaaaccccaactaaattttttcccatgattgaaagggaaatgaacccccaaaagggccccctcggtgataattttttcagggtttgccggggggataagcatgatcattaaaggggggggggagcttaaaaggaagcttcttggccttcttaagaagaatagggggtcgaaactttgaatgggctttaaggaaacccccccaaatgtaagccaggggaatggggggg

SEQ ID NO: 56060 - DNA, 950 bp, Glycine max
  Clone ID: PAT_MRT3847_21633C.1
tgaaagcccagttttgagagggtaatatttgagaattgagggaaccttgttagaacttagaagggacattttttgggcaaaggtggttaataatgttgataaggatagaggtaagttaatccatccaaagggtgagggagttaacaggaagagacaggacaaaggctgggaacaggcagagcacgaatggagctatcaacagaaaatggagaagtgagaatgagaggagagaaagagagagagatctgttagggctacgctcatgcactgcctcttccctggctctgtctctttcctattccaactccacttccctctccatttctgtaatctgttatgttcaaatgaacattttatctgctaagcaattagatttgctctaggtgttactgctttatttgacgcaatagccctattagattggctctgattgctgcagctctgtttgattatgcaaaattgtttcagttccatacatccacagttgcccggctgtgagcaatttttgtctgtttattttaagttcaaaagcacattgagcggggtagttcattgagatctttagctttctggcaacggtgtgtgaagcaagaattatcaaccaaggttcctgcaagctattacattgacgaccattgtagtataaatcccattattttaaaagatacgtgggagtggatttttgtaacgtgacattttagattccaatgcacataaaatttatgtatataaagatggacactgaaatcaaatcaggcatttcatttagtcctttgtactgtatactagtagtatgttgctggccatcatttgttgaaaacttaaaatgttagaaatagtaaaagggtgacaaattgtaataatgtatttatcaaacatttaatcagctcgtttgaattcacgatttggagatgtatgagatgaactaattaatttttttttcttatgca

SEQ ID NO: 56061 - DNA, 508 bp, Glycine max
  Clone ID: PAT_MRT3847_21634C.1
acgcgcgtactgcgagaagacgacagaagggggctcaagagtgatctgaaagcccagttttgagagggtaatatttgagaattgagggaaccttgttagaacttagaagggacattttctgggcaaaggtggttaataatgttgataaggattgaggatacagattttgccacacttcaatatgcggttcagaagccttctgacaacggtgtgtgaagcaagaattatcaaccaaggttcctgcaagctatgtgacattttagattccaatgcacataaaatttatgtatataaagatggacactgaaatcaaatcaggcatttcatttagtcctttgtactgtatactagtagtatgttgctggccatcatttgttgaaaacttaaaatgttagaaatagttaaagggtgacaaattgtaataatgtatttatctattaattaaaaaaaaataaaaataaaataaaaaaaaaaaaaagggcggtcggcctttttttttttttttttt

SEQ ID NO: 56062 - DNA, 1000 bp, Glycine max
  Clone ID: PAT_MRT3847_21635C.1
tgaaaacccagttttgagagggtaatatttgagaattgagggaaccttgttagaagggacattttctgggcaaaggtggttaataatgttgattaggattgaggtaagttaatccatccaaagggtgagggagttaacaggaagagacaggacaaaggctgggaacaggcagggcacgaatggagctatcaacagaaaatggtgaagtgagaatgaaaggagagagagagagagagatctgttgtggctacgctcatgcactgcctcttccctggctctgtctctttcctattccaactccatttccctctctatttatttatttatttgttatttatggaatgtgcttctctaatctgttatccaaatgtgttaaagggttcaaatgaacattttatctgctacgcaattagatttgctctaggtgttgctgctctatttgacgcaatgtttttttaaatcttacaacagccctattagattggctctgattgcttcagctctgcttgaccatgcacaattgtctccgcagttgtgtcactgattattttatgtctgtttaatttaaggttaataattgcttctgtcatgtgaaactcattccacaagcacgattctagtcacaatataacttttatgatggacaggatacagattttgccacacttcaatatgcggttcagaagccttctgacaacggtgtgtgaagcaagaattatcaaccaaggttcctgcaagctatgtgacattttagattccaatgcacataaaatttatgtatataaagatggacactgaaatcaaatcaggcatttcatttagtcctttgtactgtatactagtagtatgttgctggccatcatttgttgaaaacttaaaatgttagaaatagtaaaagggtgacaaattgtaataatgtatttatcaaacatttaatcagctcgtttgaattcacgatttgatgtggtatgagatgaactaattaatttttttttctaaa

SEQ ID NO: 56063 - DNA, 632 bp, Glycine max
  Clone ID: PAT_MRT3847_21636C.1
ccatctattctatatgttacctatgacatagtccaatcaattagctttagcatatgacaccattagagcgtagacaatgggatagaaagcgtgtgataataggatatgaaaagacagcgataaactcaacacacctaaataaccctgacattgagcccataatactgccctacacccaggaaatgcgtgcacaggacatcaccaacacttgagcaaagcgcagagtggccagcgcgatctggggggggggcttggcatccttgtgggaaacagaaacagacgcactcgacagcccatggatgcacgacggaatgacaggccaaacccaatcaatcattgagcaaaaaaaatggagcaaaggacttactattaaaagaaaccatttggtgtgatgggctgcataataacagcaatcggactcattgtatagaacgctctatcactgaactcttaccacataccgaggacagcatcatgtgcaacagcaagtgcaatatgaattataggtgtgcccaaaacatcttatgctgcaccggctggctacacggcattttacgaatatatggataacattttgtagactcattaaaaaagaaataagatatgagcctcacatatctagtgagctcttg

SEQ ID NO: 56064 - DNA, 653 bp, Glycine max
  Clone ID: PAT_MRT3847_21637C.1
gtaatctaaacaagggtgaaatccacatgaaagaacatgaatggaataatgcagtccatccacaaaatcccaaaactcacaaggcataattctatcacacatgatccacctcaaagttttttttttcaagcctaattaccacttccacaattgcaacaatggttcacatcaagcatgaaacatctcaactaaaaaaaatacatctctcaagttatacaagttagaaatcctttgaaaaatatgagaaaatgcataaattcaataaaaacatttgcaaacagcaattgcaaaatctttatttttttatgtatgtaaaaatagtaaaacaacaaaacaaaacaaatacaacaaaacaaaaaatagaacaacatgcaaatacagaaaaaaaaagacagaagagaatacaattaaacataaacaaaaaatagatacatatacaaaaactgaaacaaaatacagaaatagaaataagaacaaaaatagtaaaagcagaaaatagaaaatagatttgggtttttttctaaaccctcccccacacttgaaatgcacattatccttcaatgtgaggcatgtaatgaaatgcaaactatcataccctaattttcgttcgggaccatcccgttgtttgggatgcgaacccttcgtttgaccac

SEQ ID NO: 56065 - DNA, 1429 bp, Glycine max
  unsure (1)..(1429): unsure at all n locations
  Clone ID: PAT_MRT3847_21638C.1
cacccactcactgcaccactcctcgctgccagcattgcgtattatcaatggcgaccaccgagccggagcaccgccgcgacgaaaacgacgacgacagcgtgacggcggaggatgaggacaccggagcgcaggtcgctccgatcgtgaagctcgaagaggtcgccgtcaccaccggcgaggaggacgaggatcccatccttgacctgaaggcgaagctgtatcggtttgacaaggaggggaaccagtggaaggagcgtggcggcgggaacgttaagctgctgaaacataaggtcaccgggaaggtgagactagtgatgcgccaatccaagacgctcaagatctgcgcaaatcatctcgttcatcacagtttgacggtacaggagcattctgggaatgagaaatcgtgtgtgtggcatgcttctgattttgcagatggggaattgaaggatgagctgttctgtattaggtttccctctgttgagaactgtaaggccttcatgacaactatgcaagaagtggcagaatcacaaggagaaggggaggaaaacaaagatgcttcggctactgccgatctcctcgagaaactaactgttggtgaagacaaatcagacgagaaagagccggaaaaggtccagatcaccaagaaactaactgttggcgaggataaatcggaggacgaagagccggaaatggccacaaacaccaatgagaaaggtgagcatgatgtagaagcctgaggatcataagatgaatcagctccaccagcatagaatttaatgtggctggtgaatgatttgttctctcataggttgctgatatgcttaaaagattggtaacctagattggaacctcaggatatagaatggttggcatgcagtatggaaatgtgatggactgtgtatctgttgagtactgtttttgttctggtttgcaagtatggttggatggttttgtgattgtgggttttcatctttctcatgtttccttcaattgagttgtttttgtacttttaaaaaaagtttttttttttttttggttttttacgacaattatacatttaggatatgtgctatggttttgttgtgccttttcatattattttttaaaaaataatcggatgccttaaaaaaaaaaaaaaaaaaaaaaaaaaaaaaaaaaaaaaaaaaaaaaaaaaaaaaaaaaaaaaaaaaaaaaaaaaaaaaaaaaaaaaaaaaaaaaaaaaaangggggggccccccaaaaaaaaaccccccccccccgaaaaaaaattccaaacgggaccttgaagggaaccaatttttcctaaaaggaagtcaaaaaaaacttggggaaaaaaagggaaaaactttttcccggggaaaaattgtatcccgtaaaaaatccaaaaaaaaaaaaaacccgaaacaaaaaagtgaaaacccgggggccc

SEQ ID NO: 56066 - DNA, 804 bp, Glycine max
  unsure (1)..(804): unsure at all n locations
  Clone ID: PAT_MRT3847_21639C.1
gagcaaaattttaaccttcaagggtgtgtttagattatagttgcatccaactaaacccgcgttaaattcaatgcacaaatcacatagcttttccgtttgtgcattggaatgtgtaattttttcattcaacgtgaatagaacgcctatcgaatacacactctaagacttgtatacataattttaaaactatgttgattttgatgccatgaaaatcgaattaaatgaagtctggattcttgatttatgaaccagaaaggaaaggaacctctgctagagttggtagggagatgttgagtttatggagagctaaataggcaacgataccagcagcataacctgcaaaagcaaagccactaatctttcgtaagtaccaaaagaagtccaccttttccatccccatgaacgcaactccagcagctgagccaataattaacatggatccaccagtaccagcacaaaatgcaatcaattgccagaactcagaatcctgagggaaagaagtgacatcatacattcccattgtggcagcaaccaatggaacattgtctattactgcagatatgagtccaatagtactggcaatcagttcactacttggcacatgtgcatcaaggtagtttgctatttcccgaagaatcccagctgcctccaggctgctaacggataatagaattcccaggaagaatagtactccttggngtgtctatccttgagagagcttgtggtacttttagcttctacctttcagattcaccgtaatggatagcatctgtaaggatccaaagcacacagagttccagcagc

SEQ ID NO: 56067 - DNA, 476 bp, Glycine max
  Clone ID: PAT_MRT3847_2163C.1
catccagccaaacttccatattatatttcaaacctgacatcactatgggagatatatagttaacaattggggaggagcatctaaaacacaactcctcagcaatcactagtcacaacatatgtggtcatatacagtatactccttaattacttcacttgtaattatacatgtacatacacacaattttgctttaaatatggagaatttaattaattagtgggtcagcaatgatctatgtcattgcctgaaatggactgaggaaggccttccaacaagcaaaatactgggggaatggttagtgtctcaaagtttccataggcactccagcagaaaggatcaagcactatgtctccttgatcaggaagaagctcaatatctgagagggtcaagttggtgcatggcacagaatcactgcaagcaaaacgcattggtggatgccttatgtcatatgttccctttatgtttgcgtaaactat

SEQ ID NO: 56068 - DNA, 512 bp, Glycine max
  unsure (1)..(512): unsure at all n locations
  Clone ID: PAT_MRT3847_21640C.1
gcacgaggatcacacctcacgttgttgagtggcacgctttcttcttcaattcatcatccattaacttcaatttaaaaccaattagtagttgtttcaagacaattgcttgcatattgggtaaactatttattgcttcattaacgatctcttgctttggttccaatattaaccggctagtcacgacacccaaaaatttgatctatgaaaatttaattatcatactttgtatttttttttcttaacactccggttcatacgggaaaatgaactctgattaatctggagttcagccgagaagtaagtaaagtctgacaaagaatcattttcgtcaaggattgaatttgagcactacccgaacgattcaattttaatttcagcacactaatcacttgtatcnnntcacttgatttatcatactttacatattttttttttcaaagtaagatagtgatgggaaccaaaagaaaagaaaaaggtcactttcattagtatgacccctaatttagtataga

SEQ ID NO: 56069 - DNA, 333 bp, Glycine max
  Clone ID: PAT_MRT3847_21641C.1
ggctcgagccgaacgcatcaattgggggagtgctatgattcactgtctgctgtggacatcctaccttgaatgggctttttaaatacacgttcgctacgtgcaactagtccctggactatcatggaatacactgttacccagacattgatccaaggctcgaccaggattataaaggaagcatctgtgaggacgtctttcgatgaaggacacgtggagtacccttctgacatactattgactacttcttgcatgactgcgtgtcctaatggatgcgatgcgtctataacgtcgaatggagacggtgacgagaagcaacaccgagctaactttggt

SEQ ID NO: 56070 - DNA, 234 bp, Glycine max
  Clone ID: PAT_MRT3847_21642C.1
acgtaagctcggatattcggctcgaggcgaaaacattacaaaagcttcataacagaggcaagggcatgcacaaagcgcagcctttgtgcagacatagcctacgatccctgtcacgaacacgaacaccaagcaccagcgcagagcagcaccaaaagacaacacacacacagccagctcgtgagagagccagcccgcctgaaacctgacaacaagggtcacacccggacaagcgac

SEQ ID NO: 56071 - DNA, 313 bp, Glycine max
  Clone ID: PAT_MRT3847_21643C.1
cgaggatgtcgacgtttgcggcctggacattgtgtacttgcaggattcctatgaagatttctctcagggcttctatttcgaccgctttgtggtggatctggaatgtgagatgcacttgtaccctgaatagatcagagagaagtgctatgtctacgagctttctctgaatatgcgaaaggaaagtggtgggtgtgcactattctactacatcaatgagccatgtgaagatgtgtgtgtttctaccccagacggacctcacagtgctatgttcctgcagggagaacttgaacctgtcgccgaaaaagatcttcac

SEQ ID NO: 56072 - DNA, 376 bp, Glycine max
  Clone ID: PAT_MRT3847_21644C.1
ggttaaactggagattactacgttttttgctggcgggcaagatgttttgtcgcagagaagcatgaggactttttcttaaatgttgacgcattgggcatgacgttcggaagatggaaacgaaaccccatccctggggcgggaaatgtagtggttcatgcatccagcgaatcaaatttgttcaagggttacgcctgaggggcaacgaccattgtcttctcggaacctttaaccactggctctgcggtaggaagaggcacttccctgtatgtgtctgtgagccaaccatttttgagtgcacaatctctagaagctggagagggaggaatccctcgactctgcagaggtcaagcaagatgaggctgccaaactgagtgat

SEQ ID NO: 56073 - DNA, 207 bp, Glycine max
  Clone ID: PAT_MRT3847_21645C.1
tacgctgcgagaagacgacagaaggggtgtgacacaagctaaagataaggacacgagttgctgaagattccctcatgccttgttcgcaatttttgttatgacaacctaggatttatttatcaattccattacttttattctctgaatatagtgcatgtacagctggccaatgattggcagccatattcctcagctgtattatgaatg

SEQ ID NO: 56074 - DNA, 325 bp, Glycine max
  Clone ID: PAT_MRT3847_21646C.1
agacaaaaggtaataggtttagaattttgctgcctaacgcaaataatttaaataactatgcctgaacatttaactctgcatgcataactatcagtttctgccattgtattgacgctagattgcatagaagagatacaaaacacctgctagtatttaatttttgtggtgtacaccaaccccatagtctgagacgaggcaattaaaatgggggcgttgaaaaattgctcttccttgcgaaacgaacatcttctagaccggaagatgctgctgacgaccgcgggcctgcacatatattaatactctcctagacctagcttaattcaaa

SEQ ID NO: 56075 - DNA, 425 bp, Glycine max
  Clone ID: PAT_MRT3847_21647C.1
tggctcgtgctattgtagtttcttgagttcactgtagatagatggatcatatatgcttgtgttcttgctttgctttttctgaatttgcatgcaaaaaatgatttcatcaactgaataggacagagtgtaatttggcactggtttttgtttttgagttattctgttaaattaaattctgtttttgtggttggaggttgtattttttttttctgtggttcaaatcagctagaattcttcctcactactactatctcctttagcaggaatatggcactaatctaagtttgatgacttaatgtacatgtgcttcttgaatagattgatcaactgccaaactcttttaagaataatttcagatggcttgtttcaaatcctagtgtactttattttatttattaatttaccctttatgcttttccgataag

SEQ ID NO: 56076 - DNA, 2086 bp, Glycine max
  unsure (1)..(2086): unsure at all n locations
  Clone ID: PAT_MRT3847_21648C.1
ccacgcgtccgaattccttcacttcccactctatacaaagacccaggtacatcactttctattacccttttctaatgtatcaatcctttctcatcaaagggtattgcgagcgagactacgtgggagcatgattgctttcatgatttgatcacaacgctatcctgcgtttggtttcgttactgggtatactcgatgaattcgtgtaaattcgcatgaactctttagtcaagaaaaatttacatactactgagaacatggacttagaaggaagtgaaaaggattcagtggttactcagattagcattggcggatttggcagtgaggtcaaagcaagtgatctcgtgaattacttggaggataaaattggacttgtgtacaggtgtaggttgaagacttcttggacccctccagagtcatatccagaatttaatatcattgatactgcaaatattagaagaacggataactataagaaggtggagccccatgcctttgtgcattntgcatctccggaatctgtgactgcagccctgaatgcttcaggttgttgtgatctatttttgaagaatcaacccttanaggtcagctgtgggcctgaaaatccatacttnnctgaccaaaggaggagaactacaactcctaggaaaatctcattccaccaagtaagaggagctggatacctatggagtatgcccctcaagaaagcaaacttctgacacgtcaagtgatgacccgagacatcatagaattttttgtcagaaacatggtaaatgaacatttgggtgcaatctgcaatgcacatgtggtacatgctgattccagtgactatggtgccttggatgaaaaatgcatacacttggccgagctagcagccactgctgtcgattttccaaagaccgggaagcttgtcactatgcctcctcatctgaagccaaaattgtaccctgatttcatggggaaagagcggcaccagtcttacaggtcaaataaaatcctgggtagactttaccggcgtatcaaagatgcttatgatgaagatattgatgctccctatttgaactttgtgactggcgatataccatatgataaagatcttgaagttccaggatctgctgattttattgctgatgcgtgggagcaaaaatgctcatatgatggccaattgagtgggctacttggacaatacaaagtgaaaagagaagaggaagttgttactggacagatttggtctatgccaaaatacaacagtaggaagcaaggggagcttaaagagaggctgaagcactcttacagtgccctgaaaaaagaatttaggcacacttttgagaaattgaattcagatgttggagaattaagcgaggaagaaaaaaatttgttctatgagcagaaagcttcggcctggtatcaggtgacatatcatcctgagtgggtgaaaaaatcccttgatctgcaagataaatcctcagagaaccaagaggctgatagtttgggaagtacggtgatgttgagttttccttggattgcagttgattacctagctcgcacaaagataaggcaacgacatcagagatgtggaaattttgactcaactaagccagttgattctctggcaaagtatctatctgaaaggttataataattctattgagcttgctcttggctactaggccactctgccatcctataatattacgtataatgtgtcttcactttagctgcttcgattgtaactaggtttgttcccaagccaggaaatgcctctggttttgaggcttaagactgtatctagtctagttacatttgatactgtttgaccgttttgttatagtagtcttgtgcatgcggttatatgtatgtgattgtgattaaattatgtttcttgagctttctaaacatagtttgaacaatggtgaagctatcattgaaatctttgtgtgcagcattcataagtattttgaacaatagtgaagttattattgagatctttggcttatagacacagttaaagctcttgggaatttaaaaaaaaagcaataaaaaacataaaaatacaaaaaacaaaaaaaaggtgtaaataaaaaacaat

SEQ ID NO: 56077 - DNA, 543 bp, Glycine max
  Clone ID: PAT_MRT3847_21649C.1
caattgagaaagtaagaatttagacaattaattgatgaacatctagctgaaattgaagagtatatgaacacattatggtcttaactttcccatctgttacatatatgttcctttgaagccaacgtaaagaacaagagtgacgacagacataactaccatatacctaaaggagtttaaggcaattaattttcagagagttggcctaatattaaatttcttccaaaagttaataaacaaaagatctagcttataccactctacctctttcttagtcctctttatcctcctccctcgtgcttttacattttctagttctagctacttagggcaaagaactatattgctgcggcacatcaccccaagcatggacaccaccaattgaatgatttcatgcatgaggaagagatcgaagtggaaggaaggaagggtcttgtgtctttgataggaacctgtgatccttatcaaagagggtgattgggaattagtaaaatgatgtatgaggttgggtaagtggtctttttcagatctaatggaataaagaaa

SEQ ID NO: 56078 - DNA, 143 bp, Glycine max
  Clone ID: PAT_MRT3847_2164C.1
gcctatttttatttcaacaaacattataaactttacgggtctggtcttacctgaaggggtgggcgcgattcgaccccggccgaacaaaacctatcatgaccacctcttaaacggaagcaccgttgacgaattatgtgagtgga

SEQ ID NO: 56079 - DNA, 756 bp, Glycine max
  unsure (1)..(756): unsure at all n locations
  Clone ID: PAT_MRT3847_21650C.1
gacgcacgcgtccgcaacagagtaatatgcttaagctcagggtctgaacccaagagcaagttctatagactgagcatatgtttaactgttnnatgactngtcatcttcccttcatattaaatcattttaataagtatcattatatttctgttctcttattctcatctacatatatgttaatggttcatacacttattcataaatatctacttatatcatatcttacaataaaacatgattaatgattatcagactaaattgcaaaagatataaatcatattgatgtccttacaaagaggtcaacagagtaatatgcaaaagctcagggacggaacccaagagcaagttctggagactgatcatatcattatctgtgggatgaatagtcatcttcccttcatattaaagcagttaaataagtatcaggaatttgctgttctcttaggcacagctacagctaggtaaatggttcagacaaggaggcagagaatccttcttatgtctgatcttccaagaaaacagattgatagagtagcagacaatattgcaaaagatttaaatcatattgatgtccttacaaagaggtatcaatgctggttgcagccttaatatgaccaaatcatttgaaagagcagcagctaacagggcacgtgcaataattatactgccaacaaaaggagatcggtatgaagttgacacagatgcatttctttctgttttagcccttcaaccaattccaaacatggattctgtccc

SEQ ID NO: 56080 - DNA, 129 bp, Glycine max
  Clone ID: PAT_MRT3847_21651C.1
cttcagttgtgaaggttgtcagatgggggcggtctgtatatgcaaatatcagaattatcagttcagttacagtaaatgtggcgtcagtgataatgtgtgtgatctgctgggttcataatgatgagtctg

SEQ ID NO: 56081 - DNA, 339 bp, Glycine max
  Clone ID: PAT_MRT3847_21652C.1
acgaggcctcaagctatctaaatctggaattgcttgatctcagtggatccagcatcagtgacagtggcattagcatgatttgcaatgtgttctctgaaacattgacaaggctccttctcgctctttgccccaatgtgacttcaagtggcattcaatttgctacggctcaattgccacatcttgaacttatggactgtggcatgaccatatgtgaacctaattcccaccatccaactgctgatgaaagtaaccgcaaattacagaaaacatttgctactaatctacaccttacaaaccaaaagctaataatcaaacatagttgtttaaagaaacttaatt

SEQ ID NO: 56082 - DNA, 289 bp, Glycine max
  Clone ID: PAT_MRT3847_21653C.1
cgcccaccaatccaaatcttacgctggctctgctctttttgcttctctacttctccttccacttactccctctcttcctcgcacttgattcttcttctggttctggtatggatgctgctgcaagtcaaagtctctatccattgcaccgttgcaaaactgttcacctggttaggcatgcgcaaggagttcataatgtagcacgagagaaaaaccacgacgcatacaattcttatgagtttgttgacgcacacctaacctctctcggctgggaacaggttaataatctgcg

SEQ ID NO: 56083 - DNA, 161 bp, Glycine max
  Clone ID: PAT_MRT3847_21654C.1
gacgaatacgacgccaggtacaaggagctcgaaaaggtcgtccagccgatcttcaccaagctgtaccaagaaaaccccggggccggcgctggcgctggcgctggtcaaggatttcccggtggcggattcgacatgaacgacttgtaaaaagttatcttttt

SEQ ID NO: 56084 - DNA, 337 bp, Glycine max
  Clone ID: PAT_MRT3847_21655C.1
aaaaaaagatgcgtattaatatgcattggtggcaacagcactaccgtggcagctaccgcggctaggccatgcatgcgcagcttccgccgcatcagaggccccgattgcggcattctgacaggctacgtcgcgttgagcaccgacatattgaccgagctatgcttcgctctcttcgacgacaaccctgcttactttatcctcatgctcgccctcatgcctttagccgttagcctctgcagaatgtgtttactccgcgagattcctgccgtcgacaccaacgaccacgaacagtctacttatgtctcggttgttaacgcggttgccgtagtcgtcagcg

SEQ ID NO: 56085 - DNA, 434 bp, Glycine max
  Clone ID: PAT_MRT3847_21656C.1
tctcacgcgtacggaatggagaagagatgacatcgattgcaggaaccagtgacgaaaaggtttacaacaagctaataaaaggacttgatacatgggttgctacattgagtggcatggaagggaccatggatgagaaactaacttgtgacaaaatttttgacaaacgtaagactagctgcttcactattcttcccatggaggttaatcttgaggttcgaaagaaggtgagaaacattgtgaggatcattatcaagcaaaggtgcaaggttagatgtaaagtaggaatcaagccatactccatggaatggactggattggtcaataaagtactgagtatggtgagcgagaacctgggtagcgactatgcttggtttgacggacaggttaccaaacaagatgtgagcaagatggctgaaatgttaaatagtgtttga

SEQ ID NO: 56086 - DNA, 249 bp, Glycine max
  Clone ID: PAT_MRT3847_21657C.1
ccgcgctcgcccttttttttttttatcactaacaagaaaaggttgtacgggtttgtagataatacgaataagacgggatgaccttcacgaccgtaggattatggtgaagagacaaacataattacatatcttaagtcctggtatttatgccaactaggcactatacattaaacatgttcaaatatttttacgagctactgtacctaaatgtttacatatatacatggatcttttcatcaaaacttatga

SEQ ID NO: 56087 - DNA, 404 bp, Glycine max
  Clone ID: PAT_MRT3847_21658C.1
aaaacaaaaaaaaacccccttgtttaattccttgttttgggggccccaattttaaaacctgacttgttccaggggtttcccggggaaaaaaaaagcaaaaaaaaaaaattgtttttccccccacccccctgggggtttttaacatttttaaaaaatttggttatgtttttttttccccccccccaatttcccttttttttggggtttggaacccccccttggcccatttcttatttggttcccctcccaacccgaaaagttccgaggggggggaatccatgatcattttttttttcccccataagtttttcccccgaaaaaaacccctttttcgggggggcccttttggtcctttttttaaaggccccccttttggggaaggggaaagagaccccccttttttt

SEQ ID NO: 56088 - DNA, 119 bp, Glycine max
  unsure (1)..(119): unsure at all n locations
  Clone ID: PAT_MRT3847_21659C.1
ctgatcatcacaagcattattanntcggctntaccaaggtgnnngtngcngcaaacncnacacaccatntggttgannagcattgctgagatgatngtggatatgtgtatatacttgtg

SEQ ID NO: 56089 - DNA, 235 bp, Glycine max
  Clone ID: PAT_MRT3847_2165C.1
ggacagtatctcgaacaagattgtctagaaaagaggatagtcgtggatgaaatccttcactcacaaccaaagttcgaatccccgtccgaagaggtgcctatatttagtgcccggcagagcttcgaaaaagattgcccccacaggaagatactagtggagaaccaaataaactgggatgaaaacccagttgaggaggttgaaaaaggtggaagcccctatctccattgtagaagtc

SEQ ID NO: 56090 - DNA, 234 bp, Glycine max
  Clone ID: PAT_MRT3847_21660C.1
tctcattttcaggtacccatttcgcatatccttatcaatcattcaataaatcaatcatgctagattttctttcccttccggacggtcattttcatccctctcaaaccctctatctttctcttatcctataatcttctacccaaattaacactaattacttaatcataaatttcttcacttttaacctttttcatcaaatcccaattcttcaaaatcccacctttttcttttttt

SEQ ID NO: 56091 - DNA, 158 bp, Glycine max
  Clone ID: PAT_MRT3847_21661C.1
tttctttttttcttttttaccaaaaagcctaaccacttttgcccccatttgtggtttttggaataggggacaaaccccaatatgcggcgcgcattgtcccataaacaccaaaaccttgaaaactaacaggaaccaaatttgtccgcccttaggaattt

SEQ ID NO: 56092 - DNA, 378 bp, Glycine max
  Clone ID: PAT_MRT3847_21662C.1
gtatgcgattttggaggcttgttgaatatatagcaaatacaaccgcttacgattgatagtaacccactttataggggataggctaaacaaaacggctcgctaataaatcaggtattagaagccttaattacaaaggcatctatacattcaaacgtaacggtcaggataggctggattcttacatttaaaggcttgggacatggctgtaaaaatctgccggaggtctgtaccatggctcaggaaatcagatcttgtccaataggtggccacctgaccatgggatgacctacaggactatttagttttttcaattctcgggctatatggacgctttatacaatcaatggttgccaattgtgtttcctacttctcaacatg

SEQ ID NO: 56093 - DNA, 251 bp, Glycine max
  unsure (1)..(251): unsure at all n locations
  Clone ID: PAT_MRT3847_21663C.1
gtgagtgatcggtgttcanttgatctcatcataatcgtcagcgtcaattgaagaagatgccgatcagaaacatcgccgtcggaaggcctgaagaggcgagttacnccgacacgttgaaggcggctttggctgagttcatctcaaccttcatcttcgtgttcgcnggctcaggctccggcatngaataangnaanntcaccgacaacggcgctgcnacccctgcnggcctcatctccgcctcnatcgtnnat

SEQ ID NO: 56094 - DNA, 273 bp, Glycine max
  unsure (1)..(273): unsure at all n locations
  Clone ID: PAT_MRT3847_21664C.1
aacaaacaaaaatcttagccgcagaggcagaggaggagatggagacgatgatgatgagttgcntatccgattcctanttcaattccaaaatcaanaccttctattancttggttttngtaactcccaagttgttcaattcantncccantnagggtagccgtnaacgtnaatggtcggggaaganacaaaggtttgatttgcaacgccatgttnggtctgggcgngcctganctggncggttaatgccggcntggccgccctcgttttngggc

SEQ ID NO: 56095 - DNA, 269 bp, Glycine max
  Clone ID: PAT_MRT3847_21665C.1
agagtcgccaagctgacaatgattgtattgaagacgaaggatttcgaggtaatgggttaccgcgctgggcatctcatgcacttgagttagttgagctgattttgaggcctccagaaggtggtcctccttgccttcctgatcacagtgaacaggtaatatcagctctaaacttgctaagatttattctgataatagattcaagaggacaaagatctgcaaaattgtttcggaaagagacattgcacaaggtgcactcggagtggctgacc

SEQ ID NO: 56096 - DNA, 156 bp, Glycine max
  Clone ID: PAT_MRT3847_21666C.1
ccactctttttttttacatgtaacaatctgttgcatcctgcaaattaaagagccctcaatggaaggtgctcagcgatcagctcaaatacacagacctttgacgctaatcgagtacgcttggcggatccacgcaccaatacccgtggagaaggaaat

SEQ ID NO: 56097 - DNA, 745 bp, Glycine max
  Clone ID: PAT_MRT3847_21667C.1
ggacgcacattcaacaaaacagaatttgtctgattcaagggcccaaaagagagagagaaaatggaaacaagtttggcttggctggttggtaccttcttcgctcattcagctgctacattacactacacttaacacttcctttatcaacggtcattctatagggacgctccggtaaattccactccctccttcgttccaccgtcgctatcaactgtttcacactgaactcccttgttcgttttcacaccattttgcttccactgtgcctccaaaagtctcatctttcttctttataccgaactgggtagagttcatcagtgacaatggaaactgggtcgaactcagaatcattgaacagaaacgtggcgatgagtgtgaggggtagcactgggaagaagaaacagcagggaggtgttactctagcaggcaaaaaagtggacccttttgtgccgagaagcgagcacaacccgagagagttacggtcgtgggcgaaaagaacgggttttgtgtctgattactggctggaagcagggacaagtgggagtgcaaagtttgaagctttagagaggagaagagaagggtcatctccgaagatagagatagatccggtggtgggaagagcgaggcaaaacgagatcgtaccagagtctcatggaggtgcaacgaggggtgagaatggtgctgttttggatgggagggggaggaaagagaaggagaatgagggtggtgtgaggcaagggtgttt

SEQ ID NO: 56098 - DNA, 323 bp, Glycine max
  Clone ID: PAT_MRT3847_21668C.1
gtattattatgttttgtttattctatttgtttttttttagggcaaacggaaaggggccccagttccatttcaggggacccggggctataaaattttaggggaaaaaggtcccatctgaaaaaaattcaggggtcaccctaacaatacaacattgttttgggacctaaaaactttgaaccttaacaaacaggcccccccagatcagatacacattctaaccccgggtgttagacacacccctttcagagcagaaaattttcttcccccatggggctgtgccccccaatagaaaggggaaaaaaaggcccctttcaaaaagcacc

SEQ ID NO: 56099 - DNA, 678 bp, Glycine max
  Clone ID: PAT_MRT3847_21669C.1
agagatagggctgttgaaagaagaatattgcatggtggcttcggcatgggtccaggacagaagaatctgtcggacatttataatacaccatcttcacctgttgatgattgtccacaagaagctacggcagaggccttggagatgtcatttggagctggtagttatgctagaaaacttctaaaaagcatgggttggaaggagggggaagggcttggcagttctacgaagggcttggtagaacctattcaaccagttggaaacgttggtacttctggtttgggatggtctcgttgaaattagtagtggagtcacagagatatttagtgtccatgtcttgaaggaggattctagggtgaaccaccttaataggtggttcattatggaccattatttacagtactttgattaatctaagtagcacaaggttattgtacaaaaaccttgtgctactttgattaatctaagtagcacaaggttattgtacaaaaaaaaaaaaaaaaaaaacaaaaaaaaaaaaaaaaaaaaaaaaaaaaaaaaaaaaaaaaaaaaaataaacgaaaaaaaaaaagagatagtgtatatatagagaaaactatttaatgaatgcgtaaataattccttaattgtaaatatatttagaaccaataagcttaaagaaaaatatgtttaaaaaaggga

SEQ ID NO: 56100 - DNA, 279 bp, Glycine max
  Clone ID: PAT_MRT3847_2166C.1
ggttgtggctctttaaatagcatgtggaaggaggacttacaaagacgggggggttcttgtgcctctcgtgaactgaatttttaaattgtacgtggaagggaaagttctggatgctgttgatgagagattaaacatggagtttgttgttgatgaaatgacaagcttgattggtgtaaggttgtggtgtactaaccctaacaacaaggaaaggcccacctctacacaagttataaaagttcttcaacttgtagcgccattagccacgctttcacttgatat

SEQ ID NO: 56101 - DNA, 1952 bp, Glycine max
  unsure (1)..(1952): unsure at all n locations
  Clone ID: PAT_MRT3847_21670C.1
atccctcctcagtcattcgtgtctgcagcgtataatgttccttccaagtctaccactctcccttcttccctgcatccattttcacaatcccaatccactaaatatagaaaatcaaaacaccatcacactcctagagtgacatgtaatagtggaaaccaaaacaaaggagaaaaaccagatattcatatagaacaaaggaggaacattctacttggcctaggagggctttgtggtgctgctactcttaacaacaacccttttgcatttgctgcgccaatatctcctccagacctaaccacatgtggtccaccagacctacctgaaggtgcagaacccacaaattgttgccccccattttcatccaccatcatagatttcaagtttcctccttctaacaaacctttgcgtgtaagaccagctgcacatttagttgacaaaaattatctagccaaatacaaaaaagccattgacctcatgaaaaaactcccagctaacgatccacgcaatttcatgcaacaagcaaacgtgcactgcgcttattgcactggttcatatgaccaagttgggttccctggccttgagctccaagtgcacagctcttggctcttctttccctaccaccgatggttcctctatttctatgagagaattttggggagcttgatcaatgatccaacatttgcccttccattttggaactgggatgctcctaagggcatgcaacttccttccatttatgcagaccccaaatcacctctttatgaccctcttcgcaatgcgaatcaccaacctccaacacttgtggactttgacttcaatcttgacaatcctatttccaatggaagaatctccaccaacctcaccataatgtataggcaacttgtgtctaatggaaaaactcctactttgttccttggaaatccttatcgtgccggggatgcgcctgaccctggcggtggctcagtagagggcgttccacatggtccggttcatctatggacaggtgatataaatcaaccaaacattgagaacatgggggatttctattctgctgcaagagatcctattttctattctcaccattccaatgttgataggatgtggtctatatggaaaacacttggtgggaagagaagggatttcaccgactcagattggttggaatctgggctcctcttctacgatgagaataagaaccttgtgcgtgtgaaggtcaaggattgtcttgacacaagaaagctaggatatgtttaccaagatgttgaaattccatggttaaaatctaagccttcaccgcgtaggtcgagggttcaaaaggtagcactaggaccacattttaatactggtgtagcacgtgctgctgagacttcgaggaatgttcagttcccattggtgttggattcagttgtgagcatagtggtgaagaggccaaaaaagtcgaggagcaagaaggagaaggaagaggaagaggaggttcttgtgattgaaggggttgagtatgacagcaacataccagtgaaatttgatgtgcttattaatgatgaagatgataagcagattcagccagaagattcggagtatgcaggaagctttgtgactgtgcctcattcgcataagcacaaaaataagaagattatcacttgtttgaggctgggactgacagatttgttggaagaattggaagcagaagatgatgatagtgttgtggtgacgttggttccgaggtatgggaaagggcgtgtccaaattggaggcatcaagatagatcttgttgcagattaaaaaatatttatatacttcgactgtttaacctcataataatatatatatatatatatatatatatatatatatatatatatatatataatgtagtttcttggatttgtgtttgcttttatatgaaaaatgtagtttttgttatgtattttccatgaggannntaagaatgt

SEQ ID NO: 56102 - DNA, 1194 bp, Glycine max
  Clone ID: PAT_MRT3847_21671C.1
gttgagaggtttttggtctttttacttttactttttttaagcaaagaaaatacttcaaatgtttcatgtttaatgtttgatccaaaaagtcaataatggcattggcatcttcttgaagatgttttggatcctcctttttattccctttattttcattttttttaaggtagcaatggcatagagtaggtggaagttgacatgaggatgggtggccatgcgtgaaaggaacacaagaggagtcttcttggtggttatatatatatgcctattgaacttgtcatagagaagagggttgatgaggttagcagttgtaggattctagaggataaggctattttatgctacaaagcaaactaataaaaacctatggaggaaataacttcgactgttgcagtgccattcacactagagaatttaatacaaaaagagccagcagtgacaacccacatggagataactggtctcaaactcagggcaaatacatcaccacctttgatattaaatccttcaattgaaattgaaaagcacacagatattggtccacaaccccaaattaaagcgtcttcagagggaacggagaatctggttggagctggccttgtctcagaaatggttagtcaaggagacaataatggtttgtattctgaaagtctaaagcaggcaagaaaagagaatgaatcattgcaagctaaggattttcagtgtggtggcaaaattggtccttgtagggaggaatcttctgttttgaggactaattgtgaaagaaattcacctattaccatcaaggttggtgataacataattgatggaaagtccggttcgaccaagccgccacgtgctagggaacatgagagtgataatggaagtggaccagatgagtctaataagaaaacatttgctgtgccttgtgcgatgccagagaagccaacatgcttggaattgagtggtggtactagtactaattgtactaccccactttggggttgttcatcggtttgtggaaggagagaggagatggaagatgctattgctgttaagcctcatctttttcaagtcacttcaaggatggtaagggatgatcatgtgagtgaaaacacaaaatactcaccaacccatttttttggtgtctatgatgggcatgggggcattcaggttgccaattactgccgggaacatcttcattcggtgttggtt

SEQ ID NO: 56103 - DNA, 325 bp, Glycine max
  unsure (1)..(325): unsure at all n locations
  Clone ID: PAT_MRT3847_21672C.1
attgaacacgtacacgtnacagcnncnggaatttcangganncngagncagttgaacatnggcananacaacnacacggactacatccncccaattccnngaannnaacatccncatagacgcantcggggtcnntcgccttcagtacagcagccaagacgaaggnagatcgaagncctacgcgccgagatgccngtggntctggcggaatgcnttnatccggcgancattcgtnctngaggcgatctcagaggtgttnccggtcgacaagagaggggaaangccggcacgattggctggnctgcatcttatctngatnctattc

SEQ ID NO: 56104 - DNA, 368 bp, Glycine max
  unsure (1)..(368): unsure at all n locations
  Clone ID: PAT_MRT3847_21673C.1
ggaagggggacaccaaaagggannngaaagggagannnagagggggngnngnannnggagaagaagagaagaaaaagcagggggggcgcnnnnngangnngagganccgagancnaagnnnccacagaggagggggaaggnnnnggananancncaagcaccagaagnggcaagacaggananncagnacnnagaagggcgagcncggcaagaggggcnaacaancangcacccangaaaaggnggncgaagnncnnaanccncnagcncgcgaananaaancaangggcacccngaaaaaggagccagccgagnngcaggangaannagcacaagcacacacacaggnncananancngaagcaagg

SEQ ID NO: 56105 - DNA, 423 bp, Glycine max
  Clone ID: PAT_MRT3847_21674C.1
ccgggatcaggtcattgtgctactcggtgtgactaaacctttcccaatacctaaggtaagtgagtagtaggcgtctgacaatggcggtatgcgcaaagggaaggatcgtagaggagtgttgccgattggacaagtgtaacctcgacgagcatcctgctgtgctgtacatagaaccaacatggttgctaaagaaatgaatgcagagagggatagttgcagaatatgccctgacgacctccgatgtgagactgaatgtgattgtagacagactgttgtagggcgctagggcatcaaagacgtgatcagtggggattgacggataggtgctctatgtttacgatactttgagatgacggggggtgaagcagacaccattttgacctatagcgagccttataagacgcggtctgtggcctatgttct

SEQ ID NO: 56106 - DNA, 233 bp, Glycine max
  Clone ID: PAT_MRT3847_21675C.1
agctatctcgatcgaactgtccaaggtcctgtcaccaatgggcagctatcaaacttggtagcgttcagtagcatagcgatttgggaaagtatacccatcagcatcagggtgggcatcaaaggcagcattaaaattagccgcccccgcgaccccagctgctgtggcagcaagagcacagctggatgaaccgcatggagatagtactgctgtaactaacaaacccaaaccagagg

SEQ ID NO: 56107 - DNA, 892 bp, Glycine max
  unsure (1)..(892): unsure at all n locations
  Clone ID: PAT_MRT3847_21676C.1
ccacgcgtccgatcgattgattttgtcctcttcttgtctcttcctaaatacttactattgatacgcaactgaaacgcaatatgctatacgcgtcgttgtaaaaggactgacagagtcagtgtttctggttgtgtgcacttattagattcaaaccttattggcgtcgtagcagaactcaaaagttaacatccttaatctcttcaaacacggttgttcatagcatatggaaacgaggatgttgcggctttcgattcaacgagtgaggaagttgaactttctgaggcctcagatctctgctttgggaaggtcccatttgtcaactgctgctgaaccatcttccagtaagagcaatccacctagggttccaaatcttattgggggcagttttgttgactcaaaagcatcaactgtcattgatgttataaacccggcaacccaagaagttgtttcacaagttcctttgtctacgcatgaagagtttaaggcagctgtatctgcagcaaaggaagcatttccatcatggcgtaacactccaattacaacacgccaacgtgttatgttgaagcttcaagagcttatacgcagagatatggataaacttgctctgaatgtgaccactgaacaaggccctacattgtgagatgttcgacatgtctcctgatgaagagttaaacgaagctgtatcagcagcacagaaggcatttccatcatggcgtaacactccaattacaacacgccaacgtgttatgctgaagcttcaagagcttatacgcagagatatggataaactngctctgaatgtgaccacttgacacggaaagacattgaaggatgcccaaagagatgtatntcgtggtttagaagctggtgaacatgcttgtgggatggcaac

SEQ ID NO: 56108 - DNA, 441 bp, Glycine max
  Clone ID: PAT_MRT3847_21677C.1
ttttcagctgcgagaagaccacaaaaagggcggggggtggtgtgagcaaaagagcgtcacaatcccaaccctaatcagaggaagcgcagcttcaagcgagtgacagccaccagccatgggtcctatgcacagccatcgtaagggtatatcctcttctgctttgccctacaaaaggacacctcctagctggctcaagatctcttcccaagaggtccaataaaatatctacaattttgcgaataaaggtttaaccccgtctcagattgtggtcattctcagagattctcacggccttgctcacgtcaatacacgtcactggcaccaaaatccttctgatactcaaagctcacggacttactcctgagattccagttggacctgtaccatttgattaacaaggcagtttcaattaggaagcatcttgagaggaacaggaaggac

SEQ ID NO: 56109 - DNA, 367 bp, Glycine max
  Clone ID: PAT_MRT3847_21678C.1
aaaggaaaaaaattcccccaattttaatttgggaggggccaaaaaccccctccacccttttattaatttttatttttcccggaaagagagctttttttaccccatgacaccaacgtgtagtaggggccctatttacattctacatacaaaagctgtacccatgcttcttcttctagggacaggtaaacaaacatgccccggtggatcgtcatcgtcgtcggcctcgcctctttgcaaaaccccaaaaaaaaccggggccaacgggggacccaaaaaaaacaagcgtttccaagttaaaggtttttatctttctttgccctacttaacctaacttgataaaaaatcgcctgtgggggggggcccaggc

SEQ ID NO: 56110 - DNA, 832 bp, Glycine max
  Clone ID: PAT_MRT3847_21679C.1
agtgccatggggccatatagaggtgatccttcccttgggtatgctggtccatatggtggaggctatggcagaggctatgatcttggtgggtatggtggccctagtgacggttatggggcatatggtggtgttggtggtggttcctctggtagtgcctatggaagcagctatgatgccagcttaggcggtggatatggggggcctgctggaggctcattttatgggactaaagggggatacgcaggtgcaggaactggtcgataccatccttatggaagatagaagcatgtcatcgaagacttatagtctaggactaatatttctagcatcaaagcaagtttgtagtttgtttggttattcagttctttaggctacatatttttattttttaaaaaatggaaaactgttaatgatattgttaagtcccattagttattagcagcaccctctcgccagcctatagatgaccgaacaattttttagctcggccagttgaagtatgactatcggattgatgtatgagctgcaaattgtgcagatggttgtattcttagttttgttaatggctacctttgtcactactgctctttgtttatttaattctgatacacttcagactttttagatagaaattggtttatgcgtctttttggcttcacttcctctgtttttgtagaacgtgtatttttacaccttgcctagttgattcttccttaaaacacctctttagtatggactgaatgaattcaatttcctcttcaaaaaaaaaaaaaaacagaaaaaaaaaataaaaaaataaataataatctatatcttctatattaactttctt

SEQ ID NO: 56111 - DNA, 747 bp, Glycine max
  Clone ID: PAT_MRT3847_2167C.1
agcatgcaactgcctttgcaaacgacgcgcttctgaaggatgcaaagattcatattgagttgttctgtgttgaaaaggaagataaaagcttcctgaggcggttttggagtggcatagaaagcttgtttgtgaccaaggctcacaacacagttgatgcagtgactcaagaagtgcaaaagatgctctcttacaagaatgaaactgggtgggctgtcctatgcaaagggtcatctgtggtgatgagtggtcatggaaccacaatcttgaagacagtggcagagtttgagaaatggaaagagtttgtggtgaaaaaggggtttgagccctctttcaaagagcaccatgaaaggattaggcgcacccatcatcgctgcatacaccttgaaattcctaatgctgctgggaagttaccagagaccatacgatgcccagagtgtggtaggataatggagattttcatcagttataaatgcaaccacagtgataatacttcaattgcttcaaactagaacacagtgaggcctgcttgtttgatgttatggatgagagagtgtgggattaagcttcatttccggttatgagcaacttctgcctaggactaagctttttctggtaaaataaagatttctttgaacaaaaggagttctgtgtgaccttataaataaggtgtaactttttcttatgtaatctggtgttgttaatcttgaatagtgttacaatgataaaaaaaaaaaaaaaagggcggcc

SEQ ID NO: 56112 - DNA, 1488 bp, Glycine max
  Clone ID: PAT_MRT3847_21680C.1
tgggcccccggtgtatcaatctaggctttcacatctttcatcgcctcagtggttaaccaaactgtcactaacttgcttcacatccaaaggttgggagtgagaaaaattgttgtgggtggtctacaaccccttggatgtcttccttcctccacagccttatcttcattccaacaatgtaatagcacactactacttctacttctctcaggaaacatgggtatgcaattaagcgaggctcgcttgcaacgccatgagatgaattattattctccgaaaacgttgttcgtttttggggactcgtatgttgataccgggaactatagaataaatcaagctggttcgtcgtggaaaaacccttatggcgaaacttttcccggaaaaccagccggaagattctccgatggaagagttctaaccgactacattgctaagtatttgggactcaaatcaccagttccctataaatttaggaaagtgatgcagcaacatttgaaatacgggatgaattttgcatttggtggtacgggagtgtttgacacatcctccaaaaatagaatcatgcatcatagctatttctaggccttttgtttgttcaaagaaaatgtgtacaccacctctcgtctctacaactcacccgtctatgtctccgttgctggaaatgattacaatttctacttggccacaaatggctctattgagggtttcccggctttcatcgcctcagtggttaatcaaactgccaccaacttgcttcgcatcaaaagtttgggagtgaggaaaattgttgtaggtggtctacaacccctaggatgtcttccttcatccacagccacatcttcattccaacaatgtaacagcacctccaacgacctcgtagttctccacaacaacctattgaaccaagctgtgaccaagttgaaccaacaaaccaacaaggataactccaccttcatagttcttgacctttttgacactttcacgtctgtgttgaaccacccatctaccaataacattaaggaccctctcaagccttgttgcgtagggttaagtagccaagatttttgtgggaaagtggatgagaacaatgttaagcaatataaggtttgtgacagtcccaaatcagctttcttttgggataacttgcacccaactcaagcaggttgggaagctgtgtataagaagttgcaaaagacgagtgctcttcatcaaatccggtactagcttgctagctagctagagagctatgcatgcatgatagctatttctaggccttttgtttgttgttaataatgcaccgtctttccatttgttaatttatcctcaaattctgatttttttatatttattccaagggctttctcttccatgggtgcaatgtttcaaattgattgttctttcctgtgacggaaatagaaataagtttgtatgtcagcgatcatctgttttgcaattattgttagaataaaatatgaatttggttcctgtaaa

SEQ ID NO: 56113 - DNA, 1471 bp, Glycine max
  Clone ID: PAT_MRT3847_21681C.1
acggctgcgagaggtcgacagaagggggggtgggtaggatatgatattttggtccttgatcgaatcacaaggataggaatggaatcagaagaagtgatgagcgaggtgcacctgggttgcccagccggtttctccggaccctatatttcccttttctctttctctacgaatctccaattcgaccaagatggtgaccttcttctccctcgacgacgcaccgctatgttcgaagcaaacgcacaacattcatttagtgtcagaatccagcataacatcacttcgtcaattccaaatgttggtctccaggtttggagagctgaactattattatctgattttatattgcataaagcatcttcttcctctcaacttcatcaagttattgcattagaacttggcgctggaactggcttggtgggtttattacttgcacgtgttgcaaatgcagtgttcctaacagaccatgggactgaaatacttgacaactgtgcaaagaacgttcagcttaattttggattattgaattatcaagccaaaatttatgtacgtgaacttgattggttcggttgctggcctcctaaagcaaaaacaggagaggctccttccacacaaaagtattcttagacttccagagaaattgaagatgcagaaaatgcttctttgctggtggctgctgatgttatttatagtgatgagctgactgatgcatttttcagtaccttagagagattaatgtcaaggggttccacaaaggtgttatacatggcactggaaaagcgatacaacttttctctttctgaccttgatgttgttgcaaatggatattcacattttcgaagctatctcagggatgaggatgaaattgaaagcctcgagtctgtaagcatgcctaattttgtggggaagcagatggacatctctcaaattccacagtatgttggagaatatgatagaggacgcgacgttgagatttggcagatcaagtacttaggatcaaaatcatgaagcccctcagtgacccggattaaaacttgaagggtcttgcttggagcattggataaacgaattatagattttattattgaaatacattggaaaacacggcacaggtacatttataatcttataacagttttttttaatcaaaacatctaacatttaattgtttaactgataaattggatggttttttaacttctgaaaagggagaaaggaagattaggaatattggaggatttttttttggtgaatgagaatgttggaggaaattaggagagattatttggaaaataatatccatgaaaatttggtctttggtctttaattgagtcaacatcatcatgcgtgagataaaaaaattattgttgttattataattctttaattccaagtctccagaacttaaaatgtatttaatattgtgtttattaagaaagaagattagaagaaaaatatgagaagatttactaat

SEQ ID NO: 56114 - DNA, 400 bp, Glycine max
  Clone ID: PAT_MRT3847_21682C.1
cataaatgtctttatttgactagtcagatttttatttttttttttgaatggcctcttgggtttgcttctggatcctgattttggggtacacacaatgtcatacattgctttctcccttttttcttgttctggaacacgatcacatgtttttgattgaaaagtggaagcagtgttagaaaatctcatgagaaataacacggctctgaaggcagccttgggagttttctcctttttgaagcttcttgcggcggagggagacaaagagcctgagaatttgggtaaagaataacagaaattgatgttaccaaactgaaatagtaatgttttttatttttttatttttatgatatcaaaatgaaataattgttgaaaactatagtttgattccctatgtctctat

SEQ ID NO: 56115 - DNA, 375 bp, Glycine max
  Clone ID: PAT_MRT3847_21683C.1
aaaaaaacccgggcacccaccgtccactttttaccttacaccttgtttttaacatcatctccaattccctacctgcccccaataaaccttgtgctttatctactaaattataatttccctctacctttttgtctaataatccagatactatcttctatctacggtatctagcttaattaacaatcaaatacataaagaataatttttatcaccattcgctaccccattcaactaatcctgcttcttcaactattattcaatcttttcatatatctcatctacattttattatgaactaacttcttctcaatcctttacacatatttctccaataaccccattttttttctaattatataaatcatccaaaatcct

SEQ ID NO: 56116 - DNA, 209 bp, Glycine max
  Clone ID: PAT_MRT3847_21684C.1
gtcacaacagatgagaaagaacacaagcaagtttggtgggaaagtgaacgacaaagaggcgtaccccatggggggtgtatggccaagtccattatcaagcatgtttctcctaaatgcgtctctagacaccatgatccctcctcgtgttccagtcaggagcataggaccatatgtcgaccttgcatatctcaccatcacatagaagcaca

SEQ ID NO: 56117 - DNA, 479 bp, Glycine max
  Clone ID: PAT_MRT3847_21685C.1
cctaacgggtccatttcccatttttaaataatcccaaaattcggccccaccaactgggtaaaaaaccacatggaaacccccaaccgggggccaagcccggcaaaaaacaaaattgcccccaatgggtggccccttgccccccccctaaaaaaaaaaaactccggctattaaaaaaattggcggggcttctgggggaaaaagggcaccacccttttccgcataatttacaaaaacagggaccccattatgggtaattcaaaaaaaaccccccatcaaacccatcgtaaaccatggggcttaaaaaaaacgaattctcaaaaaaccaatatctacggggggggcaaaaggcccaggattgggaaaaaccccaattggcccccttttagaaaaaaaaaggatttccttcacttccgaaccccaaacaattggatgggggggcagcccccaaagattaaaagccatttcttcaaagggccccc

SEQ ID NO: 56118 - DNA, 243 bp, Glycine max
  Clone ID: PAT_MRT3847_21686C.1
cccactctttccaacataccatccatttcttaacatctatactttatatatcaccacggggtggttactcatcgaatatcacttgctttgttatactcatatctcccaattctgaacaggaccttctcatcaaatatcacctaccttacaaatccagacgatatacatgacagcttgtcaaagtctccactgtaacatgatgctagacatttccttctactctatcactggcaccacctacca

SEQ ID NO: 56119 - DNA, 449 bp, Glycine max
  Clone ID: PAT_MRT3847_21687C.1
ctcttgcagcagactctcagaaccatttgcacttctcctaattcttccactccttccaagtgggtatatgctgtcttctggaggatattacctcgaatccttcccccgccgcggggggcagtacgtggttctgctctggccctccccaaaggggtttcctgggtctggatccttgtctgggaagatgggttctgcgattttaacgaatgcgagcaaaggaagagtggtagtggttacttgaacggtagatttggagctgagttattcttcaagatgtcgcatgaggtttacaattatggagaggggtgagcgttgacattaactttacattttcttgccataagattcattatctttttctttccaaaagtagcattgcagaattcaagtgaagcaagagggacaaaataatccatcctttgatatatatatatatatatatctgcaga

SEQ ID NO: 56120 - DNA, 259 bp, Glycine max
  Clone ID: PAT_MRT3847_21688C.1
ggcagattattccctcagggctgttcgcatgaaaattaggccccttgtgacccaataggctgaagaagtgggaatgggagcactctgtcttctttgctagagaagtggagagaaaatacaaaaggtaaagcagttgagattctctacaacctaaaaaattcctaggtgctattttcttatcctttgtactgtagctaaatgtacctgagacatattagtctttgaaaaataaagttatgtaaggttttttttatcttta

SEQ ID NO: 56121 - DNA, 458 bp, Glycine max
  Clone ID: PAT_MRT3847_21689C.1
tttgtgtttttttttttttttttttttttaagaaaatacatttttgtcttttatttattttttttcttgaatttgacaaataacagctagaggcggggggaccacaatttcccatgaaaaggaggggagggcacacacaaaaaactacacagtggggggccgaaaaagatcccaaaaacgggggggaggttactcttaacaacaaagaaagtggggttcaatgtctgcccccatcatttaaaaaggggggaacaaaaaagttctgtggttttataaaaagcttaaaacactgggtgctttgacaaaaaaaaaaaaaatcccggctatgaaagggggggttaaacacaataaaaaggggaattaggtttaggggtcataactaaatcaacaaggacgtctagacacacgaaaaagaaatctaaggccccaaaaaaatatgttttgtcaacattactcct

SEQ ID NO: 56122 - DNA, 172 bp, Glycine max
  Clone ID: PAT_MRT3847_2168C.1
catcctctcggccaaaattttaaactatctcaatcccttgagggggagctgggttgctaggaaacttggaacccccaggaacccatggaacgatctaggggtcacgatggcgccacttgttgtacgaagcttcatcttcccctatgaacctgttaatggtatcagggtcttc

SEQ ID NO: 56123 - DNA, 339 bp, Glycine max
  Clone ID: PAT_MRT3847_21690C.1
tgtttcatcatataaaacatgtctggcctgaaagaacacctaccatgtcacaaaaacaaagggggaaattcctaaataaatcccagaaaactaaaaccattactcttagtgaataaggaaggaaacatgcacaaaatcttacccttcaaataataagaagccagtgggctcgcaaaaggcccttgccaagagtgttgcaaccccttttactttaacaagcaccctctcaccctcgaggggatggaccacttgccaagtgaaaccaaggccatctctggctatgagaacatatgccagaaccctcacgaacccaccatttccacccctcttgatatcaag

SEQ ID NO: 56124 - DNA, 266 bp, Glycine max
  Clone ID: PAT_MRT3847_21691C.1
atccaaaaatctctcggctgcctttataaaatcaccagaaagtaattcatattttccattcccatcctcattccaactattttgcataaaattttccttctttacaacctcatacactcattcctcctctttcttgtccccaaaaaatttcctcccttccttcccctcttcattattccaaaccataaccatcactacaccttcttcttcttcttcttcttattacatatccctcatctatcattataactacttatttaccccaa

SEQ ID NO: 56125 - DNA, 294 bp, Glycine max
  Clone ID: PAT_MRT3847_21692C.1
gctttcgttccattttttttatatcactctcagatgggcggcgcttatagatccagggccagaagattcaatgtgacactggaagcagattttcatttcaaagatctactgaaaacatggctgttcttgttggttacattgagagcaaatttggctagagcactggcttctagacagattgtggacatgactcgtatcagatttgatggactcttagctatatgatccaagattataggcactggagaagcacacacagatgttgagacggagaatgggcgcattgcttaccca

SEQ ID NO: 56126 - DNA, 331 bp, Glycine max
  Clone ID: PAT_MRT3847_21693C.1
agatgagcaaccacgtccaatcccattcccacgcccacaacctcgtcaagaagaagagcacgagcagagagaggaacaggaatggcctcgcaaggaggaaaaacgcggagaaaagggaagtgaagaggaagatgaggatgaggatgaggaacacgatgtgcgtgtattccaattgcggaggcgtcttcgttagagggaaatacgaaggctggaggaagatgaagatgacgaggacagcggagaaagcgatgattgtgtaggtattaaggtatgtaaacatgagattgagatgttgtgtgtgttcggatcgaatgggtgcgaatctatgttc

SEQ ID NO: 56127 - DNA, 703 bp, Glycine max
  Clone ID: PAT_MRT3847_21694C.1
ccacgcgtccggacctgctcttgaaccaaacactaatcttactgctactcttattttacctccctcatttgctatcatgttcatagaccttattaccagatgccatgctcctagacttgcctggcttggaataccttcaaatattctgattacaaacagattatgcagacatcgatgctacacgaccgaattgataacttatgcaaggtccaggcttacttgtcaaaggcaaatcaatcactttatagactactacccaaagcaccatattctgacttgtgaatatgaactacaaggattgggattcgagagaggtcggactgacacagcataaaggggaaacaaatggcgcatcctctcctacaaatcctgcccgctccttgaccaaacaccttagagacatttatacgaagaattcctatggtgattcaacgaacgcaattgtagacaccccatggttactttggccgcccgaacagcctgggttcgcctgagcctggacgacaggcatcatttcataagccgtattgaattctacatgacatgccttacgagtgaactgaccacccagcacgcgaatcaaccgactcgaaattgttccagcttatcttgaggactcgggttcaagtcctgcgcatgcaactgtgttgaatacttggacagaacgctttgctgaacatagtggtcctatccggctcgaaca

SEQ ID NO: 56128 - DNA, 205 bp, Glycine max
  Clone ID: PAT_MRT3847_21695C.1
atatccaaaatgatctaaccttaaggtatacatctattgcatggtatataccatcatcaagtgcctgaaacttaatcaagttcaaattagtatctgaaaccacctcagcaagatatccatcaaccaaatttgccaccattgtcatacgtgtcaatgcatcagctccagctatcaatgccccctgttcaaatatacatggagtagc

SEQ ID NO: 56129 - DNA, 1071 bp, Glycine max
  Clone ID: PAT_MRT3847_21696C.1
ggggaaagcaaagtgtataaatttatataattaaggaacatggattatttcttatatatagcgtatatcctataacaatagatgatccccaagtacatgaagtaaggaggaggaagaaaaaacaataatcctatccatacaatacaagatggaagaacaaaggaaaatgaaagattactataaatattccccggcaataaatggacaacgtacaatatatatcaccatcacatgtataacataaaaacaacacgaaatgcagccaacgatcactgaaagccagaaccaaactccaaggatacgagttcctatatatccaataagcagagtagcttcatttagggagtggtggctgaaggtggtggggagaagaaggggaaggaaggaatagtggttgggactgtggggaagtttggaagtaaagtggcagcaagtggtggaagagtgacctgtggaacagttggaatggttggaagagatgggattgtaggcaaaggtggaacattgccctgaggcagtgttggaagtgaaggcaaaggtggcaatgttggttttggcaaaggcaaatttggtgcagtacttgtttgcataagatggcgagctgctaggccaaaatccatgcatgagaaggaaatagcaatgaaaaaagccaagatgaagcagctgttggaggccatggcaaaagacttaatgaatttgctttgtgataactgataagtgatagatagtatgcaaagggacttttgatttgagcttaattgtgtgcccggcccctgtcgcgcttcgaggcagttttataggcgttgaaacgtgattacaagagatgtgacttttggatttagtttatatttttcttatatatggtagatgcttcttcatttgaagattggatgaattagccacccccccccatttttttactaatttgcagatatgagattaacttgtttacagaattgttttgaaaactaaaatgtatttgtttgtaatttactaatgatgttacataatttgtaaattcagtagaaattcccccagattatgaatttaatttgatagtgcccccccacc

SEQ ID NO: 56130 - DNA, 245 bp, Glycine max
  Clone ID: PAT_MRT3847_21697C.1
ggatactctcactcgtgcattccaacctaccctttactcttcttcctcaattccacacttcagcatggatcgttttccgatcgtccttctcttcgccaacctcaacactctcgcctccggtgcccgccatgatattctccggttaccctctgagtcatctacttttttcaaatgcacccggcggcgatgaaaatcatgagggcacgatgtgggccgtcttaactgccggtttcaatggctactgg

SEQ ID NO: 56131 - DNA, 1477 bp, Glycine max
  Clone ID: PAT_MRT3847_21698C.1
ccgaacgtaggggggagtgcgtcgcggcgcgcgtgtgtatgcggagagagaaaggaggagcacagcactacgaagagagagaaaggaggagcacagcactacacagctccgaaataggagggggagaaattttgtatgcgttggatttcgtagatctgaataaatgacaaatgtatcattcaaagaatgttcctagtgcaagtttaattggaggtaattcattaagtcatggtcagcacatagattgtggtggcagcacaatggatcctggcagtggaggaaatggtcttagcaacaactctaatctcacctcaaaacaacgtttacggtggacacatgaattgcatgaaagctatttacagaaataccgacttgcaaaatatttacctgactcctcatctgataaagggaaaaaggctgacaagaaagaaacaggggatatgctttccaatcttgatggttcatctgggatgcatattactgaagcactaaatcttcaaatggaggttcagaagcgactacatgaacaattggaggtgcagagacagctacaattacggatagaggcccagggtaaatacctgaaaaagataatcgaagaacagcagcggctcagtggcgttctttcggagactcctggctctggggttgcagccgttgctccaggggatgcatgccaagaacctgataataagactgacccgtcaacccctgaccctgaaaaggccgccaaagaccgtgctccggcaaaaagtctttcaatagaatctttttcatctcaccttgaaccgatgacaccagattctggctgccatgttggttcccctgctgaaagccctaaaggggagagatcagccaagaagcaacgagtaatcatggatggcgtgtattctaaaccagaaatggtgcttccacatcagatactggagtcaagcatgtcatcataccagcaacctaacactgtttttcttggccaagaccaatttgatccttctttgggtatatctaccaaaagtggtgaggaattggataaggttggtggtggtaatctgtgatttcctataatatgtaggttgtgttctaggactcattctatcttccttctaagcttagtttgtgttatatgtattccttaatagatgagggaacctgatcttcgtagattcccaaggttttcagttcaaatgttcaatacttgactaaacatccagcctttaattactatttagagaactaagttgaattggattaatagaaagaatcttggcatcggctatggtgattataagaagcttatggggattttacttaatctcttgattagccaaaggaattgtgcacagcatttgagtactatgtggtctggctttggggtatattctaacagatgacatgtagaaaattggcattggctgtgattgattgtaccaatcatgagacttaaatatttaatttagtatgcatcaaagtcacctcc

SEQ ID NO: 56132 - DNA, 806 bp, Glycine max
  Clone ID: PAT_MRT3847_21699C.1
attatttccacgcagggtatcactgtgtatgaagagagagaaaggaagagagaggaaggaagagcacagcactacacagctccgaaataggagggggagaaattttgtatgcgttggatttcgtagatctgaataaatgacaaatgtatcattcaaagaatgttcctagtgcaagtttaattggtggtaattcattaagtcatggtcagcacatagattgtggtggcagcacaatggatcctggcagtggaggaaatggtcttagcaacaactctaatctcacctcaaaacaacgtttacggtggacacatgaattgcatgagcgctttgttgatgctgtggctcaacttggtgggccagatcgtgccacacccaaaggcgtgctcagagttatgggtgtacaaggcttgaccatttaccatgtcaaaagtcatttacagaaataccgacttgcaaaatatttacctgactcctcatctgatgaagggaaaaaggccgacaagaaagaaacaggggatatgctttccaatcttgatggttcatctgggatgcagattactgaagcactaaagcttcaaatggaggttcagaagcgactacatgaacaattggaggtgcaaagacagctacaattacggatagaagcccagggtaaatacctgaaaaagataattgaagacaacagcggactcagtggtgttctttcggaggcacctggctttggggtttgcagcggttgttcccaggggatgcatgccaagaacctgatataagactgacccgtcaacccctgaccctgaaagctg

SEQ ID NO: 56133 - DNA, 549 bp, Glycine max
  Clone ID: PAT_MRT3847_2169C.1
accaacccttaatatattacattgtttttttgtttcaacccaaccaaaaaacttggattaaacaatattacatataacctttaattttttatttttcctttacacaaagttttttttgaaatttttaaaatttttcacatgaaacttcaaaagggatcaggggaaacaactttttaagcttagcatccaaccccagatgccaaaataataaccttaaaagttgccaaatttggggaaaatcgaaactgccccgaattttccattttttcctggttaaaagaataactccatataagggtttgccaaaagcccaccctaaagggttttcaaaagtcaaaaccttttaaatccgaaaacacaagtttttaagcatgtttttcctttcacccccaaaacactttttttaattctttgctcaaagaaatttttaggggttgggttttttaatacagaaaaacccaaaccccttgcctttgatcctttaatgatttttagccttttgaaagaagtcacaaacatgtcccatggaacatttccaactaacatcca

SEQ ID NO: 56134 - DNA, 833 bp, Glycine max
  Clone ID: PAT_MRT3847_216C.1
ggagactgtagattctgggaatgattcttaaggagcaggtggagggtttggtgggtgttaatatttgacttgtgcattccacacgctgcttccgattgaaggcatctaaggagagaaaaatgcacgatttctgcttcacgatcccctacggattgatgttagtgggtggtggactgttcgcctacataagcaaagggagcatcgcttctctcgccggaggcgccggctccggtttgcttctcatcgtcgccggctatctcagtctcaatgctttcggcaaacgaaaaaactcttacctcgctctctttctcgagaccgtttgtgcagccatactaacttgggtcatggggcagcgatatttggaaacatccaagattatgcctgctggtcttgttgctggaatcagtgctctcatgactctgttttatctctacaaattagcaactggtggcaaccatctccccaccaaggctgagtgatgatataatgatatatcatatatttgcttactataatacagatatgttggttgatctgcatgccttagatggttaagatacatcattgtactttagtgatttcaaagtatggaacaaaagatagttgttgtcgttgttgttgtggttgtctttatacacgtaggagacttgggccagtccttcatcactctctaagcagctctttttattttctactttcctttttctcttagcttagcacaccatatcactgaggttgcttaaatgcaaaactggctcttatttgttgcatacttgacaaactcgatggaaattccaattgaaatttatcacgccttgttatttgactggtcc

SEQ ID NO: 56135 - DNA, 292 bp, Glycine max
  unsure (1)..(292): unsure at all n locations
  Clone ID: PAT_MRT3847_21700C.1
ttnnngcgtnncangcacncttacntantctcgnnaattcggatcgagaanctcctacgcatcncaaaagnctnacccggtgncacnnttcatncgntccaangctttcgcgagnaganancgcgcngctnnctcnngccancatgatncgctcgnagantcaancggngcnannagtnagcgttntggnngtnnagngncgtgtcntagncagcacactggccnggncggncgtgnannnccggtccnncanagnganccntttcaacnnngnantngtatcnnccaagnt

SEQ ID NO: 56136 - DNA, 408 bp, Glycine max
  Clone ID: PAT_MRT3847_21701C.1
cccaggctgattgctgccagatggtgacacagaatagcacctcaattcaatgtgggtcaggctcagatggagacaaatttgttaaattgattattgatgatggtcatactcctaagggtcccatgctggatcctaaaatatctggactttaaaatagcacttctcaagagcacagttggaggaaccattctgcgtaatgatctatggtcgaatattggacttaggtcaatagaagagcaaggtgtagattttgcatgcgcacttagttggttaatggagacattgaaatggtggccacacatgtgtattctgttagttcagatattgtggagacccgagaaatgaatagtgcttatagggggcgcgcccagatctgatatttacaccaactgctctcaagaatgttca

SEQ ID NO: 56137 - DNA, 475 bp, Glycine max
  Clone ID: PAT_MRT3847_21702C.1
agggaaggttcctaccatcatctatgtttggtctggattgctctccattattatctctttgctttgggtgtacataaaccctccttcaggaagaacacaagattacatgaatttccaattcccttgagtttgagggtagatagatgaagttcctctgcttcatcatctatgtttggtctggattgctctccattattatctctttgctttgggtctggattactctgcttcatcatctcgtagtaatagtagtactgtgcctttgttgtgctagattgattacattcaattgtgattatatcttactttctgttatgtgtgggccacactctcaatatgtgtccgagaaaaacaagtaggtatctgttaactttttttgttaatatctcataatgactgagatattaactcaatcattgtagttatcagttcaattttactgttaacatctcaaatgactgagatgtgcccgagc

SEQ ID NO: 56138 - DNA, 378 bp, Glycine max
  Clone ID: PAT_MRT3847_21703C.1
ccacgcgtccgcttacatgtgtattcaacatacaatgagtcaataataataaaatgccaagcctgtggttggtataaaaaaaaaaaaaaaaaaaaaaaaaaaaaaaaaaaaaaaaatctggaaaaaaaaaaaattaaataaacaagcatgacgaatctaatgggtcggcctttttaaaggctccattcttacgtccgcctgcttgtgtcctcttactttttttttagtgccccctcgtttctttcctttgtccggctttttacaaccttggttttggcaaatccctgggttttcccaatttaatccctttgcgccctttcccccttttcccagttgcgatattagatagaagttccccccctttcgcctttctaaatg

SEQ ID NO: 56139 - DNA, 270 bp, Glycine max
  Clone ID: PAT_MRT3847_21704C.1
gtaagatcgtctccttgctggcagcgtccgaggctgaggtggagcagctcctgtccgagagatgcccgctcacggggcacagctgctacccagaggccctgctgcacttccggacccactgcttcaactggcactcccccacgtacgagtatgcgttgagacgtttgtacgtgctggtcaacctttgtgagaagccgtatccgcttcacaggataaaattgtccatggaccacgtgtgccttggtcactactgaagagctgcctcctgga

SEQ ID NO: 56140 - DNA, 508 bp, Glycine max
  unsure (1)..(508): unsure at all n locations
  Clone ID: PAT_MRT3847_21705C.1
angacttctgtctttattttaacgcttcttagagctccaaaagaaagcttttcaattttgacactaatttacggggtttttagcatcactagtgcaaccacttttaaccctaaaatacaaatccacaatttactcctggcggctaaattctctgatttttcataatgcgagcccactaaaacctccaaaaatatgacaatcttagtttttttcacatgattgtaacaaaggaaactgttgcaaacattgcaaatccactgaattcctaccttggcaaaacttggaaggggtaacatgaattctgagttgaaagattaaccggggatcttttgaaaaaacttatgatgggtcatcattcattcataaaataacctcaaagggaaatagagcctttattatttcctacccttgcctcctaaggcccagggtttttaaggggcattccaatcaaattttttatttcataccaaatcgtattgtcaaaacttagggtacacatcaattccta

SEQ ID NO: 56141 - DNA, 261 bp, Glycine max
  Clone ID: PAT_MRT3847_21706C.1
ctcacaggaagctcaacggcactcctaagggtgaccggcaggacagacggattggcgtgtacttggacagcagatgaaagtctctagacatttgcaacgcattcagctgagagcttccacgtctgaaccagagaaaccttactcttacgtgcgcactggacagtttacactctgtctcttcaaagcaggatatcacggagcatgttccctactggatgaggggaggcagcatgatagttctaggaaccctaggacagagaa

SEQ ID NO: 56142 - DNA, 734 bp, Glycine max
  Clone ID: PAT_MRT3847_21707C.1
gtccaaggaaagccttgggcagcagacaaggatctatcaaaagtttcaatgaacgaacaaaatctcgcatccttttgaagggttcacagaaagggtgtggaattcggcccgaggggatggttttctagcagtttatggttcctgcaaatgcattgtactggagctaccataccctttctggggacccttcaaaaggctacgagattttgttccttcattgaaacttttgatagatccttgtctgctgtccaaggaaagccttgggagttcctttggctttgtagcggatttgaatgtatcttgtgtgtccctcccatcataagagagtcttggtgaatcccaagcaaccataactcctgtattgacaaatttggagggctccaaaggcctaggagagtcaatgtatttcaagatacgacccttcttttcctctttagctacagtttttactgacaatccatgaacatctctatgcattgactctttgacaatatcatagaaatcaagaggttgatggccttggctgccttgcttcattgctgctcctgagttagagttttctggaattttcatttgattgattggtggtggctctatctgaattgttctattaaactcgttttaccacatgctagatgagcgagacgatgaagtcattgaagttcctgatgattcagtggagaattgttgattctctcttgcaaccttcacattatttgcctgcaagcatactc

SEQ ID NO: 56143 - DNA, 361 bp, Glycine max
  Clone ID: PAT_MRT3847_21708C.1
ggctcgagctcgagccgcgacatatgaaggcagcgaagccggctgctaagaaggccatgaagatggccaagaagcctgcggccaagaagattttagtcaagaaggttctggccaagaaaccgaagaccacgaagaaaaaagtggtgaagaagtcaacggcaaagaagaccaagcctgcgaagaagtaagcgtcacattcgaatgtctactaactagctcgtgtcgtctatgagactgtcgactgcctctttattattattcttccgtttggaatctagttcactgcttcaatacatcttttcaatgttctcatttgaaaaaaaattatgctttcagaattatgtaactgataaataatagg

SEQ ID NO: 56144 - DNA, 200 bp, Glycine max
  unsure (1)..(200): unsure at all n locations
  Clone ID: PAT_MRT3847_21709C.1
atatctaagcatangtgccgtgagcagcctccatatattattctttaaaacctgagcaaagaatggaatgattcatgcctgtgagcttctcatctaccatccttcaggcttcgactagctctaaacaccgcgcatatttacaagaacacccgccctatgatatactgctaganccctccttgtacataattccattcctt

SEQ ID NO: 56145 - DNA, 359 bp, Glycine max
  unsure (1)..(359): unsure at all n locations
  Clone ID: PAT_MRT3847_2170C.1
cagtcgcacgcacncgtacgtaagcncggaattcggctcgagnaacaattccacacaacanacgacanaccngncannggaacnnnnagnnnngagcnanncncncnngagnncnaaccngncnncaacccccnnngnnannccagcagnnanngnnnnncngnncnncggcnngcnnnnnnaanncggcnnnaggnagncngnagcancacgnncnnnncnannnanngnnnnaganngtanngagatnnnannngnacacnngncaccggannnagnananagacngcgccnnnnnaacannngnnncacaannncccgcnggngagannnngtnacgatgncgagcagnnannang

SEQ ID NO: 56146 - DNA, 315 bp, Glycine max
  Clone ID: PAT_MRT3847_21710C.1
accactcatacgtgcagatgagaagaggacaccacgtggcacaactttgctcacagagccatcagcatcacgatgtcgatgaaaatgccagcattgattgttgctacagttttggtatcatatgaaggtcaaggctcacactaacagtgattcacacgccatgtgtaaatcggcttcggcggccactacatcagtgatgtggcatgtgccagttgtcggcttcgcgtaggaacaatcagcgtaatctattggaacactgttcctgcagcttgctgatagtacatatctaactacgtccgagtataccaatataga

SEQ ID NO: 56147 - DNA, 207 bp, Glycine max
  unsure (1)..(207): unsure at all n locations
  Clone ID: PAT_MRT3847_21711C.1
ncgtccttttttttttttatttaatcaaaacaccttgggttaaacggggggcgtaaacatcacaccccaaacaccaaaaaccatatattcatcacctcagaaaacactttgacaacgacatattatacactaacaccaactatacactgggcacactatgttttttagttttctacactcggaacaaaacatgcgaacaactctacc

SEQ ID NO: 56148 - DNA, 383 bp, Glycine max
  Clone ID: PAT_MRT3847_21712C.1
cggtcggcccacgcgtccgaacaagcgtatgcccacgcatccgcgcgggcagccgctgcgatctacccaatgcgaccgaaaatgttcgtctgcacctatacacgcaccgggaacagatttagcgcgtagaggcacctccattggcggcaagcaactcgatccgcaatgggaatcgatttgcatgcaggatgtaggtcaactataacgaatccatgcgcccccagatgcgattaaatctacctcaagctgtccgtaaagctgtaccatgttcatggtcagaagactgggagtaacttcaacgctgttgtctccaaacgccattgcatgagcagggtcaacaagccgtcgctgtccctctcgtgattgatccgttacacgattgg

SEQ ID NO: 56149 - DNA, 303 bp, Glycine max
  Clone ID: PAT_MRT3847_21713C.1
ggagaaagcacaaattcctttatttatttcttccttcaggggtcgggttccatattaccaataatgcagcattcaaataaccatataacacagatggcaccactgaagatttgccctcatctatcctcaggcccttgcaaacttcgcaaccaactacaggttcttccctgttgctgtaactaatataataccccccttgggtcacttgttgtttgcatgttcagccacaaaatagagtgccttaattgcctcccccctttcccaatctaaggtgtaggcgtcaatactaggtactgcacatct

SEQ ID NO: 56150 - DNA, 271 bp, Glycine max
  Clone ID: PAT_MRT3847_21714C.1
cggaaacgccagcatttttccccggaagggaagaattattcagtgtctgcctacttgcttgtgtacgaggtctgaaggcgaaagaagatcactgtctgagctggtcacagacaaacagaatcatgtggtggtgcactctaagtgtagcgggaagaacacacacctgttggaggttggactttcaaggatagcaaaacgtaaaaagatgtttgtcaagtctatggtggaattcctgttcgagctgcggtcactgtggattagagctcccact

SEQ ID NO: 56151 - DNA, 319 bp, Glycine max
  Clone ID: PAT_MRT3847_21715C.1
gttaaaccaattattttggggctttttttttattttttaccagctttttctattttttgtattaaaattttttttttttttatgaacacaccggggcccccccaaaaatttcctcccgttacccttggacaccaatattttccctaaagaggcgattgttaaagggggggggaaaaaaggggcaaaaaatttactttggtaaaataggtatgggttaaaaatttcaaaaaaaaaaaaagcccgtgccaattgggttaaagagtggggcaccccacggggagatgcactctcaatattggggggccccctttggcccctt

SEQ ID NO: 56152 - DNA, 598 bp, Glycine max
  Clone ID: PAT_MRT3847_21716C.1
cggctgcggaaagacgacagaggcgacaggaagagagggagtggcgggagttcaaaacacacatcctaagggaacagagtgattacctcgtaaagacatgggtggagctaccaactgacaaaactaccactgtggcttaatttactacttctgcttcacgcaccacctatgacatcaatggtggcatgaatcgacacgcattataatgaaagcaaaagcctgcgctaataatcgtttatcatacacgcttgcatacattctttcttgaagacttactaaacaattcgatgatctatgacggaaatcaaataattggcatatttgtttagaaaaaagagacgatggtttgatgggggtaaatcatgcatgattatgaagcacttggctttcctggcatcatatgacacactagtgggattctttggggatacatctaccatgcttaattatctccaatatgagatagacatatattgcatttactgaggacaaccaaaggtgaatccttcttcttctgagaaaaagaaaggcttgcctcgactgataatacatgatagtgctgattatgagtgagaccattatggtcgacaagtaattc

SEQ ID NO: 56153 - DNA, 267 bp, Glycine max
  Clone ID: PAT_MRT3847_21717C.1
tacggattcgtccgacgaagaagacggatgtcctcgatgcaccggaaattctggctctcacagatttctgggagcgaaattgttttccaattcgacttgaacagagggaggaaggtgacgaagactggcaaatcataacaataccttgagatgtcacaccttttcacgctcccttcatttctatccgtgctccttccgggaataggtgcctgcacttattgcagaataccgtcaaccggctaaccttgaccacagaactgcaaaacc

SEQ ID NO: 56154 - DNA, 286 bp, Glycine max
  unsure (1)..(286): unsure at all n locations
  Clone ID: PAT_MRT3847_21718C.1
gntgacgtggtgcattgaggaggcttccgcaaagagcaacgccgccgtccaccatcgagggagcttcgtncaccgtccactgtcgaggtaagngctgtgaccatgtcgnttccaccattgttgtcggcgatagggtagattgttgatctgaaagtggagatgtgagtgttacggatcaacttgattcgtaaactgctncgaagaaagtttacggatcaagttgatccgtaagcatcttccagatcaacttgatccgtatgatacttacggancaacttgatccgtg

SEQ ID NO: 56155 - DNA, 161 bp, Glycine max
  Clone ID: PAT_MRT3847_21719C.1
ccaaagcgtccgataaccaggactgctttattaatcacatgaacgctcagatcactgagtcgagcatacatactatctagcagctctgaaaccgaatccggatattgaggttcaaaaccgtgatctgcatcgacgagaacacgagagtatccttggactgt

SEQ ID NO: 56156 - DNA, 791 bp, Glycine max
  Clone ID: PAT_MRT3847_2171C.1
tttcctattttataatctctagcataattcagcatggccaaagacaagtacaggtctttcttgcatgatgaacctgataacgttcagtggagacatggtggccctcccacttatgatgctgttaacaagctttttgaagaaggaagaacaaaggagtggacagaaggatcattggaggagatagtgcaaaatgctattaagtcatgggagatggagctctcacacaagacccgtttgcaggacttcaagacaataaaccctgagaagttcaagctctttgtgaatggcagggaaggattatctggagaggatactctaagcctgggaagttataatgctttgttgcaaagttctctgcctgaagacttgaagccttacaaagcagatgaagagacttttgaatcatctcatgaagcgttcaaatcagcttttcctagagggtttgcttgggaagtgatcaaagtttatagtggaccacctgaaattgctttcaagtttaggcactggggcttctttgaaggtccttttaagggacatgcccctaccgggaagatggcccaattctatggcttgggaactgtcaaggtattacttttactatgtttctacttattttttgctgcaaaaagttcgggtgaattgggtttacaggactcacaaggataaggacaagtcttacaggcaacgttataagaagtgcttataattatctattaacgaaatcacacattggtacaccattcaactacaccaggtacattctttaagatttgagtcatattttactaaat

SEQ ID NO: 56157 - DNA, 1313 bp, Glycine max
  Clone ID: PAT_MRT3847_21720C.1
cccacgcgtccgtacggctgcgagaagacgacagaaggggaaggtagatcccaatgcttttgtagccaggcgatcaaagaattcaacattgccagatcacagcccccttccagatgctttctgtaatgtggctgatgaagatatgtgggtgaaaatgaacaatggttatattgcggaccttgattcccttcaaactactcctcccaccaaccgaaaagttcagtcattcccgacaagtgatgcaactgttggttgtacaagtgaaattgagaagtatgaacgagaggttcaagatttgaggaaacaactggaactagctaaagaaagaataaatgaactcgagcaaaagcattcagaagaagtgccatcaagcaagcaattattcgttgagacacccaaacatcaacaagaaacacgactaactcatgaattacctctgaggaaatctgaatctaagggaaacttctaagatagctttgaggaggctttgtcagtaatgcagagatttgcatcggatggcacattatcaactgcgaagatactttcaaccatgagtgaaattggagatcatctatttgcaactttggaaggtcattttgcagtgaatacgggtggtgaaaggtcttccactgggaacggtactctaatcaatgaacaacaaaaagtgttttgtgagaggattgataacataattacatcactggagttatccgaaagctcaataacagaaggacaggagtggaaacataagtgcagctgtgaacccaagggctctgatttgggaggtgaaactgcaaaggaggatttaaatgaaagatatgaaaacctagaaagggagttactactgttgaaggtcgaaagagactctttgctgcagaagttctctgaatcatcagagaaactatcaatggtttccagccaaaaggaaaatgctttgaaagatttaaatactgaagtgaacagaaggaaaaatctagaaggggaagttaagcagattgctgcagcttttgctaatcgtcagaaatcactcatttctttccatagtgatcttaaaaccaaaattgagaattggagagcccagactccaatcttggtacccaaatcttttgggtttcaggactagatatgttgtatatcttgaatgtttgagtctttggtagctcatgtattaaattaaatttattatacaattatttttattctaggcaaaactcaattgcttgggatacaagtttgtacttaattcactatttagcaaggactgatatcatagcacacctacaaaaaatatatccatttctcttctgcaacgc

SEQ ID NO: 56158 - DNA, 262 bp, Glycine max
  unsure (1)..(262): unsure at all n locations
  Clone ID: PAT_MRT3847_21721C.1
ggaaatttctgcacaaaagcttctctgggatttggtgtagagtttaatctacattttttatattagtgtttttaatatattttttaattatttcaaaatgttgttcactcaagcacagacttagaaatataatttgttttcttacttagatatgttttgttttagaagatagattcatccactctagacagaacaactatgacanacagacgaagatacacatgaatggcagagagtggtagggaggtggtggtgtagtaaa

SEQ ID NO: 56159 - DNA, 784 bp, Glycine max
  unsure (1)..(784): unsure at all n locations
  Clone ID: PAT_MRT3847_21722C.1
cggaattcccgggtcgacccacgcgtccgcggacgcgtgggtttttaagtattttattgtctcgcccaacccaccaccagttaaacaggttagcttatgaactaaagaaacaagaaaaaatgaaaataaaatataaaattaatgataaattaggaaaatatacttttatactgtaaattagaatatttgactcggaaaacaaagttttcactcttctcactcttttaatcaaacatttgtagtaatattttttcttttctctttgtttggatgttgattttgtatattactcgcacaactagccaaaatattctttctcttaatcgatattatattaaactgccacttttttttatcatatattttttttcttaattgtttatcctttcaatccatcatatttttatttatgtctctaagttaaattttaatagtatttttagaaaatggacaataattaagaatgactatttatcacaatttaattatttattataaatataaaattaatatatctattcaattcataaatatttaattattgtgaatttaattatagtatcattaatatattgaaaaatatttatattttataaattttaattatataaaaataaatatttatcatgttcaatacacaggataaaatactaactaaataaaaagatgaaaaaaattgtgattntttatctcctttttgtaatttgttagtgattggttaaatttattatatgataactaaattaataaagtccanacccaaatatanaaagaatcaataact

SEQ ID NO: 56160 - DNA, 148 bp, Glycine max
  Clone ID: PAT_MRT3847_21723C.1
tatccgggctttcttttataattcttcttaggggaaacatgaaccttcataatattcaggggttttatcataaaaataattggttcccattttaggttacatgagaccgcggaactcatgaattttggcctaataaaaagggtactgc

SEQ ID NO: 56161 - DNA, 342 bp, Glycine max
  Clone ID: PAT_MRT3847_21724C.1
attgattccaagtggctcccgccgagcttgaagcaatgttaagtgctcaacaaggcatatccgatgctgctgttgttcgcatgagagagtaatctgcacgggaaagtcaagtttcatttgatgtaatagtcaaatggctctgatatagccgacgatcatatcatgaactacatttcacaaccaggtggttttttacgagtagaatatgtaaagttttcttcacggactctattccttagacaccctcaggtacggattcgagtatcaggtattatctgcgagacttaaggaatgtttagtagtgggtatttacgtccaagtatgatacacacgaacatcgtg

SEQ ID NO: 56162 - DNA, 307 bp, Glycine max
  Clone ID: PAT_MRT3847_21725C.1
ggagcaacttagcacgatatcatcacattgcaaaggaaatacacgttacattactaagtctttgttcattacgagtagtgagcaccggctatgcctgaagaggtgcatcgtgtggccagcctgagatgctgcatgacatgtgcgcggcacatgagtgctgcactccatggcacagggccgcaatcaacgtgggggcaggtatgtcggagacacgtgtccgtgctgtagttattttccaagcagaggaaaaccgtcgcaggcctgctagaacagagtgaaatcgctgaccagcgcggcgaagaccacc

SEQ ID NO: 56163 - DNA, 390 bp, Glycine max
  Clone ID: PAT_MRT3847_21726C.1
ggaacattggccttttcttaggtatctataggaagcttcattacataaaacaaacataggccataatttgggggattttttggaaaatttttatatatgcccagtctttggaaatgaaaaaggaaaaggcttaaggggggggataaaatttgtcaccgataaaaaaaaaaaaacccctgcaaaggctgaaacaacagctttgcccgaaagattcagaggtaaaaaatttggttgaataaaaaaaattgcatatgaagcttttttttccaaaatttctacaaaacatagaaacgggttactcctataaatgggaaagctcggtattttatttggaaaaggagggctgcatggaaaagtttttaggaacaagccaccaatgggtttcaccaa

SEQ ID NO: 56164 - DNA, 694 bp, Glycine max
  unsure (1)..(694): unsure at all n locations
  Clone ID: PAT_MRT3847_21727C.1
ggccggaattcccgggtcgacccacgcgtccgctcgaaacaaaaaaacatcatcatcatcaaactcattcacatttttcactattatctcgttttctactatttcctcatgaacactaacatcctcggcgactgcaagtccggaaacagtgacatcgggtgtcccccgaatggcaccgtctcggtgatcaagaactccgtccctgccaccacaaacacctcctcggacgccacgttgggacgtcacctcgctcgaagactagtccaggtgggtgtgaaggacgttttctccgtgccaggtgactttaacctcaccctcctcgaccacctcatcgcggagccgcagttgaaaaacgttggatgctgcaacgaacttaatgctggatacgctgcggacggctacgcgcggtgcaggggcgtgggcgcgtgtgttgtcacgtttagtgtgggagggttgagtgtgataaacgcgattgcgggcgcgtacagtgagaaccttccgctgatttgtatcgttggtgggcccaacacgaacgactttggtactaacaggatcttgcatcacaccatttgggtcgccagatttcagccaagagcttaggtgcttccaaacagttacttgctatcangcttgtggtgaataacatagaagatgcacatganatgattgatcttgcgatctcaacctgtctgaa

SEQ ID NO: 56165 - DNA, 360 bp, Glycine max
  Clone ID: PAT_MRT3847_21728C.1
gggttgttccatcaacttatttctcttgataatttgaaattgtctagatttctctcgtcttcaggagacgcgaaaaaggggacccttactatacaagaaacacggacttttttgggggaaacccgcccaccttggggggggcccgggggacctaaggaaaacccaaagcaccgggggggggcaaaaaccccatgacaacggcgaacaaagcgccttatttattgacagaggcccgggcgagaaaaaccacccgggcggcccaggtctgttttgacaaaattaaagggggggggggggctgattacaagcttgtttcgtggggatagggggaacaaaaaatttttgggggggcatagaaaa

SEQ ID NO: 56166 - DNA, 562 bp, Glycine max
  Clone ID: PAT_MRT3847_21729C.1
accttcgttcatgcatatcggactcttcgcgaatggaatcggttgctctcagtcgagtaccgttaccaatgaactggtggcggttaagatgattgcgatcgctttcaacgatctcatggacactcagagtactcgtcatgagaggaagcaacataagcatctgcatcattaatatgataaagggtggagagatgtatatggaacagacttgtgcatatagtataatgatgactgcataggcgctgaactcatggatactgatctacagcgtataattcgatggaatcaaaatctgctacaagagcactgtctatacttcttgcaccaaattctacgttggcttaactatatacatggttctaacgtcagacattgagatttaaaatctagctacctgcgcgctaactgcgtacgcgacttgaagattatcgatattggtcttgcgataccaactttggagagtgacttcatgacataatatggtgtgacaagatggaacataactcgcgaattgtagtggaatcaccttgattacacctctgatattgataattggctggtg

SEQ ID NO: 56167 - DNA, 227 bp, Glycine max
  Clone ID: PAT_MRT3847_2172C.1
aaaaaggggcgcgacacacgcgtgcgcaacgcttccacccattcaatccaaacatttaaaacttaaaaattaacatcactacgcccgttttcctataatttcccgggtcagaaaacacaactcgatttagatcacctcgcaacacacctttgaacatcacagcttactccccgaccgcacaaaaggcaactggttccaacctacttctctaacaataaccttctaga

SEQ ID NO: 56168 - DNA, 745 bp, Glycine max
  unsure (1)..(745): unsure at all n locations
  Clone ID: PAT_MRT3847_21730C.1
ggttgagagtgtcctctctcttcatcccttctcttctttaccagaagattattccacctaaaaccgcacctcgccacactgctgcaccctcaccctccattattctttcttcttctctctctttnnnnnnnnnnnnnnnggggggggnngnnnnngcgnggggtnntttngnnngggggnnnnggggggggggggggggtggngngacgggggggggggggggnnncgcgattatctgagcaagcttctcctaatcggcgactcttccgtnnnaaaatcctgcttgcttctcagattcnttgttgtggatcgggacttagcagtgagacaatctcggagaatggacaccattggattgggcttgatatttcagcgtcgattcctattgattttgaatttttatatattngntgctaattctatttatttttggtaaatgtataagatgttncggnggagcgagaggttgagggtgaccttttacttggtgagcatgggtcagggtctaggaatttgtcctggagttttggatggagccattagtatatctgctgttcaggtctcaatccggaaaagattgaaaagtgcatgggagatccagacgccgataccgataatnctgttttgaaagaaaagcaagatgcccaagtactgncttttataattgctatttanttcattgtatcantgtantaatatatagatgtttaacagattantttttataattgctatatgttctggg

SEQ ID NO: 56169 - DNA, 145 bp, Glycine max
  Clone ID: PAT_MRT3847_21731C.1
ctttgcactcgtccgtggtgaatctgtttatgcagcaaatacttgatgggcattgggatgagagcatagtcacattgaataaaattggtctagcagatgaaaatgttgtccaggcagcttcgtttttgatattggagcagaagtt

SEQ ID NO: 56170 - DNA, 270 bp, Glycine max
  Clone ID: PAT_MRT3847_21732C.1
ggctgcattcaatgtagatgaagtctccacttctcaaaaaactaatatactttgagtaataaaatagaaaaagatgtattttaggaatattgaggagagagagtgtaggtggataaaatccttcttttcactactttatctagagacttcatttgcaataatattgagtagagcaggctgcattcaatgtagatgaatttttccacttttcttgcttggttttccactacttgtctgattgtcttgtcctcaaaacaagaaagtgagtaa

SEQ ID NO: 56171 - DNA, 256 bp, Glycine max
  Clone ID: PAT_MRT3847_21733C.1
ctttcttttagctctttgttaagtttctaatcctagagcttgttctggacatggtagaaccgccgaaaagttcacattgtaatgtatccttggggagccttcggacacttaatcccacagcttgagatggccaaactgcgttgcgcaacagggtcacaatctcgcgctcgtgtccatcccaagtcagctccagggtctccccgaactgtgcgcaaatctggtttcagtcgtccatttgtggaggtccatgaccaag

SEQ ID NO: 56172 - DNA, 1091 bp, Glycine max
  unsure (1)..(1091): unsure at all n locations
  Clone ID: PAT_MRT3847_21734C.1
ctgaaggatggttggatgacgagccagaggaaattgatgacccagaggcgacaaaacccgaagactgggatgatgaggaggatggtgaatgggaagccccaaagattgaaaacccgaagtgtgaggcagcccctggttgtggtgaatggaagaggccaatgaagaggaatccagcttataagggaaagtggagtgctccttacatcgataaccccaattacaagggcatatggaagcctcgcgagattccaaaccctgaatactttgaactcgagaaacctgattttaagcccattgctgctcttggcattgagatttggacaatgcaggatggcatcctatttgacaatattctgatagctaacgatgataaagttgcagaatcctatcgggagaccacatggaagcccaagtttaccattgagaaagaaaaacagaaggctgaagatgaggctgcaactggttcagatggtattgcaggcttccagaagaaggtatttgacctcttgtacaagattgcagacattcccttcctgagcgaccacaaatctaagatatacgatctcattgagaaagctgagaaacagccaaatctcactattggaattcttgtagcggttgtggttgtcttcgtgtcaattttcttcaggctcatatttggtggcaagaaacctgcaaaggtggagaagaaaccagaacgcacagaagcttccaataaccaaggtggtgcagagaatgaagaaaacaaagagaaagaggaagcatctaatgctccgcgtcggaggccaaggcgagaagattgaaatggttgaatcttttaaatggcgccctgtcaactatcatcaccacagctacagataaattttgggctttagtttcattttaggtgcactctgttttcattcgtttccttttttccctttttttttaagaaaaagaaaagattatttgcttcaggggtgtagatcttctcctgtttttggagacttgagtgtttgagctagtagttgaagttgtacaattattttttgtctttatttttctattaatggatcctgtttttaacgcagattaganaaataaagacaaaa

SEQ ID NO: 56173 - DNA, 675 bp, Glycine max
  unsure (1)..(675): unsure at all n locations
  Clone ID: PAT_MRT3847_21735C.1
cgtttaccaagagcgagatatctatttagatctctgaaaaacagagtttcatttcaattcagtcttattattagggtttgccgattgagagagaaagagaaatgggagaacgaaaaggaatcccaatggctttggggctcttggcgatgatcctcttcttcattgcttcctcttcctctcacctcgttcgcgcttccgatgacgccgacgacgcggtaattccgatactattgttgttgttgttatgttgtgatggatctctgattcgagaatgtttgtgtcctttagatcttctacgagtcgttcgacgaggattttgatggacggtggattgtatccgacaaggaggattacaatggtgtctggaagcatgccaagagtgatgggcatgatgattatggacttcttgttagtgaacaagccaggaaatatgctatagtcaaagaacttgccgagtctgtcagtcttaaggatggaacagttgttcttcagtttgagactcgccttcagaatggcctcgaatgtggtggtgcatatattaaatatcttcgaccccaggagagcggatggaaaccaaaggaatttgacaacgaatctccatattctatcatgtnttggtcctgattaagtgtggtgctacaaacaaggttcacttcattttcaagcataagaacc

SEQ ID NO: 56174 - DNA, 2593 bp, Glycine max
  Clone ID: PAT_MRT3847_21736C.1
ctcgagccgctcgagccgaatcggctcgagcccgggtgatcttatcgagaatgatcctcaagaacaggcgttgcaacaccgtaacaaaggcactcaaaaccactcacccatccctctctcctgtcaccgctaccgcatcactcgtcaagaagccgtcgtctcctgctacggatgcgccagcgttgaccaagagcgagccaaggggtatgctgatcgggagggcaaaattatctccccgtttatcgagatatctatttagatctcagaaaaacagatttcaaaattctattccgttttaggtattgtattaggcgttgcgttcgagataaagagaaatgggagaacgaaaaggaattccaattgctctggggctcttggcgatgcttctcttcttcattgcctcttcctcttcctctcacctcgtttattattagggtttgccgattcagagagaaagagaaatgggagaacgaaaaggaatcccaatggctttggggctcttggcgatgatcctcttcttcattgcttcctcttcctctcacctcgttcgcgcttccgatgacgccgacgacgcgatcttctacgagtcgttcgacgaggattttgatggacggtggattgtatccgacaaggaggattacaatggtgtctggaagcatgccaagagtgatgggcatgatgattatggacttcttgttagtgaacaagcccggaaatatgctatagtcaaagaacttgacgagtctgtcagtcttaaggatggaacagttgttcttcagtttgagactcgccttcagaatggcctcgaatgtggtggtgcatatattaaatatcttcgaccccaggagagcggatggaaaccaaaggaatttgataacgaatctccatattctatcatgtttggtcctgataagtgtggtgctacaaacaaggtgcacttcattttcaagcataagaatccaaagagtggggagtatgttgaacaccatctcaagtatcccccttctgtcccatctgacaaactaactcatgtgtacactgcaattctgaagcctgataatgaattgcaaattttgattgatgggggaggagaagaaaaaggcaaatttcttgatctgctgaggactttgagcctcctcttatcccttccaagacaatccctgatcctgatgataagaaacctgaggactgggacgagagagccaaaatcccagacccaagtgctgtgaagccagatgactagggatgaggatgcacccatggaaattttaagatgaagaagcagacgaaacctgaaggatggttggatgatgaaccagaggaaattgatgacccagaggcaacaaaaccagaagactgggatgatgaggaggatggtgaatgggaagccccaaagattgaaaacccaaagtgtgaggccgcccctggttgtggtgaatggaagaggccaacgaagaggaatccagcttataagggaaagtcggagtgctccttacatcgataaccccagttacaagggcatatggaagcctcgcgagattccaaaccctgaatactttgaactcgcaaaacctgattttgagcctattgctgctattggcattgagatttggacaatgcaagacggcatcgtatttaacaattttctgatagctacaagattataaagtagcagaatcctatgaggggactacatgaaagcccaatttcactgttgagaaagacgaactggaaggaggcaaaatcgcactattggggtttcagatggtatttcgggcttccagaaggacgaatttgacctcttgtacaagattgcagatattcccttcttgagcgagcacaaatctaagattttcgatctcattgagaaagctgaagaaacagccaaatctcacaattggaattcttgtagctgttgtggttgtcttcgtgtcaattttcttcagactcatatttggtggcaagaaacctgcaaaggtggagaagaaaccagaacgcacagaagcttccaataaccaaggtagtggagagaatgaagaaaacaaagagaaggagaaacagaaagaggaagcatctaatgctgcgcgtcggaggccaaggcgagaaacttgaaatggttgaatctttattttaaagtggcgccctgtttagtatcatcatcaccacagataaattttgggcttagtttcattttaggtgcactctgttttcagtattttcttttttcttccttttaagaaaaggaaaagattatttgcttcagggtgtgtagatcttctcctgtttttggagactcgagtgtttgagctagttgaagttgtacaattatttttctattaatggattctgtttttaacgcagattaatgcctagctacctttccataataaatcgaaaatccctatttttaagcactttttttttgaatcaactcactgttacattgccacccgtagtttgagtacacatgcgtgacgtgatccaactttaagaatacgtgggtaatatacgctgtttcccctgtgtgaatcttgccgacagaatccgtacttcactaatactttttcggaaatgctagttatgcatttacttt

SEQ ID NO: 56175 - DNA, 719 bp, Glycine max
  Clone ID: PAT_MRT3847_21737C.1
gttacatctctctctttctctctctacgctttctgcaacaaccattcacatttttcattctcagttcaatcctttatcctttgcaaacatcaacaacaacaatgggtgaaacaaaagacacccacatagtagaaatccctgtagaccaagagcatcacaataatcaccacaagaatgtgttgtgttccatgacaagcaacatgattgaggccatagaggaccaccctctaaccgaaatctccgaaagcccgggtcacctcttgctcctgaagctatggcaaagagaggaagaactctttgccaaacgcattgctcacaaggagactagaatggacaccatcaaagctgaactctttcaactctcctcattcttcttcatcttccatgccttcttcctaaccctccttttcacttcttggaccaaggcccaacaacaggcccaaccccaccatagcgtttgtcacaagtggtggcttccttccatggtgtccctttgcacctcccttgtgtttgtggttcttgtgcaagtgaaggtccataggtattggaaggtgtgggggcacttgcaaagggagaggaatgatgggagggctgtgacaaggtgcattcaggaattgaggatgaaaggggcaagctttgatctttctaaggagcctaatagtagtagtagtgtgaagaagatgaagagctctagtgttgagatcaagtggaggccactc

SEQ ID NO: 56176 - DNA, 419 bp, Glycine max
  unsure (1)..(419): unsure at all n locations
  Clone ID: PAT_MRT3847_21738C.1
cgaggtcatacagagtcatgctagttttgttttcacttttcatgttcgtcataccttcaatgcttagtaatgactcttgcggcagtggattcgttcctctgacccctattcggtgtccagggcgatctcatgcttggctacctcatcctaggctacctcatcctaggtttccacctgaaatatcagcttctagttttgaggtagcccgaccggtgccaccatcattcaacaggcctcgaaacattcactatccctagcaggagtacttctttgcagcagcagcaacatgcatgtatccatctatnctccactcagtnagcgttcacgatnatagtttaattttcataaatggcttaagcgaatgcattaaatttggtctttgattggnaaggtgtatttggatatgagagatttatgtg

SEQ ID NO: 56177 - DNA, 355 bp, Glycine max
  Clone ID: PAT_MRT3847_21739C.1
aaacaacagagaggaaggcacatggaacaatcttcagggattgtccagcaacagggaagacaaccctgcgtgcccaagatctcaactttgcgaatgaggttgcaggttcagcagatgagcaacttgtggtcctctgtgactcagtcgtgatacgatacgggcaatagttcgaccagggccataaaacatgaagtattaactaacttctgatgatatgcctggcatgcatgataacattcattatgcaggacaagtgcactatgtggatgcaatgttcacggcccttgctcacgaacatggaattggcatatacatacccatgcattacgaaagcctctgcacagtttacattcta

SEQ ID NO: 56178 - DNA, 268 bp, Glycine max
  Clone ID: PAT_MRT3847_2173C.1
ctctgatatttttctcactgtcgctccatagaacttgatagagagatggcagctggaaaatcttggtgctgtgttaaatgggttgggatcttcctgtctatgagtgcgaggaaatcaggaagcacaaaccgcttctgcgccactgctattggaggcaaagttggtgctgctgttactgttaatcccagaagactcattgtggtaactgctgctgcaccaaagaagtcatggctccctggtgttagacgtggtggcaatctcgtcgacc

SEQ ID NO: 56179 - DNA, 593 bp, Glycine max
  unsure (1)..(593): unsure at all n locations
  Clone ID: PAT_MRT3847_21740C.1
attcattttaggacagaatgtgttttaagttggtttttttannnnnnattaatgttagttcttacactttgaaaacaatgattttaattatggtatttatgaaaatcagtggaattagtttatcattttaactccggtagcttatttgacgatgtagttaatggcagtcacgtgttagtcacatgacgaccacatgttagcatgtctgagtggcagggcagccgtgtgacagtagaaactaattcctccacatttcaaaaaatcgaggattgaaattagttttttaaatacaatgattaaggtcaattttgaaaatcttttatattttattcccatgacaaaaatatgctgctgctatatttgactcnnncattatcagtggcatgtctgatgaacatatttaaaacgtgcatttttctcttaacaactaatagccctaccattacaatttagaagccacacgtccaattgccccgtttgccaaccacagcaaatttgtgctgtctcgattgtggttatatatatatataatattttatgaaaaaaagtatcttatacaaaaataaaaagattaaatttaaactatatgatta

SEQ ID NO: 56180 - DNA, 468 bp, Glycine max
  Clone ID: PAT_MRT3847_21741C.1
gaaagacccacaacatatcttcatgctcagactgaagggctagatggccagacccctgccaggaaaatacccaatactacatgggaacagcgaaccgctatgcttgccctctttatgggtgaaaggatttgaatatacttttcttaactactcattagactgtgttagctcccagtatacatgccggcctgcgtgcgtgggcttcgctgagcatctcatacccttgaagtataactgctaataggtttgatacagccaccactgagtcctctttgtagacttggggtacccgcatgcttgctggcctataattcaaaggctccctcactgggtgaattagaatactgatgcaacacttggggatttagctcagcggtaaagcgcaaggccctgcgttagataccccaccccaggggggaaagaatagaactcatgcaggcattggatattgctctacagagcgcttga

SEQ ID NO: 56181 - DNA, 592 bp, Glycine max
  Clone ID: PAT_MRT3847_21742C.1
ctcaattttccgtgtcccctctttcttttctattttttacccgctctttgctttctctctgtttgatgttgttccccccttctttttattttattttttctctagacaattttccgtgacattaattggtcttcactctgagtaacctataagtctttttacccctatataagtttcactaagtttggtaataatgcaagcttctaaatatatatgcgcatatgtgtatatgtacctttctttgtcagcagctatagttgcatggacagattgacagtcgttgtttgcggatgtagcatcatcaagattcacatgcaaatgaaggtgggtgggactatgatgcaatccaagtgctctgccaatccatcggtctttttgatgtgagaatcttgatgatgctgcatcagccataaacggctttaaaaagttgaacaagtactagttgaaccccccaataaaagagaggagataaaaaaaaagtgtgtgtaggtctacacacagctcagacttccagatactgtccatgagatcatgatgcataacaagacagacaatcctaggttatcgaacattggctatttggattttggag

SEQ ID NO: 56182 - DNA, 588 bp, Glycine max
  Clone ID: PAT_MRT3847_21743C.1
ggtttttttgtaatagtaaagattgtttacgtcgacttcagaacctattaactctccttcagattaaacccattcctttgcatgcagctatggagcaaaaacgacgactttctaatttagaaagattcagtactaatccacaaagtgttttactcgctagtgatgttgctgctcgtggattagatatatcatacgttgaccatgttatccattatcaagtaccaagaactgcagaattgtatattcatcgtagtggtcgtactgcccgaatgtccaataaaggaatatctctgcttctttgtgaacccaaagaaagttatatgtataacaaattatgcgtcgccatcaatgactctaaggatttggatacttttcctgtggacgaagtaaagctcaacaaattacgagaacgtgtaggagttgccaaacaattagatgttctgactcataggcaaaagaaaacaaaatcaagtgatgattttttccgtgaaatggcaaaaaaatgtgaaattgatcttgaagatcgtgatgatctatttctgaaggacgaaaatgcaccaaaagagggaaaaaagataaaaaatttac

SEQ ID NO: 56183 - DNA, 320 bp, Glycine max
  Clone ID: PAT_MRT3847_21744C.1
agggacgcccagctcactaagctcactacgccctgtcgtcctttttttaaaatcatgaatgacttatgcaaaagggccaggatcatgttgtgagctaatcaaatctccaaagtatttgttaattttttactacacttatcacattgtccatcacctacatcaaacccctatcacactaatatttttctaactgaggcatcagatgttgccttaactctattctcctgctggctgagaactaaaaccagcggcttttcctgtgcgagtcactctaatagtttcctctagcccacttcaaatcataccacaacctgcttttt

SEQ ID NO: 56184 - DNA, 609 bp, Glycine max
  Clone ID: PAT_MRT3847_21745C.1
tattttccataaattgtagtctatagtagcatgttagtagcactccaacaacaattaagctttctcctcttggtaggatgggcgacatggagctcttttaataatatattaaatattattgcttttggatagcattttacttttcgaatgtgacaattattgctataaaaacataattgggtcaatcctacatttcatcaacatagaattatttactaataagtattaagttctattttctggacttgcactgtatctcataagatcttgattggtttcttactgacaggtgggctggtcaggctttgtttggaactcttacaccagatataattgttctcacactcctatacagcatagctggagtatgtaatatattcttcatgacattttgttggatatgaatatgataatatgtcaaataaaaatggttattaatgttgttgttaaatcacattgcagttgggaattgctattgtcaatgacttcaaaagtgttgaaggggatagggctctagggcttcaggtatactctattgtcctttgcctttcaataacagtactctgagcccttctgtcgtcttctcgcagccgctcgagcagtttccga

SEQ ID NO: 56185 - DNA, 162 bp, Glycine max
  Clone ID: PAT_MRT3847_21746C.1
cttaaaggaggcgtcatgagctatacagtcgggcttgtagctgaagcaacatgatgctcagcacgctggtgttgcctacaatgaagactagtcgcgggattacaaagggctatgcctgtactctcgccttctttaggcatttgatgctgattaacctctcct

SEQ ID NO: 56186 - DNA, 260 bp, Glycine max
  Clone ID: PAT_MRT3847_21747C.1
catggccccaaaagggggattccatttttatgaaattggagtttccccctgcagtttaaggaatttttggggggtaaatgaaaggccccgacttattgttccagaaaccttattaaacaaattggatttaccctctttactagttccctaaaattggaaagaaccccaaattttccaaatttttaaaaagactgggggcctgtcctttaaaataacagaaccctggcttaattttttagtccaatgattttcctggagcc

SEQ ID NO: 56187 - DNA, 135 bp, Glycine max
  Clone ID: PAT_MRT3847_21748C.1
cttttctttttcttacaaagctacccacgttacgggattcagggaacttctcctccactccgagaccctcttaaaaagaaagggactgttcgtaatcctggagcttggtatcccaatgctccttccacataatgt

SEQ ID NO: 56188 - DNA, 263 bp, Glycine max
  Clone ID: PAT_MRT3847_21749C.1
ctaccacttaagggtttctaaatgaaatttttttttctgttcacagatatttagtcagatattttcttttttaggttggtgctaggtgtaatatggttatttaagcacataaagtatgtgtatgggttagcattttcttttctttttggtaatttgtaggacagccttgacactaggctgttttacttttcagaatcagatttaattatgtgattaattttaaatctacaaagacttgttttttgtttttttttttgagagca

SEQ ID NO: 56189 - DNA, 442 bp, Glycine max
  Clone ID: PAT_MRT3847_2174C.1
gggaatcgagggaaaatgagaccttcacttctgtttcactgctaaggcttagacttgcagtgcacacgcatttgctgatgctgctctcaagatgataatctatttgcgagttgacgatggaaacactatcactgctgctacagatgaaacagccacattacctgatgacgattctccttcccaagatatagctgaaggaaagcctgtctccttcagagatacatctcttgcacgagatgtttatagtgcgattactgctggatcacatgggaagagcccttatctgacacaccctagctttaacacgtgccagactgagcatgatttgctaagggacttgtgtaggctatcatcaagccatctatcactctgccgccagtggatcccacttggatcttgacaatgaagctgaatgcgacatctgacatgatgcctgagacat

SEQ ID NO: 56190 - DNA, 470 bp, Glycine max
  Clone ID: PAT_MRT3847_21750C.1
tatagggtaagctgggacgcctggcgtgccggaccggaatcggccgggtcggcccaggccacccgtttcgatcaggccatgctgttccaaacaacgactgttaatgatgaaaagcttgtgttggctaacacacaagacttttttgatggaaattttccagcggattcttggttaccaattggtgtgaatgggctctatactgtgagggaattaccttcagaagctggggaagtcactgttacatgtgtgggtggacagcgtggcttatctaccactggttggattattcatgaagggaacaatcgctactcaaatgtcaacaaaggaattcgcgcagacctcgggacaggtgagaaaattgattgtctgtactagagttgatccttttgcaatagctttactggctgttctttttggcgcttagaatgaatttctgagttctaacgccacttaccctatgctgacgcgac

SEQ ID NO: 56191 - DNA, 368 bp, Glycine max
  Clone ID: PAT_MRT3847_21751C.1
aacgctccaacatgcagctcaccctgactgaccgcttctatcacgaacggtccttccagatcacactgacctgtaaggatcgcatgccctatgagatgcaggatcagattctgatgaaccaagtcccgagcgcatgccacctgatcatgcagcttgttcgaactatcattctgactaactgctaatagacaggtaagaccaagccctgcaagagcatacaggccagagaccggtgaatcatacctgtgcactctgagctcactatgtgctaattaaggcagacacagggccagttattatgggctcgcctacaagagcttacattcaccctcaatgctcagatagatggatcaacccttctgcatgaa

SEQ ID NO: 56192 - DNA, 380 bp, Glycine max
  Clone ID: PAT_MRT3847_21752C.1
acgaacgtatctatatattcataattgcacgttctcttttgttgacttcagttcatataatattgcatttactcagattcaggcagactttcaaattcacattaccttcttctctgatactcttactatcaaagctgactgcataaagacctgatctactattgaaagatggcatctttgagcatgacccagatcagaactgagagatgttcatatgggtttgacttagatagtgctcgaaagcgcaatgcatcatgcactcagagttatacttaaagagtacgctatacagactcatgctacacaccctgatcttactgtcactgttaatgggttgcacatgcctaaccgattcgttattggttcatgcacaccatgta

SEQ ID NO: 56193 - DNA, 687 bp, Glycine max
  Clone ID: PAT_MRT3847_21753C.1
ttttggttttttttttttttttttttttccgaatatagacagagtcattctgcgcatcactttttagatttgtaagaaaattcaacattacaaagtttcaacttaaatgtgactcagtcacagccacatgaaaaggcaaaaatctagaaaaaacaagtaagccgaaaggcaaaagcacaaagtgatgagagttgtttaactttacacattcacattgaggtggatttgacagaggggcctggcaatgggattatatatagacagatgaagcgcaattcaaagagatggatctggatttactgagaacagaagccaggtcactcttactgatttcggcaccgaaaacttcatttctgaaaaaagcaagctctgttaaattaccgcaatctagtgcaatcttaactacaaaaagttttatatgaagtacccacacgtgggctctaacatccccctatgatgttcatccgtgccatgttttgctatgatatttcttgtaacgatgtgttggcgacgattttggtgagattgacactttgcaataagacacgggatggtacactcacattttcactgtgaggagtttgaaaaaaccaagtaattctaatagttcctatatgcaaaccttcatgataaacaagaaaccttgatcaactaaaacctatgccaaacttattatgattctctgca

SEQ ID NO: 56194 - DNA, 635 bp, Glycine max
  Clone ID: PAT_MRT3847_21754C.1
accactcgttcgaactctagcatcagttactacttctgtctgacttgtttttcagatctgacgctcattactgtctatcgtattgtataccaggtcccagaccacggccaagaacacgaagcccctctacaaccctctcttccacgctatgttagccgaggcgatagcaaatgcgatagagagaaccggagagagaccctgctcgatcccctactccatagccaggtacctcaaagagatgcccgcggactacactacgctcgacctcattcatgtcctgaattatgttgctaatggcgaggttgctgacgagatagactacgttaagctctcacctactatccctgctactaatactgccgctgctaccgacaggtgctccaaagctgccactaaagccgcctctaagcccaatgccgatactactactactactgctgttgccaaggccgatgccaaagctgaggccacgactgccgacaccactgctaagcccgcttatgaccccgccaaggacgccgccgataaggcagctgctaagacgactcccatgaagaccgccgtgaaggccgtgagtgacccgaagagtcctatgagcgagacctcacccgcgaagaccactgcggctaaggcta

SEQ ID NO: 56195 - DNA, 514 bp, Glycine max
  unsure (1)..(514): unsure at all n locations
  Clone ID: PAT_MRT3847_21755C.1
ccgagatggtactggaggtaagtaagggggagaaaatgtacatcagaagtttccagcaagtttactttggacccttttcaggaatttttctttgcatgcagttttttttctttattttatgcatataactagaaaatataatacatatatatcagttttaaaaattttggggggccatggctccccccgtcttttcaatgctccaccccagggcacacctcttggccatttctcggagacacaagttgttggatcaagtggtctcgaaataattaagaagaggggggttaaattaattattaatgtgtcttgactaattaaaaaatttatccttcttaatgttaatagatttaactagacttttactactaagttaagaaagtgaagaacagaaacaaaaacttaaccaaaagtaaaagctacaattaaaagtacatagcagaaattaaagagtgtngggaagaagaagacaaacacaagatttatactggttcgngaacaacccatgcctaca

SEQ ID NO: 56196 - DNA, 232 bp, Glycine max
  unsure (1)..(232): unsure at all n locations
  Clone ID: PAT_MRT3847_21756C.1
tgaccaagcccgctcctccctcgcagacggttcgggatgcacgcggcggtggctcatnatctcgtggaggctttggccgtggtgaacgtggccgtggcagatgtggacggtgatatggccagaaccgtggcttcagtggtgacaatggcaatgactttcaaggaggttatggtggcagaggctatggggatggtgctgcaactggcggatctgaaagagaaagggagagaga

SEQ ID NO: 56197 - DNA, 253 bp, Glycine max
  Clone ID: PAT_MRT3847_21757C.1
cttcccagaagtagacgatggtatgcaccctaacatactacaacccactatccgcaaagggaccttttttatttaattttatccgcggaaaatgcccctgccttgagttgcactagccgctgcacagcatggggggttggatgatatgattttgataagattggtgtagggctgtgttcaaaattggaggcgaggatcggaccatgcacgcgctatcgtagagtatgagcctgaagagtacaagcttagtgaa

SEQ ID NO: 56198 - DNA, 163 bp, Glycine max
  unsure (1)..(163): unsure at all n locations
  Clone ID: PAT_MRT3847_21758C.1
aaaangncannatnaantcgantnttntncgnntctanntgttcggctngagagcatatanttatccnctttncattcantcgnntgttnacttggttctggtgagcgcagtagaggggaagaaagaagcctgacgagaggagctcgtnggatgaatataata

SEQ ID NO: 56199 - DNA, 365 bp, Glycine max
  unsure (1)..(365): unsure at all n locations
  Clone ID: PAT_MRT3847_21759C.1
tccccttcttctgaaatagtaaacnagtaaataagtaaatatnaacattaaacatnaaancccaaatngggaaagccaacgttngcaagggagncccaaattcaaaacgtaatttggcanaggaaatnctnctggctncattctttcaaggccctttcaaanatttncccaggnanagngngagttgatgttncttncttaaagnagcaggtcgagttggcagaaggcaaaacagcgtcgggggncaccctgggattcaanagttggcaaattttggggggctggctggaggaaattgggttcaattccccctttcctttggctgatngaaagatnnaacccattggttttcagttctttcattc

SEQ ID NO: 56200 - DNA, 1204 bp, Glycine max
  Clone ID: PAT_MRT3847_2175C.1
tacggctgcgagaagacgacagaaggggacagagtgcaaagaatagaaagagaaataagagagagaaagttcagaagaggcatcaattgctagctccaatatattacaccactgcaaaattttctgaagcagagatcattgttcattatcacagaaatgggtgaagagaacaaggaagaagaaaggaaagaagagaccacagaggaaaagaaggaagaagagaaaaaggatgaagagcccccagagatagtactcaaggttgatatgcactgtgaagcttgtgcaaggaaagttgcaaaagcattgaaaggatttgaaggagtggaggaggtgagtgcggatagcaaggcaagcaaagtggtagtgaaaggaaaggcagctgaccccataaaggtgtgtgagaggctacaaaagaaaagtggtaagaaagtggagctaatttcacccttgccaaaacctccagaggagaaaaaagaagaaaccaaagaagaaccccccaaagaggagaaaaaagatgagcctcctcctgtggtaacagttgtccttaaagttcgaatgcattgtgaaccatgtgctcaagttatccagaagcgaatccgcaagattaagggagtagaatcagtggaaacagacttggcaaatgatcaagttatagtaaaaggtgttgtcgaccctgccaagcttgttgatcatgtttacaagaggaccaaaaagcaagcctctattgtgaaggacgaagaaaagaaggaagaagaaaagaaagaagaagaggaagaggttgatactaaaactgacatcaagcgaagtgaatactggccattaagatcccacgttgactacgttgactacccttatgcttctcagattttcagtgatgagaacccaaatgcatgcactgtaatgtagatcagtcttttgtactaactcagtattttatagtagctgatcgatcaactgaagcaacttgtgctgtgtcgttggagcgtggaataagatgcatggttgtgaatgttttcaaggctttgtatatgatttcgcatccctcggagttggcattctatggagatagatgccttatttcttgtgttttatgagctttctacatatttccttggcaaagggtggctagaatcagttgtgttagtgtgtactgaattttggcctacaacttcaattatgtacctaaatgatgacatcaattagt

SEQ ID NO: 56201 - DNA, 686 bp, Glycine max
  Clone ID: PAT_MRT3847_21760C.1
gggggggggaagagaagcaagtctaaacaaactcaaactagtctcatgcagataacaacagaccaacgaaaacataaaatcaagatttgttcccacaaaaactggaacaaaaaaaaattaaaataaaaccagcaacagtcaccaatataagcagtacgcgtccatattgaaaaactgagaaaactaaagctggggcagtaaatctttcaacatcaaacatgaaaagcagcaagtaaatatggattgcaacagctgagttcctttgttgggctttgttcactccatgcctgaacccattaatagctccagtgaagttgagcagtgctatgctcattcctagtaatcatactcctgagaatgagaaatctgagtgacgatattcatggtccatatcacgatttctctccctgtcacgtgattaagattttgcatgttcagtatggtagtcatcttctttcctaccacgatcaggatattggttgtaatgggcaccatggtcatctccctcatcatattgcccccttcctcaatgatgctcctagtgatcaggatcatggttgggatctgcatggctatgcccatacccaggttggttgtaccaaccacgaccatcctcaggttcatagtcatgctctctttcaccatgatgttccttatcatgtttagattcaacgtgatcacaatca

SEQ ID NO: 56202 - DNA, 219 bp, Glycine max
  Clone ID: PAT_MRT3847_21761C.1
gagaaattggatctcagaattcgcggtggaaacaatgggaagtgcatcatccgaagaatgaatatttagggttgtgtggatcagggtgtgtgggtagaattacttcagtggcagggcgtttaacttgtggaatcgaagaaggggtatgatattgaaagggggaattcgagggatatgctgtaatttagggttggacttgtcttgacagtgattgggagc

SEQ ID NO: 56203 - DNA, 589 bp, Glycine max
  Clone ID: PAT_MRT3847_21762C.1
agtggttcccgcgagactcatctgcaccaaatatcgtatgcacctttctcatgtgatagccagctggtatttgccagctttttagatgcaacaatctgtgtatttagtgcttcaaacctcagattacgttgtcggatcaatccttcttcatatcttcctgcaagtgtcagttccaacatacaaccacttgtaatcgctgcacacccacaagaaccaaatcagtttgctttaggactgtcggacggtggagttcatgtttttgaaccccttgaatctgaaggcaagtggggtgtgcctcctccgattgagaatgggtctgcaagcaatgtggcagctacttcagttggaccttcagatcaagctcaaagatgatccatgtcagccgaagttgatccagctaagttaaatccatccatcgtacatgccaaaggtttggagcaactcatttggttggaagaccaaaatcacattgtaatttgccaatagatgtgaaaaattcttgttaagtttaatgctaagatgatgtacaagttcttttgagtactttcaagttgcttctagctatttaattagattggttgatcctaac

SEQ ID NO: 56204 - DNA, 1789 bp, Glycine max
  Clone ID: PAT_MRT3847_21763C.1
gtgaatgttgcatcaagagaaactgaaactatgtgaaagcttacaattaataagtctttagctgcagccgctcccgcaactcaagcagccatctcaatgtagattccttcaagatgccctaatattgttaggatgagcaatacccgaaacttgggtgatgttaaacctagaataagtgaagaatctaatgacaagtcaaagatatggaagctcactgaaatcaacgaacaatctcaatgtagatccttgaagctaccggagaatgtaagagtaaccaagatatcaaggttgatatatacaaattcaggtaatgctattctggcattagcatcaaatgccattcacctactctggaaatggcagcgaaatgagcgtaactcatctggcaaggccactgctaccttgcagcctcagttgtggcaaccatcgagtggcatcctgatgacaaatgacattgctgatagcaatcctgaggatgctgtaccctgctttgcgttgtccaaaaatgactcatatgtaatgtctgcatcaggagggaagatatctctgtttaatatgatgacttttaagactatgacaactttcatgcctccaccacctgcggcaacctttcttgctttccatcctcaggataacaatattattgctataggcatggatgattcctctattcaaatatataatgtccgtgttgatgaggttaaaagtaaactcaaaggccataatacaagaattactggtcttgctttgtctcatgtattaaatgtattagattcgtctggagcagatgctcagatttgtgtttggaatactgatggaagggaaaagcagaagtctagattcttgcagcttccttctgggagaacaccaccggcacagtcagaaacccgtgtacagtttcatcaagatcaattacagttcttggttgtacatgaaatctcagctcgccatttatgaagcaacaaaactagaaggatctaaagcagtggttcccgcgagactcatccagcaccaatatcatatgcaactttctcatgtgatagccagctggtatatgccagctttttagatgcaacaatctgtgtatttagtgcttcaaacctcagattacgttgtcggatcaatccttcttcatatcttcctgcaagtgtcagttccaacacacaacccacttgtaatcgctgcacaccctcaagaaccaaatcagtttgctgtcggactgtctgatggtggagttcatgtttttgaaccccttgaatctgaaggcaagtggggtgtgcctcccccgattgagaatgggtcagcaagcaatgtggcagctgcttcagttggaccttctccagatcaagctcaaagatgatccatgtcagccgaagacaagtttcttttacatacttggcttgctggccattttaagaactaaatttgtacttaagttaatgcagggcactctccaattcagttgatccagctaagttaaatccatcaatcgtacatgccaaaagtttggagcaacttctttggttgaagaccaaaatcacattgtaatttgccaatagatgtgaaaaattcttttaaagtttaatgctaagatgatgtacaagtccttttgagtactttcaagttgtttttggctatctaattagattggttgatcctaactaaaaaaaaaataatgagttcccccaataaatttttgtaatcccatccagtctaaatgtaacttgctaggatgatgtagtcttcatcgctcacagtttatctatatataaatatataaattttttaa

SEQ ID NO: 56205 - DNA, 187 bp, Glycine max
  Clone ID: PAT_MRT3847_21764C.1
cgggttgaaataaaaaattgatattgataaacatgggagaaagtggatatgtacacattagcttaatgcttaaccaacaaccaaccccaattgtgctgtctttaccccaacacttttgcctctgtcaacacaaaaacccattcccactctatttaatctcacaaccttccaccgccgtgaacatttt

SEQ ID NO: 56206 - DNA, 439 bp, Glycine max
  Clone ID: PAT_MRT3847_21765C.1
gcttcctgaagcgaattgactccacagcagcagctgtttaggcgcatttctagcttcttctttacgatgtttgccttgagaaaaagcgcactaaatcgtgttctatgtggtagcatttagcgcacaatgtcaatgcagagccgccagaaacgtactcctaattctgatgacagatacggtgatgctgacttacctactggagacactgtctatattgagacatggacatttgtatcatctctagtagaactagattcggacctgtcccctgttggcagtggtaccccctaggcatggaagaatcacggatcatcccaactagggtaatagtaaattgttgacaatactgctcatagttgatgccgaattaagccactgcgtaccaattaagatatggcattattgaagaaattaagcacattagaaccctgcacaaaaa

SEQ ID NO: 56207 - DNA, 581 bp, Glycine max
  Clone ID: PAT_MRT3847_21766C.1
aataaatcaacccttgatctgatgtacataaataataagtttatgatgtaaagttgttttagaagcactatagtaagtgcaataagcacaataaatagtgtacataataagtaacattgccaacacaatctatacaagttgctccatggaaatccaggtagcctttaatattttttgcatttaaaacctgatgggagctaatcgtgcaaagtttatgaatgcaatatacaattgattagtttccatggacttgatgacccttaattaccgaagtttgtgcctcaagttttatacaatctttctagtcccaaaaactaatgatgcccctagctctcatttagacaatgttaactgctcaaatcgcttgagatctctttcctgttttgttgagttgtattcttgcgcgtctggtagctcttctgagtatgttctttaacctgactcactactttggcttgattttttgagtgctcaatgcacatttttgccgttaaaacaacacaccccctctgtcctcgtttatagtcgtcgcggacacgtctcaatacacattgatgcagtcaaaactacacagctcaact

SEQ ID NO: 56208 - DNA, 215 bp, Glycine max
  Clone ID: PAT_MRT3847_21767C.1
ctcgagccgatcatacagatcaatcaaactcgttattcatgtctatgataccctgctgcaaaagagaagaataacgagtttgattgatctgtcacgtagctacttcacgtgaccacttgtcgtactcatatttagcatgatatgaatctgaatttttatcttgtgccttatcattaagtaaggaatataattgtgttccagttaaattgaatgtc

SEQ ID NO: 56209 - DNA, 386 bp, Glycine max
  Clone ID: PAT_MRT3847_21768C.1
cggaattcccgggtcgacccacacgctcgcccacactgttgtacagctccgaaaatacaactcaaggggacgtccacattcaggaagggtgttgttcaaaaattcgccatcgtcgatagaagcatgatagccttactcgatcatgatgatacctatgcgcaagaataagcgcatgatgacgctgatgagctagcgcctaacgatgagacattaatctacttaagtgcttgagcaggagtagatatgagctttccatctgctaccagcctcatcacattataagctcgcatggctcttatgatctttaagtctagccactaggagagcttcactcttgacttactttgctttactgacccttgtcctgggcccatactattgagtgt

SEQ ID NO: 56210 - DNA, 376 bp, Glycine max
  Clone ID: PAT_MRT3847_21769C.1
ggctcgcggagtgtcggcatcagaagcctgtgaggacatcaaggacaggggaggactcgagacagaggaagcagacccgtacactgcaaaagatggtgaatgcaaagtctgagctcaaactgttgccgtacgagacactgactgagacactatcacctagggtgccgagaatgaatcagagcatgcacgcgcattggatcggcacggctactgttgcctatcaggtggtgcatgggctccatttatacgagactggagcctacactagtgacacttgcggtaacactcaccatgatgctaaccatgccgcgcttgcatgaggagtcttgagttgaaattggctacacacatcggctcataaaatacttacggggag

SEQ ID NO: 56211 - DNA, 492 bp, Glycine max
  Clone ID: PAT_MRT3847_2176C.1
ggcttggaactttgggctgatttatgtgcttgcatggtcgtgagaagatgatagaaggggatattaatattaatatcaattccgcccctcctgcgcccatctcctctcctatagaagtgcaaaaataaaaggtccgatcagagaaagagagagagagagtcctgaactgaaatctagaagcagaaagaaatataaactataactgtcacggtcaggcatgattgagtaactattgcgcctcttttcgatggttactctccttaggctgagcatgtttctgaagttgcttgtaagggtaatgttgttgctggtgcttgtggtattgataacgccgcttctggtgctgagaagaaacttattgttaaatcttaagatcttaggctggcgaggaagacagcgaactcggatgattataccgtgtcggttcgtgtggggtcgaaggttgatgtatgtgcgtctacaaataaggtatgcgcggagcgttagagctat

SEQ ID NO: 56212 - DNA, 373 bp, Glycine max
  Clone ID: PAT_MRT3847_21770C.1
tggcttggaacctttgggctgatttatgtgcttgcatggtcgtgagcagatgatagcagggggtcttacctcgtataacctctctcgactactggcgccaccattctcccttaaagcttaaacccctcagccttattaaattaaattaaattaaaacggtagtagttctagttctacttacgacactaatattagttccactcttaattacttaaaagtattactacccgaagttacttaatgcgcgtccttaaggctccagattttctgtaaggcctattaaagttctactaattaaagcgagtattattattaaaagggccaccttaaagggcggcgccagagtcgaatctaatctagtttccgcgacaag

SEQ ID NO: 56213 - DNA, 452 bp, Glycine max
  Clone ID: PAT_MRT3847_21771C.1
atttgtggatagctggagtcgaaagagagtagaaaaaaaagagtttattgatgatgtattattagtgtacattttttgtgttgccaattaataaaaattatcattgatattactggtttttaataaagttattacaataaaataaattttttattatatatgatgatttataattaaatgataatctgaattattttatataaagaatacatatttaattttttttcaaaaaaaaagtttatatgttataaataatacaatatgaaaaaaggactgagaaataaaaagtgtttataaggtgtttgtattataataaatactctttttagatagtattataagaaatacttaaccagtgtaatatgatacagttaataaataatattgttttttaaagtattttattagaaatatgatttccatacctatgtataacaaaaagtatttattaa

SEQ ID NO: 56214 - DNA, 234 bp, Glycine max
  Clone ID: PAT_MRT3847_21772C.1
ccaaaaaatattttttcaaggggaactgttaccagcaatttattcacaatatataaatattattctaaacatttgcgggccctataaatttattaatatatcttcatcctagaaaatagaaatctgctttgttggttttctaaaaactactacttgtcacggccattaaaggttcgccaaagtgactcttaaatcttcaatccagatggcagatgctataataggaaatatttg

SEQ ID NO: 56215 - DNA, 272 bp, Glycine max
  Clone ID: PAT_MRT3847_21773C.1
ctcgagccgatcaatgttggggaacaaaaagattctggggctagccttatttcctacgaagggcgctgtagtgcttgacacagtttcattgtttggtcttatgttcttcttcttcatatggtgtgttaaaatggatattgccacattaatgaagactgaaaagttaatatcggaacaagagttcgctttgatggtggcctcgattatagtagtaaattgtatcctagtaccactcataagatacatatatgatccttcagaactatatcagg

SEQ ID NO: 56216 - DNA, 345 bp, Glycine max
  Clone ID: PAT_MRT3847_21774C.1
gaaaaaaaaagaaattatggcttctcttttttttttcaattgttaaataagaaaaaaatttttttttctttcgggcttccaaaattaaacttgatttcaaaaaacaaagaaaccgcgccctcttgatttgtaccaccgtggaaaaaaaccctatttctcccaggagggcgggacacatatttcctttttctccatggcagcactttgtgtccatcttgtgtgacacaccccgggggaaagagccctggttcccccaaaaaggggaactccactttttttttttttccttaacccccttccgaaaaaagaattgataacaccataacacaacggggggggggggga

SEQ ID NO: 56217 - DNA, 206 bp, Glycine max
  Clone ID: PAT_MRT3847_21775C.1
gagcgaatcggctgagattttttactttctaatgtagcttggtgcggactaggaataacattgctgttgatgtagagtgtgaatatctaatgccgagggcatctaaggatgttccctactgttattaactgtcagtatatttattttggacggttttgtgaaacatattgtgaaccatcaatcaaatggaattgtggaaaaatgtt

SEQ ID NO: 56218 - DNA, 787 bp, Glycine max
  unsure (1)..(787): unsure at all n locations
  Clone ID: PAT_MRT3847_21776C.1
ccggtccggattcccgggtcgacccacgcgtccgaagaatacgaagcattcaagacgtggtgcatttgatatttcggattctttgaaaggcaggagcatgcttgttgctgccattatggatatcgttacgtccagctgtgaaaatgcagaagaggtatcttttaagccatcattgcctgaaaatgctgaaaccagagacattgctgcagccctagaagttattgaggaaggaggtttgcacttggatgagccacctgaaggtgaagatgatggtggtgggtcgggaaggaaagggattggaatcaagatacttgatggtaaacctgttttagggctttcaaggaccagcaatgatgcctgtcacgaagaactaaagcaccaatctcctaaaactctcatatatcaaaataagtatgacaattcgctggaacaaaagaatgtgtctgctgctgttgttcctggtctctgggatgatttgcactgtgaacatgttgctgttccttttgccacctgggcattggcaaattgggcaacggcatcacagttgaatagatctcatattcaggaactggatcgagatggaaatgctatcatgtctgctttaatagcacctgagaggtctgtaaaatggcatgcaagtttggtggtgcggttgctattagaagatcgcaatacacctttgaatgaatctgtttctgattgggcttccagtctttcttctactatatctcaagcatgcaagcatgaagatatttctttggctcangtagcccttgtctgcctttct

SEQ ID NO: 56219 - DNA, 392 bp, Glycine max
  Clone ID: PAT_MRT3847_21777C.1
tttaaacctctcgttttcattctagggctttgaattttaattgtgttgatctcttttagtgttatgcttgctcgtttttcaatcgtgtgtgttctttgcttcgtttcaccaatctttgtgttcaattcagctcattatgatgctgtttggtggattgattctgtatttgaaattcggtgtatgcagattagcctttttgttcttcttttctgcggcgtttctagggattatgacgaattcgctagtatttgcattggaaaaataatgattaatgttattatatcctctggcaacgtacgtttgcatcaagaattgaataaaaatataggatcattaagcttcctaaggaggatttattgttaaaaaaaattgtattgaattattgattggta

SEQ ID NO: 56220 - DNA, 641 bp, Glycine max
  unsure (1)..(641): unsure at all n locations
  Clone ID: PAT_MRT3847_21778C.1
ttattttttctttcttttcccagcttgcccctgtgctccaacctctccttcgaccctttcactctcaattttcctctctgaaatcacaaagatcaggttcatggtggtggcggcaccgccaaagtagcacgtcggcgagtccacgcacgagagtccactgggtgtcgacatcttcatgattttgtaaagggtgatgctgttacagtgagtagtgttagtgagagccatgtgaggatgcgctgtttctgagcgtggaatggaaagtcttccaccattgtttggaagtaaaccgtcgtcgagctcctgccatggtccccaacgtccctgacctcttcgaagagaaggggcacaaatcttttttgatttgtggtggggaaatgggtttcctgctacttgtgatgtttgtgtaaacattgacgtcaaaatcgcctctgacaacggtaaacgatgatcagtaggatgtcggataagatcgctgaacctagtccaaggattaactaaataacatgagacctccaacgcggacattaaatgagcatcgtggttatgaagattcatttcgagatgcatttgctctttgttcgttccctttcgatttgaactttgatgttctttnanntnnnnnnnnnnaannnnnnnac

SEQ ID NO: 56221 - DNA, 324 bp, Glycine max
  Clone ID: PAT_MRT3847_21779C.1
tttccgggtcgagacgaagccttcgcgcatgcgagaagacggctgagggaggcgacttaagggggacagggaagaggagaaactggggtacttggctttatgcccaagtagggactgtggtggctgtcaatgggatcacaatgatgagcatggtgacatggaactggatgatgatctattagcagctgatgtgagcatggtacttgctctactaattatggacgaagatgaagatccacttgctacttgcactcctgactctattcaggctctctctgaagcaattgatcctgctccacagaccgctttcgtctctgagcatgc

SEQ ID NO: 56222 - DNA, 1235 bp, Glycine max
  Clone ID: PAT_MRT3847_2177C.1
attcggctcgaggaaataagagagagagagaaacagaaaacttcagaagaagagcatcaattgctagctccaatatattaccacaccactgcaaaattttctgaagcagagatcattgtccattatcacagaaatgggtgaagaagaagaaaagaaagaagagaccacagaggaaaagaaggaaaaagagcctccagagatagtgctcaaggttgatatgcactgtgaagcttgtgcaaggaaagttgcaaaagcattgaaaggatttgaaggagtggaggaggtgactgcagatagcaaggcaagcaaagtggtagtgaaaggaaaggcagcagaccccataaaggtgtgtgagagactacaaaagaaaagtggcaagaaagtagagctcatttcacctttgcctaaacctccagaggagaaaaaagaagaagaaatcaaagaagaaccgcagccagaggagaaaaaggaggagctccctcctgtggtaacagtagtcctcaaagttcgaatgcattgtgaagcatgtgctcaagttatacaaaagcgaatccgcaagattcaaggagtagagtcagtggagacaagcttgggaaatgatcaagtcatagtaaaaggtgtgattgacccagcaaagctagttgattatgtgtacaagaggaccaaaaagcaagcttctatagtgaaagaggaggaaaaggaaaagaagggagaagaggagaagaaagaggaggagaaaaaggaagagaaagaagaagagaaaaaaggagaagatggtgaagaggttgatactaaaactgacatcaagcgaagtgaatactggccattaagatcccacgttgactacgttgactacccttatgcttctcagattttcagtgatgagaacccaaatgcatgcactgtaatgtagatcagtcttttgtactaactcagtattttatagtagctgatcgatcaactgaagcaacttgtgctgtgtcgttggagcgtggaataagatgcatggttgtgaatgttttcaaggctttgtatatgatttcgcatccctcggagttggcattctatggagatagatgccttatttcttgtgttttatgagctttctacatatttccttggcaaagggtggctagaatcagttgtgttagtgtgtactgaattttggcctacaacttcaattatgtacctaaatgatgacatcaattagtaattttaagtcgtcatgtcatgat

SEQ ID NO: 56223 - DNA, 517 bp, Glycine max
  Clone ID: PAT_MRT3847_21780C.1
cttgggtttagtttttagctttatttttcactgggatttttcttctcctcccttcgcctctctctctctctccaattcaacttcgtagtggccatgaaagctcttcttccttaacgcagcagtctgctacttggcgaatcggtgtgtaaccatcacgacccattttcgcagcttcgcttcttcatgtgggtcgagccgggttcttcttcttcttccatggagatggaggtggatgcagtacaagttaatgacctgaattgtattgacgaacaatctctttctccagaatattctggtgtttatgatgcttttggtgaaccagacatatttcctcgggtgggtgaccagtaccaggttgaaattccatctttaatttcaaaatctgactattactggcttctaaggaatccccatgaggcagagagcacagcaagtaggactctccataagtttcgagttggattacccatcccaataatttggattaaggatgtagagaacaataggcacgatcatc

SEQ ID NO: 56224 - DNA, 599 bp, Glycine max
  Clone ID: PAT_MRT3847_21781C.1
acgaggtccccttcccttctattctaccacgcgtccccgcaaagacgtcctttcttgtccaaacacagacccactgacaccatcatcatcataatcaccaatgttctcatcgacaccacaattgtccttgtcctctcctccaccattccccatccccaattttctcgatctcatctcccaccaccatcaaaaataataatctgaaaatgaaaagaaactaaaaatccaaaccaaaccaaaccaaattcaaagacacgatgaaattgaactatcaattttgataccaattgaaggactaaagaagtttcatcaaaatgagaagaaactaaaaaccgaaccgaactccacgaacacccatttctccccactaatggtgtcatctccattgttagtgtccctcactttttttctttctctccctctcttgttgtttctatctcctcatattttgtcccctcccgacgccgacgacctcgccctcttccgccgcgccgccgccccccacacaacctcccacctctccgccaccccgaaaatcgccttcctcttcctcaccaactccaatctcaccttctcccctttctgggagaagatattct

SEQ ID NO: 56225 - DNA, 458 bp, Glycine max
  Clone ID: PAT_MRT3847_21782C.1
tacggctgcgagaagacgacagaagggcacctacaacttgttacaacttactaggccattcccacaatattgcatatatatagcaccccataaggcactgcacccactaccatcttaatttctccttcaattgctacttcaattctgattgcaaccacgacactactccaccttccaacatgggcggtatcagccttgaggaaatcaaaaacgaaaacgtcgatctggtatatacatatatatattttctctctaccattcttcttcttccctctctttctctctctcattccacagaaaataaataatcagtgagcaatttcatttttgcatttttgcatcctttattcttcccaactccagacagcaaaacataaatcctttattttcttcggtaagcttacactaattacaccaaccatgctttgaggtttttctcatgcacatggacggagctt

SEQ ID NO: 56226 - DNA, 456 bp, Glycine max
  Clone ID: PAT_MRT3847_21783C.1
ctcgagccgaatcggctcgaggtccgcaaccagaattctttcgacagcaaccaggacaggcctactggtccgcataatgtctcctccccgtcgaaccgctggaacgacccgaacgccttcctgtcagtcccgaactcgcgctcgcgaggcaactcgctggactcgcagccggagagcggtcagccttcggtttcgggtacgacggagacatacgtcaacggctctcccacccaaggaaataagcagcagcttggccacgacgagattctgaatgacagggacgcattaaagccagatcctggcaccgaacacacttttgaagtagaggacaacaagttcgctttctcgcctggtcagctgtcaaaagctctataaccctaagagcttgggtgctttccatgcgctgggcgggctggacgggttggtgaaaggtcttaggacagatcgcaggagcgg

SEQ ID NO: 56227 - DNA, 939 bp, Glycine max
  Clone ID: PAT_MRT3847_21784C.1
ggttttcacacgaactctccttcctacttctctctaagaccttgcggctttctagctgtggcattcctcagccatggatttgaaagctgaggctgaggctgaggctaacgttggagatgttgagtaccaagcaaggaagactccgagacaaggaggatatagagccacatatttcatctttgcaatgatgttgctggataacattggctttgtggccaacatggtaagcttggttttatatttcatgaacgtcatgcattttgactactctggatcggcaaccaccaccacaaacttgttgggtactgctttcttgctgacgatcgttggagggtttatttctgatacgtacatgaatcgtctcaacacttgcatcctctttggcatcatccagttgttgggatattccctacttgtgattcaatcccacgacaagacacttcagcctgatccatgtttaaaatcaacatgtgtgcatggcactaaagctttgctgttttacgcttcaatatacttgctggcacttggtggtggtggaatcagaggctgtgtacctgctcttggagccgatcaatttgatgaaaagaaaccaaaagagcacgcgcaactagccagtttcttcaattggtttttgtttagcattacaattggggcgagcttaggagtcacctttgtagtttatgtgagcacggaatcccaatggtacaaaggttttatcatatctatgtcatgttctgctgttggtcttattttcattgcctcgggaaagagattctatcatgccagggtgccgggagagagttcgttgttgatggttttacaggtgctggtggtcacagttaggaattggagggtggaagtacccttggattctgatgagtttgttgaaatacaaagtcatgaatctagtttaaagagaaaacttatgcctgacactaa

SEQ ID NO: 56228 - DNA, 184 bp, Glycine max
  Clone ID: PAT_MRT3847_21785C.1
cggctttcaccagtgcatccctctgctatccgaactgcacctggtagaccaagaaggtcaagaagaaagcgcattatgagccacaagacaggtacaagttgcctaggcaaaaattatctgttgtttgcaaatttgtggaaaagttggacacaacaaacgaacttgtaaaggtaaaacaagggct

SEQ ID NO: 56229 - DNA, 492 bp, Glycine max
  Clone ID: PAT_MRT3847_21786C.1
ggggggaaaggaacgggatatttttaaaaacaaggcaaaaaagaacaaagggattttaaaaaaaccccggggggggtttaaaaaaaaacggagttttttgggaaaaaaaaggggaaaacgtttaaagaaaaaaaattttaaaggacacggccaaatctttttaggggggtaaaatgggagaaatggtttggggaatggaaaaagggaaaaaaccgggctttataaaattggggggaagttaaaaaaaaggtttttaaaaaaaaggtttgggctaaaaaaaagactttggttaaagggaaaggttaaaaaatgggaaagggttaagggaggggttaaaaaacgggaaaaggaaagggttaaaaaaaaggaacaggctttggtataggctaaaaaaaaggaatgggggggggaacgggctaaaaaaggggaaggggcttaaaaaggggaacgggtttcggaccgggttaaaaaaggggaatgggcttaaaaagg

SEQ ID NO: 56230 - DNA, 668 bp, Glycine max
  unsure (1)..(668): unsure at all n locations
  Clone ID: PAT_MRT3847_21787C.1
ccacgcgtccgaacgctttttaggacactttttttttttttttaatttcgttttcatgtttctttcaaaacgtttttttttaagagttaagttgcgaatgcgatgttctacgtcggtattgccaaaaccacggactaatagctctggtgtgaataatgaatatgaccaccaatgattgtgatgtggttagggaaaaaatatagcaagtaaagggatttttgtcttaaagataattccctctcaactttggtgaaaattctttttaattgtttttggtagttttcttttgttatgagttctgttatcaaggtttcactctgtcgtgtgaagattaggaaaggatagtaagtgatggaatattaattgttactttaaaatttttaatctttttgcgatttgttgataaaatattttaggggcaagctgtgttggtttaaagttggctgagaaagtgtttggtaacacattgagaatccacattcactggaaaatcgcactgaaatcaacccanaagcaactatttggtacttcaagaaaccaccttgagtgcanatcaaggtgttaccaaacacgctttgaattttagccgggtcttggtgattttgacaggaatgggctacatttattttattttatntttccgggtgattggaggattttcttggaat

SEQ ID NO: 56231 - DNA, 342 bp, Glycine max
  Clone ID: PAT_MRT3847_21788C.1
gggattaaaaaccacccattgatttattttgggaccccatagattttaattcgaagtactatttgggggtcaacattgcattttgaagcataaaaaattactctttgtatatacaataacagaaaatcgcttgggcaatggggggaagcaaaggtttgaatcagttgacttgttttttttgccagcttttttaagttttttaaacccttcaaccttttgttttatttcctaaataaactcctcccgccacaaagcttctttgggttttggttccataggattttggttttaataaatccaggtggcagtttcattttctccattttccctatttgtttcaaa

SEQ ID NO: 56232 - DNA, 1296 bp, Glycine max
  Clone ID: PAT_MRT3847_21789C.1
cgtgcgcgccttctctctattttttttatataacttattgaatattattcactttcaccaaaatctgtcattaccaaccagtaatctgatttcatgtctaacagaaaccctataaaccaatagtacgtcactttacaacaatttgtccctgaattatgtaaaacaaaaataatttggataatgtattcttattagtttacaaaccctaaaagcacactagtgctatgctataatcatatcgctatacaatatataagcatatatatatatatatatatatatattattcactttcaccaaaatctgtcattactaaccagtaatctgacttcatatctaacagaatccctataaaccaataatacgtcaccttacaactaatttgtccctgaattatgtaaaacaaaaataatttggataatgtattcttattagtttacaaaccctaaaagcacactagtgctatgctataaatataatcatatcgctatacagatgtgacgcttatttttatgagcacttgaaaaactgatataatggagaccaaatatctctccaggctagcaagtctcatcccatcatctcctttggaaattgaaggatttaattgcaaatgaaaatataactccaaaaaatatgcagaagcccgccaccataacagcagtaacgcacaagaaatcatgcctgtacccaaacacgtgtttgagtacctctcttatagtcatcgagtttccatcagagagcttcactaaatgagtatcgccaccatactgtgaagttagcagaccatacagactccatgctacagggtttgcccagtaataccatctccaccaaatagggatcctcttgtgaggaatcataaaaccactgaaaaggttccacaacatataaaatggagcagcaatgatggcagcaacgttatgatttggtgtgacagccgttgtcatcattccatagaaggtaaaatataacatcgtaaaatacatgaagaataaggtaccaaatgaaccgatcaaaagtccagagaaaggaagccatggaatagaatattgaagagtatataatagcttgtgcgaacacataagggaactcaatcacaacctgagcaaatgcaaatgataaagccgaatacatccctgcagctctttctctataagaaacaaatctttccacagaaacaacaggctgaacagctgtgccatttgttataccaatgaagaggattgccgaatacatcgatcccatggcattgaatagatcttgctgcgtttcccttttagcaccaaatctcca

SEQ ID NO: 56233 - DNA, 526 bp, Glycine max
  Clone ID: PAT_MRT3847_2178C.1
ccacgcgtccggcgccggcgctcatcttccgctttctcccttactcgcgctcagcacgcaggcgacggcgtcggcgctcaggtcgggctctgggcgacggcgtcatcggcttctcctcccgcctctctccagtcgcctcgcgccctcgcctccggtcctccgcacaccggccggtgaccctgctcacactgatgtggaggcctcaaaagagaaccgtggagcatgcagtttgaacaatgatcgtgctgatgctctagaagaagaggccaatgtttccacagctaggataggtcatgttgagagtgctgaccctggtggctctgtgggtgtagaaaaggaaattttcatggctgttaatgaggagtctgagggggagcaagctggggcaacactggaggatctgtttttctttaatggtgaagaggatgatgacagtgattgggaacctgctagtcgcctggttgtgaatagatggttttgcttgaactgcacaatgccaaatgtggacaagattacatattgcatg

SEQ ID NO: 56234 - DNA, 1713 bp, Glycine max
  Clone ID: PAT_MRT3847_21790C.1
ccacgcgtccgttttcaggtaaccccggtctctgcggggagattgttcacaaagagtgcgaccctcgttcacacttcttcggccccgccacgtcatcctctaccacacccttgagccagagtgaacaatctcagggtattgtggttgttccttcttctactaccacaacaaagcatgataaaaaaacaggacttgttgtcgggtttgtcgtcgcggttgttcttgtcgctgctttcactctcacgatggtttctttggtgagaaagaagcaaaatggtaaagcttttagagcaaaaggcgtggttttggagagtcctgaggtggagggtggtggtcccacgcgtccggtggaaggtgagagggaggtgaagatgagaaagatggaagaggcgcacaggagcgggaagctggtgttctgctgcggggaggtgcagagttacacgctggagatgctgatgagggcttctgcggagtttctggggagggggagtgtggggaccacctacaaggcggtgatggattcgcggctgattgtgacggtgaagaggttggacggagagaaaagcgcggcagcggggagtgacggggaagtgtttgagaggcatatggaggttgtggggaggctgagacaccccaatttggtgcctttgagggcttattttcaggccaagggagagaggcttgttatttatgattatcagcccaatggcagcctcttcaacctcgttcacggttcaagatcagcgagggcaaaaccattgcattggacatcatgcttgaaaatagcagaagatgtagcacaaggacttgcttacatccatcaagtttcatccttaatccatggcaacctaaaatcctctaatgtccttcttggggtggactttgaagcttgtatcacggactattgcttggccttgtttgcagattcttcgttctccgaagaccctgattcagcggcttacaaagcaccggaggctcgcagctctagccacaagtgcactgctaagtctgatgtgtatgcttttggggttcttctgatagagcttttgacgggcaaacacccttcccaacacccttttcttgcgccagcggatttgcaagattgggttagagcgatgagggacgatgacggcagcgaagacaaccggctggagatgctcacggaggttgccagtatttgcagtgcaacctcgccagagcagaggccggtgatgtggcaagtgcttaagatgatacaaggaattaaggacagtgctacaatggaggatactgcacttacttgactcacatagtttgtgaactatgtatgctgagaaataatcacagcaagtactattaagtcctcaatcatcttgttaaaaaggagagcaaattgcttgagcaggaacttggagggtgaatactgaataggttaacacgaatattatacagtagaacattattacctgctttggctggttagtgcggtttattattagttcaatagacacagtaaaaatcgaatatatttgagttaaatttggctttgtccttattcattttttctctatttgtctctgacaagaaagggatgtatttgcggtataaaaaaaaagagtaaaaaaggatgaatggggtcattggggtcaagactttggcaggtaaagatgtacacgagcttagtgcatgtttgaatttctgaaaaagcttaaaattacttttactcttataacg

SEQ ID NO: 56235 - DNA, 180 bp, Glycine max
  unsure (1)..(180): unsure at all n locations
  Clone ID: PAT_MRT3847_21791C.1
gagctcgagccggatctgctcnagggcttctagcgttgtcatattcattggttaatcatttatggaataggaaaatgataggagctagatactacatgagtggacgtgaaacanaaaaaaggtcaaacagaaaagtctctttcagatctgccagagatagctcaagtcatggtagccaca

SEQ ID NO: 56236 - DNA, 655 bp, Glycine max
  Clone ID: PAT_MRT3847_21792C.1
gcaccagcggacttgcaagattggttagagcgatgagggatgacgatggcagcgaagacaaccgggctggagatgctcacggaggttgccagtatttgcagcgcaacatcgccagagcagaggccggcgatgtggcaagtccttaagatgatacagggaattaaggacagtgttaccatggaggatactgcacttactggactctcatagtttgtgaactacgtatgctgagaactaatcacagcaagtactgttaaagtcctcaattctcttgttgaaaaggagagaaaattgcttgtgcaggaacttggagggtgaatactaaaataggttaagcagtcatttttgcgggaatgtcatgaatattatacagtagaacattactatctgctgtggctggttagtgcggtttattattagttcaatagacacggtaagaatgtatttgagcttattcattttttctctatttgtctctgacaagaaagggatgtatttgcggtataaaaaaaaagagtaaaaaaggatgaatggggtcattggggtcaagactttggcaggtaaagatgtacacgagcttagtgcatgtttgaatttctgaaaaagcttaaaattacttttactcttataacgaagaataataattaattatatt

SEQ ID NO: 56237 - DNA, 109 bp, Glycine max
  Clone ID: PAT_MRT3847_21793C.1
gtgtgaggctttttaactaattaataggaatctcaacacaattccttgtttggtcgccggctattagtcaactataggacgcactaaccttatcgagacatataaacac

SEQ ID NO: 56238 - DNA, 262 bp, Glycine max
  Clone ID: PAT_MRT3847_21794C.1
aagagatctttttctgctcttagccgatagacgggtctttgctcgacttttgcgatgtctatgctctccagatctcatgaaccttaacctctccgataccaccgagaaggtgatcgcagagtacatatggatcggtggatcaggaatggacctgaggaggcaagcaaggaatctcccaggaccagttagcgacccttcagagcttcccaagtggaactatgatggttccagcacaggtcaagctcctggtgaagacagtgaa

SEQ ID NO: 56239 - DNA, 328 bp, Glycine max
  unsure (1)..(328): unsure at all n locations
  Clone ID: PAT_MRT3847_21795C.1
atccttttttataacactttctctactataatttactgattttgcagcttnncatgataccaatttatcaaacagaaatatccacaattcgttcaaggaactttttgttacctggatccaaaatacatgccttcaaaccaactaactgataaaagtgatgtctatagcttttgggtaatacttttagagcttctaacacgagagaaaccatattctttttgcaagccataaaaaaaaaaatatctcactaaccactttttttcttgcttgaaaaaagatcgcctatctaatgtttttcaacatagcattatgaatgaacaaaattaaa

SEQ ID NO: 56240 - DNA, 164 bp, Glycine max
  Clone ID: PAT_MRT3847_21796C.1
ttgatacgtgacactgggtatggaactttttttccttgacatgaacatttcgaacccgctgggaggttcttaatacaccatttgatctcttttcaactctctcttggaaatagaaattagcaatgacttagttccagcgatatattcatgaggctgcccaccct

SEQ ID NO: 56241 - DNA, 154 bp, Glycine max
  Clone ID: PAT_MRT3847_21797C.1
ggctcgagctaaaattctttcttatctgatcaagtgtctaattctattatctgattttcttccgggggctggagatggtgtgaaagctgtgttcagctattctatccaaaacaactcagtgtacacatgtcacataacccacttggtttcttgt

SEQ ID NO: 56242 - DNA, 398 bp, Glycine max
  Clone ID: PAT_MRT3847_21798C.1
ggaatttttcaccagggatgaatgtgaaaagattctagctaaaccagtgaataccgagagaagaactatccaagaactttgacagtgaaggcagtgggtcttcaaatgatgcctcaaaaacaaaagggaaagtctcaagctttaacctttcaaaatgtgtgaagtgttttcttttatctaactcacacggttggctttggatctcttggtaccattaggagtttaggagaatattgaacaaatgacagtaaaattgtatcgatctttggatcttataatttaggttatagttgagcttacgctagtgaatatatgtaatccaatattaggtttcattaccttactctagatgtgtcagaggaaagatcccattattttatcagcttctctctttaaaa

SEQ ID NO: 56243 - DNA, 265 bp, Glycine max
  Clone ID: PAT_MRT3847_21799C.1
ttggaaactcacttcaggtgtatattattgtcacggattaacaaaaatccagcaagtgactgtcactgtttacatctgatccaaaaataataggttccgcaacaaacaatagaagcacaaaaaatataaggtgacactattggcgaattgcaaatgtgcaatcctcaaatcttactccaagacaaagctccccacgatgccgccttgcatgtacttgcaatcccctcgatgcacgtcttcctcctgagcatctaaatctttccaa

SEQ ID NO: 56244 - DNA, 806 bp, Glycine max
  Clone ID: PAT_MRT3847_2179C.1
cattaatattaatatattagagatatttatgtctccgaaaggtagggcagtacaggagcagaggcagagcataaacgttgttgtgtgtttccttagaaaagagagaaagaaataatgagctccatgggtgagagccagcagcggagcttgtttgggagtacaaaggcatcgtctctgccagtgtcaacgtcgcgttcagactctgaaggaggccttcgcagacgtctttcttctctgtctctgaagatccaattagagagcccaaattcctcctcatggtcatttcccagatccaagtccctctcatccatgggtgactatgcaaggacatggtgggactggagctgggcctggatcctctccaggaagctcatcttcgctacagatctcgaaatgaacgaccaggaaactaagctccttgcctcccataacaggggcacttggagacatgttttctataagctgcgctctgagatcagaaggttcatcaatacttctgatcacaccactcttcccaaaacctaccaccacaagtccactcctcaagtcttctcataattcacaatgcttatgcctccttcaaattatttagtctttatttcagatccaccgtatgcctagcttctgcaattcgtttgttctttttgtttttttttccccacttaatgtgtacaattaattcttcatgttaatttgtcctatctcacactaagcctgtactcaattacgtgcatattctataatctatattaattgtggattgctataaatttgcctaatggaacgtcttaattatttttagctgc

SEQ ID NO: 56245 - DNA, 949 bp, Glycine max
  Clone ID: PAT_MRT3847_217C.1
ttcattcttataataatcattattttcttccacaccttcgtccgcttctgccgccgtcgccgccgtcgcctcttctctcgttcgcttccgaccaattcctccgccgccgcctctctcgacgacccgtgcctcgacccttccgtcatcaagtcccttcccacttttactttctccgccgccacccaccgctctctccaggactgcgccgtttgcctgtcggagttcgccgacggcgacgagggccgcgtgctcccgaattgtaagcacgctttccacgcccattgcatcgacacgtggttcgggtctcactccaagtgtcctctctgccgaaccccggtcctaccggccacgggttcagctgacactgaaccgggttcggtttccgaagcgggtgagggttgctcctcatcgtctttgcctccgccgattgggtgtccgagaaagccattggatataaatataatcatagagattccagaggtggaaagagggtctgattctgtaaccggagatcaagggttcagatggtcattgaagaggttttgcaacgtttaagtgagtgagtgcttttgcaacgaatcacaaacaaggcatagcaactcatggatgctaaaacaaatggacgacattttcgttttacaggcaaatgttattagttttttattaaggaaggaaatcaaacttgtaacttttttctccctatcttcttcttacccaactaaacttataactccccaaacaataggattgtatgataaacagaatatctattgcttgcaagagttatcacttttggtaggtgttactctatctatagaatctcaaatctcaaatctcaatctcaattgtgtttcaccttaaccattggattggtgtatttagttttaatctgtgtatgtttggacgcaagttcaggtgttacaatggtaatttttcactttttcattta

SEQ ID NO: 56246 - DNA, 462 bp, Glycine max
  Clone ID: PAT_MRT3847_21800C.1
aaggtttaattattcgttttggacctaccaacaaacaaacagtgaagcctttgtttttattaccttacttacacctctctatggtctagaccaaataaaaataaatgtctggaaggtaaaattaaatgtagaagtttatagccagacttacatcaaatgatggcatgtgatcattaaaaataaatccggggaattgaatattaaatgtaggagggatgttatgatcaaatgctggcatttgatcatttgttatacaaccggttctttgaatgattatttgtaggatggatgagatgtacttgcttctttctttgcctgggtggttcttgctctagtgtgtctgattaacacaacttgggaattctttctcctcaatgttattttttttaatctcttacctttgaatatattatatgaaatcaaattgggattgaatggaaaaagtatcacctttaggaatac

SEQ ID NO: 56247 - DNA, 2200 bp, Glycine max
  Clone ID: PAT_MRT3847_21801C.1
gtcatcgcctctactccttttcaagattaagtccgtgagatcacttagatgtctctattcctaatccaaatttaataattaaaacatattatagctttgtgtgaaggagtaaatgaaaatatgttgcagttgcgtcctgtcatctcctctactcgacccaaactaagaaaattccacctacccctgttgtatactaaaataataatccttgttcatttaaataaatatttttgatgagataatgcaaggatctgtagctgaagcagaagcagaagcagaagcaggggatgaggaagtgaagtctacgctccttttcaatggcaaactctaagctgaatatcattctcattcacattctcttcctctctttctcctccttcgcagaagcattagattcccagcttaagcaacaaaaccaagacgaagaagagagggttccattcgtgggcgtgaacatcggcaccgacgtctcgaaccttccagcagcctcggacctggtcgcgttccttcaactgcagaagataacacacgttcgcgtctacgatgcgaaccaggacatcctcaaagccctgtcggagaccaagattcgcgtcatcatcagcgtcccaaacaaccagctcctggcgattggttcctccaactccaccgcggcctcctgggatcgaccgaaacgtcgtcgcttactacccccaaaccctcgtcagcggaatctccgtcggcgacgaggttctgaccagcgtcccctcctccgcccccctcattctccctgccctcgagtccctctacaacgccctcgtcgcctccaacctccaccaacaaatcaaggtctcaacccctcacgctgcttccatcattctcgaccctttccctccctctcaggcttacttcaaccaatccctcgtttccgttattctccctctccttcagttcctttcacgaaccggttcccctctcatgatgaacctttacccctactacgtcttcatgcagaacaaaggtgtggttcctctcgacaatgctctcttcaaacccctcactcctaataaggaaatggtcgaccccaacaccttgcttcactacaccaacgtcctcgacgctatggtcgacgccgcttatttctccatgaagaaccttaatatcaccgatgttgttgttcttgtcaccgaaactggctggcctgccaagggtgattctaaggaaccttatgctaccaaggacaatgctgatacttataactccaatttgattaggcatgtctttgatcgcagtggaacccctttgcatcctgagactacttccagtgtgtttatatatgaattgtttaatgaggacttaaggtctccgccgctgtcggaggcgaattggggtttgttttatgggaacactacgccggcttatctgcttcatgtgtctgggattgggacttttttggccaatgataccaccaatcagacatactgcattgccatggatgggtttgattctaagacgttgcaggccgcgctggattgggcgtgtggaccaggccgagccaattgttccgagattcagcctggagagacttgtttccagcctaataatgtgaagaaccatgcttcttatgcgtttgatagctattaccagaaagaaggcaaggctcaggggacttgtgacttcaaaggagtggctatgatcaccaccactgatcccagtcacgggagctgtatatttcctggaagcaagaaagtgagcaacaagacaaaggaagtggtgaactctactatatcaagcaatgcaggggagaagttgaggttcaaaacctttaacagcatcaaaataagtgcaattggcaacattttgcacattttattggctgcatatctccctactttgttgttagtccttttatgaggtgctaataattcaattttttgttctttttggaattttgaatttcatagagttaaggatgaggtcataagagaaaaggaatcgagcatgatatgtaggtctaaacttagggcttatgtagatgcttccttttgttttaagaaagtagtgttaataatttttcgtggggctcttgtaattaacgtatgtattacttgaaattgtatttgttagttaatttgtttagaatgtgtatcaacatgtcaccattatcttcgtgttggaggcccatgattttggtcatttttcgtggtaaaatttcttttccatt

SEQ ID NO: 56248 - DNA, 362 bp, Glycine max
  unsure (1)..(362): unsure at all n locations
  Clone ID: PAT_MRT3847_21802C.1
gaattcggcacgagagatatagcagaggtatggaagaggattgaagaacagaagtgtcacactcagcgtgaccttctcacttagcgcatcaagaccgcttagcccaagaagcctgcttagtgcaagaagctaacttagaggccaactatagggcgcatctggcgatttagcttgcatatggcaacttagcatgcatctggtggcttagtgcacatgcatttggtgggcttagcgcctatgcatttggtgacttagtgcataatcacttataccagctagactttgcatgtacgctcagcgcgcacgtgcagacttagcacacagtggcaattttgattagtcatnnngtgggaagatatttg

SEQ ID NO: 56249 - DNA, 134 bp, Glycine max
  Clone ID: PAT_MRT3847_21803C.1
acaagacttgacaacctgccgcgtcaaactggctcggcccctggtgaagactgtaagtgcggctacaggatctatggggggttcaattaaccaaggttacaattcctatcctacaaatcctgacttgcatctcc

SEQ ID NO: 56250 - DNA, 415 bp, Glycine max
  Clone ID: PAT_MRT3847_21804C.1
aaagaaaagagaatggatttgattccagaactaccctgaaggggaaattaaaagcaaagaaaaacgacagaggaagagatcataaaagcgtagatcaagatcaagaagccgaaatgcaaagcccaattccttttaaactttccgaaataggtatcaggggcggcattggaggcagggggactgggccagggccaggaaaatgaaaaatatctggaagagtttgtaaagctcctttttttggaggtcgatggcacgctttttttcaaagtggagctggattatggtgttcagggcctggaaggctgtttttttcaagtggggctggtgctggatgctgctttcgtactctgccatggatggaagctaagctcttcccttgtccttgtcccgacaacaacgttgcccggacgcgtgg

SEQ ID NO: 56251 - DNA, 527 bp, Glycine max
  Clone ID: PAT_MRT3847_21805C.1
cgcgcttacgctagctattcttttgggtcgggtatagcttgcatccagagaggtagactgggcttcctagacagtatactcaatctcgttggtcgctagaaatcacattgctgcacagaggttactactctcgatgctggagaatgtcgattcctgcatggaactcgaccagcgcactccatttccagcatctttattctatggtgctttcaccggcttctgaattatatcacacggactcatttcactgactgctatagcaacatatcctggtagctcctgatatcttatggctaatgcaaggagagcttgggcttctttttagattggcagaactgtgaatgatggcaagtgtgtcccatagtgctctaacactatggaataatctaagtggctgcaaagcatgctatgaagcatggggcgagctaccacagtatctgggatgagtaactgttgcatattgggcttgggttactgactattaaacagggcagatatagcagataagatactgaggacacgtgcct

SEQ ID NO: 56252 - DNA, 260 bp, Glycine max
  Clone ID: PAT_MRT3847_21806C.1
tccattcggctgtgatctaaacctgcgttgcgctaaacgccaccgttttcactgtctctgagaatggaggcactaagtcgctccgtggaagatctattcgaggatttccagggccgcagagccggcatcatcaaagcccttacgaccgatgttgaagatttctacagccaatgtgatcctgagcaggagaatttgtgcgtatatggatgtcctaatgagcaatggcaggtaaatttacccgctgaagaaggtcctccaga

SEQ ID NO: 56253 - DNA, 498 bp, Glycine max
  unsure (1)..(498): unsure at all n locations
  Clone ID: PAT_MRT3847_21807C.1
ccttaaaccgattcacattattctttctcagactccttcactctgtgttgtcgtttctgtttcttcagcaattcttctcatcgtaggggaaaacatgaagttctgcaaaaagtatcaggaatacatgcaaggccaggagaagaaacttccatgtgtaggattcaagaagctcaagaagattctgaagaagtgcaggagaaactcttcatccctgaaaccccttaatgcatcccttgccgccaaaacctgccccgaccattgcccaggtaatcaaaatgctttttccttttttcggtgtttcaaagtttcaatctttaccctttacagagtgcaatcaatcaacaggagatagaatagaatgatggagtcctggagcgagaaaaaaagactattctctctgtttgcctgctatgatggcatgcatgatatgttgntgntggtggtttaattctaataaacaattcgaaagcattttttttagtaaaggagatttttttt

SEQ ID NO: 56254 - DNA, 169 bp, Glycine max
  Clone ID: PAT_MRT3847_21808C.1
ccaggcttaagattgagcactttgaatggtacagtatgccatgtcttcactgaggggaatcttctttggcttccaaattagattaattaccatatacttatttaaggatagaacaaggacaaatatgtatatggtaattaatctatccttaaataagtggaatcacctg

SEQ ID NO: 56255 - DNA, 695 bp, Glycine max
  unsure (1)..(695): unsure at all n locations
  Clone ID: PAT_MRT3847_21809C.1
gctggatttgccatgtggtattgggatggattgtatggaaaaggaagattggatgtttcagagatgtgttctgttgcgataaagcaggttgacagattggtgagcggtgttatgcggtgaatgatggtgtttgaagacgtggaagttgagatggaagtgttctattgggttgagtcacaaatatttgggaaaggaaaatgtaatgtacaaccatttgaaagcaatcatcattcaaagaactccttgaccccttttttttatgtcagtttggatacatccacacaaataaacagaaagaagaaagcttatagacttaatgttttacatggtactggttatgaaattattaaacatttaaaacagtcacttatttgctttgcatatttggcaaatgagagtgcaaatagtaaaatccttgtatttctgttggccgaaattttttaggtctttagttattttaaaacttttctgttttcatcttgtgtgtgaattggagcacgcctcatcaacctggagtccaccattgattcttccatgatttacaaaccaaaactgtcaactttgacttccgtcctataatgattcttagaagggtcgagatgatgttctttgactaatttcttttgaatggatgtacattnntctttccctctttaagaaagaaagctgtncttagatatgaacccccatactca

SEQ ID NO: 56256 - DNA, 254 bp, Glycine max
  Clone ID: PAT_MRT3847_2180C.1
atttacacctttcaacctctttttaccatgtcagacctcaaagcttccgttgtcgagaccaagaacggcttccatgtcgagggatacgagaagatcgaatatgacttcaccttccttgacggcgtcttcaaccctgccaaaacaacctagccaagtgctatgagcgttggggccgttgcttggccgtcatggacttgaacatctacaacgtctatggcgatgagatgcaaaagtactttgaccactacaaccta

SEQ ID NO: 56257 - DNA, 388 bp, Glycine max
  Clone ID: PAT_MRT3847_21810C.1
acacgcacgcaaacgaagctcgggctcgagatgaacggtaccgtttcgttgatgggatctttattaacagcttcttggaattggaaactggtcctataacagcattgcaagatgaggaaagggagtacccacctttatatcctgttggaccacttgtccaaactggacagcatcttctgcaaatgggttggacttggagtgtctagcatggttggacaaacaacaagttgcttctgttttgtatgtttcttttgggagtggtggaacactctcacaagagcaaataactgaacttgcttttggtttggaattgagtaaccataagttcttattggctgtgagagcaccaagtaatgtagcccatgcttcatatattggggtacaaaaa

SEQ ID NO: 56258 - DNA, 375 bp, Glycine max
  Clone ID: PAT_MRT3847_21811C.1
tttttgttttttaattttttttttttcttcttttccaacgggccatagggaccttaatttaatttaatgtatttttacagggaagttgaccaaaatacccctggttgactataaaaggtcaaccttttgacctactatataaatttttgaaaaactatctgcactatatggggaaaggggaatttcccctttatgtattttgaacccgaaaggaaaggaggaaagggaaaccttaaacatggcgctagataaaatttcggggggccaaaggtttgaggaagcctgatttatacagcctgccaaaaaaaaaggcgggcaaaggaattacaaaaattaaatcatgaggagcatccacactctttttgggtaaatcca

SEQ ID NO: 56259 - DNA, 573 bp, Glycine max
  unsure (1)..(573): unsure at all n locations
  Clone ID: PAT_MRT3847_21812C.1
ctggtacgcccgcggtacccgtccgtaatncccgcgtcgacccacgccgtccgaaaaaaaaaaaaaaaaaaaaaaaaaaaagacaacacaatctaaaaaaaaccaaaattacaaacaaaaaacatacaaaaagaataacccctctatagggacccctatttaaaatacactgaccggccggccgcaccgttgttctccgggctccccccggcgttcccccccgttctttcttctcttctcgtggccccttaacccccctgccgtgcccccctttttgccccctgccgatcgcccttctccccgggttctcccccctttatggcctttgccaccctccctctttctcccatttttttctctaacctaagtggggccctactcgcccccccctccgcaactcttttcagccccctggggcgggggccttcccccttgttccccccctttcntccccacgggcgccggctgccccccccttgcctctccttcctctccctttcctgccccccttccccccggtttcccccggcttttccctccttccctttttcccccctttttgccgcctttccc

SEQ ID NO: 56260 - DNA, 461 bp, Glycine max
  Clone ID: PAT_MRT3847_21813C.1
acataataataataatatatttttggcatctttttattccgtaacacttaccctattattgtcctctttacagtttataactttatacatacaaacaatttaaagaacctttttaaattttccatccaaccgttgactacacaactataagtaccttatttttattttttataacaaaaaattgataataaggaaattgaatcccaatcctataaaaatattttctattttttccaccaccacataaattaactttaaaaaaaattaagatctcacgtattctctgttgaaaacaatcttatcaaatctaataaaactattatcaacaataaaattctcttttaaatagttaccacaattccatattggagctcgaattccagataaatatttaatacaacataattttgtaccaattattttaggtactcagttaaaattaataaaaaaaaaaaaaaaaa

SEQ ID NO: 56261 - DNA, 1269 bp, Glycine max
  Clone ID: PAT_MRT3847_21814C.1
gaagcttgttgtgggggatgttttccgtgccccatcaaatcctgccttgttgtgtataatggttggtgatggagttcaaattctggggatggctgttgtgacaattttgtttgctgcacttggattcatgtcaccggcctcacggggaacacttatcataggtatgctgtttttctacatgatacttggtgttgctgctggttatgttgcagttcggctatggaggacaatcggctgcggtgatcagaagggatggatttccgttgcatggaaggctgcttgtttcttccctggtatcgcctttttgatcctcacaaccttgaacttcctattgtggggaagtcacagcacaggagccattccattttcactctttgttatactgattttgctttggttttgcatctctgtgccccttacccttatcggtgggctctttggagcaagggcacctcacgttgagtatccagtccggacgaatcaaatccctcgcgaaattccccagcagaagtacccatcatggcttttggttcttggtgctggcaccctcccattcggcaccttgttcatcgagctcttctttatcatgtctagtatttggatgggccgtgtttactatgtatttggatttctcttagttgttatgattcttcttgtggtggtctgtgctgaggtatctctagttctaacctacatgcacctatgtgtggaggactggagatggtggtggaaatcattctttgcctctggttctgttgccatatacatctttttgtactccataaactatcttgtatttgatctcaagaatctgagtgggccagtttctgcaactctttacttggggtattccctcttcatggttctagcaatcatgttggctacaggcacagttgggttcctttcctcattctggttcgtgtattacttgttctcttcagtcaagttggattgaagactcttcacagtcaaaaaaattagctctacagagaacagttttcaacaggaggaccctcggaaatgttcaattttatgttactttatttcagtccattttactaaggaaagtagtaaattttataacaaataatcaagttttactttttttcattgttagatataatatcattgtatgataggttggaattctgaggtttatactgtacttggccgtcgcagttgaggaatgtaattctgataatgggatgttcatggccttacatgcaaaatttacaatttcattttattcacattaccggttttcagttt

SEQ ID NO: 56262 - DNA, 401 bp, Glycine max
  Clone ID: PAT_MRT3847_21815C.1
accggtggtagaagaccacagaagggggcacatgtgagtttgttgatcgaggtggctcgggacagtgggatcaaaatgaaggtccttgacttcttcattgatacaatgttggtagcatggccatgccatgcctacgataatgagagctctatgaatgaacactggctatggcgccagacctaaccacgtggaatgcacaggtcaaaggcttgctgccaaagcgcacagcacacttctattatagacctatccaggagggtgcttagtgtcatcataggaactcgtgcttggggatctaaagatgcccctgttgatgctgtctatggagaagctgactatgtggttggaaagccaaagacaaacactgacttcctatcatacaatggggttgggatcaaact

SEQ ID NO: 56263 - DNA, 235 bp, Glycine max
  unsure (1)..(235): unsure at all n locations
  Clone ID: PAT_MRT3847_21816C.1
gctcgacatggtatgccaccctcacaccctaataccaatatctcacactcatcaccttatcctcaattccccggctcccaatcccaatccaattctctctcccagcctttggactctccccatttcactccgnctacgtccattccaggtctttctctcactactctctcatctctctggattccttgcacccattgaacacttccccttacaaagacacttccttttccgactc

SEQ ID NO: 56264 - DNA, 446 bp, Glycine max
  unsure (1)..(446): unsure at all n locations
  Clone ID: PAT_MRT3847_21817C.1
acgggncgggaatnccggggcggaccacacccttccgaactaatgttacaggaacaatattttttttgaaggaggatggaactttgccaccatgggcggtggagttaagtaagcaacatcctaaggttgaaaattatggtcctgttagcaaaatttacttgcttgccagcaaaggagtgaaagctatttttgggttactggcaaaggttattgtggtggggaatgatcatgctcccataaaataattagccattggttaagcactaatccaatggtggagccatttgtaatagcaccaaacaggcaattgaggggggttaaccttattaacaaactttggtttcctaactaccgggacaccatgaattttaattaatttgcccggaaagccctggtaaatgcaaatggtttattagagaaacaatttttggggggtaggtactttt

SEQ ID NO: 56265 - DNA, 1322 bp, Glycine max
  Clone ID: PAT_MRT3847_21818C.1
aattcgcacggataatcgaactactttcacttcttcaaaatggctcactcgttgataagaaaatgcataaaacctgcaaccctcaacttcctgacaccactcgcagtccctgagattcggcggcggctagcgtcggtggcggcagcggcggacgaggaccctccgcaatcgccgtcgtcgttcactttctcgtcggagggggagaaggtgtacgtgaagccgccggcggggaagtggaagccgtcgccgtcgtcgacggtgacgatgccgatgtcgttcatgacggggtccatcgtggggaagcgcttctacaaggaggtgaagactcgcgaagccgatgacgggaacggctggacggttatgctcgattaccgaaccctaaagactccttccaagagacccctcaagcttccctctcttcctcttgctaaagccattgctgctgaatgggaataccagcaaacggatggcataaggcccttcacaatgcctcttatgagacttgcttgcactgccttggaaagagttccactcacaaggagcaaagttattgagaatttgatgaagaaatttaatcaagatttagtattttgccgtgcacctgatgacgatgagctgacaagctatgtacatgctcgtcaggtggagaaaattgatccattgcttcgttgggtggagtcagaatttggctttaagccagttctttacaccagcttttttggtggaaagcaggaagatggtcttgtaatggctattgagaaccttctaaagaaaacagatgattgcgaattggcagcaattgatgctattgcagcatcagcacattcgttaattatagctattggaatggttcaggggaaattgcaaattgaggaagcaattgaacttattagacttgaagaagattctcaggtggacaggtggggcctcgtagaaggtggccatgatgtggatattgctgatctaagggtgcaggtttcgtcagcaattgtatttcttggtttatcaagatgcatataggcttttaacatcctttcatattttacgttaccatcctaggaactagctatcaggctagactagaataggaaaccaggggttgttgtcatatccagatctttccagagacaataaatattcttgggtacgcataatttgctttgtagagttttatttatggttacagttttgtcatgggttgaaacattataaacatggctttaaaagggcctgatttgtactggaataacaggtaaaattctttgttcaagtgttttctttcagcttcattattcataggaaacaaaaatgtgggttgtgtg

SEQ ID NO: 56266 - DNA, 636 bp, Glycine max
  Clone ID: PAT_MRT3847_21819C.1
aattcggctcgagatagagagggcaaaagatcatctatctttctgcttcaaatcttcacgctcatcatttacaataaatatgtgggaaattgatagcacagtaaaaaaaggaaggcgcaagacaccaggtactgctgggaacaaaaaatcccttgaggttaacttacctgaaagttctcgaaaatttattacttgcattcgaaagtatttgctgttttatctcaaactattggaagagactggagatagatgtattctcgaacgttcatatgttgctcttcgtgcagataaacggactactgcctctggttcagtgagcagttctaacaatgtgctggagagaatgtttgcattgttcatggagcaagggagcttatggccagaaatatgcagtttgcccgaaattgaaggctcagatatgtcagagactatcatatatggatatcttcatgaacatattgtattgttggagaaaaatggaaaactggaaactcttgaagcaacaaatgagaagattaggaagcgttctaagaatccaaagttctcagacagtaattgtgcaaaagttggcaagcatgcttctgttgcttggtgtcgatctcttggatataatttggcacaaataactccattatc

SEQ ID NO: 56267 - DNA, 380 bp, Glycine max
  Clone ID: PAT_MRT3847_2181C.1
ttgggggggggggggggggggggggggggggggggggggggggcagcatgaaacataacagggcgtagggaataacatacaagaaggttgataccgaaaccctagaataaggcacgagattagtgaagaagcaaaagaatctagagaatagaagctggaaactaatcggtagagtacaacccaaaaagacgggcaagtttaggtaataaaaagtagctcaggaaaagttaaggaaaaaactagaaacgaaaagaacgggggaaaataccgagtgccaccaaactaatggtagggacgctatggttgtaagtggccccttaccattagggttattacaaccaccactactagatgtagatgggcagctattacgattattt

SEQ ID NO: 56268 - DNA, 1535 bp, Glycine max
  Clone ID: PAT_MRT3847_21820C.1
aaatttattacttccagtcggggctattggccgtctttcctcctgcttctggtagagactggagatagatgtattctcgaacgttcatatgttgcgcttcgtgcagataaacggttttcattatgtattgaagatcttataccagtggctatcggaaggtatctaaaggccctgatttcaactatgtgccattctcagactacctgcctttcggttcagtgagcagttctaacaatgtgctggagagaatgtttgcattgttcgtgcagctggggagcttatggccagaaatatgcagtttgcccgaaattgaaggctcagatatgtcagagactataattcggctcgagcttcatgaacatattgtattgttggagaaaaatggaaaactggaaactcttgaagcaacaaatgagaagattaggaagcgttctaagaatccaaagttctcagacagtaattgtgcaaaagttggcaagcatgcttctgttgcttggtgtcgatctcttgtatataatttggcacaaataactccattatcttgtgaattctcaaatgggattcaggtccttagtttgactgatggtgggatggataatagccagttgctctgtattgatttgcagccaaaagaattatggagtacagcttttgaagatccaactcatttagaaaagattgaaacaaaatggagcactattttatctaaagtaaaaaatattattatcaagaaagcttctgatgagaatttggaaactgcaaacactttgctcagagcttgctataatttttaccgggagagttcttctgtagtgcttacctctggactcaacttttatttgattccatctcaatcagtaacacagacaccattcaacccaagtactgctgggattgaagcacttgatctgagcataccaaggaagcttctcttgtgggcctacgtgctatcccatggacgttgtgcaaatatctcaattgttgtaaagcattgtgaagaaatgtcgaagtccaagatgaaaagaggaagtggaacgtcacctgcgttatcaaacacatctcctgcccctagtcttccaggtagcggtaaaaatggaccaaattctgccggaggcattgacgttgattctgcacatgtcacaacagtggggtccggttcagtttctagtggcaataccactaattttgtgaattcacttccttcatatgacattcagaaaaatctctttgcttctccccagctgcatcaatgcaccagtaacgatgcagaacgaagcaatttggtagcacttgaaggagatacagagggagattgactttcatgtacgtgggacgaatttgattagggcagtgacagctacgatatacattgtaatgatatatatacagaacttgtaaatcccatttttgtgatagaaaatgtaaatacgattctacttgagacctttacgatatgcattgttttaatcgcatgacggctgtacatagtaccttgaagttgtgatgaatgtagagttgtaaacacaattactttt

SEQ ID NO: 56269 - DNA, 439 bp, Glycine max
  Clone ID: PAT_MRT3847_21821C.1
aattaccgggtcggcccactcgttcttacacgcgttcgaacacctccgacaagactttttaatgtataatagggttcctcctcctttgatgctacccctacatcgggtccttctgaaactttaaattccagcagaatgacactttcacaacatgctctgacattctctccaaatattcgacggcttcagttttaattccaaatactgcaattcttacttctgaatttcaatgatgattaatactgcatacgaacatcctgatggatgaaccaaattcaaaagtttttttgatagattatctctatgctgttggctctacaattattacttccacattaagaacttgacaactctctttagttcatgcatgcaacctttcactatggcatattaactttacaccattctctaatactttaaattactttaaacacttact

SEQ ID NO: 56270 - DNA, 294 bp, Glycine max
  Clone ID: PAT_MRT3847_21822C.1
cccacgtcgtacctgcaaatacagtaaatatcattattcacggggacaatccccatctgtccatttaccatctctcaatattttcttctccatcgagaagctctcgcgtaacgtaaaacaaagcaacctctatacaggatccatctccatagcccatgtacaggtgatcggcacctctatctcgcggatcggggaacccggtcgtcctgcgcaggaaggcagccaccggcgccgccaagaaggacgagaaagccggccacgccgcccggcgctccggcgcggaaaaagaaaccc

SEQ ID NO: 56271 - DNA, 319 bp, Glycine max
  Clone ID: PAT_MRT3847_21823C.1
catggtggggaaaacaatttcatactatgtgttattttctgtagcatctttcactttagatagtagggtttatatcatccaccgatactgtaaaacactccctcgatataagtactcctgtttaaagcccaattttgagtttctgtctgttgaatgttgttatcattgtaaattaatatttccatctaattcagctttccaaacaataattggtccttctctaaaagatattcgtttggcaaatcatcttgcatgtttctaagcttgtaataagcttcatcaatattgttccttaaattaacattttttttcattaatt

SEQ ID NO: 56272 - DNA, 630 bp, Glycine max
  Clone ID: PAT_MRT3847_21824C.1
cggtccggattcccgcgtcgacccacgcgtccggtggatgaaaccaaccttctcttatgaacatttcacttcattctgctccctcctccctctgaaacctctttctctgcctcatttttatacctatctatttcataatacatctttgggttatatacccaacaatgcattaagggtcttttttttcttcttttctctcttatccaatcatccaagtcctataaaaagcatctatatatatatatattgatattgctttgaactttgatttttatttttttttcaattccccaaaaggagtggaaaatggcaccaagaaacagtcgcggaaagcccaagggagagaagaaaaagaaggaagaaaaggttcttccggttgtcatagatatcactgtgaagctcctcgatgaaactcatgttctgaagggaatatcaacggacagaattatagatgttcgtcgtcttctatcggtgaatacggagacgtgttatatcacaaatttttccctgtcgcatgaggtaagagggccacgtctgaaggacacggtggacgtgtccgcactgaagccctgcctcctcactttagttgaagaggattacgatgaagaccgagcagtggcgcacgtgcga

SEQ ID NO: 56273 - DNA, 594 bp, Glycine max
  unsure (1)..(594): unsure at all n locations
  Clone ID: PAT_MRT3847_21825C.1
tacggctgcgagaagacgacagaagggggtatagagacacatctttctttattccattggatctgaaaaagaccagttacccaacctcatacatcattttattagttcccaatcaccctctttgatgaggatcacaggtgcccatcaaagacacacaggaccctcccttcctttccttccttctatttcttttcctcatgcatgaaatcattcaattggtgagtatctttgcctctgcaaaaggaaactggaaactgaagaaactagctaactttcccgccccacaaggccaaaaaacttaactttctttcacctctctcaccactttttcctctctcaaaagatgtcacccgatgacacaccacctccaaagcctgccacagcaaaagaccaagagactcaaagttccggtggtggcagaaaaagctcctccacaaggccccaagagcaaggtctcaagtgtccacgatgtgactcacctaacaccaaattctgctactacaacaactacagcctcacacagccaaggcatttctgcaagacatgtagaagatactggacaaaaggtggggctntgcgcaacgtccctattgg

SEQ ID NO: 56274 - DNA, 485 bp, Glycine max
  Clone ID: PAT_MRT3847_21826C.1
aagcccggaattcggctcgagcaaaaatattcattcaagctgaccttgcttttttctaaaaggattttcttgccaacgcgcagggttaatttaaactactcaattattcttccaacttttgcattagtgtaatggactcttattaactaccttgacgatttataaatctttttatacttatctgcctacaccaaatccatatatgtaagaaacaaataatgtacttatttattcatcatacaaaaaatagttaatttttttccttaagatcgcacattgattgaatgaatcaaaaaaaaatcagctatattaaaatgtttaaaacttattaacaaatataagttctaaatatgcaacttctttcaatattttaaaaacaaaactttatgattgataatgatttcattacacttaaatcaaacgactgtcctataaaaaaatatattttgttctctacagcaacatgtttgaatcataattacctc

SEQ ID NO: 56275 - DNA, 1666 bp, Glycine max
  Clone ID: PAT_MRT3847_21827C.1
cccacgcgtttactctttttttcgcccacgcgtccgctggaaacctgtgtggtgaatctcaaccgcacacatcatgctaccttatcatctttattaaccgttcatttcctagccagtttcacacaccccactgaactcactcactggaagccttgttgtgagtaagggaaaggcttcctgcactgagcaccaagttgaaacctcttgattctttgcttagaattccacagaatatggagactgttcttttcaatgactccccacctttggagttcaagggtatgagcaaggaggaggaagactcattgctagggcaagttgaaatatggaggtacatgacatgcttcacggactccgtggccttgaaatccgtcatagagctgcgcatagccgacataatagaccgttatgggaaaccactatccttgtcacaaatcgtggagaacatagatgatgcaccctccccagatgcctctcttctacagagagtgatgagagtgatggtacgtagaaagatcttcagtgcagaacaatcagagactggagagaccctctacggcttgacacgtgcctcgaagtggatcctccgcgacacaaaaatgaccctagcacccatgttgctgctggagaaccacccaattcacctgaaccctgctcactacattagtgagattattagagaaggcactaaaaatggcactgctttctttaagtgccatggccatgagcaatttgagatgacaggtttggaccctgagtataatagattgttcaatgagggcatggtgtgcactgctagggttgtgtccaaggctgtgatcactgggtacaaagatgggttcaaccagattaagtccttggttgatgttggaggtggcattggagggtctctttctgagattgttagggcttatcctcacatcaatgccatcaactttgacttgcctcatgtggttgccactgctcctaagtatgatggaatcacccatgttggaggtgacatgttcgtgtccattccagatgctgatgctatttacatgaagtggattctgcatgactggagcgacgagcactgcgtcaagatcttgaagaactgcaggaaggcaataccagagaaaacagggaaagtgatcatcgttgatcacgtgctgcggcccgaaggcaacgaactcttcaccgacgttggcattgcatttgacatgatgcttctcgctcacaacgccggcggcaaagagaggacggaagagaactggaagtggctgttcaaagaaacaggtttcgcccgttacaacatcatcaagatcaacgctcttccttccatcattgaggcgtttccaatctaacgaagaggaagccactacacttcatgtgcgtggttttatgttgcatgtgttgttattattattaacagctatgtgatcttcgtgtgatgtggttttcatccctacccgtgttatgtttgtgtattaaataaaagtatgaagcgccccaccaccaagtaatatgggttatatacgtgttccatatataccaagagagtggtgcgtggttgtgaagaatctatatattgctattaatgaatgagtactttggtgtgcaaaacttgctttctgtgatgttttctctcctcactccatatatatatataatcctttgctcaagttcc

SEQ ID NO: 56276 - DNA, 1742 bp, Glycine max
  Clone ID: PAT_MRT3847_21828C.1
ccacgcgtccggcttctcaataattcaattgcacgttcctggaaacctgtgatgtgaatctcaaccgcacattccctgctaccttatcaattcgtgcattcaactgaagcaatcaaccacacacgtcatgctacttatcatctttattaaccgttcatttccaagccagtttcactcaccccgctgaactcatcacttactggaagccttgttgtgagtaagagaaaaggcttcctgcaccgagcacaccaacttgatacctctgattctttctttgcttagaattccacagaatatggagactgttcttttcaatcactccccacctttggaattcaagggtttgagcaaggaggaggaagactcattgctagggcaagtggaaatatggaggtacatgacatgcttcacggactccgtggccttgaaagctgtcatagagcttcgtatagcggacatactagaccgttatggtaaaccactatccttgtcgcaaattgtggagaacatagaagacgcaccctccccagatgcctctcttctccagagagtcctgagagtgatggtgcgcagaaagatcttcagtgcacaagaatcagagacaggagaaaccctcttcggcttgacacgagcctcgaagtggatccttcgcgacacgaaaatgaccctagcacccatgttgctgctggagaaccacccaattcacctgaaccctgcgcactacatcagtgagattattagagaaggcacaaaaaatggcactgctttctttaagtgccatggacatgagcaatttgagatgacgggtttggatcctgagtataataggttgttcaatgagggcatggtgtgcactgctagggttgtgtccaaggctgtgatcactggctacaaagatgggttcaaccagattaagtccttggttgatgttggaggtggcattggagggtctctttcggagattgttagggcttatcctcatatcaatgccatcaactttgacttgcctcatgtggttgccactgctcctaagttcgatgggatcacccatgttggaggtgacatgttcgtgtccattcctagtgctgatgctatttacatgaagtggattctgcatgactggagcgacgagcactgcatcaagatcttgaagaactgcaggaaggcaataccagagaagacaggaaaagtcataatcgtggatcacgttcttcgacccgaaggcaacgaactcttcacagacgttggcatcgcattcgacatgatgcttctcgctcacaacgccggtggcaaagagaggaccgaagagaactggaagtggctgttcaaggaaaccggtttcgcgcgttacaacatcatcaagatcaacgctctcccttccatcattgaggcgtttccaatctgaagaagatgccactaccacaactgcatgtggtttttatgttgcatgtgttgttgttattattaacagctatatgatcttcgttttaattttgtggttttccttcctgcccttgttatgtttgtgcattaaataaaagtaagaaatgccccaccactaagtaatgctatatggattatgtatgtgttccatatatgtcaagtgagtggtgtgtggttgtgaagaatctattgcttttaatgaatcagatcctttggtgtgaaaaaaaaaaaaaaaaaactcgaccacaagagaggcagccgcagcagaagttgccgccacaactgacctctctattgcc

SEQ ID NO: 56277 - DNA, 452 bp, Glycine max
  Clone ID: PAT_MRT3847_21829C.1
ctctctttttctatctccttctttctttgtttctgtgtgttcgagattgaagaagatgatggaggctgaacccgagggcatggcccatcatgcgaacctacactacgcacagaaacagcttcaaccctacatgatgatgccgacgcagactcagcccgcttatatgtgggccacatctgtccaaccttcgatccagtcggcggcttcttcacaacgcagcagctccgatgaagtccgtaccctctggatcggtgatttgcaatactgtatggacaaaaattatctctacacctgtctggcacacaccggcgaggtgacttcatgtaaagacattcggaacatactgactatgtcaatcggagggatatcggtttatcgagtttactagtcgtgctaaagctgagagagtgctttaaacatacaatggcaccattatgccaaatgcttggcag

SEQ ID NO: 56278 - DNA, 272 bp, Glycine max
  unsure (1)..(272): unsure at all n locations
  Clone ID: PAT_MRT3847_2182C.1
tttcatgataatacaagtaaattacactattcttcgatgtacgttgacaaaaatctgataactattggaatttgtctattataaccgtttttcagaagtaaaaagggctgtttgaaaaaataataatattttggggcacttgctatatccatcccatcccttccctttcttctttttaaacttaaancacttaaataatctcttattcanatatcttcttctttcccncacgatcacacactcaataatgcactccttccatgtcaacaaac

SEQ ID NO: 56279 - DNA, 1291 bp, Glycine max
  unsure (1)..(1291): unsure at all n locations
  Clone ID: PAT_MRT3847_21830C.1
catacataaatacacatgtttgcttattttaaaaaataataataatttagtccaaccctgtataagagatagctcaaatgattgggtatgtcttcaatacgaaagctccaatggcttcttactacttcctcttgcttgttctcgtcggtgcaactacagcttctggggctgaactatgtgcagacttttactcatgcacctgcccaaacttgttgcctatagtgaagaaaggagtggccaaagccattcagaaagaaccacgcatgggcgcttccttactccgattgcatttccatgactgctttgtaaacggttgtgatgcatctatactgttggatgatacaagcaacttcattggggagcaaacagcagcagctaacaaccaatcagctagagggttcaacgtgattaatgatattaaggccagtgtggagaaagaatgccccagagtagtgtcatgtgctgatattcttgctttgtcagctagagattctgtagtttatttaggaggaccttcttgggaagtggggttggggagaagagattctactacagcaagcagaagtgatgctaataatagcattcctgggcctttcctcagtctaactgctctgataaacaattttgctaatcaaggcctctcagttacagatttggtggctctttcaggggcacatacaattggcctggctgaatgcaaaaatttccgagcacacatctacaatgattccaacgttgatccctcttaccgaaagttcctgcagagcaagtgccccagaagtggaaatgataaaacactcgaaccccttgaccaccaaactccaatccattttgataatctatactttcagaatttggtgagtaagaaggcccttctccattccgatcaggagctgttcaatggcagttctactgacaatctggtaagaaaatatgctaccaatgctgctgcattctttgaagactttgccaagggcatgctcaaaatgagcaacatcaagcctcttacaggaagccagggccagatcagaatcaattgtgggaaagtcaattaaacgttagcaagtgatgatgtataatatgtttttaatataaattttatttccctcctccaaagttatgtcgaataatttgatcctcgaaccgtcaagcaacctggtttatcatcaatgaactacgtagttttatatgtacaccatatatgcacatgactttgtgacaaatgaacgacaatcaacataaccagcagacttatagcatcaaatgancgncaatatcaaactatctatcc

SEQ ID NO: 56280 - DNA, 345 bp, Glycine max
  Clone ID: PAT_MRT3847_21831C.1
gaaagaacaagttcaagaaacagtaagagccaaggagaaaagaaaaaaaaaaagaactggactccttcaattagtgcattgtttcttttcttcaaattattattatttgtttcatgttatgagaatattatctatgtataaatagatggtagcaagaagacattgttaatttgagagatggcgagttacgaggctattaagaactttgatgatgatgatgatgatgatgatgatgtggagatggcactaccccataaccagatctttgaatcaagatctgccactgtttcttcccccattggccaaactaccccgcttcacattcacaacattattgaggaacaa

SEQ ID NO: 56281 - DNA, 2075 bp, Glycine max
  Clone ID: PAT_MRT3847_21832C.1
ggtctgtccacgcgtccggtcgaatctctctcgacaaaaagctattggtgggggggctggtatcgacttagggggggtaccgccaacgcgactccttcaacgagtactgcattctccggaaacactaagagccaaggagaaaagaaaaaaaaaaagaactggactccttcaattagtgcattgtttcttttcttcaaatggtagcaagaagacattgttaatttgagagatggcgagttacgaggctattaagaactttgatgatgatgatgatgatgatgatgatgtggagatggcactcccccatagccagatctctgaatcaagatctgccactgtttcttcccccattggccaaactaccccgcttcacattcacaacattattgaggaacaacgcattatctccaggcaccaacctcaacccaaatctccgcgtctggtttctcttgatgtttttcgtggtctcaccgtcgcgctgatgatacttgttgatgatgctggcggactcattcctgcgctcaaccattccccatggaatggtttaacactagctgattatgtcatgccatttttcctatttattgttggtgtttcgcttgcactctcatacaagaaactgtcttgtggagttgatgcatctagaaaagcaagtttacgggctctaaaacttcttgcgttaggccttttccttcaaggaggttatttccatcgcgtgaatgatctgacatttggagtggatataaaacagataagatggatgggaatactacagagaattgcagtagcatatttggttgtcgcactgtgtgaaatttggctcaagagtgatgatactgttaattcaggaccatccctattaaggaagtatcgataccagtgggctgtggctttgattctttctttcctttatctttgcttgctatatggattgtacgttccagattgggtgtatcaaattcaaacagaaccttctgcagagccaaagacattttcagttaaatgtggagtaaggggtaacactggtccagcctgcaatgtggttggaatgattgatcgaatgatattgggtatacaacacctgtacaagagaccaatatatgcgcggatgcctgaatgcagtattaattctcccaactatggaccattacctcctgatgctcctgcttggtgtcaggccccttttgatcctgaaggactcctaagttcagtgatggctattgtcacctgcttgattgggttgcactatggacatattattgtccattttaaggaccacagagtgagaatcatatactggatgatcccaacctcttgtcttttagtttttggccttgcgttggacttatttggaatgcatataaataaggttctctactcgctcagttacacatgtgtcactgctggtgctgcaggcgtcctctttgtcggaatatacttgatggttgatgtctgtggatgtcgtcgcatgactttggttatggaatggatgggcatgcatgcattaatgatttatatccttgctgcttgcaatgttttcccaattttccttcaaggattttattggggaagtcctcacaataacattctcaagttaattggagttggcacttgaagaaaggcacataaacatgctattggataaaagattatatgcagtaagactgtgaacatgttttactgtaaaagaaatggctacccgagtttttggagctaatcttttgatcaagaacaagaacgggtgtagcatattcttctaatctcttgatgacgtcacctgcatggatgatggatatagtttagagttcactacatctcttgatggcattaccttttctatatatggagcagcgtttgtttataatagcaccactgcgatataatttgtacttttactttatatccttgaaatgatagatttcaagagagtaagcatcattggacacgatacgatattaatgtaaaatttagttttatattttatttattgttactattagcctagaaatgtcaatttcttctgcatgagctggttctctattattggatctagtaaaactttgtttaatcatgcc

SEQ ID NO: 56282 - DNA, 472 bp, Glycine max
  Clone ID: PAT_MRT3847_21833C.1
tccgcggacgcgtggggtaagagccaaggagaaaagaaaaaaaaaaagaactggactccttcaattagtgcattgtttcttttcttcaagtaagaagactccttccttctctccttctttctttctttctttcctccttactcagaaagaaggattcacctgatcattattattattatttgtttcatgttatgagaatattatctatgtatatatagatggtagcaagaagacattgttaatttgagagatggcgagttacgaggctattaagaactttgatgatgatgatgatgatgatgatgatgtggagatggcactcccccatagccagatctctgaatcaagatctgccactgtttcttcccccattggccaaactaccccgcttcacattcacaacattattgaggaacaacgcatttatttcaggcaccaacctcaacccaaatctccgcgtctggtttctttt

SEQ ID NO: 56283 - DNA, 263 bp, Glycine max
  Clone ID: PAT_MRT3847_21834C.1
cgtactcgtgggttaattttgtgatgagttcttccgtcctctttcatgcttcgaagggatgataaaatgtggaagttctaattgtagctatgtcagaggatggagccaatactttgtaagaaaaaaaatttggttttttagttatatattaaatattatgagttggaagatgaaaaaaaaaaaaacaaaaaaaaaaaaaaaaaaataaaaaaaaagaaaaaaaaaaacctaaagaaaaaaaaaaaacacaaaaaaactaaaaa

SEQ ID NO: 56284 - DNA, 653 bp, Glycine max
  Clone ID: PAT_MRT3847_21835C.1
ctcgagccggttattctggaacagcaattatctcaaggatcaagccactttcagttcgatatggtctaggtataccagatcatgatagtgagggtagacttgtaactgctgagtttgatacattttatttgatatgtggatacgtccctaattctggagatggcttgaaaagattgtcttacagggtgactgaatgggatccatctctcagcaattatttgaaagagctggagaagtcaaaacctgtaattttgactggtgatctaaattgtgctcatgaagagatagatatatacaaccctgctggtaacaagagaagtgctgggtttacagatgaagagaggaaatcatttgcaaagaacttcttatctaggggatttgtagatacctttagaaggcagcatcctggtgttattggatatacatattggggttaccgtcatggtggacgcaagtttaacagagggtggcgtcttgactatttccttgtctcagaatccattgctgacaaagttcacgattcatacattcttcctgatgttaccggtagtgatcattgtcctattggccttgttgtcaagctttagttttgctatccaagcaccaagttatgggcaagcctatattatatactgcaagcagggatttttgct

SEQ ID NO: 56285 - DNA, 237 bp, Glycine max
  Clone ID: PAT_MRT3847_21836C.1
ccacgcgtccgatgacgcgttattacgggtgggaggagacaacttcatgcggaggcgggacggacccttggtagaatgtagtataggtcgaacatggaccgtagcagcaatggcgggctttcatgatgcttaatcatttgtgaacctggagatgatgatcaagatgtcctaagcgaccagttagcttcgctaactatctacaacccaatgagctagatgttggataataggaatgct

SEQ ID NO: 56286 - DNA, 359 bp, Glycine max
  Clone ID: PAT_MRT3847_21837C.1
atctcgcgaaaatggggaatcctgctgatgacccggtatatgtggaggctttcgctcgcacgttggtgcaattcaatgagagtcatgaaacatgaccctcgagatgagcacacgatgactatctgacaacttgcacaactcatgtgcttgctgcaacaactctggaagcgggtgggagtccataaaagtatgctatggaacatgatgggcgagcgtcctcaataccccaagattacgtactcggtgatacgacgacaaccatattctataggggtgcatatgggcaaaatactggccgttgatgtacatcgctgtgggtgaccataccttagtgtatcccacagtaaactgcttggaat

SEQ ID NO: 56287 - DNA, 138 bp, Glycine max
  Clone ID: PAT_MRT3847_21838C.1
tattctaaataatagcagttttatattgtctttcctacaaacaacaggttacattaaaacgggaacaaacagaaccagttttatagaacagtaatgggaactagatctagccgggacagaaccatcccctcaaaagag

SEQ ID NO: 56288 - DNA, 421 bp, Glycine max
  Clone ID: PAT_MRT3847_21839C.1
gagcggtgcttttttttttttttttttgcaaacaagtaggccccgggataataaaaagggggggcactgcttccccccaaactcaagattgtccaacttcgaggcgttgttaaaaaaaagggcgggggcgataacaaaacgcggcatccggctactttggggggggcttggccttgccccacccggccttagaggcttaaaaaatagactcgctcattggcggatgttcatggaaaaaacggggggagacccctccccccgcattttacttttccgccattgaaaccccctgaataaccctctcttgaatagaaagtcataatggggcattcccaacccataaaatgtggggttttggggcccttgcccccacaaccctaaaggggggcccatagccataaaaaagggggggggcgggggc

SEQ ID NO: 56289 - DNA, 254 bp, Glycine max
  Clone ID: PAT_MRT3847_2183C.1
ctaatttgagcaacaaaaattagttggctaatatatgacctgagccagcaactggaaaaatgatgggagaaggttgttgactttttaagctactttacaattcacttccctccctatcttgtatattactggaacagcttatgctattttctacttattaatattttaaatttacggtttacagaaatgattaatgacagtcatgtgtaagcttttctttaatctatttagagtttgtttgttgatgctgaagt

SEQ ID NO: 56290 - DNA, 576 bp, Glycine max
  Clone ID: PAT_MRT3847_21840C.1
aaaacccgccgtctccggcggaagactcggcggcggcggcgccatcctccggcgaagcaaaaccttccctcttccctctatttcctctcacagcctcctcctctctccaaaccaccaccacatcctccactccccaatggctcagcaacaccagcttcaccaccgacatctccgttataaacgacgccgtggcctcgcaactcaaccgcgaaatcacgcagtcgccgccacaagacgacgaggacgaaaatcgcgcccaggcgaatcccctcccttcttctaggtacgagattctggaatcttccgaatcggacggaggcggaagagatagagagaggaagaagagaaagaagaggaaaaagcggaagcgcgattcgtctgtggagagaggcggattccatggtttcggttcgagaaagtcgcgcgttcgagcttgggcggattcggaggccaaagttgccaaggattattacattgattctcacggagatcgcgacaatctcgcgttcggatgtatttacaggtgttttggatggaataatttgaaattgaattgaatctaatgatataatggtc

SEQ ID NO: 56291 - DNA, 647 bp, Glycine max
  unsure (1)..(647): unsure at all n locations
  Clone ID: PAT_MRT3847_21841C.1
ggtgtaccaaaaaacaacaataaatccatactcatcctttatgattatttcctttatgtaaggttcttttgtgtcaagaaacaaatctgagttgatcacttgacttccgatcatattgaataactaaatttgaccaacccaggaaattacaatgtcctggaatctgttgttgtctttaattagtgctgtcagatgctttaatgcttttgaaatttcatcataactagaatgcgatatatcacccgcaacaaataggtttgtctcttgcccgactacaatccagctacacccaggaatcttttggatatctttctttatcattgttctcctcaaagatctagcttcatcccaatttcctgatgcagcatacatattagaaagcagtacatatggagaagaactttggggttctagttcaataagtttattagctgccctctgtccccttttttcatccccatgtattttgcaagcacccaataaattggcccaaatcatagcattgggttcaacttcaagtttgtcaatgaactcttcagcttctttgagaaaaccccacctaccaagaagatcaaccatgccggcatagtgatctactcggggctcaatgccagtataatntaccatgacatccaaaaatttgacga

SEQ ID NO: 56292 - DNA, 926 bp, Glycine max
  Clone ID: PAT_MRT3847_21842C.1
ctgcctccaaacctcacacctcgcgcaatcacgactggaaacgcgcgcaaattgaacacgatgcagcttaccaccctcctcctcgccggccttagcgccgtgagcgtttcagcggtgccttcgatgggcgcatcgtgggtccccaaccaggtcactgtgaaggaggagtacaaggtgcctggcgacaaccctctgtacttctgcgccgacccggcggactacatcctgcagatcgagaaggttgacctggaccccaacccacccaagcctggagagaagcttgccatcaaggccagcggtgactttaaagaggaggtcggcgagggcagcaagatgcacctgcaagtcaagtacggtctgatcacattgatcaaccaggagcgcgacgcttgcgataccatcgagcaggcagaccttaagtgcccgctgaagaagggcgagctgagcttgaccaaggacgttgagctgcccagggagatccctccgggcacatacaccgtcctcgccgacgtatataccgaggacggcgacaagatcacttgcctgacagccaagattgctttccaccggtaattgtttcacgcaatgaacagttcgctcgacattcctaaggcgcctctcagcaacggcaagagtgacaccaaagaggacagcaatgtcgttgatggctctggtatcctgaatttcggcaatgtgaaggtcaacaacaagcggaagtttgaaatgtctggacccgctgctgcgctggtacagaagaggatggctgagcgactgagacggaacgagttgtagcagtgatcttgatggcgcgataccatgcgatggttcaatttgttggtttccttatgatgcacatggcataatgtatatacgacgaggcaatgcatatttcacttcctggcatcctggcccatggcagtatcgcc

SEQ ID NO: 56293 - DNA, 564 bp, Glycine max
  Clone ID: PAT_MRT3847_21843C.1
gcgctggaatggttgattttacactgtcagtgttaaaatgtgaacaatgtgaacaattttgcaccctctttgtgctggaatacttgattttacactatcagtattaaaatgtgatgaagataacttgcttgcaatacattgcagcttatgtggaagaatgatggtgatcacaatctagcagtggaccctaaagctatcaaatgcttggaaagggtaggcagtttgaatgctgaagctgattccatctaagaacttcacaaggaacctagccccattatcgaatttgtttctatttggaatgacatggttttgccaccttcgaggcaaagttttcagatagaattgagtgaaatcatttagaaaatcgataaatccgccaatattgttgaatgatatgttgcaccattcgatctatcacgatctatccctccaccacatattaattgacccggggaattatttcattccagagaaatttcaaacaaaatgtactatccataccattttttttttcaacaaaattcggtcattttgctattggccatggtggaacaaattatttca

SEQ ID NO: 56294 - DNA, 205 bp, Glycine max
  Clone ID: PAT_MRT3847_21844C.1
atcttttctgtctttttttctttctcttttttcctccctttttttcccgcccgcttcctccagaccacccgctttccccctcctgagccgtaccacagcccggcccaaccatggacatagctgtctcccgcgtgaacaaagccacccgctcacaaccccccacagcctacgagccggaagcacccagcgaaaagccagcggggcc

SEQ ID NO: 56295 - DNA, 353 bp, Glycine max
  Clone ID: PAT_MRT3847_21845C.1
cacgcgtccgcccacgcgtccgaacaggagaagctgtatatcctaggttgtatatggtagtccttaatgatagatattagattctcctctcttcacagttgggggactttgtagtttgtacagattgagccatccttacttgagttgattttttgtgccacaagcaatatttataacaaatgatgattaataaaaaaaaaaaaaaaaaaaaaaaaaaaaaaaaaaaaaaaaaaaaaaaaaaaaaaaaaaaaaaaaaaaaaaaaaaaaaaaaaaaaaaaaaaaaaaaaaaaaggggggggccgttttaaagaaaccaagtttacgaacccgggcatgcaaagtaaaaatttttt

SEQ ID NO: 56296 - DNA, 515 bp, Glycine max
  Clone ID: PAT_MRT3847_21846C.1
ggagagagagaactagtctcgagtttttttttttttttttttcaagaataattttttattaaccgtgtcagaaataagtgtcttcctcatggatatccttacatatccatgttccatacctaattaacaaatcgttatattgcatccagtcaacccgacactgagtctggcaaataagtaatttaaataagctatcattgatctctatgagaatatcccatcctctagtcaaactcattcgaaatcttgctcaccaacaatggagcatctcttttaggcatgtcctccgtgaaggaaattcaagcgcagataggttaacgagatatgattctacttatgaggattccttttatgtttggaacaactgccctatcatcttgcctctctggtcttggctgattcgctaggaattgttcattttaggaattaatctttctctgtttgtctttcttttctgacgcatcaaaaaaaaaaaaatatcccatctgtgttgtgctgaaagaattccttgcacg

SEQ ID NO: 56297 - DNA, 584 bp, Glycine max
  Clone ID: PAT_MRT3847_21847C.1
ggctcgagcggctcgagcggctcgagcggctcgagatcaaaagtagctaaggaactgcatcttaaaacttagcatggagttgttgttttcactttttaaagttggatagtctggagacattggatgcaacttgaatttgagtttaactggttgttttacgatataaaaggaaggacaaaaattaggtgcacttttaagtgatttttgtagttattgtagccaaaagatgcagtttttaagtgatttttgtagttattgtagccaaaagatgcactttttaagtgattatttttgtcgttattgtagacaaaaatcatcagctgttgagctcaacacgatccaaaacctaagatgtgtgatagtctttagtcaacactgtctttaaggacttatcagggtggcattcatgggctttttcctattgtgctgaacttaatctaactacggttagcaatggcttgattcttttacgttgcaattctaatcaaacacgtgttactttttgaagtggatgcttaatgtcttcttaagagttaagatactgcagcatgggtaaataatcctatacagtataagatattttg

SEQ ID NO: 56298 - DNA, 320 bp, Glycine max
  unsure (1)..(320): unsure at all n locations
  Clone ID: PAT_MRT3847_21848C.1
ccgcccacgcgaccgcggacgcggggggaattttgagcaacaagggcgtccagtcccccggccagaggcaccaacagcaggaacgaggccaccagcccagggaagacccgcccaggcgganggcacncaacagcccaaacagcaaaagacaggaacacccgcggcggacgacaccccacagaaccgggcagaaaanggcgagcagaaaacanngaacacaaagccccaagaggcaacaaccgcggagaaaaaggccgaagaaacccagaaagggaccccggacacaaaagagaagcccgaggaaaaccgcaacaaaaagc

SEQ ID NO: 56299 - DNA, 436 bp, Glycine max
  Clone ID: PAT_MRT3847_21849C.1
gcaggcggcatcagaatctagttgaatacatgtatgtcatcaataatctattctccgcagtcgtggagcctgatcccacatcaatccacaattaaaccccaaaggcatccctctttgaacccaatcgctcatttcagctttgtcaccgcttataccagcatcccacgctacccacaattcccagccgcactcttaccgctcaaacaaccaccgtccccccaatatcacacagtcccacttcttcgtcccattccagtccttcagcctcagcagccttcttccacctctccaccggctcagtcacaggctcatactgcgcactgaatgcccctcgaaacgtgccgtagtgcatagcgatactcttcttgctcttcacatccctatgaatcgccagcgaatcttccggacttcagtgctgtcctgaccagatggtgcg

SEQ ID NO: 56300 - DNA, 304 bp, Glycine max
  Clone ID: PAT_MRT3847_2184C.1
ggctcgagactagagatcactgactgctccagcagtgcagtcgatggccggcggactttaaaaggcagtatctatttccagctcaatgccacgaccactgcttccaaaaccggctgctaccggtgagccctaagggcaaatggcaacactcaacaagagacaactgcataagccttgaagattactggaagaatgctggcgaaaatgacatcaagtgagaacatacctaatgctagggtatggccttgtggatcaacaatgaacttttgtggtatcaaatcacgcgaaagaaggagcatgcggt

SEQ ID NO: 56301 - DNA, 471 bp, Glycine max
  Clone ID: PAT_MRT3847_21850C.1
gtgatgacggtgttgatggtagctggatgtgcagcggcaacagccatagggtacgtgggatagtctgcagaggagcatgtggcttggcagccaatatgcgaccatgtgcgcaaggtctgcacaacacatttgaattgcctcttgctctcttattcagctatcatagtctattgcagaatcactattctatgagtctacaaaatctgctctggttctaccaagaactaatcaaatgacatcaaataccaccaacagcaactaccgatactaacaactagtgtagctatagctctgatgatgaggtcttgatacgggtttattaatactactatatacttcatgtggtgcatgaatttgctccgaaattgttagataggtgtgggatatgaatggctatattgggtatggccatgaatgctacagcatgtaaagcatgagtaatgataatctatctgtctttcatgtcgaagc

SEQ ID NO: 56302 - DNA, 301 bp, Glycine max
  Clone ID: PAT_MRT3847_21851C.1
ggttaatccttaaattttttttttttactttttttcgtgttagccataggccacagtttttttcaattgacatatttgaaaaaaaacaaatatacagaatccaacatgccccacccgactagtactgtcacaatcaccaaggactgaaggacatacactccctcatgcgggacagcacactagtagcggaattggaacaaccccctcacgctgtaacaacagcgaccggctcccccctacccattgaaaaaccccttgtaccaggcggcaaacaacgcccagggggccgcttggcaatgac

SEQ ID NO: 56303 - DNA, 439 bp, Glycine max
  unsure (1)..(439): unsure at all n locations
  Clone ID: PAT_MRT3847_21852C.1
attgggatatcagtgctaacttgagtgtgggggatagtgtctttaatcgggctaatgatcaaagaaagttggacgaaaattcaactattgacagttgtatgcatcttgtccaagagtttccaaaagctgggaaccgcctagactcaacgaccaccatagaaagtccttgtgttgcttcagatggatcagctgataccacacagactagaacaggcatcgacaatgttcagataaatgggctcaatgattccaatagatgtgatgaatccttgaatcagccaggaataccagaaagatgccatcctgttggtgactgttctttgacatcttccagcttagatgtgggacgtaaaataaacttaagatctgtaggttctagtattacccnctccatggacaataaggatacttcagaagtacctcgtggaattgactacat

SEQ ID NO: 56304 - DNA, 226 bp, Glycine max
  Clone ID: PAT_MRT3847_21853C.1
ctgcaggcggcctgctctctttattcctttcgagctttctctcccaccctcaccatcaactctcttactctttgaggaggtttttatcatctgcccattaccctccacctgcccagtccctaacgttaccacatttcgttgctttatagtacttctcattaactccgttgtttggtatcaaaacctttaaccccaaatttccggctttcttacttattttcaaaaa

SEQ ID NO: 56305 - DNA, 1282 bp, Glycine max
  Clone ID: PAT_MRT3847_21854C.1
aattcggctcgaggtgaattgaaaacatccacatctctccttcggtatgcaactccaactgtgacaacaacaatacactctggcacagtgtaaagttagcgtacttagctgatgaatgatgaaggtacccttctgtagttctctccaacgacaacagttggccaaaacaaaacaaaaataaatagtaaatgaaatttaactcaagacgcttaccacaaacgacaacttcttctatctcttttcaatccttccattttttcacacacactcctatctacattcaaacagcacactctctgtttcattcacaattcaaatctcaatcaccatgtctgaccaagaaggtggcaaagggtctccaaaatcttcgtctttgggtccatatgaagaagccatggaggccttgtcgtctttgatcactagacgcactcgtgctgatgatagcaacgtgggggatcagtttagcctgttatatgattacctgaagatgctagatttggaggagccaattgcaaatatgaagattatccatgtggctgggaccaaagggaagggatctacctgcaccttcacagaatctatattgcgtaactgtggttttcgcactggtctcttcacatctcctcacctcattgatatccgagagagatttcgtttagatggtatggaaatttgtgaagagaaatttttagcctacttctggtggtgttatgatagactaaaggaaaaaactgatgacaatattccaatgcctacctattttcgtttccttgctttagttgccttcaagatatttgcagcagagcaggtcgatgttgctataatggaggtaggattaggtggaaaatacgatgcaacaaatgtggttcagtcacctattgtatgtggaataacttctcttgggtatgaccacatggagattcttgggaatactctgggagaaattgctggtgagaaggctggcatcttcaagaatcggattccagcttttacagtgcctcaacctgatgaagcaatgcatgtacttgaagagaaggcttctctattaaatgtacctcttcaagtggtaactccattacatgccaaattgctaaatggtttgagacttggtcttgaaggtgagcaccaatatttaaatgctggtcttgccatcgcactgtgctatacatggcttgaaaggactgcacatgttggagatatctatatggaacatactgacactttgccagagcagttcgtaaaagggttaacaagtgcaagtttgcaaggaagggctcagatt

SEQ ID NO: 56306 - DNA, 1479 bp, Glycine max
  unsure (1)..(1479): unsure at all n locations
  Clone ID: PAT_MRT3847_21855C.1
ccacgcgtccggttcagaagagaatgtcattgacattctaagttctaactcaccacgcgtccgcaaaacactactcttctctttccatctttcgatccaaccttcagttttctcacaacacccccatggctcaaggagataatgggtcctccaaatcttcgtcagtgactccgtatgaagaagcattggatgccttgtcatctctgatcactaaacgcactcgtgtcggtgatgtcaatatggaggaacgattcaacgtgctttataagtacctaaagatgcttgatttggaggaggcgatttcaaatatgaagattatccatgttgctggcaccaaaggggatctacatgcaccttcacagaatctatattacgcaactgtggatttcgcactgggcttttcacttctcctcacctaattgatatccgagaaaggtttcgtttagatggtgtggaaatctctgaagagaaatttttagtttatttttggtggtgttatgatagactaaaggaaaatactgatgacaatgttccaatgcctacattttttcacttccttgctttacttgccttcaagatatttgcagcagagcaggtagatgttgctataatggaggtaggattaggtggaaaatatgatgcaacaaatgtggttcagtcacctattgtatgtggaataacttctcttgggtatgaccacatggagattcttgggaatactctgggagaaattgctggtgagaaggctggcatcttcaagaatcggattccagcttttacagtgcctcaacctgatgaagcaatgcatgtacttgaagagaaggcttctctattaaatgtacctcttcaagtggtaactccattagatgccaaattgctaaatggtttgagacttggtcttgaaggtgagcaccaatatttaaatgctggtcttgccatcgcactgtgctttacatggctgaaaaggactggacatgttggagatatctatatggaacaaactgacactttgccagagcagttcgtaaaagggttaacaagtgcaagtttgcaaggaagggctcgagttgttccagaccaacacatcaagagtgaaaggtcaaatgaacttgttttttttttagatggggctcatagtcctgaaagcatggaagtgtgtgcaaggtggttttctctagccattaaagaatacaacccggaccaaaccttgtttcatcagcaacttaataattctaaattgtcacatgaagtagtgaagagtacacaccacggcgaaagaggatcccagagaaaatccactccgatattgctgttcaattgtttgactgtacgagatccacagttgcttcttcctcagctgatgaaaacatgtgctgatcatggtgtctacttcaagaaggcgctctttgtaccaagtttatctgtgtttaataaagntggaccccaggctttacacccgctgatccaaagttgatctgt

SEQ ID NO: 56307 - DNA, 309 bp, Glycine max
  unsure (1)..(309): unsure at all n locations
  Clone ID: PAT_MRT3847_21856C.1
nagangnagcgtagtaacncggaatcngctcgngcnctctctacaaancntanntcnggannctaatnatgccttgcatgnncttgnanatcaggnggggcaagtgacnacacnnccgnaccanaacggnncgtcngnccaacaanactaagggangtngtnagggctaaaacngcncaggcngnacaanaggtgngnggannacnggagancannanagcatgcgngacgaganncnagnngtcccgnatcgcanagacncntaagcanggccagnggcgcnacgnagganaagacnangnnnnggnc

SEQ ID NO: 56308 - DNA, 340 bp, Glycine max
  Clone ID: PAT_MRT3847_21857C.1
cagataatgaagttataatggtccaacatcgccattgtttggaaacagccttccaatgcatagaagatcatcttgtaggttagaatacttacatgttataagctataatctttttttggattgaagtatattttagtccttagagtttccccttatttggtttttggtccttacatatatatttttttggtttttgttcttatttgtccctgtcattaagtatcagttcttatatttttcagtaatttaagttttagtccctttagcttttattcttcaaaattaaatggtccttatattccatgatgaacaggtctctatagtttattattaagatatc

SEQ ID NO: 56309 - DNA, 292 bp, Glycine max
  Clone ID: PAT_MRT3847_21858C.1
gccatgcaaacgtggaatagcaacatgagtgctatcatatgcatgcctagtattctggctgcatatgaatcccatctaagacttccagcgcacgcccatcaccgccacacaggctcgcaaccaaacacacccgctgatctgtccactaccccacctacaaagactgacatcttagtgatatatgccaagaaaggcgagcgctatctatatatgccaacaagacacgtcgttgtcatacagggaatgcaacatttctatccacagagccaatgagcatgccctaaagcataac

SEQ ID NO: 56310 - DNA, 271 bp, Glycine max
  Clone ID: PAT_MRT3847_21859C.1
ggatcggttgctgaaagcggaaagagcctgtggttgtcttaacctctccaatcgatccctcactgaagataccgaagaggtttaccggaatctgaagggcctcagcagcagagacgacaagtgctgggaggcacctcgggctaaaaaacttattgtgggtcacaatagcattgcatcgtggaacgaacatctgagagatttggcttatcttgctagggtgaatcggaacgagaacagtctttttcagcgtccacatgatattggagggctg

SEQ ID NO: 56311 - DNA, 266 bp, Glycine max
  Clone ID: PAT_MRT3847_2185C.1
cttcacagcgccgtcgcagagaatccaactgcgccgatcctctgaaactgttcgcccggcgcgtgagaatatcccgaagtgagaccaaactacatagtaaaagaaaatgttcgagtttggaacttctgtacttgtgccttctgttcaggaacttgcaaagtgagccatcatcaatgttccagagaaatatcttcgtccaaatcaagactctcatgttatagtagactcaaccttaacacttccactcgattgaccttagcaaatta

SEQ ID NO: 56312 - DNA, 370 bp, Glycine max
  Clone ID: PAT_MRT3847_21860C.1
aattcggctggagctcttcttcttttgcggctggggttttagcgcagcttcttttatatttaaggaagatgggtaaggaaaaggttcacatcagtattgtggtcattggccatgtcgactctgggaaatccactaccactggtcacctgatttacaagcttggaggcattgacaagcgtgttattgagaggttttgagaaggaaagctgcttgagatgaaacaaagaggtcttttcaaagtatgccctggggtgcttggacaaaactttaaaggcctgaagcgtggaaaagagggaaatcacccaattggaatattggcttttggtggaaggttttgaaaacaaacataaagtatttatttgcaacaagt

SEQ ID NO: 56313 - DNA, 593 bp, Glycine max
  unsure (1)..(593): unsure at all n locations
  Clone ID: PAT_MRT3847_21861C.1
tctctctcagaatggacaaagcccaaaccgaaccctggcgacccgacccgtttcactccggcattttccggccgccggagacgccgcgcgagcccatggagttcctctcccgttcctggagcgtctccgctcacgaagtctccaaagctctctctccggcgctctctaaagtcaccctctccaatggcaccgctgccgtcgtcgccataccggaagacatcgcaggcgaagcagaagaatcctccgccaccgtctccgggaaccccttttccttcgcctcctccgaaacctcccaaatggtcatggaacgaatcatgtcacaatcccaggaggtatctccacgaacctcagggagactctctcatagcagtggccctcttaacggaacccaaagttgtggctccttaaccgatagtcctcctgtttctccttctgaaatcgacgatatcaagtacacccgcgccaacaacatcgccagcagtttaagtcttaatttcagaaccaccgcgaccgccgccgcgcctggcggcgggaagacngtggggaggtggctcaaggacaggaaggagaagaagaaagaggagaccagggcg

SEQ ID NO: 56314 - DNA, 367 bp, Glycine max
  Clone ID: PAT_MRT3847_21862C.1
tcaaccaacccttccggttcaattttgattttataaaataaaaattaaaaaagattataagggggggataaaaattttattaaaaatgttaaaataacaaaaaaataaataaaaaaaaaaaaaaaataattggggggccccttttaaagaacaaaatttaactaacccggccatgaaaattaatagcttttttatggggaaaccaaaattaaattcactggccgtgtttttaaaacattgagacttgaaaaacattgggtatcaaaaataaaagcttttgaaaaatctcttttttttaatggcgttaaaaaaaaaagcccaacctatccctttcaaaaatttccacctataaggaaagaaacccctt

SEQ ID NO: 56315 - DNA, 892 bp, Glycine max
  unsure (1)..(892): unsure at all n locations
  Clone ID: PAT_MRT3847_21863C.1
ccgcgtcggaggcttcgcgcggtcaccttccctcccgcaccgctgctgacgcttccggcggtctccttccctccctcaccattgtcttctctcctgatcgtgtctactgaaccgtgggggccgcgatgttcctcctccatgcgtccgaacgaaagcgttggtttccaataagcattaatatccaactgagccacaacgaaaatgacggttcaacccctctgaccccattgtcattattctcagaagattatattagtatgttgaatctgagagaagagagagagagagtcgtgtgccacaattttcccagctttaattggagtgatttctgatattttgtgttagagttcaatccagatcgtgactagagaagcaagagatccttgattttgctactgtttgaattttggggtccatagcaaaatgggggttatgtccaggcaggttgtgcctgtctgtggcaacctctgttgcgtctgtcctgctctgcgggcaagctccagacaaccggtgaagcgttataagaagttgctagctgatattttcccacgcaatcaggaggctgaacttaatgatagaaaaattggaaaactatgtgactatgcttctaagaaccccctaagaattcccaagattactgataacttggagcaaatatgttacaaagatttgcgttatgaaaccttcggctcagtggaagttgtcttgtgcatatacaggaaattcttatcgtcatgtaaggagcagatgccactttttgctggtagtttgttagagatcattcggactcttctagaacaaacccaaacagatgaaatcatgatcttaggctgcaacactctttntgattttttagatagccagacagatggtacgtacatgttcaacttac

SEQ ID NO: 56316 - DNA, 468 bp, Glycine max
  unsure (1)..(468): unsure at all n locations
  Clone ID: PAT_MRT3847_21864C.1
ggactacgtctcaacttcctttcaatattcttatttccatcataatttcactgttgttctctgaaagcttctttggttcgttttttttttttcctcgcaacctcttgtttttggctttgcagcggttggatgtttcttctccttggttattatttatcctgtgaaagatttgatttttaaggtccgcaagagttctttttgtttaaaatacaagtgagtattctcaattttgtttctgattacttttttatgcctttctggcttgcgggcttttatgcttaaaattttttggcatatatattgcacatatgaacatatcttaagcgtaaatagagttttgctgaagcagngtgcttctattgtagctaaattttgagtgcaacaggctatacataagtttgtaattttaaattggaatgaattgcttccaaagatgattgtaagaatttattcatgaatctattacta

SEQ ID NO: 56317 - DNA, 677 bp, Glycine max
  Clone ID: PAT_MRT3847_21865C.1
ggctcgaggtagtagtagctaagtactcgttgatgatgctggaacgaagcgtagttttccaataagcattaatatccatacgaaacacaacgaaaatgtcggtggggtgttcaacccctctgaccccattgtcattattctcagaagattatattagttatatttattattattcccttgtttaatttcttcaattttgatgttgaatctgagagaagagagagagagagtcgtgtgccacaattttcccagctttaattggagtgatttctgatattttgtgttagagttcaatccagatcgtgactagagaagcaagagatccttgattttgctactgtttgaattttggggtccatagcaaaatgggggttatgtccaggcaggttgtgcctgtctgtggcaacctctgttgcgtctgtcctgctctgcgggcaagcttcagacaaccggtgaagcgttataagaagttgctagctgatattttccacgcaatcaggaggctgaacttattaatagaaaaattggaaaactatgtgactatgcttctaagaaccccctaagaattcccaagattactgataacttggagcaaatatgttacaaagatttgcgttatgaaacctttggtcagtgaaagttgtcttgtgcatatacaggaaattcttatcgtcatg

SEQ ID NO: 56318 - DNA, 511 bp, Glycine max
  Clone ID: PAT_MRT3847_21866C.1
aatatcgtctggtgcactgtttatcaattctacaacctttgaggtcactcgaatcctgctttgcttgatttccttttttatctcaggagaccatcgggtacttatgggcagtccagccaaattcacaacccccgttgagccctgaatgctatctttccattccggctcttctgctatcttgattccaggaaagtcttttgccggaaaaattgtttctgcgttagatttggatcgtgtcaagacatgaacactgtgattgtctgcatgtaatctttgcaccaaccttctaccaataaaacctgttgctccagttacagatatgatcattttatttcccttggggtcttgatcagagacacaccaaacactgaagctcctcctagcctccctggtagagacggatcgaggaaggtgaagcgatggacagatggtgtgagaccatgtcagagctgtggctccacacatttccattcagaatttgctatgcagtgttcaacctgttacagccaag

SEQ ID NO: 56319 - DNA, 358 bp, Glycine max
  Clone ID: PAT_MRT3847_21867C.1
tttttgttttgtgttagatatagacgagggcgagccaacgctaatatgctatagaacacacggtgtcatgtatgtattagttaattaactagattacaattcaaccacatcttcaaatgtgtatcgctttcaaaaatctcaatacggcgaatgcctctagtgtccggaattcaaaagaataaagaatggggcagttgctatgtcaaaactgcttcaagaaagaattgcttgaagggcatccttcacgtaaggatatctgaatgggaaacccaacttcttagcttgaataggaagcactctgtgcccttctaaaaccacagtagcacctttcttcaaggacagccttgagcgcaaaagt

SEQ ID NO: 56320 - DNA, 2545 bp, Glycine max
  Clone ID: PAT_MRT3847_21868C.1
cccacgcgtccggaagtccaaaagaatattgaggggcttgaagactctcttcttcttgatgactatggttatatcgcttcttcttttctccgccccggttctccttgttattgccgatgcacttgttccttctgctctgctctcctcgctttctcaatcttctttctccatggaaactctcgcttcccatttccacaactacgattttcgatactctctcattgatattccccttgtgtcaataatacgatccttcatcatcttctgtaagtacatatactcaaattcacagtagtaaattgaaatcagtagcggaacatgtaattatatgaaaagttcgtcactaaaatttggtgattctagaattagtgaaggaaatcaagtttccgtcaccaaatttggtcgcctaattcattatttttctagtgtagttagtgcttgcacacacaacgacaaggtgtgattttgtagtgattttcgaggacccttttgaaggttgtttaatgggttgtaaactttttttttttgtgtaggtgttaatagtttgtgtgatggaccaaggctttcccgtggaccttatttggggatcacgaccatgtgctctgttttgtctatgatgtttgtgtcgttcaaagccgtttacatcttcagtgtttcgggtattgatcgaagtgggtatgttcgtgccaccgaaatagctctgttcgtgtgctcttgtgcgttgcccgtggggcatgttgtggtggcctacagaacaagttgcagggaaagaagaaagcttttggtctacaaaattgacattgaagctatttcagcttgcaaaaatgggtatcccaggtatccgaagattcctcaagaagaaagaatcaaatgaactcacatgtgcctctacaagattaaaggatatatcaatatcaactatacgtatatatgattttcaactaacacaaacagcttctgctattcatcatattatgttcttgcgtgcgtcaaaggatgctacggtttatccaaaggatgccagtaacctttgacgcctaattttctaacctcggatactgtcatagaagtttacactctaccgctaccaggatacataagatgaagctctattgtacatatattaattagtaattatacctaaacaccattcaacaactttatgtatcatggcagcggtagagtgtaaacttctatgacagtatccgaggttagaaaagttaggtgtcaaggttactggcatcctttggataaaccgtagcatcccttgacgcacgcaaggacataatatgatgaatagctgtagctctgttagttgaaaaatatcatatatacgtataaattgatattgatatatcctttaatgttgtagtggcacagtgacttcatttgattctttcttcttgaggaatcttcagatacctaggatacccatttttgcaagctgaaatagcttcaatatcaattttgtagaccaaaagctttcttctttccctgcaacttgttctgtaggccaccacaacatgccccacggccaacgcacaagaacacacgaacagagctatttcggtcgcacgaacatacccacttgggtcactacccgatacactggatacccatttttgcaagctgaaatagcttcaatgtcaattttgtaggcccatggctttcttctttccctgcaactcgttctgtagcccaccacaacatgccccacggccaacgcacaagagcacacgaacagagctatttcggtggcacgaacatacccacttcgatcaatacccgaaacactgaagatgtaaacggctttgaacgacacaaacatcagagacaaaacagagcacatggtcgtgatccccaaataaggtccacgggaaagccttggtccatcacacaaactataaacacagaagatgatgaaggatcgtattattgacacaaggggaatatcaatgagagagtatctaaaatcgtagttgtggaaatgggaagcgagagtttccaaggagaaagaagaaggagatagcgtggagagcaaagcagaaggaacaagtgcatcggcaataacaaggagaaccggggcagagaaaagaagaagcgatataaccatagtgatcaagaagaacagagtcttcaagcccctcaatattcttttggacttctcttcttttgaggaaaaacccatgttggaatgatcctatatatttggtgattccaaatagctaatcctggatcagcttataatatatgagggtttgttgcaaaagaaataactatatatgtgatgtgttgttgtgtgttgtggtcacaaggggaacgagggagaaggttttaattaagagggtgaagaattagagaaagaagggacggagcaaggaaggtgcaggccaaggtgcagcaattttgaccggacttgtccactctttgagtgatgacaaatgcttgggactttacacgcagacccccttatgggtcacatagcggcgttctcaaccggacgcgtgggcggacgcgtgggcggacgcgtgggcggacgcgtggg

SEQ ID NO: 56321 - DNA, 4014 bp, Glycine max
  Clone ID: PAT_MRT3847_21869C.1
ggctcgagaagggatgtcgctgtggctccaaatttaccacgaacggatgcgagaataagaataggtttatagttaacacacacttcgtcttggtgctgagacaagagtcataatcttggctgtaacaggttgaacactgcatagcaaattctgaatggaaatgtgtggagccacagctctgacatggtctcacaccatctgtccatcgcttcaccttcctcgatccgtgtctaccagggaggctaggaggagcttcagtgatcggtgagtgtctgatcaagaccccattcggctcgaggtggtcatttagtttaggtttcttctagattgttatcacttgagtgattttgcagggaaataaaatgatcatatctgtaactggagcaacaggttttattggtagaaggttggtgcaaagattgcatgcagacaatcacagtgttcatgtcttgacacgatctaaatctaaagcagaaacaatttttccagcaaaagactttccaggaatcaagatagcagaagagccagaatggaaagatagcgttcagggctcaacaggggttgtgaatttggctggactgcccataagtacccggtggtctcctgagataaagaaggaaatcaagcaaagcaggattcgagtgacctcaaagcaaaggttgcagaattgataaacagtgcaccagatgatattcgacctaaagtttttgttagtgcaacagctgttggttattatggcaccagtgagacacaagtctttgatgaacaaagtccatcaggaaaggattacttggctgaggtttgtagggaatgggaatcgacagccctaaaggtaaacggaggtgttagagtggctctaattcgcattggtgttgttcttggtaaagatggtggagcattagctaaaatgatacctatgttcaagttgtttgctggtggacctctaggctctggaacacaatggttctcctggattcatttggaagacattgtcaatttaatatatgaaacgctgtcaaatccatcttacaaaggtgttatcaatggaactgcaccaaatcctgtgcgattggcagaattgtgtgatcagctgggacatgccttgggtcgtccctcatggctaccagtaccagactttgcgctcaaggctgtccttggagaaggtgctactgtggttttagaagggcagaaagtgcttcctactcaagctaagaagttgggtttcccattcaaatattcttacgtgaaggatgcctgcaagccaattctttcttgaaagcgcatagcagctactgccacattcttaattcttttgacatcagtggcattcaccgtattgagatttttgaaagcgatagatatacttctgaagatgtgattgaattgtaatctattttatttttggtcatgtgaattcaaaaacgtaactattaactaacatgataccgtgtgttttatagcatattaacattggcacgagataaaaaaaatctaaggtgactttgtattcagtccacaaaacttactaacttttagcatgaaatctatgttaacgtctctttgtaggttttagaagggcagagagtgcttcctattcaagctaagaagttgggtttcccattcaaatatccttacgtgaaggatgcccttcaagcaattctttcttgaagcagttttaacatagcaactgccacattctttattcttttgaattccggacactagaggcattcaccgtattgagatttttgaaagcgatatacatttgaagatgtgtttgaattgttatctagttaattaactaatacatacatgttaatacacaagtcttgtcactttaacttctcgttttgatttgaagaactagtctaaaaagtaaaaaacaaaaaaaaaatcacgaaattacttcactattactggatgtcccaatactcatttttcaagtttggacattggttcctagctggacttgtgctacttgcccattctcattttctacagccttgctggcgttggattttgacctaaataccctataatcccaaatcccacaaccgagctctttgtgccagggacagtttaaagtcgaaactaaggaatattgacccaattacctaggagaaaaaaaatagagaacttaagctaaaccaataatgctggttctaatgggggccagaaaaggcatggagacaaccgcgttagtggtcttcttcattgcaaccccggccggcctcaccctggggtcgcagcctcaacgggcagaaatcccagaacaatagctccacattatgggccccgcacctatggagagcatcgccacgtgaagccaccacgaaagctaagctcgatccaacggcccacataaagttcctctccggatgatcaataacaggaaggatgatcgcgagcgtgagaagcgccagcaggagaccgtagacactgcaccccaaattggcacgccgtgacccccgagccaccacgggaatatccgggaactttaaccccacgttaaggacccagacgccaaagagaacgttgacacttaggacagcattgcagctatcctcattccaacggcccatttcggcgtgctctgcgactggtccaacacagtgagattcaggcccggagtcaaaagcgagagtatgagcccactagcgatgcaaagcggcaacacgagccgcccggcccggtccaagaaaaaagtggcgaccaaaatggaaacggtcttgacgaacccaaccgcaaccgtggcgaggagacggtagttatcggatttgatcccggccttctcgaagattcttgggctgtacaaaacgacggcgtctatgcccgtggcttgcgcgaagaagtgaatccctagcgacgcgatgaagatgtggcgaaccgcgggagtggggtgaaggaaaagctctctccagacgccgtggccgtgggtttgcttcgacaccaaaacgacgtcgtcgtcgcagtcttgagggatcccagccgtgtctttgatatcggctagtctgagccgagcctcttcctccgactcggagattttgtagagaactcttttggcttcgcctaatcgacctttggccaccagccaccttggcgactccggcatggctaaccctgccacggcaatcaatgatgaaggaattgctccgactccgagcatcattcgccagccaaacttgagtgtcagcttcgaaaatccatagtttgatatgtatccaagtaaaatccctaaattaagaaataccgcaggcatatcaagtcggaggttgtgagggcaactggggagcatatcagaggtgtagacgggggcgatcacgagggcgtagccgatgccgatgccggcgacgaatcggccaaacatgagaaaggaatagttgggggagaaacccatgagaattgctccgacaaagaagatggcgccggcgaaaacaatggtgtaacggcgacctatccagtcggaggttctgccggcgatgcatgagccgatcaggagtatagcagtttatgattccgttcaggatgtcgatttgctcgtccgataccttgagatctctttttatgtacagggctgctccactcatcactccaatatcgtaaccaagtaggatgtaagtcattgaagccaaaatagcacatgcgaaagcgtacttgttccttttgggcttctttacaggattttcaaaatcctcctcgtaatctttcagagattcagccgagcttcaactatctttccctgagtcatcttattgacttagtttagctgaatatcagcagaagggaaaatatgagagtgggaacgaggttagagaaaggaatgttaaagtgctaacatgtatttaatttaattattgggttatataatatataagtatgatgataagtgaagagagaaattaaggagtagcggggtggttgaattgtaatctagttaattaactaatacatacatgataccgtgtgttttataagcatattaacaatggcacgagatcgtttatatttttccac

SEQ ID NO: 56322 - DNA, 1380 bp, Glycine max
  Clone ID: PAT_MRT3847_2186C.1
gatattgatcaatccatcatttccaattaggtaaagtgaaacagtaaaagagcaatggaggaggaggaggaggcggagaaacagaagaagcacttagcaatgctggaacgcctttccaaacgcacccaaagccgttcgcaaaaccccgattcctcatcatcagaatcctccacttcctccatcctttcacgcttcacccacttaaaatcctcgattgagtcccaactcgcccaatcccaatccatttcctccgacccctccaacctcaaactccacttcaatcaaatctccgaatcaatctccgatttagaaaaattcgtcgccgaaaactcctactccctaccctcctacgacgtccgaacctccctcaaaaccgtctccgacttaaagcactccctcgacgacctcacttcccaacttctccccaaaaagaaattctcattcaaaaataaacccaccaccaagaaagaatacaaggattccgctattccactacccacacaaccccctcaactctccacgcgccttgcgccgcgtgactcgccggggttccgaaacaaaaccgctgagcttttaatttcggactttcgaggatccgaggttggggaattcaccgtttcggatctcgattcctgccaagtcaggataataggttccgtcagggcgcttttcgttcataggttgaagaattctagggtttacgtgggccccgtgacggggtcggttctcattgaggaagcggagggttgcgtcttcgtgttggcgtcgcatcagattcggattcacggtgccaaaagaagcgatttctaccttagggttaggagcaggccgataattgaggactgtaatggcgtcaggtttgcgccgtattgtttgaactatgaagggattgaggaggatcttcgtggcgccggtcttgacgccgagaccggaaattggagcaatgtggatgatttccggtggctgcgcgcggtgcagtctcccaattggtcggttttgccggagaatgagagggttgggactgttgagatatccaatttgaaaaatgaggataaggagatttgatttgcgtctcaacgttgtttccttctttgtttcttttatgtgaggctgggatgttattgagtctaggtatgttctgtttcaggaaattgatgttgagaacttgaggttaatgcgattttggtaattgaaatggttttggatatgttcattttcagtgtagtaatgagttttctgtgtgttgcttccatgagaacttcagcaatatgttcttttttcttcgtattagtctgcatttatcctggttcgggaattgcttggttattaattatttgtttgtttttcaaatacgttggccacaaacggttggaatgttcc

SEQ ID NO: 56323 - DNA, 391 bp, Glycine max
  Clone ID: PAT_MRT3847_21870C.1
gctgcacgaacccccacttttatgatgatcttgctaaaactacttaaaaaggggaaaatgggcctgatcactaaacggaatagacacattaacactttgtaaaaaattgaagaactattaattgctactggtccctgcagattgatcgatatgatactttgcaacgaacactgaacctctataacttattttttgtttcccattgaagtttttacacgatttatctttacatgttctattgtgagagattaatactgtaatatttaacacacattttttgtatcattgccggtagcttactacgtcgttattatgaatatgttggctgctcaatgctacctcaatttgctgcacacatcatttataatctatataagtaagcttggagatg

SEQ ID NO: 56324 - DNA, 190 bp, Glycine max
  Clone ID: PAT_MRT3847_21871C.1
ctgatcatctatcgaaatcaaacgggggtcttttaaaataattataccatccttatttccccccttttccgccttcttacagcctcttggactcatcgattaattccacaatttctcctcccgacctaccatctttccatatttgcctatatataaatcctttacaaattcccataatatcttcttcctc

SEQ ID NO: 56325 - DNA, 624 bp, Glycine max
  Clone ID: PAT_MRT3847_21872C.1
ctattcctgcatgcaaagtacaagtacaaacaagctaacaaaagaaaaactagtgatcgacggaatatggacaacagtttcatctttcatgccttggcagtatggcactggtctcaataacttcggagtctccaaggccattctttaaaaattaatacaaattctaatgcctctgatgctgcgttcactggtggagctggcaacagcactagtgtgtgaacctacatccactctcacaacaattctatattacggcaatttgcttccccgcaatcttaacttgggtcgattagtgcgacgtgaatttcttcaccaagaaaaccatttcttccattttctcaccactatgctcaggtgcgtttggtagatagcaatagcatgtcaggtgcaggtgtttagtaaagtacttgaatagttaaattggtacatggagttgttgagggaaccaatttaatgcgtgtactttttgaggcaagtatggtagcagtgtcttaaatgtagatgatgtttgaggcacattcgttgatgttgaatttcccttatcacaattttatctttttcatctctattttttttgggggttcaaagaaacaaagtttaataacattttagtgttagaattgc

SEQ ID NO: 56326 - DNA, 472 bp, Glycine max
  Clone ID: PAT_MRT3847_21873C.1
acggctgcgagaagacgacagaagggctatataagttgttgatttaaaatataaccatgcatgccattaactattttttttttacattaaagcaagcaaacaacttaaatgtcaatttgaatgggatgcatatttgaataagaggaaataacagagagagtatgagagacaaaagtaatgaataataaaaaaagcatatgcaatttaagatttgcttgtataattaatttttgttgagagatatgactacctttaataagcttactaattggtggagaaattcagaacatttttgcattgatttaatataaaattcattgcacaattaaatttttgtacatccagtttaatttgttttgattaaaaaacaaattaaagaagcttccttaactgaacactcaggaaaaaaaatccaaaactcacattaattaattatacatgaagacaaatgataatagatgttgccatctac

SEQ ID NO: 56327 - DNA, 769 bp, Glycine max
  Clone ID: PAT_MRT3847_21874C.1
ggtaattctagttaataaagacagatttatcgttaacaaacatttcttctttgaacagtttgcccaacaactctaaaaaggatatgcagacaacatggaatttcaagatggccatcccgaaagataaataaagtgaatcgttcgttaaagaagatacagactgtgcttgattctgtccagggagtggaaggagggctaaagtttgatccttataccggggggtttatagccggaggatcaatcatgcaggaaacggaagcacataaatatcttgtgtttcctgagaaaagttctgtgaaagatcctaagcctgcaacacaaaaaaaagtctcagtagctccagcacctgccagcactattgagaattcaacaattaagttgaatgatgatgaaggtgtttgtctggtgggaaacaagcttgtgcactcaagaagtattcctaactccaacagcggtgagggagaattgaagaaagacaatgtttcttctgatgattcaaaatcaatgaccatgaatgatggatcatgccataaagcttgccattggaaaaagactaaggattgtcctgaacaaacttgttcaatgtccttggtaactgatgaggttgaagttggtgtagatagggtagaaggagctgatgaacataaccatcctacttcttcaagcactacaaactcatccaatggctctggttcaatgatgcatggaagctcatcatgctctcatgagaaccataagtattcaaaagttaaatcaaattgtgttgata

SEQ ID NO: 56328 - DNA, 399 bp, Glycine max
  Clone ID: PAT_MRT3847_21875C.1
gattattaacttcttatttttttttctctttttttttttttcaaaagaaagcaaactctgcaaatgggtaattttatgggttccaaaagttttcttccacttttctttgaacgaaagtcggagactaattcgttttcctactgacagctattggcttgaattttttcttacccaaatattttttttatacccatgaataaagctcctatttcttaaccatctcttaaaaaaaaaaaaggcttatccttcccctcattgggttggggaagaggcgacaaaccttaaaacccccatttatgaacgcggggggacccccatgcgtaataaatccccgtttggacaaaacgaaggtgaaggtacaccccctcgacccccacgttagggataggcctttttggg

SEQ ID NO: 56329 - DNA, 633 bp, Glycine max
  Clone ID: PAT_MRT3847_21876C.1
ttttttttttttttttttttttttttttttttttttttttttttttttttttttttttttttttttaaaccggaaaaaaaacttaaaggaatttggaaagaattttataattcccgacaaaactaataaaaaaaatacatttttaccttaaacggggaaacgaactgggggggggacaactccttttgggggcggggggggaaatcgtttttttaaaatcacaatcgcccaagctaatggaaagggaaaaataggccttcaaaaaaaaatttggaatcgggtacagcaacaactaactaaaaccgtttttatccacaaaagaccttggaaaaagggggggggatccattaacccctgggaggaaaagcatttttgggcccacatatgttccacacacaagccttgaaaaaaaaaaaatttgggggggaattggggttcttagtttttgaaaaacatttttcgcagaatcaacgtttcgatttaggggaccatcaagattctttctcacatcaatatccccaaatgccagcttgggtgggggaaaacttgggggaaaccccttgaaggggactatttttctccatttttggcccttaaatttcggagctaaagccccccattgggggaagggcc

SEQ ID NO: 56330 - DNA, 335 bp, Glycine max
  Clone ID: PAT_MRT3847_21877C.1
accaattcgatcggccgattcttctttttttgtctctatttattttttgggccattattacttgtgacttccattaacttggacacataccttatcattctacagacatttaaattattccttccaactcctttccttcaattttttccacaaactaacccaccctacctttcttacccaaaccccaatgatttaaaacactattcaaacactcttattgataatcccaaaccttctttcacttttacaccaactctttaaaccttccactacccactaagatcttctttccttaaacttcattttcaccacctttccaaacatcttatccacca

SEQ ID NO: 56331 - DNA, 374 bp, Glycine max
  Clone ID: PAT_MRT3847_21878C.1
acctgtctgagttttatgcctgtgaacaatatgaggtcccttcatttgatggagttttgattcctttgactattgtttttgcacgtaacaataagatagaagctaaaaaacctgggatattgcatggacatggagcttatggtgaattacttgacaaacggtggctcagtgaactaaaaagcctcctggatcgaggttgggttgttgcctatgccgatgttagaggtggaagtggttttggtaagaaatggcataatgacggaagacgtacaaagaaacataattcaatcaatgattacatctcttgtgccaaattcctcattgaaaaagatattgtgcatgaaaacaaattggcttgctggggatatagtgct

SEQ ID NO: 56332 - DNA, 147 bp, Glycine max
  Clone ID: PAT_MRT3847_21879C.1
acaagtaaaacctccgcagagaattcattgaaaattataaggctgtccccaaaagaaagtttgtttttcaatgaactgtccagccgatgtttagctcaatttgtcagtggtgtcatgtcaataaccataaggaagatgaaacattgt

SEQ ID NO: 56333 - DNA, 1282 bp, Glycine max
  Clone ID: PAT_MRT3847_2187C.1
gatcaatccatttccttctaatggaggagaaacagaagaagcacttagcaatgctggaacgcctttccaaacgcactcaaatccgttgacaaaaccccgaatcttcctccatactttcacgcttctcccatctaaaaacctccatagagtcccaactcgcccaatcccaatccatttcctcagacccttccaacctcaaactccacatcaatcaaatctcccaatctatctccgatttagaaaaactcgtcgcagaaaactcctactccctaccctcctacgacgtcagaacctccctcaaaaccgtctccgacttaaaacactccctcgacgacctcacttcccaacttctccccaaaaagaaattctcattcaaaaataaaccccccaccaccaccaccaagaaggacgacaaggataaggattgcgctattccactacccaaacaaccccctcaactctctacgctccttgcgccgcgtgactcgccggggttccgaaacaaaaccggtgagcttttaattgcggacttcagtgattccgaagttggggaattcaccgtttcggatctcgattcctgccaagtgaggataataggttctgtgagggcgcttttcgttcacgggttgaagaattctagggtttacgtgggccccgtgacagggtccgttctcattgaggaagcggtgggttgcgtgttcgcgttggcgtcgcatcagattcggattcacggtgccaaaagaagcgatttctacccttagggttaggagcaggcccataattgaggactgtagcggcgtcaggtttgcgccgtattgtttgagatatgaagggattgaggaggatcttcgtggtaccggtcttgacgccgagaccggaaattggagcaatgtggatgatttccggtggctgcgcgcggtgcagtctccgaattggtcggttttgcctgagaatgagagggttgggactgttgagatatccgatttgaaaaatggggacgaggagatttgatttgagtctcaacattgcttccttctttgtttcttttatgtgtgattgggctgttactgagtctaggtatgttctgtttcaggaaattgatgttgagaacttgagattaatgcgattttggtaatacaaatggttttggatatgttcattttcagtgtaggaatgagttttccgtgtgttccttccatgagaacttgagcaatatgttatcttttctattgttgcatggattttggtaatcgattggttattgatttatttgttgcttttc

SEQ ID NO: 56334 - DNA, 192 bp, Glycine max
  Clone ID: PAT_MRT3847_21880C.1
gacaaaactgttaaagctataagtaaatatgggtttcaagcacttggagcaaaggcacatgaattgaaaagagtggaaacgaaaatggtacctcaggtgaaagacaaaaaacttggtcaagggttccaaagcgcactcgacaaagatgttactctgttttttgagccatgagggaaacccatgttctccact

SEQ ID NO: 56335 - DNA, 382 bp, Glycine max
  Clone ID: PAT_MRT3847_21881C.1
ggcgcatcgagaatttaagttattagtatcttttacatcttctgtcacataccttcgacttacattcacctacacaggactggaacaccaaagtgtgcatgcacagagccatgactcccaccgctgctctctccttatggactaccgagacatccttgtgcgtttcacgatatgatacgcctgttgatcacaacactgctccgcaagccgctctgatggtgcgcacagaaatctctatgtgcgaggtgatacacatcaactgcgcatcctgatatgtccaagacgccgcatgactataacactgtctgccggccggggaaatcatctaacgggcttttaaggctgataaactaacattattattctggctacatgtgcaacg

SEQ ID NO: 56336 - DNA, 735 bp, Glycine max
  Clone ID: PAT_MRT3847_21882C.1
ctgtcgatactccttcctaatagtcaaaagtgtacataaaccaaaagtttgtgtgtgtatattatcgtccctcattctaactcggggctaatgctgactggaaccattattttttagtgccatgaacaaagtcaaaaggtggagttaggtttgaatcctttttcgttgttatatgccaacttccttgccatgaccttttcacaatattttagagtatcggttccaagacatggcctgtgagagagagttccaaatggctgtccttctgacacttgtcatgatctggacacccatgtttgtcctcagtgattgtccattacaggactttctagaccactctgtttccattctccaattcaaccatataaatgcaattcaaatctcaatctccacttcaccaccttacaccctcttctttcactttggtgcaataatgatagattcaaatccaccactcatgcaacactatggggcacttgtgagaaactctggtgaagccaaagaggctacaagttttaatgatcaaaaccatcctttagtggatgcatgtgacctacccttgatagaccttagtggtcttaaaagttctaatgaaagagaaaggagggcttgcactgcagcaatatgcaaggcagcatcagaatggggattttttcaagtggtgaaccatgggataaggcatgacttgctaagaaaaatgagggaggaacaagtgaagttgtttgaagtaccgtt

SEQ ID NO: 56337 - DNA, 245 bp, Glycine max
  Clone ID: PAT_MRT3847_21883C.1
cacatcttcacagttacaaatctttatggtggggacgttcgccctaattagatgctaaacatacagaactcacaaatatttacgactgtaaatagtgcaaaagattcatgctaaagtaaagaacgattagtactagctccaagttacataaaaaactgaaactaggcattttaatgaccatccgggttaatacttcacaaaaaaggactggatgctcgaaggtttacctggggcatagttttttt

SEQ ID NO: 56338 - DNA, 340 bp, Glycine max
  Clone ID: PAT_MRT3847_21884C.1
acttctcttcatgacttgaagttttactttccaaaacaaatgattaaacgttctattcaccaaaaaaataaaaagtttttggttgattttcttaaacaagaaggggcccccccccctcattgtatttcctataaaaaatggagctagccctcctttaagccaggggccaaaaaatattaagcagaccctggggcctataacctaaaaatgtgggaattattttgaagccgggggggttttctccggcctggaaattttccctacatcccagggggttcaaggccattggttctgtcctcaaaaccaaaatcttttttatggttcctggggttggcccccc

SEQ ID NO: 56339 - DNA, 262 bp, Glycine max
  Clone ID: PAT_MRT3847_21885C.1
cttacgcgtccggccaaaggttatgatcgaacactcaagctcaacatgctcgtaatcatgaaactctcaatcagaaactacatatctgggttcaaaagcttaaccaaatgaagcttgctttctgcgttgggcaacaacatcaagtttcacacggtgatacattctgagattataagctgaacactcatacatgcgatatgacacttaacgtgagacttaaactggttgtggtactcttcgaacgatgagtatagatcccatg

SEQ ID NO: 56340 - DNA, 214 bp, Glycine max
  Clone ID: PAT_MRT3847_21886C.1
ccgcagcgcgacctcctgcaaggtcagcagcacgcgcgaatgctgcacgatgcacccacactcaagctacactgaatcaaccaccaccgagaccttggtcatggcagtggcacctggaaaagctcagcaagcaggtgcacacatgggtgccccacctcagaaccagggctgcaaatggggaccaaactgctcctgctacccctgcgcttccaag

SEQ ID NO: 56341 - DNA, 394 bp, Glycine max
  unsure (1)..(394): unsure at all n locations
  Clone ID: PAT_MRT3847_21887C.1
gttttgtgtgagaaattgttatgngttgaaaatttagaaaanatatgaggnggaaggataaagtgtaaaggttggggtgngtaatgagtgatntaantaaaattaattgngttgggggggggggnngntttnaagtngggaaaaatgtagtgnaaggtgaattaatgaattnggaaangtgnggggagaggnggtttgtgtattgggagntnttnagngttntngntaaatgaatagntgngntnggtngtttggttggggngagnggtataagttaaatnaaaggnggtaatangggtatnaaaagaatgaggggataatggaggaaagaanatgtgagnaaaaggnnagtaaaaggnnaggaaaagtaaaaaggnngngttgttggngtttt

SEQ ID NO: 56342 - DNA, 688 bp, Glycine max
  unsure (1)..(688): unsure at all n locations
  Clone ID: PAT_MRT3847_21888C.1
ccaaccttggtgctacagaggagcaactagactttcctgttctttatgcttctgctaaagaaggatgggcgtctactacatttaccaaggatcctcctgctgatgccagaaatatgtcacagttgcttgatgccgttgtaagacatgttccaccaccaaatgcaaacattgatgcacctttccaaatgctggtttcaatgatggaaaaagatttctatcttgggcgaattttgactggacgcatattctctggggttgttcgtgttggtgacaaggttcatggattacgtaataaagattctggtgctgaaaaaattgaagatggaaaggtggtgaaactgatgaaaaagaagggtacaaacatggttctaactgattgtgctggagctggtgatataatttcaattgctggcctgtcaagtccagcaataggccatacagtggcaactgtggagattatgtctgctttgcccacagttgaattggaccctcctacaatttccatgacttttggtgtaaacgactccccactagctggccgtgatggcactcatttgactggggggagaattggtgaccgattgatggctgaagctgaaaccaaccttgccataaatgtgcttncaggcttatcagaatcatttgaagttcagggaagaggagagctacagctgggtattttaatttg

SEQ ID NO: 56343 - DNA, 1405 bp, Glycine max
  Clone ID: PAT_MRT3847_21889C.1
aaaaaatgaaacaggtgatcatttaatcatatttttacaacaactcttataaactattaatgaatccaaagaggatttacctctctcagtacaaaaaaatctactagggtgtaactaaattctttttcatatcctccgtaaaggaaaaaaagaacacgctcctaaaaagttgccactttcctagtatgtactcgtcccaactctccttccaaacccagaaataaaaacacacacacataaacgcaacccaacacaacagcatcaaaacaaacaaacaacacagtttttcttgtctctatattcttccggccaccgcagatggcggcggagcacgacagctgctgctcgcgctgtgtcaccttcctaataaccataggcctcacagcgctcttcctatggctgagtctccgcgttgacgaaccaaaatgctacctcgactacatttacgttcctgccctcaacaaaaccctaaattccaattccactcacaacaaaaacaccacaatactcttcgctctcaagctcaccaacgggaacaaggacaaaggcatccaatacgacgacgttctcctctccttcagagtcttcgagagcgtcaacctcacgcgcccactcggcaacgccaccgtgcaaaggttctaccagggccaccagaagaaggccaccaagcacggaaacttcagcggcggcggcggaaacctcaccgcggcggtggctgggagaatgtggtaccgtgtggactatgctactgcggtgaagtacaagattctcttctggtacacgaaacggcaccgtttatggggaggggcaaatgtggaaattggcgattcgggaatgaaggtgtatcgtaaagccgttaggcttggagggaagaaccccgtggtgatcgagtccggcgcatctaagctcagtggacgctatcgtgcgcttcttctttcccttcttctccctttttgtggcttgtgggtttagttgacttgactttttcacttcacccacttttgtgtgtattgttattattttatttttgtaatttgtattgtgacttttctttttgtctagttccaattcaaagattagagatgattatattcgattacacgagttggaatctaagcacggggatttctttaaaatatttatgtagatggatgcatgtataaatattttagtacataactaattaggtcatggtttttatttagtttttgtaagtgatcctgaatttctgtcctgatcggttccggaagacattgattttttgtaaatttgtatgtgaattgtgatttgtgacttttctttttttaagttcaaataggacgggtatttctttaaaatgttttagtacccaacttattatgtatctacacattatttattgcattaaatttgaaatacaagtttt

SEQ ID NO: 56344 - DNA, 222 bp, Glycine max
  Clone ID: PAT_MRT3847_2188C.1
tcgtccacgcttacgtaaaaatacagcctcaaagaatgagtagatgaacgacgttatgggtaactggggttgttgttgatacaggtcaatcttatctgtcacaatccattctggcgccctcaaaacaccctctaacttaacaaccaatatataaagaaaatgattaaaacttgatcactctttctcttgccagtatcagatcttttttagatatgattttaa

SEQ ID NO: 56345 - DNA, 486 bp, Glycine max
  Clone ID: PAT_MRT3847_21890C.1
gaggtggcggcggaaacctcacggcggcgctggatgggaaagtgtggtaccgtgtggactatgctactgcggtgaagtacaagattattttctggtacacgaaacggcaccgtttgtggggaggggcaaatgtggaaattggtgaattgggaacgaaggtgaatcgtaaagccgttagacttggagggaagaaccccgtggtgatcgagtccggcgcatcgaagctcagtggacgctatcgtgcgcctcttcttctcccttttgcttatctcctggcttgtgggcttagttgacttgacttttaacttgacccactttttggatctttcatttttgtgtgtattattattatatttaattaggtcatgttttttatttagtttttgtaagtgatcctgaatttctgtcctgatcggttccggagacattgattttttgtaatttgtattgtgaattgtgatttgtgacttttcttttcttaagttc

SEQ ID NO: 56346 - DNA, 199 bp, Glycine max
  Clone ID: PAT_MRT3847_21891C.1
tggagaagcaaagggcgttgagttgttgccagtggaacaagccacaccaacgataggtcctcctcctcctcctgctcctcccactacgagggaagaggccactggaagactccgatgcccactccagttacgtcaagattctcgctgttattcaagaccttcgtcctcactttcgccaagttctccgaactccatacta

SEQ ID NO: 56347 - DNA, 349 bp, Glycine max
  unsure (1)..(349): unsure at all n locations
  Clone ID: PAT_MRT3847_21892C.1
taataatgcctcncccaaagaaaaggagttaggaatgtcttaacagatatataacctgtttgggtacaagctagaagagcttttcaaagcttttctgttgaaaatatagaactttttctatcaaagaagctctcaaaaactctcctctcatggctttgtacccatgtaggcacatagtatcttagtccagcattgccttatgctaaatttatgtttgacatctcgtataactcatctattcttattttactcaaataataacagagttaaaaaaattatttatcataaaannnnnnnnnnnnnnnnnnnnnnnnnnnnnnnnnnnnnnnnnnnnnnnnnnnnnnnnnnn

SEQ ID NO: 56348 - DNA, 229 bp, Glycine max
  unsure (1)..(229): unsure at all n locations
  Clone ID: PAT_MRT3847_21893C.1
aggnanaatcgcangcacgcgtacgtaagctcggaattcggctcgagncaaaacaaacanancaaaanggtattnaaaanaccaaatctnnnnaannnnaganacagtaaaantgtnanccgatatctaaacnggcgtcggnccatgtgantcccgtgagantctcaancggccaaagcaccgatgagacaccagnantatgcaccttccatnaatgagnaacngantc

SEQ ID NO: 56349 - DNA, 357 bp, Glycine max
  Clone ID: PAT_MRT3847_21894C.1
tgtatggtgatggggtttttttttttgttcatgaggtgcgtcaagccctcacttccaccggaaataaattgaataagctttctaagctggtctataatatctaccatttactgatgggtatttgacaaaaactacgtgcgactattgcaattttagaaagttagtcagatctgtgatttttctcaagtagaaacctttaagcacgatgttcttatgtttctgtgggtgtgctcctgaggacaagggtgagtttattggtcacaactttcattatgtttccgggttaaaattccggaaatgcaagaaagcttatctttgtcaatcttcgcataatgtgataccagaaattgtatttgc

SEQ ID NO: 56350 - DNA, 403 bp, Glycine max
  Clone ID: PAT_MRT3847_21895C.1
tggacatgtacgcacactaaggaaacttgcccatgacacaagcttatctgcatggactatcggctaaggaagaaaaagcgccactgcgcgccaactaagtaatgtgttgctagacccaaatttatccctcctaggcttatctgtaattggcatacttgaatgaaagaaacatgctatttgcatctaccttgcggatcatgaggtgccacagaaggagccaatgtgctcataggacaagaatagccttgatggacaaccggtattccggggtgccttgaatagtatactctgaattgaacaagttagcaatttctaccggcacctcttgactccgataacgttgagcgcaacatgacatcccacttcaattcaaacatattatatatcgactagcgctctgagg

SEQ ID NO: 56351 - DNA, 346 bp, Glycine max
  Clone ID: PAT_MRT3847_21896C.1
tcggggaattccatttcctcattttcaagaaataaggaggcaaaggtgggcatatttgaatgggaataattggtttccttattaggcctatcctgaagccaaaggaattgagatcggaattcctcggggaattccaattccacattttcaagaactaaggaggcaaaaaggtccatatatgaatgggaattattggtttccttattaggcctatcctgacgccaagggaagtgatatcggaattcctcggggaattccaattccacattttaaagatatagggacgcaaatgtgtacatatgtgaattgagaatatgtgttctcatattaggcctattcttgaccc

SEQ ID NO: 56352 - DNA, 1376 bp, Glycine max
  unsure (1)..(1376): unsure at all n locations
  Clone ID: PAT_MRT3847_21897C.1
agctttcagcgagtatacaacaaaggggagacccattttaacgactatcccgagctgtagaagaagatatgaggggggtgtttcttccatggaacccaccttgcttccacgacgcactccatctcccttccgtctcgctcctgccaacgagacccttcttcttcaccctctcagcctcctccaccccctcagcgcccgtggagtccgcgtcgcagctcagcgcgcgcgagaggaggcgcgcgaggagcgagaggagggagacgaggagcggcgcgaagaactggagggaggtggtggaggagaggctcatggaaaagcccaagaagcagaagggctcgtggatggacgagctgaacctcgacaatctcgccaagctgggtccacagtggtgggtcattcgggtctccagggttaagggaaacgacattgcgcaactcctcgctcgctcgctcgccaagaattatcccgatatggagtttaagatatatgctccatctgtcaatgtgaaaaggagattgaagaatggctcctactccgttaaaccaaagcaactgttcccaggttgtgttttcttgagatgtgtgatgaacaaagaactacatgacttcataaaagagtatgatggtgttggaggctttcttggttccaaggttggaaacacaaagagacagatcaatagaccgaagccagtgtctgctgaagatatggaggctatcttcagacaagccaaagaagaagaagagaaaactgaccaagcttttgagcaagaagagaaaaaagcttccctagactctgggattcgcaatacagaattagaacccgatgatattttaaatgctattgttgattataagtctaaaaggggatctagaaaagcttctaaccaggtcaaagccacagatgcttcatctactcgaatcaattataaactccttgttccaggttccaccgttcgtgttctatctggaacattttcagggtttacaggcaccctcaagaagctgaatcgaaaaaccaaattggccactgtgcatttcactctatttgggaaagagaacatagcagacatagacgttaatgaaattgctatagagacaaactgatgaagttaagaaattcactgcaagtttagcaggacacaggtggaagccttttgctggtgcttcattcccaaaactgaaatcttagatgtatacgcgctgaaagcctaaaatatgaggtttgtagttgcattatggtattgctaatgcagatttcacaactgaatccctcattcccactggctctgtaaaaggaattgataatttgacataatgaatgaactttgtgattattgagttaaaaaaaaaaaaanaaaaaaaannaaaaaaannnan

SEQ ID NO: 56353 - DNA, 169 bp, Glycine max
  unsure (1)..(169): unsure at all n locations
  Clone ID: PAT_MRT3847_21898C.1
cggcncgaggagtttgttttatttgnccgaagannacgcaagggaaaggcttgngtaaggcccgaacacgagcagaccgaaacngacancccnggcnngggnnngcncggagagagacncaancgnccncnaanacgaccacgcgcganagaaccnccaacncgagaag

SEQ ID NO: 56354 - DNA, 843 bp, Glycine max
  Clone ID: PAT_MRT3847_21899C.1
accgaagccagtgtctgctgaagatatggaggctatcttcagacaagcaaaagaagaacaagagaaaactgaccaagcttttgagcaagaagagaaaaaagcttccctagactctgggattcgcaatacagaattagaacccgatgatattttaaatgctattgttgattataagtctaaaaggggatctagaaaagcttctaaccaggtcaaagccacagatgcttcatctactcgaatcaattataaactccttgttccaggttccaccgttcgtgttctatctggaacattttcagggtttacaggcaccctcaagaagctgaatcgaaaaaccaaattggccactgtgcatttcactctatttgggaaagagaacatagcagacatagacgttaatgaaattgctatagagacaaactgatggtatgcttcacgtgtccagcagtaatcatagaatcgccagtagtattgaaaagaaaagctttgaagagttgcacactgcatgctctttcagcatttttccatttgtggatgaagctggatttctttatagagaaataaatgcattcttatatcttacctggagcttacttgtgtattttgagtcatgcagaagttaagaaattccctgcaagtttagcaggacacaggtggaagccttttgctggtgcttcattcccaaaactgaaattttagatgtatacgcgctgaaagcctaaaatatcaggtttgtagttgcattatggtattgctaatgcagatttcccaactgaatccctcattccccctggctctgtaaaaggaattgataatttgacataatgaatgaactttgtgatt

SEQ ID NO: 56355 - DNA, 316 bp, Glycine max
  unsure (1)..(316): unsure at all n locations
  Clone ID: PAT_MRT3847_2189C.1
ggacctcgccctgtcntgttatcacagaccgcgcccncggnggcgccggagccttatacgccgnttctccgctcccgcaccgattccggccgaggtcccgcccccgcgctggcgctccttggtggggcgngccggccttttttttccatncgtgctggtgcgtgagacggcggggcgtgagctcgaggagcgccgcgctgcctggagctactccaagtcgggggtggcgctcgacaggacgtggaacatgggcttcgtggtcgtgtggtggggtatgctggcatgctccacctccgagcaccggaccagcccgacc

SEQ ID NO: 56356 - DNA, 806 bp, Glycine max
  Clone ID: PAT_MRT3847_218C.1
gtttgtcttgcgcatgctctctactcacctttgtagtcccggccgtcaaaatacccattcccatcgcctttctctctccttcttcctctgccccccaaaaaaatgaagcgcttcatgctcccaagaaaccctctcagcgacgcagcagagcttccttcttcgccaagcccaaccccaactaccagctttgccaaactccgtccctcttctcacaaacacaaaccctccaaagagaacgaccttccctccgatcccaatctcgttactccctcccctgccaaattgaagagccccttgcccccaagacccccttcttccaaccctctcaagcgcaagctcaccatcgttgatgccctaaccgacaattctcttcgatttcggcatcaaggttattgtcaggatgaggccattgtcttcggacaaggacgaaggagatcccacagttcagaaggttttcaatgattccttgtccattaatggatacaatttcaccttcgactccgttgctgacatggcggctactcagctggatattttcgaacacgttagggtgcctctagtggagcattgtttggttgggttcaatagttctgggttggcttatgcactgtggggtcctgccttccctttgtcgcgtctttttgctcttcgtggtctccccccccggctctttcggcgtcgctttgcacgctgtcgtggcgagcaaacttaccagtctgaaaaccaactcagctatcagtgccactgctcttttcttgagatatacaatgagccaatcatggatttgttggatccaaatcagaaaa

SEQ ID NO: 56357 - DNA, 198 bp, Glycine max
  Clone ID: PAT_MRT3847_21900C.1
gcataatatcttacagaaaacatccacatacaaaaggggacgaaaattcaaggtcccaattacgcgggaagcaattaaggctcctcacggtgcttggtgtcaacaatgccctgatctctgatctcaccctctgggccaaagagagggttgtcctcagagagcaaaggcttggctctcgagaaccccctgtggaaatag

SEQ ID NO: 56358 - DNA, 938 bp, Glycine max
  Clone ID: PAT_MRT3847_21901C.1
cttcctcaaacaccactttcatagtttcatctccctcactctcattcaaacacaacacaacacaaagtgtcacaaacacacacagttccaaactcaaatctcgcctcaaacctctcttgttctcgtttccccactccctcattttccttcctctacccgcatttttctctaaccacccctcacacacttcacttacacatagagagagagaaagttcggtgcttttgtatagaatcaccaccccattaccctgcatacaccatttaatgcattgattctatctgggatctctctcaaaagaaaaaaaagaaaaacccctctttgataatggacaccacttcatcccctatgtccctccaaacccaaaaaacaaactttcaagaacttccagaagcttcccccaagccatacaagaagggtatagtagccaccctaatgggaggagctggttccttcaaagaagacaactattttgtgtcccttctgagatcctcagagaaaaaggcccttcaggagctaaaagaaaagctcaagtcttcatttgaggactctccctctgatgcctccatgtggggcattccgctccttggaggcgatgacaaagctgacgtcattctcctcaagttcctcagagcaagggacttcaggattggtgatgcacaccacatgctcctgaagtgtttatcttggaggaaggagtttggtgctgacaccatcttggaagaggatttttaggcttcaataaggagcttgaaggggtggtggcatacatgcaagggtatgacaaagagggtcaccctgtgtgctacaatgcctatggggtcttcaaggacaaggaaatgtatgagagggtctttggtgatgatgaaaagctgaagaaattcttaaggtggagggttcaagttcttgagaggggcatcaaggtgcttcatttcagc

SEQ ID NO: 56359 - DNA, 139 bp, Glycine max
  Clone ID: PAT_MRT3847_21902C.1
tgctcgagccgggccggacggtcgaggaggatcgtggtgcgtgctgctgccaccagtcttgtgcggcgcgggagaagagggacagcagcaggtcgacgtctcacaggaaggcttgctcccttgccctcttgagatcccc

SEQ ID NO: 56360 - DNA, 463 bp, Glycine max
  Clone ID: PAT_MRT3847_21903C.1
ctaagaatttgttctagtgtagcaaatactaacatgtgggcaatacattcggagagtagctgcctctccttgcaacagaattttaaacatttcttattacagtgcagcatggtaaaacaataaagaaaatcaaaactcttttcttaagaaataagaactttgattcataatacctaggaaaacctataatgttgaagaagtaattcctggcctagaacccatgttttacttggtgtcctttttcatagagagaaaatggtgaaataatttcacatgagcaatcccattctttttattcaatttatatggggaagcccccaatttttagcatgcatggcttcttttcattagttgtggtctttgtatagttagttttttttttcctggatgaaacttgatgcaaattgtcactgaaagtgaagagcttactgaatgctaatgaaaaagggagtttcctgtccaa

SEQ ID NO: 56361 - DNA, 2281 bp, Glycine max
  unsure (1)..(2281): unsure at all n locations
  Clone ID: PAT_MRT3847_21904C.1
tgaacaccactttcatctccctcattcattcaaacacaacacaacacatagtgtcacaaacacacactccaaaactcagagtctcncctgacctgtgggggtgtcgttcccccaccccactccctcattttccttcctctacccccatttttctctaaccacccctcacacacttcacttacacatagagagagagaaagttcggtgcttttgtatagaatcatcaccccattaccctgcattcaccatttcatgcattgattctatctgggatctctctcaaaagaaaaaaaagaaaaacccctctttgataatggacaccacttcatcccctatgtccctccaaacccaaaaaacaaactttcaagaccttccagaagcttcccccaagccatacaagaactcgcgtccgccttgtttccgtcatttattcggacatagtggcacgcaaaatcaacacaacacaaagtgtcacaaacacacacagttcccaactcaaatctcgtttcaaacccctcttattctcgtttcctctgtcctctataaggaaggaaatgccgccgagactccctaaaaaatctatcacacccgtagacattcctgttcaagatggtgcactgaatctgcccagagatacccagaattgacccccaaaacctgcatttaagttcacaatccatggaggacagaaagtgaacatacaaatagaaggaattgaggctggtgcaactatcacatgggacattgtagtgggagggtgggacttggaatacagtgctgagtttgtgccaaatgctgaaggaagctacaccatagctgttgagaagccaaggaaaatgggggcatcagaagaagcaatccacaactcattcacatcaaaagaatctggcaaaatggtactctcggctgacaacactgcctcaaggaggaaaaaggttgctgcatatcgctacgttgtccgcaaaagcagcaccatttgagaatggctattattaaatagtttctaggaccttctttattaattaatatcttgcttgtgatgttactttttctacctttttttgggttaaatttttagagggtcttcttatttatgcttctgaactcattaaaaggcctgtttcacagggtattaactaggggtagttggcatacatgcaagggtatgacaaagaaggccaccctgtgtgctacaatgcctatggggtgttcaaggacaaggaaatgtatgaaagggtctttggtgatgaggagaagctgaagaagttcctaaggtggagggttcaggttcttgagagaggcatcaaggtgcttcatttcaagcctggtggggtcaattccctcattcaggtcacagacctcaaggacatgccaaagagagagcttagggtggcgtccaaccagatcctctccttgttccaagacaactacccggaaatggtggctcgcaagattttcatcaacgtgccatggtacttcagcatgttgtattcaatgttcagcccgtttctgactcagagaaccaagagcaagtttgtgatctctaaggaaggaaatgctgctgagacactctacaaatttatgagacctgaagacattcctgtgcagtatggaggactgaatcggcccagtgacttgcagaatggtcccccaaaacctgtatctgagttcagaatcaaaggaggggagaaagtgaacatacaaatagaaggaattgaggctggtgcaactatcacatgggacattgtagtgggaggctgggacttggaatacagtgctgagtttgtgccaaatgctgagggaagctacaccatagcagtggagaagccaaggaaaatgggggcatcggaggaagcaatccacaactcattcacatcaaaagaatctggcaaaatggtgctctcagttgacaacactgcctcaaggaggaaaaaggttgctgcttatcgctatgttgtacgcaaaagcagcaccatttgagaatggccattattatctaggacctttttattaatatatatatatatatcttgtttgtgatttctacctttttttggttaaatttttagagggtcttatttatgcttctgaactaattaaaagcctgtttcacaggtattaactagtaatagtggtggtactaatgtgatgtaaaaaaagagaaaactggtggtggtataggcttggtatagaaggaaagcaattaagtttgcttatatagcattaccaaattactatttgttgtccctcacgttgtggtgacnnnntgttgcaagtgtgt

SEQ ID NO: 56362 - DNA, 361 bp, Glycine max
  Clone ID: PAT_MRT3847_21905C.1
aagtcgcgggtttttacggggggtacattggggggatctctgacggggctcataacgttgatcatcccgaagagaaagaccaagagaagggaaagttggccggagatattaactctgactctaaatcggactatggatcggatacagaagcccatactgatgcacgaaaagcctgcggaaatgccttcataggtgctgtgacacatgctggagaacattctccagaaaaggtgaccgagaaggaccccaagagatacccgccaggatgggacccagattgagacctcaatttaatgcggaatatgctgaggtggaagctcatatggaaacatagtcgcttgaagaggctgtagctcctaaa

SEQ ID NO: 56363 - DNA, 354 bp, Glycine max
  Clone ID: PAT_MRT3847_21906C.1
acccactatccttacacgcgcgcgacatggattattcctggttccgtgtctttgcagcagacgaacatggaggacaaccgaaactgagcgccacgcgctttctcggaacctgtttctgaatctgacttcgagagtcaatgcctacatacacgagtacttcgacgaacccttgactcatcgctacgactcctccttcttgcaaagcggcagcaaggccctttaagacaaatactgcatcacgatcgaaacggagacgggtgctcgtcgttaacagccctggagcgtgcatgggaagacgcaaactaacactggcttgaaggacgcgattatccatggagatcggtatccggaccg

SEQ ID NO: 56364 - DNA, 429 bp, Glycine max
  Clone ID: PAT_MRT3847_21907C.1
cagtttctagacagaataacaatgtcaatgtcaacatcaactcaagacatagcagattagttcgtgcaactgtgatgcctgcctcagatggacatctgaaacaagaggaaacaaatgctccatcttctgtacatgcaaaagctgaggaacataaggctttatctaaatcagaagcaaaaccgttatctcttgatcatgaaggaggtgatattgaagatggcgacgataatgataatgatgatgaacttcctaacttttctgatgttgaggaaatgattcttgaaatggatttatctccaatggatcaagagacaaatgctagtagagaagtcttgcgatatcaacttgatgaaagtaagaggactataatgagattggagcaaagtgctcagtcctctatgggaagagcaatttcatcccaaggtgcat

SEQ ID NO: 56365 - DNA, 850 bp, Glycine max
  Clone ID: PAT_MRT3847_21908C.1
ccaagcgtccgcggacgcgtgggaaaacttggaaaggaaactcaaaattttctcacataaccaccaaacaatggagttcccacactcccttcaatggcaatacggcatcccttctcaccttctctttccctacaatttcatccctgaaaaccatgttcactggacagaaacccctgactctcacatattctcagctgacatccctggtgtgaagaaagaggagcttagagtggaggttgaggactcaaagtacctcataatcagaactcaagcagtggataaatccacagaacctgcgaggaagtttgagaggaagtttaggctgccagggagggttgatcttgatggcatctctgcagggtatgaagatggagttttaactattacagttccaagatcacttagtagaggtttctacattgacccttctgatgtgcctgagaatttggaagttcttgcaagagctgcttaattgaatgaatgaatggtccttgttttaattaggaactaccatttactgattgtgattgattcttctaggttctaaggaaattaattaatgaaacattggttatggtgtctttgcgtgatttgggccatgttcttcttatctgagtgattcttgtgtacaaaatgattgtggattgtgatccaattgtgttctattattttcagaagtaacatggatccaagacttcaactcgcagatatttagctaacttttatatcaaatttgccacactttcatactttacctaaattttatggaagtagataggtagacactaaatgctataatattttaaataaggtgttaatttgatactatatgaagaagtatttgtacatc

SEQ ID NO: 56366 - DNA, 237 bp, Glycine max
  Clone ID: PAT_MRT3847_21909C.1
atattaccctttatttcccccccaacacccaggggcacgaagggggcacttcacggagtaggccccaaaccccacaaacggggcgcaaaccaacagccaaagcccacgaagggccagacccaaaagccaaacggcgagggcccaaacggacacacagaccccaaggggggggagggggcgaccaccaacacccaggcacaacggggggacaggaaccccccccccagaagggaaaac

SEQ ID NO: 56367 - DNA, 328 bp, Glycine max
  Clone ID: PAT_MRT3847_2190C.1
tcattaaaataataatgtataacaattatattaatatttaataataatatttaattttaaaaatcatgaaaattatataattttaaacaacatgagagaagtcaaattcatactttgacgtctgactatgtgtgtatatatgacaaattaatataaacactcaattaaaaaataaaaaatagagacctaattaaaaaatttataaagatatgggaagctagagcctaatttaagcaatattttaattgattttgaaaactgtggaaaaggaaaataaagaaaatggaagattattggcgatagtgggaggcacacaagacatccatat

SEQ ID NO: 56368 - DNA, 158 bp, Glycine max
  Clone ID: PAT_MRT3847_21910C.1
ctgaaagccaaggataacgaccacgaccaccatatcttctgatccttatctattaccaccgcctaccgtgccggtgccgacccatccattccatacaccgaacagctacacgctgctggcctccccacgaggtagaccatcgatgtcctatcctacaa

SEQ ID NO: 56369 - DNA, 442 bp, Glycine max
  Clone ID: PAT_MRT3847_21911C.1
gtttgattgtgttgatgaagaggattactttgaggaagtttctttaagcgcagcacttaatggtgtcgagggtttggactatatacaaagaatatctgtatccacatctgatggatcatctgatgtgctataacacacatatggtgaacctgtcagacggggaactgatattggatatcacctaaaggaaacagctgtggcgtactcgcaggagtctaaacttaacgaattgctgaagagatactctgaatttattaactctactatctatatttgggcaagcaaagaggatgatgtgcaggttcccgctgatgaatatgactccagtgatgaacactatttatctgtaagcagtttcaaggaggaaagcgaagatcaagatgctgataaaaattgagacgaagaaattatgcccaagacaaacacggttgaagaaacaact

SEQ ID NO: 56370 - DNA, 212 bp, Glycine max
  Clone ID: PAT_MRT3847_21912C.1
aaagaagatatcagcaccacgaatctcaaatactttctggtgccattttttctttcatcggcgcaaaataaaatggcaggagatttctttttacatactcttatcttataccttctatttctttccgaatttatgtcatatattcacctacattcttcgtccctaaatcatattatttaatctattattgacttttaaaaattgccttttta

SEQ ID NO: 56371 - DNA, 220 bp, Glycine max
  Clone ID: PAT_MRT3847_21913C.1
aagaaacacttttttggggcagactttgctgcagaattatcaaagactattctcagcgagcacagcactttttgggcaatgatccaggccgatgggggaatctaactcttcaatcccttgggaagcctgaacctgagtgccggcattgacttcacttttaccaccatagacaactaagtgccaaataacgaggcaacaaaggccacaccaactgcgggac

SEQ ID NO: 56372 - DNA, 220 bp, Glycine max
  unsure (1)..(220): unsure at all n locations
  Clone ID: PAT_MRT3847_21914C.1
gcaggcacgcgtacgtaagctcggaattcggntcgagnngnatgtgattgtaaaaatgtagangaggggntagtntnnctaaagntgntntgaancatcnctnggantanatnnncgcgagagcntnnnnaggtnnngagnnangtantngctgacngtgngaacgggagnnaagaagcgnnagagagtgagactngatntgacncagancgtgcgaann

SEQ ID NO: 56373 - DNA, 259 bp, Glycine max
  Clone ID: PAT_MRT3847_21915C.1
gtgccgtctttggttcctcatggctgttatctgtctttatgatttcatgattagacaatgtggaattacataactggcgttgcacttaaagtgatgtgatttatgcatttatgcatgagaactaaatagatttttagattcctacttaaacaaaaactttccatgacagtagcatactgatgagactacacacacacacacaaaacaacaacaacaacaacaggacaacaacaaagcatgctcagtattgagacactgt

SEQ ID NO: 56374 - DNA, 218 bp, Glycine max
  Clone ID: PAT_MRT3847_21916C.1
cccaagtttccgatgccgttggtgtccctgagcccttgtcagtgtttgcgcccacttaaggaactgggaaataccttgacaaggggagtcttcaaattgtgaatgtgagtttcgacttcagacctgtagtgatcaccattaacttggaccttaaaaagggcggtcataggttcctcacgacccctgtttatggatactttggacgggatgaccctgac

SEQ ID NO: 56375 - DNA, 387 bp, Glycine max
  Clone ID: PAT_MRT3847_21917C.1
cttgttttttttttttattaaatgggttttttactttcatttgggtataattttagggagaacgggcactgttaccagcaattttttcacaaaataaaaaaattattttaaacatttgcgggccctataaaattattaatataccttcatccaaaaaaaaaaaaatgtggtttgatgggtttttaaaaacttccacattggaacgccatttaaagtttggcacagatactttcaaaactttaaacccaatgggaaatgcttcaataagaaataattggaacagccaaatttagaaatggggaattagaggaaagtttttaaattttccttttttaggacatcaattaacacccaaaacgggttttaaaagaactaggggggtttttt

SEQ ID NO: 56376 - DNA, 356 bp, Glycine max
  Clone ID: PAT_MRT3847_21918C.1
aaaaaaaaaaaaaaaaaaaaaaaaaaaaaaaaaaaaaaaaaaaaaaaaaaaaaaaaaaaaaaaaaaaaaggaaaaaacgataaaaaaagaaacaaaattaaaaacgcgtgcaagcaaataataacgattttatagggaaaacagtggcggtcctttgtcagtcgtcttgcaacgcaccccctgttaaacccctggcgtttcccattttaggcccctaacattacatcccctttccgcctgttcacgctgtatggagggggacccccccgctggcccttcccataatgtgcggcgcctgaatcgcttttgggccgcgcgttgtaatacgctaattagccccctaggacccgcttctt

SEQ ID NO: 56377 - DNA, 146 bp, Glycine max
  Clone ID: PAT_MRT3847_21919C.1
tgccactggtgtttctagcccgaggccttgaaaacaagtccatgagttcaatggaaaactttgccatttccaaaggctctggacatgcatgtccatcgcattgcgagaacaggccgtgctgggtgacaaggacggggttgcataca

SEQ ID NO: 56378 - DNA, 330 bp, Glycine max
  Clone ID: PAT_MRT3847_2191C.1
gatgttataaaacaactgaaatatgctattttactatccttcaatctttttcattggggggtgtactaaatataccgttccttctttcacaaaatatctattaaaaagatatctgctcacccatatatctcttaccttctcacatcatatcctttcttcccttttgattctctataataaactatacatgtaaaatttaccatacttattaaaacaatctttatcatggtatcaacaaatatccagcatcttttaactttaaaactctaacaatgaataacaactcatatttcctttcttaaaaaatatcttaccaattcaaaaaacaac

SEQ ID NO: 56379 - DNA, 828 bp, Glycine max
  Clone ID: PAT_MRT3847_21920C.1
gtaggaagccatggaaaccttctccataactggaaactcatcttccttcatcattctcactagaccatcaacgaggcacaagccaatcttcctgccacagcgtcacactttcaaccccatcagatgcaccaatactgataataataacaatagtagtagtagcagcagcagcaacacaaccaatgatgatgcaaactcggttcaagttcaagcaccaaccacgacaccaactactcccgtagaaataagcttccggagaaggtcgagaaggcaagccaaacgactgcgagagaacgagaacagcggcatgcaaaaggcgagggtggagactccccccaagaagtgggaggacatgtctctgagtgagaaagcagtagagctgtatgtgggagagaagggtgctctcttctggctcaacaagtttgcatatgcttcaatcttcatcatgattgggggatggatagccttcaggtttgtgggtcctgcattcaacctttaccagcttgatggtcctctactctccccttctgatgtcttcaagtgatcgatcttcttcatctcaagtttttgagtttgatcaatattcactcttttagcttctgagctcagatgatgctctccaattatgttgctactatagtgcgtcacagatattatatgtaccattccaggagagccaaaaccaaccattttttttttgttaaagagagagttgtaatgtcactgcagcatttttttttcaggcatttttcgtgttagaaatcaaccctatgaatgatccatatacatcaactttgtttagtgggataagattattgtaattgctgt

SEQ ID NO: 56380 - DNA, 450 bp, Glycine max
  Clone ID: PAT_MRT3847_21921C.1
aagaaggaaaaaaatgcaactgttttcagcggaagccaaccggtcaagcaactcattcagctcccttatcgtcgggggagtcgcgggagatgccgagggcgtcgatgagggaggtggcgaggacggactccttgaggccgtaggaggcgcgctcgcggtcgaggtttgggagaaggaggctgacggcggggaagaaattgcggccggagggtttgaagaacacataataagtgataatgttagcgacttcagtgacgacgagcaacaacatgattttcatgaacatggagaaccaagccatcaaaatatgagatgaggaaaccacgatttgaggcaaagttgttcgcaatgagagtagagtttccacaagcagcagattggttggatcaaatttctaagagtaaatggacttacgcctatgatgaaggaaaacggtatgaccatatgact

SEQ ID NO: 56381 - DNA, 822 bp, Glycine max
  Clone ID: PAT_MRT3847_21922C.1
cccacgcgtccgcccacgcgtccgaataaactgaaaaacagtcgaaaccatcgcactgtacgtctgtaccataacttccaccaccgccgccggcgccgatcaccaccatttccggcgactccacgctacaacaaccgtgtttgaaggactacaaaagtgagcataccatggctttgtccctttcttatgcaatcacaaagccatttttgagggtccaagacagaagcagcatgaactgtgaacttcagagacccaaaaatggtgttgtagctttgataaggtgtgaatcaaaagagtcatcatcagagttgccagaaaaacattccaagttggagatagggtcacccattattttcattgaagctcccaagatgatcaagactgcagctactatgccctgcctcagggtcaattctggtctagtcaaacctggtgatgttggaaggattgtgtctcgaaaacccaaagacgtgtgggcagtgcgcgtaagaattggaacttatcttgtagatggaaaatatttcaagcccctggaattgggcgagtttaggttgataaagacctgagaattgctcccaaaacacaaagactcaatgccaacttgttagatgacccgtggcataccatattttgtatatttttactgcattgtgcaaattagttgagcaaactacatgaaattaatgtttctcgtatttcttttaaatttccttattttatttatttattggtaaaaatgtttacgtagagaagcttaataatgtgtataatgtctaaatgaccatattaatattaagctgtttttatttgggagttgttgta

SEQ ID NO: 56382 - DNA, 428 bp, Glycine max
  unsure (1)..(428): unsure at all n locations
  Clone ID: PAT_MRT3847_21923C.1
acccacgcgtccngaataacatattttttatacagccgcaaacgcagtttttgacactgaaggggggagaaccgaagcttaccggcagcgactccacctaaaacaagaaagaggccacagggaagagaccggctgcaactaaccccgtaggcatcatgcccttgggaaacagacaggtcagaaatggttgctgcgcaagaaaaaccgtgggaaactagcactgaacacccagacgtgccgcatataaacgccgtcgctggaacaactcccgtgggccaagagtaacttcaaccggacccatttcaacctgctcaagaccaagaagtgagaaagaagccacactacaaacgcctgaggcagagaccacgggggaaatgggcagcagaaatccgcgacccaaacaaagcagccaaagcgtggctaggaac

SEQ ID NO: 56383 - DNA, 210 bp, Glycine max
  Clone ID: PAT_MRT3847_21924C.1
tctaatcgtttgctcacgcgtacgagctattttaagttacgacaggtcctcttgatcagaggattgtcaatgctgatgctttggccaatagaaatgacctcttggctgcatgatacatcatgcctgacaatatggtggtggaccattacacgttttactattctggttgatggtgggcaaacggattatatttgtaaatgatgcatgctc

SEQ ID NO: 56384 - DNA, 163 bp, Glycine max
  unsure (1)..(163): unsure at all n locations
  Clone ID: PAT_MRT3847_21925C.1
agcttgggaaaatnctcctttgngccctttggcaacatggtnctaaanacccnnccaaagngatncctnaaggtnactcctaagttggggatcaggtaatgatgtttntggtctaaatttggccccagaatggtcctactcccnctaaagnaatgggcaatac

SEQ ID NO: 56385 - DNA, 283 bp, Glycine max
  Clone ID: PAT_MRT3847_21926C.1
attctgaagctgccagaccgaataaattgaccatgacttgacattggatttataggatcttggacgccttcacagcatcgccgaaagacctctaacactctctcttctctccttccaaatatcgtaacctctacaagttatcaccagagaaagcttatgcgcacattacatctccgatttcaacctgaactaacgtggcaccttcacctgcactgaagtatgctgcactcgcgtcactcaattgcgaccacaatagtgacacagtttagatatatgtcttaat

SEQ ID NO: 56386 - DNA, 423 bp, Glycine max
  Clone ID: PAT_MRT3847_21927C.1
cggacgcgtgggcggacgcgtgggcggacgcgtgggcggacgcgtgggcggacgcgtgggcgattctcgccatgccgaaagccaaatccgacgccaaagccgccgatagccggttgaagcgcaagggcgctggtgctggaaggaagcaatcgaagaaagctgctaaggatcctaacaagccaaagagacctccaagcgctttcttcgttttcatgtccgagttcagagagcagtttaagaaggagcatcctaacaacaaatccgtcgctgttgtcggtaaagctggtggtgacaaatggaaatcgctgtctgatgcttttgcgttcatttaatgtttcaggaaaaggcccccttcgttgccacggccgaaaagaagaaacaagagtatgagaaaactattttggcttacaataagaaattgga

SEQ ID NO: 56387 - DNA, 884 bp, Glycine max
  Clone ID: PAT_MRT3847_21928C.1
tggatcccctggctcgcgcgctcagacaagacaacacaacacaacgcgcactctctctttttctctctgttttttgttctctcttcgcttaaaccctatcgttcttctcgttttcgccgattctcgccatgccgaaagctaaatccgacgccaaagccgccgatagcaggttgaagcggaagggcgctggtgctgggaggaagcaatcgaggaaagctgctaaggaccctaacaagccgaagagacctccaagcgctttcttcgttttcatgtccgagttcagagagcagttcaagaaggagcatcctaacaacaaatccgtcgctgttgtcggcaaagctggtggtgaaaaatggaaatcgctatctgatgctgaaaaggcccctttcgttgctactgctgagaagaagaaacaggagtatgagaaaactatttcggcttacaataagcaattggagggaaagaattcagaggaagacgagtctgacaagtcaaagtctgaagtcaatgatgacgaggaagatgaggaggaggatgatgatgacgacgagtgaagatggtgatacaagatgaagcgtaggaggatgtgggaaaagaaaattgttttgcatagtagttgttgggtttagaatttcataggatggttcccaacccacatccctttatgataattagtttctgaatttttattttgtcctcccttactagggttagattagcgcacaatcgtaattagggttcagtatcatgatcatgtacttaaaagtcaatgctatgatacgtttcaattctattctcgaagaaattccacagcctctttcaactttcccttttaaaaaaaaaaaaaaaaaaaaaaaaagcgaccgccctacaggatgcagcta

SEQ ID NO: 56388 - DNA, 1016 bp, Glycine max
  unsure (1)..(1016): unsure at all n locations
  Clone ID: PAT_MRT3847_21929C.1
cgcaaggccatctctcccactctcgcgttccttcttcgtcgcctcgacttcttcgttgcgacactgagagagctgagggagctggcggcgctttgacttcttcacagtgtcactctgtctctctttttcttctcacactcacgcctcacacagttcctaaatccctagccagtacaacctcactcactttctctctttgtctctctttctctcagattcctacattgtctgcgcactggcaccaaacaaccataagatctgcaccgtcgctgaaatcggcctcaacgacgcatgccgtcgggaatcagcaactttgtggttgaagcgcaagggcactggtgctgctggaaggaaacaatcgaagaaagctgctaaggttcctaacaagcgaaagagacctccaagcgcttttttcattttcatgtccgagttcagagagcagttcaagaaggagcatcctaatttattgatgatatccacatttttgtaacctagtttgcattaatttaatgtttcatgaaaaagtcccttcgttgctatggccaaaaagaagaaaccagagtnntagaaaactattttggcttacnnatagaaatggnaggggaagaatccagaggaatacgagtctgacaagtcaaagtttgaagtccatgatgatgaggcgattgaagattgctaagcatgagcagcaggaggatggtgatgacgacgagtgaagatggtgatacaagatcaagcgtagtaggatgtgggaaaagaaaattgttttgcatagtagttgttgggtttagaatttcataggatggttcccaacccacatccctttatgataattagtttctgaatttttattttgtcctcccttactagggttagattagcgcacaatcgtaattagggttcagtatcatgatcatgtccttaaaagtcaatgctatgatacgtttcaattctattctaaaaaaaaaaaaaaaaaaaaagaccgctatcgggcgctctagcggacgcacgcgtgc

SEQ ID NO: 56389 - DNA, 365 bp, Glycine max
  Clone ID: PAT_MRT3847_2192C.1
gccattcgcaacggttaaagaaagagagaccgagagcgagcgagagagaaagagagagagagagcccgaccttcctctatcgagctctgaacctttctcccccctttaagaaacgtgatatgctcaatgctcgcagaatccaaaacgagtgcgtacgttagagtccccctcacatcacgagttgctgagagaaacaagctgggtctgtaggaacacggaaaaagagagcgcctaccataccacgaagaggagtccattcaggcaaaggatgagaaagctcctgaccaaaagaaaaattgattactgtgagcattgaattgtgggttacaaggagcacgaaagcttttccaaaccaaatgttttga

SEQ ID NO: 56390 - DNA, 1836 bp, Glycine max
  Clone ID: PAT_MRT3847_21930C.1
atctctcccactctcgcgttccttcttcgtcgcctcgacttcttcgttgcgacactgagagagctgagggagctggcggcgctttgacttcttcacagtgtcactctgtctctctttttcttctcacactcacgcctcacacagttcctaaatccctagccagtacaacctcactcactttctctctttgtctctctttctctcagattcctacattgtctgcgcactggcaccaaacaaccataagatctgcaccgtcgctgaaatcggcctcaacgacgcatgccgtcgggaatcagcaactttgtgtcgtttaggttgaagcgcaagggcgctggtgctggaaggaagcaatcgaagaaagctgctaaggatcctaacaagccaaagagacctccaagcgctttcttcgttttcatgtacggattttcgtttgcttttgataccgaatctgttttcgtttcgtttcgttttgatttttttttttgtgttctggcgattgaagtttttgtgattgtttttttaggtccgagttcagagagcagtttaagaaggagcatcctaacaacaaatccgtcgctgttgtgagtgatttcgccttactttcactgttcgcgtgaaaatttgacgctatttttttgttcttaatagaatttcactgtgaacatattttaggtcggtaaagctggtggtgacaaatggaaatcgctgtctgatgctgtgagtattaagattttgagaattcttttttcattattagtttttgcgtatggttctatatgatttaatttattgaccatatctacttatttgtaacctagtttgcgttcatttaatgtttcaggaaaaggcccccttcgttgccacggccgaaaagaagaaacaagagtatgagaaaactattttggcttacaataagaaattggtgaatactttttaccctatactacttactcttattttatagtataatgtaatgtaatgcaataattgattgagcttgttattttgatgtgttaggaggggaagaattcagaggaagacgagtctgacaagtcaaagtctgaagtcaatgacgatgaggaagatgaggtagatggagattaacctgttattatgatttgtgtcttgtttaactagtttgttcctttgtataactaattgtataattaatgtgttgtttgctgtttattctgtaggaggaggaggatgatgatgacgacgagtgaagatggtgatacaagatgaagcgtaggaggatgtgggaaaagaaaattgttttgcatagtagttgttgggtttagaatttcataggatggttcccaacccacatccctttatgataattagtttctgaatttttattttgtcctcccttactagggttagattagcgcacaatcgtaattagggttcagtatcatgatcatgtacttaaaagtcaatgctatgatacgtttcaattctattctcgaagaaattccacagccactagcgattaatatcatgatcctgtacttaaagtcaatgttatgatacgtttctattctattctcgaaaaaaaaaaataaaaaaaagagtagttgttgggtttagaatttcataggatggttcccaacccacatccctttatgataattagtttctgaatttttattttgtcctcccttactagggttagattagcgcacaatccgtaattagggttcagtatcatcatgatcatgtacttaaaagtcaatgctatgatacgtttccattctattctcgaagagaagaaaaaaaaaaaaaaaaaaaaaaaaacggccgctgtataggatccaagcttatgtacgc

SEQ ID NO: 56391 - DNA, 811 bp, Glycine max
  Clone ID: PAT_MRT3847_21931C.1
tttttaagggtaactcgcagtggtatataataaacttttatactagtaactacatcttttttttaagagaactagtaactgcatcttagtagtacaagtaacacttcattcgtataaaagttcacttattttcatacaattaaaaaaatctttaacttagtgcaatttatacatcaaacatttgtgcacaaacataaggttaatccacagctctatacatatattgtttcatctcatcaatagcataagcgttaaacattttcctaaattaatgtagtctatcccttcttcaaaaacagggcatatcagtccctttcacaggaaataatttgcaacaaatattttgaactgtgaatgctttttccaagtgatataatgacgaaggaattcatagatatagtagatgctcaataatcaaaaccagtcaccatcattccattacctccaggaacgaaccaaactctccaatttctgcatagcccttgcaggggcaaaccacaaaccccaatgacacatgaaaggatccacaagaagaaaaactatacaatgttggagtcatctctaaaacttgagaaaacaatttggtgtgggtaggtttcataagaaagcaatatctatatgagcttcttcttccgaaagaatcgtttcagataccacagctgcaaccctgaaaccaaaatgcagatgccaagcgaaaagatactgaaccaagcgactctagcattcgttgtttcactaacttccctcatctctgcttccctgtagcaatgtccaagaaaagggaaaagggagttttgaaatgtagtaatca

SEQ ID NO: 56392 - DNA, 260 bp, Glycine max
  Clone ID: PAT_MRT3847_21932C.1
ctaagtgtaatgatgagactggagcaaagggacctaataattttaccgagatggggggtcttactagtatcctcattttctcgcattttattgttatcctactaggtttctatccacacaatctatacttgtttacatcaatactattgctcccaaatgtcctcaaaatcccgggaaagaactggctatcaatgaatctttttccattacctcaaaatgggggaacaaccaagttgtatgaaaataggtgaaacgactaa

SEQ ID NO: 56393 - DNA, 1220 bp, Glycine max
  Clone ID: PAT_MRT3847_21933C.1
ataaatattcacttattttcatataattaaataatcttcaactcagtgcaatttatacatcaaacatttgtgcacaaacataattcagagctctatacatttttattgtttcatctcatcaataacataagcgttaaacattttcctaaattattgtagtccatcccttctttaaaaacagggcatatcagtccctttcacaggaaatcatttgcaacaaatattttgaactgtgaatgcttttttccaagggacataatgacgaaggaattcatacatatagtagatgctaaataatcaaacccagtcaccatcattccattacctccaagaacaaaccaaactctccaatttctgcatagcccttgcaggggcaacccacaaaccccaatgacacatgaaaggatccacaagaagaaaaactatacaatgttggagtcatctcaaaaacttgagaaaacaatttggtgttgatagttttcataagaaagcaatatctatatgagcttcttcttccgaaagaatcgtttcagaaaccacagttgcaaccctgaaaccaaaatgcagatgccaagagaaaagatactgaaccaagcgactctagcattcgttgtttcactaacttccctcatctctgcttccctattcttcaaataaattagattgtcccggatggcttccacagccccttcaagtttccttagctcaagttcaacaccctctatcttttcttttcttgcaacggagtcccaatctttggcatggattccagttttccattcaaggctgattgtggtctctcctccaccttcttgatgtttgttattcacccaaaagcatgccacgtagttcccagactcggtagttgtaaatgcaaactgaccgtgggtaacattttcattctggtgaagattatttccataaggggatgtcaccttggcggaaatagtttgaagttggtgaccctggacatcatcggctacaacatagtaatctgctaaaacgacgacgtgtgtctggatttcctcggacatgcacttggttcccttgctggggatggttaaccatacagcctcggtaagagtggtgaaacataacagcaagagcagaggggttcgagagcttaggttgatgtccttggccattactactcaagagggttgttgacctatgaatccaaaatcagatactctaaaacttatgagaccagagtataaatt

SEQ ID NO: 56394 - DNA, 223 bp, Glycine max
  Clone ID: PAT_MRT3847_21934C.1
cacaccccctgtttaaaacaagcaaagcacgaaactcccatgggggggccacaaacaaacgggggggagctacaaagccgcaagaccaagcggtgtgatcccaaacgagggttcggcatctttactgataaagatgctcctgacggggccaagccggccgaaccactaaatccagcaaccactccaacgagggagtcgcaagaaccctccctaggaccagcaa

SEQ ID NO: 56395 - DNA, 352 bp, Glycine max
  Clone ID: PAT_MRT3847_21935C.1
ggcagcgcttgataccaagccccactcaaccaccataccactctctctgctcttcctctacctttcacgtttttagagtatgaagatggaagagacattcctatgtaacacagagtcggtgtacgacggacacactgacaggctctgcgtccaaatctccgatgctgtcctcgacgcttgcctcgaacaggactcagacagtagagttgcctgcgatacatgcacgacttccaagcttggtcatggtcttcggagatctcacgactaacgctaatgttgactacagataagatactgcatgacacctgcacgaacatctgcgtcgtctcaaatggtgtgggatcggctcacg

SEQ ID NO: 56396 - DNA, 298 bp, Glycine max
  Clone ID: PAT_MRT3847_21936C.1
gtgggaatcacggacgaagagagctaagacatcatatgccttagcgccactctcaacaaagcttggaatatacatatgccggcccaggaacatgccgcttagatcatagaagaactagaccctgaagacacaggaattatcaatggaaacgatctacacatgctcttgttggatgaaccaacccattctactagaggagataggctgtaccttacataaatgctaagcttaaatcttctccataaagattgagactatcctatatcgaggaggtaccttagcacccagttcttcctgc

SEQ ID NO: 56397 - DNA, 1088 bp, Glycine max
  unsure (1)..(1088): unsure at all n locations
  Clone ID: PAT_MRT3847_21937C.1
gtaccggtccgtaatcccccatgcgcgcgtgcgtacgattgttccctaaaaacacagaagcaggaatctcctacgacccaattgaagtcagaagattctgctcaaaataataatagtctggtgagatcacaaggattaccagcagcatcggtttcaatgcagtacagagggaatgaaagtgacttcaaccattacaacaaggtaggtggttctgattccatgttcctggatgttgaaaccgggaatgtacattctctgcaattgaatcatccaaacataacgactgagaaaagatggagtggtgttccagggtcaatcccatctgctatgttcggcatggcaccatccatgcaagcaatgtctccatttgctaaaatggagggcggtcggtctattgcccatacaaacgaaggaagaatgattcaacaaggaccaggaagggagccggtaatgatgcaacatccacaattcacaaatgccaaacagaactctatgatgtctttaaattcctttccttcaggagcagcaggttggcatgtaaatagtattccaggtgctgacaatgtgaggccaaatgggaagttactacaaactcaaagcataagaagtgtgagtccaaatcatttggagcaatttggtcaaactccttataaagaatattctcatttccttggaccagcagactactcatctgctggagtgggtggttattgcaagccaatgggtgcatcatcatcccctccacctacaattcctccttgcatcaanggtcatggagcacaagcacgccttcaccttngctcacggtgccacttccttggactattttctgggcatcagaatgcagcccgacattagcttacattccacatggattggacccttggggcttcatgcccgaattgctacnccgcatagaatgagttgaancccatnttttcgggtaggggntgaggtaggactttangtgaaacgtntgaatgaggnancatctatgatgaangttgaactatatggatgaagcatcttgtgagcaatagctgatgactccagactgagacaagntgctaaagtagttgttgaaaaaa

SEQ ID NO: 56398 - DNA, 563 bp, Glycine max
  Clone ID: PAT_MRT3847_21938C.1
aaagggttgaactcttgacaacttggtcaagaatgagggaagaaagggagtaaataggaaacaaatcatgaatcaagcaaatatggtgaaatgcgtgaactgtgattctgttaccattcctgagctacgatctgtgacagaaagctttaagttcaactcaacggtgaaagcaccgctacatggttttgcgttttggtttgatgttgagtttggaccatcaccaatgccactcagtattcgttacccgacttcatctgttgacgatcatcctccggtggatagtcaaacaagaagagaccctacgctgctcctgtccactgcacctaatgtcctgccaacacattggcaacagaccttgatatacttttttgatccaaaagatctgaaacaagatcaactcattgaaggaagagtgacattgtcacagaatcaagcaagttcccggcttctggatgttaaaattgcatatgacacaggaggtcaatcccatgtgaaatattcttttctgagatgaccgagtttgttatgaacttatcttatcatgaaggccccgttcgtttgca

SEQ ID NO: 56399 - DNA, 384 bp, Glycine max
  Clone ID: PAT_MRT3847_21939C.1
tggttcctctatagcggccgctttgcttttttttttttttttttttttttcgccccgggggcgagatattttattcgctgtggtggctttggacttatacgtctggctttttgggtgaaaggcgatattcccttttacatttgcgctacggcttctcagagtgggaaacgtggccatagaaaaagggggggacgattaatgggtgtgggaacaactattgaggttttctgaaagttttatttgttctggtatgaggtccaagtgtggtttccctcggggtcttgtaattgagctgggtccgctacctgggggacgctaaatttggatgccaactctggaacctccgccttccccttgtgtggctcgccttgaggacttcttggg

SEQ ID NO: 56400 - DNA, 298 bp, Glycine max
  Clone ID: PAT_MRT3847_2193C.1
acggaaaatgaaaaaggatttggggccctccccaaaaagattcttttgttttaaagaaggggatttttactcaaacgcgggttcaggaatgactgtattttccctacccccgttttaaaaacttaaaaacggttattttttttttttttaaggggggggtttcaaattaaggaaacctattttttgcgataggaaaaaaagatttttttttttcccaagatttttaaaaaaaattttttttgttcgaacgatctcccaaatttaaagggggtgttggaaaaacataaaaaatttttcc

SEQ ID NO: 56401 - DNA, 319 bp, Glycine max
  Clone ID: PAT_MRT3847_21940C.1
gattatttcacacattgagatggggacattttttggtgggacaatgcaaaaactctgaccactgatgtatctgtacaatagctctgttgcgaattgggtactgaggctggccaacattatcctgagtgtgcccaaagccacagtggagttcatttgcacacaattcacattacttgaaagagcttatgccagaaagcaagatgtgagcattgaatgtgatgcacgtactattgcaaatgcacgaaagacactggttgatagcaacgttggaaactacacacaaatcgctggtttccatgttgctggaaggagaggaaga

SEQ ID NO: 56402 - DNA, 502 bp, Glycine max
  unsure (1)..(502): unsure at all n locations
  Clone ID: PAT_MRT3847_21941C.1
attacatcaaattgattatgtttaggagtctggatctaaaataaaataacttggctgtgtcagtattcagtaatgcaatgccaacaaacgagacaggtatagcggtcattccgaacaaagtcaggagaaattgaatgtgactgctaacttgtcttcatcacacataataattttatacattttaaaagctaatcaacaataaaataaaaaaaattcaagaactactcttgtaatatactaagcccacttgctacttaacttagcaacttttttaatccatatattatgatctcacaaacttgcaagcaacaacatgaaaattgaggaaccaaaccaaatctatatgtgtgagttgtgagagctaaggaagtttctctgctacactttgagatggaaattcaattccagcatccanagaagcacttgagagcaagcacatcnnnaggaggcaaagggagaaacaacaacaacaaaaccaaaagcaagtatgttggggtgaggc

SEQ ID NO: 56403 - DNA, 474 bp, Glycine max
  unsure (1)..(474): unsure at all n locations
  Clone ID: PAT_MRT3847_21942C.1
cggacgcccttttngaaatcatacttttgaattctgcaccatacatcaatgacttgtctgtagcacgtataactggactgttgatactactcccccaacatcatatgttacagcctcatcatcttttacaagttctttaaatgtgtctgtaaacatatctttcacagaaccctgtataggtggaggtggctttggatgcaagtcggtaaatgcctgcaatcttcttgtctatggtgctggccaggtcataccatcttcctttagaattatacagccaaacctcacgtattctcttcttgttagtctatcgtctacagttcaatatggccgggcaatccttgtaatggataggaacttctgcactgaccgtgctgtcaacaactttatgaaaatgccaaattcaactgtttatatacattttgacagaataaaagtttatgtcaacatcaggactcatttaccaaataactactt

SEQ ID NO: 56404 - DNA, 599 bp, Glycine max
  Clone ID: PAT_MRT3847_21943C.1
gccatctgtatattaaaagcgatgtatatggatttggcgttgttctgctagaaatgctaacaggtagagcagctctagacacaaatcagccaacgggtatgcagaatttggtagagtgcactatgtcatctctacatgccaaaaagagactgaaagaggtaatggatccaaacatggaggaacaatattcattaagggcagcatttcaaatagcgcaacttattttgaaatgtttagaatctatgccaaagaaacgaccgtctatggaggaggttttggaaaccttagaaaaagttgaagccataaaatacaaacccaaagtgaagaaaagaagtgcggttcgttagataagcatcccccaaataaccagggttggtcaccacttattcattacaacaacgtttatcccaaaccactaactcattctcctccatagtagttcaccatgcatctaccatttatttttcaagcagttacatggttagtaaatttcgtaaggactagataagttttttgtccagtacaattttaaattttggattttatttatttatttttatctattttaaatcctttatttaatttatcgttcatgatta

SEQ ID NO: 56405 - DNA, 223 bp, Glycine max
  unsure (1)..(223): unsure at all n locations
  Clone ID: PAT_MRT3847_21944C.1
aattcggctctaggagagtgtgaagatgctaaagacataaacataagaaagagcacaaaacagaacataaaaaaggcagtgcgagtggagtgaactgaattgagtgagagaagcgcacacacgttgaatagaaaatcatggcagttcctgtaaccaaattagttctcatcatcgatctgcatcgtatagaccttcgtctnttggcattggggcacgaacgact

SEQ ID NO: 56406 - DNA, 459 bp, Glycine max
  Clone ID: PAT_MRT3847_21945C.1
atagactctacagagaggtttgcagaagtattagcacagagaataatgcagtggatcagttaaaacaaatagttcatgcagatagacatttggaatataataaagctgagatgaagcatttagaaatgttcaacatggtaaatactcatcatgcaaccactggttataagtgtttgaagttgaaatggaggaaatttggtcacttggctggtcaagttggtggagcaaaaggtatattttgtgggttgtttggacttgaagctgaaaacaccttttggttggatagttcctccacagagaagggaagagcacgcttttcatttatgggaggaaaaggcggatcactttggaagcagttagtgttcagattgtcccatcaaagtgatgggagttcaaaaggaggtggttatttgtcaactgaagattctcaaggttctgctgaaacaatatttttggaag

SEQ ID NO: 56407 - DNA, 346 bp, Glycine max
  Clone ID: PAT_MRT3847_21946C.1
gtacgcccacgcgtacgcccacgcatacttttaatttctggcatctgattgcaagaggctagaactatatttcctaaaaaaaaagagaaaaggaaatgtaaaaaaaaaaaaaaagcaaaaaaaaaaaaaacaaaaaaaaaaaaaaaagaaaaaaaaaaaaaaaaaaaaaaaaaaaaaaaaaaaatgaaaaaaaactaacaaaaaagtaaaagccagtggggggccgccctttaaaaggggccaatttagtaggcccttctcccggaaagagagcgcggaaaaacggagctcctaaataaaataaccgcccccaagtatgaaacccgcggaggagagaaaaaccccg

SEQ ID NO: 56408 - DNA, 625 bp, Glycine max
  Clone ID: PAT_MRT3847_21947C.1
gccggaagtttcatttagttccgcctgcacggttgtttccggcgagttttgctccgatcgctcctgctgcagctccagccacgttaaggacctccactccgtgccgtcagatctgcagaccaagggtttcgaaacggtagaagactcaaccagcctcaatttcaaatcgttcagtttgttgagtgagttttccggagactcggaggaatcggcgatgattccggcgaagtcttccgcggcggtgctgaaagtgaagacgccgccgaaggcggagatcgaagagtttttcgcgatggctgaaaagtacgagcaaaaacggttcacagagaagtaagtagtagtatatatagttgattgctacaaataaaagttttaatattgcaaattactggtgcagtctcaattacagtcacaagccttgatgatacgacctaaaccagggtcgcgaacccttgtttaaaaccttctatggtctaagagtattttattttattttttcatttcgcgcgacacaggataaggaatgtgagccacctcgcactttaagggtaccagaaattgaaccctaactaactaacttacacctctccccttggggcaggctccacttttaatattgtttgaa

SEQ ID NO: 56409 - DNA, 409 bp, Glycine max
  Clone ID: PAT_MRT3847_21948C.1
gcagtttcccataactatgcttttaaccatccacatcctcaaccagaatggtggtcctaagaggaatctaaaatccaccactggcttggaccatgggcaactcttttttactttaataagctaaacctatgctttttttttaacacaagaccagtaaaggccacccccatttcctgtgccaggctgctgcttcttttgcagtaaaggctgattccgtggaggacccagcaccaattgtgaatttccagacttctttgagttttcccggtggctaaaatccattaccttggttgggaccaggttccagggaaaaagttttggcgattttgggggccaaggcctatgctgcaggttggtttctagaccaatctttcgccctggattggaatgctgggaaagggcattcaaa

SEQ ID NO: 56410 - DNA, 962 bp, Glycine max
  Clone ID: PAT_MRT3847_21949C.1
ggctcgagcgggaatttaagatagtatttgaaaagcaaagctcagaactcggacccggggaaaataaaaaggatagcatagtgccataatggaagcttgagaaggaagtggtccaaagaagaagaaagatgaaggagaactactcataccaatcgtatccagattcaggcgagtcctctccacgctccagagagatcgacttcgagagccctcctccatgggaccaccaaaactacaaagccaagttcatctgcagctatggcggcaagatccacccacgctcccacgacaaccagctctcctacgtcggcggcgacaccaaaatcctcgccgtcgaccgctccatcaagttccccgccatgcttgccaaactctccgccctctgcgacgcccaagacaacaacatcaccttcaagtaccagctccccggcgaagacctcgacgctctcatctccgtcaccaacgacgacgaccttgaccacatgatgcacgagtacgatcgcctctaccgcgcttccgctagaccctcccgcatgcgattattcctctttccttccgatactcctccttcgcctccacctgcttctgctccacctgataccgttatcaaacctaataacgtcgattttctcttcgctctcgaaaaaaacgtcgccgtccctgctcctccgcctcctcagccaccaccggtttctgtcaaatttaatgatccgctgccggagcctgtggcgccgcagccggagtaccggtcgcggttgaattttaaccctgcggtttcggatccaagcgcgattcagcgccagttgcatcaattgcaaattgcggagaacgagaaagcttcgtattggaggaagaacgaggataattaccctgccggtgattactacgttcagaaaatgcccgagaagttcccgccagcgaattttccggcaagcgcaccgggttattggcctgaaaaacat

SEQ ID NO: 56411 - DNA, 432 bp, Glycine max
  unsure (1)..(432): unsure at all n locations
  Clone ID: PAT_MRT3847_2194C.1
acccttncgtaggcggatcaaggcttgaagggccgtcaaccaacgcgtccgcccacgcgtccgcccacgcttccgctggttgttgctgtagtggcggagaggatcgtggtactgctatggcggaatcatcggaatccttcaccatggcatccagcccggcccagcgtcggcgaggcaatgatcctctcacctccagccctggccgaagctcccggcgtactgatgccctcacctccagccctggccgtgaccttccaccatttgaggatgagtccgaggggctcctaggcacagaggggcccctggaggaagaagaggatggagaggagctcattggagatggcatggaaagggactaccgcgccatcccagagctggacgcctatgaagcccgaggactggctctggatgatgaggacgtagaggagctga

SEQ ID NO: 56412 - DNA, 269 bp, Glycine max
  unsure (1)..(269): unsure at all n locations
  Clone ID: PAT_MRT3847_21950C.1
cacaacaaacatacataganaaattcactcatataacnanccntcanttcaataaancnaggaccnagaaagattccanangtagctaacgaagcaacaagcnccatgctggnttccaaanatctnangtgtgctttaggggacaaggtttcancagggctttttnggncgncaagttatttntcnggggnattggaaccagaacngcagacccccangnggnctccncgggtggnccttaacctnaccttaaggtnngaacaaaccnc

SEQ ID NO: 56413 - DNA, 344 bp, Glycine max
  Clone ID: PAT_MRT3847_21951C.1
gttttacgataccagggctctatctctctggagagtttgtctttcattggaatgactggtatcgcaacctctatgccttttacgaggatagtatctttgagctttacagctttagtcatgcagttagaccatggaccgcatattgaatgtctggatcatatcctctaattatatgtgtgattagcgccttttttatggctagaacttttaactgtgtttggggaggctgttcacgatttattgatgtatttcctatgcacacgcttgcaaactcattcgtcaagtattatgcactgctcttgccctctatagtcatcatggattcttcttaaccaaagatggaa

SEQ ID NO: 56414 - DNA, 769 bp, Glycine max
  Clone ID: PAT_MRT3847_21952C.1
ttttccgttcttccgcatcaatctatctcaattctcatgtggacgagcagtagtatttacagcgagtgttccatgctccgcaggctcctctgcacttctcttccccgtcttccactaaaaccacaatcttcctccttaaccattctcaactcctcactcacccaaaatcaaaaacaaaaacagaaacccttatcttcccacaccatcaaatccttctccacttccaaaatgggggacgcgccaagacccttatccgttccaatccccactttggaaaaagcagaacgctccgaccttctccgcgccctagaagcttccatgggttcccctttcagctcggagcctctctccccaaaccctaactctctcatcatcgtcatcagcggtcccagcggcgtcggcaaggacgccctcatcgcgcgcctccgcgacaactcccgcctcgccctccacttcgtcgtcaccgtcaccacccgcccccgccgccccgccgaggtcgacgggaaagactacatcttcgtatccaaggaagagtttctcgggatggtggagcgggaggagctgctggagtatgcactggtctacggtgactacaagggggtcccgaagcagcagattcgggagtgtctcgcgaagggctgcgacgtcgttctgagggtggatattcagggggctgccacgctgaagaaggtgctcgggaagtcggcggtgtttgtgtttgtggcggcggagagcgagatggcgttggtagagaggctcgtggaccgga

SEQ ID NO: 56415 - DNA, 462 bp, Glycine max
  Clone ID: PAT_MRT3847_21953C.1
ggtttttctcgagtttcttttaatctttttgctcagtctttataagcaattttataagaatttttaaagttaagttgtgaactacttgtatccactgtcaagggcaggcccgtatttgtctcaaaacctaggtatgctctagaaagaacattttttctattcggccttgcagccctgttcacttctggaaacacccacaatcatgtatattttcccccatgaattttgatcatcatgattaaaaattttatcccgtgcaataaattttaaagatttaagaattttacctctacctagtaaaatttcaatggtcttaaattgattcaaactaagtaatgtgcgagtttacaaaaatagtgcttagtcaaaataagtatcattatagtgaaaatgattctcatgcgaaattttaaacccaccttttgatgcacaaatttaaacatgacaagccttgttgttgaa

SEQ ID NO: 56416 - DNA, 709 bp, Glycine max
  unsure (1)..(709): unsure at all n locations
  Clone ID: PAT_MRT3847_21954C.1
ctgcagctccagctccaacctttcccgctcaagtcgcaacacctccttcttcatcttgcgctcgttctcttttttttcagccatacgcttggcagcctcagctgcctccagggccttcactttgacatctctcttgcctgtaacaacagcagccgcttgtttttgttgaactaatggaataaaggaagaaacgttggatacaatattgttaatggggccttgtttcatactatcttttccagataacttcggccttttgcaaactgatccagcagtcctcttgacaccattcgctccaagagaaatattatggttctccttcccctttcttgtgaatcttttcctattgccatcctgcttgtcaagcttattttttaccttatcgcaagtcccactgagattaaactctgtgcttaaaatatctttacgtccacctgttaatatatcatcttgtaaaactgacgtagaggggtttgcattatctacaatctcagctaggggttctctaatatttgaaccagccattccttcggaaccaatgcccctttggaatgtaccaggaatctcgtccacattttcattttcttcagtaatgcagggaaggtctagttttaaactcctacgctttcctgaactgcccaggttcgaattaattccatcccaaagagtttgactggaanaagggtactggaccctggcaatttgggtg

SEQ ID NO: 56417 - DNA, 477 bp, Glycine max
  Clone ID: PAT_MRT3847_21955C.1
caacgaacgagacagctacctttgtgacatggacaatccttatccgcgcacttctatcacgctcgtgtgcaccacacccagacgagcactctcatatgattacaaagagcatttcacgaaggaccgcccatggataccactcgatactatctcacgtaatacgccgatagttcgttcttcacaccacatacactcgcgtttgttacactgtacccatccatgacgctcctcaactctttttgacacaaacagcgtacaaccgggctgacctcaatgatgatgagatatgtgacagataccacattgacaacactgggcttgggtgtaattggccatcagaagatgtgcttgctcactattggtggtcacatgcagatatattcaggtctaaaaaaagcattgagcttggttctggctacggctgggtggatttgctattgcagctgctacggatgcatcagagttgtaatctcagat

SEQ ID NO: 56418 - DNA, 221 bp, Glycine max
  Clone ID: PAT_MRT3847_21956C.1
atctttttattttttgttggccatttatttttttacgggggagggaaaaaactaccttatctgttcaaaaggcatactaacaccctggcacgtatgaatttccaagagttttttttaaaaaaatagggttttattattcaaaaccttaggggtggaaaatgatgctgaaacaataattcaaacggcattgtttgcggccacaggctcctttttcacatgaa

SEQ ID NO: 56419 - DNA, 204 bp, Glycine max
  unsure (1)..(204): unsure at all n locations
  Clone ID: PAT_MRT3847_21957C.1
aaggacncgagaaattgttgcctgattaagccttttgttctatccaaacctgttcgacttatcagatgaaaccccgtttccttattttccttacggccttcgctatccctagttcttccttttcttatgagctttacgcgggcggtgtcctgatttgtctatactggtcatgcccctggtctttcttggcccctttttgatcct

SEQ ID NO: 56420 - DNA, 241 bp, Glycine max
  Clone ID: PAT_MRT3847_21958C.1
gtcttgtgcgtttgtttaacaactactcgatgacctgtgacacaggggaactaccttgaaaacccattgtagaagtacacaggtgcatggtacattaaaaaaagagaggagcctaagagttgaagcagccacaaaggagcttggagttggctagaaagggaagaatggctctttatgatgatcatcattgaccctgatataccagaactttgctatgggcttttatgttatgtgtctgact

SEQ ID NO: 56421 - DNA, 1003 bp, Glycine max
  unsure (1)..(1003): unsure at all n locations
  Clone ID: PAT_MRT3847_21959C.1
tccggtccggattcccggtcgacccacgcgtccgtgatttctcgtttacgctcaagactagcgcccctcacacgcacactactactgcagtatatatagtattcaccttcccttcacttgtttacatcatcttaagctgcttctaggagaagaagtaattaaagcatggcaacagtgtcttatgcggtgtcaggaagcgcgtgccagagccaccgtggcgcgtcgagaacagaggccaaagtgaattattcggctcaggtaagtctcaactgccagggattgagatccttgaacaagctgcacgtgcgaaccacccgtgcggccaaaaccaaaaccttgctgtctgcgaaaagtaacaagagtgggcgtgagggagttttggggaggattgagtgtgggatgaacttgatctttgtggggactgaggtggcaccttggagcaaaactggggggcttggtgatgttcttggaggacttccaccagctttggctggaaatggacaccgtgtcatgacagtgtcaccgcgttacgaccaatacaaggatgcatgggacactagtgtgacggtggaggtcaaaattggagatagaatagaaactgtccgtttctttcactgctataagcgaggagtggatcgtgtttttgtggaccacccatgtttccttgagaaggtatggggcaagactgggtcaaaactctatggccctagtgctggagtagattatgaagacaaccaacttagattcagcttgttatgccaggcagcacttgaggcaccaagggttttgaacttaaacagtagcaaatatttctcaggaccatatggcgaagatgtaattnttattgccaatgattggcacactgcccttcttccatgctacttgaaatcaatgtaccagaccaaggggatttacaaaaacgcaaaggttgcatattgtattcataacatagcctaccagggtaggcattcctttgcagacttctctcttctcaatttaccta

SEQ ID NO: 56422 - DNA, 295 bp, Glycine max
  Clone ID: PAT_MRT3847_2195C.1
gctccattctttcttttttattcgagagaaaagataatattggtgagcggagtaataccagcatgttaaaatatccgtgtaactggcaattactatagctatcgttggaaaaatagcacacaaggcctgatgccagggaccttgaacagacaattcaattgtacataaagcagatctaacttgctcaaaccatcaaacatattcctatgtgacagcactaaggaggtcaacatttaacgagcaataccccaaactctgaccacgcactctgatatagccacataacaaagtgctt

SEQ ID NO: 56423 - DNA, 1417 bp, Glycine max
  Clone ID: PAT_MRT3847_21960C.1
ccacgcgtccgcactgagaagccattatttcagttcagattcattccctcaacatttgttgttacttttactacatttactatctctctaaatgatgtctttgatctcttctctttcagttgttcaaacccatgttaacatcagatcctgatttgttgctctatttattttacgctcgagactaatttactttacactattactacatatactattcacttccccttcacttgtttacatcgcaaaccttctctctcaatactacagaagataacgtacgattgcagaaggcgtaaaccaagcatggcaacagtgacggcctcttcttatgcggtgtcaggaagcgcgtgtcacagccaccgtggcgcgtcgagaagagaggccaaagtgaattctttggctcaggtaagtctcaattatgatgggttgagatccctgaacaagctgcacgtgcgaaccacgcgtgcggccaaaaccaaaaccttgttgtctgcgaaaagtaacaagagtggacatgacggagttttggggaggattaaatgtgggatgaacatgatcttcgtggggactgaggtggcaccttggagcaaaaccgggggacttggtgatgttcttggaggacttcccccagcgttggctggaaacggacaccgtgttatgacagtgtcaccacgttacgaccaatacaaggatgcatgggacactagtgtgacggtggaggtcaaaattggagatagaatagaaactgtccgtttctttcactgctacaagcgtggagtggatcgtgtttttgtggaccacccatgtttccttgagaaggtatggggcaagactaggtcaaaactctatggccctagtgctggagtagattatgaagacaaccaacttaggttcagcttgttatgccaggcagcacttgaggcaccaagggttttgaatttaaacagcaacaaatatttctctggaccatatggcgacgatgtaatctttattgccaatgattggcacactgcccttcttccatgctacttgaaatcaatgtaccagaccagggggatttaccaaaacgcaaaggttgcattttgtcttcataacatagcctaccagggtaggcatgcctttgcagacttctctctactcaatttacctcgcgaattcaaaggttcttttgacttcactgatgggcatgttaagcctgtgaagggaaggaaacttaactggatgaaggctgcaatattagaatcggaccgagtactcactgtaagtccatattatgcccaggaacttgtttccggagaggaaagaggtgtagaaatggacaatataattcgttcatgtggcatcactggtatcgtgaatggtatggataatagggagtggagtccaataactgatgaattcaatgatctacactacg

SEQ ID NO: 56424 - DNA, 1979 bp, Glycine max
  unsure (1)..(1979): unsure at all n locations
  Clone ID: PAT_MRT3847_21961C.1
tcccgttaacgacccacgcctccgcaaccccacaaggttccttaaaatccttcttcatattcttacccccctcaaaatccttatttcaatcatctccttcagatatagcaatgacttttcagaagcagcaaaaagttccttgattcattaccaggttcaagctctcattttcctgagatgaacttatctcctctcacaaacgaagggattcactccacccaacatgagtggtgggggctgctacaaaccgacaccaaacaagaaggttccaacaacactcttgccatgcctcaaaacctcaaccaatcagaatcaccctttcttcaaggtttacactttctcttcccttctctcacaacctagtttctcatcaaacactctttcactttcttaaactccatatctctagctcagttggttgagattggtgagttattaaaaagaaaaaaaccctctcttctcacacttagttcttccttaaacaagaacactttccatggattctaagagctccaaattctacgggctgagcggctccatagctcgacgcgttttcttccgcgcgttattcctcgcctccgctgtctccctcgttgccctgattcgcttcctccccgccgtcgatttggaatctttgactcccaagacctacgttgactgcgtcatcgacgactcagattcgctctccgaaaacaccaccttaaccgccggctcctacttgttccagagccgcatcctcaacaccttctggggctccttcgactccatgaactgcaaaaacgacacgagtttagcttccaccatcatcaccattctaaagggtaaacgactcttgaacttcggagctaaaagcctctgcgttggagaagggtctaatgtaattgtctccgcaatgcaaaggttgggattctccagtgttattggtctccacaagcacccttttttctccctcaacaaaaagaaaatcgcgtgccgctttgagtacgatgattccacattcgacttcgtgttctccaaggatgttgttgacaaggtttctgttcctgcgttgctggttcttgaggtcgagcgtattctcaagcctggtggaatcggtgccttgcttgttggctcttcttcttcttcttcctcagtgtcttcattgttgagatcttccaacgtggtgcatgttggtcatgtcaatgagcttagccttgtggttttcaagaaaagatctattttttatactgtgcttccagaagattgtgcaagtgttcaattcaccaagcctttggtgaaactaatggagcctcttgtggaggaaagagtaagagatgtcaagtatgagacggctgcatgaagaactcagaaggggtcacgttcgtttatcatccgggtttagctgggaaaattgcacacaagaatggtgtggatggagaaatggaaccgtttttcggtgaggaagagtttgattttcttgtgtggttcaaggaaactgtgcagcatgctgattttgtggttctgaagatgcatgctggggaagttgaaatgaagttccttgcggatatatttgagagtggagctatatgctctgttgatgagttgtttcttagttgctcagagagtggagatggtaaaagggaaaccatgagcagcagggaacactgcatggatacttacaagggtctcagaagcaatggtgtctacgttcatcaatggtgggatgcaaaattgcatcaaggtgcttaagggtcatatgtacagtgattgtcgcgtgagagaaattgtactatttgtatcttctttgtgtgtttgatatcttggattgcagaacaactatctagtggtattattgtttttgttgtctatcctagaaagtaggatgcttaatgctaaggctatgaacacccgcaataaaatcactgtgctcattgcttttcttaaaaaaaaaaaaaaaaaaaaaaaaaaaaaaaaagggcggccgctctagaggantcaag

SEQ ID NO: 56425 - DNA, 374 bp, Glycine max
  Clone ID: PAT_MRT3847_21962C.1
gttttatttcttattttaccgtaaaaatgaatagagatatcttcaaaagaatatgacactttttattagattttttgtgtgtatctagctaactgatacaacaattttatgttaaattatttatttttattaaatagttagaactggacataccactacaaaaagtagatttaacattgtcagattaacattggtttttgacaaaaatcgatgttaaaataaacgcggtgacataattgtaaataatgtgtattcgttaacatcaattttctaaaacctgatgttaatgaattgacattaacatcggttctgggaaaatcgatgttaacattaattcgttaacatcggttcttgaaaaaccgatgttaacgtcg

SEQ ID NO: 56426 - DNA, 442 bp, Glycine max
  unsure (1)..(442): unsure at all n locations
  Clone ID: PAT_MRT3847_21963C.1
ttttttttttttttttttttttttttttttttttttttgaaaagctgaaaatgagactgctgtatttatagaaatcgaaaatcgacatgaagttgaatgttttttttgtcctcttcgatatacattattattattatcatacctaaacgacaaaaaaaaggtcaatcagatcataaagcaatctgatgggccatctgggcctgcggcgggtgggcttgaccgttaggtcagggcaatattacgggcttgtcgatcaacagacaacacggcagagatttgagaaacgctattattgttggtggccatgggggcagaagcgacattattataattgttggttgtggcanctgcggcggcggccccggtggtggtggtgttggtggccaccccttcacaggagggacacatggtgagagtggtagctggaacctgcatgaaaaat

SEQ ID NO: 56427 - DNA, 651 bp, Glycine max
  unsure (1)..(651): unsure at all n locations
  Clone ID: PAT_MRT3847_21964C.1
gcgagttaaataacaacancttcttattangattcctcgtggcgtcccggtgagtgtttactttcctcatggattctaagagcttcaaattttacgcgctgagcggctccattgctcggcgcgtattcttccgcgcgttattgctctcctccgctgtctccctcgttgccctgatccgcttcctccccaccgtcgatttgggatctttgactcccaagacctactttgactgcgtcgacgacgactcagattcgctctccgaaaacgccaccttaacagccggctcctacttgttccagagccgcatcctcaacaccttctggggctccttcgactccatgaactgcaaaaacgacacgagtttagcttccaccgtcatcaccattctaacgggtaaacgactcttgaacttcggcgcaagaagcctctgcgttggagaagggtctaatgtaattgtctcctcaatgcaacggttgggattctccagtgtcgttggtctccacaagcacccttttttgtccctccacaaaaagaaaaccgtgtgccacttcgagtacgatgattccaccttcgacttcgtgttctccaaggatgttgttgaccaagtttctgtcccagctgcattgctcgtgcttgaggttgagcgcattc

SEQ ID NO: 56428 - DNA, 296 bp, Glycine max
  Clone ID: PAT_MRT3847_21965C.1
gaccgcatgcacaattaatacagatgagttcgaataacaacatggtgctgctaaaggtgtatgcgacgcttctattacttgaaggcgttacagttgcacgcatggaacctgaacttctttaaacgtgatcagtcattaagtactgaggatgatgagtatataaaaccatgctgcgatctctacatgtgcacacgctcaaagcctgatccatgcagctgcgaagatatatgctgcattcatgccacttagaatgaaacagctgtatgtgcacaacctcacagactcgacagagacac

SEQ ID NO: 56429 - DNA, 387 bp, Glycine max
  Clone ID: PAT_MRT3847_21966C.1
attaaattaagcccaagattaaatcttaattggtatggcagacgcttaaacaacgtcggagaaggacccagacttttgacagcggcctttttgaaagagaaactacgtccaatatgactcagacctcattggtgagaagggccaagtaatgccaaattgttgactactaggggaggaaactctaagttctttctttcaaaatttgtgtgcctttagcagttatggttgtacaaaatccatcatggaccttggtctgccatacactttcttgaaacaatgagtcgcactcctcaacaatggtgacttaacaaagatatcaccctggaaaggttttgacttattcgaatacggaaaaagatgggtgattttcagtgacggccaaaacca

SEQ ID NO: 56430 - DNA, 1332 bp, Glycine max
  Clone ID: PAT_MRT3847_21967C.1
cagctgcctgcatggacagtactaatgttccttcaagaaacacacaccctttgagaagcaactcttcaaaagaatttagacgtaacgacagggttagcttctttgattggttttaccaattcagaattcttctccagagaagcctcaaggaaagaaaacacgaatccttcaacactctgagagtctgtcaagttattgctgcagcactgttagctggtttaatgtggtggcactcagactacaggaacattcaagataggcttggcctactcttcttcatttccatcttctggggagtcttcccgtctttcaacttggttttcgcattccctcaagaacgcaccatcttcatgaaagagcgagcttcgggtatgtacacactgtcctcctatttcatggctcgaattgttggagacctgcccatggagcttattcttcccacaattttcctcattgtgacatattggatgggtggattaaagcctgatttgtgggcttttctcttgactttgttggttgtgcttggatatgtgatggtgtcacagggtcttggccttgctttaggtgcagcaataatggatgccaaacaggcttccacagtggcagcagtgacaatgctagcatttgtgttgacaggtggatactatgtccataaggtgccatcttgcatggcttggatcaaatatatatccacaaccttctactgttataggctgctgactagaatccagtatgaggatggcaagaagatatcatatctattgggttgctatcatggtgataagggtggctgcaggtttgttgaagaggatgtggtggggcaaattggcaccctaggatgcattggggtgttgcttttcatgtttgtgttctacagattattggcctaccttgccttgagacgcatcaagagttgaaacttgaaaattgaaattctgtgttgcagcatggttcttttgggaaagcttgaatgcagagaagaatggatcaatttgttggctcctagtgcagtagtcacaccacttttacactaggctagactggctagttgattcgtactaactgtaattgaagaatgaatgaggattttctgttgtaattgtaaagttagagaattaattaacaagcaaaattgaagtgaagagagaaaagaagagtaattgtagatttggatttcaaatcgctctccaagttcattctgtattcagaatgttaaagagaagaaataaggaaatttcttccctatgaaatatataaccagggtttgtttcccggagtatttgttcattcctagtaatattattaatttaaacatcacatataaatgttatt

SEQ ID NO: 56431 - DNA, 518 bp, Glycine max
  Clone ID: PAT_MRT3847_21968C.1
tcgtaagctgggatcctctagggcggccgcttttttttttttttttttttttttttttttggaaccaaacacaaccttaataattttgtgaaattttacaaggactaagaaagcaaaaaagcttatgccaggttaaaatgtaatttgcgacgaaacacaactaaaaaactatgattttatgatgcacattctaagacaattatctggaatcgtcttagaatgtgaggcgatggcgtttttgtaattaagagggttaaatttattttttacgttggccaatctaaagaatcgtcttagaatatacgttagtgacaaaattgtaaataaactgaaaagagacaacgactagagtgttagagattgtgttgctacttgctagcattccttttattgcaataccaaattgactagagttcatggtgtcatgattgtggaaaatgaaagacaggaagaaaatatgtgaaacacatcacttgaaccaagtcaaataacaaactcaaatcaaaacatggaaaaag

SEQ ID NO: 56432 - DNA, 622 bp, Glycine max
  Clone ID: PAT_MRT3847_21969C.1
ccacgtacttccaatgtgagactcgagttacgtaccttacaaatgaatcctaacatcccaccacactccacagctccaatgtgcacgtgggttggctctgcactaaccctttgattagtcttggactcgtagacgaatactgcaatatctgcttcaccacctgcaccactcatttgtagctgagaaacatgtaggaaatctctgataccaattaataagaaccttgggagaaccacatcacataactagcctttgtagttagagagcccaaggccttacaaaccccacactgaacccatattccaacatgggactcaagtcctataccttcaattggatcctaagttacctctaagtttagaaatggtgatgtgctacgtagatacattcataaagaaatattgggactgttatcattttataagtgacttttaaacttagttacctctaaggcagttttgggtgtgatatgtataccatctgaacttcttctagtggttggcttgttcctccaaatgagccacaaattaaatcaaatcagagcaattttttaatacctgctacttggttagggaatttttttctgcatttgttaatctaccatttaaaaattttggaggga

SEQ ID NO: 56433 - DNA, 1476 bp, Glycine max
  Clone ID: PAT_MRT3847_2196C.1
cgcacgtggactccaaattaaccaataatattttagttaaaccatgtccatggccatcattaacacttttggaaacgttgatgtctatattctattattatcatcatggtttctcgtatctgctgtgtgtgtttggggacgacccgccacttttctgcaagactttgaaatcacgtggtcaaagactcatatcaggcaaattgatcaaggcagatccatccaactcattctagatcaaaactctggttgtggctttgcttccaagagtaagtacatgtttggccgtgttagcatgaagatcaagctcatacccggagactctgctggcactgtcactgcattttatatgaactctgacaccgacactgtacgtgatgagctggattttgagttcttggggaaccgtagtggtcagccttacacagttcagacaaacatctatgctcacggaaaaggagatagagaacaaagggtcaacctctggtttgacccttctgcggattttcacacttatactattatgtggaatcatcatcatattgtattctacgttgatgattttcccattagagtgtacaagaacagtgagggaaagggaatcccatacccaacaatgcaaccaatgggagtgtattcgacattgtgggaagctgataattgggcaacaagaggggggttggagaaaattgattggagtaaagcacctttttatgcatattacaaggactttgacattgaagggtgcccagtgccaggacctgccaactgtgcctctaaccaaagtaattggtgggaaggggctgcataccaagctcttaatgccattgaagcccgaaggtacaggtgggttcggctcaaccatatcatctatgattactgccaagataagtcaaggtttccagtgatcccaccagagtgccttgccggcatttaaaccctaaatttcatgtcacttcaattattcaagtacaggaatacccctatatataatttacattgtccactgttcaaaaacatatcatactatattttatcggaaaaaaaaaacatcatactatatatactagagtaatctatttgcttctgctgagttaatttcaatttatcccatgtggtacgtctcttcaattatttcaagtctttcatataaacacgtgaaataaaatgtacatcaataaaactaggggtaaattattatgtccccataccataccacatggataaattgaaattaacacttgttttgttttgggggagagggcaaatgattctggtgtatgtggggcgagggctatgttcgaccagaagagaataagtcaaaagctatctctgggtttactgtgcctgtgtatttaagtgcgcattgtttgtggtgtaataaagcttgcgcattattgtgatgattcatgaaggatatttttgggcttgtgatgtagcaaatctcattatttgttcaatgactacatctatttctgt

SEQ ID NO: 56434 - DNA, 115 bp, Glycine max
  unsure (1)..(115): unsure at all n locations
  Clone ID: PAT_MRT3847_21970C.1
taaacanatgcaatctgaagangctgggtttgaagccagacatcattgacctcgaataccagtnccngttggnnangtgccacanggaaccctggtgggagcagttcacaattgg

SEQ ID NO: 56435 - DNA, 614 bp, Glycine max
  Clone ID: PAT_MRT3847_21971C.1
cccacgcgtgcgcccacgcgtccgctcaagtgcttaatgtttggaaggaacagggtcaccgtgttctcctttttactcaaacccaacaaatgcttaacatttttgagaattttttgactacttctggtcacatttatcggagaatggatggtctcactcctgtaaaacagagaatggctttaatagatgaatttaatgattcaagtgaaatatttattttcattttaacaaccaaagttggggggttggggacgaatcttacaggtgcaaatagggtgatcatcttcgaccctgactggaatccttcaactgatatgcaggctagagagcgtgcatggcgtattggtcagaagcgggatgtgacagtgtataggttgatcacgcgtggaactatagaggagaaagtgtatcaccgtcagatttacaaacattttcttaccaataagatattgaagaacccacagcataaaaggttctttaaagcccgggatatgaaagatcttttcacacttaatgtggatggagaaactgggtcaactgaaacgtcaaatattttcagtcaaatatctgaagaagtcaatgtcattgggacctataaagaaaataaggataag

SEQ ID NO: 56436 - DNA, 192 bp, Glycine max
  Clone ID: PAT_MRT3847_21972C.1
cgtcgcatgcgcgcgtacgtaggcttggatgctctagagcgggcgcttttttttttttttttgttttttttttttttaagcaagcgaaagctgattttggggtctaaacaaaacccgagtatatattacccaccagaaatggcttctcgtggggaaaacaaaactgtggctcagcttacacagaaacatttg

SEQ ID NO: 56437 - DNA, 554 bp, Glycine max
  unsure (1)..(554): unsure at all n locations
  Clone ID: PAT_MRT3847_21973C.1
ctctataccagttctaaaaaatttgaaaactattttttctttttgggtgtcggtgtattttttgtgaagatcccgtgccaatttgagcatagtttaattcatatggcgaagataagttagacaataataatggaccatattgttaatcattttgtggtgatttatttgatgtttatttttgtatttttgtactggtattctatttcacattatatctttctctagttgtctgattaatagttggatcatcttcctatatgtgggcatgtaatgatcatttatcatcgttcttgaaagtctgagcttgctataaagctgtctaggtgtttcatataatttgacatgttcctcaatggagcttgaactaaagtcatctgacgaaggagtggagacaatgtgcatgattttacctgggggataaaaacgatagctatctactttgtcagatgccgtgattgaattgctggtgccttgtgcagcatcaataagctgattctcttcctcagntatctcttttgctgcagctgcctcttctacctgcgcccgaatgttca

SEQ ID NO: 56438 - DNA, 476 bp, Glycine max
  Clone ID: PAT_MRT3847_21974C.1
ggaaaaaaaaaagaggaaataacccccccgggttttttttaaacaccacaaaaaaggaggggcctttttggaatttcaaaaacccatcatcatttttttttttccctacaccccaggatttttaaaggggacggcccggatttttcatccttttcaaaaggggaggggtaaacaaaaaaaaaagcccaaatgagcccaaaaaccccaaacaggacccacccgaaaaggttgttgctgaggccaaagggaaccccggttccttaagggctaagtctttaaccccccaaggccagggttggccctaacatggttggggccctgccccttcccataaaaaaggcccccatccccaacaggctggagcggttttctttcacaaaaaaaggtttttcctccagggagcaactaatttttcccaccttacccatggggggcaaaccaaaaacgggagaggaaaccccaaaaaaacgtttttg

SEQ ID NO: 56439 - DNA, 409 bp, Glycine max
  unsure (1)..(409): unsure at all n locations
  Clone ID: PAT_MRT3847_21975C.1
gnagnagnagnagnagnagnagnagnagnagnagnagnagnagnagnagnagtagtagtagnagnagnagnagnagtagnagnagnagnagnagnagnagnagtagnagnagnagtagnagnagnnagnagcagctacnntnncncgnnnnnttctctncctcgttgtgcggggggcgcgtgttttcctttccctcgttgcttgacctgctantttngcccgctcncttnccccctctggcccctctgngcttnagcccctcccctnnctttcacnnncaccatncacccantnncaccccttccttggcttcctttgttaattncccaccttccctgtttcccggtttcattcccttcccagttaaaacccttcctttgtttccggtttcaacctctcccagttttaa

SEQ ID NO: 56440 - DNA, 235 bp, Glycine max
  Clone ID: PAT_MRT3847_21976C.1
tgctgttccccaactccatggtaatagaagggtattgccattgagagcatctgccatagtgtaaagtatatgtagaccagtgtcgttgataaacacggtgcacaattgattgctgtcgctattcgtgctgatgcaagaacatgggactcacatcgtattgcatccctaaatcgtaccactgctaaaggtgttgtgcaacatgatataccgtcctttgttcagttaattcgtttaa

SEQ ID NO: 56441 - DNA, 557 bp, Glycine max
  Clone ID: PAT_MRT3847_21977C.1
gcttcttgaaccttgagaaagctagataggtaggcacacacacaagatggagcctgctaggaattcaagagcctcactcatatatatatatataacatggttggaagaagcaacctaattaagttctatctcccaatatatatatcattcctctctcctggctttccttgtagccgctctcctcctctactcgtccctggtcttccgtgtgtcccctccgttccgcactcacttagctggctgtctggcggttcgatttcgtgtgaggcctgcttgctttgtcctcttgtggtcttcctagcctcttgggatttctcccgcgatcgtgactgtcggtggattgtcgggtgtttggattgttgctctttgaatgaggatggagtacttaaatttaatgtattttcaatatttaatcttatgtatttgtaaggagcttgcaacaacaaaagaaagaacgaatacttatgcatttatgacaccgaacattagatcagctagaatgggatttgttctagctaaatctggtcaagttaatttgagtataataaatccagttt

SEQ ID NO: 56442 - DNA, 293 bp, Glycine max
  Clone ID: PAT_MRT3847_21978C.1
gatctacgtgttctgtcgacactggcaagacagggatcatgcaacactgtgggattgaataaggtagacgtggagacagcatactacatggacgacggactacataagagtacaactacatcccatacggcggtggcttcgatattcacactgatctacaggcgtacagtctgtgattaagactataccggctacccactcggagcctcttcctatgataactctgataacgatcgatcacaatacaccgtcttacgctcaaccctctgcttatggtgatgaagccctgacca

SEQ ID NO: 56443 - DNA, 391 bp, Glycine max
  Clone ID: PAT_MRT3847_21979C.1
cccacgcgtccgcccacgcgtcctttctatccagaaccagacctcgttagttgcgtgtcttggattcttttggtggatcaataaatgttaatccttaattgttaatattttgttagtgtggaattgtggtaactaaatgggtttttcaatttgggcttagatacaaccatggttggtcacactgtcgcagagattttggttttgtttctgattaagttcacgttggatcaagttgggttcaaattggactctctatgcctacttgctctgtgtctgatattttgcctgcctttaacgaattaagcttcaagagtcaacggcgttgcattataaaaacgtaaaaagagcatggaagggagagaagcaagcaaacaaaactgatcgatcaaat

SEQ ID NO: 56444 - DNA, 327 bp, Glycine max
  unsure (1)..(327): unsure at all n locations
  Clone ID: PAT_MRT3847_2197C.1
gcccggaattcggctcgagaaaagacccaactccccccttgnnngtgtttttctttaaccataaaaaagatgtttcccatcggggccgggatccgattcaactgccgttcctccccctcaatttcgtatggtatgagaatacacaacagcccacaaggatgaaattgtgaatcttgaaaggctgtacttagttattgtggacaacattctagtccacctgcgaatcatttattcaagtgtaaaaatatctagagccatcagttttgattttcctggaacaacatcagatattgtaaatgggtctacacaatatatccctgagaagcc

SEQ ID NO: 56445 - DNA, 124 bp, Glycine max
  Clone ID: PAT_MRT3847_21980C.1
atcacacgtgctatttggtgtgtcatcatgttctgtgttaaatggttcagcggcatggtcgtggttgtcataaccataatgtctgcctatgtgcgtgtatagatgatcactgtccaacattcaa

SEQ ID NO: 56446 - DNA, 325 bp, Glycine max
  Clone ID: PAT_MRT3847_21981C.1
gggaacccgaaccttaacatattaacggaaaaagggtcaatggagggagctcaattcagggttactattggttttcacaagggcttgaaaattcatgatttaattttcaacaacaaaaaaataagcttacaaattccaacatgggatgggacaccgggcgtcatggggaatattacgggtcaaaaatgcccataacacattctaatttaaattttctgaggcttctaaaaaccaagggtggttgataaagttacaaatccatttttttatataaaaatggggggcctaccaaaactttattgggtggtgtggtgtgggtggaaaa

SEQ ID NO: 56447 - DNA, 169 bp, Glycine max
  Clone ID: PAT_MRT3847_21982C.1
cgatcttatgagaactagtataatatcatcatcaaaatttgttcttagaaaagaagaagaatgcaaagtaataaaacatgtatacagtgcaggccaactgcgggaggcaggtcttaaattcaaggaatatagtggcatttgaggaatgtcacctttcagatgatacaaa

SEQ ID NO: 56448 - DNA, 1197 bp, Glycine max
  Clone ID: PAT_MRT3847_21983C.1
ctccggattcagctcgagctcaaaatgcagggtttaattcgcaaactggtggcacaggtacaggcacagcatccccttcgcaacaccaactctcaccaccgtatcttcaacactcacagcgccttctcctctgttcccaaaccttcgcaaccccaactgcatcaagtgaaccacattcactctcccttcctcactcacccacttcatcattttcactcatgccgctccttttccaccaaatttcgcgcctttctctcccaaccaatgatctcgcgtcacttcgccttcaatcctctcctcagggtctctgccagaagcctccaaatcggttgcaggcccagtcttcattattttattcgacacaacttcaatttcagccataatcacgatttttctcggcgttcttggagatcatggctccgtgggctaacagctaatgacatggttttgggcttgattatagctaatgttgctatttttttattgtggaggatagcagatcaaaattttatgataaagaactttactatctctttggacaattttaagagtggacgtttgcacactttgattaccaatgcattcagtcatgtagatacctggcatatagtttccaacatgattggactctacttctttggaatgaatattggaagaaattttggacctgaatttctgctgaagttgtatcttgctggggcagttggtggctctgttttttacttgatccatcaggcctataaagcacaaacatcaaaggactggagaactatgattgtttcaaaggaattagcattgggggcaagtggagctgtaaatgcagttatgctacttgacatatttctctttccaaaagcaaccctttaccttgacttttttataccagttcccgcggtcttgctgggtatctttttgattgggaaagatatgctaaggatacttgagggaaacagtcaaatatcaggatctgcacatttgggaggtgctgctgttgcagccatagcttgggcaggggttcggaaaggaagattctaaatcctttttcataccctggaaatgtgtgtttattattgttcaataagtttatgttaggtatcctattgaagacattggtttaacagccgtgcataggaaaatttactgtttttcttttcaggtttgaatgatatattattgatgttaaaccctttagttctt

SEQ ID NO: 56449 - DNA, 378 bp, Glycine max
  Clone ID: PAT_MRT3847_21984C.1
ggagattttaatgcattatttcctcaaattgatatctttgtgaatttaattgaaatacaatattagagtaagttttttacacgatcattcagttatggattgttatataattgaaaattattgacttttgtaataattaatgattttcaaatgaattaacaatgaaaaatctttacaaagagtttatcaaaattaaactctatctttaatggcattgggctctaattggcctgtggactgattcacgaattaatttcagggatttgatcccaaatagacatcctccttgatgggacccgaatttttaccccgatcaactggaagggggttggcaggggtaacttttgaccggggggtcaagggggttttaacattttt

SEQ ID NO: 56450 - DNA, 345 bp, Glycine max
  Clone ID: PAT_MRT3847_21985C.1
cgtcctttttttttttttttttaaaacccatcgtttaatgggttgggggcaattttgtggcttgttattttcagatcaagctttttattacattttggattagggaaagaacaagttgtgttaaagactccaaaaaaaaaaaggttcttggaaaccatgggtgcatttgaaaatggtggcgaggggggggggtaacttccgggggaatttaggggcccaccacccccccattctggtccccccaatgggggggggggggttgtttccctcaaaaaaaaccccaaaggggccgggaagggggacccccgggaccttttttgttttgccaacccttttggaatcccc

SEQ ID NO: 56451 - DNA, 480 bp, Glycine max
  unsure (1)..(480): unsure at all n locations
  Clone ID: PAT_MRT3847_21986C.1
ggagagagagaaattgttgggaatgaaattctttccatggaggcaatgcatcacgagaaatgggcggtcatcactgaatgaaagctgcataaaactcctgtctctcattgcatgtggggcacggtttaacacagcgttttctgtttgggagcacaatgcattgcattgcattgggcgccatcaattctcatcgtcaaaaatcaaatctttattttcaaaagttctaatcttgcataccaatggtgaaaaatgaaaaggaaaaacagaaagtaaccccaaatgaaatctaaatanaaaatttgaatctttttaaaaaaataatttggagaaaaaattgataattgagcttaaatattaagtaataccaaaagttgttgatataaataatttgacacttaattatttaaccaaagattttatctttattttagacacgaagttgctgtaatggatcaaaatagactaacccgttagaaaaga

SEQ ID NO: 56452 - DNA, 1554 bp, Glycine max
  Clone ID: PAT_MRT3847_21987C.1
cccacgcgtccgctttaataacacccaccacaaagaggtaattttgatgatttggaattggtcatggccaaagtcagaggtggacctctctcccccgcggcgcacgttagcccccctcccaagcggtgctcccctcctcatccacccacgtcacttattcagccgcactttaacatgatcaacaagtccaccaccacaccctaacctaaaaaccctttcttttctctctccacccatggcctccccttcttcccccaccgactccaaccctccctctgccctccccctccctatccctccccctccgtccacctcctcccgccgtctccctcctccctgctggacccccgaggaaacctccgccctcatcgacgcctaccgcgacaaatggtactccctcggccgcaccaacctcaaggccacccattggcaagaggtggccgactccgtcacggcgcagtgccccaacgcctcccccacggccaaaacccccgtgcagtgccgccacaagatggagaagctccgcaaacggtaccgcaccgaaatccaacgcctccgcaacctcccccttccccgcctcaacaacgccagcaccaattccccttcctcctggctccacttcaaatccatggactccatggaaaaaggccccaaccacaaacctcacgccgacaacaaccttaacatcaacaacaatttccacgatgacgacgtcgacgacgacgatctgtacgaggaattcaaaaacgcccccggatccaacaccaggagcctcaacaagctctacaagaacaacaacggattcaattcggctggttcgggctccggatccggatttcggatccggatcccggccggcgtgccacaacaacaacaccatacggcgtcgtcaaataagatttttaacagccatcctcctcccgggatggggccacgtggcgggggcgtgaagagggagcgcgagagggacgcggtggcggagatggtgggggctattaaggtccttcgcgacgggttcgtgaggatggagcagatgaagatggagatggccagggagatcgagagcatgcggatggagatggagatgaagcgcaccgagatgatcctggactcgcagcagaggattgtggaggcttttgctagggccgtttcgcagaagaggaccaagggcaagtccacgccctcgccttcatcgcaaccgtagaaaattccaaatcgaaaaggttgaaatcggacggtgacggtgacggtgattgattaattctctttagtggttcggtttctggtttagataggttctcatattttgctatagtcttgtgttacttttttaattgttagctggtgatgtttggatgtgttgaatgctggaaacttgatattgggtttaggatgggtaaatgtgggtttagcatttgtaattttctgtctcatatttcttactcacagatttgctactcatagttacatttcattacatctaacttttctagtagtttttaattattccgatgaattgtctcgtctgataattagccatgcatttgttgggtc

SEQ ID NO: 56453 - DNA, 432 bp, Glycine max
  Clone ID: PAT_MRT3847_21988C.1
tacaagcgtaagcaaaccgctgttgctgctcctgccaaggctgctgctactgacaagactgttgaggtcaagggtggtaagaacggtagcaagcgtaccgtccccgctcaaaaggcttctcgcttctaccctgctgaggatgttcctcaacccaaggctggtcgcaaggctgctcccaagacctctctccgttctaccatcactcccggtaccgttgccatcctcttggccggtcgtcacagtggtaagcgtgttgtcgtcttgaagcaactcgattctggtctcctcctcgtcactggtcccttcaagatcaacggtgttcctttgagacgtgtcaaccaagcctacgttatcagcacctccaccaaggtcgatatctctggtgtcaaggatgatgagaagatcaacaatgctaacttcgagaaagccgct

SEQ ID NO: 56454 - DNA, 2081 bp, Glycine max
  Clone ID: PAT_MRT3847_21989C.1
gaagtcgccccacgggaagcgcaagcagccgaaccgcgaccgccacgagacgcaccgcgatgcttctgcaatcgtagcctcgccgcctcccccctccgggcagggccccccctcaaaccctccccctcatcgacgccaaccgcgacaagtggtaatccctcaggcccagcatcataagtgccactctctggccggcggcggccgttgctgtctctagccgctgcccctcccctcctcctcccccaacttcacttctgtgccgcgcaaatttaaatgaacttcgtcatcgctaccgcaccaggtggacctctctcccccgcggcgcactttagcccttctccccagcggtgctcccctcctcacccacccacgtcactcattatgccgcacatccctccccactttaacaacaaccatgcccttacccttaccctcaccatttcactctcaccctcacccaacacccccttatcctgcgcccctcccctcctccttatccttcaccctattctctcacccccaccacacccttacctaaaaactaaaaacccaatctttttctctctccaccaccaaccatggcctccccttcttcccccaccgactccaacccaccctctgccgtccccctccctctcccggcgcctcccgccacctcctcccgccgccttcctcctccctgctggaccccggaggaaaccgccgccctcatcgacgcctaccgcgacaaatggtactccctcggccgcaccaacctgaaggctacccactggcaagaggtggccgacgccgtcaccgcgcagtgccccaacgcctcccccacggcgaaaaccgccgtgcagtgccgccacaagatggagaagctccgcaaacgctaccgcaccgaaatccaacgcctccgcaacctccccttcccccgcctcaacaacgccaacaccaattccccttcctggtgggtccacttaaaatccatggactccatggaaaaaggccccaaccacaaaccccactcctatcatcaacaacaacctcaatttccacgaggacgacgacgacgactatctgtacgaggaattcgcaaccgatcccggatccaacaccaacacgagaagcctggttaatgaggatggagcaaatgaagatggagatggccagggagatcgagaggatgcggattgagagggacagaaagcggccggagagcaacaacaacaacatacagcgtcgtctaataagattttcaacagccatcttcctcccgggatagtgccacgtggcggaggcgtgaagagggagcgtgagagggacgcggtggcggagatggtggaggcgattaaggtccttcgcgacgggttcgtgaggatggagcagatgaagatggagatggcgagggagatcgagagcatgcggatggagatggagatgaagcgcaccgagatgatcctggactcgcagcagaggattgttgaggcttttgcaatggccgtttcgcagaagaggagcaagggcaagtccacgccctcaccttcatcgcaaccgtagaataatcgaaatcgaatttgaaatcggacggtgagggtgattgattaattgtgtttagtggttcggtttcttgattagctaggttctcatattttgcaatagtcttctgttacttttttttttttttcttttaattgttagctggtgatgtttggatgtgttgaatgctggaaacttgatattgggttttaggatgggtgaatgtgggtttagcatttgatatcggttaattgtaattttctgtctcaataatttcttacttacagatttggaactccatagaagcggcgcatgccccaaaaccatcacaacagccttaacctttgttaaggtctcagtaagtaagattctggtattgttgtttgtttagatattgctttgattctgccactgtttttttttttctcctgtgattttaagtttatcagtgttaggttgatgctggatgaatcgtgaatgtagtagtagctttagatattcattttgtagtcttgtctttttttatgtttaaataaaaccagaggacagaatctctctct

SEQ ID NO: 56455 - DNA, 439 bp, Glycine max
  Clone ID: PAT_MRT3847_2198C.1
cccacgcgttcgctaaaaaaaaaaaaaaaaaaaaaaaaaaaaaaaaaaaaaaaaaaaaaaaataaaaaaaaaataaaaaaaaaaaaaaaaaaaaaaaaaaaaaaaaaaaattaaaaaataataataaaataataaaaaaaataatattaaacattgatagtgatgtagtaaaaaaattttttgggtgatttagcattcctatttttgattacacttaaatgatgattaaattaaattttaactggagatcaaaattgagaatgagggggactcttctaactttataacaatagggaacagatgcttgacacttttttaaccccttttagtattatatttttttagcactgtttgaagttttactaatgaggtgcccaacttatattgttttttagaaaattctccgattaaaattttttataaagagtacccctatttt

SEQ ID NO: 56456 - DNA, 302 bp, Glycine max
  Clone ID: PAT_MRT3847_21990C.1
aggcattgtgagatcttctaaagcctgacgctgcaggggtttaaatcgactgatcaccctatactaaatgtacatacacagttcacttaaacctatttctataaactctatcttcatcaacattcatcagatgaatgatcagtatagcaagcctgcctatttacaacaatggcgagatacaacgtgattgaaggtaatgcaacactctactgaacacggatatacttgtgacaagctttgcatcatgacagaacccatagactgagaaaataaaggttcaacagcatacttgggaccattgc

SEQ ID NO: 56457 - DNA, 324 bp, Glycine max
  unsure (1)..(324): unsure at all n locations
  Clone ID: PAT_MRT3847_21991C.1
atatggtgcgattcatcctgtttgttagtatatgaanggatgggcttttgtcgcctccccccacctttatagtgataaacaatgtatgaagcttttagcattagagcttgagcctgtgtagaactgaaatatgtttttatttttgcaaaatcaagtttgaactaaattctggatagagattgagtgattatggtttctccaagcctaaggtgtcttacatttatacattccaaattctgtttggtccaaatggtatcttgaaggctaagctggagttcagcattctgtgctagacttttatagaatgaaaatgatggatgcatt

SEQ ID NO: 56458 - DNA, 367 bp, Glycine max
  Clone ID: PAT_MRT3847_21992C.1
ctttgattgtaggtttttgattattgggcggcgaaacagggttgaatatttttgttttagggtttgagctttgaattacagagcaaagtgaagcgtgaacatggtgatgcatataaacgggacaccgtgcgctctaggattgcacatgcctgtggagtgggaaacccactcgcaatggtggatgggttgacctgaacgtgcctataactggggtgacagcgtcgttgactctcaacgggtgtatgatagggatgcgttagcgatcataagattcgaggctgtaacaggttgtgttagttatgcacagagggagaacgcgcggagttagctaccggagcatatgatggtgggtgagatgaacatgaac

SEQ ID NO: 56459 - DNA, 1176 bp, Glycine max
  Clone ID: PAT_MRT3847_21993C.1
tttacaaattgaaatgggccattcacagctttcccagacacctccagagccgtagcagcagcactagagttctgccgtgactcaaaatcaatcttccttctctttatgctttcatttgtggctctatgtttctcaacagtgagacgcaagaatgccagttcttttttcaaatttcttctttctttcagcaacaaatcctcctccgcttttagttcagctaaggtctgctgcccccgggtcctgccgggactcgttgtttcgctgggattagcaaccttagatcttgaggtttgggttggtttgcttgggcggctgtactcctcatagccatcgaggttgccgccgcttgctgacgtggcgccgctccaggaaagcggcgtggtggggctggcccttttttctcccggtctttctggtagtggctgtttcgctgggattcgcaacctcaaatctggggttcagggaggcggtggccgccgcggagcgcggggggtgcccgcggctaggtgacctgccgccgatccatcagcccggcctgccggggcccgccctgctggactccgctttgttgtgagcggatctggagcggcgccgacgcaccgtccagtggaggttgaggcagggcggcggaggcggagagcggtggaggcggaggagaaggtcgacgaccagggagtcgtcggccatggcgaccttgacccagtgatcgtcaaataatctaggaaaacccgttcacttgaacctttttttaaggatatgatacttttcatgtttgttctccaactactactatcacagaatgaccatggaaataattacttacactagagtactcaatgtaacgtagcattaaattgaagtgtaccatattccaatccaaaaaaatcttatttataccttacagttacactgctatggctccgtgtaccatcacagcgggagagagaggcacgttattttgagagggaagaagaaagaatggtgatattggggtgggtaaagagaaacaatccaaaataaatggaaaaatgttaaattctttgcatgcacccaaatactagtagtgctaattaaaatgtagtatgtttgaaaatgaaagcaatggatgggtagagattaatacaaaacacaactaacgagccagcccgagtatttggtaactatgtggtccccatt

SEQ ID NO: 56460 - DNA, 222 bp, Glycine max
  Clone ID: PAT_MRT3847_21994C.1
gtcattttggaaaatagggtttgtggtttattgattgtgtaatccgtttggttgtaagcagaaacttctctgtgttaaatcattgtttgtgatttagctctattttttatggttctgtttgtgattgaacatttgcagatcttcgtgaaaactttggccggtgaaacccaagatccttaacgtggagtcctccggggccttccattaccttgaggccttggt

SEQ ID NO: 56461 - DNA, 462 bp, Glycine max
  Clone ID: PAT_MRT3847_21995C.1
tcggctggagggaacgcattaaaagtctccacaaaattatttcataataaattatttgagtccatctattatgtgataacaagcgagccttctttgcagctaagcgtgaggagcgattgatgtaaagcaaaagtccgtcgcggcggagaagaggagaagatgcggtggggaggttcagcgaaggagagaagtgtcaacgttgaagaagaatgagtgaatgacctattgacgttcgcaatttcaagggcatattaggtgtttagggcagctactgattagtttaacgggttgggttagtgggcttacagttttagaagcccaaacacgttttagaagcctatttttaacccgaatgcacaaacacgttttgagacgccgtttccacgaccttgcgatttatcgcagcattgatagcgattttttactaacatgtttgcaaatatatgttgccaccttttatat

SEQ ID NO: 56462 - DNA, 413 bp, Glycine max
  Clone ID: PAT_MRT3847_21996C.1
acggctgcgagaagacgacagaaggggtccatttatgtatgcatcaacatcgttcgcctggaccaataatgaagaaactaactggtcagaaattgtaaatttttcatgcaacgatttcaaccattacaagggaattagagttttaacatggtctcagctaatttacttatgaaacctggttaacttacctagttagaccatgtaatatgtatcatctttaacaaatactgaagggggcatttggtaattatattataagatatcttggtgtcttagatatgcaaatgcttggaaaatggaatgccgacatggcagcaatgtacttgtcatactagaaacacgaggaatcttaaatacgggtaattaacgtattaatatgagaatgtgatttgattacctctaaaatgggaaca

SEQ ID NO: 56463 - DNA, 452 bp, Glycine max
  Clone ID: PAT_MRT3847_21997C.1
tttgatggtgttcgggttcgtgacggacatgattgggatccactcggttttcggcgcgttcgtgttcggaataacggttccgaagggcgcgtttgcggagaggctgatagagagggttgaggatttcgttgtagggttgttgttgccgttgtattttgcttcgagtgggttgaagactaacgtggctacgataagtggcgcgaaggggtggggaatactggcgctggtgattgcgacggcgtgcgccgggaagattgtgtgtgacgtttctgaccgccgttgcgtgcaagattccaatgagggacgcgatgacgctgagcggtgctcatgaacactaatggattggtggagctcatcgtcctcaacattgggaaggaaagaccggtgaccaacgatgaaatgttcgccattctggttcttatgctctattaccaccttattacaaccccata

SEQ ID NO: 56464 - DNA, 550 bp, Glycine max
  unsure (1)..(550): unsure at all n locations
  Clone ID: PAT_MRT3847_21998C.1
ggctcgaggtaaaatccaacggattttcctatgctatagttgtagtaggagagcatccgtatgctgaaatgcatggtgataacatgaacttgacaatcccagaccatggtcctgagaccataacaaatgtctgtggagcaataaaatgtgtggttatcattatttctggccgtcctgtcgttattgaaccatatgttggttcaatagatgcactagttgctgcatggcttccaggtagtgaaggccaaggtgttgctgatgttttatttggtgactatggtttcacaggaaagcttccaaggacatggttcaaaactgttgatcaactcccaatgaatgttgaagatcctcactatgatcctctcttccatttgggtttggtctttctaccaaaccaactaagggcttttatctgagtagntatcatcttcatctctctctctctctctctctatatatatatatatatttaatgtacaaatgaaaacaatanaatagtgaggttgcaaacatatttnttatgtttgggattttttttcttccttcagct

SEQ ID NO: 56465 - DNA, 2151 bp, Glycine max
  Clone ID: PAT_MRT3847_21999C.1
aacatgaacttgccaatcccagaccatggtcctgagaccatagcaaatgtctgtggagcaataaaatgcgtggttatcgttatttctggccgtcctgtagttattgacccatatgttgattcagtaaatgcccttgttgctgcatggctcccaggtagtgaaggccaaggtgtggctgatgttttatttggtgactatggttttaccggaaagcttccaagaacatggttcaaaactgttgatcaactcccaatgaatgttggagatcctccctatgatcccctcttcccatttgggtttggtctttctaccaaacctactaagggcttttactctgagtagttatcatctttatttgggggggggtatatcatcttcatttgttgttgtgcgtttgaggggaataaacactgagaaaatttatatcaatgagttataagcaaccacataaatgaatttggcatcacactttaatccaaaatcttaagactcaagtttataggtcttgtcttcacttatatggtgttcaacattcttatttcctcacgatgtaaaacttaatctcatacttgtacttcagcatcaataaacatattttttatattagagaaaaaaaaaaaaaaaaaaaaaaaaaagcgataaattttaatcccttgtttgaggactttacaagtggccactcgtccgaccacgcgtccgtacggctgcgagagacgacagaagggagagatggattgatgaaaattcacatgccaggctacttcagctcgatcagcaagggtgtggcaaccattatggcctcttactccagttggaatggagtaaaaatgcatgctcaccatgatcttattactggcttcctcaagaatactctccatttcaagggctttgtcatttcagattttgagggtcttgataggatcacctctccacctcgtgcaaatatcacttattcaattgaagcaggagtttctgctggcattgacatgttcatggttccaaagcattacacagaattcatagatgttctaaccatgttggtgaaaaataagcacattcccatgagtcgaattgatgatgcagtgggaagaattttgtgggttaagttgatgatgggtatttttgagaacccttttgctgactacagtttggtcaaatatttaggaatccaggaacacagaaatttggctagggaagcagtaaggaaatcaatggtccttctgaaaaatggtgaatctgctgacaagcctttattgcctcttcctaaaaagtcgccaaaaatacttgttgcgggaagccatgctgataatctaggatatcagtgtggtggctggaccatagattggcaaggagttagtggaaacaagcttctaaaagggactacaattctcactgctgtgaaaaacactgttgatcctgaaaccacagtggtctacaaggagaaccctgatgtagagtttgtcaaatccaatggattttcctatgccatagttatagtaggggagcacccttatgctgaaatgtatggtgacagcatgaacttgacaatcccagaacctggtcctaagatcataacaaatgtctgtggagcaataaaatgcgtggttatcattatttctggtcgtcctgtagttattgaaccatatgttggtttaatagatgcacttgttgctgcatggctcccaggtagcgaaggccaaggtgtggctgatgttttatatggcggctatggtttcactggaaagcttccaaggacatggttcaaaactgttgatcaactgccaatgaatgttggagatcctcactatgatcccctcttcccatttgggtttggcctttctaccaaaccttctaaggccctttattcctcttgatgtatatttttttatgtaaaactataaacaataaaagagggtaggatttatttactaacatgtgataaaatattacaaatttaccttaattatattatctttgcaacatttcaacgataaatttttatcaattagctattttactatccttcaaaaacatctctctctctctctctctctatatatatatatatatttaatgtacgaatgaaaccaataaaatagtgaggttgcagacatattttttatgtttgggattttttttattccttcagct

SEQ ID NO: 56466 - DNA, 261 bp, Glycine max
  Clone ID: PAT_MRT3847_2199C.1
attcaggggacagaagggaatttatttaattatatggattagtttaacaacccctgtatgcgcagtaggttgaaaactacagaaagcatgcttgaagttgaacatgaccatgcagagagagcgcaaagggcttaaaaactgttaaaatacaccgaattttttaaactagagaaagacgaccagacaccaatcttatctgagaaaacaatgattaaacattttttttatgaaagacaaaaccggccacgtgggttgacaccg

SEQ ID NO: 56467 - DNA, 797 bp, Glycine max
  unsure (1)..(797): unsure at all n locations
  Clone ID: PAT_MRT3847_219C.1
acgcgtcaacgagaagacggcagaagcggactctctgaagtaaccaacgcaacccatcactctttctttcttcctcttccccccacatactattttttcaaatctagggtttcctctgcgtctagggtttcttccttctgcaaccatcaatggcggcaatcacagctccccagcaccgatcctcgaagacggagtcctacgttgacaacaagcgcaaggatgacatccgccacgccaacatcgtggccgcacgctccgtcgccaacgcggttcgcaccagtctgggccccaagggcatggacaagatgatctccacctcctccgacgaggtcatcatcaccaatgacggcgccaccatcctcaacaagatgcaggtcctccagcccgccgccaagatgctcgtcgagctctccaagtcccaggactccgccgccggcgacggcaccactaccgtcgtcgtcattgctggcgccctcctcgagcagtgcctcctcctcctctcccacggcatccaccccaccgtcgtctccgacgccctccacaaggctgccgtgaaggccgtcgacgttctcaccgccatggccgtccccgtcgagctctctgaccgcgactccctcgtgaagtccgctagcacatccctcaacagcaaggtcgtcagccagtactccacgctcctggctcccctcgccgtcgacgccgttctttccgtcgtggatgcccccaagcccgacatggtcgatctccgcgatgtcaagatcgtgaagaaactcggcggcaccgnctacgacaccgagctc

SEQ ID NO: 56468 - DNA, 1095 bp, Glycine max
  unsure (1)..(1095): unsure at all n locations
  Clone ID: PAT_MRT3847_21C.1
ggtgctggaattcggcttgtgatcgcagttattaatttaccctttttttcaagttaaattacagaaacaacggagggtctgtttttgtttcagagttcaaagttatttgtttggtttatatgtggttaaggatttattatggtgatgaatgaaaactgattaaggttttgaactgtgcagggttctgtttccatttgtgtgtagaggcaattcatgggaagtcgaggccaaaagcgtcccgagatggttgatgaactgcctgctgataagcgggcgtgcagttcattggattttagaccaagtacttcaaactcatcagttcaaacccagatgaattcaacagtggaggcgcatgatcacgacatggatacttcctcatctgcttcggcttcgagtcaatcagagggagagccagagaaggattcggcttatggatcgtgtgattcagatgacatggagcagcatcatagcactctccatgaatatcacaggcagagactgtccagtgatcatgggaaatttaaaactattatatctagcttgagtggtctgactgaaccctctcttcaattagccgtactaaccgaactttgtgaggttctgtcattttgtacagagggttcaatctccagcatgacttcagacttgttatcaccactacttgtaaagctggcacagcatgagagtaacccagatataatgttgttttccattagggccatcacctatatctgcgatctgtatcctcgatcagctgcttttcttgttcgtcatgatgctgttactactttatgtcaaagattattggcaattgagtatcaagatgtagctgaacagtgtctccaagcattggaaaaaatatcacgcgagcaaccacttgcttgcttacaggctgggacaattatggctgttctgaactatattgacttcttctcaacaagcacacagagagttgcacttgctactgtggtgaacatatgtaagaagcttncttctgaaagcccttcacctttcatggaggcagtgcctatactgtgcaatcttcttcagtatgaggatcgacagcttgntgaaaatgttgctacctgctttatc

SEQ ID NO: 56469 - DNA, 713 bp, Glycine max
  Clone ID: PAT_MRT3847_22000C.1
aggatatcagtgtggtggctggaccatagaatggcaaggagtcagtgggaacaatcttctcaaagggactacaattctcgctgctgttaaagacactgttgatcctgaaaccacagtggtctacaaggagaacccagatgtagaatttgtcaaatccaatgaattttcctatgccatagttgtagtaggagagcacccttatgctgaaatgcatggtgacagcatgaacttgacaatcccagaacctggtcctgagatcataacaaatgtctgtggagcaataaaatgtgtggttatcattatttctggtcgtcctgtagttattgaaccatatgttggttcaatagatgcactagttgctgcatggcttccaggtagtgaaggccaaggtgttgctgatgttttatttggtgactatggtttcacaggaaagcttccaaggacatggttcaaaactgttgatcaactgccaatgaatgctggagatcctcactatgatcccctcttcccgtttgggtttggcctttctaccgaaccttctaaggcccttttctcctcgtagctatcattttgatgtatactttttatgtaaaactataaacaatgagggtaggacctctttactaaacatgtggtaaaatgttactaatttatcatattttttgcaacatttttaataacaaatgttaccaatttaccttaatttaataaaa

SEQ ID NO: 56470 - DNA, 430 bp, Glycine max
  Clone ID: PAT_MRT3847_22001C.1
acaccacatggtgtgggagatggaatcaagcttgggaagttaacttcgtgttgtgtatgaaataattttaggacgatgggaaaatatatgcttttccaatggcctcgataagcaaagtattgagttcttgcatttcctccacgatcgcatagatgatcatctctctcacagtgccatcctgtttgcagacactgagattatcgtccggtgcaccgttcacccgatgatgccacacgagactctgagcgaccaatctgatctggtatgaatgtagagggctgaattcattcctccgccgaaagccaagaccatgagaatggttaattcctgatgctctcaagatgataaggattcagatgggactcggatctgtctgtctggtcaattaacatctggcgtaagatggaactgctgtgatacgatcaaggaa

SEQ ID NO: 56471 - DNA, 435 bp, Glycine max
  Clone ID: PAT_MRT3847_22002C.1
ataaaattaaaatttattaaaattttatttcccacgagacctagtacagtttttaggaacccaataaattcaagagattttggaaactgaaaaaggggtttttactaaaggaaactgcaacaagaacaatttccacttatttgggatgtaccggagtaacacaaggtcaaaaggagcttttttggtagaacacacgtccggttgattcaacattttttacaggagggggtcatttttaacaggtagcttttggaacttaaaatgaagggaagggtttggcaaaggggtaacttttttttccccccttttttatgggtatgacaatggggccagaatgggactatataccaatccattggatttgaagctgattttgggtttggagcggtaccaccttttttgattttagggaagggccaggaataggccgaaggc

SEQ ID NO: 56472 - DNA, 399 bp, Glycine max
  Clone ID: PAT_MRT3847_22003C.1
cgagaaccagttgaacggaattttcattttagccgaactttaagtgtcggaaggcttcgtgacagagttctccgtcgatcaacattatctgacctcacctttttccctttgcaacaagagacagagctgagagatgctagcctgcctagccaggatatggacaggcaagcagtggagggaaattcaagagtgtcaccatctgatcatagtaccattaattcttcaacaaatagatatcctccatctagtatgtctaactccatgtttagcatccaagattatgagggtgagacttcaggattgagagaaggtaggtatcaggatctactggagcataggtccaatttcctgaacggagaagaagaatacggtcccaggttcgtgctcttcagcgattgg

SEQ ID NO: 56473 - DNA, 341 bp, Glycine max
  Clone ID: PAT_MRT3847_22004C.1
ggtacggttgggctcgtgcaagatcaaaggaagaatgggcttgcgttggcacgtccaattctactaaggataataggtgggccactattctgtgccttggacagagcgtcgttggcgatcttaatctttttactgttggcaagaattgtgaaggaatacacgttggagtgtgctatatcatggggtgagaaaatgcgcgatttaacatacccctaatggcctatgaagaaaacataaagacaatcggaggaaacccaaaaacgcacttggggaggtaaagccacaagtcgtgaacttgtgaaatgagggcgtaagcttttgacacaatcagagatgaatcc

SEQ ID NO: 56474 - DNA, 1207 bp, Glycine max
  Clone ID: PAT_MRT3847_22005C.1
ggctcgagagcgtgggatttagaaccttggtattataaaggaaagcttgcgttcccccagtattacatctcccatttcgagtctatcatcttccttctcgtcattcttcgtttcaacctcgcaaaatgagcacatttgctacaagatcccttgtttctgtagaatcaacaacaacaattgaaggaactgaagctgacaatgtggatagtgactcactgttccgagggtgcgtgttggaagggagatgggacttcgttcttacagcatatagaaatgacagtaactatcacaaaataaaaatcaacgaaagcagaggcacagcactacacgtggcagtgaatgatggcaaagtggaacttgttaacacccttgttgttgcaatcttaaaccacgaagggagggaagtgctgagggatgatagtgcactgaaaacaaccaatgagagaggggacacccctttgcaccttgcatcctcaagagggttcattggaatgtgtaagtgcatcataggggagcttaaggaaaggaaggatttgattagggttaggaacaataagggtgaaacacctctcttccgggctgtgctcacatgccatacaaagacctttgtgtacctccatcatgtttccaaagatatagatgttccacttaggaactatgatggggataccatccttcaccatgccatttggagagaattcttggatttagcaattataataattcattgctatcctggacttgttgagatgcgaaacaaagatggagccactcctctcaaagttcttgcctgtaagccttcggccttcaggagtggaatcaatctcccatggtggaagaaaattctttattatggtaagtgttgcgtgcgtggtggctgagctcataagatttttcttcttctgttttttacaaaaatggaattaaatttcaggggtggctcaaccctaaagtaatattccaaacacagaaacacttgctttagtttcctcgacaaaattctcttataattattcccttaaaaaatgtttcatacgtaaaaaatctcttaaaatttaagtccaatttaaattgacttttttttttatcatttacatattaattatcgatcttactattttcttaaaaaaattattttgttgtattgcttccttccatgaatgtaaactagtctacttttccattaatttattctcattatcccact

SEQ ID NO: 56475 - DNA, 298 bp, Glycine max
  Clone ID: PAT_MRT3847_22006C.1
aaccgaacacaattttttgtttaaaaattaataacgccccatacattaaattttatttattagggctgttgtatggggggattgaaacaataaaggggtcaattatacacgtgactagctagtggggaaatgctcatccatactcccaaaatagttattggtgtgggggccaaaattgctttttgaagataatcaattatgctcttgtgcacctggaaagcttttgggagaacctctcaaaaaataagggggttttcttttaacaaaaaatttgcaatggggaaggggccaagatttt

SEQ ID NO: 56476 - DNA, 791 bp, Glycine max
  unsure (1)..(791): unsure at all n locations
  Clone ID: PAT_MRT3847_22007C.1
cattttcctcacagctgcaagcaangtctttgattttccatggctatgcataggattcttcaaaggggtcgtcgattcttccaatcctccaccgcaacttgttactgctttctcaggttctgctgcttttcacgcatttccctctcatggggttgaatctcctcatgttcgggaaattcacaaacacaagagaagttaagaatgactttgacaaataccatgtaaagggtttatctcgatgcctgaactggacttcaaggtcaaatgccaatagtcaagcatcctgctatgtggtaaatcgtcattttgcatctgattgcaatgatatatgctcaaaggagttctcaagtaaggtgcagttgatcttaagtatatcatttttcctgtttgctatgtattttaactcgaatatgttgttaagcaaggaagataatgcatgcttaacttagtacatcattatagctgtcatgttgagcctataatttacatttcatgaaaagcccaagtctattatttttcattttgatttcatacattcaacactaaagaaagtgcagaaagcaatagctgaacaagtctcagggccaggcctgacttctaactagtgatttattcggatttcggacagaacaacatgcaccatggaatgaataaaaattgaaaataaacgaagcatgccaagcgaagattctagaacccccttgtataaacaaaaatagtataaaatcaaaaaattaaatagaaccaacataaaccctttgtaaaccctaacagggacctcaaattctcac

SEQ ID NO: 56477 - DNA, 120 bp, Glycine max
  unsure (1)..(120): unsure at all n locations
  Clone ID: PAT_MRT3847_22008C.1
gattcgatcatctttatttnnagaatatcccacttaanatggatcagttaanactagcatttccattntnctaanacttcatctgttagtatcaggtgnagtagnaacnaacatggttca

SEQ ID NO: 56478 - DNA, 245 bp, Glycine max
  Clone ID: PAT_MRT3847_22009C.1
cagttttctctttttctatgggatacgggagacatccaactaccgtgtcgtatagggagcgcagcgtggccatcaccacctcgaaccaacaccaacaactcacttcctcgaaggagactcattagtgtgcattattccatcccaaaaatcacgctcctcttcttcaaggtataggttttgaaccctctttctctattatccctatctcgcgcgcgctttccatgccctatccctaccaccccatc

SEQ ID NO: 56479 - DNA, 171 bp, Glycine max
  Clone ID: PAT_MRT3847_2200C.1
tatagggtcccaaaataattttgttacgtttcgttccggctttaccaatccatcgtttaattcaccttctcccccttgtaacccaacacatattacatgcatccaattcctcagatatttcctctcccaaatttctgttgttattaattatcatattaattatcaatattc

SEQ ID NO: 56480 - DNA, 201 bp, Glycine max
  Clone ID: PAT_MRT3847_22010C.1
gtcgttagctcgattcggtcgaggggtcgtgatgaacttgggggccacgggacaccccacttggatgtcggctctacaaccagtattgtactgaatggaagagaggcggagatgagagaaggttggttgccaagcccttgcagaaagggttttcacttgccagctgactggctaccgcttcaagccactgttctagggcct

SEQ ID NO: 56481 - DNA, 1296 bp, Glycine max
  Clone ID: PAT_MRT3847_22011C.1
aattcggcgtcgagctcgctctcgctctcgcgtcgctgctctattccgttcttcacgtgacatcacggcctcaagaaacgtcgtcgtattagagaaaggcgcgtaacgcatgaagagacaaatgttgcatgatctgattgagaatgcaggaggctgcgctgtcaccgatggaggattcgccacgcagctcgaaaagcatggagcctccatcaacgatcctctttggagcgccatctatttgatcaaagacccacatcttatcaaacaggttcacttggaatacttggaggctggtgctgatatattggttacttcatcataccaggctacacttcctggattttcatcgaagggtctatccattgaggaaggggaatcactactagagaagagtgtcaaattggcagttgaagcccgtgatggtttctggaattcagctataataaatcctgggaataaatacagaagagctttggttgcagcctccattggaagctacggatcttaccttgctgatggctcaaaatacagtggctgctatggacctgatgtaaatttaaagaagttgaaggattttcatcgccgcagattgcaagttcttgttgaagctggtccagatttacttgcctttgagaccattccaaacaaacttgaagctcaggcttgtgtcgaattgcttgaagaagaaagtgtcaaaatcccatcttggatctgttttaccactgtagatggtgagaatgctccctcaggagagagtttcaaggactgccttgaagcattaaataagagtaacaaagtagatgctgttggtataaactgtgcacctccccatcttatggaaaatctcatttgcaaatttaagcagttaacaaagaaggccatcattgtttatcccaatagtggggaggtatgggatggtaaagccaagaaatggcttccatctaagtgttttcacgatgatgaatttggatttaatgcaacaaggtggcgtgatttgggagctaaaataataggaggttgttgccggactacaccctccaccattcaaattatttcaaatgctttaagagaaaaatcttgattgtgctagtagatgcaactttttttgacaaattgcaatatcttgtctagttattttctataatctatagtctaaatttaaattgtttgaagcttgttcattcagttggaacttgacattagcttgatttcatagataaattaacgtaggtcaacatcaagataacctcttcacccttcctaggttatcttttattaattaattaaatcatattt

SEQ ID NO: 56482 - DNA, 410 bp, Glycine max
  Clone ID: PAT_MRT3847_22012C.1
atggaatgctgcacaagctcaattaaacggcacagttcattgtaactatcctcaatggatagagatcctttgccatgacataaatgtgcatgtcccacaccatatttctccaagaattccaagctataaccttcgtgctgcttatgattccatcaaacagaactggggcaagtatgtcaatgaagccaactggaattggcgattgatgaagacgatactgacgagatgccatgtgtacgacaaggagagatactatgttccgttcgatgagctcgcgcctcaggaatcccaaccaatcaaattccttaggaagttcatgccagattacgcatgatgccatcatcacagctgttgactagttgagattattcagtgttgtcggcacaggtggacagtcacattttcagtga

SEQ ID NO: 56483 - DNA, 160 bp, Glycine max
  Clone ID: PAT_MRT3847_22013C.1
atagtttgcgagaagacgacagaagggggaatcgaaagcgtagaaggatttcactcctcccttacttcatcaattctttcagtttgaatggcgagtgaggatgatgcagtgaagaaggcaatgatagtagatgctcgtccaagaaacattagtcataatg

SEQ ID NO: 56484 - DNA, 607 bp, Glycine max
  Clone ID: PAT_MRT3847_22014C.1
aaagagggttggtgcacgaccaaccaataattataaacttgtcattcgaaatacgcaactctattattgtctattatacaattgaaatcagccttaggcatatctcaaataataataataaaaacaatcactgtaatctaactagatcagaatttgcaagcaacattactcggtaatatgactatccaccggcacttgcacacccaacacgattggtccttaggttctctccatattcctagttgaaaatttaaacctttatgtccttcctagtgcccaacaccctttcttgcttccaactactccaaagcaaaacacatacgagttcaacatgcgaacgctcttataaaggtcacaaatgtccagaggctggaatcttcaacgcagggggagacatgactatagctatgatccttcgattacaaatgagatgatgcaaaccttaggttatgaattgaaacaatttgagaacgactgcttcgaggagccctagtaggcagaaaactcccaagtatcttttaaggtggtattagtttaaggtatgttgtttgattgcatattgggcaaattagaagtcacaagatccacggggataagtatgctgact

SEQ ID NO: 56485 - DNA, 281 bp, Glycine max
  Clone ID: PAT_MRT3847_22015C.1
caatatttttggaagaaggttttcttgattttttgaacaaggagcttcaatcatatcgttatgataaaaatgaatatgaaggcttgccatttgattttcacggtggatatattggttacattgggtataacctcaaagttgagtgtggtgtgaaatcgaaccgtcacaaatctacaaactcctgatggcatgctttttctttgctgataatctggagctcttggaccacaaaaatgatgatgtttatatattgggtatacatgaagaaagttcaagtatta

SEQ ID NO: 56486 - DNA, 2045 bp, Glycine max
  unsure (1)..(2045): unsure at all n locations
  Clone ID: PAT_MRT3847_22016C.1
ttagagttgtggcgagcagcgagactacttcagcctggccatggcatttgaaacgagtcattttttagtatcgcgctcaagggcatccaattctacaatgtcattactatcttcgaattcaacatgacccaaaccttcttcacctgatgcgggatgttcccacaggggatagtaacgcctcctactgactcccagcttcgccgtgatagcgtgagcggtgaacgtcaaagagaagaatgtagctgcaatatcttgagaaggctgtgagatttccgcggtgttgttcgacattttcggcgcgctttctaaaagccaagaggcctctccaataggtggcgtttgtttgctcttcgagaaggacgtcgaggtctcggtccactattccgttctgtttttgtgatttgcagcagcaaacattcagggagatttatggccagagagcactggttcctggttttattatcatcgatggtaattcaggctattgcaaatttggttggagcaaatacgcatatccatcagggcgttcagcaacatttttggaatttggtaatattgagtcaccaatgtatactaggcttcgacatttttttgcaactatttataacaggatgcaggtgaaaccaaataaacaaccagttattgtttctgtgccaatatgccattatgatgatactgaatcagccaaagcatctaggcaacagcttaaagaggcaatttatgcttccttgtttgacatgaatgttcctgctgtttgcgccgtcaaccaggccactctagctctgtatgctgcaaaacgaacttctggaatagttgttaatataggttttcaagtcacgtctatagttccaattttaaacggtaaagtaatgcgcaaggtgggtgtggaagttatggggctgggagcactgaaacttacaggatttcttagggagaagatgcaactgaataatttaaggtttcaatctttatacactgttcgcacattgaaagagaatctatgctatgttgctcttgattctgaagctgagctattgaaagatacaaaagcatcatttgaagctgctggagaaggatggtttaccctttcaaaagggaggtttcagacagcagagatcctattccagccacatcttgccggagtgcaagctatgggtctgcaccaagccatagctctttgtgtggaacattgccattctgcagatttagcatgtgacagtgattggtacaagactatagtcttatcaggggggactgcatgcttacctggtttggctgaaaggatagagaaggaactccatgccttacttcctccctacgtgtccaatggaattagagtcatacctcctccatatggtgctgatactccatggtttggagcaaagattgttggcaatttgagcacctttcctggtcattggtgcgtcacaaaaaagcagttccgtcagaagcctagactcaacctcatatggtgattgttgtgatacaaaatttatttcctcaattatgcaccctcatccaaagaggcaacaacagaagatgtgaattttagcaactgcttttgtatgtataagtatattatgatttccttcttgaaacgaagcctatagttaacattcaggttgttaagaataatgtaataagattcaagactaaaccacaagtgtgaagaaactgttaataatatagttgaagagcaaaaccacaacgtgagaggttttttgtaattagaaaaatgcctagacattggaataatggaatccatctctggttcttccattcaattttatgaaatgagatggtccttttaagaatgccataaacttcgaagatggcttactctacgaagtttaatttttcaaacccagtctgcttattaggtcttttttttgtctatagttgaggatgacaattttttaatgaaccgaaaacattatgtctgcaatggttttacaactgaaccaagcagcacttcatggtcacgcccacccgagaaaaggatcatcatcattttatattttatgcannngaaggaacagtaaagt

SEQ ID NO: 56487 - DNA, 296 bp, Glycine max
  Clone ID: PAT_MRT3847_22017C.1
gtataaaaaacaattctttgaaggggggtggggcattgttttataaatcacctcgggttttatactattcgaagtgttagaaccaaataatagggaagattacttatgaatgatacatcccgcctacatataagggttccgagattacattcggttggctattgataaccatgaagctccaacttgatactttgagagttgatccaaccaaataagcgggtgaccttatgaaatatcccttgatgcatgacaaatggacagtggcttggctctttctgccgaatttcgggcttacc

SEQ ID NO: 56488 - DNA, 226 bp, Glycine max
  Clone ID: PAT_MRT3847_22018C.1
agccgatgaatcgtgagcacatcattttctcatttgcttttcccgtttctctccgcattctcttctctttcaattttccctcctttatatattttctgttcctttgcattttcctcgtcgcattattcattctattctcttctcctcatggcgccgagcaccggagacgtgcaacttaattcccccgtatccggcgaatattcagacgatctcgaagacgttcgcc

SEQ ID NO: 56489 - DNA, 582 bp, Glycine max
  Clone ID: PAT_MRT3847_22019C.1
ttaggttactaaggaaaaagttaagaaaacgggcagggattaaaaagtaaatggttgggaaaagagccaagggtccttatttgaaaaaaataaataggttgtgtttcgggtcatgtgtgggctgaagaagagaaaaaccaaggggtgaagataaaggagagagattacaaaatgtgtgaaagaaaagttggggactttttgtaaggtgcttaatattccgataaataagaccagtaggaagaaggaggaactgtctgcaaagttgttgcaatttttggagtccccacatgctacaactgatgttttgcttgctgataaggaaaagaaaggcaaaaagcgagccagaaagcaaaccccaagcaaatcttctggggaaggatccaaaacatctgccaagaagcaaaagcaaaattcacaagttgggaaaaaccaaaagcagtcttctgacattgaggacagtgatgcagctgaaccttcagatgcaaaagttgattctcaggaagatgatgattcaagtcaaaaaagtgaaagtgataatcgggaaagcatatcagagaaagaaaaagaattattccggccggt

SEQ ID NO: 56490 - DNA, 538 bp, Glycine max
  Clone ID: PAT_MRT3847_2201C.1
gggagcgaaagatgtatatattcaagacgtagggtgagaggagaatgctatgtatcgagaaatggcgttcacaagccaaaggaaaatacaaaacatctccgagaggtatttttggggggttgtatgcggaaaggattctccgattaggcgttgtgcttccagtgagcgatatctccatcgaccatctcgtaaggctttcctttttgttgaagtttaccagcagccttgacagcagtttccgaaccgtattccttgaggtcatcaaagttcatgatatcaccacagatgaagtgcttttcgaaatcagtgtggatgacaccagcagcttgaggagctttagttccttcccgaatcgtccaggctcgtacttcttgaggaccgcaagtgaagtatcggatgaagttgagagcttggtaaccagcaaccatgattttacctaattgaccttgagtgttcaatttcgtgaactcctcgactcgaacgttatcatcttcgaattcttgcaacatgcgctctttcaacgcgaccgagaaaggaa

SEQ ID NO: 56491 - DNA, 1335 bp, Glycine max
  Clone ID: PAT_MRT3847_22020C.1
cccacgcgtccgtgcgagaagacgacagaaggggtgtgaaagaaaagttggtggacttctgtaatgtgcttaatattccgataactaagaccagtatgaagaaggaggaactgtctgcaaagttgttagaatttttggagtccccacatgctacaactgatgttctgcttgctgataaggaaaagaaaggcaaaaagcgagccagaaagcaaaccccaagcaaatcccctgctaagaagcaaaagcaaaattcacaagttgggaaaaagcaaaagcaatcttctgacatcgaggacagtgatgcagctgaaccttcagatgcaaaagttgattcccgggaagatgatgattcaagtcaaaaaagtgaaggtggtaataaggaaagcatatcagagaaagaggaagataaagaaaaggttcacaaacgttcttcaaaaaagattctgaaggaggatcaaaccacacctgtaaagaagaccactggtgtaaagactgccaagagcaatgaaaacacttctaaaaaatctacttcaaaaagggctgttactgacagtacttctaagtccaagaaacagaaatcagtgaaggaaaacctgaactcgaaaaggaaggatgcaaacaaaaaacaaactgacaagtctttgaaggctttattgaaggatcaaggcaaagataaaagtagtgagaaggccaaagcagaacctagtaaggaggagttgcatcgagtggctgttgatattttgaaggaagtagatttcaataaggcaactttatctgacatcctcaggcaacttggtactcactttgacgtggatttaatgcctagaaaagcagaggtgaaggatataattacagatgtaattaataacatgtctgatgatgatagagaggaagctgaaaatgttggggatgatgatgcagatgaagatgatgcttgattgtagaattatatatgggtaaataatcttaggctattgcagaaattagatgcatgtgtttcattccacagctatattttctcaccatgattcttgcaataataggtttcaatgaatatttggtttgtgttgtgatctttttccctgataggtattctcaacttcgttgtatttccatttagatttaactcctttcaccgtattattagtgtgaccttaattttatttcttatactgaataggtttattcacctgcctgtaaacaatattgccatttagatcagcatttttttttcaacagctagaactagattatgaatctttaaaagatgagattgttatgaatcgcaatggctttcctatttaattgctgataagataagcatttgcaccttgc

SEQ ID NO: 56492 - DNA, 1268 bp, Glycine max
  Clone ID: PAT_MRT3847_22021C.1
aattcggctcgagtgtcaacttgcacggactcttattgatggctggaaacaaatggtggatgagtgggtcaaggataccacagctattgcaggttcagaaggtactccagattcagtaaatccatctgttgttgatgatgaagaagggcttccatcacctcctatggatgaaggggctttatttgcagctccaactggttcgatggaactctcacagttctttgatggcatggatgatgatggaaatcctcaacacagtggggaattcatcaagaaccatgaacatggaagaagaccatctctgaacagtcaaaatacagcaaagaggaaacctcaggcatcaaatgaggcaaacatcattgccaaggacagtaagggtcagcaagcaaagaaaaacgaggctgctgtgagaccaaataaatcagtaatcgctgattctggccctagcagaccacctaaatcaaccatgcagaagaaaggcaacattgaaccaaagatgcaacaaaatatcgtgaagagtgctatcccaagaaatcctcacattcatcagctagataaacccaagtgttcagacgatgctgctgtgcacgtaaagttagaagccactaagagaaaacttcaggagcgttatcaacaagctgaaaaggctaagaggcagcggacggtacaggttatggagttgcatgacctcccaaagcaagggattggccatcgaaatccacatgtgaaacccggaaatcacaagaggcaatggggtcatggacgaagatagaactgttaattgtgaatttggctgcattttcaagcttccaaaatctgggcaagaactccctttgctagccattattgaagcttcttcctctttccatacaaaagcaacaattcagttcaccattcttacctgtattgaactgttctgattgagagggaagtaaactctgagtcacagtttatttcctaagttaaaaagttgaatatatatagaaattttgttgatccaaagactggatttggaagagggtcctttagcacttaagtgttgatgtggttctaaactggctgtctgttgaaatgtccattagttccattctcatgattgatcatttaattttggacaattttcttttcacatagaacttccattaaggtctcaacatttcgtctcccttgtcccgaactcaagaggtctcgggtatatgtaagggagttgaagtaaaccggataagcctatttgagaataagcaatagcatttaattatcaaaaacca

SEQ ID NO: 56493 - DNA, 319 bp, Glycine max
  unsure (1)..(319): unsure at all n locations
  Clone ID: PAT_MRT3847_22022C.1
tnnnttaataaatttatagaaaaaataatttaaaggatgggttttattaaattataatcccacaaaaaatcttatcattttaaacccaaaaaaatacaatcactcaaacccaaatttgtaaactaaaacaaacactaactttaacacttaaaggccctttctataactatatctgcccctacaaataacacttacccttttctaattaactttttttaaaaagaaccctttttataaccctttgaatgttctatatcttgcactccaaatataaattcccacttcttcattcacataccaaatggatacacatacttta

SEQ ID NO: 56494 - DNA, 286 bp, Glycine max
  Clone ID: PAT_MRT3847_22023C.1
gctaggcgtatgtgcacacgacattgcactttgactgacttgtagacactatactctaaggtcactggtatgcacgaaaaatacgtggcatacggccttcttgcttccaacgtgtctctccatgaactcatacgctaaaggacatgtcagcaataggagtagaaccaatgcccatgctacattctatggtgaaagacatgcttctgggacaatagatggtgctagtcagcatcgaaactagcatcgaccatgatatgggactaacacagcagcacttatcactgac

SEQ ID NO: 56495 - DNA, 434 bp, Glycine max
  Clone ID: PAT_MRT3847_22024C.1
gaagacgacagaagggccatcatatatatgataatcattttaaaagtaattcaagaataacctgtgattgaacgatagcgtaaaattattttacccaacaactgcataaacattcaattcaaatatttattacacattgttacacacataaggaacatgtaagaaatatttattttactttgaagtgtgacaagacaatgcatgcatgcaagactctagatagagtttttgtcatgtgatatattaacttctctctcccttcgcatcacatgcacatatttcatttttcttctttaattgagttgggttttaggtagttataagggagtgttgggtaggaaaagtctaatttggttattttaaggatattattattgatcccatacaaattgcatacaaaatccacttccatattagtgtagggcgttcaaaca

SEQ ID NO: 56496 - DNA, 395 bp, Glycine max
  Clone ID: PAT_MRT3847_22025C.1
cggggccgaccacacccgtccgaaaaaaacacgtccgtttggtttcgttcccatgggggcctccgtttccgcgtcctccggggtggctgtttggaactccgaactttcaacccgctggccaccttaattggcttccgaatttttttccgccaggcaatcctttttgcatttcccgtcgggcccccccctttttcggattagaattcaacgcgctccggttcaatggggacctggattccttcttttggttcaagcgaggaaccaaacctataactggttggacgattggctggccaattctgagaaactctggtgggtggacttttatgcaacctgggggggccctggccaattaatggttcccatcctcaaggaagtaagcactcggtttaagg

SEQ ID NO: 56497 - DNA, 303 bp, Glycine max
  Clone ID: PAT_MRT3847_22026C.1
tggagctggttcgaggaggaagaggatatctggtattcttgattacagagatgggaagaagcttgtgaactgaatatatagacctataactcttctagcagggcacgatgactttggagaatctcttgctgaattgggacaggcttgcataaggacaaccgaatgtcaagagagttcattaggatgacaagtgctcggaccaggctgcttttggaacttctgaccattatgttgttaacaggggtactatcttacaggctagtattgaaggcactacagatttgacactgctatacttttcgt

SEQ ID NO: 56498 - DNA, 299 bp, Glycine max
  unsure (1)..(299): unsure at all n locations
  Clone ID: PAT_MRT3847_22027C.1
tgangngtagnaagatnggaattaggntcgagagnanntntgnaantatntnnaagnaaggtaatgggaganantgtgttggaatagaaggggttttntagttagantgnatnatttanannagagtnatatgaanngagttgtaagattgatananttaagatggagtattgaattgggcagtttntgtntcagatnttganaagttagacgcatntngtgccagntgcagtagagnantgtaanngagnaattcnaaactgatnttgatggtgataaacaaaagaaagagncttctn

SEQ ID NO: 56499 - DNA, 949 bp, Glycine max
  Clone ID: PAT_MRT3847_22028C.1
ctcaccgctcggagacggatacagtgctcaaatgtatcatgcaaacagaggatatatccacgacttgacccggtggtcattatgctagtaattgatcgggagaatgaccgtgcccttttgagcaaacaatcgagatttgtacctagaatgtggagctgcttagcaggttttatagagccaggagaaagcttggaggaggctgtaagaagagaaacgtgggaggagactggtattgaagtgggagaagttgtatatcatagctctcagccatggcctgttggaccgaatagcatgccatgtcagctgatggtggggttctttgcatatgcgaaatcccttgaaataaatgtggacaaagaagagttggaagatgctcagtggcacagtagagaatatgtaagaaaggctctgacatttgctgaatacaagaaagcccaacaaactgcggtagcgaaggtagaacaaatgtgtaagggagtagaaaaggctcacagcttgtctaccgatttcaatgtggaaagtggtgaacttgctccaatgtttgttcctggaccctttgcaatagctcatcaccttatttcctcctgggcattcccagatcaaaatgtaaatggcagtgaatgtcattcaaaacaggctagtggttctatgtcaaatttgtaggagtgcaaattatttttttaaaggcacctttgattttacattgttttccatactaaactgatgtgagatataatcaatcaccataagactgactgcattatgttgcattttctttgttgggcgtagaaacataaattgggcagttgaattgtttagggtttttttatgtgtaagaattaaataagatatcaagagatttataacatttacatatctggttcaatcaactgagttaaaccccctggttgaactggttgaattattgaggtttgacatcaagtatgaa

SEQ ID NO: 56500 - DNA, 2906 bp, Glycine max
  Clone ID: PAT_MRT3847_22029C.1
aaaaaaaagaaatgaatatactaaaaaaatgtaatccgcttgatgggcgtgggacagtgggggaagttgtaggggtttcagggcacgcattctatcgctgtttctctcgaatcaacaaaacgccaccgtttcattgatctacttcctccaaggccaggtctccaagaattggtaccaattcaagctgcaaatatacttgaacttcaacttatcccacattctccactctcaatggcttcaactctcaaatctggcggaattcatacaggggcaatcaatgatgatttatacaaggaattgtggcatgcatgtgctggtccccttgtcactctccctcgtgaaggggaacgagtctattactttccacaaggtcacatggaacagcttgaggcatctatgtatgagggattagagcagcagatgccttccttcaacctgccttctaaaatattatgtaaagtggtcaatgttcatcttcgagctgaacctgaaacagatgaagtatatgcacagataactttgcttcctgaagcagatcaaagtgaggtgaccagccctgatgatcctctgcctgaatctccgagggtcaagatccattcattttgcaagacacttactgcttctgacacaagtacccatgggggtttctctgttcttcgaagacatgcagacgattgtctgcctccactggatatgtctcagcagccaccatggcaagaattggttgcaactgatttacatgggaatgaatggcattttaggcatatttttcgagggcaacccaagcgccacttacttaccactgggtggagtgtctttgtcagttccaaaaaattagctgctggtgatgcctttatattcttaaggggtgaaaatggagagctgcgagttggggttaggagggtcatgagacagcaaagcaatgtgccttcttctgttatatctagtcacagtatgcatcttggtgttctggccactgcatctcatgccattgccactggaacactgttttctgtgttttacaagcccagaacaagccggtcagagtttattgtgagtgtcaacaagtatctggaagttcagagtcataaactctctgttgggatgagattcaaaatgcgatttgagggtgatgaaattcccgaaagaaggttcagtggcacaattgtgggtgttggagataataaatcatcgtcggtctggcctgattctgagtggcgatcattaaaggtgcaatgggatgaaccatcctcaattttgcgtcctgacagagtttcatcatgggaattggagccacttgtgtctaccactcttgcaaactcgcagccaacccaaagaaacaagagggcacggcctctcattctaccttctacaatgcccgattcttctttgcaaggtgggtttgctgggttggttgtgcagaatttctttgtcattctgctgcccattctgtttttctacataatcatctttctttgtgcaccaggcatatggaaatcatcagttgaatctacctctttctcttattgtgacccccaacaaggacgtggcctctatccatcaccaaagttcaattcttctgcaactaactttattggttttagtgggaatagctctgtgggatctccttccaacaaatcaatatattggtctaataggatggaaaataacttggaatctatttcagctatagctcttaaagaagctggagagaagagacaaggcactggaaatggctgtagactctttgggattcagctacttgagaattctaatgcagaaggaaatctacaaacagtcactttgtcaggaagggtgggtgatgataggtcggttccatctttagatgctgagtctgatcaacattctgaaccatcaaatgccaaccgatctgatattccttcagttagttgcgatgctgaaaaatcatgcctgcagtctccccaggagtcacaaagcaagcaagttcacatgcaaggaatggctgttgggagggctgtggatttaacacgatttgatggatatgaggatcttctcaggaaattggaagatatgtttaacatcaagactgagctctgtgggtccctaaaaaaatggcaagttgtctacactgataatgaagatgatatgatgatggttggagacgatccgtgggatgagttctgtagtgttgtgaggaaaattttcatctacacagcagaggaggtgaagaagctttcaccgaaaataagacttccaatgaatgaaaaagttaacccaagcaagcaggattcagaagcaatagtgaatcctgaggaccagtcatctaatatggggcccagctgctagaagtcgtatgaattccagttccagtatatcctagttgttatgaatgcaataaatgttggtgtggagagaggcgataatgaactaaaggtggccggccaatactaataggagcatgcatatcacttccacttgtgtattgtattgtattgtattgtattgtattgtattgtattgtattgtattgtgcagctaggctggctggctggcatgacgtcagcaagcaagaatcgacgcagagggttgttttgagatactgctgtttgatcttgccttgccttgaatgaaagatattgtgggttttctatttcttctacggctcggttatcttatcgccgggagggagtgtagtggtccttgctcattcggttttgagttggccgcaagcaccaacatgtatgtctttacttaatatcatgccatgcatgatatgatctttttttttttgttttttatgagaggggtgggtattttcttttgtaactcactcaatgtgatgcatgcctttttgtacagaagtatttattattatcttcgaatgctatttatatgtacgaggcataaccctccgttctcccgct

SEQ ID NO: 56501 - DNA, 388 bp, Glycine max
  Clone ID: PAT_MRT3847_2202C.1
tctctcagtgacttgtcagtgctacgtaatggtcgaggttggagtgctttcactctctttagatgcacaactagattcttcatttttcagacacacatctaccaaagttcactctattgttcgcgaaatggcgaggatcgtttccaataaagatacccgcatgcttgtcaatctcattagacttcgctttcatgactgttgagttcaaggatgtgacgcatcatttatattgaacaacacttgcaccatatagagcgatcaacaagctctgcctaacaacaactctctatgaggcatggatgtcttgagcgacattaagacagcagttgaacaagcttgctccagagatgattcttgtgctgatatcaatctccttacatctgaaata

SEQ ID NO: 56502 - DNA, 722 bp, Glycine max
  Clone ID: PAT_MRT3847_22030C.1
cccacgcgtccgcttcctccaaggccaggtctccaagaattggtaccaattcaagctgcaaatatacttgaacttcaacttatcccacattctccactctcaatggcttcaactctcaaatctggcggaattcatacaggtttctctctaatctcgtgtttctctttcccctttttttgacgcaacctcgccagaatcattctttaattgcttactcaccttgggttgctctctctaattgaattcatagccaattcgtgagactcttcttacccatgccatatgtcatgatcatgagtaactttatctgactggtctgtttggcaaaatttatcaacgttggaaggtgtttaatatatattccacatgaactttaagttattctctacttcattattttgtcatgctttgttttttaggggcaatcaatgatgatttatacaaggaattgtggcatgcatgtgctggtccccttgtcactctccctcgtgaaggggaacgagtctattactttccacaaggtcacatggaacagcttgaggcatctatgtatgagggattagagcagcagatgccttccttcaacctgccttctaaaatattatgtaaagtggtcaatgttcatcttcgagctgaacctgaaacagatgaagtatatgcacagataactttgcttcctgaagcagatcatagtgaggtgacccagccctgatgatcctctg

SEQ ID NO: 56503 - DNA, 541 bp, Glycine max
  unsure (1)..(541): unsure at all n locations
  Clone ID: PAT_MRT3847_22031C.1
ggcgaataaagcagagcccgggagtgaaaaacgagggtaatggcaccaacagtgatgttttcgcttcgtgctcattctccagccttggacttgagtccaatttatgtgaacaacttcgtgagaggttggggtttgaagttccgacgctggtgcaagctcaagcaattcctgttattctctcggggcggcatgcgtatcctttttcttctttttaattttaaattttaaattttatttttgcgtttcatggtacgaggttgtcttttttaccaagaaaaaaaaacttctttaatgagaagtttagattggtgaatgctgcaacgggcacggggaagactgttgcgtatctggctccgattattcatcacttgcanggttatgaaaatcggattcagcgctctgatggaacatttggtgtgttttgttttcgctttgaaagatatttagttgctctgtgtaattactttttcacaaaatggcatggttgattaggttcccatcacttttgttattttgaaatgatgcgtgttatatgccactt

SEQ ID NO: 56504 - DNA, 1780 bp, Glycine max
  Clone ID: PAT_MRT3847_22032C.1
cccacgcgttcgcagaattagaattagaaagagaaagagaaagagggggggtcgtgtcggcttgaaaccaaacacgaccttatcggcgatccaatttcgatctgtgcaaatcgtaaaccctacctacttgcttctgcaattctggtggactggatccattttcatctcaattctcagtaagttggggcacatcacacaataactttgacatggcttccgctgcgccaggtgcaaccaatgatgctttatacaaggaattgtggcatgcctgtgctggaccccttgtcactcttccgcgtgaaggggagagagtttattacttccctcaaggtcatatggaacagcttgaggcatccatgaatcagggattggagcagcaaatgccttcctttaatctgccttctaaaatttcatcaggaaataaataaccatttccaagatgcgtgattaaacggctgagattgtgtacagttatccagaaacagaaaccgtagacaacccgaatcccttattaagcaggggtttcgcggcgcgagacggtgacactggcagagtggaatttccgccgccattcgaagctacagcgatggccataaccgccaccatttccgttcccttcacatcccccagtcgccgcactctcgcctccgtcaatagcctctctccgcgttctacccgatccactttgcccacaccgcaacgcactttcaaataccctaattcgcgcctcgtcgtgtcttccatgagcaccgaaacagccgtcaaaacttcatccgcctccttcctcaaccgcaaggagtccggcttcctccatttcgccaagtaccacggcctcggaaacgacttcgttttgattgacaacagagactcctccgagcccaagatcagtgctgagaaagcggtgcaactgtgtgatcggaacttcggcgttggagctgacggagttatctttgtcttgcctggcatcagtggcaccgattataccatgaggatttttaactctgatggtagtgagcctgagatgtgtggcaatggagtgcgatgctttgccaaatttgtttctcagcttgagaatttacatgggaggcatagttttaccattcatactggtgctggtctgattattcctgaagtcttggaggatggaaatgtcagagttgatatgggggaaccaattcttaaagcctcagatgtgcctactaaattacatgcaaataaggataatgctgttgttaaatcagaactagttgtagatggagttatctggcatgtgacctgtgtcagcatgggaaatccacactgtgtaactttcagtagagaaggaagccagaatttgcttgttgatgaattgaagctagcagaaattggcccaaaatttgaacatcatgaggtgttccctgcacgaactaacacagagtttgtacaagtgttgtctaattctcacttgaaaatgtgtgtctgggagcggggagcaggagcaaccctagcctgtggaactggagcttgtgctactgttgttgcagcagttcttgagggtcgtgctgggaggaattgcacggttgatctacctggaggacctcttcagattgaatggagggaggaagataatcatgtttatatgacaggctcagccgatgtagtttattacggatctttgcccctttaatatgttgcccccattgttaaacccaatatggaattaggaattgctgaataatatttgtatgagaggtggactttctgcttgttcttactattttgccacatatttatatcttcc

SEQ ID NO: 56505 - DNA, 4722 bp, Glycine max
  unsure (1)..(4722): unsure at all n locations
  Clone ID: PAT_MRT3847_22033C.1
ggctcgagaaaataatgtaatatgcttagatagggcgtgggacagtgggggaagttgtaggggtttcagggcacgcattctatcgctgtttctctcgaatcaacaaaacgccaccgtttcattgatctacttcctccaaagccaggtctccatgaataggtaccaattcaagctgcaaatatacttgaacttcaacttatcccacattctccactctcaaaggcttcaactctcaaatctggcggaattcatcgtgccgtgcggtgtacagaattagaattagaaagagaaagagaaagagggggggtcgtgtcggcttgaaaccaaacacgaccttatcggcgatccaatttcgatctgtgcaaatcgtaaaccctacctacttgcttctgcaattctggtggactggatccattttcatctcaattctcagtaagttggggcacatcacacaataactttgacatggcttccgctgcgccaggtgcaaccaatgatgctttatacaaggaattgtggcatgcctgtgctggaccccttgtcactcttccgcgtgaaggggagagagtttattacttccctcaaggtcatatggaacaggtacaacttgcctgggcatgttctcttaatttctgactttaattgaacttgaggcatccatgaatcagggattggagcagcaaatgccttcctttaatctgccttctaaaattttatgtaaagtggtcaatgttcatcttcgagctgaacctgaaacagatgaagtatatgcacaaataactttgcttcctgaagcagatcaaagtgaggtgacaagccctgatgatcccctgcctgaatctccaaggtgtacagtccattcattttgcaagacactcactgcttctgacactagcactcatggaggtttctctgttcttcgaagacatgcattgcgtacagttatccagaaacaaaaaccgtagagaatccgaatcccttatcaagcaggggtttcgcggcccgagaccaagtcaaaccgagacggtgacactggctgagtggaatttccgccgccattcgaagctacagcgatggccatagccgccaccatttccgttcctctcacatcccccacccgccgcactctcgcctccgtcaatagcctctctccccattctcccagatccactttgcccacaccgcaacgcactttcaaataccctaattcgcgcctcgtcgcgtcctctatgagcaccgaaaccgccgtcaaaacctcctccgcctccttcctcaacctcaaggagtccggctttctccatttcgccaagtaccacggcctcggaaacgacttcgttttgattgacaatagagacacgtccgagcccaggatcagtgcagagaaagcggtgcaactgtgtgatcggaacttcggcgttggagctgacggagttatctttgtattgcctggcatcaatggcaccgattataccatgaggatttttaactctgatggtagtgagcctgagatgtgtggcaatggagttcgatgctttgccaaattttttctcagcttgagaatttacatgggaggcatagttttaccattcatactggtctggtctgattattcctgatgattgttagccaccactggatatgactcagtagcccccatggcaagaattagttgcaactgatctgtatgggaatgaatggcattttagacatatttttcgagggcaaacccaggcgccacttactgaccactgtggtggagtgtctttgtcagttacaaaaaattagtggctgtggatgcatttatattcttaaggggtgaaaatggagagctgcgagttggaggtaggaggctcatgagacagcatagcaacatgccatcttctgttatatccactcacaatatgcatcttggtgctctgactactgcatctcctgccaaagagacaggaacagtgttgtctagattttacaagcccagactgtagctgggctgagtttgctggtagtagcctcacctgtggtagaggatgcttgtggtaatattctggcggtagttcttccgggatgaggttcaagaggagatttgagggtgggagcagattcagaggaactattgcgggtgtgggattgaggtagggatgataaatcgtgcttttgagtggcgatccttaaaggttgaatgggatgaaccatcgtctattttgcgtcctgttagtatttctgcccgcgatttggaaccacctgtgactacccctcataaagactcccagccatcccaatgtaactagaaatcggggcctctcattctaccttcaacaatgcctgattcttctttgcaaggtgtatggaaatcaccagttgaatctgcaccattctcttattgtgaccatcaacatgggcgagatgtctatccatcaaccaatttcaattccactgcaactggttttcttggttttggtgggaactgctatgcttccaacaagtcaatatattggtccagtaggatggaaaactccacagaatctttttctcctgtagcacttaaagaatttggagagaagagacaaggcactggaaatggctgtagactctttgggattcagttacatgacaattctaatgctaatgaagaaaatctaccaatggtcactttgtcaggaagggtgggtgatgatgggtcggttccatctttggatgctgagtctgaccaacattctgaaccatcaaatgctaatcgatctgatattccttcggttagctgcgatgctgaaaaatcatgcctgcagtctccccaggagtcacaaagcaggcaaataaggagctgtacaaaggtccacatgcaaggtatggctgttggaagggctgtggatttaacacggtttgatggatatgaggatctgctaaggaaattggaagagatgtttgacatcactggtgagctctgcggatcgacaaaaaaatggcaggttgtgtacactgataatgaagatgatatgatgatggttggggatgatccatggcttgaattttgtagcattgtgaggaaaattttcatctacactgcagaggaggtgaggaagctttcacccaaaataggacttccaatcagtgaagaagttaaacccagcaaaatggactctgaagcagtagccaatcctgaggatcagtcatctattgtggggcctggttgctaatgtcttaggtcttccaacatttcagttgttatatatatatacaatagatattggcatgaaaataggaagtagaacgtgagagaaacgagtatgtacctggcaagcccttcatcatggcctataaggagcatatggttagtgtattctgcatctatacaggagcagcataacagcaccaaagcagagggcttggggtattgtggcttttctctttctttcatagctctgtaatcaccgagtttcgatgccttgcttgttcagttttgtattggttgcgagcgtgcagaaatgtcttgtttttttttttttggttgcgagcagcataacagcaccgaagtatcttactatgtatgcatttggattttttttttggttcttttgtaattcacttgttatgatgcatcatctcatttatgtatatataactttctattatatacatactatttaatgtatgtatatcgagccaatttaatgcgatgcatcctttttgtaaaaataggagcatatcatggtgtcatctatacaagcacaaagggctggtgtggtataatactgtttttgaagataggcttggggtgtggcttttctatttctttcatagctccgttatcaagtctcgatcgcccttgcttgttcagttttgtattggttgcgagcgtgcagaaatgtcttttggttaagtatcttactatctagtatgcatttggagtttcttttttggttcttttgtaattcacctatgttgcatctcatttctgtatatataactttctattatatatactatttaatgtatgtatatcgagccccctgtcagagttgatatgggggaaccaattcttaaagccttggatgtgcctactaaattacatgcaaataaggataatgctgttgttaaatcacagctagttgtagatggagttatttggcatgtgacctgtgttagcatggggaatccacactgtgtaactttcagtagagaaggaagccagaatttgcttgttgatgaattgaagctagcagaaattggcccaaaatttgaacatcatgaggtgttccctgcacgaactaacacagagtttgtgcaagtgttatctaattctcacttgaaaatgtgtgtttgggagcggggagcaggagcaaccctagcctgtggaactggagcttgtgctactgttgttgcagcagttcttgagggtcgtgctgggaggaattgcacggttgatctacctggaggacctcttcagattgaatggagggaggaagataatcatgtttatatgacaggctcagccgatgtagtttattacggatctttgcccctttaatatgttgcccccattgttaaacccaatatggaattaggaattgctgaataatatttgtatgagaggtggactttctgcttgttcttactattttgccacgtctttatatcttcctacccttttttggttgaatgtgtcacaacaacggtttgttatctggttttggctatattaacctganagaaatgaagcaatga

SEQ ID NO: 56506 - DNA, 383 bp, Glycine max
  unsure (1)..(383): unsure at all n locations
  Clone ID: PAT_MRT3847_22034C.1
cttncgaaagagacagaaagttgagagtagaaagttcacggtttttgggaatgggggctttggcatcgggcacagaaaaatacatccatgattccatggtgtaggatgctaagaggaaagacgggaacctcagcacctataaaggggaggatcttcttgtatgtaacgttgcttgaaaaagtgcatttacaaattgcatttgcaaccatttatctgaagtgtgcagcaaatataaagacataggtccttggatactggtatttatatgcctccagaatatgaaacaaagacccttaagtttctcacaagaacatgaatttgattgtacagagaacaaggcggagaatcccaattttggaaaggtctgtgttattggatcttat

SEQ ID NO: 56507 - DNA, 2706 bp, Glycine max
  Clone ID: PAT_MRT3847_22035C.1
atcgtgccgtgcggtgtacagaattagaattagaaagagaaagagaaagagggggggtcgtgtcggcttgaaaccaaacacgaccttatcggcgatccaatttcgatctgtgcaaatcgtaaaccctacctacttgcttctgcaattctggtggactggatccattttcatctcaattctcgtctctcttcagtaagttggggcacatcacacaataacaattcattctcttagacatggcttccgctgcgccaggtgcaaccaatgatgctttatacaaggaattgtggcatgcctgtgctggaccccttgtcactcttccgcgtgaaggggagagagtttattacttccctcaaggtcatatggaacagcttgaggcatccatgaatcagggattggagcagcaaatgccttcctttaatctgccttctaaaattttatgtaaagtggtcaatgttcatcttcgagctgaacctgaaacagatgaagtatatgcacaaataactttgcttcctgaagcagatcaaagtgaggtgacaagccctgatgatcccctgcctgaatctccaaggtgtacagtccattcattttgcaagacactcactgcttctgacactagcactcatggaggtttgtctgttcttcgaagacatgcacgatagattgtttgccaccactggatatgactcagcagcccccatggcaagaattagttgcaactgatctgcatgggaatgaatggcattttagacatatttttcgagggcaacccaagcgccacttactgaccactgggtggagtgtctttgtcagttccaaaaaattagtggctggtgatgcctttatattcttaaggggtgaaaatggagagctgcgagttggagttaggaggctcatgagacagcaaagcaatgtgccatcttctgttatatccagtcacagtatgcatctgggtgttctggccactgcatctcacgccattgccacaggaacattgttttctgtattttacaagcccagaacaagccggtctgagtttattgtgagtgtcaacaaataccttgaagctcgaagtcataaactttctgttgggatgagattcaaaatgagatttgagggtgatgaaattcccgaaagaaggttcagtggcacaattgtgggtgttggagataataaatcatcgtcggtctgggctgattctgagtggcgatcattaaaggtgcaatgggatgaaccatcctcaattttgcgtcctgatagagtttcttcatgggaattggagccacttgtgtctacccctcctacaaacccccagccatcccaaagaaacaagagatcgcggcctcccattctaccttcaacaatgcctgattcttctctgcaaggtgtatggaaatcaccagttgaatctgcaccattctcttattgtgaccatcaacatgggcgagatgtctatccatcaaccaatttcaattccactgcaactggttttcttggttttggtgggaactgctatgcttccaacaagtcaatatattggtccagtaggatggaaaactccacagaatctttttctcctgtagcacttaaagaatttggagagaagagacaagggactgcaaatggctgtagactctttaggattcagttacatgacaattctaattctaatgaagaaagtctaccaatggtcactttgtcaggaaggatgggtgatgatggcccccttccatctttggatgctgagtctgaccagcattctgaaccatcaaatgttaatcgatctgatatcccttcggtaagctgtgatgctgaaaaatcatgcctgcggtctccccaggagtcacagagcaggcaaataagaagttgcacaaaggtccacatgcaaggtatggctgttggaagggctgtggatttaacacggtttgatggatatgaggatctgctaaggaaattggaagagatgtttgacatcactggtgagctctgcggatcgacaaaaaaatggcaggttgtgtacactgataatgaagatgatatgatgatggttggggatgatccatggcttgaattttgtagcattgtgaggaaaattttcatctacactgcagaggaggtgaggaagctttcacccaaaataggacttccaatcagtgaagaagttaaacccagcaaaatggactctgaagcagtagccaatcctgaggatcagtcatctattgtggggcctggttgctaatgtcttaggtcttccaacatttcagttgttatatatatatacaatagatattggcatgaaaataggaagtagaacgtgagagaaacgagtatgtacctggcaagcccttcatcatggcctataaggagcatatggttagtgtattctgcatctatacaggagcagcataacagcaccaaagcagagggcttggggtattgtggcttttctctttctttcatagctctgtaatcaccgagtttcgatgccttgcttgttcagttttgtattggttgcgagcgtgcagaaatgtcttgttttttttttttggttgcgagcagcataacagcaccgaagtatcttactatgtatgcatttggattttttttttggttcttttgtaattcacttgttatgatgcatcatctcatttatgtatatataactttctattatatacatactatttaatgtatgtatatcgagcc

SEQ ID NO: 56508 - DNA, 279 bp, Glycine max
  Clone ID: PAT_MRT3847_22036C.1
gcagaaaatcatactgtgatccaggtctctaccattcacaaatccacccaatattgctaactcgagccgcaatcggcatggaccacatttcaatatctattttctttatgtaacttctaatccacagacttatgatatccctccttcatatctaatgtactacttcactacattaagccagtagctctctttcctgagttcttcacctgcacaaataaaacatggacttccctatgctaaacatgaaaggtcacttgctcatttttaacttccttcata

SEQ ID NO: 56509 - DNA, 452 bp, Glycine max
  Clone ID: PAT_MRT3847_22037C.1
aaaaacaaatatgaaactatggccttgcattaaaaaaataatccggtctaccactaatgcttatggaacatcaaatcatgtgctttgtcttctttcacatgatatgaaaacgaaaatgaactcatgattttttatactaggatgacttcgagaataaaaattgtattgagaacgcatcattattaagctagaccaacggcctactttgatgatgatctacagaattgggcagagtccccaactctgcatcagttgttgattttgcaccattgacccttgcagaagaggataagaccctctaggtcttggagctcgtgaatccgagactaggcaacatctttgaggggatcccgatctctatgagcagtaggccactcccatgccggactgtgaatggtttcagaaacatcagagtcgactatagcaatgaaactggctttcttgccgtcgtt

SEQ ID NO: 56510 - DNA, 555 bp, Glycine max
  Clone ID: PAT_MRT3847_22038C.1
tttgtggctctctcagtgccatagggattccacaggtttttgtacaaatagcttgtctgatgcaggcttccctggggctgctgctcttggtgatattgcatgtggaatgacatctgccagaataacttccaaagatatagttttctggtttcggtctcacacggccgcagaaatccgatgcgatggtgcaaagcatgaacctggtgaaagggatgatggtaggaggatgcatccaagatccatcattcaaggctttccttgaagttgtcaagaacaggagcttactctggaaggtctatgaaacgaatgccattcattcattgcatttaataccgagagatgcgttcaaagagacagagagcatgaagatagccacatatgctctcaattcaaggcttggttgtttgaacattgaagaaacgcaaggactggaggcagtgacaaatgagatggtaaggttaattgaaacagcaacagtgccagttttggcggttgatgttaaggggatgtatcatgtaaatggagccagaagtaagattaaaatctattggtatt

SEQ ID NO: 56511 - DNA, 290 bp, Glycine max
  Clone ID: PAT_MRT3847_22039C.1
atttattcgtttatctaactgttatgtacgtggggttggaaggagctggagcacggttcaaaatttattgaggttttgtgggatttgatttgagatttcaaatttagatgcgaaagagaaagagggaaattcaagtataaatatccctagaatgaaggacgtaaatactagtgtatctttctttcgaataactttaattttatgcatttgtatgtgtaaagctctcgttgaattatgtaatggcacaattcatttattaatgtgtttacaacttgtataaatttaactca

SEQ ID NO: 56512 - DNA, 223 bp, Glycine max
  Clone ID: PAT_MRT3847_2203C.1
cgaactagacgattcttggttttcccggcaacccggacggacctgaggcggggggcattccctatagagaggccattagcagctggcgcaatcaagggccaaagccgcgcccggggaaaatggaaaccctcccaaagccaccaaaaacaagccggaacataaaatggacagcccggagagcctaatgagagacccaacccacaataattgccgtgggctcact

SEQ ID NO: 56513 - DNA, 720 bp, Glycine max
  Clone ID: PAT_MRT3847_22040C.1
acccgagggatccctctagaagtcgacctgcagtggggaagacaggagaagtccactagcttttcaatgtagcaggaatgactacaatgttccattgactactaatgattatgggaagagggagccagatgcccgaggaccctgttgtggaatcgatgttagtattcaatgatgatgatgtgatggaaccgaacttgcacaagtatgtgacagtgaatagaggtggttcacttggtggtgcggacatggatgaccaagagtcttcaggaagcaacagcttcactgtgagtagtggtcacagcattggggtgtttcttcttcttcatgggaaccaagttcagttgaatcgaaagattgctggacttcgaggtcgaactactccaaagaggaatgtcagagaagtccattaggcttggaaggaacggtggcatcatgaagtggccggggcgtgatgcgggtggagccaagaagaaattgaacagccaaaggagagagtgtgatcatcagcatggcagtggaatagggcgtggtaggcttggtgccaataaagttcttcacaacatacctgttgtcacagcagctgcatccacatagatgttgttttgttgaatggcttaaccttcttgtatcttaaatactccatgagtttaacattcattctgtttggagttgcacactttgcagccagttctcatttaattaaggtccatattaacaata

SEQ ID NO: 56514 - DNA, 582 bp, Glycine max
  Clone ID: PAT_MRT3847_22041C.1
gtggaagcagcagcagcatcttcttctttgtctctgctttcgttagcgagtgtgaaaactaggagcaaagtcgcacagaactgtcacgtgactcaacaaagacaacgttgtaatcatgtttgtgttaagaatgcaagaagaacaagggtgactgctgtgcctgtgaatgttgatgatgtaaccacagtacttgaccctgctccagtggaagtcacatggcaaattgtggttggagctatagctggggttaccccttttgtggtggcagggattgaatttagcaaaagaattatagctcaaaaaagatgcgaggtgtgtggagggtcagggcttgttcttagggaaaaggaaaaggactatctccgttgcccagaatgtggtgggtttcttccttggcaatcctggaaaagattcttctccggttaatttctacagcattgtacaaaaaaccatacttcaacaaatgacaactttattttagcagagattctctgtttgtgataacattctctatcatacacaaatgtaaacaacatagtaaagccatttgcaatgattaccaactaaaaaatttataagaaa

SEQ ID NO: 56515 - DNA, 417 bp, Glycine max
  Clone ID: PAT_MRT3847_22042C.1
cttaattatatcattttaatcttattgtcaattatttagtatttttggtttaatcagggggatctgctcaaaacatattaaccgttaaaactatttcttgatcttcctaatcactatgcacaaacatatattgccttcactccttattagcaactttatttgactggaacatctgttgaaagggatagcattacattattgttattgtacttcttttatagaataaaattttaactttatttaaaagtttgcatattacccactttgttttttgttcattgttcttgccatacgaaactgtatcatatcttttcaactactggttataaaatcctaatttgtacttacatactatattatccataccttaagttaaatatcaacctttgtataaatttctcattcactcatttaaaa

SEQ ID NO: 56516 - DNA, 558 bp, Glycine max
  Clone ID: PAT_MRT3847_22043C.1
tacatgtgtgcagtaccgcctgcttgggggggggggggggggggggcatgctaataataataagaatacaaataagctgggacgtggtaggcagaatgtacaaaactgggcaaagaaaaataaagggacctggcgtaagataggaacgttgctgggaggtgtcggcctgataggttctaaaaccgcgtgacgtatgtaacagcaacgggagagtgggcagaggaggttggaatcaaccacaaataaatatgcaaattaaaagaagcaagctttttttacgtattactgctaacctattaggctggtaagcgcggcagtgattattgagctaaaaaagcaaatgacgaggatatcgtgggtttggcgggcctaagaaaagggaacatgttgttatgtttaaagaggcccacgcacaactgcttaccaccctgctattaagcttacacttagtaggactagctgtaagcataagccgtgtactacttgtagtgtttactaaggttggtacgctatgtgttaactaggtgtgaaaaggccgcgacgcggtagataattttt

SEQ ID NO: 56517 - DNA, 277 bp, Glycine max
  Clone ID: PAT_MRT3847_22044C.1
ttgtgcatggaactatgaactaaaacattaaccatgcaaacacaaactagaggacacatacgaaaacacactcaactaggagcagtagttcacaatatacaacgcatacgaggaccacccgatttggcttgttcatcgtcatgactaggatgatgaggataaccattaggataatcatacgtttctgcctctaaggtcgtggctaggacctctttcttgctactactagggtgagatgaatccatgaaacaagctgggggataaccatgacagcaaa

SEQ ID NO: 56518 - DNA, 1451 bp, Glycine max
  Clone ID: PAT_MRT3847_22045C.1
cgtaagctcgatggctcgagctttgataatttgcatccttcctttggtcttatagttattagttagaccttgcacagtaaataacaatgaagcggccatttagttcgagcggttatcacttttgtctaatgaatatgttcctgttgcttttggcagtaaggtcccaactgacaacagacttttataaatcatcatgtcctaacgtttccaaaatagtaaggagagaagttcaaaaagctctaatgaatgagattcgaatggctgcttctttgcttcgccttcactttcatgattgttttgtgaatggttgtgatggatcaatactactagatggtggtgatgatggagagaaatctgctgctcctaacctgaactctgctagaggatatgaagtggtagatacaatcaaaagttcagtggagagtgcatgcagtggggttgtctcctgtgctgatatattagccattgctgccagagattctgttttcctaagtggtggtcctttttggaaggttccgctaggacgaagagatggaacagtctcaaacggaacactggcaactgaggtgcttccagcgccatttgatccattgaataccatcatttcaaagtttactaatatgggccttaatctcactgacgttgtttctttatcaggtgcccatacaattggccgagcaaggtgtacactgtttagcaatagattattcaacttctcaggaacaggtgcaccagacagcacactagaaactggcatgctctctgacctgcaaagtttgtgtcctcaaaaatggagatggaaacgttactacagtccttgatcggaattcctcggatctatttgacagtcactacttcaagaacttgctcagtggaatgggccttctcagttctgaccagattctattttctagtgatgaagctaattcaactactaaacctttagtccagagctatagcaacgatagtggactcttctttggggactttgccaactctatgatcaagatggggaatatcaatattaagactgggactaatggagagattaggaaaaactgcagagtgataaattcttagtaatatgataataacgctttgcaagatatggaataagcagaagattgggtgtcttcctgttatattaggtaatttaggttggtgtttatatatgttactcaaaatggaatttgtaggtggaaatgtgcttttcagatgaatgtgagcaacttaacccaacaaaagataaattaaagatagtatcaacgattccctcgttttatgttatgtgcaccagtttttttctattcagattgttttcttaattccttggcaagttcacaaatttgtataaataataataaatgataagatctagtctatataatttgtatattgtatacactaaattttaagtgatggaacaaagaaaagttgatatattttaaggt

SEQ ID NO: 56519 - DNA, 265 bp, Glycine max
  Clone ID: PAT_MRT3847_22046C.1
aacagtgacgaaaaacacaaaaggtaacgagatgatacagtaataatatatacgatacaacatatatcctacatgcatacagcgacagagaaagtatgtgcttcatatgaaggagtagttcgataatatagccggccatattatggtatatacaccagcactttacatacttaggtgttactcagcgggggatggaaagatacatccgctaaggacttgtagaagaagcggacgatggacagactattaaagcgtttaagcatat

SEQ ID NO: 56520 - DNA, 511 bp, Glycine max
  Clone ID: PAT_MRT3847_22047C.1
cctttcccccccccccctttttcccccttttttttttttttttttttttttttttttttttttaaaaaaaaacaaaaaaggcttttgttttaaatttgcaagggataatcccccttagccttagctgcagattactttttttccccatttaaaccctaaacaaacaaccccaacaaaatattgggatggagggctaaattagtttcattttttgctccagctaatttttccctccttacaaaaaaaacaacttttgttggttgaagccagtctaaaattttccttgggggaaggtgtcccccaacattttgttcaggacacgtaaaaagttttacaataaaactagcggggggggtgccccttttttgtacttttgaaaatccttcacataaaacttcctccacccagttttccacctccttatcccggtctgaaacatattgggctgcaaaaaattggcccatgacttttgtcgtggatctgcaatgcacacttcggatccaaaaatttt

SEQ ID NO: 56521 - DNA, 1025 bp, Glycine max
  Clone ID: PAT_MRT3847_22048C.1
aaaaaaatatgaagttctacacagctatccaatctctctgtatatcagagtgaagcttccgtaagaaaaatctctattgcaaagaccaaagagaggccaccaaaaacacaaccctattccatgcatatgcaagggcaatttctatggacaaaatcagaaaacatgtagggggaaatgaaacagacttgcaaaagcatgcattctacatttctactcttaccactaaccagctacacatgaaaatgatatgtagacagcgtttcagctgtttttgaaagaatcatgaaatagcatattttcccaaatgtgttatgaggctagttcagaacaaggtgccaatttatttatttatttatttatttttgcattttgagaaggcatcactgtagaattctgtcgttttcttggtcaatagtgggtgtgcctttcaacctcagtagctttttcatgaggctaattcagaattttgacgttattagcagattttcccaaatatacactcatttctctgacggagaggctatgcaagctataccctcatttctctggtgtgagcattactttccagttaaaggttccagaaaatagcatactcatcaaactgccacattttgccctcatttctctgatcaaactacttagcttgtgtggcgttgagggcatgcccaacattcaccaaaaacttgcaaaagcctattcatactgtatttgacagctggtccatgtaaaaataaatgttgctgtttctgaattagtgtagcaaattacacccatatttgaagacaaattcatgtttgatttaagaagacttcttttaaaaattccctagtggttatataagaaaaccttaatgtaaaattcttgatactgcactgctataggctcaccaacttttccttgtgtatgcggtcctcatatttctctcaattatataaaatttcaatttactgttgataaagccttttttttttcctctgtgcatttctactttcaaggctttataagcagtagttgattttgtgttc

SEQ ID NO: 56522 - DNA, 124 bp, Glycine max
  Clone ID: PAT_MRT3847_22049C.1
ataaccaaaatttccaaatggattatgctgcccactatccaaacaaacattttaagcgccagaattgctatatttatcaaaagcacccccaaagggtcctaccttagttcaacttaaaacaatt

SEQ ID NO: 56523 - DNA, 1905 bp, Glycine max
  Clone ID: PAT_MRT3847_2204C.1
tccttctcatgtggctggggctctttgttttgtctgttgtcgttatcccagctgcaaccaccaagacaccgcctcctaccaccaaaaatagacctcaattccgacttcagtgagagcacgcaccaggagaagccatggctactcaatccccatcacctcagaacctaggtggtgatattgaacaaacagaacaggtaagtcgggattagcgagcatggcaacccaataaacgcctcctccaactcccaccgccaccgaacataaccaaggttctgaagtggtgcaagcaacaattgtagatcagcaaaatgccagagaagagcctgctaaacagagttcaactacatcagtctttgtgaactcgcaactgatgcgagaagaacaaattcagaatgctgtgaaatttctatcacacccaaaagttagaggttcacctgtcatgtataggcgatcatttctagagaagaagggccttacgaaggaggagattgatgaagcctttcagcgtgttccagattcagctccaactgtgcagacaggtggtgtaaatcaagatgggcaattgaaatcatcatcaaacattcagcaacaagcccaacaacaaactttgcagccgggtttacctgcttctactggtgttaatacttcatcgggaaccttatcacgctccagatttcactggtcccatgcccttattgcagttggattactggctgcttcaggtgctggaacagctataataattaagaattctgttctccctcggttaaaatcttggatacgtaaggttgtcttagacaatgatgatgaacaattaaagaaaactgacaacaaaccgacactgatggaagaagctgcgcaagctgcaaaatcagctgcagctgcagctgcagatgtggcaaaagcaagccaagaaatgctggcttcaaaaggtgaagagaggagatactttgtggaagttgtgagccttttagataaacaagtacaagaaatgaagtcaatgacaaatgccataagaaggttggaagggcaagaagatcttcaaatcagtcaaacaagttcgaagcaactgattgtgaatggaaaagcagactacgacatgagttcagtgagatcttcatccccacctacatctgttgaaccatcaagtggtcttcatccaaaggcatatgcggagataatggccatggtccaaagaggagagaagtcttctaatattaagcatcgggaggttagtcaggtgcaaagcacatctacccagatgcttcagtctcaagtaaatggtgaagacttgaataccaaggccctggatgcccctctattaaatggggatgacccattaccctggtggcagaggaaaaatgtcagaattagagagattgataatgaaaatgagtctaatggagtacccaatggtgctgcatccagtcagcagccaatccaacagccagttcaacgcgtatgggttcctcctcaacctccccccatagctatgccggaggctgcagaagcaatcaggcggccaaagccagcggcccaaaaggaacagatgtctgataatcagtcagtagctcattctttagacggttccgatgatgtacatatggacccaaaactattggaatctgaaggtgcagttgagggaagcagtgtcagctcggttcccacttctagtgagatacaagaggagcatgaagtcaaatatgatgagaaatgaaggtgaatcatgcatgatctatcatgaaaaacatgatttggaataagcttgtcacacaatctgtttcataatcatattagttgtactttgaactggacatcaatacaatatgcaaacgcacgtatctttctatgcaataaatttgtttactaatgtaaaaaggtttaattaaaaactgaacttttact

SEQ ID NO: 56524 - DNA, 437 bp, Glycine max
  Clone ID: PAT_MRT3847_22050C.1
ggctcgagaaaccaaaacaaaaaaggcaaagccatacataaacacacacaaacatagtgagagtgagtgagtgtagtgtagtattgttttgtagctaagcaaaaatgagtttcaccttcaccaccatgaccttgaacttggtcctcttaatggccatggtggccaccaacatcctctccctctaccacctctcctccaccctccaatcccccaaatcccccaaaccacccccacctgtccccgaccaactcctccaccagctccacaccatacgcgccaccatcaaccacctcacgctcctccagaacactaacaacccaactaaaaaatccaccatcccctcagatctactcttatactcccacctctccccaatagcctcctcctgccacaaccaccccgaactccttcacatgtacatgacttacacacctttc

SEQ ID NO: 56525 - DNA, 510 bp, Glycine max
  unsure (1)..(510): unsure at all n locations
  Clone ID: PAT_MRT3847_22051C.1
attttagttcaagtgagaaagtagaaacagagaaaaatggaaatttgaagcgacatgaatcatccaccatagacttgagaagagaatatggaaaagccaacaaagaaagggaagcctttgcaaaaagtgaaaaccataggaaacgaagagatgcatctagttgttcatcttattactctctctcatcaggagattttgggagtgagctggaagttcaggatgagattggtttggaagagtcgtcactggaatatgagaaggatgaagcgaatcatctggaggaacaagtaaaggaagaattcaacaggcaaggggatgactcaaagaagctgcaggctgtttcaaataagcgaagaattgcatttggtgtggatattgattggaacctaaggaacaagtctgaaaagaagctgactgagggaactctgcgaaacactgaatccacaagagaacaacaggacatgcattcaagagaatntaagaacacttgaatctggtcataaaaaatca

SEQ ID NO: 56526 - DNA, 449 bp, Glycine max
  Clone ID: PAT_MRT3847_22052C.1
tccggggtctaagaccaattctcaagtaacccgcttgagagtttcagtatctttcaaattctttacaacaacaaaaatcttttatactttgggatccctcactttttgtgtttgaatctcttgggaattaagacatatcaaactcttattcttaagagatgcatcaccttttttaaagtttagacaaagaatataaaaattcactctttgatttagagaaattgttacaaattgaagtactagaaggtttctcaataataagtgtatttgaccttgatgaatgaaaatgattattaacaagatcttttcaaaagtttctcatttatgtaaacgtgttaaaatgataaatatttataggcaaaatctgtgtaaaccgttaggggtcattcccaaattgtgtaacttttcaaaaacacactttttggtgcaatttcaaatttctcatttac

SEQ ID NO: 56527 - DNA, 176 bp, Glycine max
  Clone ID: PAT_MRT3847_22053C.1
acgcgtccgcccacgcgaccaagaactcttgcacgcgcatttatccaaccacgaataagccaaaaatacctgggtgcactacaacggctaacaatcctcctctaacagtcaataacgcaccataactaactcctacccttcatatgccaaaccggacctcatcgaccccaagacac

SEQ ID NO: 56528 - DNA, 247 bp, Glycine max
  Clone ID: PAT_MRT3847_22054C.1
tcaaagttctttttttgcatctccgactcttcatcctcgctactactaccaatcccctccaccaccagagacgctttcgctattttaccgctatgggagccctccaccaccttctctttctccccctcccccataccaggacgagtcacgcacctcctccttccgcatgtcccgctcccaatgacatttacaaatcacctccacctccagtttactatatgcttccccacctccacctatctacaaa

SEQ ID NO: 56529 - DNA, 1140 bp, Glycine max
  Clone ID: PAT_MRT3847_22055C.1
tcggtcgcgagaagaccacagaaggggaggggagatcagaaccaaaatggccaatcctagtagccctggatttaacctgtatcggctcgttctcctaggcgagaccactatatctaaagaaaagagtgaagattaatgtgagtgcaattttgagtggaaaccaagatggccaatttttcaagtcactacggaatgttggtgtctctcttgcttacgttgatccaaatccaagccaaggtgttttgctaccaatacaaagttggagatctagatgcttgggggataccctcctcagcaaatccacaagtctacacaaaatggtccaaatatcacaatctcacaattggagactcccttttgtttctatacccaccaagtcaagattcagtgattcaagttacagaggaatcctacaagaggtgcaacattaaagacccgatattgtacatgaacaatggcaactctttgtttaacattacatcaaagggccaattcttcttcactagtggtgagcctggccattgccaaaaaaatcaaaagcttcatatatctgttggtgaaggaataatagaaactatggatacagcacctggtccaagttcgtcattgcctgcatctgcaccctcctatcccacagtatttggcaatattccagtagctccttcaacctcaacctcacctcaactcacatcaacttttcaacttctcatcattggatttatgatatgtgcgcacttcgcttccttaatgtgaaattaaaatgtccatgtctttgttgccatcgagagcgtagatcaattgactcaagattattcaagcttaattggtaatgttgaggtggaattttggaaatgcatatatgtcaaagagaaaactttatcaagcatcatgatctacttgattcgaacaagatagatacactgtctttacctaaaaaaatgtccatgtcttttattttttcttgcattttttgtcaatgctcaatacgtctccatgttgattttttttttctttttcagttgacccgaatacgggcgtacccagtacctatatattatattataattcttttagcaatgtaattctttgtgattggagatttccgtaaaacagcgtcaattcttcatttattaaggaggg

SEQ ID NO: 56530 - DNA, 301 bp, Glycine max
  Clone ID: PAT_MRT3847_22056C.1
gggagacccacgcgtacgcacgcgtgcgaacagatgagagagggaacactggggtctgcttatatacactcatatggggaactatggggagccaatgatgatacagcccacgtgtatacttatttgcttgagaaagtagttgacaactctattactgtgagacaccatgaggttgctcaataccaacgagcaaatggcctactatgctaggaggacaatttataaaatctaacccttgagagctcagacagaattggaatactattaaatgcatgcctttgatttacactataaaacaaaa

SEQ ID NO: 56531 - DNA, 149 bp, Glycine max
  Clone ID: PAT_MRT3847_22057C.1
ctgatgcacaattattggataaagtatgagtttaattttcatgtttaaagatatttacactcaaaaccagtcagaaataacccataagacagatgttcctgagttgttgcttgtgtcattctccaatcataattttaccttgataaaca

SEQ ID NO: 56532 - DNA, 194 bp, Glycine max
  Clone ID: PAT_MRT3847_22058C.1
ttcggctctagagcaccacttcctcactctcactccctcaattcacaatcctcacgttgcgtcggtcacatgatactcctctcgcactccgtgtcctagctctatcactgaatcactcatccttataataaataaataattactcgaagaaggagtaagacggtctcgacgatgtagacgttgtagaagaagaa

SEQ ID NO: 56533 - DNA, 2562 bp, Glycine max
  unsure (1)..(2562): unsure at all n locations
  Clone ID: PAT_MRT3847_22059C.1
gctgaagatgtcatatcagagcaccttttgaccttcaaggacattaacggactagttgagcagaatgttcaacttagaagccttgtacgtagtatttctggccatattgaaaatcaggaagtggagttcaaggagaagcttgaaatggaactcaaaaaacatactgaagaatctgcttctaaagttgcagctgttctgcagagagcagaagagcaaggtcacatgattgaagcgcttcatgcatctgttgcgatgtataagaggttgtatgaggaggagcataatcttcatttatctcatacccattcctcagaagctcttgcagctgttgcggcagttggaagaaacaacattaagacttcaattgaaagttcacaggaggctgctaagaagtccctggaaaaagctgctgagcgtgtgagatgccttgaggatgatttagcaaagtctaggagtgagattattgtattacgatcagaacgtgacaagagtgcacttgaagcaaattttgctagagagaaacttaatgacattatgaaagaatttgaacatcagaaaactgaagcaaaaggcattttagaaagaaatattgagttttctcagctggttgttgactaccaacgaaaattgcgtgaaagcactgagtcattgattgctgctgaggagctttcgcggaaactttctatggagctgtcagttttaaagcaagaaaaggaagtcatatcaaatgctgaaaaaagggcatccgatgaagttcacagtttgtctgcaagggtgcagcgtttgcaggctagtttgagtaccatacagagtactgaggaagttcgagaggaagcaagagctgcagagagggttaagcaagaagaatatataaagaaattggagagggaatgggctgaggccaagcaagagttaaatgaagagcgggaaaatgtgcggagattcacatcagatcgggaccaaaccctaaaaaattctttgagacaggttgaggatatgagcaaagagttagctaatgcattgcgtgcagttgcatctgctgaatcaagggctgctgttgctgaggcaaaactctctggtcttcaaagaaagatgggttccacagatgacaagcttgttgaaataggtggagtgagtggatcttccactttgtcaagtgatgaggttgttgctgaattgcaaaaggcaaaagacgagattgaaaagtggaaagaggaagcgcatgccaacaaagctcacatgctgcagtataagagcattgctgaggtgaatgaagatgcattgaaaaagatagaaaaggcgcatgagaagtttaaaacagaggctgacaatggaaagaaagttttggaatctgaacttaactcacttagagagaagatgttagagattgaaaatgaatcttctttgaaatatgaagaagttgcttctgaaactgttggaaaggaagaggctcttacatctgctatggctgaaatcacaaatcttaaagaagaaattttaaccaaatcttctcaaatttcagcaatggaaattcagatctcaggtttaaaagaaaacctggacagggagcatcagaaatggcgggcaactcaaaccaattatgaaagacaggttgttctccagtccgaaactattcaggagttgacaaaaacatctgaagcactagccttgctgcaggaggaggcatctgaattacggaaactagccaatactcagaaaattgaaaataatgaactaaagactaagtgggaagatgagaaggcacaactagaaaagtctaggaatgatgctgagaagaaatacaatgaaatcaatgaacagaataaaatactacatagccaacttgaggcttttcatattcaatgggccgagaaggagcgtaatgctgctggtatttcatctggaagtagtagtgcagatgcctttggtgatgctggtccggctcgagtgattaattatctcagacgttccaaagaaattgcagaaacagaagtttcattgttaaaacaagagaagctgcgactacagtcacagcatgagagtgctttgaaggcagcagagtctgcacatgcatcactagaaactgagcgtgcaaaatcaagatcatttttgtttaccgaagaggagttcaaagcattgcagcttcaggtcagagaaatgaacttacttcgtgagagtaacatgcagctcagggaagaaaataaacacaattttgaggaatgtcagaaattgcgtgaactggcacaaaaggttagagctgagacagagaacctagagaatctcctgaaggaaagagaaattaagcttgatggccatacgaaagaaattgaaaccctaaaaatggaaaaagatcatctcaataagaaggttactgagctgcttgaaaggagtaaaaatgttgatgttgaggattatgatcgagtgaagaaacttgctaaagagatccaggatanactaagagagagggatgctcggattgaggaaattggtaaaagtctatcagaaaagcaggattctggtttcatcctagagaaagatctttcaactgccgattggagcttg

SEQ ID NO: 56534 - DNA, 362 bp, Glycine max
  Clone ID: PAT_MRT3847_2205C.1
aaaagattgagacaagcgacttcaagagtaacttggtaaagttagtcaatttgataattctgttgatattaaatttcaatgatccaatcattatattagaagtttttatagaatagataatgtctacaaattttataaaaaaaaaaaaaaaaaatgtttgatacttcatatataaaataaattcaatttaaaattgataaaaaaaatttaaaaaaaattaaatgattataaagtataagattacctaaggagtaaactctcaactatgtctatgaatatgacaaacattgctactttagatattgcatttaaggggggaaaaaaacactcttaaacgtggttatttaattttttttagttag

SEQ ID NO: 56535 - DNA, 1458 bp, Glycine max
  Clone ID: PAT_MRT3847_22060C.1
atgccttctactactcttcaatggctaagccttgttggcatcatttggctccaagccataattggcacaaacactaatttccctacttactcttctcaactgaagcaacttctatctatttcccaagttcaactcaataaccttgcttttgcctctgatgcaggcaagctttttggctggttttctggccttgcttctatatacctccccctttggttagtcctcttgattggttcaactcttgggttagttggttatggtgtgcaatatctctacataaccaaccaaatctcctctttgtcctattggcatgtgttcttgctaacttttcttgctggcaatagcatttgttggataaacacagtgtgctatgttgtcaccataaggaacttcttttctgatcgcgaagttgccgtgggaatgacaactagctaccaaggactaagtgcaaagatttatgccaacattgttgatgctgtttctcctcacaagaaggctagtgcctttatcttccttaactctctcttacctgtgatagttggtttaatagcagctcctctagtcagagaaattgatgaagaagtcacaagtcctaagcacacgcgtgttggttttggtgtgatgtttgttattaccatttcaactggaatatatgctgtgttgagcagcttgcagtttgtcacaagcaaagtatcctcactaggcaccttggttggtattctagtgacccttctcttgcctctactagtccctctttcagtgaagatcaaggagcttcaggaaaacacagaaaaagtgagaatctaccattttactatggaggagaatactactagtgaagagagggtggagaatgaggtgaaagagggtgaagttcaagaagaggttgttggtttagtatatcttaataacttgggacaaatagctgaatccaggggttgctctaatatttcatctttggtgtctttgtcatcatcgtttgggttctttggccgtctcatgccatctcttatgtactacttctacaggggaaaatgtagaatttcaagacctgcttctatgttggcagcgatggttccaatgtcaggtgcatttttcttacttctcaacaaaacagacattgtcctctacaccagcactgcagtgattggagtgtgtactggagcaatcacttccattgctgtttccacaactactgagctatttggtactaatcatttctcagtgaatcataatgtggtggtggccaacattcctattggatcccttatatttggctactcagctgcacttatttaccgtaaggaagggcatgaacatgatgagcatgtgaaatgcatgggcatggaatgctacagaaacacttttatcatgtggggttccttttgtttccttggaactcttttggctttgattctacatgctaggactcgcaagtttttctcacaaaaacaatag

SEQ ID NO: 56536 - DNA, 1283 bp, Glycine max
  Clone ID: PAT_MRT3847_22061C.1
ctcgagccgaatcggctcgagcggctcgagagcattttcactagcattgcacaagttctagtggccgcttatagaaaacgaaaagttgagctaccacgtgagaagcatgttgatggggttttctatgatcctccacttattgggacaaacgttttgtcaaagctaccactgaccaaccaatttaggggtttgaataaagcagctgtaataatggagggggagctaaaccctgataggagtagagcaaataagtggaaacttgtcagcatccaacaagtggaagaggttaaatgcttggcaaggattttcccaatttgggctgctgggatcctaggttttacttccatggcacaacaaggaacatttactgtgtcacaagccttgaaaatggacagacaccttggaccaaaattccaaatcccagccggttcacttggggtcatatcattcatcaccataggtgggtgggttccattctatgacagaatcatggtgccaacactaaggagagtcactaagcatgagggggggatcacactccttcagagaattggaattggcatggtgttctccatcttatccatggttgttgctgcattggtggaaaaagtgagaagagatttggcaaatgcaaatccaagcccacttggaattgcccccatgtcagtcctgtggctggtcccacaactagtcctgatgggcctgtgtgaggcattcaatgtgattggacaaattgagttcttcaacaggcaattccctgatcatatgagaagcattgccaatgcattgttctcttgctcttttgctggggctagctatgttagcagtgcactagtcaccactgttcatcatgtcactagaacacatagccacccagattggttgacaaatgatataaatgctggaaggcttgattatttttactatctggtagcaggaactggagtcctcaacttggtttattttctgattgtggctcaaagatatcattacaagggaagtggtgacctccaagataatgctcaagatgtggagttagcttcaaaaggaaagagttagattactatagtgctaagaatgaagattctaaataaataagaataagaggaagaaaaaataatttacatattatatatatatatatatatatatatatatatatatatatatatattatatctttttttcgaaagttgtactatgtaattaacgtgtttggaaaaatgttgagaagtaaaaaattacatttcagatataataattatagtttatgtttgatttca

SEQ ID NO: 56537 - DNA, 1545 bp, Glycine max
  Clone ID: PAT_MRT3847_22062C.1
atgccttctactactcttcaatggctaagccttgttggcatcatttggctccaagccataattggcacaaacactaatttccctacttactcttctcaactgaagcaacttctatctatttcccaagttcaactcaataaccttgcttttgcctctgatgcaggcaagctttttggctggttttctggccttgcttctatatacctccccctttggttagtcctcttgattggttcaactcttgggttagttggttatggtgtgcaatatctctacataaccaaccaaatctcctctttgtcctattggcatgtgttcttgctaacttttcttgctggcaatagcatttgttggataaacacagtgtgctatgttgtcaccataaggaacttcttttctgatcgcgaagttgccgtgggaatgacaactagctaccaaggactaagtgcaaagatttatgccaacattgttgatgctgtttctcctcacaagaaggctagtgcctttatcttccttaactctctcttacctgtgatagttggtttaatagcagctcctctagtcagagaaattgatgaagaagtcacaagtcctaagcacacgcgtgttggttttggtgtgatgtttgttattaccatttcaactggaatatatgctgtgttgagcagcttgcagtttgtcacaagcaaagtatcctcactaggcaccttggttggtattctagtgacccttctcttgcctctactagtccctctttcagtgaagatcaaggagcttcaggaaaacacagaaaaagtgagaatctaccattttactatggaggagaatactactagtgaagagagggtggagaatgaggtgaaagagggtgaagttcaagaagaggttggtattatagaagaagttggagtgaagttgatgctgagaagaataaatttctggttatatttctttgtctatttttttggtgcaacagttggtttagtatatcttaataacttgggacaaatagctgaatccaggggttgctctaatatttcatctttggtgtctttgtcatcatcgtttgggttctttggccgtctcatgccatctcttatgtactacttctacaggggaaaatgtagaatttcaagacctgcttctatgttggcagcgatggttccaatgtcaggtgcatttttcttacttctcaacaaaacagacattgtcctctacaccagcactgcagtgattggagtgtgtactggagcaatcacttccattgctgtttccacaactactgagctatttggtactaatcatttctcagtgaatcataatgtggtggtggccaacattcctattggatcccttatatttggctactcagctgcacttatttaccgtaaggaagggcatgaacatgatgagcatgtgaaatgcatgggcatggaatgctacagaaacacttttatcatgtggggttccttttgtttccttggaactcttttggctttgattctacatgctaggactcgcaagtttttctcacaaaaacaatag

SEQ ID NO: 56538 - DNA, 136 bp, Glycine max
  Clone ID: PAT_MRT3847_22063C.1
tcgggttccttaatgtcaaaatttcaccatttgaccgaattctgatcgcccaaatgacatggtgcgtttaatggctgtattttgtgaatatttgacattaaggaactgaacttgggttttaaaagggtacactggt

SEQ ID NO: 56539 - DNA, 641 bp, Glycine max
  Clone ID: PAT_MRT3847_22064C.1
aaaaaaaaaaaaaaaaaaaaaaaaaaaaaaaaaaaaaaaaaaaaaaaaaaaaaccaaaaaaaaaaaaaaaaaaaaaaaaaaaaaaaaaaaaaaaaaaaaaaaaaaaaaaaaaaaaaaaaaaaaaaaaaggggggggccgtttaaaagaaccaaagttaacttccccgggcaggaaacgtaaaacttttttaaaagggcccccaaaatcaaatcaagggcccggggttaaaaaacgcgggaacgggaaaaacccgggggtacccaaaataaatcgcctggaaaaaaatccccttttccccagggggggaaaaagaaaaaaggccccacccaatcccctttccaaaaattggcccacttaaagggaaaagggaaccccccctgaaccggcaaataaaccccggggggggggggggtacccccaaggggaacggtaaaattggcaagccccaaagcccccgtccttttggttttttccctttcttttttggccacgtccccgggtttcccccgaaaagcttaaaaggggggccccccttaggggtcccaatatagggcttaacggcccttaaccccaaaaaaattgaaaaagggggaatgggtcaaccgaaaggggccaaccccccaaaaaaaagggttttttc

SEQ ID NO: 56540 - DNA, 244 bp, Glycine max
  Clone ID: PAT_MRT3847_22065C.1
ggctcgagcactatcatacatggggcatacttgttttctaggtcggatctagatatgggacctggggccgtcaggataaacgtgatcacacattgcattgcctatcattcggcctatttggcaagctaatgtctttctggcgcctgcgtcttcttgtcttggcttgcctttatttggagcgcgacgttgagctcttccaccccaccttaattgcggccacaactgctgactccgctgaccagga

SEQ ID NO: 56541 - DNA, 261 bp, Glycine max
  Clone ID: PAT_MRT3847_22066C.1
gcgaaagaaaccagcttagctatatcatctatggggggacatatgacctggggcgcttaccgaaaattgattccctgaccctaaaaaaagacatgtgtggtgtttttctttttaaaacaaagccttcattccccaaatgtcatggaaaatatctgtcccgatctctaacataatactgacatacttattgtgctggcacatgatttgtgcacaccacctccggcggaccttggaatgttacatactacctgtgggcgccca

SEQ ID NO: 56542 - DNA, 430 bp, Glycine max
  Clone ID: PAT_MRT3847_22067C.1
aacctttgggctgatttatgtgcttgcatggtcgtgagaagatgatagaaggggatcccttcgaactccgagttccctccatcccgaccccgaatcttccaacgaagtacgcgtccctatcttctaatttatttgaaaacgtttcctaaccctacgtaaccctccccggtcgccgagtccttacgtcttaactcaaagtcatatagacacagacctcttacgtcccgccaagaagcatccgagaacccgaagtatagccaaagtattaatccgtccagtcctcctattgagaacgtactccggttcgcggcccaaagtctcgagtcgccttacgaacttctgcgtcctactcccgtccttccctgggaaaacacgaaggacggtagaggccatcccgaacctaggcgctaacactccacattacataatt

SEQ ID NO: 56543 - DNA, 405 bp, Glycine max
  Clone ID: PAT_MRT3847_22068C.1
aaaaacgggaagccaagactggttcccagggcatatatagcatatgagataatccttatggtcatgaaacaggaaattcccctgaaaacgaggtttcttgagttttacacaaaggcttccctattaaaacctatctatagctctatgctgcattggctccaagataaattaactccacttatgccttatggaggatggttatatggctggggatccctttaccaacaccacgatcacagctcttggatctttatttacatgaaaagggatataaaggtgctgagaatactcccggcatggaaggcaggtctgctaatgtcccaagggtcatagggctttcagcttgatgctgaaatgcatattgactgagcgaagacgtcaatggggacgcagtccaaggtttat

SEQ ID NO: 56544 - DNA, 324 bp, Glycine max
  Clone ID: PAT_MRT3847_22069C.1
ttttttttttttttttttccttccaaaacatacgtcattagtggccccttaaagtatttctaaatctttctaggatggataaaagtctatttagatttaagaccaataaatatcattggccattggactaaatcacagaaaatacaggttaaattggcctggatataaaatttctacaaagactaacaatttcaaagtctatgcaataagtttacctttaaaattggaggggttggggggcttatttttttaacccatcaaaagagttaacaatatcaatttttatcattatttaaaagtcctaatatattacgatcctaaggg

SEQ ID NO: 56545 - DNA, 354 bp, Glycine max
  Clone ID: PAT_MRT3847_2206C.1
tacggctcgagaagaccaccgaaggggaaaaaaagagacttgaggcagatgaaacaaatggtcgattgaaggtttctctcgcgatgatcttcattttggtcatctacagattgttcggtcgcttcttctaccacgacaacttttaggacattgatgtatctgaattattatgctcttttctccttctcttataggtattttttattcctttatttttcctttctagattatgtcacttaatctattatcaaatttatctataatccttaaaaaatttttactggctcttaattttgtctttttcttgttttctaaattttttcctttacttttttcttttctttttctttcatg

SEQ ID NO: 56546 - DNA, 456 bp, Glycine max
  Clone ID: PAT_MRT3847_22070C.1
gggggcccaaaattagcggcaaaattccaagggtgaaaaaaaatttaaaattttaaagtttctgaaaaggttggaaaaaaaaggcaaaccttttttttttaaaaatttaaaattttaaaaacctcccgggaaaaaaaaaaaaaaaaaccggcctcaaaaagggttacaactttgggcacaccacccaagaaaaaaaaaaacctccgtctgtggatttggggaaaccacgggttttggaatccatatattttttaaaaaaaacagccccgggggttcacccagaaatatggggccggaacctgggggggcaccattttttcctatagggaggccaattaaaggttggcgaaaaatggggcaaaactgtttcttgggggaaaatgttttccccctaaaattcgccaaaaaaatccagccggaaacataaaggtgaaagcccggggggcctaagggggg

SEQ ID NO: 56547 - DNA, 257 bp, Glycine max
  Clone ID: PAT_MRT3847_22071C.1
gttgatatatagtagtgttggatgttgttggggtaatggggtttgatgttataaagtatgatgttagaatgttgagttagatgttagaatcttctaattctgaattgaaagtttgaattcccagttgtgtttggtatgagtggaagtgagattgaatatgaataaggtaagtgtttggagaatctgaagctggcattgttgcattagaccttgtttggaatttggatgagtttctcgataagcacttacaggaaaag

SEQ ID NO: 56548 - DNA, 152 bp, Glycine max
  Clone ID: PAT_MRT3847_22072C.1
aggatgcccatctctatcccttccttttgtctcaaacacatattctttctgagaggtatggaattctttctaaatctagcatggacctcaaaaccacactgacggaggaggtcgaaacaatggcactgtcatgattggtgctaacgtgacca

SEQ ID NO: 56549 - DNA, 293 bp, Glycine max
  Clone ID: PAT_MRT3847_22073C.1
gggggggaaaaaaatgtttaaaaaaattcaaatccttagggggcgtggttttgccaatgatttttttgaaccggaaacaaaaggccggggtttttaaaactttttttttaggaatcccaatccagcccaaaaaacaactggcggttccttaaccaatcaagtgggaatcccaaagatgggggtgaaaaccccgttttggggtttttttgagcccgcccctttttgatttttttttgcaaccaaccggacccgggggcggacccggggggccccccggggatccatgcccggta

SEQ ID NO: 56550 - DNA, 336 bp, Glycine max
  unsure (1)..(336): unsure at all n locations
  Clone ID: PAT_MRT3847_22074C.1
gcgtgnnnggnagcnaacacnncnggagntnncaccaanaaaangtanntgcacncacgcgtacgtcngcncnganttcggctcgaggaagagntgcctctgcaaacgnggcnncnngnnanagcgtgnccatatntnngnctcncnnccgnnancnanangcaangagctcanccnnanggngtgnnnncncttgtnggccgncgtgttcggtntcccanttacanttganganggntgnntcnanccnaggggggncgnttncngcggaggntcgaggaccngtggacagngcggnnnnnggcncgcnntnnccgtngncccaagngngnntnc

SEQ ID NO: 56551 - DNA, 350 bp, Glycine max
  Clone ID: PAT_MRT3847_22075C.1
ggctcgagctcgaccttaaatcctacaccgccattgttccggggaagctgtcgttcgacgtgtgggacgtgaggggggaggaggttaggggtgcgcttaggattctcgcgacggctaaggttccggcgaaggctacttagcgtgcaccaccgtgttgcaggtgtcttccctatgtcacgctggtgaggattgacttgcatgactttggtcccttcaatatgtattcccagggcacccctatctccaactgtgcgcatgtcttttgtgccgccgtctacccgattacccttacgatccctatacattgaaccctaaatgctgttaattattgccctctgtttacccttgca

SEQ ID NO: 56552 - DNA, 421 bp, Glycine max
  Clone ID: PAT_MRT3847_22076C.1
aaaacaggaaccaaaatctcaaggaaattaaaaatctttcatcaaaaaaaaaaacttctgaacgggtcaaactggtctcatgaccactgaaaaaacatagttcgcatacaatccattttatcccccgcagaaaaaaaaatggggccccccccccaagatgggccgcaacaaagggccctttttgaaagcttcaacaagtttaagctttaattatgggggtcccccgccccccccccggggtttggatccctaatttcccaacaaagacatacccacttagttggcccccctcccccccaaaaaaggaagggctggggggccccctttttaacaaaccccttgggaaccctttggcgcattcccgggaagaaagggtgggtgtttttgtttgaaaaccaatacttgcccctaggcttttttt

SEQ ID NO: 56553 - DNA, 435 bp, Glycine max
  Clone ID: PAT_MRT3847_22077C.1
acggctgcgagaagacgacagaaggggctcaccaaatatcatgaaaaaatttagcagtaaaagaggctggctggtccatgcatctctctaggtaaatgtggagtggccaagaaattatgttaagatgattgtaagtttttattagtgccgaagaatctgattccaccaaaggctatcccaactcttctcctttgttgcttccaacactaaaaggactgtaagagcttattataatttaaaaataaatacaatcatatttaccctcttcagaataaagtcgtttcaatcttttcactctacttttagtgaactatctacttgaaggagtttgattcaggtgtgcgtagtcgaactcatcttcctccaagcatgtgatcactctcggaaaaaaatactctccattgctgggaaaaaaatatttactaggaattaaac

SEQ ID NO: 56554 - DNA, 1017 bp, Glycine max
  Clone ID: PAT_MRT3847_22078C.1
ggctcgaggttttgggcagatgcaagatcaaggacttcttacagtcattttggtgatgcagttactctggacacaacatacagaataaatcaatatggagtgccatttgctccattcactggggtaaaccatcatggtcagatgattttgtttggctgtgcacttcttttggatgattctgaagcttcttttgtgtggctttttaagacatttctgacagcgatgaatgaccgataccctgtctctatcactactgatcaagacagagccatacagacagccgtttcacaagtttttcctcaaacacgccactgtataagcaaatggcatgtcttgcgagaaggccatgaaaaggtggctcatgtatgcaacatgcatccaaattttcagattgaactttataattgtattaatctgacggaaaccattgaggagtttgattcatcttggaattttatcatcaataaatatgaactcacgaaaaatgattggcttcagtccttgtacagtgctcgtgctcaatgggttccagcatattttcgtgattcattttttgcagcaatatctcctaatcaaggatttgatggttcttttttttatggttttgtcaaccaccagacaacattaccactgttctttaggcagtatgaacaagctttggagtgctggtttgaaaaagaattagaatcagattatgatactatttgtacaacccctgttctgaagacaccttccccgatggagaagcaggctgcgaatctctatacgcggaaaatattttcaaagtttcaagaagagctagttgaaacttttgcttatactgccaacagaattgaagaagatggagaaaatagcatattcagggttgcaaaatttgaggatgaccaaaaggcatatgttgtcacattaaacctttctgagttgagagctaactgtagttgccaaatgtttgagtattcaggcattctttgtagacatgttctaactgtttttactgtgactaatgtacttacatta

SEQ ID NO: 56555 - DNA, 814 bp, Glycine max
  Clone ID: PAT_MRT3847_22079C.1
ccacgcgtccgggctggtgaagatagggttcatgttgtgctttctgaaaacagggtggctgttattgggattatgatggttttagtggaccagatgcacctgattttctgatgagtcatctttataagttcatagacaaggaattagaaggattgctctgggattatgaggataatcccgttgatccacttaaacctgaagtccttgaaaatggaaatgatgtagttgctctagaatgtgatagggaggaaatgtcagatgctcatagcatttcaaatgaagaaagttcttgctgtttagaaaattcttgtcccataatggtcaaggatcaatcatctaatagtgagatagtggaggtaaatgctgaagttaaggtaaatattgaacagaaaaattgtggaagtcccagtattgtacatactgttcctgcatctgttccaattggacaattgagtggtcaaggcagaagaagtgtgcgactttatgagctacttcagatggaatcttggaatgaacaggtgtcagaacaaggcaaggattctgtggttcctgcggaaatagcacaagagaggcagatgagattctgctcacctgatggtaaagaggatagatctagacatccagatgaaggtcccactacttcgggggaaaatggaggtgctgggtttaattcgacctaccaggagccaatagcttctttttccgttttaggacaaaggcagaattcaagaaagccattcattggtacaaaaatcacaaaaatgttcaggaagcagaagttcttgcgtaagaaactttttccttggagttatga

SEQ ID NO: 56556 - DNA, 648 bp, Glycine max
  unsure (1)..(648): unsure at all n locations
  Clone ID: PAT_MRT3847_2207C.1
ctcccttatgttcaatctgccaacacaaggctcctgtttttggaaaacctcccagatggttcagctatgctgaattggagcttgccacaggtgttacggctgcgagaagacgacagaagggggaggatttggatctgttcacagagggcttctgccagatggacaagtcattgctgtcaagcaacataaattggctagttctcagggtgatctagaattctgctcagaggtagaagtcctgagctgtgctcagcaccgaaatgttgttatgttgattgggttctgtatagaggataaaagaaggctattggtatatgagtacatatgtaatggatcattggattctcatttatatgggagacagccagaaccattagaatggtctgcccggcaaaaaattgctgttggagctgctcgagggttgcgatatcttcatgaagagtgcagagtgggttgcattatccatcgtgacatgcggcctaacaacattcttatcactcatgattttgaaccactggtggtggatttggacttgcaacgtggcagcccgatggtgacacaagagtggaagctaagagtattggaccgtgggggtagtcgcttcagaatgtgctgagggcgccgagatactganaaggctgtggtaat

SEQ ID NO: 56557 - DNA, 523 bp, Glycine max
  Clone ID: PAT_MRT3847_22080C.1
ctgctggggggtcctctgggccgtgccttttcggcaggacgattggtcggttctccgggtccagccaccttccgccctccgtcccccgttccccagctggtccccctttgccgagctcgcattcctggggggagatcgcgtccacccagggccctcgggccgacccagttcccactctcccgttttgggcttctgtcttcccttgcctgcctctcgctctgctccgttcggcctcctcctctggctagcttttccctcacctgttctgtgcctggtttgattccctactttcgggctcccgtcctgccttgccctccgcccgatctgtgcagtacctctccttctcggtcgccaggcacatttttgcttcagtaatgtgcatagtttgatacccaactaacaaacacacaaccttccattgtctcagcccaatttgagtattaacagtccttcattgtcatcaggtactacataatttttttatgcataaaaaattattattaagcatgtacatcggtgttaa

SEQ ID NO: 56558 - DNA, 578 bp, Glycine max
  unsure (1)..(578): unsure at all n locations
  Clone ID: PAT_MRT3847_22081C.1
ccacgcgtccggcgctaagcgtgtgttgtgctaagcaagagtatacgctcggtctgtcttactcgttaaacgaattttataattcttccaatttttctttaagaatttttcttctaatttttgtatcaatttttcttcaaaacacttgaaatcttcttcttttaacttctgctaataaaaaattataaaaatattaatttctttattattttattaaaaacaacaataaagtaaagtaattacaatcattcttagttaaaattgactattaaattatctcgtatttcacaattattagttatattatgagtttatctttttacattattaatcaatcataaaatattattagtatgaaattttgaaataattattttaaaattttataaattcatgtacttttttagtttgtcatggtagttgaatgatagttgaatgatagtgcaaaagtttttagatattgagtccatatactattacttcttatagtatttaggtaatattttcttatcgcaattnttataatattattagttattttcttcctgggtcttttaagatattataaaagatttata

SEQ ID NO: 56559 - DNA, 429 bp, Glycine max
  Clone ID: PAT_MRT3847_22082C.1
attttaatgcactgctgagttttcctagaccctagtgtttctttcagagtggaaacataacgactgggcattagcaagttgacgcattagaaagaaaataaaactaagttgtgttattatacttagaaaatgatgctttatttattttagaattaaattttcttatgttttcttcagttagtgctttgcttatcatagtttgttggcttacaggaaaacaatggtagtgtgtttgtataaaatttcttggggattcattcatttggatctgtcttggactaatagtaatattgattgttacagattctgtcaagctagctagctacctataattttggctttctgttcttagctgtgtttgtattggccaggttcagttctcatttcaacttacctaacttgaaaattgtcgtttatattggccttatt

SEQ ID NO: 56560 - DNA, 611 bp, Glycine max
  Clone ID: PAT_MRT3847_22083C.1
ctctctctctctctctctctctctctgattctagtcctttaattaatacggtctttctgtatcttgatatgtacatgcatgagataaattgaaaaacagaaaactcgtttaacctataattctttcacacataaattcctctgcaaattctctgtaaccaataaaatttctgggtgtcttttattattttgattcataacttgatctatctgtaatctagtctttattgggcgaacgagtgaattttggttgataagctcttcaaactttggtttgaattcgttcagaggtcctatcggtaggctatttgttattttgggcgtttgagcgtctgtccgttgcttagcccccctttctttgtttcgtttcctttcagtgatcgcatcgattggctgtctcgatcggcttttgcgcgagtcttctcgccatttctttgaccccgtgcgtcttcgtttacattagatgcatctttttgtgtccctgaatatttgtctcttaatttctttttcaatttgccaccatattatgttgtgtctatagtctctgaactctgattgctgattagattcagtatgtgattgggcgagtgtttgtgaaattgattctggttt

SEQ ID NO: 56561 - DNA, 1079 bp, Glycine max
  Clone ID: PAT_MRT3847_22084C.1
ttttgtaaatagcgccttagtactttgcaggctgatggaatatctatgttcgaaaattctgccatgcgaagtcattggtcacttgagttatgtcaattgcaatgttaaggcatagttttcatcaccaattactaatgatttaatcccttaaagaaaaatttacggacgcgtgggcggacgcgtggggaacaagggaagagacgaaggaaaatggtgtagcaacgactcgtgaagtgtgaaagatcaagtacgtgaacatctcaggtttgttgttcggtagtacatcacagcagtgcagagtgatcatcatttggttctgaagaaataacaatgggaatgggtgagactcccccacatcaacctgcacctgtgcctccaactgggttgctcatgaagcgctgcaagttcatttggcgccttcttttgctctctaatctcgcgcttggaggtcccttcttgtctctttctgcatccatcattatgctctctttctttctttctttattcactgtgagcataaggtcgttttcaaaaaatatgaccagtctgttacatttctttcttgagtgtttgcctttcatgtgttcgacacattgcctaacacaactaacttggctttgaatttcaaacaagatgccctcattgcacgtgcacagcacatgcttttcttttccctcaactccttggtatatgataataacattcaaataatttgaagggcatctttgattggaacagcctgttgagaaccttgattgctataggcggacgctgagtgattccctgtatcgcgacggtggcaacggcgaaccactgcacgactacgtactgagtgtccggcacatgatgacatgctggcgatggcggcggcaacttctacaatctgcgacggcaacgtggttctggtttttttttgttctttttttgttgctgttctttttttttctgtttgacaccctttttttatttttggttctgttttttttttgttctgttcagccctcttctaaatgtttttttttctgttttatcatggttaattttgaggcgtttggtggagaagagggagagggagatgc

SEQ ID NO: 56562 - DNA, 398 bp, Glycine max
  unsure (1)..(398): unsure at all n locations
  Clone ID: PAT_MRT3847_22085C.1
caagaaggctttcccgtcatcactgtatgacgtcctccttctttgggggggggggggggttaaagtgagccttgggttaggagtgtgacagcatcggaaaagagacgaataagcgcagagagaagaagaggttcaattaaaggaaaaaaaaaaaaccaaaaaaactcacttacggaatgttaactacagctgattcgcacgcggtggtttagttaattaacgtaaagtttgttcggtgtggtgtcatttgaaggttcagtggatcgatgtcggtagatcatcgtagactgtggtgagacgcgtattgaaaggtaaggtatgccttcgtcggggataatggtgcgatcgccaaaatttccntcggatttaatggaagtcttgcgtaatatagtttttgg

SEQ ID NO: 56563 - DNA, 211 bp, Glycine max
  Clone ID: PAT_MRT3847_22086C.1
attcacgcgttcgattcttgcataattgatatggagacatgataatggatgactcaaatgcgagtgtggcacattgtccacaggtaattgtgtaaaaaatcgttaatatattgatgaatgccaagagaatatggcttgtcagtgcccttaatgttgcttcaataatacctttagcttctacgactgcacatctaatctacatcttcacctt

SEQ ID NO: 56564 - DNA, 440 bp, Glycine max
  Clone ID: PAT_MRT3847_22088C.1
gaagagtggtagctccaagacaacaagatgcagatgcgatttatttggactaaattgcctattcactcgatttatttgtgagaagagtggtaaaactagttgttgtaactctctctatatattccttctaatcttgtaagattttcgcacatatgaattatgcaaaacttgtataagattttcagaaaactattactctgcgatgttgctaaagatggactatatcaattcatctcttgaggctcttgaagatgaattcattgatgattttctaagtgatgagtatgaataacattacatgaggttggtgatggaaaggtgacaacagcaagccactatgagaagtaggtgtacacgaaaatacattgatagagattgtgaagaaaggcaagaaagattattcaatgactacttcttcaaatgatgcggatacacagatg

SEQ ID NO: 56565 - DNA, 317 bp, Glycine max
  Clone ID: PAT_MRT3847_22089C.1
ctaacacggggggttttgaagacaaatcaccgggtggcccccaaagccaaagaagccaaaggccaaaaacaaaaagcacagccaacgcgctcagcaaggaacatactcatacaccaacaacttctggaaagagagggactctaccatagcacctccttcaatcactgccacacactcccacaacggcgtaagccccgggaagaggaccccagcctcttgggggaaatcaaagccccccggactgacatagggacaaggaacaggcagaaggcggcacccgagcaacccccaacgggcccggggtatcacacaaacag

SEQ ID NO: 56566 - DNA, 291 bp, Glycine max
  Clone ID: PAT_MRT3847_2208C.1
cgtccgcccgctcgtacgctcgaaagcactaccacatgcttctgacgactgctcatgagtatctgggcggggtgccttatgaagctaggtacttaaacgatgagctcaattctcatgataatgcgtataatagacatcatcgtgacatcggcgtacgagatcttgagtcaattcatcttctatggatactacttgatgtccatgagctttacgcactctaaacaaactttgggagaattcctacaggatgcagtcatgtacatcggtcatgacatgattacttaggccaag

SEQ ID NO: 56567 - DNA, 338 bp, Glycine max
  unsure (1)..(338): unsure at all n locations
  Clone ID: PAT_MRT3847_22090C.1
atccccgagagcggccgcttttttttttttattaatttttttngaaaatataaacacccaaacnnacnananacagaaaattttaaaacatattgggacctcatccttaaccataaaaattcactcacccaaatcacaatattcttcctagtatttaaatttatatatcttaatctactaaaacacccaaccaaaaaatctaaccaactcctataaattattcctacaatttaactattacatctccagtaacacaattaacctcccatcacaaaaaattctccccactccatacataaaaattctctcccccaaataaaaaataattactccattac

SEQ ID NO: 56568 - DNA, 329 bp, Glycine max
  Clone ID: PAT_MRT3847_22091C.1
aattcccgttggaccacacccgtccgcatcgaaaaagggaaaattaagatggggatttttcgatcacctttaaatttgcatggggggggggaggcccatggttactagggaatggcccaacctaaagaaagggatggggatcaatcccctttccttaaactccaagaaaactttggcccaaggaggtgacatgggcctcgccaaggccggggaaattcttacttgtgccgaattcggggatggttgcagatttttgaagctccctttggcaattgagatagccagggggtacccttttgtttaaattcaaagagggcccggggggtttt

SEQ ID NO: 56569 - DNA, 598 bp, Glycine max
  Clone ID: PAT_MRT3847_22092C.1
gtcacaactttattatgtttcgtgtaataatctggaaatgcaagatgcttatcttgtcaatctcgtaaatgtgttactagaattgtttttgcacagttcagtggaagctcgccaattgagaaggaaagctctctttcttattgaatggctgtaaaaagctgatgtgcctaccatagcacatattgaagagttccattcgatgcagaggatgattaatgctcctgattcaaatgataatattgatctactgtttgagcattgatttgttgggtttacatggagcatggtaagcttttcctaacaagattgttttagatgattagtttgtgttgggtaacacacatgaattttttgatggaaattttccagtggtatttttggtaccaatttttgtgaattagttttatcctgtatgtaatttcctttagtagctgccgttgaaaatgttacaagatgaagtggacctggtggtttacccaccattgttttgatatattctgaagaacctattgcttttaaaattttacaaaagagttttctcatactttggaagagaaaaaattgtttttctatttgatagaatctttcaatatatcta

SEQ ID NO: 56570 - DNA, 464 bp, Glycine max
  Clone ID: PAT_MRT3847_22093C.1
aattcggctcgagatggatgtatggtcatggatatgtgagctctccaacatcggaggagtggacagaggacgactcgccacccatgaagggctaactcgcgagacgagaagaaggatgaactacaacttcgaatccagttcaaccgtagaagagctcgaagctgataccttacgggctcatgactcaggagagctgcctgtgatcctatacctgtatgctccgcaaggcatttcacgcatacaacgtccacaagccttggtaggtctgcgcaaagtgccacctggcattagagaagcgcatcctgcctgttctactgcagcttgatccaagaggtcatatcccactaccccactgtgcacgatggcacatgcctaacgctccgagctcctgaaactgagatacctagcccatcgcatggatcatggactgccacacacctagatcgctatacaccgtctacaac

SEQ ID NO: 56571 - DNA, 718 bp, Glycine max
  Clone ID: PAT_MRT3847_22094C.1
acaattcattcccataattattcttaaactatggaagaagagcaaacacacataatgaaagactccgatgacatggaatcccaagaagaagaagaagaagaacgagaggaggcactctcgctctgcgaccttccacttaaccgcaattccagaactccaagcttggacgacatgtcgtttaagaaaattctccgaccgtcctcgttacccgatcacgccggcgagattttcaacggcttcagcagcagcagcagctccgacatgtgccccgccgacgacatcattttctgcggcaaactcgttcctttcaaggccgaacagccgctgaaaaacctcatcgccgctgaagaggagaaatctcccgcgcgccgccggagatcggagtctctctcctccgtgacgcgatcgaacagtgtgagcacgttcaccggttctcgccacctcatgatgaggaacagcaagagcttggattatagcaggttgcgagagtctgcggcgccggaggttgatcggaattcttccagcagaagcgtcgtgccgccggaggcagcggtgaagaaggcgacgaagccgcgctggtactctctgatgttcgggacgatgaagattccgccggagatggagctcagcgacatgaagaaccggcaggttcgccgaaatccgtccagcacgatgtttctcacggcggattccggcggaaagatggccgtgaatcgca

SEQ ID NO: 56572 - DNA, 437 bp, Glycine max
  Clone ID: PAT_MRT3847_22095C.1
ccggtttccaccgacatttttggaatctttttaacaatccggggatccaatttggttccgttaatttaaatttaaagggccgataataggcaccccaataacgagggggcaggtctttttttcaaccagtccaaaccaaaatccgaacaaccaacgccacctgagattcccgggttttttttcggatggaccgttgatgggttcccgttgggccacggaagcgtcgtgggccagccaatgggccgggcccctgggaactcctcaatttgcgcttgtttgggccaaaccgatcatttttgcagaagcgatttcgaagttggtttttttgggaggggggctccttgggtgctgtttggaagcaatgttgaaggactggatattgttctggggacatttgccaatcactgtttgccatattttggaaggatttaattgga

SEQ ID NO: 56573 - DNA, 1004 bp, Glycine max
  Clone ID: PAT_MRT3847_22096C.1
atatataataaaagcaatgccatgagtccatgagtaaaaataactgtttaaggataaaaatataaattgcatcaattacatatttgggcaagcaactaaatttaaataaaaatattaatctttggaaatttcactcaaaatatacaataatacgcaatggctgaactatggatccttgcaatttcctttggacacgtcgcatgaggtagcgctctccacgaatactatggatagaaatactttccaggcttcaaaacttatacacgatagtggaaggaatggtgcgattaaagtctcattacaatcccagtgccctcttcgtaagtgcattcaacaattattcacacttgtatgcccgagtgatttcccacgaaattgaatcgtctggcgagaggccatctatcacacaaccatttcgcttacagtttaccaatgcaaccataaacctttcattttctaacgacgacggatacattacttgctcatcctcgggaagttcattaaactcctcgggagatatttgcaacaaatccatagcagtttgacctgtgcaccatgctaaaactttcgtacccgtatccttatccgcaagagtaattttcagatggaacgtgcgtactaccccagcatcagaaattgtacgacaaaagctgcattccacccatctatcagaaatcttgttgacaaaatgaccacagagagaatgtgaaaatattgtattaacgtaaaaatactcagatggatcgagccagactcgacatacttgcgcatagctagtctggtaaaaaatatcagtgagtcgcgatagaatatgaaggcaagatgagttgatcaatgctggtaaacaactgagattgatgaaagaagccccaatatcattctcaaaccataatacttccagacacttttgttttgacatcgtacatgtcaagccagatatgtatacagtgtgaccgaaactaactcttcccaatgacctgaggtatattataagacaaaatctc

SEQ ID NO: 56574 - DNA, 840 bp, Glycine max
  Clone ID: PAT_MRT3847_22097C.1
acgaagcttagagtgttattgttgttgtatctgtggtgtggttttggccatggatgaagatcaaatagaaggttgtgtgagtgggtacctcaagcagaaagggtttacgcaaaacgatgaccaacttcaactcaccaacaccgattcatctcttcaacccgacactctcaatcgcgcccaattggagagaggttctgctagataccatgatgggtatggtagactaagatcatgggcatacaggtcacttgactcatacaagcatgagctgctgcgtgtgctttttccactatttatccattgcttcatggatcttgtggcaaaagggaatcttcaggaagcttggaactttttcaatacctttcgtgaagaccatgaaatgatgcattcgcgagaccttcaaaagttggaactagttctttctcctactcattttaaggaaatggaattcgctcattcccttaggcagagtaaattcaacataaagatatgtgggtattcttatgagctactgatgcaacatctacacagtatgcaatccaccacaataattggtattatcaatgagcacattagcttccaagttacagctggacaacctagctcaacttctgatgatccagaagccgtttccctcattggaaacatcaaggatgaagcaaaccagataaaccagaaagaaatactttggggaatgtttaaagactctgcagaagactgtgtagataagactgggtccttgctttcagacacagaaaagggtgaaggggaaggcaaagagggagagaatgatgagattaagaaaaggtcaattgatggaggaaagcaaggtagttcaat

SEQ ID NO: 56575 - DNA, 188 bp, Glycine max
  Clone ID: PAT_MRT3847_22098C.1
ctgtgactctgcactttcctcttttattggatgtaagaaataattaaaacacagcacatgcgttaatcccatcttaaatcagaagtggggcaacaacaaaaacatgggaaatttccaaaaatggggggggaataaacggggggggaataaaccaagttaatacaccttggggattaaaaaaagggggg

SEQ ID NO: 56576 - DNA, 552 bp, Glycine max
  Clone ID: PAT_MRT3847_22099C.1
ataaattaattaaataaaatattcagtcaaaatatacagcaatactcaatggatgaactataaatccttacactttcctttggacacgtcgcatgaggtagcgctctttacgaataaccatgtgcactgcagtcagtgccagcgactacactgaagaatagaaatacattccattccaggcttcaaaacttaaacgatagtggaaggaatggtgcgttcaaagtctcattacaatcccagttcccccatcgtagtgcattcaacaattattcacatttacatgcacgtgtgatttcccacgaaattgaatcgtctggcgagaggccatctatcacacaaccatctcgcttgcagtttaccaatgcaaccataaacctttcattttctaatgacgaaggatacattacttgttcatcctcgggaagttcataaaactcctcgggagatatttgcaacaaatccatagcagtttgacctgtgcaccatgctaaaactttcgtacccgtatccttatccgcatgagtaattttcagattgaacgtgcgtactacc

SEQ ID NO: 56577 - DNA, 339 bp, Glycine max
  unsure (1)..(339): unsure at all n locations
  Clone ID: PAT_MRT3847_2209C.1
attgncaactcagaaattagtgttgcgtaaattttaagaaaatgattggaaagtcaacaattttttttttgggaaaatgaaaggggcctaaacccaaggatagttaccaagccataatactaccagggggtgttaccccttaaacattattaaacaaaaacactgtccaaagagaaaaaaggtgcgcttaaaacataaaatttacccccaccaaagggcctaaatgggttaaccttctttcaccctaaatttttggtccacacaatttggttatggaatttaacgccaattaccaaaaaccaaaaggtttttgcttccccatggaaaaaatggaaattt

SEQ ID NO: 56578 - DNA, 2024 bp, Glycine max
  Clone ID: PAT_MRT3847_220C.1
ccacgaacaataacataacataaatccacgcaattacaggatattaaaattacgacttttaatatgcaaccattccactcaaagtcacatacagacacaggatatacaagtatggctaaggtaaggaaaatgcatgaacacaatcaataacacaattaatagcagtggtgctcataaaaattatcaactattgataaactcccaacacttttgaatctgatgacttgcaaacatcacaatccatgaggacattcaaaattgcaaacaacagcagtagccaaagtcaaaagaacttaaccaaagtagctagaaagaacatataaactaccaacataaaattaaagcacgaaagacaaaaaaaaaaaaagaagataatggatgattcagtttctctccaaattcgtcattgttcaatcaactctacctcacagttacaatatcatcaatcttcaaaatcatccgcacacactctgtcgccaaggtgatcgcactggtgctcacaagcaggggctgcaccacattctcctccaagatgttggtaatctgccccttccttacatttattccagcatttatctcaccctgtgcatgacgattccttagctcagtaacaatggcaatcgggttcaaaccagcattttcagccagagtatagggaataacttcaagcgcctcagcgaatgccctcacacagtaaccctccatcccatgcaacaccttagcccaggcacccagctgcctggagagctcaatctcaggggcaccaccgccggcaatgagaaacctcttggcaaccaaacacctaacaacacacaaagcatcgtgcaaactccgctcagcctcatcgagcacaagctgattagacccacgtacaagcacagtggtggtcttccccatctccttaataccagtaatcttcacaatcttcccatccccaagagaaaactcttccacaagatcagcataacccaacttctcagtgcgaaaatgctcaatgttagcaatgggcaaacaattcagtgtcttggtaatgaactcaatctcatccctctccacatccttaatgaccaaaatcttagcttttgcaaggtaatgcaaggacaaatcagtaaccgcatccctcaaaatactcttctgaatcaacaacacattacaaccagtggccttgatcttcttaatcatgctgagaatataactacgctcttcttttagaatcctatccatctgagagtaatcactcaccacaatgctctgttcgatgtcggttttgggcggcgaaatctggaattgaatgacggcgatcttggcgttctccatgcgggtgggtcccccggcggcgtggctgaccttcttgtcaaagacgagacctttcacgagctcggtgtcgtcgacggtgccgccgagcttcttcacgatcttcacatcgcggaggtcgaccatgtcgggcttgggggcatcgacgacggaaagaacggcgtcgacggcgaggggagccaggagcgtggagtactggctgacgaccttgctgttgagggatgtgctagcggacttcacgagggagtcgcggtcagagagctcgacggggacggccatggcggtgagaacgtcgacggccttcacggcagccttgtggagggcgtcggagacgacggtggggtggatgccgtgggagaggaggatcccatctcccccgccaacccctcctgccgacatcgcccccccccccacaccccgccgcaccccccgcgagacccccgccccggaggcactgctcgaggagggcccgccagcaatgacgacgacggtagtggtgccgtcgccggcggcggcctgacccccctcccccgccaccctcctcaccaccacccactcgcccaccaccccgccgcgctcctcccacgccccctccggacttggagagctcgacgagcatcttggcggcgggctggaggacctgcatcttgttgaggatggtggcgccgtcattggtgatgatgacctcgtcggaggaggtggagatcatc

SEQ ID NO: 56579 - DNA, 364 bp, Glycine max
  unsure (1)..(364): unsure at all n locations
  Clone ID: PAT_MRT3847_22100C.1
ggatctaccgnaagtnaacaggacaganactccttgnntgattggtctcatgccttcacctngnnattttctcttctnttntcactntntggttgggggaacantganagtcatgtttganccctgnnttgtgcngtccangggtgntgttgngtccgccggtcatgttcatgcctatgaacgatctgagcgcgttcccaatgtcncatacantattgnnaatgnncttncgcctcctgtnnntggtnaatcagctcctgtntntttaaccattgnnnntggnngaaaccttnnnagtttaccncccccctgccnnaccccnncccnngtttctgctttccnagaggccagcttcggccctgcc

SEQ ID NO: 56580 - DNA, 170 bp, Glycine max
  Clone ID: PAT_MRT3847_22101C.1
gcgatacgacgacaacaacggggttgggacgaatacagctctcacatgagcactgaattgtatggagagatatagacctgtggtatagagccttggtctgcgccgtgggtgctctccggcggtcatagtcatcgcgaggtgggggcctctcctcggccgttcagtcagtg

SEQ ID NO: 56581 - DNA, 497 bp, Glycine max
  Clone ID: PAT_MRT3847_22102C.1
atccaaaaggcatttggcacagcaggatcacagtatgttcaatgggctgcaaaaatggcggtgggccttaacacaggcgttccatgggttatgtgcaagcaaactgatgctcctgatcctgtgatcaacacatgcaacggcatgagatgcggagaaacttttactggaccaaattcccccaataaacctgccttgtggactgagaactggacatctttctatcaagtgtatggtggactgccatacataaggtctgctgaagatattgcatttcatgtcaccctattcattgcacgaaatggaagctatgtcaactattacatggtattgttactttgaaactctctttcgatttgatagggtccttctctgtcttctgttgctagaactaaacaaattacttaagctttatctttttgcatatacatgtaccaattgaatcatagctaagattttcactagacattgtgtgccatccagggaaaccttttcaaatt

SEQ ID NO: 56582 - DNA, 724 bp, Glycine max
  Clone ID: PAT_MRT3847_22103C.1
gcctgaagcagttaccggagccggttacttgtaggagccatgatgaggcttccacttcttctagcatgactgagaaagagacaagaaactcccaagaagatgatgacctttccccaagacaacaaaccggttcatctgatgtgtctccacagtctagagctggaaagagtgattctcttagcttaccgttgacagaataccaaatctacaagaatgatggattggcagatgcttcaactcagacagaagaaaatgttaacaaacccgaaacccagaaaacttgtaccaggggtgtatcgactgaggatgatgggtcattagaacctgaatgccatgaaataggtgaaactcaagtgcttcaactgaaagataattctgaaatatgtagggatactgtttctcctcctccctcaacttctagcccatcgtcttctggagggaaaactgagactttggagtccctgataagagctgatgtgagtaaaatgaacagctttaggatcatggaagaggagcgtattcgaatgcaaaccaatgcaaggctgaaagcctcaaatctgctgatgcaactgatctcgtgtgggtctatatcagtgaaaaaccatagtgttggccttattccttcctataaggataggttttcccactcaaaattcccctccccggtgttctcaacttctggtatgtttggggactttgattgcatagcagagaaaacaaatgt

SEQ ID NO: 56583 - DNA, 447 bp, Glycine max
  Clone ID: PAT_MRT3847_22104C.1
tttttttttttttttttttttttttttttttttaaaacaaaaataaatgagtgccttatattataaattgataatactcatcatactaaaggactgaaggtatacatacagtaaaagccaccgtatattacaagattgataacaatataacaaataatctcgagggcacatgtgtttggcttttcctatgattcgatagacggaacctatgtagtaaaaatggttcagttcaagggaaaaaaaaataaaatcaaatgtgcatgcttaaacccacgttttatcatgcctcaggccaaccaaccccctctctactattatgtaataacaaagtcaattattggcaaccctgtttctagcaaacagctgcagccaatgtcatcaccatcaaaacaatttgataaagtcataaacatgttcaataaagtcataaacatgttcattttaatc

SEQ ID NO: 56584 - DNA, 1862 bp, Glycine max
  Clone ID: PAT_MRT3847_22105C.1
cggaccggattaatcctgggcgcgaccagctcctggtctgcggccggcctatggctattatgggtccaatctcatccaaagtgcattcatcacaaactattttcatttcctcaaccttattaaagaacaacacactcacaaacacacacatgatagatggctagagattcaaccttcccaccaacaacaacaacaacaataacatgaacaacatagagtcctaccctccggttctccgccacctagaccaccaccaactaccaccaccaccaaaccctgacccggataaagacccgacccaacaagactcggatccaatacccatcatagatttttcatgcttaaaccatgacaagagcaagttggacgaagcttgcaaggattggggtttttttcgtttggtaaaccatgggattcccatgacccttttgaagaagcttcaagaggtggccaaggaactcttctctttgtcctttgaagcaaaagaaggtgcatgcagtggcagcccagtgtcctacttttggggcacccctgccctaacgccatctgggacaacaacgagaggcccccaaaacatgaattgggttgaaggctttgatgtgccgttgagtcaactcccacacttcaaccctcatcagcttcccacgctcgagtccatcagacttccgataaaggactacaaaaatcatctgtcaagaattgccacaactttttttgaagctatggcgaagatcctcaacctgtttcttaaagctttagcgcgttaccttgacctgaatctaaaaccctcaaagccatacttagcagaaaacactggaatggtgcggtgtctatcgctatccaaattgctctgatgcaaatgttggttgatactaatagccattattactccttaagtattggccataattgaccaatatgtatgaattcagtggacttcaggtgctcaaagatgatcaatggctaactgtaaaacccatttccaacacgttgattgtcaaccttggagacatgatgcaggcaataagcgacgacagatacaagagtgacacacacagagtgtataaaaaaaaacacaaagagagattataaatatgtttttttttttcccccggtaaagactttgagatagagagatcaaagtacaaacctttttcatacattggattaagaacataagatatagtacattgattttcataataatatatttaagaattataaaaatttacacgtaaagcagtttaaataaatatatttataattctaatatttgtgtttacctttttttgttatgactattaagtgatttcttaataaaatatttttacaaattattatatctatatcacatatcaaaattatgtggttaacaatttctaattggtttaatattaaccctttttttttcaaaaatgcaagtcattaaatacaaaaaagtactgacaatgtatggtaatttatatattatttggagattgggtgatagagtaaatatttttatgttttagagatttgttgttggtttggatgttttcgagatgttgaattgatgtatcgtataaaattaaatattactaaataatttttttttatataaaataatagggaaatattattaaaatataacccagtgttgaaaatagggatcgatggatcttggccattgcctcatggttttggttgtggggtaccccgtacccgtcacctttttgagattatgacattgatggcactgcatgaacggggtgtttcgaccaattgaattgtgttattgcatatatggagaaagattatcagatttgatagtcgcgtttaacgtataatttccttaattagatatgaaagaccaacaaaactag

SEQ ID NO: 56585 - DNA, 688 bp, Glycine max
  Clone ID: PAT_MRT3847_22106C.1
ccacgcgtccgaaattaatccctaacttcattaagatcacaaattagattgaaatatcatccaatcaatctgtgattaaattagaaattaggaaattaatcaataacctaattcattttcaatcctaaacacattcataatcatgaaaatcagaaatagaagtggagaggaagatgaacattcacatagaatttgaaatacttaaccagaactcaaattcctcattgctttgattggatccttggattgattagttttttagccttctatagtcatcactagtggaagaacaatgaaatttgagcaataaaaaggaacattagagttgaagagagggagaaagatgaagaacaattgagagaaaaagagagagaaaagtttgatcttaaaacttgcacaaaaagtttataaattttgttttgtaccaaatgattccaactagctaattaacaacactaatatatattgtgaccaatcagaaggaaaggatgggccttgattaggcccaactaatctatctaattaagctaattacacattgcaaaatccaatttcacagcctaaaatccaagtgcagagactctgacttccaagcctaaaatgaccctccaaaggcaggattggtccaagcttatttctaacaaattgtagctattttccttagctgtctaaggaatactcatatttt

SEQ ID NO: 56586 - DNA, 847 bp, Glycine max
  unsure (1)..(847): unsure at all n locations
  Clone ID: PAT_MRT3847_22107C.1
cgaattcgagctctgtacccggggatcctctagagtcgacctgcagtagtaatcatactaaaatgggtgacaagaataaaagcatgcgagtgatttacatttatgccacctgataggaacaaggtgacaaggaaatctggtttcgagcaccagggccttcagaatagaagagaagagaaggaaaggtaattgctaatttcatgtagatgttgttattacatagtagtttatatactaaattttatttaatagaatttgtcctttttgtgccatagaatatcagaattagttattcttgtctccccatcctcatgtttttttagtcgtaaatgaagtcgtgagtgtatgtaggacttctcaatttaattttttttttttttaaaaaaacacacatttgaaagtgaagaacttcattctaaagttaatgtgtttacaggtttttatagtgaacaatatttattgataaaatataaaaaaataatatgttaataataaagtgataaaatatttgaagttgtgagactttataattgttttaaaaaaaaattgtcttgtagacttaactgttaaatctataaccaaatccgtttctatttccacacgtcaagggaagaaggtatggacggaaaataaagtaacaatatattctttaaattatctggttattatttattattaaataaatttttatgagtctcaaaataaaatattttctatggattaaatttttttattcatgccattttatttgaacaagcatgaaacattatattatagntttaagtgagaaaggaaaggaaaattctgctaatacattgatgaactacgcttaatatacaaaatctga

SEQ ID NO: 56587 - DNA, 666 bp, Glycine max
  unsure (1)..(666): unsure at all n locations
  Clone ID: PAT_MRT3847_22108C.1
aaattccattcttcacaactaaaaaccnttgaagttatctggaaattaatagctatggctggcggaggcttcacaacaagcggcggcgagtttgaggcaaaaataactccaattgtcatcctttcatgcatgatggctgctaccggaggtcttatgtttggatacgacattggcgtttctggtggtgtgacatccatgccagcattcctgaaagagttctttccggaggtgtatagaaagacagtggaagaggaagagttggacagcaactactgcaaatacgacaatgaaaagttgcaactattcacatcgtgtctgtaccttgcgggtttaatggccacattcttggcgtcgcatataactcggagacagggaagaagagccaccatgttgatatcgggattcatcttcattgctggagttgccttcaatgctgctgctcagaaccttgccatgctcatcattgtgagagagtcttacttggttctggagttggttttgctaaccaggccgtgccagtttttctttcagagatcgcaccttcaagaatacgtggagcattgaatatacttttccagttgaatatcacccttggcattctcttttccaccttgtcaactatgccaccaacaaaatcaaaggtggatggggtttggaggctatctc

SEQ ID NO: 56588 - DNA, 255 bp, Glycine max
  Clone ID: PAT_MRT3847_22109C.1
gatgcattgctaacatagactctgcaaaggcaaattgaggcctatagcacactgaagcagccatatatcatgcaacaactgaatcatagcgactgaaaatcatgtgatgaaactcagatagcttgaggtctatatatatcaagctgaacgcaaagggattaagaaccattatacatgtacctcacgtcaaaagtcttactagagaaaacggctcaccacatgtaacggacacagatcattgaccgaacctaaaat

SEQ ID NO: 56589 - DNA, 273 bp, Glycine max
  Clone ID: PAT_MRT3847_2210C.1
gtttttgtagcatgtgctgctgttggcttgacatcaagttacactccaacttcattgttggaatctggtttgcaaaacgacagagggttaattgtggagtatttttgtgagggattgtttacggttgcttataacattaatcagtcccaagagaaagactttgctggacgggaatattctttcctttgatatttaaatcttcgctcttagattggaaaatagtttctctctataaaagcacatttttgtttgtgtgtaaggaccttttatatt

SEQ ID NO: 56590 - DNA, 270 bp, Glycine max
  unsure (1)..(270): unsure at all n locations
  Clone ID: PAT_MRT3847_22110C.1
agacaggagtaaagaaaagaaaaaggaggagaaagcaaaggagaatgcngaacatganaacagagagcagcagaataaattaaaagaaagcaccaaagctggtccattaggctcaaattctttcacacaggtttccaggcacatctatgagaattcngctgttggggaaaatctcaagaaacggaaggacnttgaatcaaatggaattatgcatgcaaatgacnattggcccagtaagttgccaacgccctccccctctncctcccatct

SEQ ID NO: 56591 - DNA, 175 bp, Glycine max
  Clone ID: PAT_MRT3847_22111C.1
caactgcgtccgtaccggctgcgagtaataagacagaaggggtaattcagctgtaacacttttgcgacagcaaaaaccgggtggaaatatagcaattcctgaaacacttataggagttctgttaaccaaaaaattttgatctcgcaaattatttttttttttttatttttttttt

SEQ ID NO: 56592 - DNA, 168 bp, Glycine max
  Clone ID: PAT_MRT3847_22112C.1
tacggctgcaagaagaccacagagggggaacttgcgacaggaagagctaagcacttaaaggatcaaccagctgctcacaacaatggtagcaaatgcaaatcaagtgaaaagttccatcagtcctgaggttaaaagccaaggggatgagagatgtctagcaccacccat

SEQ ID NO: 56593 - DNA, 108 bp, Glycine max
  Clone ID: PAT_MRT3847_22113C.1
caatcaatgcgtccataatccctatattccctgcttggggtgaccactgtcaacaaaaacagctggaattggattcttccaccataacataaccttagaaagaatctt

SEQ ID NO: 56594 - DNA, 272 bp, Glycine max
  Clone ID: PAT_MRT3847_22114C.1
atttgaatagtgccttccaaatatacaggaatccaactttggatgagttgcttgccatctgcagacagatgcatctagcgtgggcagagttttggttcaataccaattttaatgcaccaccatgatgtctcctttccgagctttgtatgggcaggaccctctattatttaaaggaaccacagttctttccaagattgaggaaattgatcagctgactcaactaagagatagccttctgcaggagctgcatgagaatttactaagagtgtagg

SEQ ID NO: 56595 - DNA, 804 bp, Glycine max
  Clone ID: PAT_MRT3847_22115C.1
ggtccccggtggtttctcggagcagcattgacgatggaatgctttccttcacttccctgccggctgcaaatataaaatcagttaacggtgcttgtgtcggtgccggtgattcggatcactcggatctggaagctgaaccaaagattctatgctctacgagctgtagttccaaatgtatccaagatggacaaggcatcgctgttgggggacgccatattgtacattaacgagttgaaatcgaagctcaacgtgctggattcagagaaaacggaattggagaagcaattggattcaaccaagaaggaactcgagctcgcaactaaaaaccctcctccaccgccaccgccgccaccaccaccaggaccgcctccatctaatagcgtagaaccaaagaagacaacaagcaagctcgctgatttggagttagaggtgaagatcattggttgggatgcaatggtaagaatccaatgcagcaagaagaaccaccctgcagccaggttgatggcagcattgaaagatcttgacttggaagtgcatcacgccagcgtgtctgtggtgaatgatttgatgatccaacaagccacggtgaacatgggaaacaagttttacacgcaggaacagcttctgtcggcactatcatccaaagttggcgatgaactacgatagttccttctgtactattattggtagcagtagctgtagctttctatgtaaattagtgttcttatttttggttagtcctttttggtagcttggactaaattaattttattgaggtaatttgatttgggaagctgaatgatc

SEQ ID NO: 56596 - DNA, 2769 bp, Glycine max
  Clone ID: PAT_MRT3847_22116C.1
gattacaaccctcttaaaaattaatgttaactatctcatttcttctagttataatacatctactgtatcttgtaaacataagagcaccttccaacattcacatagtcaaactattaaaagatgaaatatataatgagcaacctgcatgcagctatttctcagttctcacgccagtgaagacagttttccagagaatccaatcagaaactgccacgtgtcccaatgtgccaccacttctctgtttccttggctcaggttaagaatagaaggcatctttttacagcctctcccattcagcgatttaatcggcgtgtacctttcctggaaacctcgcacttttcacagttttcactcaaatgaaacccaaatacactccacataaataccaaacccaaatccacccccactcactcagtcactaaccttatctctctcctcagatagatacacacactctctcttttccactccctctttcgccgccagaacaaaccaaacccacacttcactctcatccaattccaaattctcgttgttgctggtgcacggaatgaccgagtaccggatgaacctgtggaccgacgacaactcctccgtcatggaggccttcatgagctcctccgacctctcctccctctggctccccacgccgcaatccgccgcctctactaccactcctggactggaaaccacccgagcaccgccgcctcagtcccactccctcctcaaccaggagaccctccagcagcgcctccagacacttatcgaaggcgcccgagagagctggacctacgcaatcttctggcagtcttgctacgactattcctccggcacctcccttctcggctggggagacggttactacaagggcgaggaggacaaagacaaagtcaaaaccaaagcccccaaaacgaggtcgtccgcagagcaggaccaccgcaagaaggtcctccgcgaactcaattccttaatttccggcccctccgcttccgctgacgacattgacgaagaagtcaccgacaccgagtggttcttcctggtgtcgatgactcagtccttcgtcaacggtagcgggctgccgggccaggctttttttaactcgagcccggtctgggttgccgggccggaacgactttccgagtcggtctgcgaacgggcccaccaggggcagatgttcgggctccagactctggtctgtataccgtccgcaaatggcgtcgtcgagctcgcctccgcggaggtcatttttcagaaccccgatctgatgaacaaggtgcgtgatttgttcaacttcaacaacaacaacaacaacaacaaccctgaaacgtgttcctgggcgttgaattgcgttgccaccaccgatcaaggcgagaacgacccttcctcgctctggctcaaccctgaaatcaaagactcctccaccgtctcgccgccgaattccacggttaataagacgatgcatttcgaaacccctggttccagtaccctaaccgaaacccctagcgctgctgctgctgttcacgtccccaattctaaaagccagggattcttcccgagggaattgaacttttcgaattcattgaaacctgaatccggtgaaattctgagctttggggagagcaagaagagctcttacaatggggctttctttcccggtgttgttgcggttgaggagaacaacaacaataacaagaacaagaagaagaggtccccggtggtttctcggagcagcattgacgatggaatgctttccttcacttccctgccggctgcaaatataaaatcagttaacggtgcttgtgtcggtgccggtgattcggatcactcggatctggaagcttccgtggcgaaacaggtggtggagcccgagaaacggcctcggaagagggggcgaaagccggctaacggaagagaggaaccactaaatcatgtggaagccgagagacagaggagagaaaagctgaaccaaagattctatgctctacgagctgtagttccaaatgtatccaagatggacaaggcatcgctgttgggggacgccatattgtacattaacgagttgaaatcgaagctcaacgtgctggattcagagaaaacggaattggagaagcaattggattcaaccaagaaggaactcgagctcgcaactaaaaaccctcctccaccgccaccgccgccaccaccaccaggaccgcctccatctaatagcgtagaaccaaagaagacaacaagcaagctcgctgatttggagttagaggtgaagatcattggttgggatgcaatggtaagaatccaatgcagcaagaagaaccaccctgcagccaggttgatggcagcattgaaagatcttgacttggaagtgcatcacgccagcgtgtctgtggtgaatgatttgatgatccaacaagccacggtgaacatgggaaacaagttttacacgcaggaacagcttctgtcggcactatcatccaaagttggcgatgaactacgatagttccttctgtactattattggtagcagtagctgtagctttctatgtaaattagtgttcttatttttggttagtcctttttggtagcttggactaaattaattttattgaggtaatttgatttgggaagctgaatgatcaaccaggggatagtaatatctctgatgaagtccaagtggattttttttgtgttaatattattatctgtttatattgtatatatatatatatatatgtttatgaattatcataaatgtgaactgatgttggtgaattt

SEQ ID NO: 56597 - DNA, 1073 bp, Glycine max
  Clone ID: PAT_MRT3847_22117C.1
attccctctaacaatctttctcttggggacatagaaaaacaagcacgcacgcacacgcatacacacacacactctctcttttccactccctcttttggccgccagaacaaacaaaacccacacttcactcccatccaattccaaacccacgttgttgttggtgcatggaatgaccgagtaccggatgaacctgtggaccgacgacaactcctccgtcatggaggccttcatgagctcctccgacctctcctccctctggcccacgcgtccgcagtccgccacctccaccacaactccaggcacggcaaaagcccctcctcctcctcctcctcctccgccgccgccggcgcagtcccagtccctcctcaaccaggagactctccagcaacgcctccagactctcatcgaaggcgcctgcgagagctggacctacgcaatcttctggcaatcttcctacgactattcctccggcacctcccttctcggctggggagacggttactacaagggcgaggaggacaaagacaaagtcaaaaccaaagcccccaaaacgaggtcgtccgcagagcaggaccatcgtaagaaggtcctccgcgaacttaattccttaatttccggcccttccgcttcagctgacgacattgacgaagaagtcaccgacaccgagtggttcttcctggtgtcgatgactcagtccttcgtcaacggtagcgggctcccgggtcaggctttttttaactcgagcccggtctgggttgccgggccggaccggctgtccgagtcggtctgcgaacgggcccaccaggggcagatgttcgggctccagactctggtctgcataccgtccgcaaatgcgtcgttgagctcgcctcacacggaggtgattttccagaaccctgatctgatgaacaaggtgcgcgatttgttcaacttcaacaacaaccctgaaactggttcctgggcgttgaattgcgttgccaccaccgatcagggggagaacgacccttcctcactctggctcaaccctgaaatcagagactcctctaccgttgcgccgccgaattcagcggtta

SEQ ID NO: 56598 - DNA, 305 bp, Glycine max
  unsure (1)..(305): unsure at all n locations
  Clone ID: PAT_MRT3847_22118C.1
acgctggatacctatgcacccaaaaattaggtttttncatctaagcgacaaaatgcgtaggggaatttaaaataagcgtacatcctgagattcccgatatacgtcaacctttccaactgctgctgaatccacgggcatgcaagagacaacctgctgaacttacacatattacttgccacacttaatgcactctcactcaatcttcttcgcagaggaaccgaaaacactctgtctcaaccatgaaaactttctcttccgagatctatacaactgcctcactgctagactacgcactttaaaatgct

SEQ ID NO: 56599 - DNA, 281 bp, Glycine max
  Clone ID: PAT_MRT3847_22119C.1
aaggcggttctctagctgtgctttgtttttttttaattgttggttttcgggcaaaaaaaaccttaaagttttttatctcggggaagcacttcccccccccccaataccccaccctggggggccaaaaaaaattagttgcccacaaccgttccctccccctttaaaaaatggcttgaaatcccccctccgttttaaatagccgggtccccccccacacagggggccccttaaattcctgggtggccaaaccgcagccgcatgaactttttttccccccaacc

SEQ ID NO: 56600 - DNA, 566 bp, Glycine max
  unsure (1)..(566): unsure at all n locations
  Clone ID: PAT_MRT3847_2211C.1
gcatcctcctccccatcctccccctcataganaatgaaaagaaaaaagagaaggtatccaatgcaaatgataacaactttgctttcctgatagatgtttgtgtcattgctaaaattgattaagtgatgtgatgttgctattggattattgcttttgttgggaataaaattgtatcgtttattttgtagtcatttacttttttatttcgcttcttctgtatgctttttgttgttgcaggactcccgaatataattactgttgtgcgcagcatagcccttctggttgtcaaatcgtgttaatggaaatagagtttacattgcttcaatacaagaaatatacagaaaatcgtatcaaatgtaaaagcttcttaaaattttgatgggcctccccggcccttaaatttatgttctctcaagcagcatacaatgaatcgactgcttattattattttattattaggcttaaatatgtttttcatacttgaaaaataaatcgtttttagattattacttgaaagtcacttttggttgattacgtatccaaaaaaaaattatatgttttaacgt

SEQ ID NO: 56601 - DNA, 258 bp, Glycine max
  unsure (1)..(258): unsure at all n locations
  Clone ID: PAT_MRT3847_22120C.1
atttgacacgtgtacaacgataattctaaatacattgatctaatgctagtatttgtnttcgnataactncattgcaattgtgttaatcagtactttgattgtcaaaaaataccttactccccaacgctttacaatctcatgtgcctaaatgaaattatcaaaattatcaatcccaatcgaaataactcccttcaattatacaatcaactttctcaattttnttaccatattttgatcgcttttgaaaggattcttcta

SEQ ID NO: 56602 - DNA, 240 bp, Glycine max
  Clone ID: PAT_MRT3847_22121C.1
caaagaaaactggccaacatttcattcattaaactcaaggacaaagtgtcctattacttttattgacatccagtgagtgaaatgggggaagaagagatggttgacttggctgcgcctcaaccttacattgataagaatacaatgcttgtggttgtggaacttcgtgagagttgagacaacaactcaaacaaattttgcatatgatcatgttccttttctccccttgtatctcgccccatg

SEQ ID NO: 56603 - DNA, 452 bp, Glycine max
  Clone ID: PAT_MRT3847_22122C.1
cggaattcccgggtcgacccacgcgtccggctctgcctggggacaatgtaggcttcaacgtaaagaacgtgtctgtcaaagacgttagacgtggcaatgttgctggggacagcaaaaatgacccaccaatggaagcagctggcttcactgctcaggtgattatcctgaaccatccaggccagatcagtgctggctatgcccctgttctggactgccacacggcccacatagcatgcaagtttgccgagcttaaagagaagatcgatcgtcgttctggtaagaagctggaagatggccccaaattcttgaagtctggtgatgctgccattgttgacatggtccctggcaagcccatgtgtgttgaaagcttctctgactaccctccacttggtcgttttgctgttcgtgacatgaggcagacagttgctgtgggtgtcatcaaagccgtggac

SEQ ID NO: 56604 - DNA, 339 bp, Glycine max
  Clone ID: PAT_MRT3847_22123C.1
ttttcgcgttcgaccacgcgttcggtggtctgaatcattcacctaatttatttctgaacgctcgggctctcaaaggagcctctgatcgtgctccagtgttccttgtcaagagatccttttgtttatgcggtcggaagggattgaccactaagatgatttactgtggtttgtatccgaagatggccttgatatgctgtgaggagatgaggctggtatatggcgtgtgccctatgcctaagagatctgttccaggtggaccactcaaccttggataaccacatgtaacccttgggggcacactttatcgactaccagtcaatgtttgaagacgcaggagtt

SEQ ID NO: 56605 - DNA, 304 bp, Glycine max
  unsure (1)..(304): unsure at all n locations
  Clone ID: PAT_MRT3847_22124C.1
gtcgcangcacgcgtacgtaagctcggaattcggctcgaggtcggngaangagtgcgagnaccacnatgggnnnnagaggnngatcttccggcnnntgnnctggtgcttantggtgttccttnnnatcgngctggncacaatncnnttnatatgggcaatccttaganccatcaaacncaccttcnngctccnagacgtcnccgtctacgccttcaangncaccgtggngaacntccnnacttcgacntntcnggtcangcncatctcncgtancncggacgancgcatnngngttactangat

SEQ ID NO: 56606 - DNA, 1173 bp, Glycine max
  Clone ID: PAT_MRT3847_22125C.1
cccacgcgtccgcctacttctacttcccccctttgctctcaaaccttatcacctaatccttatcctcccaaaccagaaaaccatgtctacctccgcagcttccctcgcactcccaaccctcactctccgaacccgaccttaagctctttgtcgggaatcttccgttcaacgtcgacagcgcgcagctcgcggagctctttgagagtgccgggaatgtggaggtggttgaggtgatttatgataagactactgggaggagcagggggtttgggtttgtcaccatgtcttcggttgaggaagctgaagcggctgctcagcagttcaatggctatgaacttgatggaagagcattgagagtgaattctgggccacctcctgctcggaatgagagtgctcctcgttttagaggtggttcttctttcggttccagaggtggtggtccttcagatagtgaaaaccgtgttcatgtaagtaatcttgcttggggtgttgacaatgtagcacttaagtcattgtttcgtgaacaaggttttcactatctgaaggaccaccacctctggaaccgaaagaagaaccacctctaaaacgaggagcactctcattccgagcaggaggtggcccttcagatagtgaaaaccgtgttcatgtaagtaatcgggcttggggtgttgacaatgtagcacttaagtcattgtttcgtgaacaagggaatgtcttggaagctagggtaatctatgacagggaaagtggacgatcaagaggctttggatttgtgactttcagtagccctgatgaggtcaacagtgcaattcagtccttaaatggcgtggacttgaatggcagagctatacgagtctcattagcagattccaagcccaagcagttctgaggatttagcttttcgtctatacccgagagaggatttcggtatttgggacttgggagttatacagctgcaagatgtcattggcaaaaacagtttgggaaagaaatacacttacatgcattgagactacatgtacacagtttcaatatctgacaggcttcttcctagatgagtgtctgttgaaagtttaaatgtatgttccaaatttgatggttgtcatttgaaactgatttgtagtccgtattttcactatagaagtagatgtctcaaatttattgggtaccccg

SEQ ID NO: 56607 - DNA, 430 bp, Glycine max
  Clone ID: PAT_MRT3847_22126C.1
acagctcgaggttgtcggataatagtgttctatgatataaactgttgtgaatgattagatgtgttttggtagcagtgtgaatggcagattgatcagtatgctactaatgggaatcaggtggtatggcaaatgatgaagataatttgatatacaccaaaaactaaacctgtgactaagcaacaaattcaacctcaatcagatacatatagatcttcctcatattttgaaagaatacactattgtatggagccattgagtaactgtgattacttccgtaaacacggttaacttatgcactccaatggaattgaggattcagcccactgggaggatactgcatttgaagttagaggttctgaatgcggctaacttatacatgttacatcaacaccaagtttggacctctctatcaaaagctaaacaattgggt

SEQ ID NO: 56608 - DNA, 1274 bp, Glycine max
  unsure (1)..(1274): unsure at all n locations
  Clone ID: PAT_MRT3847_22127C.1
gggccggctcgagtcccccccgcgcgcgataaaccctacttctacttcccccctttgctctcaaaccttatcacctaatccttatcctcccaaaccagaaaaccatgtctacctccgcagcttccctcgcactcccaaccctcactctccgaacccgacaacctctatgttctccccaatgcttctcctcgtccctctccctcacacccaacaacaaacccatttccatttctgctgtttttctcaaaccaacaactctgtcgtcgtctcgcttcgttccccacgtcgtggtgtcgtcggatttggggcaggaggaggacaccttcagtgacggagacggccccagcttctcccccgaccttaagctctttgtcgggaatcttccgttcaacgtcgacagcgcgcagctcgcggagctctttgagagtgccgggaatgtggaggtggttgaggtgatttatgataagactactgggaggagcagggggtttgggtttgtcaccatgtcttcggttgaggaagctgaagcggctgctcagcagttcaatggctatgaacttgatggaagagcattgagagtgaattctgggccacctcctgctcggaatgagagtgctcctcgttttagaggtggttcttctttcggttccagaggtggtggtccttcagatagtgaaaaccgtgttcatgtaagtaatcttgcttggggtgttgacaatgtagcacttaagtcattgtttcgtgaacaagggaatgtcttggaagctagggtaatctatgacagggaaagtggacgatcaagaggctttggatttgtgactttcagtagccctgatgaggtcaacagtgcaattcagtccttaaatggcgtggacttgaatggcagagctatacgagtctcattagcagattccaagcccaagcagttctgaggatttagcttttcgtctatacccgagagaggatttcggtatttgggacttgggagttatacagctgcaagatgtcattggcaaaaacagtttgggaaagaaatacacttacatgcattgagactacatgtacacagtttcaatatctgacaggcttcttcctagatgagtgtctgttgaaagtttaaatgtatgttccaaatttgatggttgtcatttgaaactgatttgtagtccgtattttcactatagaagtagatgtctcaaatttattggttaccccgttccaatattgttgtggaagaattttataatcgtgatgtgcctggaaaattatctncc

SEQ ID NO: 56609 - DNA, 2127 bp, Glycine max
  Clone ID: PAT_MRT3847_22128C.1
ttcttgtgcacaggcacgaccggctcgagctcgagccgaatcgctcataaaccctaaaccctacttctacttccctttgttctcaaaccttatcccttatcctcccaaaaccaaaccatgtctacctccgcagcttctctcgcactcccaaccctcactctccgaactcgacaacctctctgttctccccaatgcttctcctcgtccctctccctcacccctaactccaaacccatttccatttaccgccgttttcctcaaaacaacgctgtcgtcgtcgtcgccgttgtcgctgtcgtctcgcttcgttccccatgtctctgtgttggagcaggaggaggacaccttcggcgacggagacggccccagcttctcccgcgaccttaagctctttgtcgggaatctccccttcagtgtcgacagtgcgcggctcgcggagctcttcgagagtgcggggaatgtggaggtggttgaggttatttatgataagactactgggaggagcagggggtttgggtttgtgaccatgtcttccgttgaggaagctgaagcggctgctaagcagttcaatggctatgaacttgatggaagatcattgagagtgaattctggaccacctcctgctcggaatgagagtgctcctcggtttagaggtggttcttctttcggttccagaggtggtggtccttcagatagtgaaaaccgtgttcatgtaggtaatcttgcttggggtgttgacgatgtagcacttgagtctttgttccgtgaacaagggaagaaggtcttggaagctagggtaatctatgacagggaaagtggacgatctagaggctttggattcgtgactttcggtagccctgatgaggtcaaaagtgcaattcagtccttagatggtgtggacttgaatggcagagctatacgagtctcattagcagattccaagcccaagcggttctgaagcttttcatctatacccgagagaggatttcggtagttgggacttgggagttatacagctgcaagatgtcattggcaatcagtttggacaagaaatacacttacatgcattgagactagatgtacacacagtttcaatatctgacagaggagaatatatcagtgtctcttgaagtttaaatgtatgttccaaatttgattgttgtcatttgtaactgatttgtagtccgtattttcactatagaagtagatgtctcaaatatttattggttaccccgttccaacattgttgtggaagaattttataattgcaatgtgcctggaaaattatctaccacagatttatcttttggttccatttcttaagagctatccagttgcttagcacttgatgaaaaggctaaaagtaactaaatcagttctaaacaatatgcaggcaaggtcaacaatataactattgacaaatgcacaaagattggaggtgtatttgaggtttgtgatcggtcaatgcctacttatagagcaattttttttggttgtttttggacatacacttgtgtgtgtagtttttttttggagtaagataggtcaccttacaattacacaattatcaagaattttaaatagaagcattgaatgtagaaatagaaagaggatagaaaaaatgatacattggtagtcaattgctactttcgaacgtggttgtattcaccctattgatttatttggttttgctttaagttttaattttcaatgtcgctctgttatgagattttcagcactgtttttttcttcataagtggttgataaaaacataaaactgattgtatcattattttaaaatttttaatttaaaaaaaaacattttaagacaattttctgaaaaattataaagaatcgtcttaaaaagtctacattttaagataatttttgtaaaaatcatcttaaaatcctcaattttttttaaaataaacattctaagatgattttgaattgaaaagattttttaagacgttagtttcaaaaatagttcaaaatcattgttaaatgtatcagaaaacataatggaacatagtttttccaatagtggtagcttatcataatattatctttgattgaattcactttggataatgcttttaatcatacgcaatttctgatatgttgcac

SEQ ID NO: 56610 - DNA, 233 bp, Glycine max
  Clone ID: PAT_MRT3847_22129C.1
cccacgcgtcctgcaagagagagggagattctatgcttgctaccttctctctgaaaaatgggtacgttcaagtttcaccagtaccatttcgtttgcagggctcttcccactgaagcagatcatcaccccaagatctacctaatgaagctctgggccaccaaccaggttctcgccaagtccaagttctggtattttctgaggaaacttaaaaaggtgaagaatagccatgtcca

SEQ ID NO: 56611 - DNA, 284 bp, Glycine max
  unsure (1)..(284): unsure at all n locations
  Clone ID: PAT_MRT3847_2212C.1
ccaaattccagggaaaaattttttttgcccatggaaaaggcaaaaaaaatggagggttctgtttctcagcccaggtttaaaaaaaaaatgaaccaccaggggttggaggggtggtagtngtagtaaccatccaaaattccaagggcggggcccctccctaatattttaattcccaaggaaaattggttgggctcccccttcctttggggggcaacaatggcccccaaatccccacccctttgggagggccccctttctttgtcttcccaagcaaggcccttccc

SEQ ID NO: 56612 - DNA, 290 bp, Glycine max
  Clone ID: PAT_MRT3847_22130C.1
ctagcaaaccatgttagtaccaaccctatgtactcttctatttcattaacgtcacaacgtgtatacactttattccacttgtaagacaaggggacacataacgtagccctactcgccgttaggaagctagatgatatatggcgattagccattaagagtagattgcaaaatgcacttgaactaggcttgcagatacattatatccttggctgtccacgagatattttacctagtgaccgaaaaacttaatacatgacgctattcagattctgtcataccatacaacctgc

SEQ ID NO: 56613 - DNA, 212 bp, Glycine max
  Clone ID: PAT_MRT3847_22131C.1
gggggttggaaaggtgaaccaggtccgtttgcaattttctcattcagaaacgatgaacactcattcaagcaattgtttatatcttgaatggtagggcgaattgaatatacctatccaaacacctcacacaagttactcacaacaaaagctcctcgacaataatcctatctacatctcctaatttctcaatcaatctacaactctcatcacct

SEQ ID NO: 56614 - DNA, 406 bp, Glycine max
  Clone ID: PAT_MRT3847_22132C.1
ttttgtttttttttttttttttttttttttttttatttgggttattgtatttatttttttttttaatttgttgagttgttgtttagtgtgatgatggttgttttttgtttttctttgggggggaagaaaccgactgttgttttcttcaacaccccgaaaaccttaatcacccatggactcttggaaaaaaaagggggggggtgaaaaaaaacaaccgaaaagcccgtgttggggggggcctgaagggcgagacccctttgaatatgtagcccccgggttcccccccacatgtggcaacaagtacgtgctttcaagccaaacccatgagaggggcaagggccaaaaccccccgttagagggtgggcggaaaaaaaacggaacagcgcgagaatggggtgtacaagaa

SEQ ID NO: 56615 - DNA, 461 bp, Glycine max
  Clone ID: PAT_MRT3847_22133C.1
cggtttcgtgtggcaaattttccctcattcattctcctctcctttccccttcctcacaaatcacttcccttcttcaataccaaatcaaattccttctcaatttgattctcttcggccatgtttgcttacagggttttgtcccgttcctctgccatcctttctcgaagcttcacccttttctctgtttcacgaaattcccaacctttctccaccaccctgtccaataacttccattccctccttcacccatctcccaacaaggtaaccgcacttcgaaaacgtgatcaaaatttggtttttcggtatttttagtagtgggggggttttatctagggttttagggtttattgaaaactctacagctttggcatttttttatgccctgtgtgagtttagtttattctggtatgatttttttctatgatatattctgtcgatttttagaatttttcccttttccc

SEQ ID NO: 56616 - DNA, 175 bp, Glycine max
  Clone ID: PAT_MRT3847_22134C.1
atctaatggttactatgacagggcaatagttttaaatgtgtataaagcctcatcgttgcaagcttatcttgcgatggatgcaggcctacactgccgattcgagaaaggaggttggaatgttacatggctgagccaatgaatttacgtatgtgggaacctccactaacttagttta

SEQ ID NO: 56617 - DNA, 924 bp, Glycine max
  unsure (1)..(924): unsure at all n locations
  Clone ID: PAT_MRT3847_22135C.1
gccgttgcnnctgccaacgccgnnncgggnntcannnnngccatngcggcgcagnnngtgtggacccccatcgacgtcgtgagtcagcggctcatggttcaggggagtggtgggagcaaaaccgtgctcgccaatctcaattctgaaaattacagaaacgggtttgatgcttttaggaaaattctgtgtgctgatggagcgataggcttttatagaggctttgggatttctatattgacttatgcgccttccaatgcggtttggtggacttcttattccatggttcatagactcatttggggtgcttttggttcttacatgggaaataacaatttggggggagggtttaggcctgattcgaaggcaatggtggcggttcaagggttgagtgcggttatggcaagtggggtatctgcaattgtgacaatgccgcttgataccattaaaacgaggttgcaggtgttggatcttgaagagaatgggagaagaaggcctttgacttttgttcagacggtgaggaatttggtgaaggaaggtggtttggttgcttgttacagaggattgggtcccagatgggcttccatgtccatgtctgccacaactatgattactacatatgaatttttgaaacgaatgtctaccaagagtcaagaggatttcacttcatcataggccaggcagtgaaacattgttaggaattaggagcaacaatcaacttgtttctttgcttggatttttctctgtcagttgtactagtctagtctacctcatcggacactaaatacaatatgatgatgagagattgtatatacaactcttgtttgtttgttttttctgtctatatcttgtaccaattacaatacctatgattaaggtcgaaaaaaaaaaaaaaaaaaaaaaacccaaagcggccgctctagagga

SEQ ID NO: 56618 - DNA, 179 bp, Glycine max
  Clone ID: PAT_MRT3847_22136C.1
ttaaaagataaggacgcgggatccaatccctttgtataaaagggagactgttacattgagcacaaccccttgttggactcgggaatatctacaaatgaacattccccagcgtttttttggactgcttccaaaagggccttctattttggatcgccccctcccgaacgaaaaatagaaaa

SEQ ID NO: 56619 - DNA, 335 bp, Glycine max
  Clone ID: PAT_MRT3847_22137C.1
aaataaaaggctcaacggggaatgaaaaattgaagtggggacactcccccaactaataatttgggggccacgtaacttcatacaagaaaaactgttttctatagagggatccaaacacgaagcttacttcctatacgggggcgggggcacccagcttttaaggcacactggtacgggccactttggggttgaaagcggtgccaccttttaaacgaagtcccagacttattaacctaatccaagttcattagggggcgggattctgcactgatgcttatagttttccaccctctcccacaacttataacggggcaaacactggttttcctcataag

SEQ ID NO: 56620 - DNA, 172 bp, Glycine max
  Clone ID: PAT_MRT3847_22138C.1
aagttgctagttgtggtacttgactaacatgaattgactatatgcaatcagggcaacaacaatcgcactggttaacttcgacgacagaaaaatatttagaaatgaggctggtataaaataaaaatggaaaacttcaataatggctatgccaaagttgagtagtataattaga

SEQ ID NO: 56621 - DNA, 478 bp, Glycine max
  Clone ID: PAT_MRT3847_22139C.1
gggggatttttttttttttttttttttttttttctccccccaaaaaaatagaggggccgtgcctcacacagagaatggttgcatgtggaacacaattttttggtggacaagataaccgctctcctccatgggtggaaaacaacctcctgttgatatcttggaacagatacgtgtttacccacaaaattttttccttcttgtgagggggccccgggccaaaaaatagagggggcccaggaaggggtatatgggtttggacccccccccttttggggggtttatgctttataaaaaagaaatcttgcctgacctttatctggggcccccacaaagtttttttccaataaaaattttgcttccccccaagggtggtgtttattgaataaagagggggttttttttcccccctttttttttaaaataaacacacctagggggggaacctttgtgtggggagatatattataaacgcggtctt

SEQ ID NO: 56622 - DNA, 1176 bp, Glycine max
  Clone ID: PAT_MRT3847_2213C.1
cggactgatatcgccttttagaaccgtcatagttgctttcttcctcattttccgattccgcaatgcaaagggtgtcccaaacctccaaaatctggaggaccgtatcctccaaagctagaataaacgtgttttccatcaacgacccttttgcttggcgctccttctctgcggttcccgtcgtggcagcaaccaccagaaaattgcatcaaccggagattccgagcagtgtccagaaatggggtgcgggctcgagcttcagaacgtcgaaattcgcctctgggttcaaccctctgcaacggaagcctttggatttccttggttcgactcctcaagttcccttcttctcctcattttccaatgccccaatgcaaaggattccgcctcgcattagaatatgggccggatatgggccacagcggaggatttgggccgtaacagggcccgcgtgctgtctctgtaccggcaaatactgcggggcctgaactcgccggagttgcggctgggcttcgcggcgaggctggcgaagaaggcggaggcgcgtgcaatgttctgggtgggctccgatgaacgctcgttgcacaacattgcggatctcattgatgctgcagagtactctctctcctttctcagaaaaggacaactccctcctcgtcacatcaactgatcaacattcttcacatgcttattgtttttcaatgtatatacattttttttctagagaaaaaaacatgaagtggagtgtgtgtcttataaggatatttagtaaacattctattagagttagttactgctaaatggattgttatggttagttacttgttgtggccactagtcagtgctcaatgctgaatataaattagagcattgtgtatatttccatcaacgacccttctcagaaaattaacaaaccttattaccttaaggattttgttagcaagtagtggagcaagcaagggctgtcctggcaggaggtagtgcgccaaggatccctctgtcggctgagcagtacaattccgttgggattgcttttcactttttgtaattttgctttttgttttttcctccaaggcaatatgccaaagcaccattagcgaagtgttagcagaaaagcttgtatatagcaaacaatgtactcaaatggaagcaagcaatataatcagaatttcctctccttta

SEQ ID NO: 56623 - DNA, 220 bp, Glycine max
  Clone ID: PAT_MRT3847_22140C.1
cctaatttttttaaccaatatcattccccacccaccacaggacaaagcccttttctaatttcaattgaaccaaaacaactcgcgacttacacaaaacaatttctgcaaggaatgaaacttatcatccaataaacattgtgcatcaaaacccctaattaaaccttcaactaaaaccaaacaaaatgcttacaaaaatattatattcaaaattaaacttcca

SEQ ID NO: 56624 - DNA, 177 bp, Glycine max
  unsure (1)..(177): unsure at all n locations
  Clone ID: PAT_MRT3847_22141C.1
agttnaangnnagctnacgtnacgctcggnacgactagngaactcttcganccgngantnaantccggaccggnacctgcaggngtaccagcttnccctatagtgnngtcgnattagaagcttggcgtantcataggtcanagntgtntcctgtgtnaaattantanccgctcacaa

SEQ ID NO: 56625 - DNA, 892 bp, Glycine max
  unsure (1)..(892): unsure at all n locations
  Clone ID: PAT_MRT3847_22142C.1
tcggactnntggtactacttgtaccttttgctatagtaatagatatatttttttgctgattaaataaaaaagaaaaaagtatgagacccttgagttcaagtgccatgatgtctgattttcaatcatgaaatactcgacaagaatgttttctatagtaggacaggaagttacattgatcaaaatctaaatgtttcatatgatttgacatcatgaaccaatgtccttttattcattcgcgtggtagcactaagttgcaaattattggtccccttatcctagtcctgaatttttaacttgtcctgattactttatgtggcattatgcagtgagagattgtgtgaaagcaaagttgcattcttctcaatttccttggtgatctttgggtccataggcttccttttcagaaaatttgagtaccattcagcagagagcttaggtatcctccttaagcttggatcattcatatctacgtaatataagccataacttgattcatatccaagcagtaactcaaatgcatccaagaaggaccatacaaagtacccttttacatttaatccactcctaagtgcatcaaccaaacttcctatgtattcatgcaagtaattcaccctcggccagtcatctaatgatgaattatgaggtgtttgttggccattttcgtgtatgtaaattggaatattgccataagtgttctttagtgactctaacagcccaaggaaaatcttggtagtaattggaacctcatatgtagaagtatcatttggaacaaatctttcaatttccaccgatagatctgcaatgtaatctctatcctccttctgcaggctgccaggactgtttttaacataaaatgagtagtaaaagtttattccaatgaagtcgatctcgt

SEQ ID NO: 56626 - DNA, 513 bp, Glycine max
  Clone ID: PAT_MRT3847_22143C.1
acctcatcatagttttgctaacacaagtatacggctcttctcaaaaggttttcatccaatttctttccctctcttttcattggtgtgcactttcacttgtggagctgcatcaactgcagtggaaattgtgctttgttcttgagatgtctggtgttcttctttgggtgagttgtggacccaaagagaacatcaactccttggtgagtttttcatgcaggagtagtagtggtggtgaaagaacacaaaagagattttctggaatcagttttgctagtggtacttctgctttttcaagtgcagtggcagctactgagacttcaagatcttcagaggagagggtctatgaagtggttctgaagcaagcagctttggtaaaagaacacaaaaggggtacaaaaatagctctggatttggacaaagatgttgaggctgatttaacaatgtggatctgttgaatgcggcttatgatcggtgtggtgaagtttgtgctgagtatgccaagacattttactt

SEQ ID NO: 56627 - DNA, 447 bp, Glycine max
  Clone ID: PAT_MRT3847_22144C.1
aaagaaaaaaatttaaaaattttattgggaaaaaattaaaagggtttgggttaatttttaatgggaaaaaaaataggggttaaccatttaaattacaatttcaaaaatttttccttaagggaaggaaaattttatttaaaaggccggggggggggccggggattttaaaaaaaagggttccactcggggaaaaaatttgaaagggggggtccatccaaaaatttgggatttggcccaatattaaaatttacggggggggggggatacaaatttccattttaaaaaaaccggggaactttttgaattttaccaacgggaataaggggaactttaggcaaattgaaaaggggggaaccaaaatttccacctattggtccaatggtggttaaaggggaggtcccaccaaatttttcctcaaaaagtaacttgttttttggggacgggggg

SEQ ID NO: 56628 - DNA, 270 bp, Glycine max
  Clone ID: PAT_MRT3847_22145C.1
gccacgcatgcgttcactgttcactgatagcataaacctcatcttgacgatcaaagcctagtgtcaggtttgtttcaagatatagcaaagaattcttctcaaaaaaagtgaacatttttcatgttttgtacaagttttgaaaatatatttttaggaattgttgactcgtaggaatataaagtactgttgtcacttgccttattgaaagttgggtattttatgttttcatgggaatgaaaatcaatttctataatatctatttttatttca

SEQ ID NO: 56629 - DNA, 368 bp, Glycine max
  Clone ID: PAT_MRT3847_22146C.1
gaagttatagagagagttgagttgtgttgagagagatagagagatagaggagaagatgaaccgtggtgaatcttacggtgctattgagacacaatacataaggtggcatcacatgcatgaaccaagggaaaaccagtgcacctatgctcttggtaaacacataagagctcctgttcaccttgtgtgcacactggtgagaagatttgatcaacctcataaatataaaccatctgttagcaagtgtataacgcaaggggatcttgtcatcggaagttgtcgagaagcgaatgttaaatgtgggcattctgccacaacaagtactgtgtggtatgaacaactggattatgaggaacaccttttctatatca

SEQ ID NO: 56630 - DNA, 757 bp, Glycine max
  Clone ID: PAT_MRT3847_22147C.1
ccacgcgtccgggactgcggcgttggacatgacagaatgacatgcgtgtcagttgaagcgcgtgagggaatctgatgaaggcagctatataaggaggcaagttgagttgcgtcagcctctttgccccgttttattgcatctcagaggccgattctttcgccgcttctctctttccttgtggtgttctcgtgttgctcgtaacaaaatggttggaagtgttgacgctttgaatgagggtttgagaatcaacggagcagttgaaccgttgcctgaggactttgatgcaacagctgtaatcatagatcccgtgccttctgcagttgtagacaatggcattctgaaggaggaggcgcagatcaataaaggaaaagaaaaaagagaaatagtactgggaagaaatgttcataccacatgtctagaagtcacagagcccgaggcagatgacgagatcactggggaccgggaagctcatatggcaagtgtgttggccagatacaaaagagccttgactgaaaggacaaagcaccatttaggctacccctataatttggatttcgattatggtgcactcacgcaacttcagcacttttccataaacaaccttggagatccatttattgaaagcaactatggtgtccactcccggcagtttgaagttggtgttttgggattggtttgcccgattgtgggaactggagaaaatgagtactggggctatataacaacctgtggtacagaaggcaatctccatggcatc

SEQ ID NO: 56631 - DNA, 2359 bp, Glycine max
  unsure (1)..(2359): unsure at all n locations
  Clone ID: PAT_MRT3847_22148C.1
tacggctgcgagaagacgacagaaggggaagtgggagttgaacaaagtctttattggccacttgtttcaatgcccctctttattgcatatgtatcataacataacattaagatatatattcagcttcttgtcttttccgttacctttttcccctgaaatcactgatccacaacaagaggcactcagagagcatttgttgatttggatttggaaggtttttccactttggttatggaagcaacttagcttccttccttctctctttattttccacattgtacaaatgaattttcagggtacttgttggtagtggtggttgacaaagatattgaagatgggaattttgagcactatagcaagcttttttggatttggagtgggaacttcaattgggctagtcattggctactatttgttcatatacttccaggcaacagatgttaaggatccagtaattcaacctttggttgagcaagatgctaaaacattacaactgttgcttccagagatacccacttggattaaaaacccagactatgaccgtctcgactggcttaataaatttatattgtatatgtggccttatctggacaaggcaatttgcaagactgcaaggagtatagcaaagcccattattgctgagcaaattccgaagtacaaaattgattcagttgaatttgaagaacttagcttgggttctctgccaccaacttttcaaggaatgaaagtctatgtgactgacgaaaaggagttgattatggaaccatcagtgaagtgggctgggaatcctaacattatagttgcaattaaagcatttgggcttcgagccacagtccaggttgttgatctgcaagtatttgctgctccgcgtataactctgaagcctttggttccaagttttccatgttttgccaatatttacatgtctctcatggagaagccgcatgttgattttggactaaaactgcttggagctgatgcaatgtctattcctggcctttataggattgtccaggaaatcattaaagaccaagtcgcaaacatgtatctgtggccaaaggccttagaggtgcaaataatggatccaacaaaggccatgaaagttccagttggaatccttcatgtgaaagttgtgagggcagagaagcttaaaaagaaagatctactgggggcgtcagacccttatgtgaaactcaaactcacagaagagaaacttccttcaaagaaaacaactgtgaaatacaagaatttgaatccggaatggaatgaggaatttaatgtagtcgtcaaagatccagaatctcaagtcttggagcttacagtttatgactgggagcagattggcaagcatgacaagatgggtatgaatgtcattccactgaaagagattacacctgatgaacctaaagcggtgactcttaatttactcaagaccatggaccctaatgatcctgagaatgagaagttgcgcgggcagctaactgttgaagttctgtacaaaccttttaaggaggatgagttacctaccagaagcggagactcccaatttaatcaagaaaagctcctgaaggaacacctgctagtggtggtctacttgtaattatcgttcatgaagctgaagatgtggaaggaaaacaccacacaaatccatatgtgcgactgctatttaagggagaagagagaaaaaccaagcatgtcaagaaaaatagagatcccaagatggggtgagtcgtttcaatttatgcttgaggaaccgccaaccaatgagagactatatgttgaagtgcaaagtgcctcctcaaagctaggcctgctgcatcctaaggaaagtctgggttacgtggatataaaattgtctgacgttgttaccaacaaaagaatcaacgagaaatatcatctcattgactcaagaaatggacgaattcaaattgagcttcagtggagaactccttgatgatggctggtatcagttgcattgcacacacaaattcccagcgtacataattctttaaagcactttttcttctgataaggtttggatgaaagccttgaaacttgattctctatgacacagagaaaattaggagtattgttattctattgttaataaacagaataacacgtcagtgactcaatactgtcctacgagttacgctcacatagaatgttgtccataactccattgataatttgatcgatattcaagtttctgtttgtctatttatgttttccatatagaatgttgttcataactctattgataatttgatattcaagttctgttcctctgtttaaaaaatatctgacacattggtgattctatataactgacatctttctnctctttttcttcgctttt

SEQ ID NO: 56632 - DNA, 252 bp, Glycine max
  Clone ID: PAT_MRT3847_2214C.1
aaaaaccgaagagcaaagagtgctattaggcgaattattgatgtcctaattttattgaagggagctcatgatgttttttttattcctgtcataacaaactgcattaactcactttatgaaccccacctaacccaccacatgatactgattttgaaaaggaaaggggaagggttttaaaatgagatccttaacaccacagtcccctttaccacgacccgagaaacataagacgagaaaaaaaaaggctaaaac

SEQ ID NO: 56633 - DNA, 997 bp, Glycine max
  unsure (1)..(997): unsure at all n locations
  Clone ID: PAT_MRT3847_22150C.1
agnataacaaaattggatgtgagatttcctttaggacacttttagaaaactgtcaggactctagaatattttcattgcataaaagattcctcttagatattttcaagctgatttttctttcttttgactagattggcaagcatgacaagatgggtatgaatgtcattccactgaaagagattacacctgatgaacctaaagtggtgactcttaatttactcaagaccatggaccctaatgatcctgagaatgagaagttgcgcgggcagctaactgttgaagttctgtacaaaccttttaaggaggatgagttacctcagagtacagaagattccaatgcaatagaaaaggctcctgaaggaacacctgctagtggtggtttacttgtaattatcgtccatgaagctgaagatgtggaaggaaaacaccacacaaatccatatgtgcgactgctatttaagggagaagagagaaaaaccaagcatgtcaagaaaaatagagatccaagatggggtgagtcgtttcaatttatgcttgaggaacccccaaccaatgagagactatatgttgaagtgcaaagtgcctcctcaaagctaggcctgctccatcctaaggaaagtctgggttatgtggatataaaattgtctgatgttgttaccaacaaaagaatcaacgagaaatatcatctcattgactcaagaaatggacgaattcaaatcgagcttcagtggagaactccttgataatggctggtaccagttgcattgcacacacaaatttccagcgtacataattgtgtaaagcaatttttcttctgataaggtttggatgaaagccttcaaacttgatttctcattattgttgataaaaacaataacgtcagtgactcaatactgtcttacgagttacgctcccatagaatgttgttcataactctattgataatttgatattcaagttctgttcctctgtttaaaaaaaaaaaaaaaaaaacaaa

SEQ ID NO: 56634 - DNA, 296 bp, Glycine max
  Clone ID: PAT_MRT3847_22151C.1
ggcaaaaaaaaattttgctttttttctttttcccaaaatttaaccaaagggttttcccataaccggggcacccccgaggcccctattttctccttttttctaataaaattaaaaaccccaaatttgacctttgccccaaacctccgggaatttcccccccgaaaccccccgtttgaaatgacccccgggcttttcttcaataactgaagttgccaaggaatccaaatgttaaatgccccaccgatgttgcgtaaaaaatgttaaatgggaaatgaaacccaccagggctttttttc

SEQ ID NO: 56635 - DNA, 1603 bp, Glycine max
  Clone ID: PAT_MRT3847_22152C.1
gaagtgggagttgaacaaggtctttttattggcagcttgttttattgccctctttattgaacttttatcataacattaagatatccccagcttcttgtcttttccctggcactcaaactcaattcactgatccaccacatgaggcactcagagagcatttgttgatttggatttggaaggtttttccactttggttacgggagcaacttaacttccttccttctctccttattttccacattgtacaaatgaattttcagggtacttggtagtagtggtgcttgacaaagatattgaagatgggaattttgagtactattgcaagcttttttggatttggagtgggaacttcaattgggctagtcattggctactatttgttcatatacttccagccaacagatgttaagcattttggaacaagaaaaagatcgtgttcttctttctggtttatcattttttgaagagccaagagtatttcaattgagttatatggtatttcaacattgatccagtaattcaacctttggttgagcaagatgctaaaacattacaactgttgcttccagagatacccacttggattaaaaacccagactatgaccgtctcgactggcttaataaatttatattgtatatgtggccttatctggacaaggcaatttgcaagactgcaaggagtatagcaaagcccattattgccgagcaaattccgaagtacaaaattgattcagttgaatttgaagaacttagcttgggttctctgccaccaacttttcaagctgaccttccaatacatgacatgattacagaattatttgagttataatctccacaaaattttattgtgggatagtttgctgaatttgctcagatgcaaccaaggataggctctaggtcaatgataaacaatagttttgtttgcatttgagattattaaaagggaaggaaaaagattatagtcaatatttgagaaatatgttctgataatagcagtgtgtccctggaattaagttgatttgaccatgaatctggtttctacagtgtgacaggtattttttgaactgaaaaatgaaatcattgtcacgtcatatttttttacacctgatccttgatgactcttccagcaagaagtttagactgattaatgtttattttcatcaatatatggcaggaatgaaagtctatgtgactgacgaaaaggagttgattatggaaccatcagtgaagtgggctgggaatcctaacattatagttgcaattaaagcatttgggcttcgagccacagtcgttgttgatctgcaagtatttgctgctccgcgtataactctgaagcctttggtgttttccatttatttacatgtctctctagccatgttgattttggactaaaactggagctgatgcttttttctctgtctcttatttattgtttcttgtaatttttgtattgcgtatgggaacaatgaattatatcgttttcacacccttctttgtttgttgaatcattatttatgatataacttgatatcattatcatgttcttactttttgtgcttgaggttgaataagctaacttctagcttttaaattaattataaag

SEQ ID NO: 56636 - DNA, 506 bp, Glycine max
  Clone ID: PAT_MRT3847_22153C.1
aaaaaaaaaaaaaaaaaaaaaaaaaaaaaaaaaaaaaaaaaaaaaaaaaaaaaaaaaaaaaaagggcggccaatataaaaagaaaccaaacttacgggggcgggctttctagaggattcaattttatatacgggcgcctgcaaccaattaacttttcttttgtgccccccaatttgaattctgtggccccttttttaccccatcttaactggaaaaaccccggtctccccccacttaattgccttggaaaaaatccccttttccccatttggccttataaaaaagaggcccccctgaatgccttttcccaacctttgtgaacccttaatttaaagggggcccccccttttcttccccccttaccccccggttgtgttgggtttaccctaagggtcaccccttttttttccttccctttatcccccgctctttgggtttttttccctttttttctccccaatgtcgggcttttttcccgggtaatttataaatgggggccccccttt

SEQ ID NO: 56637 - DNA, 416 bp, Glycine max
  Clone ID: PAT_MRT3847_22154C.1
ccaacttctggaccccttggtatatatatttgggccgtaaccagacacaggaaaatagggtttttttttccttggctttaattcgacctcttctaatttaattacagttttaaattctggttaaggctttgaaaattgggaatagggtttaaagcaggtctaaaaagtcacctagtttttgaaataaacaaataagggaaaaataaaaccgggtatgggcatcttttttttaaataagctaatttatatgaccattcacagaggccaagggctagctagctagctagcttgcatgttccaaacaaaaaaaattccgagggatgacgtcacggaaaatggctttgctccatgtttgggatatgggtatgcatgagggccctgctttggtttttgggtcaaaaacaacccaacccctt

SEQ ID NO: 56638 - DNA, 454 bp, Glycine max
  unsure (1)..(454): unsure at all n locations
  Clone ID: PAT_MRT3847_22155C.1
tnttgctgggnngtgtgttggtnnttgtcngatcgttttnnggtntngnngntngcgcnngctgtncggangctctggnntgnggctcgttgctcgttggcgctggnnttgnggtncgcntnnnnttctnnngtcgtgcgtgntnnnncgngtcntnntgtganngtgtggntggnttgnntgnnntgtgttncgtnngcaggtttgtgttnntggtgctnnntnctcnnngggtggngnngttgttcttgtgctgtnttncgtgtgttgncgtgntcnggntgtantggtgttgngngtgttcttgtgtgtgngctgttgagtgttnatncccnnttatgttgttgngcgtgntgtatcgcggtcgttngtgtgcgtgatgttgctggttggncgtgttcgtcntgtntgtgtcggnggtntccttcnnggtncttgncttngtnttgttngn

SEQ ID NO: 56639 - DNA, 1226 bp, Glycine max
  unsure (1)..(1226): unsure at all n locations
  Clone ID: PAT_MRT3847_22156C.1
caagcgtccgctcctcaatcgagccgttgcggtgttccagtttgctgacaaacatcgtggtgcatacagtaacagcctgcaccgtgcagtctgcccattttactgcgacgtcaatggttaccaggacgagctactgtgggcagcagcgtggttgcacaaggcctcacgtaggcgtcagtacagagaatacattgtgagaaacgaggtggtgttgagagctggggacaccattaatgagtttggttgggataacaagcatgccgggattaatgttctcatttctaaggaggtgttaatgggaagagcagactattttgcgtcgttcaaacaaaacgctgatggatttatctgttctacattgcctggaatttctcaccctcaagttcaatattccccaggtgggcttatcttcaaggctggtggaagtaacatgcaacatgtaacgtccctgtcttttctgctcctagcttattctaactacctaagccatgccaataaggtcgtgccatgtggcgagactagtgccaccccagctttactcaaacaccttgctaaacgccaggtggattacattcttggggacaatccattgggaatgtcgtacatggttggatatggtgcacgctacccgcagagaatacaccaccgggccagctcgcttccctcagtggcagcccacccggcccacattggttgtaaagctggatctcggtattactttagcccaaatcccaacccaaatgtgttggttggggccgtggtgggtgggcccaccaataacacagattccttccctgattccaggcctttctttcagcagtttgagcccactacatatatcaatgccccgctggtgggccttctttctttcttttcagctcactgttgactttgcaagaagtgtatctatgatttccatgtggtgcgcaaaattggtcaccctgcattgctcctaaggggaaaaaaaatggagacgagtgtcgctaatagtagtattctggtttgtggtggttttcttttcgtaagtgaagtgatagtgcaatttttgtatactatagtattttatgtaacggggcaagtctatatatagaatataaagtttatggtctagagttttaatgcatatggaattcacgtcctaacaaagcaggacaaaaaactggacttcgttgataataaaggcatgatcattgatctgtgggggggaaattatntaaggggggaaa

SEQ ID NO: 56640 - DNA, 350 bp, Glycine max
  Clone ID: PAT_MRT3847_22157C.1
ggagagggaatcttttacgatccacacatgctgatctaaaataatcttttccattttaagagttttgcttggaagtgtgtgtatctaccgctgacttatagtttccattataagtaattatttcttctttttttttcttttctgatttgctgctttctcaatgaaatcttcccctcttcatgatctgtctcaactatatattgattttgctgtttgtttgtttgtgatcaaaattgggttgattccattcatgatttccaccaaatttttcctttattgtcaatggatctgtttcattgtttgagttcctccttattcagatcgtacagttttatgaaatcatatgctat

SEQ ID NO: 56641 - DNA, 228 bp, Glycine max
  Clone ID: PAT_MRT3847_22158C.1
ttaaaagaattcatgataaaataatttatttaagtttttgaaatgattttagatatttattgatagtttattttcacaaaccatttataataaacacgacctgtggcatattggatacaattattgaaggaccaggtgatgatacctagagtaatatttgatggaatgggcaatctgaggataggcttaggggggaagtttcaatagagtccctctctggtgaaaccc

SEQ ID NO: 56642 - DNA, 932 bp, Glycine max
  Clone ID: PAT_MRT3847_22159C.1
tcttggcacatatagaaagatcacagcccagccacaaggcacagacactagactgagagatcagacaacaataaaacccaactgactctgtcatccgttaatgttaaaccccacctagctgcatcgtgtccccatggcatgccttgcatgcctcgcttggctcgctcggcggggacttagatccttcttccttctccctcaccgacacctcagagcaggcttacgcccttcttcctccatgaagatcaattacctaggtcaaattcgtccatgtatatctagccccttatgaggtgtgaaacatatttcttctcttacctttatttgtttgatgtgagattttgtcattctccgagactgctcaagcaatacatacgccagcaagagggccaataaggatttgatctcaacctttgttcttcctccatgttactgtagcctctcatgctgcttcctcctgttgcagctacatttctacaattagctataggcacgtgaccgacttcacactgaagcaagtaatcaaccaccatcgcactgggacacttatcttcctcttccgtcttcccgcccgcggcccggccctagttctccctcacaccgggggtgcccctgtcgtgcatggccttcgctttctctttcttttcgacctgctttcttctcccagctgaccttgacctctgtggctccctcctccggttgctaatccgttgccgataatggtaatgagcacccaatgttatctcgtccgcttcaaatcatcaacgagcatctcatagtgccttttcacttcctccacagtcttacctcccaccgccctggccaagttctgccaccgatcgggggtatccctgtcgtagatggccaaagcattctcaaactttttgttctgctttgttgtccaagctgagcttgaggccattgagacaacc

SEQ ID NO: 56643 - DNA, 107 bp, Glycine max
  Clone ID: PAT_MRT3847_2215C.1
gtgcacacaacatttcaatatgcaggcactgaaggaaatgcgccccgactgcgagaagccatggttttccgtgatccacctgaatactataatcctcctgggggctt

SEQ ID NO: 56644 - DNA, 159 bp, Glycine max
  Clone ID: PAT_MRT3847_22160C.1
caagcactgttcgctctctcattcgaaccattcgatctcatcatctcaccaacctgtgagtcagactgcgaatgactgtagatttacagtgccaggctctgagctatgagacttaggcatcttcgctgtctagattatgcttataacgacattagccct

SEQ ID NO: 56645 - DNA, 1074 bp, Glycine max
  Clone ID: PAT_MRT3847_22161C.1
acatagtaattgcaaattagtaatagacaataatacttctcgtattccccgctttcttctgatgttaagacagttatcaaattgctagacgatcatctgactttaggtgcattaattccagggtagtttggtcaggattgaaaactttgctttgcaatgtatgattttgacatgtattcgatccgtttcacacattaattgggtctagtttttcaatttcagcctgagaacattgacctgaaagataaagtctttgaggttataatccaatagcttcacagcagttacgacgataagaggggatcacagcttgaacaagtgaccattcaaatcttctgtcacatatccccttctcttctattcagattgaagatcacggttgatgtcttcaatgggtcctcctgctgatgaaaatcttgaaacaaaagagatcgatctcagaagtatgtcatcttcttcacttggtcaggcaccacaagcccacaaagtagcaattcctccaagacagaacctcttcaaggaattccaatccactataaaagaaacattcttttctgatgatcctctaagacccttcaaagatcaacctagatcaaggaagattaggctcggtattgaggccatattcccaatacttagttgggggagaagttacaaccttaaaaaatttagaggagatataatatccggtctcactattgcaagtctttgcattcctcaggtaagttgatactactacctcgatttcaagcttctaaagaacaggagaatttatgtaattcatgttacatgctacattttttgaggttctaacttctaatacttggcttgaaaaacaggatattggatacgccaagcttgcacatttggctccacagtatggactgtgtaagactcttcttgtctctcatcaacagctcttgcacacgtttaattttctttggatgttgttggaatgagatcattttgcattttgttatcctttgcagactccagttttgttccaccactgatttatgctgtcatgggtagctctcgtgatattgctataggaccagtggcagtggtttcact

SEQ ID NO: 56646 - DNA, 144 bp, Glycine max
  Clone ID: PAT_MRT3847_22162C.1
gtgactgggctcacggatgtgacaatgagtgccgtacgacatggagactctaggattcgctcgacggttgcactcatcgactttgaatggcaataattgataacaaggatgtgcaatactggctcataactcatatgagacgat

SEQ ID NO: 56647 - DNA, 305 bp, Glycine max
  unsure (1)..(305): unsure at all n locations
  Clone ID: PAT_MRT3847_22163C.1
ctccngtannnntacgnancgctcggnangcntgctcgnncnagcttgacntanagcganagacancgcnnacgccncnnngnnattgnnggtcnngnacatnncnnancacnactnnagcantgctgancacnttnntcanngaccaggagggnanntatggcgnggganacngagcaaagnctnggtagnnncagacnngaanntgcanngnatgnnntngngananggnacnctcggagtggtgnnngnatgggtngatgnagacganggaggtctagggggcgaggnagancnggngatnc

SEQ ID NO: 56648 - DNA, 284 bp, Glycine max
  unsure (1)..(284): unsure at all n locations
  Clone ID: PAT_MRT3847_22164C.1
cgacagctactagtcacagcccccttttttttttttacaattaccatccatacttcttaatccacaaatatctanctacaagcaagagattttcttaaactcacctcttttcctcatataaacattttaaaaacatatctcacccattttttcttacatacaaatcaaacaatccattatacaaccacttcttttactacctaaaattacttttttcatctatcttaaattactctataaccaataaattttaaacctatattctcaactattttcaaccaata

SEQ ID NO: 56649 - DNA, 254 bp, Glycine max
  Clone ID: PAT_MRT3847_22165C.1
tgtaaactcttcttcaataagccttctattgatctgggcaagtgatcttgacaggagggcacaagaatggtgttgtctataaccttcctcctacttctgtctcgactagtcattgctctccgtatgtcactgtacgtagcctatagaggttagctctaccctcaattctaggacggttcatgtcgcagagctgcaagagattgtcaaatccatcgttgccaaggcagtggcaaaagagccccgtgtggctgcct

SEQ ID NO: 56650 - DNA, 384 bp, Glycine max
  Clone ID: PAT_MRT3847_22166C.1
cacaagaggaatttcttggggggtgttcaactcaggagggggctgcaacaactctgtcggctgatgggtgtccatatttcaatgctatgggacacgatagtttagggcaacaataccacttttttgtgctgctcgcagacattctgacaaccataaacaatatgtgtgcatatgggctcaatcctggtattttaggtgctcgagttttgggcaccatatttaaacttattttacagcttactgattggaatgaaaaggtaacagtgcaaacaccatagaatttggattatagctcccactgttttatctgatatagtattgacctggctggacgtttgaattttagtggacaaaactggagattggatcacacttatacaaaat

SEQ ID NO: 56651 - DNA, 465 bp, Glycine max
  Clone ID: PAT_MRT3847_22167C.1
ctaagctgactccgcccttgtcgtcctttttttttttttttgattataatgtaatttattttaggatctgagcgccataatttttggaccgttcaccaccaacacttaaaaaccataagggtatggtctaattgggggtaacgttatgaaccagttccttgtaaaatgcataagctccaaccagtttttttgatcacgttcaatgctttacccagatttgggtccaaataacttactcctacccatttatgcctatcctaatataactttacaccaccacgacacaatatgccaactgttattctgttgattaaacctcagatggtaaacaacaaccttaccattaacaacctcatgacgatactactttttataccgaggcccggtttttgtccttacaaatttaaaccatccttggtggcccaaaaaaacctcccccttttaatgtgttttgcaggtggtggg

SEQ ID NO: 56652 - DNA, 510 bp, Glycine max
  unsure (1)..(510): unsure at all n locations
  Clone ID: PAT_MRT3847_22168C.1
gctaccaacaacaactcaacctcatcactagcaaacggtgcccttcttcgcctaccttcgaccgacaccattgaaccatccatagaacctcaccttaagcccatcaaccttggagagaccttatcagaactctatcatcgcatggagtgttgtacacagtccaacaaagccttaatgtgtgcggaacagtactctctcttgcgtggccttggtgatcagaaaatactcagaagatgtctcaggacagcatgtcaaaatgctgaggatgtgctctccaaggttgtgttgtctgcgtggttgaggtttgagaggagggatgatgagctagttggtgtgtgttcaatggattgtgctggttatgttgttgagtgtccaaagaagaatttggaacatgggtttagtncttgttcagttaatgatcactgncagtgtcagaaagagccaaatcaggaaacctgcactgatagtgtgtgtttgccagacgaggaaagtgatgttttgttctgtgtt

SEQ ID NO: 56653 - DNA, 122 bp, Glycine max
  Clone ID: PAT_MRT3847_22169C.1
gcgttcgatgataaccaggaaagtaaggttaaaatcatgtatgtagatgccaggcttacgtgttacaacgttcaggatatagtatgccgggcttgcttaatctagcatgctgggtgacatga

SEQ ID NO: 56654 - DNA, 823 bp, Glycine max
  Clone ID: PAT_MRT3847_2216C.1
attgaagctcgtgtgaaggaccttctttctcgcatgactctgagggagaagattggtcagatgacccaaattgagcgcactgttgccacctcttctgccattagagatctctccattgggagcatactcagttctggtggcagtgcaccatttgaaaatgcactgtcgtctgattgggctgatatggtggatggctttcaaaaatcagctcttcagtcgcgactgggaatacctctcatctatgggattgatgcagttcatggtaataatagtgtctatggcactaccatatttcctcacaatattggccttggagctactagggacagcgatttagttcaaagaattggagctgctacagcacttgaagttaaagcttgcggaattcactataattttgctccgtgtgtggcggtcttgaatgatcctagatggggaagatgctatgagtgttatagcgaggatactgaaatagtcagaaagatgacttccattgtttcaggtttgcaaggccagcctccacaaggacatgaacatggatacccttttgtagctggaaggaacaatgtcattgcctgtgccaagcattttgttggagatggaggtacttacaaaggtgtgaatgagggaaatactatattatcttatgaagacttagagataatccacatggcaccttacttagactgcatttcccagggagtttcaaccattatggcctcctattctagctggaatggacgccaactccatgctgaccattttcttataactgaaatcttgaaagataagctaagttttaagggttttgtgatttctgact

SEQ ID NO: 56655 - DNA, 413 bp, Glycine max
  unsure (1)..(413): unsure at all n locations
  Clone ID: PAT_MRT3847_22170C.1
ggctcgagcactgttctctatccggcaaacagatagacaggttaggctatggctgatgacagcgttgctgtctgcccagtcatgaggccgcaatatgatggcgatcaaacggcgtgtttgtgaagcatggaccctgagggcggcaaagtacccttgactgaccgtgacatgatctgngactcctgggtggatctctgacatcacggctatgatgccggcacaggctcactcctctgctgtggaggagaggttgcttgagggaatgtcacaataccaaaatgttgtgggctttcacggctcaacatatgggaatgttctagatatggagggaggcattcagctgactattacgggacaatgtgccgaccacgaaatgatcactcatcttcctctcgtgcactagtccagaccct

SEQ ID NO: 56656 - DNA, 333 bp, Glycine max
  Clone ID: PAT_MRT3847_22171C.1
cccttccggtttattttcaaaaaatccggctgttcctgggctggactcctaggcctcaaacaaaggcatgcgcgaccgctcctggtcacaatcttcagcttctaaaactcgcccggaaaagattgttcggaaaaaagttgcagccggttccgcctaatatcttatcatgttaaccacgtcatagtccaattttgcccgttgcctcttcttgagggtcatttgggggttaccggccgggtaacccaaccccggggggtatttgtcgacccaaatttttccatccacttaagggcctggttgttaaatccggtaaggaatcctttttttgaccct

SEQ ID NO: 56657 - DNA, 351 bp, Glycine max
  Clone ID: PAT_MRT3847_22172C.1
ggcttcgaaagagagagaaagatgacgaggcgtgggcatggtgactcggcggagagacaagttccgcatgtcgctgggtcttccagtggcggcaactgagaactgcccagaaaacacttgggctaagaacctctacatcatatctgtgaaacggatcataggccatcttaatcgtctaaccttggcctgcgttggtcatatggtgtgtgtcctccgtgaacaaggtacaacctcgatccgatgatgatcgtcttgccagctgtcatactttctccgcgcatgtcatggcacacaatggaccgcgtgttcatgtactttgactataatgctgtagatattgccaatcccata

SEQ ID NO: 56658 - DNA, 308 bp, Glycine max
  Clone ID: PAT_MRT3847_22173C.1
atcctcacttccttgccctcattctcatacacctattcggaacccagacgcaatgcccatgttcactccatcactcttcacacccttcttccatcacattgaacccagtgccacactgtgattatatatcaccaccaccaagctcaatctcaagcaacagcattacaccataccaatgccaatacccgtgtgccacggaattcaagcccaaaccctaacccaagcccaacctgggttttagctcgtcggtttcaaaaacttcggccgtaccaatcctaagtcggaccggtttcaagtcaaccgctttc

SEQ ID NO: 56659 - DNA, 360 bp, Glycine max
  Clone ID: PAT_MRT3847_22174C.1
tcgcgatctagaactagtaaaaaaaaaaaaaaaaaaaaaaaaaaaaaaaaaaaaaaaaaaaaaaatctcgcgccgtttcctgcgtttattatgcgtgcgcctggcaccgatatggtattttttatagcgacacctaaataaattgaccgttggccgcctttttacaacgctggaaagggggaaaaccccggcgttgcccatctggatgggggggaagcacttcctcctttcgcaatttattgatatagaaaagaggcccggcccgtatcgctcttctctaaatttagcaggctcttaggggggagggcggccccccctcgctcagcccaaaaaacaaggggggtgtggggggtattctga

SEQ ID NO: 56660 - DNA, 1743 bp, Glycine max
  unsure (1)..(1743): unsure at all n locations
  Clone ID: PAT_MRT3847_22175C.1
acgcgcgtccgctaagagatttgatgctgaggaaaaagagagttgtaactgaaaagtttgaagctgtcatgaattacgagttggaaaaaacacaatgattcaatgagttttaagctgagaaagtaccactagttcatggatgctttcacccatatatctggtaatatagataaaatttacaaacaacttacaaagagcaacacgcatccactgggtggaacagcatacctaaacttggaaaatgatgatgatccctttctacatggcatcaagtacactgctatgcccccaacaaagcgcttccgtgatatggagcagctatctggtggggaaaagacagttgctgcacttgcattgctattctccatccatagttataagccttcaccattctttatattggacgaagttgatgctgcattggacaacttgaatgttgccaaggttgctggctttattcgttcaaaatcttgtgaaggagcaaggactagtcaggatgctgatggtggaaatagttgatagagtataatgagatcaatgaattgcacctgttatgataaagccgaagcattaagttggggtttacagagactctgaaagaggctgttcgagaactctcacattaaatttatgtcttgatatctgagattgaaagaacagcaccaaatttgaaggcattggaccaatatgaagctctgctagaaaaagaaagagctgtaactgaagagtttgaagctgtcaggaaagaggagagggaaaaaacacagagattcaatgaggttaagcagagaaggtaccacttgttcatggatgcttttacccatatatctggtaatatagataaaatttacaaacaacttacaaagagcaacacacatccactgggtggaacagcatacctaaacttggaaaatgacgatgatccatttctacatggcatcaaatacactgctatgcccccaacaaagcgcttccgtgatatggagcagctatctggtggggaaaagacagttgctgcacttgcattgctattctccatccatagttacaagccttccccgttttttatattggacgaagttgatgctgcgttggacaacttgaatgttgccaaggttgctggctttattcgttcaaaatcttgtgaaggagcaaggattagtcaggatgttgatggtggaaatggtttccagagtattgtgatatcactgaaagacaccttttatgacaaagccgaagcattagttggggtttacagagactctgaaagaggctgttcgagaactctcacctttgatttgactaaataccgagagttctaaaatttcatccacagggtacagttgataagccacctgctatgtacagagcattcagagcttggttgcatttttatttcttgtttggaggtggccaaacttatgtgtgtatctcttcttttctcccctcttcaatttcatgttttttaataccagtctggttcttttttaaaattattgtaaatgggatttcctcacattctatgtatgtagaatacagtagctagatgtccaaactttcgttcttgaattatattttattcatcgatcttttttcaaaaaaaaaaaaaaaaaacaaanaaaaaaaaaaaaaaaaaaaaaaaaaaaaaaaaaaaaaaaaaaaaaaaaaaaaaaaaaaaaaaaaaaaaaaaaaaaaaaaaaaaaaaaaaaaaaaaaaaaaaaaaaaaaaaaaaaaaaaaaaaaa

SEQ ID NO: 56661 - DNA, 872 bp, Glycine max
  Clone ID: PAT_MRT3847_22176C.1
gttagttcatataaattaaattcattatatataaccttaaaggtgtatacatgaaaaatggaatacatgaaatttgggtaaataaattttatttccccgtgcattccacggattcccgactagttctgtacacatagtaaatgttgatccatgaacaaaaattaattttcttctattttttgggttaggaaacgacattaacaactagaaaccacgtgggatagcaactaatggagaactttaacactcggggaaccaattgtttccatcctatgagaagcttatattcccaagcagggaacacactttagagacaaaaaaggcttctagacaagaaaataatcaatcatatgctggataacatctgcaccttctatttgggtgatttggtctttgacctgaatgatagtatgagaagcaaatctattcttgctattgcggaagctaacatctactttttcccaagacactcgagataagcctgttacaagcccctcttctatcttggcatagctggaatcttctgttgagtcacactgctcagcatcagaacatgctttgcaatgctcttcatatacaacatgtggatattttgcattgatggtatccttccaatttgcaagttcactctgacgtctgatggatgatgttctccagccaacaatatgatcataggccacatttgaatatgcaaatcggggtttgaaagcacacaatgcagacatgaaatacaaatcaccggactcttgaaccatgcgttcaagcaatggaggttttccttcatcatcatcagtagggaaaagatgccgacctgttcttgtaaaaataaaatgaataacacagctaggcaccttctgaaaagcaggtacccc

SEQ ID NO: 56662 - DNA, 248 bp, Glycine max
  Clone ID: PAT_MRT3847_22177C.1
tttctagtttttccaaaacggaaaacacaatgggactcttacttcccattaaaccggttgctttttctatacccgggagagattgacccttattctacacacaaactcaagcattttatacaacccccaacgctggcagaaacaacctgctccattgtcaacaagagaacatttgtgaaggctaatttgcaaacccctacccaacaaaaaaaatcgttcttgcaaaaaagagaagcggctggaaaatt

SEQ ID NO: 56663 - DNA, 229 bp, Glycine max
  Clone ID: PAT_MRT3847_22178C.1
attctacagtgcgcatggacactgggagcatcacgatgtcaccgtgaacgaccagaataccctgctcttcggtgacaagccagtcactatttttggacacagaaaccctgaagagatcccatggtggtcacctggagctgacatcattgctgagtccaccggagttttcaccgatatggacaaggcctctcggacatttgaagggtggtgcaaagaagttattatgtct

SEQ ID NO: 56664 - DNA, 1037 bp, Glycine max
  Clone ID: PAT_MRT3847_22179C.1
ctcgagccggatttttaagtgacgggaacaactgaaaagagaatagccagatccagacagacactgccagtgcgagaagcctatcagcaaacagagtcttcttttctttttcttttttctctacacacagtgaaggaaggaagagagtatcatccatggcggccaccagagcagtaaccattgccagcaactccacatgctctctgcttgcaaagaaaacctttgtgggtggcactgctctttccctcaacaacctcaaattttgtcgtactaggaggtcttacacctgcagagccatctacaatccccaggttgtcgtcaaggaagaaggccaacccgaaacccttgattatagagttttctttggacataaaaatatttacacttttttttataaaaaaacatttacactgttagttcatatatattaaattcatatatataaccttaaaaagtgtatgcatgaaatttggataaatatattttattgtccccgtgcattacacggatttcccgacaagttctatacacattgtaaaggatgatacatgaacaaaaattcaatttcttctattttttgggtgaggaaacgatcgacatcaacaagccagaacccacgtgggagaactttatcactcggggaaccaattgtttccatccaatgagaagcttatattcccaagcagggagcatactttagaggcaaaaagcttctagagaagaaaatgatcaatcatatgctgtataacatccgccccttctatttgtgtgatttggtctttgacctgaatgatagtatgagaagaaaatctatgcttgctattgcggaagctaacatctactttttcccaagatacacgagataagcctgtaacaagctcctcttctatcttgtcgtagctgttaccttctgttgagtcacactgctcagcatcagaacaagccttgcaatgctcttcatatacaacatgtggatatttttcgttgttggtatctttccaatttgcaagttcactctgacgtctaatggatgaagt

SEQ ID NO: 56665 - DNA, 777 bp, Glycine max
  unsure (1)..(777): unsure at all n locations
  Clone ID: PAT_MRT3847_2217C.1
attctccaattctccttctccttccaagttaatcatgggtttcaaatccctttttaacatgaagaagaagaaacttctgaagacgatgtcgtcttcgtcctcattgccccacgcgccaccggtatcgttgcattcatcacgcgcctccgtgatggaggaccttgaatatgtcttcaaaaagttcgacgcaaacggcgacggaaaaatctccgcttcggaactcggctccatgatgaagagcctgggccagcccgcgaccgaagaagagctaaagaaactgattcgagaggtcgattccgacggcgacggtcacatcaacttggaagagtttactgagttgaataccaaggacgtggaccccgacgaggttttggagaatctgaaggacgctttctccatctttgatcttgacggtaatggttccattaccgcggaggagcttaaaatggtgatggcgagcctcggagacgcgtgttccatcgaggagtgccggaagatgatcgccggcgtcgacggcaacggcgacggcatgatcaacttcgacgagtttcaaataatgatgaccggaaacatgaacaaataaataactacgtcaaaagtggatttgcatattatttctggatccgatttccgtgatgatgatatgagattttctctctgcatggttgttcacactgctatgaggttatttcgtcttttttcttttctttttgagaattctgcgtaaatggggtagtatcttaatttttaaagattaaccaccaacnatatagctgt

SEQ ID NO: 56666 - DNA, 451 bp, Glycine max
  Clone ID: PAT_MRT3847_22180C.1
gagggacaccaaccgtttttgatttgttcacgaacgcgtccgctcaggaaaggatcatttgttctagttaaatgttgcggtttagtctcctccttcgacaatcgaatggcgtgttataatatatccagtgaaattaattccttatccactcctttcgccctgtttacaacaacattgctcaatccgaagcttatgagtctatatgattagctgcacctattggacaatggaaaatacggaataacatgctacttgagaagagatgaaagatgccttccatcattttatgacacagggagtgaatcgttggatacataaacgagattctctcttttgcatcactgtgacatgtgtgaacaaaaaattctgaaatcatgttgttttcgacattttcaaattgaatattgttgatatttccaaacggacgatcccattggttgtcattgaaaag

SEQ ID NO: 56667 - DNA, 419 bp, Glycine max
  Clone ID: PAT_MRT3847_22181C.1
ggaaacgaactatccttttcttcttttggtatggagaacaacagtattgccatgacaatccaaaaatcatgacatgcttcccagacaatatcctttttggggaaccaaagaattggcggacttcgaaacaatgaaaaaagggacctttccatttaattggattttgacaaatggtttgtgtattttggccttacttttacaaaatttggggccgggagagttttgaaaaaaaccatggtagatggcaggggtcaaaattgccgaatgagatggccccagatttatggggctagaatccgatccatacttagggggcatgtgaactttttgggggacgcttgcaattactaaaaaccctgtttttctaattgagggattcaatttgctgagaaggggtttcaaattcagtaaaaagttgg

SEQ ID NO: 56668 - DNA, 1281 bp, Glycine max
  unsure (1)..(1281): unsure at all n locations
  Clone ID: PAT_MRT3847_22182C.1
aacctgaaaaaacaggaagacaccaagaaagtcaccaaattaaaaatgatgagcaacattttttctctctgcctcagtttttcattactcttctacgtggctcagggagccacagttactttcacaaacaattgccaatacacggtgtggccaggaaccctaaccggagaccaaaatcctcagctgtcaacaaccggtttcgagttggctcccggaggaaccaactctgtgaacattccatctccatggtcgggccggttttgggcccgaaccggatgctccaacaacggagggtttacatgcgacaccggagactgtgcctccggtcaagtcgaatgcaacggtgccggtgcaatcccacccgctactttggtggaaatcaccgttgcaccgaacggaggacaagatttctacgacgtgagcaacgtggacgggttcaatgtgccggggtccataaccccacaaggtggaagtggcgaatgcaaaacctctagttgtccaaataacatcaacgatgtcaatgtgtgcccttcggagctccaagtgaaagggtctgatggtaatgtcattgcttgcaatagtgcttgtgtggctttcaatgaagatcaatattgttgcagaggagattacgacacagaagagacatgtccacctacgaactactctcagattgtcgaggagcagtgtcctgatgcttattcctacgcttacgatgataagagcagcactttcacttgcttcaacggacctgactatgccatcatattctgcccttgaatcctcatctcccccaatataaataagaccatacataaatnatatatatatatatatatatatatatatatatatatatatatatatatatatatagtttatatactatggtcgagccatagaatgcagcatgaataaagcatcacgtattttccctaattgcatgtatatattcataaattacatcttactataataaagtttaaatttcatatttccgtttctgtggggttttgtttatgctcctttgcctagctgccctcttttaattgactgtctcacatccaaggtatgagctagctgattataatatttacgatgacaataaagagcaatgatcaatgagataagtttttagtcaagattatctatttatattatttctaacttgaaacaatattttttatttaaaaataagtgtatttccatgatccttaaaattaatatgttgggtaaattaaatagctatttaaatgtctaatttatttctaacttataacagat

SEQ ID NO: 56669 - DNA, 141 bp, Glycine max
  Clone ID: PAT_MRT3847_22183C.1
gcaggaaattgttccttgtttttttttactggagattttgtcttttatttgtagaggatgaccgttcactatgaaaaaaactgtgaaaatatatttggctgggtgacgctcactttccgctgacaaaatcggaggtctaag

SEQ ID NO: 56670 - DNA, 361 bp, Glycine max
  Clone ID: PAT_MRT3847_22184C.1
cgagctatcatatccaaacacttttcttcatatttttcttcctcttctggctctaggtctaggggagactagcattatgggggctacagcaatcctattggtggctatgtgtgatcttcccctcatggttgaggccattcacccagcaatgaaccctttttgcgtgaaagcacgagtctactgggacccttgccgcgctgattttgcaacctcattacccacctacattgcactggctaacattatgtagaaatgcttgagcatggttaacacactaggttgtacacaccaaaacagcctacactgacttaactgtgactcatcaacaagtacgtggacgaggatcacccagatcaatatg

SEQ ID NO: 56671 - DNA, 483 bp, Glycine max
  Clone ID: PAT_MRT3847_22185C.1
tataatccacaatccaaactattattttccattggcaagagtaatgacatttttaatatcaagcggaacaaaatctacacaaacgaattaaaatccattaaggaagctcatgtccctccttactgaagagataagggaagattcaaatttctcaaggcatgttcagaaacaggaacaatgaaaaggatttcattctctcaaacgcccggatggattaatgatagacagctcacattaacccttaatgattagtgcccacttaaccacaacactgcttaaatcgaatgccctccaccatactttttatttgaaagggattaaaggcttaaatcgcgttgaccccatacactcttttaattgctcttcattatcctttaaagtcccccaatatcttagtccactccttggaatctcaaaacaacctaattctttttttgccttaacctaagtagaaggtttattttcaaataccaccaggcacaa

SEQ ID NO: 56672 - DNA, 1120 bp, Glycine max
  unsure (1)..(1120): unsure at all n locations
  Clone ID: PAT_MRT3847_22186C.1
cggctcgagagacagccctactagtcccaacttcaattcaactccagtaacgggcctccattaatgctctcacccctttctttctctctctctatttattatttttttctttttctttatttattcatcccccatactctcactttctattccatcaataatctctttcactcctgggatctgcattccctttttcttctatttttttccgactattttagggttttcgtttgtcgcctcctcgatccgcattccttcgtcgntgttcatgattccttcctgacaaatcgcgccacagcaagtccaaggcagcaccctgctccacccaccaaccccaactacctcttcctcaagggaacaaagaggttcatagacagcgacagcctctgaatctgttgtctcctgattctggttcatccagtggtggggttgcagacaaggattcattctcatctaaattcgggtggagatctacgaagcagctgtttggaactccgattaagaagttattagctgaagagatgtcaccgagagctgaatccaaaagaagatcacctggtgtgatcgccaaattaatggggcttgatgggctgccgttccagcagcctaccaataagcagcataataagggtttgtctgtaaaccaacagaagacagcacaattagaaaaaacacgcagcaaaggagtgctatatagtggtcaatcttctaggggatgctcaaaggatcaccaagaatttaaggatgtatttgaggtctcagagattccaaaggtagagagccataggtatccatcacaggggtgtgcagacttgatgagcactgatgctgaaatctcattcattgaacagaagttcatggatgccaaacgacttgcaactcatcaagacttacagtcttcaaaggatttctgtgacacacttgaggttttggactctaacaaggatcttctgctaaaatactttaagcgtccagattctttgtttaaaaagcatctaaatgatcttcaagctgctcctgtccaatcacattatgggcatgtaaaacctatggatattgagaagtatgaacatgacttcaatttggatggcaagatggggggaggaaaaccacggggtgg

SEQ ID NO: 56673 - DNA, 1016 bp, Glycine max
  Clone ID: PAT_MRT3847_22187C.1
tttttttttttttttttttacttagaaatttaattaaatttaaaaaagctttgaacaagatgatcatgaaagtacaacagcagtgattaaaatttaaacacaagtacacaactatcacaacgattgccatatgccgcaaacagaatttccacctattcctccaagttctattctaacttaagcagaacctaattcctagtcattaaacaaagacaatacagataacaagaagttaaaaaatagcctccaagaaactatacatgcacacatggaaaagtgaagcatatgaacttgcaaggtgtagcccttcttgtacatacataactaaaattgctctacattattgaacatgcattagggttgtcatcactgaagagggaggtgagcttctcatccggtgcgttagggttggggagtgcttgttcagtgtttttcacataccctgatggcgccttcttgtcatatgcctgaactacatagggatatgccaccaaattgtactgaatatatggccaatactccgctttttttcgtgcgttgcactctctctaggaccccgtgtttctatccacggaacctgaccctgtccctttgttttgttctctatacccctctacttgtttcacacctgacatgttggaaacagaattccgcactcttctttcacagccatcgcagtccagtgtcaccgtgatttccgcggtctgcagcgcgcgcgcgctccgcgcgcggggtggcgcctgagcagtcatctgaaaggaaatcgagagcacccatttccttggttctttttttagcgccccaatcaatggagctctcacgcccacgctcgctcacgggctctcgcgcactctctcccgcgctctcgctatatatatatatatatatatatatatagagagagagagagagagagagagagagagtgagagcgagtgagagagggagggagggagggggcgcgttaacgctaattaaagaggaagggagggaagagctctataacaatattttgc

SEQ ID NO: 56674 - DNA, 338 bp, Glycine max
  unsure (1)..(338): unsure at all n locations
  Clone ID: PAT_MRT3847_22188C.1
ttctgatccgatctaagctgcgnnnctggtgttgtttgttgtggctgtgctgcgtggtgggtaccttgattttcccggtgggcatctggaaaaggagggttcgcttcgaagtagcggcacaaaaaaccgctccgcaacccgcgccgctccagctgcgacccgaaactgcgccgctacacacatgtccgtcgcggatgggtgccgctccgccgcaatagcggtcgctacggcaactattgacaactatgattaaatatgatgcggggcctacaaaattgtgtcattttcaataaattnnnaccaatgagaggctgttnnnnnagagagtgtctaagagt

SEQ ID NO: 56675 - DNA, 330 bp, Glycine max
  Clone ID: PAT_MRT3847_22189C.1
atgcacccgtactttagctggtcctctgggtgaagcccaaggccacatttgctttaatttgggaggcaaaactgaccatttatgaatgggatttatttgctttcttaacaggcctatcctgaagccaaaggaaaggaggatcggacttcctcggtgcaactcaactccacagtttgaacacataaggaggcacatatgttcatatgtgaactggacttatctgttttgtgattaggcctatcctgaagccaatggaaacgagatcgtattacctcgacggattccaagttcacatttgtaagagatcaggaggcactgatgatcatatat

SEQ ID NO: 56676 - DNA, 550 bp, Glycine max
  Clone ID: PAT_MRT3847_2218C.1
ctagctgtaatttcattaccataatgatataaaatccatatgaacgttcatcagacaagtagcccaggattgtcatctaacaagcacatcaaaaatggcaggagttaataatggctactgcaaattagagttggagtcttcttgggagataaacgacaaaccgaaaggacctcaattatttgaacatgatgatgatatgaatatgaaccattaggaatgttacccgtcctgacacgattagtcatttttcttttttctgctgccacttgtagagttctgctcagtaagcattttcaacacgttcaccaatgcttgcaaacggtcccatacgctgagcccgtaaagtgcttcaacaagcgactcctggaactcaaatccattttctgcaacaggatactgtataggcttcggtatcacagtttttatgaatggccaccatctatcttcaacaacagattttacaaggcagcatgctcgcaaaccctcaacaccaccgaatcgtccaaatccactgtttttcacacccccaaatggcagggactgacacatg

SEQ ID NO: 56677 - DNA, 397 bp, Glycine max
  Clone ID: PAT_MRT3847_22190C.1
gttattagagattttgtcaacccaatcacctttgattcatttggatttatattacgtcacttactcaatataacccaaaccgcctggggaactcccccggcataagtgccgctttaacgcttaattaatggtaatggtgaaccacaccccatcccattgtaggtgaatctcctacaaaaagcttaatacattgccaacgggacactatggtgcaatctttgcctcaatctctatttgaacagccggggatcaaacgaatgcccatacacaaagttctcagagaactacaatgttacgaggaagaacgccaatactaactattttacacatgggagccgttcttacactgaagaaagacaggaggtctgttctgtaaacaaagccaaaggagattgtt

SEQ ID NO: 56678 - DNA, 201 bp, Glycine max
  Clone ID: PAT_MRT3847_22191C.1
cccgggtggaccccccgccccctccctcgctctctatgacccgagccgaacagccgagcctcctctgccgcttggacagagcggcagcaatcaatcacaaaggcatgcaagagagccccctctattcatagaaacggagagggataatccaaccgtcccacgaaaggacacctcactgcgcttgatagcaactgcggacca

SEQ ID NO: 56679 - DNA, 196 bp, Glycine max
  Clone ID: PAT_MRT3847_22192C.1
ctggcccaagcccctcaagttaaaaagtaaaagccccattcccccataatctggacataaatttatggcggaaacatttttttttaattcactttcttggagcatctctagcttttttgttattttcctgcattttcatcctcaggtttacgaccccccaatgaggagcctttagagactattattcttaaccttg

SEQ ID NO: 56680 - DNA, 354 bp, Glycine max
  Clone ID: PAT_MRT3847_22193C.1
gcactgatttcttggtgactgcacgcgagaacctgtcccggataaaatccatgattggacgacagagatgaacatctagtgctacgtggcgatggaaccatccgctcacaacatctagcaaggaccaggattcacgggctcactgatcacactgcatagctttatggcagaccaagaacttggcatgtagctgaatcacatactcttgccgatcatgaacctgcatctggttgcgtcgtagattctggaccttgcttataccacacacactcattattgctgccatgctacgatgccttgtacaccccttgtgtttattttcattgcatggagctatctggggaagctcctata

SEQ ID NO: 56681 - DNA, 385 bp, Glycine max
  Clone ID: PAT_MRT3847_22194C.1
cccaaaattcaccccatattttgaatgaaaatagatccaagacaacaagatggggggctttaacctttagccccaactaactcccataaagatcaagaaaaaaatcccctttagcgcaacctttttgtttccttttcaaactcgagtggggggagaatgtctccttttttaacgggcccttaaacattcctaatgatatgacggttttgatcatccaaaaacttcattttaacctgagtcacctgtcctttggatccagtccgacccataattttgacaacaagagcatgcttaacctgaaactccatcctgatggctgttgcaaaagacaaacgaaaaaagcaggccccgttagggttttcggacccgtgggcggacccttggg

SEQ ID NO: 56682 - DNA, 487 bp, Glycine max
  Clone ID: PAT_MRT3847_22195C.1
tacttttgacttgacgtaccggcgttaggggctcactggtctgccaatgcaggatggtgtggtctgctgagaggtcaaaagaatgtagccttgagaggtgatctggttgcatgtgcccttccacaggccagctatgttacgcattctatgaggccaggaggcctcacgacgacgcagccgtcgagatagttgaagataatgctcaatgtgtattgtcattaccatagtctatttcgaatgtggacatggactccatcccaaagtacatacaacaagatgctggatgaatcaaatagcagtgtgcttgatcatcatcaccatgagagccctgatcctggacatggacatgatcactattgtgattctcacatccatacgagctgattatatggacgcatatggtctagttcatgtacataatgaatggtgaaagaaatcatgggcggttcatgaatgttactgcctaacattctcgctaagagatagt

SEQ ID NO: 56683 - DNA, 308 bp, Glycine max
  Clone ID: PAT_MRT3847_22196C.1
attcaacttttaaactcattcacctatatctctttttccgttaattataaccttttcttaccaatctcattccaaaaaaactttaataccccttatcattactttatatcttttcaaacttctcaaaacaaaacaacttctgcaattttcttcaattctcttatttttaaacataacttctatctctcacttctcatcatattctccaaaactccattttaacaattccaccccacaattttcaattttttcacaaatacccatattttttcaattaaaaatcaaaacaacatttctattcaacaatt

SEQ ID NO: 56684 - DNA, 825 bp, Glycine max
  unsure (1)..(825): unsure at all n locations
  Clone ID: PAT_MRT3847_22197C.1
ggaatactaaccgtctgattatcaaacagtccataataatgactgcgtgaatgcagagaattttattccatacacgacattgtctctcataatatttaccatgccagcatgggactagtagattcttgcagtaatatttggcataaaaattgcataaatcttttacatttttactacaaatgatgtaacttgtcatgtcaaattgccaaattgatgcttacaattacaataagtttgaggaacttggactatcagactcacacgagtatttctctaaaacgaactcaggtaataattctcttaatctctgttctctggtaaagccaaattaataccagaaccaatttacgtgtagtctttgccaaaaaaaagcctcgttgaactgtaacattttcccccccctaagaaagcataatagcacatgattctcaaggtggcacgctgaaagccaatgcttctttggaatctgagcacttccttaaagccgaccttatctcctttaacatctcgttaatcctgataccctttagaacgctaactccaacaacagagagaggtcgtggatagtcctcaagtcttttttccttcctgtcagtttcatcagacaatggatctagaacttcagagctaggttttggatcggaagcagcaccattgttgccaattctcataatttcttgagccaatgattgaagtttgtcctttgcctctggtaggtcaatcttattcaaaattataccgattgtagaatcctgagtaccttgaacggaatgtacattataattttgaataagattnccctacgnagaggngnnaggacaaacg

SEQ ID NO: 56685 - DNA, 389 bp, Glycine max
  Clone ID: PAT_MRT3847_22198C.1
gccttgaggtgaggacctgaggcccctgaatttttgaatgaaagagctggggcaaggaaaaggggaactaccaaggtacagtttgtgagcatggtgggaatacaccgatcagttgcagtggacttcggaactacgcggttagtggcatggcccggcgttggaactggagatgtcaaaccgaagaccatgttgtgaacaggaggaaacgaaagtacgatcgggtggttggttgggttaagattcaaaggactagttgaggtgaacttgccattgtagtagtgaacacatacacacactcgtgtttctattgcacaaacatggatggctctgtacacttgtgcgtcatcaagaacatgatcactgtgacatcccaagctgactgtgctggg

SEQ ID NO: 56686 - DNA, 495 bp, Glycine max
  Clone ID: PAT_MRT3847_22199C.1
agaaaaccaaagtataaagttgtataacaaaagtctaacaaaaaaaatatctgtccagtaactaattatttgatgggggatccaagatggatacccctctaatgtctcaaacctgataaatcaaactgaacttcacttacaatttgatcagaaacatgtcccatgaaaaagatggtgacaagaacaaacagctttgccaagcattacagtggcaaaaaaaaattcaaaaattaataaactatcattaagcatactaaatatggtgcatctctccagcaatgcactattaaactactggaaccaatcttcctgagtatatcccgcaatctgatgttacacctcaatcaaattccaagaaaggaacctagcctcgtcttttttaaccagtttcccttgatctactgttaccataacatatccaattaacatatctcctaagcagcaattcctctattagtttgtctacttattacattgtagtttccaataaaaccc

SEQ ID NO: 56687 - DNA, 240 bp, Glycine max
  Clone ID: PAT_MRT3847_2219C.1
atgagaatgtggaggaagggtcgttttatgagtactattatgggaagagaaaaggagggtggaagaggttcttctcttacggcaactctgattcttgtgcttggatttggttgcaaatgggttggagaattttggtgagcttcggaattgcgctgcttgtgttctacattgctacaaaacctccatcacccaatgtctccgttgagatcgcaaggtttccagaatttaaactagcggaag

SEQ ID NO: 56688 - DNA, 908 bp, Glycine max
  Clone ID: PAT_MRT3847_221C.1
ttcgtccgcgagaagacgacagaaggggagcttacctcatccctctccacattaatgctcagcttttgcaaggtatgcaaggacaaatcagtaaccgcatcctaaatactcttctgaatcaacaacacattacaaccagtggccttgatcttcttaatcatgctgagaatataactacgctcttcttttcgaaacctgtccatctgcagtaaccaacgcaaccacatcactctttctttcaaatctagggtttcctccttctgcaaccatcaatgtcggcaatcgcggctccccaacacagatcctcgaagacagagtcctacgtggacaataagcgcaaggaggatatccgccatgccaacatcgtggccgcacgctcagtcgccaacgcggttcgcaccagtctgggccctaagggcatggacaagatgatctccacctcctccgacgaggtcatcatcaccaacgacggcgccaccatcctcaacaagatgcaggtcctccagcccgccgccaagatgctcgtcgagctctccaagtcccaggactccgccgccggcgacggcaccaccaccgtcgtcgtcatcgctggcgccctcctcgagcagtgcctcctcctcctttcccacggcatccaccccaccgtcgtctccgacgccctccacaaggctgccgtcaaggccgtcgacgttctcaccgccatggccgtccccgtcgaactctccgaccgcgactccctcgtgaagtccgccagcacttccctcaacagcaaggtcgtcagccaatactccacgctcctcgctcccctcgccgtcgacgccgttctctccgtcgtggatgcccccaagcccgacatggtcgatctccgcgatgtcaagatcgtgaagaaactcggcggcaccgtcgac

SEQ ID NO: 56689 - DNA, 353 bp, Glycine max
  Clone ID: PAT_MRT3847_22200C.1
cggccgggctcctagtgatactttttcattttcccttttgtaccaattgcctttcttgcaaatcaaggagaaatgcaaaagagcattataaagttagttactatgatttgcattctttcacttaacgtgtactcctttttcacaaatttgaaacatgcgatgtaattttgaaagttgttgcatttgggggcttgaagctttctaagcctagtgttgaacctgccttgagctaattacagaatgcacttgagggtctggggtttatgagctcaatgcaattatcatgcttgtcatctttttgttatcaaattttgaccactatacgagctaagaccgttaatggttagcacatc

SEQ ID NO: 56690 - DNA, 445 bp, Glycine max
  Clone ID: PAT_MRT3847_22201C.1
cagatcaaaaaatctacatttttcattcatttcctcccccaattgggctagagtcaccaatacagtccagtgccaatgaccttatcactaactagcttcactacattcctgtttcatgctgtaacattcagagaaacacatcctccactagcaactaatccttttaaaaaaaaatgcgcacacgaatccgagtctaattccacctttttgtacacactacacttacttatcgagcgctggtccgacacgactttgttgccaaacacttgttcctatgcacccacgcgtcactatgggatgcccaatgccgagcctccaacgtctactgccatgtttcacgctgaacgaataacggagccctcgccggccgatccgggaacctgggattttcgtgcgaagaaaccgatgccgattctgatcccttggcctaggactgccacgcata

SEQ ID NO: 56691 - DNA, 1815 bp, Glycine max
  Clone ID: PAT_MRT3847_22202C.1
ccttcgctttcggttctggctcatttggttatgggcttggtggtatagcttcagatgaaccagtgaagagttccgagggttatattggaaactacaatgttactagtagacaacctaatagagattcttgagctcaccagtgagtgtttactgcaatccaagtagaaatattccttgcaacttcctgtacttatgtgaatcgctacctaggagatatgatagttggaaatgtcatggtagcagtagatcaaggaaaactggtcaaaggttaatgaggtattgtgaattcatacatctcaatcacctaagagatacagctcataaggaaattcgtcatatatagctaacggtgttctttcttctttcttctttcatttgaagtatacatattcaaagacaaagcagttacaagtgattttgtgtaaggcttgttttttttcttttttttcctccttgttttggtcctcttcatttttcaagacttaggttcctttcttggaattggattgaggtgtaaaatcagatttgcgggatatactcaggaagatttgttccatgatagtgtaatagtacatctctggagagggtcctcgtcgttagttggtttaatgttagattattaatttttgaattcttgtttcttttgccgctgtaatgcttggcatgcaaaagtgttggttcttgtcaccatctttttttttcttttctatggtatatgtaactctgatcaaattgtaagtgaggttcagtttgatttatcaagtgtgaaacttgagtgggatgcctatgtaggatccccatcaaataattaagctgctgaacagttttattagtttttttttcacacttttgtctacaactttgcatttggtctattattgaagtcaattgtatgctcttgattttcaagattagtcaattcttacttcctggcgcgtacctcttggtggtgtccgtgcctcgaggttggcgatggagtctttgaggtcctctctacttcaggtgatacccacttgggtggtgatgactttgataagagaattgttgattggctggcttctaacttcaagagggatgaaggcatagaccttttgaaagataaacaagctcttcagcgtctcactgagacagccgagaaagcaaagatggagctctcaacattgactcaaactaacatcagtttgccattcataactgccacggcagatggacccaaacatattgagaccaccatcacaagggctaaatttgaggaattgtgttcagatctttttgacaggctcatgacaccagttgaaaattcattgatggatgcgaaactctcgtttaaggatccttgacagaatcatcctggggtggtggatcaacacgtatcccacctgttcaggacgcttgccaatgagaatccctagcaagggacccaaacggcgatgtcattgatgcagatttcactgactctaaatgagcaggcaactagttattaccaatagagagtatatgttagtattttttcccccattatatgttttcttctgttccaaattcttaataatttttgtcaatggagagtgggtgcgtgtttccttcaaatattagacacggatttcataggttcgaattgatgctcgctttgtaccctggaattttgtctcagtaacaacactggtattattatgcgtggcaaattattataggctaaaaacgtttcagtaagcttatgaaacgtgatgacagattctcagggaaaacgatcgattcttcctacctttataatacattgcaaaaacacaagcataacagaaattgttaatcgtt

SEQ ID NO: 56692 - DNA, 1564 bp, Glycine max
  Clone ID: PAT_MRT3847_22203C.1
ccacgcgtccgcctctggcaaaacccttcttctcttctcttggtttcgttctgtgcatctgccaaattaggattaggattagggctaccaataccaataccaataccaattctattctatggcttgctcaagcgcccaaatacacggtctcggaaccccttcctcccgaaccctatttttaggtcagaggctaaataccaaggccgcctttatcaagctcaagtccacacctagaagactccgccctctcagagtggttaatgagaaagtcgtcggtatcgatttgggaaccaccaactccgccgtggctgccatggaaggcggcaagcccactatcatcaccaacgccgagggccagagaaccacgccctccgtcgtggcctacaccaagaatggcgacaggctcgttggccaaatcgccaagcgtcaggccgtcgtcaaccccgagaacactttcttctccgtcaagaggttcatcggccgcaagatgtctgaggtcgacgaagagtccaagcaggtctcttacagagtcatcagagacgacaacggcaacgtcaaactcgactgccccgccattggcaaacagttcgctgccgaggaaatttctgcccaggttctgaggaagcttgttgatgatgcttccaagtttttgaacgataaggttaccaaggccgttgttacggtgcctgcttacttcaatgactcccaaaggactgccaccaaggatgctggtcggattgctggtctagaggttcttcgtattatcaatgaaccaaccgctgcatccttagcctatggctttgaaaagaaaaacaacgaaactatccttgtttttgaccttggaggcggtacctttgatgtctccgtgctcgaggttggcgatggagtctttgaggtcctctctacttcaggtgatacccacttgggtggtgatgactttgataagagaattgttgattggctggcttctaacttcaagagagatgaaggcatagaccttttgaaagataaacaagctcttcagcgtctcactgagacagccgagaaagcaaagatggagctctcaacattgactaaactaacatcagtttcttattcataaggttcacggcagatggaaccaaaaatattgagcaaaacaaggagagcttaaagaccccatttttgggggttcaacccaacctatcaaggatcccatggctgcactaaatcaggaagtcatgcagtttggtcagtccctttacaaccaaccagaagctgcaggcgcaggagggccaacccccccacccggtgccgactttggcccctcaaaatcctcaggcaagggaccccccggtgatgtcattaatccaaatttccctgcctttaaatgaccaggcaactagttattccccacccacagtatatgttagtattttttcccccattaaatgtttttttctgttccaaattcttaaaaatttttgtcaatggaaagtgggggggtgtttccttccaattttaaaaaaaaaaaaaaaaaaaaaaaaaaaaaaaataaaaaaaaaaaaaaaaaaaaaacccaaag

SEQ ID NO: 56693 - DNA, 1334 bp, Glycine max
  Clone ID: PAT_MRT3847_22204C.1
agataatggagtgacatccaacagcacaatatcactgacatctccagccaagacaccagcctgaactgcagctccaagggcaaccacttcatctggattgacagtgacatttgggtccttgccagtcaacttctttacaagctcctgaacagctgggatacgtgttgatccaccaacaaggatgacttcgtcaagatccttaaacgagagtttcgcatccctcaatgaattttcaactggtgtcctgagcctgtcaagaagatctgaacacaattcctcaaatttagcccttgtgatggtggtctcaatatgtttgggtctggaaactctaggtggtgtgatgacaaaaattattccaagaaacactactcttcccacctcaaagtccgaggttttctcaaccgctgctgatggacagaccagtgtagagatcaatgtccttcagggggagagagaatttgttagggacaataaatcacttggtagcttccgcttggacggtatccctcctgcgcctcgtggtgttccccagattgaggtgaaatttgacattgatgccaatggcattctctccgtcgctgctattgacaaaggcacagggaagaagcaagatattaccattactggtgctagcaccttgccttcagatgaggtggagagaatggtaaacgaagctgagaaattttcaaaggaagacaaagaaaagagggatgcccttgacacaaagaaccacgcagattctgtggtgtacccgacagaaaaacaattgaaagaacttggagacaaggttcctggccctgtgaaagagaaggttgaagcaaaactaggagagcttaaagacgccatttctgggggttcaacccaagctatcaaggatgccatggctgcactaaatcaggaagtcatgcagcttggtcagtccctttacaaccagccgggagctgcaggtgcaggagggccaacaccacctggtgccgactctggcccctcagaatcctcaggtaagggacccgacggagatgtcatcgatgcagatttcaccgactctaaatgagcagcagccagctaattacacccatagagagtatatgttagtattttttccccgttatatgttttcttctgttccaaattcttaatgatttttgtcaatggagagtaggtgtgtgtttccttcaaaaattagacacggatttcataggtgctcattgatgctcgctttgtaccctggaattttgtctcagtaacactggtattattatgggtgcaattcattttatataggctgaaagcgttccactaagcttatgaaacgtgatgacagattatcaggg

SEQ ID NO: 56694 - DNA, 888 bp, Glycine max
  unsure (1)..(888): unsure at all n locations
  Clone ID: PAT_MRT3847_22205C.1
agaaaactttaggaaaacctatttaaagaaatcttgctttaaatggatttaatgaaaaaaattgatagagattagagcccaccagcattgtggatctgtttatctgactccatctagtggaataaggcttggtgtttttgtttgaaatagaattacctaattactggacactattctttctcattctattctgcctaatgcctatataattatacttataatattcttattcattgttgcagtggtttgacacagacaaattacaaagaattgaatgtattgtacgagaagtacaagaatcaaggatttgaaatcttggcatttccgtgcaaccagtttgctggacaggaaccaggaaacaatgaagaaattcaggaagtagtttgcacaaggttcaaggctgaatttcctatctttgataaggttgaagtcaatgggaagaatgcagtgccactttacaagtttttaaaggagaagaaagggggaatatttggcgatggtatcaagtggaacttcacaaagttcttagtaaacaaagaagggaaggttgtggacagatatgcacctaccacctcacctctgaaaatcgagaaagacatcgagaagctcttgcaatcttgagtactaagattttattctacatatctaatgtgctgaggacataggcaatctgtccggtgtcttcgaaggacaagtagcaatatgtatcatcaattaatataatgccctgaaaagttcttaatatatctcgtgtatttggattttggattgctcaataagtgtaaattggtgttctaactctgttaccaaaaccataaaataataatatatttggataatcggatgcatgtttatgttaataaacaaaaacctcatactaccttgntt

SEQ ID NO: 56695 - DNA, 3073 bp, Glycine max
  unsure (1)..(3073): unsure at all n locations
  Clone ID: PAT_MRT3847_22206C.1
tctcggttggagacgacagagacattgagcggatggatgtcactttcattatctttggctctggatactctaggaggtgtgatgacaaaaattattccaagaaacactactcttcccacctcaaagtccgaggttttctcaaccgctgctgatggacagaccagtgtacagatcaatggtcttcagggggagagagaatttgttagggacaacaaatcacttggtagcttccgcttggatggtatccctcctgcgcctagtggtgttccccagattgaggtcagttgggatgatctagtaaagagttctgagggtttatcaatgtaataagtagccactttttcacttcctatcatttaagcattaattcagaatagagtgttcattacaacaacttaccaaattaggattaggattagggctaccaataccaataccaataccaattctattctatggcttagctcaagcgcccaaatacacggtctcggaaccccttcctcccgaaccctatttttaggtcagaggctaaataccaaggccgcctttatcaagctcaagtccacacctagaaaactccgccctctcagagtggttaatgagaaagtcgtcggtatcgatttgggaaccaccaactccgccgtggctgccatggatgtcggcaagcccactaactagatcattcggttctggccttaattatagctgctccttagagccgaatatcatagatcgatgttaggatacccctcctcgtaattgattggagcacccactgggtacggtaggagaaaaattttaagagggaagcggatcatggaaagcgattccttggaggaaaataatgaggcagagacggtggaggactcgaaaaaaatgtaagtgaaagtgcatgggtaacagagactgtgcccatgaaagaagaaagttcaggccaaactaggggtgttgaaaggttcgatttctgggggtttaatgctgcctataaagtgatgcaatgtctgcactgaatcgggaagtcatgcagcgtggccagtccctttactactagccgggagctgcagatgcaggagggccaacaccacctggtgccgacatttgcccctcataatcctcaggtaagggactcgacggaaatgtcatcgatgaagatctcaacgactctatatgagcagcagctcgctaattatactcaaatagagtatattctagtatttttctccccgttatacgcattcttttggtggaatttggtattgatgcttttggcatgctattcgtcactgctatcgccaaaggcacagggaagaaacaagatattactcatcttgtggtgctagcaccttgccttcagatgaggtggagagaatggtaaacgaagctgagaaattttcgaaggaagacaaagagaagagggatgctattgacacaaagaaccaggcagactctgtggtataccagacagaaaagcaattgaaagagcttggagacaaggttcctggccctgtgaaagagaaggttgaagcaaaactaggagagcttaaagacgccatttctgggggttcaacccaagctatcaaggatgccatggctgcactaaatcaggaagtcatgcagcttggtcagtccctttacaaccaaccaggagctgcaggcgcaggagggccaacaccaccacccggtgccgactctggcccctcagaatcctcaggcaagggacccgacggtgatgtcattgatgcagatttcactgactctaaatgagcaggcaactagttattaccaatagagagtatatgttagtattttttcccccattatatgttttcttctgttccaaattcttaataatttttgtcaatggagagtgggtgcgtgtttccttcaaatattagacacggatttcataggttcgaattgatgctcgctttgtaccctggaattttgtctcagtaacaacactggtattattatgcgtggcaaatcataataggctaaaatcgatgctggtatcatagtacatctccggagaggcgctctgtgttagttgttttaatgtcagattattaatttttgaatttcttctttcttttgccactgtaatgcttggcatgcaaaagtgttggttcttgtcaccatctttttcttttttttttgctatgatatttgtatttctgatcaaattggtagcaaggagcaaatttaatagaggaattgctgcttaggagatatgttaattggatatgttatggtaacagtagatcaagggaaactggttaaaaaaaacgaggtattgtgaaatcatacagaagctaaatcagttacaagtgttttttgtgtaaggtttgggattttttttgtctttatttttcaaggctaggttcctttcttggaatttgattgaggtgtaacatcagattgcgggatatactcaggaagattggttccagtagtttaattgtgcattgctggaaaggtgcaccatatttagtatgcttaatgatagtttattaatttttgaatttttttttgccactgtaatgcttggcaaagctgtttgttcttgtcaccatctttttcatgggacatgtttctgatcaaattgtaagtgaagttcagtttgatttatcaggtttgagacattagaggggtatccatcttggatcccccatcaaataattagttactggacagatattattttttgttagacttttgttatacaactttatactttggttttcttgtttcattccaaaattagttcttgctagacttttgttatacaactttatactttggtttagtagtgtaataaggcaatgctgaagacgaaacagaaaaagaagacccgatacaaacaaccatgcaccagcaggcgcaaganagccaacaccaccacccggtgccgactctggcccctcagaatcctcaggcaagggacccgacggtgatgtcattgatgcagatttcactgactctaaatgagcaggcaactagttattaccaatagagagtatatgttagtattttttccccccctatatgttttcttctgttccaaattcttaat

SEQ ID NO: 56696 - DNA, 247 bp, Glycine max
  Clone ID: PAT_MRT3847_22207C.1
gattaacgaaaacatcctatgcaaatgcttatcgagttgttcatatcatcataaaaccaagcttttaatctcttactttaaaataacacaaactttaacttgaccaatatttctaaaaggatatatcatatatctaaaacaatttgtccagaatacactttcacaactagaaagatgaactctacacttgatagggtccatgtcatcattggaattgatagattgtctcacccatctcgaatgaagc

SEQ ID NO: 56697 - DNA, 721 bp, Glycine max
  Clone ID: PAT_MRT3847_22208C.1
cctttacatactctgatctctctcagagcaatagcaacaatggcttccctcaccccaggcattctgctgaaaatgctgcaggccatgaacaccaacacccgcgtcaccggcgaccaccgctccccgctcctccaggtcatcggcatcgtccccgccctcgccggctccgacctctggtccaaccagggcttctatttaaacctctccgactccgtcaactccacctacgtcctcctctcccaccccgacaccgacctcatcctctccaaccgcctccagctcggccagttcgtccacgtcgaccgcttccacttcgactcccctctcccctccgtctccaacctccgccctctcgctggccgccaccccttcctcggcaccccggagcccctcattgctcgcatctccccctccacccgccacttcctcatccaacccctctcagactccgaactagaccccctctccctcctctccctcaacaacaacaacaaatccccaatccctaaccctaaccctaacccaaaccataaccatgaagagcataaacaacatcacaaagacagcagcaaagaacgaatctccagagaccctctcgcgcctcgcgacaacaacttaccgccgcagagattctcatccccggccaccgccaagagatcgcagtcggcgggaaggaataagattgtttccaccacggcggaaaagggatccatcaccggcg

SEQ ID NO: 56698 - DNA, 754 bp, Glycine max
  unsure (1)..(754): unsure at all n locations
  Clone ID: PAT_MRT3847_22209C.1
ggaagaaggtagtagagttgtccggcgacggcgcaattctttccggtgacggcacggtggtcgcgttttattagccaattgcgtccactttttcccgcaacggtgaaattggaagcacaaaccatgtctgtttctgcgtcacaaaccgaagaacaagtctcaactaggaaaccaacaacactgtgtgaagaatgcaaatcaaacccatcgaaatacacgtgccctggttgctccttacactcgtgcagtcttccatgcgtgaagtctcacaaagaccgaactgggtgtagtggcaagaggaaccagacccagtttcttcctctttccaagttcgatgacaatgtcctattatctgactataagttgctggaggaggtgaagagggtggctgaatctgctcagagaatgagaaataaattgggcatttatgcatattttaggttacctcgttaccttagaagcctaaagaatgctgctgggagcaggagaaccaaactgttgtttctccctaacggaatgtcgagaagagagaagaatcggtctcaatatgaccagcgggtcccaagtcatctttcaaggagttagatataaaagcgccaatcagacagcaattagcaaatatagtcattttggagtttcctgttgtttttgttttcttgccatctcacagaatcaattttgaagttattaaggatgtcaataccagcanacataaatcactgcagaaagattgtgaagacaacccaatccctca

SEQ ID NO: 56699 - DNA, 444 bp, Glycine max
  Clone ID: PAT_MRT3847_2220C.1
ccaaggcggtttccaccagccgggcgaagaacggcgtgcaacccaccaccagcggcgggatggtccccggcaccccgagggacgtgcccaccagcaaggtggtcaggggaatcagcacgatcagcaggatgatgaacggcagcgaacgcaggatattcaccagcaccgacaagctgcggtacaccagcagggtttcatgcagttggcgcttgccggtgagaaacagcagcacccccaggggcaggcccagcagtacggtgaaacccagggccgccgcgagcatgctcagagtgtcgaggcaggcctgggcgatgtccgcccagtagatgtttttcaaccattcagccatggactcaggaccagtcgtgacgcggtggcttgatgccgttgagcaaccagttgccgaccacgtggtacttacagcgcaccgggtcgtgcagggtg

SEQ ID NO: 56700 - DNA, 1806 bp, Glycine max
  Clone ID: PAT_MRT3847_22210C.1
aagaaaagaaaaacttcattgtgcccatatgtcccatcaaccttgtgaaaccctaattctaaagagcagtgagctccctcctatgaattgaaacgaagttcagcgtggcagggaggaagaaggtagtagagttgtccggcgacggcgcaattctttccggtgacggcacggtggtcgcgttttattagccaattgcgtccactttttcccgcaacggtgaaattggaagcacaaaccatgtctgtttctgcgtcacaaaccgaagaacaagtctcaactaggaaaccaacaacactgtgtgaagaatgcaaatcaaacccatcgaaatacacgtgccctggttgctccttacactcgtgcagtcttccatgcgtgaagtctcacaaagaccgaactgggtgtagtggcaagaggaaccagacccagtttcttcctctttccaagttcgatgacaatgtcctattatctgactataagttgctggaggaggtgaagagggtggctgaatctgctcagagaatgagaaataaattgggcatttatgcatattttaggttacctcgttaccttagaagcctaaagaatgctgctgggagcaggagaaccaaactgttgtttctccctaacggaatgtcgagaagagagaagaatcggtctcaatatgaccagcggaagaagtttatatcttggacaattgaattacattttcactcaacagatattgttttactcgaccatgaagttgatgaaaatacaagcttttactccattctagagaagcacctcaagcctggtccttggaagaatcagctaaggcaattttgtgaagtccagctggattgtctaaagcttttcattcgtaaatacccgaaaggtcccaagtcatctttcaaggagttagatataaaagcgccaatcagacagcaattagcaaatatagtcattttggagtttcctgttgtttttgttttcttgccatctcacagaatcaattttgaagttattaaggatgtcaataccagcaaacataaatcactgcagaaagattgtgaagacaaccaattccctcaaggtttatcttttagggaggaagtgatagaagatgacaacaactctgcagatcctcaggtttttgatctcatgaagcaagtggaatcaagtttatcacatgaagtgatgacccaaaatatgagttctgagaaagcaccaaatgattccccagagaagtctctgtttgaaggagctactgggggtaatctttcacattctttgacggaaaccaatgaactaaaattctctgaagatatgacatttgactttgatcaggatttgatggatttctatactgatatcttggatcaaacaaatcctggtgatctttttgattttgatggtgaattttcaaagaaaacagaaaatgaaatagatttaattggtactagtgatttattccctatgccagaggaattggaggaaggggaaattttagaataattggtagctataattcacttctgttgaatagttggagagaaaatgagaaaacattgacaacatcaatactattatatgttttgaggttgaggtccattgattcccataatgggtttgaagctgagtttccagttgtgtggacatgatttaaaagttcatattttcctttatattgagcatgacagagatttaagattgttatctttttgtgccatgacagaacttacaaaaagagttaagaatctcttgatgttcagtgtcaaagatgttcttggtctagtttatttaaatatctttgaagatcgcttattt

SEQ ID NO: 56701 - DNA, 375 bp, Glycine max
  Clone ID: PAT_MRT3847_22211C.1
cgaaaacgaactgatctgacgtgtacaacaccgcatggccatcgtccctcttcttcatacccatagttacaccgaccacactgaaaccggtgaggcgcccacatgcgactcaacctaacccactgttacttctgcccacaaaaccccgaccttctcttctcataagcatggtgctgtagacaacacccaggagagtagcaacagcgacgcttcgaccgaattggatgacaccgagaaagaggcgcgagaaaataccaccatgcccgaacgctctacgtacctggccaaagaagatccaagtgctactgttaagtggccattgctagttggactgactctgctcgtctatgctaggacagctggcctattcgaact

SEQ ID NO: 56702 - DNA, 1951 bp, Glycine max
  Clone ID: PAT_MRT3847_22212C.1
ggcaaataatgaaataacttttgtggtttggacagtttgacgctctgctatgacgtttgacgaaaagcgccgtcaagaaatattatgaggtaacttcttgcaatcgagagcgacaggaggttcaagcaatggcaatggcgtctacactacctgctggggacgaagaaacgccacttgtgcccgatgataattcggccatcgaagctcgcaagagccaccactccacggatattcacatcctgagcttggcctttctcttggtctttctcgccttcggtgccgctcagaatttgcagagcactctcaacactgaggatgacttgggtaccaccacactcgggatcttgtatttgtctttcacattcttctccgtggttgcttctttggtggtgcgagttctcggctccaagaacgctttgcttattgggactactggatatgtgctttatgtcgctgccaacttgaaaccaaattggtatacattggttcctgcttctgtgtatcttgggttttgtgcttccataatatgggttggagagggaacatatctcacttctgctgcacgcagccattctacagataacaacttgcatgaaggtgcagtaattggtgactttaatggggaattctgggctgtgtatgcactccaccagtttattggaaatcttattacatttgctctactgagtgatgatcaacaggagggaagtaccaagggcacaactttattgtttattgtattccttttcattatgacctttggtgcaatactaatgtgcttcttgcgcaaacggggtgctaatagcaagggacaacaagagctttcaggtgcagatgctggcgcatgtgcatccttgaagtctctatctaaatcacttgccagtgcgttgtctgatgtaaagatgttgttgatcataccccttattgcatattcaggtctacaacaagcatttgtgtgggctgaatttaccaagtatgttgtaactcctgcaattggtatttctggtgtgggtagttcaatggcagcatacggggcttttgatggaatattttctctgcttgctggtcgtctcacctctggtctcacatctattacaacaatagtttctgctggactttttgctcaggcagtcgtattagtcttacttctgctaaatttcagcataagtagtggattgcttggtactgtttacatactcttcttggctggtttattgggcatcggtgatggagttttaatgacacaacttaatgcattgattggaatactatttaagcatgacacggaaggggcttttgctcagctaaaaatatggcaatgcgctacaattgctatcgtgttctttttcgccccgcttatctcgttcaaagccgtgcttgtgattatgcttgctctcctttgcttctcattctgcattttcctattgcttgctctgaaggtcgggaagacatcatcaccctccaccagtcagcgaatttaaaactgcttaaactgtagattttttgtatacaatctcagtctgtctttctcgcgtgtagcacgtccactctggactatgtctttatttttgtggtgaaatttcggtcagttgaatgagcttgtacaaattgtgacaaatcagtgtgtttggtaacacatttgttaccgctctggttggacgtggttccgcgaagcaattaatagttgcttttgcattgttttttttacgtgaatttctcataaacatgaatctccaataaagcaaatataagctataagttcatttgtcacgtggctatatatagttattcactgaagaatattcctagaaatatgtcatatgagccaaattcagacacatttttgtaggttctaaaatctgtttcggatcaatatatgtaacctggagaggatgtctcgggtatgatgtgaaaaatccttttgacctttgttaacaaaaaaaaaaaagga

SEQ ID NO: 56703 - DNA, 751 bp, Glycine max
  unsure (1)..(751): unsure at all n locations
  Clone ID: PAT_MRT3847_22213C.1
caaacggcgagtcttaggaatcgaggatattaaacttttagatgtgtcttgtagcgtgcaacattggggccggcaaataatgaaatgctgtaactttttgtgtttgaacgttaatgcttgatgacgtctgagggaagcaaatttggaaatattaatagccaaccatcttgcaatcgagaactacaatcaatggcgtctgcactacctggcgacgaagaaacgccacttgtgggcgatatttcgggccttgaagggcgcaagagccaccacaccagggatgttcatatcctgagcttggcctttctcttggtctttctcgccttcggtgccgctcagaatttgcagagcactctcaacactgaggatgacttgggtaccacctcacttgggatcctgtatttgtctttcacattcttctccgtggttgcttctttggtggtgcgagttctcggctccaagaacgctttgcttattgggactactggatatgtgctttatgtagctgccaacttgaaaccaaattggtataccattggttcctgcatctgtgtatcttgggtttttgtgcttccataatatgggnttggagagggaacatatctcacttctgctgcacgcagccattctacagataacaatttgcatgaaattgcagtaattggtgacttcaatggggattctgggctgtgtatgcactccaccagtttattggaaatctataacatttgctctactgagtgatgatcagcag

SEQ ID NO: 56704 - DNA, 140 bp, Glycine max
  Clone ID: PAT_MRT3847_22214C.1
ctctgcatagtgcacactgctcaattgccttctcaatgcatgctgtgtaagatatttaggctgaattcatgccacttcagattgtaagaagctgtatgtgcacacgctcacagtcaggacagcttcgttgtcttgacacc

SEQ ID NO: 56705 - DNA, 586 bp, Glycine max
  Clone ID: PAT_MRT3847_22215C.1
atgatctcggaacggatatctcggctcttgcatcgatgaagaacgtagcgaaatgcgatacttggtgtgaattgcagaatcccgtgaaccatcgagtctttgaacgcaagtcgcgcccgaagccattaggccgagggcacgcctgcctgggtgtcacacaagatctaattggagattgaatagggaatttggataatagctgatgctgtatagccatttaaaaaacaaaaaagcttttgattcgaattatgatttaagtttttaaaatacttttgttttgattctaattcctgtaatattatttttagttccagcgagtaaatagcatccttaactgttaactgaagatggcagtgtaacttgcacacactccatgctcactagcctagtcccaaccttttggcgccaacgccactccttcttcgtgctcgcgacccttttctcctccactcgggatgtgtaccacgcgaacctcgacatcgtcgccctctcacgcgccgggaaagtcgacgccgcacgcaaactgttcgacgaaatgcccataaaagacgtcgtcacgtggaactccatgctctccgcctactgg

SEQ ID NO: 56706 - DNA, 249 bp, Glycine max
  Clone ID: PAT_MRT3847_22216C.1
ctacagttgtcgttggatccctagcctttgcggtcttctgggtactagcggatctcccagctgtgcctagtctactcattgggagaactgtagggtccctgctaggtgcgatgcgtatggtaatgttcaaagttcttagtccagaccgagcttatgctgcaattgatcttccagttacttagtctactatatgggactatggctgtcgctactttgcttgacatatcgaacgtgttcaagtacttgggg

SEQ ID NO: 56707 - DNA, 267 bp, Glycine max
  Clone ID: PAT_MRT3847_22217C.1
gaagcatcacttaacttgatttccatcaaccaatactcaataaataaacgcgtcaggcgtcctttttattacttcacaccctcacaagccagtgtaatcaaagcatgggctgataatacagataatgtaaacgtaggtcaacaataactatttaaaatagcgaaggtaaactctttagcttcactcggtcaatatactgccatttcaccggttttatcatatggagaatctgtattccattcataccacacttattagatatttttt

SEQ ID NO: 56708 - DNA, 529 bp, Glycine max
  Clone ID: PAT_MRT3847_22218C.1
aattcggctcgagaaaaaaatctcaattagcaacacataaacctcaaagctgtatccactctctcaagcaattaacatggcaacaacattaatcccctcagatctcactgaatttgtgatgcttcaagggaatggagtaaagggcctctctgaaatgggcctaaagagcctcccaagtcaatacatccaacctttggaagagataatgatcaatgttttgccacaagagtccattcccatcattgacatgtccaattgggatgacccgaaagtgcaagattcaatttgtgatgcagctgagaagtggggcttcttccaaatcatcaatcatggggtgccccctcaagtgttggacaatgtcaaggatgcaacttataggttttatgggttgccacctgaggagaaggttaagtacacaaaagagaattcttcaacaaagcatgtgaggtatgggtctagctttagccctgaagcagagaaagccctagagtggaaggattatctcagcctcttctatgtttctgaggat

SEQ ID NO: 56709 - DNA, 680 bp, Glycine max
  Clone ID: PAT_MRT3847_22219C.1
gattcttcgaacgcttactggcttctcctccaagttctctctcttatccctctctggcactaccttctccttgcagccttcattctcttctccattctctacaacttcctcgagctctatttcctccaagacctcttctccggattctcaggctcccctgtgcttctctcctacaacacttcctctagcattctcaacgccgtcgtttccaagtgcaagattcttcacggcagatatttcgccacgccctggctctgcagccctcacctccagactcttttcttgaactacttcgggaggcctcctcctttgaaatacaccaagcaattatttagcactgctgatggcgaaaccattgccttggattggctatccacttctcatgtttctggtgatgttgcttctgaagatgaatctgttcccattgttgtagttattcctggcctcacaagtgactcttcgtctcaatatatcaaacatcttgcgtatcacactgcaaagcgtggatggaaggttgttatctgtaaccaccgaggtttttgaggtgtttcaatcacgtctggtttttcctacaatgctggatggactgaggatatccgcgcagtggttaattatctccataaagagaaatccatggcacctctgtttgttgttggaactagtattggagctaatattct

SEQ ID NO: 56710 - DNA, 441 bp, Glycine max
  Clone ID: PAT_MRT3847_2221C.1
ggtttgagttctgtgctcctgacctacttaacaattttagcctagtccttcagacacaaaggttgtctttgccaatataccatgaaccaatcatggatatgccggatcctattgagaaaaacctacaggaatggaacaatgaactcattgctattgagcacctggtcccggtgatatgatgtcataagatatgccgaggaccatgtccaaaaccatgatacatcattatctgaagctaacaatggtattgggaatctggatcgtatcaatgaagtaggacagtctagagctttgctatgagaatgagatctgagaacatgtatgaagttaagatgatggggttcccaattgacattaccaaggcaacaacgagattctcttttagatgcacaaacttttgaaccatccacattgcataagcttcaatgataattagtaatg

SEQ ID NO: 56711 - DNA, 790 bp, Glycine max
  unsure (1)..(790): unsure at all n locations
  Clone ID: PAT_MRT3847_22220C.1
tttatatgtccgctttcgtgacgttcttgtgtcaaacttaaatctctcactttgtgctttctacactacttacatcaatggcgggatctccatctgcttcggccaaaaaagccattgttgaaaccagtacaaagtcgtgcaaaaaagtcattgatgaaatccatataaagttcggaggagtcattgatgacctttgtacaaatatacatggtcagatccgagaagccgaagccgaagccaaagccaacgagatagccctagctattttggaggaacggcttaaaaaagtggtcatcccaaaagaagttcccaccaaattgatgaccagcgaagtcttggagaaacttgaaagcgttgcaaaggacgcaaaaaatttgaataagatggtggtggccatggatcaatctaaggaagtctgggatattgtggcttatttttccttgtttcctcaacatggcgagcttgatgctgagagattaattgatctctggatggcggaaaaattttgcaattctccaaaaggcggtcgtaggtgtttgagccagctggatgggaactctatgttccaagacgtgaagaaagacgagtttggccaagtcagaagcttcaaattgcatctgctaatgcatgaaatagcagaactcgtggaaaaacatcaccattccattagggagaacatcaccattccaaacgaaaaccaggttcactccaaagtccaacgagcctcaattgatttgagtgacagtcgtctnnnnnctaaacagcttnatcannnnncaaaacaactncg

SEQ ID NO: 56712 - DNA, 624 bp, Glycine max
  Clone ID: PAT_MRT3847_22221C.1
aattttttttttacgagctcatttttttgtctccgcccttttttttttttttttttatttaaccctttcttattttatattcttccttgacaaggtacagctagtgatatgtataacgagcgtttgggtgctaagaatctcctatcctaatcctagaaaagcataatgaagttggtagaggcaaaaattgttgagcatcgtgtgaagggtaacaatgaaatgaataaatattgagggaaaatataagcaaattcatgaactcagggattgataacctaatggtccttgctggtcatcctgtctcctctcactttttcccatcaatgatggcatccaagggaatagcttgcttagctccttgcttattttactagacctcaattgttcgtcattgattccgaatttcgctctttcaatagcttccattatatcttcccttgccacagtttcactacctctacgagcagcaagcaaagcggcctcattgacaacatttgccagatcagcacctactaaaccagtagtaagagaagcaattaaatggcaaatgatgctagtgtcctcctccaaaggaactcctcttagatgcacagccaatatctttctccttccttcttctcgtgc

SEQ ID NO: 56713 - DNA, 466 bp, Glycine max
  Clone ID: PAT_MRT3847_22222C.1
aattcggctcgaggaagacgacagaagggctcactgacattgtatcaaaggaaggaggatatgtcacttttggatacaacaataaaggaagaattatgggagaaggaaacattggaaattagcacaagacataaataaaaaatgttttatatgttaatggacttaagcacaacctcttaagcataagccaactatgtgacaagtgcttaaaaattgaattcaacaagagttgttgtctcatttgtgaagctatttctggtaaggttgtccacataggtaaaatattaggtaatatctacatgttgaatattgaacatgcatcatttcatgaacttagttatttggtatgtaagattgatgattcttggttatgccatcattgggctgcacatataaacatgcatcatctcaatcaattaagtaataaggaattaacaattttattccaaaaactagtttgagaaaa

SEQ ID NO: 56714 - DNA, 843 bp, Glycine max
  Clone ID: PAT_MRT3847_22223C.1
gtccggaattcccggggcgaccaccagccgtatgccccaccactccttttcttatggcatttcgccgggtaagcagtgtcccattcctcttccatcttgttctttaattccgattcaacaaaccaatccccccctatccattacccaatggcgttgttcattactgttgttgttgttttgttcctgctgcagctgagttcgagtgtccgagtgaactcggagccgactcaggacaagcaagccctcctctctttcctctcccaaaccccacactcgaaccgtctccaatggaacgcttcggaatccgcgtgcgactgggtgggcgtgaaatgcgacgcgtcacgctccttcgtctactcgctccgtttacccgccgtcgatttagtgggtcgggtcccacccggtacactcggccgcttaacccagcttcggatcctcagcctccgctccaacgccctcaccggcgagatcccttccgatttctccaacctcattttcctccgcagcctctacctccagaagaaccaattctccggcgagttccctccgagtctcactcgcctcactcgcttggctcgcttggatctttcctccaacaatttcaccggccaaatccctttctctgttaacaacttaacccacctcactggcctcttcttagaacgcaaccatttctccggtaaaatccctagcatcactctcaggcttgttaacttcaatgtttcatataacaatctcaacggttcaatccccgagacactctctgcgtttccggaaacttccttcgtcggaaacatagatctctgcggaccgccgttgaaggacttgactcctttcttcccc

SEQ ID NO: 56715 - DNA, 212 bp, Glycine max
  unsure (1)..(212): unsure at all n locations
  Clone ID: PAT_MRT3847_22224C.1
aagcagaataatacccctcgaggcacanagcaaatgatagttatatcttctttttatcttactttaaaacactcctttgagaagtgttcagcaactgcttggggatttccccaaggtcaattgttaaatattatttactgccctccatcagaatacaacattccagaggctaagagtttgttagtattgttgtataaccgacttgggtggaa

SEQ ID NO: 56716 - DNA, 146 bp, Glycine max
  unsure (1)..(146): unsure at all n locations
  Clone ID: PAT_MRT3847_22225C.1
ccccaatccaatccattccaattcccattgttttcacttctcttccatccatggattctctaagntccacacaacataaaaaacgtaaaaacngcaccacngancgcagantcacgnnatcgcgccaagcctccttccacacaaca

SEQ ID NO: 56717 - DNA, 1844 bp, Glycine max
  Clone ID: PAT_MRT3847_22226C.1
gtaagctcgaattcggctcgagcagaaactggaaattggcggaacctggaaactaatggaaagcataagttgactaagaaaactatgcaaaaagcacacatggttccatgaatcttcttccttcatcaaattcctgtgtgtttatgatctttgcccccaccaagccaagagtgagaaatggaagcaccatgggccacaacaagttcaagcatagtttttgtgatagtgatacttgctctaacatcatgggcatggaggatgttgaattggctatggataaggccaaagaggctagagaggctcctaagggaacaaggccttcaaggaaacccctacaggatattggttggggacttaaaggagattgtgaagttgcaaatggaagcaagatccaaacccatgaatctctcccatgatattgtgccacgtgtgtttgcacatctgcatcagagtgtcctcaaacatggcaagaattcttttatttggtttggaccaaaaccaagggtgaccctcacagatcctgagctgatcaaagatgtacttaacaagatcagtgatttccgaaagcctgaagcaaatccacttgccaaattactagctactggtcttgtaaactatgatggagaaaaatggaacaagcacagaagattaattaatcctgcattcagtttagaaaaattgaagattatgttaccaatattcttcaaaagttgcaatgatctaattatcaagtgggagggaatgttgtcttatgatggatcatgtgaaatggatgtttggcctttccttcaaaatttagctagtgatgttattgcgagaacagcatttggaagtagttttgaagaaggaaaaagaatatttcaacttcaaaaagagctagcggaacttacaatgaaagttatcatgaaagtttacatccctggatggagatttgtacctactgcaaccaatcggagaatgaaggaaattgatagatatataaaagcttcacttacagacatgattaagaagagagagaaagcaccaaagacaggtgaagctactagggatgacttgttaggtatacttctggagtcaaatcacaaggaaatacaagaacacagaaacaatgagaatgttggaatgaatctcaatgatgtaatcgaggaatgcaagttattctactttgcagggcaagagaccacttcagttttacttgtttggacaatggtgttgttaagtaggtaccctgattggcaatcacgtgcaagggaggaagtcttacaagtctttggcaaacaagcaccaaattttgatgggctaagtcaccttaagattgtcaccatgatttttttgaaggtggttcttaggctatacccaccagcagttggtcttaatagaaatgttgacagagatatgaaactcggaaacctatcattacctgctggagtgcaagtttccttaccaacaactatggttccccatgaccgcgaactctggggtgatgatgtgaatgaattcaaacctgagagattttctgaaggagttctgaaggccacaaatggcagagtttcattttttccatttggatggggtcctagaatatgcattggacaaaacttttccttgttggaggcaaagatggctttgtcaacgattttacaacatttctcatttgaactttctccagcttatgctcatgctcctgttacagtatttactcttcagccccaatatggtgctcatgtcattttacgtaaagttgaaatataaaaaataatagtaacaagccttgtttgatttgcatttcagaattgcaaattttataaagcaatgataatagcagtttgctaccaattcatgcc

SEQ ID NO: 56718 - DNA, 1892 bp, Glycine max
  Clone ID: PAT_MRT3847_22227C.1
ggctcgagatcagagtgtcctcaaacatgttcctgtcaaattcaaatagaacacaaaggaagttgctcattctcttcaatttgctgtgttttcttttttctttattttcttatttatctttaaatttaagccttgatataaagtactatgctgatggtatgtaggcaagaattcttttatttggtttggaccaaaaccaagggtgaccctcacagatcctgagctgatcaaagatgtacttaacaagatcagtgatttccgaaagcctgaagcaatggatgatgattctttggtggatagtgatttaggttggttggcttccgtggcagaactggagctgggactagaagattcttctttcctcaaattatgttcttccaaacatccatacaaactttgctctaccaaagtacctatggaggatgttatattgttccttccatatattcgtactcaagtcaaggcatactttctttgtggttatttatttgatgaggcaaaatataaccgtgagctggaaaagttgataattgaaataagacatgcccaaggactgcatgcagtaggtcaaagtgagaaaattgaagcatcccgaaagtatgaactcttatccctcttggtattcttgtttctttctgatgaggacatgaccaagagcaagggcaaggatccacttgaaggacttggagggcctatgacaagggctagagcaaggaaagccaaggaagctcttcaacaagtgctgtccatactatttgaatacaaacccaagtttcaaggagaaaagtccaaggttgtgagttgtatcatggcccaaatggaggaggactaaatgacacccctttgtctcaattttagagtgtttagtttgtctaaataatggctcaatccttgtaaagttggctgaccaaaaatatattttgggttaatcaactaaaagggctttaataggtttagttcaagttgtaataagggcccaattggcaacctaggcatcagccttttgggagaccaaatggtggctgacttgttggctgttgggggtgacttttggttgccacaatttcagttacactcagccattaagttttttttaattccctaggttaatggcattaagttattttaattctaggttagtgggtcattactaaaatctgctgtaaagcttctatataagctgaaccattttatcaataaacacaagttgagttttattcagaaaattagagtttatctcttttatcttagtgagagtgattctcctaaattcttgagtgattcaagaacacctttggctgtatcaaaggactttcacaacctttgtgtgttgccctcgccggaaagagtgattctttccttccttttcctctccacccttgttctttcaaaccacaattccagaaaatccacctctgcccaaaattatctcgtgaccataactcccattttacgcactcaaattaagtgattcttgagcctaaattgaatttcaaaacgagacctttcacctcgttttggaatcacctcatttggagccctgtagcttctgttattgccatttctatatttctgtccagccaccacttaacatacgttttaccatcccattcatccattttatgccagaaaccaccttattaagacccacgaaattaaccaccttattttccatcctttccttaatcaatttccgcattttccatcaaggcggacgcgtgggtcgactcgggaattccgtgaaatataaaaaataatagtaccaagccttgtttgatttgcatttcagaattgcaatttttataaagcaatgataatagcggtttgcaaccaattcatgcattttgaaacattctaaattattgattcattttctaaaaaaatattatgtg

SEQ ID NO: 56719 - DNA, 1350 bp, Glycine max
  Clone ID: PAT_MRT3847_22228C.1
ccattcaattcaaaaaaatctgtctttcccattttttgaagaaaaaataaatattcttttttttttttgtggttagaaacttcaaatatatatgatgcctgaaggcaactaaaagggaaatctttgccgctactgggttagctaactttcctttgcaggggaggttggaattggggggggggaaaaaaaccaccctttttaaggggttaaaaatcgtcttaaaaatgatgggaatcttacggggcggaacgcttgatacaggctgtaaagcttttggatgaccccacttccggggaaggaaaataagtcggggtaaaccccatttccggggaaggaaaataagtctgggtaaaccccacttccagggaaggaagataagtctgggtagaccccccaaggattaccttgataaggctgaaaattggttcaacaaggaacccagagagacacaaagtgtgaaatacacaagtcagcacaagaatgtgacaagaacaagaacgccaacacaagacgcatacaagaacgaaaatgtaaacaagaacacaaataacagatgacaaaaacacaaattttgtacagaatacaaagaaaaagacttggataggataaaacctgtatctgaagaagaagaaatgtcgagatgagaggtcggtttatcagatgagatttgtgtgtgaagagaatagcgaatagcgaaggtggaaatgtcgaaaggcggttcgcttcaaaaggacgtgccatggagagcatcgtcttcttctgcgaagcccatccccaaaattcaccacagtccccttcttcgcgtatcccaaacacctgtttccgattacggtatctccgtcatgaggcatccggaccctataggtggtggattgggtcatgaggccatagtggaaccagctggccctgattgtctcgtacctggccagaaaatgcccatccaattacttggcctccaggtctggccaatccatgttgacctgaagtttttggaaccagttgggcgagaacttaagatgcttggaaagttcatggatgacgctgttgaactaatgaacaaatcattcatagagcgttgataatatgggctttgtgaagagacgaagtagccgctgtttgattctttttttatgggatgggaaatatagacaagcagagtgactgtaatgtaacatttgactcattttgtatgcaaaagagaattgcaatgcgagatagttttgttcggtactaattcccttataatgccaattagaaactgtttctgagaatccaaaacagggaaaaaataaatagttttgggccaaaattcccataaataaaaattttaactaaaaaattttttttaac

SEQ ID NO: 56720 - DNA, 388 bp, Glycine max
  Clone ID: PAT_MRT3847_22229C.1
tttatatgtttggtttgacttcttgttttctgctttcaagaaataaaaacactgaaatgcgttttcaaaaagaaatgtatttttatatttgcttaaaattacattccttgtcaccgcgtattcattttatccaaaatgaggttcctagtttcaactgaaaacactgaaaacgagattttattattttcagtttttggttcggctgagaaaatattttcactgaaaatgttttcaaaaatccaaccaaacacatttccatcaccattttctatttccagtgaaaatgaaaacagaaaacagtcaaaccaaacacccccttaattaaaaatgttgttggggatcaaaaacacaactcaacaatggctataattgtttatctgggcattta

SEQ ID NO: 56721 - DNA, 460 bp, Glycine max
  Clone ID: PAT_MRT3847_2222C.1
ctcaagctcgagacgaattgcaagaagacgacagaagggactctccattttttttatcatttagctttgtcacattggactgcttcagatcattgaaagaagcctacctaagaagcaaaaggtgaagaaagaccctgctttgatagagaaggaggaaatggaaagatgtggaaaagtttgggcaaatattgtaagaagagacataccaaagcatcataggaacttcactatttttcatcgaaagcagctcattgatgccaagagggtctcagaaacttgtcaaagagaggcattgccctatttccctccttgaatacattttctatctgttatattttgtattgatttgtggtgtatctagaatctagctgtctagtctagtctaatgattttgatggtaggttttgtattcggcattttgtccacaataacttattacttatatggacctatttttctt

SEQ ID NO: 56722 - DNA, 531 bp, Glycine max
  Clone ID: PAT_MRT3847_22230C.1
gaaaaaggtgaggctgaggagttagcaatgttttcgagattggccacgcgaaggaggagatcttctaatttgtcagtaacgacaatttggcttgaagcaagatgggagattgcttcctcaattcgttccaatgcagacttagttagaggagagttcgccatggaagaaggcaatgaaagcaccagatttgtttataactaaagggatacctagcattcgaggcctaggtgcctccagagaaaaggtaaggaaagagagtactgtattattgcttaaccattttcggagtacattgttagtatttatagagttctttgtagctgttctcatctaacaattctctaatggtttgttggcatctagccttggaggaacgaaaagttacaaaatagcaaaaagaggatcacaatcctaagggattagtactctcagccgacaaaggatcttcaggagcgccactaccatcaagagcaatgctgccaggacactccctgcttcactacttgcttacgaagtccttgaggtcatatg

SEQ ID NO: 56723 - DNA, 879 bp, Glycine max
  Clone ID: PAT_MRT3847_22231C.1
gggccggaattccgggtcgacccacgcgtccgcgaagggggttcgcttcaaaaggacgtgccatggagagcatcgtcttcttctgcgaagcccatccccagaattcatcacagtccgcttcttcgcgtttctcgaacacctgtttccgattacggtatctccgtcatgaggcatccggaccctatagggggtggattgggtgacgaggccacagtggaaccagctggccctgattgcctcgtccctggccagaaaatgcccatccaattacttggccttcaggtctggccaatccatgttgacctgaagtttttggaaccggttgggcgagaacttaagatgcttggaaagagagaatcaggaactgaacaattttgctactagccaaatatatttgcaccctgggataacaactacattaattactgatgagttttgaggaagagatagagagagagagtgatgtgaacctgagtaggagcggatcatttgatacaggctacgaaggttttggatgacgccacttccagtgaagaaagataagtcagggtagacaccacaaggattaccttgaaaagtctgagattggttcaacaagggactcagagagagaaactctcaccaaattttatcaaatgctaaaagttttctttattgaaaataaaaaccaatacttataatgtatatgaacaaaaagataaaaatagacatgggccttctaaacagtttgggccaaaattacaataaataaaaattataactaaaaacatatttaacttgggcctttaaattagtttgggccttcagcaacaattacccttctgtcgcttcacgaagcagtcggacgaataggtcgacccaggaaaaaggaaccggtac

SEQ ID NO: 56724 - DNA, 204 bp, Glycine max
  unsure (1)..(204): unsure at all n locations
  Clone ID: PAT_MRT3847_22232C.1
tctnnngggnggggaaaggccgggnnanngacccaannncnacaggccgacagaagctgacaaaggcatcgggaatccccacggccaaacttatatacatgcatgttcaaaaaagacgccttttttgaacctggactccctacattttggcaaagccttctagccaggggttaaacccagctcctcagggcaagggaaaaaggg

SEQ ID NO: 56725 - DNA, 189 bp, Glycine max
  Clone ID: PAT_MRT3847_22233C.1
gcactgggcccattttgacgctacaggtgctgattatgtctagaggctgcgaccacgggccaacgcctcattagatgaatcatctcaaggttaactaggttgccgggctgattgctgcaccaatggggcacagagataccagactctgcaccacacttctggggcccaggcccgtacatgaggaggccc

SEQ ID NO: 56726 - DNA, 268 bp, Glycine max
  Clone ID: PAT_MRT3847_22234C.1
ctcatctctgaaagtcgtgaaggcagcagcccaggtcttgaatacattatggcaatatcgggacctccggaccatttataaaaaggatgggtggaatcagaaccattttattacacctgtgtcgacattggagcgagaccgattcaaatcacatccttccttgtctaccaccaaccaacagatgtcacccatcattcagtcaggctccagcaaaccttcaccaatttacatcagttcctattcctcaccagcaagagaacaagataga

SEQ ID NO: 56727 - DNA, 429 bp, Glycine max
  Clone ID: PAT_MRT3847_22235C.1
cttttcttggctacttacaaaccctaattttccaaatcacgtgttttttctaactatttctgcctaactttcttctacctcctctagatccacccccattccgcatcaacaacaacaacaacacattgttatctcaatgatccatttggtccatactccacttggttttttttatcaattcccttcataaaaatattcccctcttttttctgcagcgatctatttgtgcgttggaggtgcgtgtttttgtgatttcctccaacccaattgagaaaaaaaaaatgagaaattgggcattgcggattgatggggttgttcttttgaatctctgttattctttgtagggtttgagtttctctctgttacagtgacttttgatagaacaaaaaaaaaaagaatggattctgttggggaatcgagctttttggt

SEQ ID NO: 56728 - DNA, 1761 bp, Glycine max
  Clone ID: PAT_MRT3847_22236C.1
gctaatttggaaggcctcaacgtacggggttatcagtttgctgacaagatcaaggagggctgcgaaagacgacagaaggggggtgatggaacagcaggttggcttcttggagttgtttgtgatctcaaattatctcatcctccaccaatagccacggtccctttgggcacagggaataatctaccttttgcatttggttggggaaagaagaacccagcgacagatcaaagatccattgaggcatttttagatcaagtcatgaaagctacaaaaatgaaaatagacaactggcacattcttatgagaatgagagctcctaaacaaggtccctgtgatcctattccaccacttgagctaccacattctttgcatgccttccatcgtgtatctgaatcagatgaatttaatatggaaggtttccacacatttcgtgggggattttggaattacttcagtatgggaatggatgctcaagtctcttatgcgtttcattctgaacgaaaattgcatcctgaaaaattcaagaatcagttggtcaatcagagtacttatgctaagcttggatgcacacaaggatggttttttgctcctctgttccatcctccttccagcaacatagcacatcttgcaaaagtaaaagtcatgaaaacgcatggtggttgggaagacttgcaaattccttccagcatcaggtcaattgtatgccttaacttgcctagcttttctggtggattgaatccatggggtacaccaaacaagatgaagcggcgtgatagagatttgacacctccatatgtagatgatggccttatagaggtggttggttttagagatgcctggcatgggcttgttttgcttgccccaaatggacatggaactcgccttgctcaggcacacagaatccgctttgagtttcacaaaggtgcggcagaatatacattcatgaggattgatggggaaccttggaagcaacccctcccagttgacgatgatactgttttggtggaaatttctcaccatggccaggttaacatgctcgccactcatgattccaagtccaaaagtgagaatgatccgtcatcaccacaccataatgatgtcgaggaagatgatagtgatgatgaagaagctaaagcagatgaataccggaagtttggtgcggcagatacatttaaaatcccagatgaggtagaccttgctcatcttagttagatctttcattgtgaaagccattctttagagttatgcagttgacaacattgtctgcttagctgttagtaggatttttataaatatttgttagttgcctttatcaattgtatcacctatttgatctattctagcagcgttatgtctgtgaacatgtgaatagtaattaagaattgagatgcaataattcctttgatataaacgtttgtgctgttgaaatacataagaattgagatccaacaattgctttgttataaaagtttgtgctgttgaaatacaattagtcaacacagcaagtttttgtgtgaattttgtggaaagtatgctgtgaagaggaaagttgtgggaatatggggatgtaaggactgtggtaaaaataaattctgggggggcttttactttgggtttcgacaggtaaaaccatgttggtaccaaattaatttgctttgggggagataaccttttcagaagctggctttataactaaaaggccacgtccgatttctttttgtaaaatttatacccaccttgtatgcaaaagggtaccccccc

SEQ ID NO: 56729 - DNA, 164 bp, Glycine max
  unsure (1)..(164): unsure at all n locations
  Clone ID: PAT_MRT3847_22237C.1
ctctcgatgttggatgtctatagctcactggctgacgtggcactctnactcgaagaagtccagaccangtgaagtaccaagggngangataagtctggctngtgttttngccttatnncaatggatgtgcnattatgttctacaagactggaattcagggnatt

SEQ ID NO: 56730 - DNA, 976 bp, Glycine max
  Clone ID: PAT_MRT3847_22238C.1
ctcgagccgattcggctcgagtgaggagcaaggatattttaccttggtttgtatattatcatgttcattgttcataaaacttatttttggaattatttcaattttttaaatacaaactcacatagatattcaaagacacagatacaagtagatacttgaatttctttgatgtttagtgcacaaacatggagttttggtatctttcttacgccttccttatactgaaatcacttacacattccaaaattttataggatgagtggaggagaggcttaaaagcattaagggccgatacagtaagtaaattgaagaaggcacttccagacctagaaaaagaggtcaggaggccatcgaacttcacagatttctattcttatgctttccaatattgtttaacaggtaaactttaatgtatgatatgagcatttgtgtcgttaattttaaccttttgttttcttttctacattcatgtcaacttgtttggagtatttttctaggctcaaaatgattacaaggtcataaacatggatcaatggatgggatttttccgtttttgcaatgagataagttttccaaccgtccatgactatgatcctgaacttgcctggcccttgatcctggataatttcgttgaatggctgcgagaaaagcaaaaatagcctgataagctggctgattctctgtaactgcaaccattgaaccccttttaagagaaactgtcggattctgcaactaaatcagatagatatgccttgtggctccgtttattgtacttaacaagttgttgtttttttgttggcccagtttcttattttgggcattttaaacacaaaccattattacttctgtttaaattttccattatatggtataggcgcagttgaggctagatacaagttttacgttgtgatcactgccaatgccaaccacatttatcatacataagagcctttatagaactgaattgagtatgatc

SEQ ID NO: 56731 - DNA, 798 bp, Glycine max
  unsure (1)..(798): unsure at all n locations
  Clone ID: PAT_MRT3847_22239C.1
cacgcgtccgattttaccttggtttgtatattatcatgttcattgttcataaaacttatttttggaattatttcaattttttaaatacaaactcacatagatattcaaagacacagatacaagtagatacttgaatttctttgatgtttagtgcacaaacatggagttttggtatctttcttacgccttccttatactgaaatcacttacacattccaaaattttataggatgagtggaggagaggcttaaaagcattaagggccgatacagtaagtaaattgaagaaggcacttccagacctagaaaaagaggtacaattattgaagtgatactctttatgactatgacaagtcatggacaaattaatttttggcaattgttacttatttatggtggaaatattttatcagttgttaacatttttaatttgacatctaccgtaaaggtcaggaggccatcgaacttcacagatttctattcttatgctttccaatattgtttaacaggtaaactttaatgtgattttgtgtacgttaattttaaccttttgttttcttttctaatgttcattcatgtcaaagttgtttggagtttttttctttcaaaatttaaatagttattctagaaacttggatagaataagattagattcatctgatctcagccttttattntatttttcccttgtcttttagtttgaactgtaatcagattggttagaaaatctctaaccaactctgcctatttatgtcatcctttgtaaccttgattaatcaataanataagaattatcact

SEQ ID NO: 56732 - DNA, 540 bp, Glycine max
  Clone ID: PAT_MRT3847_2223C.1
gactattcccttgcattgaatgttctttaaatgtggttactacaagtgttctcacatctttcgcaaactcaaacccttgacttgaatgagacctctttgattgaacacttctaccaaatcttgtgacagactctgctgtgaacaattgattgagtatcattctttgttttcttgttttcctcctattatttaatctgtttccttgtctgttctctctattttttctatattttgtaagagacactctactcctttgttctgtgtgtctatctattcctatgtgttgttagtctctacttctctttgttctctgttctgtcctttctgatttaggattagtggttctctaatagagttttgtgaaagagagcgattgagagtgaggaagatattattattcaacccatgtcttcaatcaatacatgctcagtttatatacagcttaacaaacataacagaactaactgagtaactaactgtagttatttaattaatatagttaactaaattaacattttttcttaattcatgtgaatttgt

SEQ ID NO: 56733 - DNA, 352 bp, Glycine max
  unsure (1)..(352): unsure at all n locations
  Clone ID: PAT_MRT3847_22240C.1
aannaannnnaannnannnnnacannncaanaataannnaaaatatangnaanaaaanncagnananaagtnnaananagagnnnntnngaacgnntanaannattanacaaataancaanantntntaganncnganntgaaacanatggaganaaanntataaanaaananagatgngnaganaanagatgncagaanaanagaagnctnnacngacagnaaatancaaagtnaanacngngcngnannnaananataananaannngnaagagcaaataanaaananagnncnggantnannacantaacagtananctatagagannagaggatnaaaanannaacac

SEQ ID NO: 56734 - DNA, 321 bp, Glycine max
  unsure (1)..(321): unsure at all n locations
  Clone ID: PAT_MRT3847_22241C.1
actactctacttcattctaacttcaaagacccacttaaaacttcggtattcatctacaacacatccaataacacnttattcatattctactacctctttattacatcattttcacttataacaacttctccatcaaatcactacttactaaactcaattccaaacttttctattaaataccctacaactttttactttttatttctaattcaaaacatattttatcccacatactgctcttattctaactcaatccaaactcattaaatatctaactaattaaacttatatttactaaactaatctcatcttttcttcaat

SEQ ID NO: 56735 - DNA, 1790 bp, Glycine max
  Clone ID: PAT_MRT3847_22242C.1
ctccactgtgtgtgttgttatcataccctagaacaacgccacttaaactggatctcccttaatttgtatattttattgtattaatttttcttaattaccctctaaatattttcatcatcaggtggatgatcacaaggtcttgatgggttccaatggtggaagtagtaacaataataaggtaatggaaaaaccaggtcaaaatcaacttgtgcagcagcagcaacatccagaaaccctcaagtgccctcgttgtgactcatcaaacaccaagttctgctactacaacaactacagtttgtctcagcctagacacttctgcaaagcctgcaagcgctattggacaagaggtggaaccctcagaaacgttcctgttggtggaggctgcagaagaaacaagcgtgtaaagcgtccaataacaagcccttgttctgccgccattgacactgcttctaattcttctaactcttcttctgctcccactgctgctgcttcactacaaccccagatcgacactgcttcaacctcaaatcacatcaaccctttgttctatggattaccaagtagctctagcgatgtgaatcttccattgttctctaggttcggttctagaatctccagttccgggtttgatcttcagttgaataatgcccttggattaggtttttcatccggggttttgtccaatgaagctagtgataataacggttacagaagcgggtttggttcaaacaatatgcttctttcaagttatacatccactactactactactccagctatgtcttctcttttgcttcaacagaagttcatcagtggtggattgaaaaatgatgctgatagcagcaacactttccagcatggcttaagcttaacctcactagagcagttgcaaatagcaagtgatcatagcagtgaggcagggatggtggcattaaaagatgtgaaagtagaattaggacaaaacaacaacaggttggagtggaatggtggtgctttccaaagccagatccagcatgtgggcttgtacgatcctttgctttattggaataattcagcaacagctttgggtgtttggaacgatcaagctgctaatattggttcatcagtcacttctctgatctagaaaaatacaatccaatcgaatgaagaagtatggttttcaagtttgtctcccccttctgtcttgttgctgctacttttttcttttgttttgtttttcttcttttttttgggccaaaatgggaaattaaagggaggaaattaaggtgatacttgtaagaaaatgggaaagcaaaaggtgagaggagtttggatcggagcgatcatgtcagctgaatcctgcaaatatatataaatttctcttacaagattgggaaaagaattgcatatattgctctgagaggaacctgggatcctcttctctcatcttctcacagttgctgcgcagtgttctctacggaaatcctttctgttgaattaaagttccccatagttaagtaagttggtctttcattttgttatgtacatatggatgacatttcttttctttttcttatcttgtaatgaaccagctgtggttagctaggtggggtaggggatttactgggtatgatgctgtccttgaataaaggaactaatattggtttcatttttgttaactttgtgatgatttttgttttggatagggagaatgggaatatattgggtataatggtatagaagagagggggattatttacttggttttagatgattaatgagttaatgtatgtcggtggtttaatttggtg

SEQ ID NO: 56736 - DNA, 1946 bp, Glycine max
  Clone ID: PAT_MRT3847_22243C.1
ctccgatgtgtgtgttgtaactatgtgtgtgaacatcataccctagaacaacgccaccttaaactgggtctcccttactttgtatatttttattaatttttcttaccctgttcatattttcatcatcagttggatgatcacaaggtcttcctgggttccaacggtggaagtagtaacaacaacaataataaggtattggaaaaaccaggtcaagatcagcttgtgcagcagcagcaacaacaacaagaagcccccaagtgccctcgttgtgactcatcaaacaccaagttctgctactacaacaactacagtttgtctcagccacggcacttctgcaaagcctgcaagcgctattggacaagaggtggaactctcagaaacgttcctgttggtggaggctgcagaagaaacaagcgtgtcaagcgtccattaataacgacaaacccttcttctgctgccattgacactgctgcttctaataattcttctaactcttcttctgctccactacaacccccgatcgacactgcttcaacctcaaatcacatcaaccctttgttttatggcttaccaagtagctctagcgatgtgaatcttccattgttctctaggttcggttctagaatctccagctccgggtttgatcttcagctgaataatgcccttggattaggtttttcatccggggttttgtccaatgaagctagtgataataacggttacagaaactggtttggttcaaacaatacgcttctttcaagttatacatccaccactagtactactactccagctatgtcttctcttttgagctcttctttgcttcaacagaagttcatgacagatggtgttgatagcaccaacactttccagcatggcttaggcttaaccccactagagcagttgcaaatggcaagtgatcatagcagtgaggcagggatggtggccttaaaagacgtgaaagtagaattaggacaaaacaacaggttggagtggaataatggtgctgcttgccaaagccagatccagcatgtgggcttgtacgatccttctctttattggaataattcagcggcaacagctttgggtgtttggaacgatcaagctgctaatattggttcatcagtcacttctctgatctagaaaaatacaaatccaatcgaatcaagaagtatggttttcaagtttgtctcccccttctgtctcgttgctgctactttcttctttttctttttgttcttctttcttttgggccaaaatgggtttttggtttacttaattaattacatcaaaatttaatgaaaagagaggaaaagtgatacttgtaagaaaatgggaaagctaaagcctaaaggtgagaggagtttggatcggagtgatcatgtcagctgcatcctgcaaatatatataaatttctcttcagccctgttggttttatgtgtcaaggtcgttgggaaaagaattgcatatattgctctgagaggaacctcggatcctcttctctcatcgtctcacagttgctgcgcagtagtgttctctatggaaatgctttgtgttgaattgaagttctccatagttaagtaagttggtctttcattttgttatgtacatatgcgatgacatttccttttcttttttcttgtcttgtaatgtactactatctgtgattagctaggtgaggtagaggatttactgggtatgatgctgtccttaaagaaaggaactaatattggtttcatttttgttaactttgtgatgatttttgttttggatagggtgagaatgggaatatattgggcatatctggtataatggtatagaagagagggggattatttacttggctttaggtgattaatgatttaatgtatgtcggtggtttggtgcttatatgtgttcaaccttgttctatctattggttctgagaaactaactttggtccatgc

SEQ ID NO: 56737 - DNA, 255 bp, Glycine max
  unsure (1)..(255): unsure at all n locations
  Clone ID: PAT_MRT3847_22244C.1
cccacgcgtccgatcattggttattatttgaaccggggaaaacatgatcaacttgtaacagctattctatgaggagactactttattggtaatgtgtatgtcggattaagtggattcgagtgaaatgttgatcaggggagtcatttcgacatattttctggaatataactcttggattataagtttttaaaaaaaaaaaaaaaaaaaaaaaaaaaaaaaaaaaaaaaaaaaaaaaaaaaaaaaaaannnnnnnnn

SEQ ID NO: 56738 - DNA, 298 bp, Glycine max
  Clone ID: PAT_MRT3847_22245C.1
tacatgtactcatatgaagtgtacttttcgtgggatatggaatggtggagggggggatggacacaagaacctttttgtagcctctctcttctttgaccgttcatcagaggcttgttctactgatccaaacttgccagtcgtaatatatcatcctgcaaatatctacgatacacttacgcacgcatgccaaacataacttgagaacgcctaattcactcttcctcttgttcatgacctcaaccttatctatcatcgcattgaccttatataccatcatacactactccaagatccgtat

SEQ ID NO: 56739 - DNA, 437 bp, Glycine max
  Clone ID: PAT_MRT3847_22246C.1
ggaggcggctcgagctcgagccgaattgcctcgatccctctggagctcaagaaagagctctcgggtgtttgtagggcttgcttttctgctgatgctgtaaataagcatgttgattttgtaagggagtacaaacaggattttgaacgtgatcttgatccagaaagcattactactttcccatctaccctgtctcaactgactgagcggttgaaacactggaaaaatgttcttcaaagcaatgttgaggataggtttccagcagtattaaagttggaagaagaaagcaaggtgttgcgggactttcacgttattgatgttgaagttccagggcaatatttcactgaccaggaaattgcaccagatcataccgtgaagttggatagggttgcagctgatattccaattgtgcggaggcatgggagcagtttccggcgctt

SEQ ID NO: 56740 - DNA, 556 bp, Glycine max
  Clone ID: PAT_MRT3847_22247C.1
ccttgcctactatatctaccctatccaactgaactctgaatcttgtgcccggcctctacacgtgaactgcccaaataggacgcttgttgcggaaacagacaagatatactgctatcataccatccctgcatattgcgtggagacagcagatgactgcctccatggcgatcattatacatcatatatcgtggcagctgacgtgcatcatgcctttggtgctgaatacctccatgtccttccgaacgacatattcgtgatctgtgttgatggcgccgtactatctaatatatcatactacaaaatacatggatatggcgtggatacatttaacacaaccttgtatgatgcatgtgttaacgatggcaatgcactctgctctgtccgagactctcaagaatcacaacgagctgtggtatctaggctgcactagtatatgcttgtcacgactaacactgtacaacatgccgttacttaatcatacttaatataagctggctaccacacatgggaaaaattaattctcaaggatccacaagatccctgcagtgcatatgca

SEQ ID NO: 56741 - DNA, 556 bp, Glycine max
  unsure (1)..(556): unsure at all n locations
  Clone ID: PAT_MRT3847_22248C.1
ccacgcgtccgcccacgcgtncgtacggctgcgagaagacgacagaagggtactccggattgttcatgtacaatcaaatgtacctatgatttgattaaatcaatccaaaagaaacaggaaattgaacaagtgatatgtttcttgaaaggtttaggagaagtttatggtactgcgaaatcaaatattttgatgatggatcctctcccttccatcaacaaggcttatgccttggtcttgcaacaagaaggacaactgcaaggaaatggaactagtgactcaaaggttttttttacctcttcaaatcagtagaataatcaagggaattggaggccacaagggagaagaggtagcaactttggtagaggaagaggtaatggaatcttgggcagaggagatgaaaatgctggaagagaaagaggacacaaatatacaagcaaacaatgcacatattgcgataaatttggccacacagttgacccacgctactcanagcatggttttcctctaggtttcaaaccaagaaataactccataattaacaattttgtggcacccg

SEQ ID NO: 56742 - DNA, 373 bp, Glycine max
  Clone ID: PAT_MRT3847_22249C.1
gacctataagaggattttctcacatatcaaattcatattaggctactaggtactagtagctcacaaaaccacgaccaacaaagtcgttataagaattttcagtttactgttataccaaggctagctatcagagccttgttcctttaggccttaggtgcttaattagccaattttaagcataattagtttaggatcggaaaatgaaaataaatgttattaaatagtaatagcattttttttataaagaatatcatatttaatattctcaatatattcataccatgatttttaatataaataaataaagagatgatctaattgatcttaattaaaaaaaaaaaagaaaaagtaaaaatatatacaaagaaaaata

SEQ ID NO: 56743 - DNA, 281 bp, Glycine max
  Clone ID: PAT_MRT3847_2224C.1
acatttctcccttctggcccttacctatcctctctcaaattcccaacaatgacctggctgcaaggtcattcacaaagggctcctagcacagttacaaggcctcaatttctatagaagctgaaacttatttgaggccagcgggggggaacaaacatcccgtcccccaagggagacaagtcaagaattgcttgccaaagagggatagacataactcacccccaagcagattcgtgaactatgacacactaggctctagtggctgccccgaaatgcatacagag

SEQ ID NO: 56744 - DNA, 199 bp, Glycine max
  unsure (1)..(199): unsure at all n locations
  Clone ID: PAT_MRT3847_22250C.1
cggccnccttttttttttatttattttctatcaaaaaaaaccataagatatatgacgatttattaggggggggaatataaaagacaaaagggtatgtgctcttttcgtataatcaaaatttaacaataatttaatgctttcttctaaaactaatgatttaattaacgctatttgatttggggctaatacagatttaagg

SEQ ID NO: 56745 - DNA, 389 bp, Glycine max
  Clone ID: PAT_MRT3847_22251C.1
cttaaatatgacacttatcgattttctataaatatttgttattactatttgtatattattggttttgtcctaagcatgtacttgtgttatgatagtgtatgttcctatacacgtgtgtattttgtgtatattattgttgttgttgtaattattactattgttgttgttgtttttgctgttgttgtcatcttctttattatattatattatatttggtgttatagaagtattagattaacttcttatagttattagggtaaaaaaaactctaggaaatgaccattgtttatcggcatgcgacctttgtttcaccacctcaaaatgtttaacacccatcgcggtggaatccataaagttctgagatgtttcgggaagaaaccggtcaaaaa

SEQ ID NO: 56746 - DNA, 271 bp, Glycine max
  Clone ID: PAT_MRT3847_22252C.1
ccacacacccgttcaggggttatattactacagaaggggaaacaggggggattctttgcatggaacatggggtcctaccccttactgagccccgcaacaggaacattgtaacaaaacacagtccacaccacttgtcaatactcctaccatatgaatactatcatggttcctgctttgatatcgcgaacacaactcctgttccgaaacctaatacacccctatatccaatcactcataggaaactgacttctttgataaattgctgaggaca

SEQ ID NO: 56747 - DNA, 344 bp, Glycine max
  Clone ID: PAT_MRT3847_22253C.1
aataaatgaccaagcttattattacatgggggaaaggggggtgggggtgttattgattacaacattaatttgcttgtatttggacagactgcccctaatgttacctacatatatatccgtaaaaagtaaaagttcatcgagccattgatgcatctattgctattaaactttttcttttaaggttaaactttatgaacttgtgcttgtttaccccgaggtcctgagtccaagagatcttgcatgaccctattcatgactgtcatgctacttggtaccttcatggaaaccttctttcgattctgaatgatcatacttgaactgcaccttaacgatttatgcattct

SEQ ID NO: 56748 - DNA, 1293 bp, Glycine max
  Clone ID: PAT_MRT3847_22254C.1
acttctatatcaacaatttccgaatgtcactaatgacatacaatataagttacagcatgcattttgtataaacacaaaccctacaagacattgaaataataaattacctagtatcacaccaaggcaaacatctcttaataagttgtgaaatctagaactttgaagcaaaaacattctttaagagaaaattcacaaaatgcattaacaaatttttgaaattttcttgatcttaatcacaccattaactttattaccattttaccatcccactaaagcatgaatatttggctaatcacgtaattacataggccctcatgtaacactcgtaggtaataactaataattgctggtaacaacaaaaataaaaggggatccatatgaacttcttttttttcccaagtcaaccgtcaaacattaacgaattttggatcatcccaccataagtaaatcaagataacagaataagggcataagttttgctaccaatgttgtccagtgtatggccactaaaatcatcccgcacgaggatcgagcacctgcccaataaagagtactgttccagttaaatcttctctgatcaggaacaagaaaggatggtcagctacgaagtctattttagttggaagcatcgcactcctcaatcgtatagttgcagaggtggccgctgcagcttcagtgccttcttcatttacttcaataaaagacttgtgaaatatgttggaaacacataggttttgacccacaggagagtccaccatttctgtcaaccctccaacagagaaaggcaaaaccactcccagctccttcagcacattagagacttcaaacccaaaagaaattttgaatcttgggatcctgaagtcccctacttccactttttggttaggaagcttgcgttccaagaacccaggattcagaagccaacttctcagccaaagctaacagcccatcttttgtttctggaaggaaaaagtacatggtgaattggcgcttatctttgccttgcttgtaggaaagaccaaggactttgaaactattttaagccataataaactgcttcttcttgctcgtcatgaagggaaccttgactgagctgccattaagaaggtgcaaatcgtagtcttttgttattgaagcatcaaacttataaaaccatgctcctttgcaccacagtgcatttgcaaagataagtctggttgaattgtcaactgatccaggaggaagaaggtctttaacaaggccatttgtctccttttcagcccatgaattaacttcatttgtcacttcaacccc

SEQ ID NO: 56749 - DNA, 1955 bp, Glycine max
  Clone ID: PAT_MRT3847_22255C.1
tttcttttttttcaagagaaaatccctgaaaactgaaatgcattaacaaattatagaaaatttccagatttcaaatcacatatcatcaactttttactactcttctactatcctactatagcattaacatttggttatttgcgaatcacacacggctattacactcggggctaaataactcacaacagttcattagcgtcaacaaatgtataaaacggttaaattgttagctaatataaaacggttaaatatgttggcgtcaaccaataaccgttagattagaactgtatgaggcgcggttgaattccaaactctgtagaggatccaattcaatcaaggagagataagagaaaatccctgaaatgcattaacaaattgtagaaaatttcctgattacaaatcacacattatttttagtaccagcatcgcactatgatatttggctattcgcatatcacccttggaagacgaaattagttagacaacgccatactcgtaagtgttcaaaacttaaaacggtgatccatatgtacctttttaccttcttaagccacatgtgaaactgccagaaattttggatcatccaaccataggtaaatcaagacaacagaataggagcataagttttgctaccaatgttaatattattcagcctgaggattcaacacctgtccgataaagagtactgttccagttaaatcttctctgatcaggaacaagaaagggtggtcagctacaaagtctatttcagttggaaacatcgcacacccaaattgtatagttgcagcggtggccgctgcagcttcagtgccttcttcatttacttctataaaagacttatgaaatatatcggaaacaaacaagttttgacccacagcagagtccaccatttctgtcaaacctccaacggagaaaggcaaaaccactcccagctccttcagcacattagaggcttcaaacccaaaagaaattttgaatcttgggatcctgaagtctcctacttccaatttgttattaggaagcttgcgttccaagaacccagattcagaagccaacttctcagccaaagctaacagcccatcttttgtttctggaaggaaaaagtacatggtgaattggcgcttatcttcaccttgcttgtagggaagaccaaggactttgaaaccatcaaaagccctaataaactgattcttcctgctcgtcatgaagggaaccctgattgaacggccatcaagaaggtgaaaatcatagtcttttgttatcgaagaatcaaacttctcattccatgctcctttgaagtacagtgcatttgcaaagataagtctggttgaattgtcaactgatccaggaggaagaaggtctttaacaagtccatttgtctccttttcagcccatgaattaacttcatttgtcacttcaacagccttggtctggaaatcaactgaagccaaagtggccttgtattgagcactgacaagttgtttgaaggaagggtgaagagagagggattgctcaacccacacgccgtcggcgaaggagaggcgaggcccgccggcgggagcggcgtcggagagcacgacggcgacgagctgagaggcgaaggagttgagatgatcggtggatttggatcggaggaaggagagaagctgatcgagtgtggggcccttggagccagaagcgatgatgctcagaacaacgtgcaacgacagcggcgagtacacgaggttactgtcccgagcttctttcgacaacaggagctttgtgatgctcagagcgacgtcggtttggttgcttatcgattcacggaggtccattgttgtttggatttttgaattaagtcagtctccgaagacgctcaacttattaatataactatcaggaggacaaccgtgtccgtgtggcgcctccactttgacatttcatttcacccccttctgtcgtcttctcgcagccgt

SEQ ID NO: 56750 - DNA, 2659 bp, Glycine max
  Clone ID: PAT_MRT3847_22256C.1
gcgtacgtaatctcggaattcgtcttggggtgtagggttcgagcctccctcttgcgcgtccgcagcctgccgtgtttctggttacggctaaggatttgccggaccgtctgctacccgctgtgtcggccggtccctccgcctgtccgttgcggcatccctttccgcatggttggtccgccctgcctgcgccccgaggactgcggtgctcttcggtcgtgtccccttgtctgcttgtgttcccgtggcccaggctgaccgccggtgttcagcagctctggtaggaagtcacgaagggttatgagcacctcatgcctctcccccagcgtgcacctgctgtgtcgcgcggggttggccctcctcttgttgatgctcctggcccagctattatcatggggcctggtggcgttagggctgaagctggatcctgggttgaagaacaactttctgagagaatcagtaaaaagggtcaagtgaatttatttgaaaccacaattcgggttttgggtgggcttttaagtgcgtatcatctaagtggtggggaaaaaggaacaaacttaactcatgcaggacctaaaccagcagtttatctagaaattgctaaggatttggctgaccgtctgttatctgcttttacagccagtccaactgctattccgtttagtgatgttattctgcatgaaaagtcggcacatccagctcccggtggactgagtagcacatcggaagtttccactttacagcttgagtttaattatctcagtcagatatctgggtgatcagaaatatagtttggaagcaatgaaagtcatggagcacatgaagactcttccaaagattgaaggactagttcctatctacattagccctcattctggtgaatttagtggagaaaatattagactgggatctcgtggtgacagttactatgagtacttaatcaaagtatggcttcagagtggagctagtagcaacactaatacatcattcctatatgaaatgtataaggaagcaatgaatggtgttagacatcttcttgttcggaaatctatcccaaatggactagtttttgttggagaattgccttatggatctaacagtggtttcagcccaaaaatggatcacctggtgtgtttcctacctggtacacttgcaattggtgccactaaaggccttacaaagaaacaggcaatggaaaacaatatgcttaactttgaagacctagaaaatttgaagctagcagaagatctgactaaaacatgctttgaaatgtatgcagtaacttcaactggtcttgctcctgaaattgcttactttcatactgaggaattttctgaagaaggtcatgatggaggaaataagagctcggaatttgttaatgacatcataataaaacctgctgaccgtcataatcttttgagacctgagaccgtggagtcattgtttgttttgtaccgtatcacagaagatccaaaatatcgggaatggggttggcaaatctttgaagcttttgaaaatcacacaaaggttgatactggtggatattgttctctggacgatgtaactagtgttcctcctcatagaagagacaaaatggagactttctttctaggagaaacacttaagtatttctacttgctttttgcggacagctctcttattcctttggataaatttgtttttaacacagaagcacatcctataccaatcaatttgaagaaatgagtatattcatcaaaggcattcaacacagttattaaaaatacagaccctgtcaccctggtctcacaaagtgagatgcttctttgaagtcagtctctcttacactgaccaagagtacttctggttgtaaaggaattgattagctgggttctcagtgataataaaaactgtgaaatattgttcgaatcatccaacacatcagcaaacacattttagagaccgccaattgattatgactcattttcttggatttacaatctcatttagatagggtcagttataaatccaagaaaatgggattgtaaattttgtttcaagtcatggacaaagagcagcttttgtaatcgaattgtatgattttccaatatgtttttggatgcttagcatttttgtgccttgattacacggttgtcattacgttcctaaagatgcgatctatcttcgtaacatcatgaactcaaatcttcattattgctgcactgaagaaagaggtgatctccatcccggatgacatttatgtcatctatctctgcattctctgtattaattacttttgtagggttgaagccaccaaatttgtcaccagcaatttggagcagctcttctaatgaatcaggcaggattattaattttccatgctgacctcgtgaggtactcccgctgtgtagcaaatggattgttactctcttcttggtgagccttgccgattctctatcacttggacagttagaatttcttgaattggagtttgtgtttgttttctctaatgggaacttgatagatctaataccatcttgtcttctgtttctggtcgagccattcctgtcaaggtcaaggatttttggctctgctatctgtattctaaattcatctaacttctcattttcacaactcattttttgggcacaaatgctctttgtttttggcccgtttacttgag

SEQ ID NO: 56751 - DNA, 273 bp, Glycine max
  Clone ID: PAT_MRT3847_22257C.1
tcttacatcccaatatttaaaaatcttcttactaacatatgtaaaagcaaagaactatataaaaacatgaattctttagaagctccttttttccgtgcagcaatcaaaggagctattacttcatgcatacaatatccactatccaacttgaacttaataactatccaaactacaccttttcccattcacattcaacctcatcttaacaagtttgtccctgtaattcccatacatactacaataccagcactcaaagaactatctttcacaact

SEQ ID NO: 56752 - DNA, 401 bp, Glycine max
  Clone ID: PAT_MRT3847_22258C.1
cttcacactgagttagaaaaactcccttttagacccatgttacataacttcgttgtgatgttcaaatgcccccattttcaccctttttgaaagatgagcacgaaatgttgacccgcaaacttgataatttggatagtttgaaaatgagggggcccccctatgagagtaaccatctcatataagcgcaaaatgttgaccctccaaagacaatcacggtccctgatggctttgactataagctataaataaaagatgacttcaacaggatcccttgggggaaagactactgcatataaattcgtggactttgaatgccggtggttgggctacaggggctaaaaaaagaaggacatttacttgattgaggacaactgttctgctgccggggaaacatcaggaca

SEQ ID NO: 56753 - DNA, 504 bp, Glycine max
  Clone ID: PAT_MRT3847_22259C.1
aattcggctcgaggaagagtgagaatgcttaccactggatctggtgcatcgtcttccttgcacatcacccaagggaccccagttcccatttccacagccatttttgcagcccaattcacatagttttgaccagcagctccttgcaacttactctgtgccccatattcattctcaatctaaaacaacaaacacatggtgaatcatgaatgcatcattaaaattcaaactagatctagagtgaaaagctcataagtcatagccactagtggtatgaagagaaagcaacgatatgaagattaaaattaaatgctatgaaatgaaagacctcaaaagtttacctgagagagtatgatggggccaccctgagactcaaatagccgctcactcttcatcattcccacaatcttctcagtgaacccttgcatcgccctctgaaacacggttcatgcctcatcaataaaattcaaaggacccaatagtctgataatcaaaaaacatttttgg

SEQ ID NO: 56754 - DNA, 211 bp, Glycine max
  unsure (1)..(211): unsure at all n locations
  Clone ID: PAT_MRT3847_2225C.1
cgtaagcaagcatccattctatcgaccgccctctttttttttttttttttttttttttttnnggggacaaaaaggcggccttttttttatcaggcattaaacaataccaccatcaaaggccctataattctctacactaaaactcacatgttttcacaactacaataacctctaaagaatatacatcatatcctaaatctatatccattct

SEQ ID NO: 56755 - DNA, 579 bp, Glycine max
  unsure (1)..(579): unsure at all n locations
  Clone ID: PAT_MRT3847_22260C.1
ggttttatgaatagatcaatgtcaaagctctttcgatttatgcgctattgtatattttttttcttttttcgtgtctaaaatcaatgaaacatgaagtgagattcgacaaatttcttactgtggttgtaatttgggatgacgaataattgagatcaataatagatcgattggtatggtggatgattaggttttgcgaagattacgtttattaacaattgggcgtcactagcaggcattggttgtaagtttctgaaaaaagttgtctgattttgtgaattggtttgctatatcctttgtatttacaatttggagaacaaattatcctaaccataaaaaaagtaaataaacattgagaacagaatataacaatgatgattccattcatattatggtcatctataaagcagattggtgcttctgtaccaagattgtgtcggaagatgactaaattactgtgtcctccatgccgttaaaactcatgaaactcttgttcatgcagtgaaattgggggatacacgttatgtattatagattatttccaggtttcattcatatctttaggttntaaaaatatttatg

SEQ ID NO: 56756 - DNA, 422 bp, Glycine max
  Clone ID: PAT_MRT3847_22261C.1
tttgttttttttttttttttttttttaatgaattttggtataacattttttgaaaataggggtattatggaaactaaatatttacctttttttcagttggaaaacaaaaaagaggaaaaccatagaacaaaaatcttggggacagagtcaaaattcacaaaaattgggcaaaaactagaaaaaagttgtatggtgcttagatccaaaagacaaccagtggtcaaagcaactgcatattaaaaaagttgaagaccatatcgatgccaccaacgtagtgagggttggccccaaagaaagagaaacagatcccaagccaggtggtgaatagaagcttatatgaaacataaggggataggggaagtttattttatgggggggggggggagtgtaaacaccatcaatggggggaggtccacatcaca

SEQ ID NO: 56757 - DNA, 1373 bp, Glycine max
  unsure (1)..(1373): unsure at all n locations
  Clone ID: PAT_MRT3847_22262C.1
gcatgctgacacacactcactcactgtcccatcccacctaagcttgttacccaactaattaccatcatcagagccatccactgaggggtgacctgcgtagaagtgtgagttgattgagaggcaatcatttattcaacttcgcatttctctcgcatccactgaaccaagattcctattccaaaatgaccgctcctacttcttccagcctgtggctggctccaaaccccagcaaaagatggggcgaactcttcttccttctctacacccccttctggctcaccctttgtctcggcattgttattcccttcaatctttacgagaaattcacagagctggagtatttgctcatcggattggtctcggctgttcctgctttcgtcgttccattgctgctcgttggaaaggttgacagaagcatttcttggaaggatcgttattgggtcaaggccagtctctggataataatcttcagttatgttgggaattatttctggacacattacttttttacagttcttggtgcatcttatacctttccatcatggaaaatgaacaatgtaccacacacaacattcctgctcacccatgtttgcttcctgttttaccatgtttcatcgaacatgacactgcgtcgattgcggcattttattgctgatttgccagaaaaacttaaatgggctactgaagctgcatggattcttgctcttgcttattttatcgcatacctggagacactggctatttccaatttcccttattatcaattcgtggatcgcgactctatgtataaagttggatctttgttttatgccatctactttattgtgagcttcccaatgtttttaaggatagatgagaaacctggcaataaatggtacttgcctagagtggctgttgatgctttgggagctgcaatgctggtcacaataatacttgatttgctggcgcatctttttgggtcctattgttccgatagcagacacaaaacagtgtcctcaagtaggattaccctggtttacaggacatgccaatctcacatgaaagttatgtggcgaattgtggttttcattacactccaatgcaatctaaacatgcagattgttatgtggagaatttgcagaagaacccaaactaggacaatttttgtactagtgctgacactgttaaattcctgataagatcaatagtgtttgtaggactttcatgttgccttaggttgtagacaaggcagtaaacttaatagtatttattgaaattaaccacgttccagttcgcttgtggtcccctatcttttttttttttgtatttgtattattagtatcatatgaggcnaggaagaanttaaatgaaagattaggtagaaaaaaaagaaa

SEQ ID NO: 56758 - DNA, 674 bp, Glycine max
  unsure (1)..(674): unsure at all n locations
  Clone ID: PAT_MRT3847_22263C.1
tggtgggtagtacctgccaaagttgccttcgatcaanactgcatggtctgcactttggancagcatatattatactgttgttgcattactgcgtcttgatcctcctatgagtattttaaatgaattgaaggcaacgtttttccccatgctgacggccggatggaagctatggccatttgcccatctcattacttatggtgtgataccggttgagcaaagacttctctgggtggataccatagagcttatttgggtgaccatactttccacattttcaaatgaaaaatcagaagcaagaaactctcagtctatggtgccttcagaagtgaaatccacatctgtttatcctcctgaggagtaacgagtggagatatgaccagaagcagtactgggagaaaaatggctttgctcaatcagatttttatccttgatatggatggacatatagatttatgatgcggaatgtgaaaaagctaattatatacgttgatatgttgcatcccgcggaaattcatgtatgttaggtaacatcaattttcctgaaaacattacacataatgtaattgctgttaaatttaacgagtaaataatttatgtccaaacccttccttaccttcctatcttatgtgttaaaatttttgtcaataaaaaattaataattgatatttatcaat

SEQ ID NO: 56759 - DNA, 511 bp, Glycine max
  Clone ID: PAT_MRT3847_22264C.1
ctagagtggctgttgatgctttgggagctgcaatgctggtcacaataatacttgatttgtggcgcatctttctgggacctattgttccgatagcagacacaaaacagtgtcctcaagtaggattaccctggtttacaggacatgccaatctcacatgagaggtatgtgacgaattgtggttttcattacacaccaatgcaatctaaacatgcagattgttatgtggagaatctgcagaagaacccaaacttggacaatctttgtactagtgctgacactgccaaattcctgataagatcaatagtgtttgtagtgctttcatgttgccttaggctgtagacaaggcaggtgacttgatagtgtttattgagattaatgacaaccgagttcctttgtccctatccttttttttagtagtagtagtagtgtcatgtactcaagtttgttatttttattttattttaaagttggttggaatatataatattgggtgttgctatgttcggtataa

SEQ ID NO: 56760 - DNA, 471 bp, Glycine max
  Clone ID: PAT_MRT3847_22265C.1
atagaataagaattcttggcgagaggagcattgtcatagtccttgtagccttggccagtcaaccacaattttctgttaaaggttaattatagttgctttcaactaatttgtcagtagagagaggagcattgtcatagttggtgaaaatagggggtctcctcctttagggtatcgtggcatcagcaccagccatgattcggatcatgaggtgcaaaataacacccacaggatatgtcattggatttaagcaagtgtattcatcagcttaaagcatttgtcattagatttaagcgatgtactcatcagcttaaagcataacggaaaaggtggggccaaatttgaagagagggcagcaaattggtgatttaagcaacaccaatggcaattggagttggaagtggcacatcgactatgtatcaaatggcattagaatgcacatgcaggtgtgtggaaggatgaacaacagatatt

SEQ ID NO: 56761 - DNA, 285 bp, Glycine max
  Clone ID: PAT_MRT3847_22266C.1
tttgaaacaaaaatctcaaaaacttgagagggtgatttcatattccactaaaatactggcattacaaataaaccaaaacccatacttggaaatctacacgccaccaccttcagtgatgtataacattacagatcaaaacagaggacagaaaagacagaaaatgctatacattccctgacaacgccataagcaattgccttttaaaatcttgaagaatctcacattgccatctacagaacgaaggcacataactgtgaaataatgcctctgctccatcaagtattt

SEQ ID NO: 56762 - DNA, 402 bp, Glycine max
  Clone ID: PAT_MRT3847_22267C.1
attcggctcgagtctggatgttcaattcccaattgagcaactgtttggacatcatcattgtttctatgccctggtagtggtagaagctttagctttggggagatgttgagggctctctctttacatcccccttctagtaaaatcatttttctttattttcttttttctaaataggtgggcaaatgccaaactcttattgttaaattcatagttaaataacgagaattttaagaagcctgtgcagaaggaatccccttcattatttgcaatgggggtattaacgatctgtcttttccattgtattttttttttcttcattttaatcatgtgattctcatgaacttaatttttttttatatagatttgcccatataatactattacctccttgaggttttctta

SEQ ID NO: 56763 - DNA, 1381 bp, Glycine max
  Clone ID: PAT_MRT3847_22268C.1
ggctcgaggaaggacaagagagccgaaaagaggagcgttgtgttgttaggcttgtttgtattgtgttagtaccattttctaatctcatcatctaacccttccatcgtagtttccacatttctcctaccgaaaagtcaaaactacccactcacccaggtcgcagcgatggacgtaggagccggcgacgatcattccccggaagccgccatatcgcggtggaaattcgcggtgtcgcggcagtaccagcacatgctggacaaaacgacgccgcacgttctccggcggtggatcgggtgcctggtggttgccgccgtgtacgtgctccgcgtgtacttggtccaaggcttctacatcgtctcctacgccctcggcatttacatcctcaacctcctcatcggcttcctctcccctcaggtcgatcccgagattagcgacggccccaccctccccacccgaggatccgacgagttccgccccttcgttcgacgcctccccgagttcaagttctggtactcgatcacaaaggcattttgtattgcgtttgtgatgactttctttagtgcatttgatgttccagtattctggccaatactccttttctactgggtggtcctattcacacttacaatgagaagacaaatatcacacatgatcaaatacaaatatgtaccgttctcatttgggaaacagcgctacgccggaaagagagcagcagaaggcacaagcccgaccttggactgaaattttcagcttaattgaactttatttgctacatttaagtcacaaacccgcatgtggcttgatatcattggctgaagaagattctttgaggtctagcatgggtgtatgacatctggatgttcaattcccgattgaactactgtttggttcttcattgtttctacgccctggtagagcctctagctttgggagatgttgagggctctctctttacatcccccttctagtaaaatcctttttctttattttctttttctaaataggtgggcaaatgccaaactcttattgctaaattcatagttaaaataacgagaattttaagaaacctgtgcagaaggaatccccttcattatttgcaatggggtattaacgatttgtcttttccattgtattttttttcttccagcagaaggaatccccttcaggaattgcaattttggtatatagatttgcccatacaatactattaccttcttcaggttattttaatcatgtgattctcatgaacttaatttttttttatatagatttgcccatataatactattacctccttgaggttttcttagtattgttgtgacgagttcatttggaatgtctggacctttatttatttattttctgaatgagatttctccac

SEQ ID NO: 56764 - DNA, 252 bp, Glycine max
  Clone ID: PAT_MRT3847_22269C.1
taacaggtaactcgcctacaagcgatatatggtgttcatggaagaggctattctttactaaacaaataaagggtgcccaggccaacgggttctattattcgcctaattaaggatgttaacacgacaatctattcagtaaaactcgggggtccaaagagaagggccacatcttgtgcaaggacttaagaacacaaggccccctgacttggtgtaactctttctcctttaaaggaaggaactatttttacacat

SEQ ID NO: 56765 - DNA, 519 bp, Glycine max
  Clone ID: PAT_MRT3847_2226C.1
ttggggggggggggggggggggaggggcaattcggggtatgaagcaaacccgtgataatgggcagagggtgcttgggttccaacgcaacaatcggaaacagtgagatcgacataggaaggagcagagtaagagtagaaggcagaggcacaaagaggaaaaccctagaagagcagaccaagacacccgctatatcctaacaccaagggggggaaaatggaaagcgacttaggtggcagtagttaggttaaatgttaagcaggaggcatcggtggcacgcgttaagaatattatttaaagcggctgtctttaaaaatagtgaaggtacttggcataaagtgggcagaagttgggggccgacttttggtaattggttatgtactacgttaggtatttatcaaacgcacaccattagtgatccggcgaagaggagttaatgcgcagcaatccatgggcgacagcaaagtaagcggtgtggctctaggtagcgtggctaagagagtagaagacacagccacgac

SEQ ID NO: 56766 - DNA, 107 bp, Glycine max
  Clone ID: PAT_MRT3847_22270C.1
ggctcgagagaaccctcatctctcctcacgcttggactgtgtaagccgttcatggcaatctttgtggaccgaggtctcagtcctttcccagagcgattcggtatggt

SEQ ID NO: 56767 - DNA, 1109 bp, Glycine max
  Clone ID: PAT_MRT3847_22271C.1
ccacgcgtccgagaatcgttttcttcgatctcacaattagagagcgatggaatatctagggattgatctaagctgcgccgttggatctctccgccacggccagttcccggagaaggattgcttgctccctctcatttccaaactcctcggctacgccatcgtcgccgcttccaccaccgtcaaacttccccagattatgaaaattctgaagcatcagagtgtgagaggccttagcatgatatccttcgagcttgaagttattggatataccattgccttggcttactgtctccacaaaggccttccattttcggcttacggagagttgttgtttcttttgatccaagctttagtattggttgccataatctactactattctcgacctttgcatgcaataacatggatccgggcattgctatattgtgctgtagcacccactatcttagctggtcaaatcccacgcgtccgctttgaagctctgtatgcatcacagcatgcaatctttctctttgcaaggatcccacaaatatggcaaaacttttctaacaaaagtacaggtgaactcagcttcataacttcttttatgaattttggaggttcaatggttagagtattcaccaccatccaagaaagtgcaccaaaaagtgttctattgggctatgcaattggtgtcgcaacaaattttaccatcttgagtcagattatagcataccaaaagcctcaggttggaaaggagaagaaaacaaagtaatagaaccgtatcaggttgtgtatatctcatcatccgggccaaccctctgcaggtgccacggcatccagtccatacacagaattttgtcagtcttcaatcgaacattaccttatttcagatttcaactgctgctaggtgattattatcatttttattttggactgtaggcagcagtgtaaaagtaacaggtgattattatcatttttattttggtacctgagatacttgagcttcatgattttatcgttatttatcaaagctaaaatttaaaggatgcatccaggttctttgtaagaatctcaaatcatgattctaaggcttagttctaccttttttaaatcgtaaaatgttgagt

SEQ ID NO: 56768 - DNA, 1207 bp, Glycine max
  Clone ID: PAT_MRT3847_22272C.1
tgccacgcgtccgacggctgcgagaagacgacagaagggggagcgaaagaaaaacgaacaagaaaaaatcggatgagctatacatttcttagcagaaacttcaccggacctgagaattgagaaagtgtagtttgagtttcacatcaaaagattgtgtgtaagaagcgttttcttcagatcgatggaatatcttgggattgatctaagctgcgccgttggatctctccgccacggccagttaccggagaaggactgcttgctccctctcatttccaaactcctcggctacgccatcgtcgcggcttccaccaccgtcaaactcccccagattatgaaaattctgaagcatcagagtgtgagaggacttagcatgatatccttcgagcttgaagttattggatataccattgccttggcttactgtctccacaaaggccttccgttttcggcttacggagagttgttgtttcttttgatccaagctttagtattggttgccataatctactactattctcgacctttgcatgcaataacatggatccgagcattatattgtgctgtagctgcacccactgtcttagctggtcatattgatcctctcctctttgaagctctgtatgcatcccagcatgcaatctttctctttgcaaggatccctcaaatatggcaaaacttttctaacaaaagtacaggggaactcagcttcataacttcttttatgaattttggaggttcaatggttagagtattcaccaccatccaagaaaatgcaccgaaaagtgttctattgggctatgcaattggtgtcgcaacaaattttaccatcttgagtcagattatagcataccaaaagcctcaggttggaaaggagaagaaaacaaagtaatcgaattacattgcgtcgtgtatatctcttcatcctggccaactctcagcagacacagaatttggtcagtcttcaatcgaactttaccttgtttcaagtttcaactactgataggtggaccataggcagcagtgtaaaagtaacaggtgattattatcatatttattttgaacctgagacacttgagcttaattagtttatcgttatttatcaaagctaaaattgaaaggatgcgtccaggttctttgtaagaatctcttaccatgagtgtaaggcttagttagttctacctttttttaataagcaaaatgttgagtc

SEQ ID NO: 56769 - DNA, 326 bp, Glycine max
  Clone ID: PAT_MRT3847_22273C.1
ttttttttttttttttttttttttttttaggattttttttttttttgacagagaaactttgctactagtgggaggagcccatctttcttttgggtatcaaaacaaaggtgcgctaggaaaaaaaaaaaaaattggctaaaaaaaaaaaaagggggaggggaagtggacccttacctgaggagccctgcacaaactcttgccttgccacccccagcagatgcggacgaggcccccgccggtcccccttataccagcgacgggtgattttaaaacagactcccccatcggtgttatgagaaagggggaaagaacaaaacacgacgggc

SEQ ID NO: 56770 - DNA, 295 bp, Glycine max
  Clone ID: PAT_MRT3847_22274C.1
atttggaaaaattgtttcttgcactgtgaagccagagcaagaacccctataaaaggagaatgttggtgttcctgtccctgaaatttcataaccaaaagaccacaacgctcgaagtaactgcatgggaatttaccaaagttctctgtctggggaaaatgaaaatgatgtgcctctgaatataactgacatttcggtacataatttctggaggcgaggcaatgagaatattttttttaaagaaataactcacttccacgccatacaactcccgccaaaacatttatacaaatttttt

SEQ ID NO: 56771 - DNA, 354 bp, Glycine max
  Clone ID: PAT_MRT3847_22275C.1
tgctgctacaagacgacaacagggggggaacgtgtaagagtttgttgtgagcgaataacgagtataacttgaggagaatacgaagttgttagcattctatggtgctgtggtagatttggggacattgccaattccactgagcatgctatctactgttacttccccgactgaacgcttgctatcgagaatcttcgcctatcgcatggctactatgttctaagcatgctgtgggaccataccatatacgagccttgtactacatcactgactaatttgttaagcccctcgtacgattacattaatgcagaatcactcatctcatgcaccgaaacattttacggacagtctttcttt

SEQ ID NO: 56772 - DNA, 138 bp, Glycine max
  Clone ID: PAT_MRT3847_22276C.1
agatcgcagagtggtttttgaacagaaagaagggttacaaggatggcaggtactgtgcgggttgtgtgtagtgctcttgatatgaagctcagcgagatgttgagagactcaggaagatcagaaaccagcgtggtttga

SEQ ID NO: 56773 - DNA, 305 bp, Glycine max
  Clone ID: PAT_MRT3847_22277C.1
gtaataggagtaggaagccatggaaaaggaaaacgaagagatggaaaggaaaaggagagaggaagagttgatccatgagagggaatgggaggagagaatgaactgcaagaggctggactggaacaagatggttgacgagatgctgagccagcacctagcagaaatgggccagatgcagactcattatcttcacgagcaacaaactcttactaaccaattgattgcgatattctcgcactggcctgcccaaccttatggcctatatgatcatgctagtgctagcaaccattatctctcacaaatga

SEQ ID NO: 56774 - DNA, 376 bp, Glycine max
  Clone ID: PAT_MRT3847_22278C.1
attgcgtaccccgcacccctacgtcaactgggtctataaggctggggatcaaatacctgccacccgggggatccgctatatatatacctgccgccaccaaaggggagggcccactggtgttgcctctacacaggtttcatgacccgctggactcatggagccatcagactgtctctctcaggtaaactgggtaccgctgccaatgctccccatcttcgtggctacggagacaccgaagcaccacctgcagtgcctaacgacagctgcttccacatagtgggtgatcgcgttgcgcgcattgactctatgcgtgaccaacaagtgctccttgtggctcatgactggggagccactctaggagaggatgtatgcatgt

SEQ ID NO: 56775 - DNA, 393 bp, Glycine max
  Clone ID: PAT_MRT3847_22279C.1
tttttttttttttttttttttttttttttttttttccctaccaaagggaacaaaaaacttggaattctgaccttgtccgcgtttgttctaacaacagcaaaagaggaattcgggaaacttataagcaactttaaaaactttataatgttgaaggcccaaaaagagggttccaggggcataaagaaaaaccagtggttaggagcaaggtctattttaaaggcaaaaaaaaaaacattttttgtcaaacactgtagataacccccgctacaaaaaaaaagaaacttcaacggggaaagcccaaaggggcaaaccaggggtgaaaagccatgctttcagcttcgaggttcactgacggaaagagcacggaggacaggaacgtctccccgaaggagg

SEQ ID NO: 56776 - DNA, 273 bp, Glycine max
  Clone ID: PAT_MRT3847_2227C.1
atcgatgcatcacttcgcttcactaatacatcctgagcagacgtgactcagaacacgtatgtgtgctcagacgttggggtcaaggatcgtcgtgaatgggacttacacggtatcgttgtggttgttagggacttctcttatcctcatgaggacgtcatcggcattgagtttcacgacgtcagtgtctcagaccaaggtgggctgcagtatagactcttcgacacgcttcagcgatctgtcagcaggtcatgctcgtcagtagacgtgctggca

SEQ ID NO: 56777 - DNA, 171 bp, Glycine max
  Clone ID: PAT_MRT3847_22280C.1
caaacaacaaaaaaacaaccgccggtgtaatataaatagctatttaacttacaaactagatttttctccaaaaacaattattccaactttaactagctttctatgcatcccaaatttggaagtttaaaatcatttagcacctcccgttcaggaaattaaaaacattttttt

SEQ ID NO: 56778 - DNA, 770 bp, Glycine max
  unsure (1)..(770): unsure at all n locations
  Clone ID: PAT_MRT3847_22281C.1
acattaaatgaaataactatctcatattacatcttattcataagctcaaannnaaaacttttatttaaggaaagtattcatcaacacttgattaaacagacgttaacaacttataaacataaactctacatagaagtacggatatacttctacaggagaaatctagagagccccactttatccccggtttgcttgacatctttctctgttcgttgtctatactccctcaaagtgaatcttctgtagataggtggcttgatttggctttgtatcattgcctcctcagagcgggaatagaagtatgccatagagaacctctctactttctcagcagcaaccactctgtgttttatgcttttataaacaccattactcaatgcctgcacattataggaagcacgtatcaaagttaattaatttagaaagaattcgagaagacttgttttggtcaaccaatataagatagaaaaatcaaattattgagagtattaatttaacaatacatttttgtcaagccattttccggaaccggtgattgctttttgattggagtccaaaaaaaaataattaaatggcaaaaacctaaagcaacttaatgcttgctagaaattgtgcttttttcttcaacgtgaattaattatgtcattggtaatatcttatgacatgtgcattttataagctatccaatcatttgtatttatctcacttttttttattcataaaaattaaacataatatcatagaatttagaatatatatccgcttaatca

SEQ ID NO: 56779 - DNA, 1417 bp, Glycine max
  Clone ID: PAT_MRT3847_22282C.1
gcgacagaagggtacggctgcgagaagacgacaaggctagggtttttgatcgttgttgttctaaagcactcatccacacattctccgtcgccacgacaacaatggctccaaagaaaggtgcgaaaggtggagttgtagcagcaaagaagaaggttcaggagaaggtaacgaaccctttgttcgagaagcgtccgaagcagttcgggatcggaggcgcgctgccgccgaagcgggacctgacgcgcttcgtgaagtggccgaagaacgtccaaatccaacgcaagaagcgcacgctgctgttgttctaaaacgtccacacattctccgtcgccacaacaacaatggctccgaagaaaggtgtgaaaggttccgttgtagcagcgaagaagaaggttcaggagaaggtgacgaatcctttgttcgagaagcgtccgaagcagttcgggatcggaggcgcgctgccgccgaagcgggacctgacgcggttcgtgaagtggccgaagaacgtccaaatccaacgcaagaagcgcatcctcaagcagaggctcaaggtccctcctgcactcaaccagttcaccaaaaccctagacaagaatctcgccacgaatctatttaagatgctgctcaagtacaggccggaggacaaggcggagaagaaggagcggctcttgaagagggctcaggctgaggccgatgggaagcctgttgaggccaagaagcctattgttgtcaaatacggtctcaaccatgttacttaccttattgagcagaacaaggcacaactggttgtgattgctcacgacgtggacccaattgagctggtggtctggcttccagcattgtgcaggaagatggaaattccatactgcattgtcaagggcaaagcacgcttgggaacgattgtccacaagaaaactgcttcagttttgtgcttgacaactgtcaagaatgaagacaagatggagttcagtagaatcctagaagctattaaggccaacttcaatgacaagtatgatgaatacagaaagaagtgggggtggtggaatcatgggttccaaatcccaagccaagaccagggccaaggagaagctccttgccaaggaagcagcccaaagaatgaactagattcacttgtttttacattattgaggttgccatttttctatattttatatgggagcatttacaagttaaaatgtgaggttttacttcattttggtagctcgtaatccacaaggaccgattttgatctttgattattcgtagttattttaaacttagaaatggaatgtttcccctttttcggttcaggagttgctagtcagtattcgagattttgcagcaattcagtagtttttgaccgtcgcgttgcttattaatcggggtccaagggggtgagatatttatccggcccttc

SEQ ID NO: 56780 - DNA, 577 bp, Glycine max
  unsure (1)..(577): unsure at all n locations
  Clone ID: PAT_MRT3847_22283C.1
gtccggtccaggagagtgctagagcgcgagctanaactagtgcactcttccaaaccttctcttccctcttttctttctttcatccccaaatcaaaacctaaaattcccaccttcaactttctcccccaaatcgagcccccccaccactgcgaagtgcccattattttatatatttatggcggtatatacatacaaagagaggggggggagtggggtcggagcaggggaagcttttcatcggggggggttcatgggggacgaggggggagaaggtcaaggggcatttcggagactatggcgagggtttgaggacctccgtgatgcgggagaagaacactgggaaggctaggggcttcgggttcggcggttttgcggagcctaacattctagatagggggttgggggacaaacatgtgatagatggcggaacgggtgaggccaaaaagggcttctcaagagaggagcaacaaatttctgtgacttcaagaggtggaaattccaattctggggtgagttctggggatgggggagacatcacgactaaaaagatatttgtgggaggggtgcgtcccaccct

SEQ ID NO: 56781 - DNA, 127 bp, Glycine max
  unsure (1)..(127): unsure at all n locations
  Clone ID: PAT_MRT3847_22284C.1
gtcacttcngtggagccttgctgcctttctgactgnactcaaagcagtaagagnnaaaggagctccccagaatcaaatcatgatcatggatctgcgatnaaaattcgacttccgttgangncnccat

SEQ ID NO: 56782 - DNA, 284 bp, Glycine max
  Clone ID: PAT_MRT3847_22285C.1
cgccgtgatggcaaagaacattcccgttggtgctgagcacaagcacgctgctggtgagaaacacgagcacaaggccggcgaaaagcacggtgagggccagcacgagcataagcacggtgccggcgaacacgagcataagcacggtgacgctcatggtgccccgcatgccggcgtaaagaaatgattacgtcgatgctcagcgttctttacgccattgaacgtatattattgtgacaacgagccgtgcttcaataaataccgaggcttgtcgcaaaaaaaaaaaa

SEQ ID NO: 56783 - DNA, 661 bp, Glycine max
  Clone ID: PAT_MRT3847_22286C.1
cccacgcgtccgcttaaggatttgcctggttctagtggtataatgcaaacaatggggagggaccagagactcaagtatgcagcatcatttgaaagttgctacttctttcggcttctgtattacgcaggaacccagtatcccataatgggagctatcaggatgacttatccataccaatatgagctgtacaagagggtagatgagtcacctggaaaggagaagtatgctattttgtctacctttccagagaggcctactacagatgaaattaatgatgcttttgaaggaaaaccaagtaaggatcctagaaaaacctcagggatttggggattcttgaatggcatactctgagctaactggaaagcaatggaaaagtgtcagtgtatgattttctaaattatcattgaagaatgatggcaatcagctgtgtgattgtagatagtacccaagtcagagctagtagttcaacttgctggtggtggagcagcttgtttaaaattgagtgtagatcccagggaaatgaagattagaaaaaaaaagccttgtcaaatgataaatgattcaagatttaagggcccaggaggaacaactttgtttataaacaactacatcaatatttttccccaaaaaataaaataaaataactacaatatttattatg

SEQ ID NO: 56784 - DNA, 567 bp, Glycine max
  unsure (1)..(567): unsure at all n locations
  Clone ID: PAT_MRT3847_22287C.1
tgccaagcaaaattgctctcttatatatgctttacatgataggatgctttacaagattcattgtctcccctagtttctgcacagcacactggtggtgagaatttaacccttcgtattttgggaggtgagagtatatgatgaagttcaaccatttcatcttaaaaataacaagtaattgctaaacttgaaggttctactgtcagtgagcaatgcgatttatagttattaaggttttagcttgattgattcaatctttgtattttattttgttggatttttcattttaaaaaaaggccacaagtgacaagtatttccaaacacatgcatgcaactcttgatgaaccttggtatgaactttctatggagcttgtatggctttgaaccaatatcgagttattcattttagtgtgtgaatatttcttctacacnagatcatgacaacggttttaatttactattatgttcttggtcctcaactgagggtttttatgtgatttggtagagatatgaaccaccatcaattgattcagatcaattgtctcccatgtttttaggggtgttattttt

SEQ ID NO: 56785 - DNA, 248 bp, Glycine max
  Clone ID: PAT_MRT3847_22288C.1
aaagaaaacagaaaggggggttaatataaccctttttacccaaactccccgaaacaaaactggagtccttgggcccaataattgtccgcattttaacctggtaaaaaaaaaaccagtgaagcagccctaaattcggaaaaggctacctgattggacatgacccggggggacccctgggctggaccgctgataccaaggccgcttttttagagccaacaccaagcccgcttgggggcccccaaagccac

SEQ ID NO: 56786 - DNA, 497 bp, Glycine max
  Clone ID: PAT_MRT3847_22289C.1
ttttttaaaaaacaaagaaattacataaagtttttatatctcttcttatgcccaaataaaagacacaagtcaaaccgaaaattaaatctcacaattcttgaaagagacattgttttgttttttggacatcttgaaagacacataatcatataactttgaaagacacattattacacatcacaaactgtcatataaaaatacacgagtagaggacgttgttaaacaaagacaattccacatattacttttgtccatggaccaaagagccaatccttttatgaattctaatgtcttgagtgatatgtataacgtgggttgtatgtccttgtttgtagtcacccttacaaaatttttacgagggatggatgctggacgattggatgcaatggtcctccatcgggagcaatgcactcgtagaattcatctgccatattgtaaatttcgagaagttgcagtttttccaagtgttgaataccgggaggtactgtcttgagttg

SEQ ID NO: 56787 - DNA, 580 bp, Glycine max
  Clone ID: PAT_MRT3847_2228C.1
ttggttgccgggagatttaccgtgctacatgtgtagcagtgccacctgcttgggggggggggggggccgtgaaggacgaaagtaagtggtggggtgggcggactgggcgtgatgtgttaatgagagagcgccggcaaataggcagaataaccgtgggaaggacattagagagatagcgttataagcaataaccgtgaaggacgaacatgcaaggggagtgacaagcaaaaatgcaaaaatggtaaacagcggtagctagcctgcgaagcctggcggaagaaaccgcctgagggctacaaatgcgtagtttgagcaagaaaggatggcgttgttgagcaaacagctcagaaaaggctggaactgaaatggcgggcgaaggctgggtggtacgggcggcaaccttgcctactaaatactggaatggtataggtacctgggtggttaaaagttatagctgtttgtggcagggcaggataacagctgacaaacccgataggaggtagtgctaagggtttaattgcaaaattaagcgcgttatttatagataaagtaaatattagtgtagacctgggcagcgtgc

SEQ ID NO: 56788 - DNA, 250 bp, Glycine max
  Clone ID: PAT_MRT3847_22290C.1
ttcacgcgttctcacacgcgttcgctgactcttgcggagacaggggactaatataccttcgaaggtagcctatgtaccggggtaccttattgttactcgtaactcgagctgcctagcttaaacaaccctattacgcgaaccgaaatgcactatcaaaagcctgcagcccttaatggggaaccattcccacaaagagctatccatagagaagctgtaaattacggcggtgaccatccgcgttgcatagaaa

SEQ ID NO: 56789 - DNA, 730 bp, Glycine max
  Clone ID: PAT_MRT3847_22291C.1
caagttctatcggcagctcttgagattggtgaggatgaaaatgttgaagtcgaccccaaatttcgtgctttagttgctgttggatcactgatgcttgaaggtcttgtcagaaaaacagcactggattttgatgttgtgaacattgcaaaagcagccaagggttctaaggaaggcaagattgctgaaatcggatctgacattgagctgttaacaaagcggggctgaataccttttgggtgattaatctatcccgttcctccaaaaaaaaatgaaggtaaagaggaatgatcacgttcatgttagtgacccttaatcagacacatgcacgcagggttcctttctatactgtttttggctgtctttgggggtaagggtcgaaggctcgaagcatcttgtgcagggttctttggaaatggaaattatgcagtgtacagcattttcagatctttttccaaattatgtcgcatatatattgaattttcagttttatgaataattttcattctctatgtgtctgccctcctgtcttttacaacatccatcatagaagtactagaacatggaagtaggtaggaaaatgtgaaggtaccgtgcttcctttactttgagacaattatagttggaaacccatgagatgttaaaagattagattgtttaagccaattgagcaaattacagcaactgtagtagtcttcctctctcatttttttttaatatttaagttttattc

SEQ ID NO: 56790 - DNA, 867 bp, Glycine max
  Clone ID: PAT_MRT3847_22292C.1
cacgcgtccgggagaaccccaattatttttattttttttttatatattttttttatctacattcttgcaagttgcaacactcagttgttacctttcgtccgcagaaaacaattgaacattgcatcacatagaaacacataagttaagtacatagagaatctactggaacttctggttcgtttttccgctccaaattttccgttaattaataccattatatttcataagcatttttctattttttcatttttttttttctgtttttccttcgaggaaaaccagggcaaggtggtgtttctctcttggaggaggtttttactttaatgccagaatctgaaacaacaacaacaaacgacgtttgttgtaataataatacgtgtgtctgtttctgattttgtggtgttaccgtaaacccccatcccctaccaatccgacgtttatccattgcccatacctgaatcaaaacccaacctttgccaaaacgcaacaccgaaaatattatttttataaacaaaaaaaataaaaaattaaagtggctttaagctttggatatcgatcatcgaccacccaaattgaacccctttaatccattttcatcacaaggtcaagaacaacaatctagtacttttctaggttgcatcgaggcccttgtgttttgcattgatcagtgacaattggcattaaaaaaatcgattttgattggttggtgttggtgattggtgaatttggttttccctcgatctattgatctggggttgtggtttttgggttttgattatgagaatgaataaagggtcacttgattactggaggaattggcttggagctcgaactctgatatatttggcatcattgaccatgcgatca

SEQ ID NO: 56791 - DNA, 250 bp, Glycine max
  Clone ID: PAT_MRT3847_22293C.1
acggctgcgagaagacgacagaagggcttatgtcttgattatgtacaaaccttttgagtatattaaaatctataattagtaaatattaccaaatattgttcaaatatttattctcaaaactagctagtcaccgcaataagagatttctattctctataattactagtgaaactacgtgaatttcattccttcaatttctttaattacattcaaatttcattaatttcagcggttggattaatttgcttat

SEQ ID NO: 56792 - DNA, 274 bp, Glycine max
  Clone ID: PAT_MRT3847_22294C.1
gttcatgggatggcagttatagatggcatggagtggaatgttattttcaacaatgcgttaattgatgcttatgggaaatgcagggaacccaatttgtgggtttctgtgttttgttggatgccagagagaaatgcggtgtcttcgacattaatggttgtggcttagactagagcatgtagattggttgaggctgtagggtatttaaggacatgccggttaagaatacggtttctggactgcttgataccgggttttgtgagaaatggacgttgta

SEQ ID NO: 56793 - DNA, 635 bp, Glycine max
  Clone ID: PAT_MRT3847_22295C.1
caatgaatgcgaaggtggcgtttgaactgtcagagagaatcccacacttgagccttaggatgaaggagcattgccaccgtgcgttggtgttcgccacaaggctcaagaaattagggttgaaggtgatctacccaggccttgaagatcacccacagcacaaattgctgaaatcaatagccaacagggaatatggctacggtgggcttctttgcattgacatgggaacggtggagagggcaaacctgttaatggctcacttgcaaaatgatgctcaatttggattcatggctgttagcttggggtattatgagaccctcatgtcctgctctggtagcagcactagcagtgagatgactgaggaggaacagaagcttgctggaatctccccaggcctggtaaggatgtccattggatacattggcacattggagcagaaatggagtcagatggaaatggcactcgaaagattccaggaaaaggagccactagtttaattttacttctatttattactattttgttggactagctaccgttttgaaccgcttcagtacattgtcaatacaataaactactgtttagtttacttcataaatttcttgtttttggtttattttataaatattcttttatat

SEQ ID NO: 56794 - DNA, 903 bp, Glycine max
  Clone ID: PAT_MRT3847_22296C.1
ggctcgagcttgcggagagggttgtcttttgggtcatccttttcccaattcaataactctctctctctctcttgctccctacattttcgatcactttaaagtctcaaacgtaatggctgaaagcgcggtgacgaacaggaagcgcagcagcggggacgacgccgtttcggagaatgacagaaagcggaagaatatggtggcacgcaacatggacccggctgaggcgttggccttgacgcggcacgagttcggggagcacggtggcgtaaacatgtcgatcgaggcctcggcgacgttcacggtgatggagccggagaccctcggtcgcatgttcgccggcgagctgggcccggaccgcgatttcttcatttacagccgccacttcaacccgacggttgtcaacctgggccgccacatggccgccctggaaggcacggaggccgcctactgcacagccagcggcatggccgcgatctcctcggtactcctccagctctgtagcaccggcgggcacgtggtcgcctccaccactctctatggtgggactcacgccctcctcacgcacttcctccccgggaaatgcaacatcaccacgacgttcgtggacatcgccgatttggaaagcgtggagagtgccatcgtggaagggaagacgaacgtgctgtacttcgagtccatggcgaatccgagcctgaaggtcgcagacattccggaactgtgccgcgtgggacacgcaaagggcgtcacggtggtcgtcgacaacaccttcgctcccatggtcatctcccccgctcgtcttggcgctgacgtcgtcgttcacagcatctcaaagtttatcagtggcggtgctgatattattgcaggggctgtgtgcgggcctgcgagcctagtgaattcgatgat

SEQ ID NO: 56795 - DNA, 1022 bp, Glycine max
  Clone ID: PAT_MRT3847_22297C.1
ccataagcccaataataataatcttcagctcagctccacgaaaagcaaccttaataatcttaggaagtgataaatcaaaaatccaactaagaaccgagctagttttccttttacgtcctctgattccggctacgtactcgcatttcactttccttactcttatcgagagtgagcaattgtatcccgtgaggtgtgatttgtaagctgctacagtcagaaaacgaacagaagaaaccaaaactgttgcatttttttgccgaaggattaccaggaagcaaccatggatgttgatgcacagccaacgatggatgaaacaattctggttggtgatgatttaatgacaggtcctccatcacctgtagtaccaccggaaatagcctcccatgtactccaaggtgttgatttgtgtgatggaattctcaggaatctctttctctgcttgcaaatcaatgacattgaaccattttgtcaagatgaaattgctttatataaacaatgtgctgaaagaagggataaggagataaggaagcggcttcaagatagtgaattcaaattaggttcatcaatgcctctagatgaagccaaggggagggcctctcagcttgaagcagaagttacatcattggagaggcgcctaattcttgctaatggagttgaatgcgtttaagggtttcgtctaacttggagcttacatattttgttaaatgtaaattaaaatgcagaaaagtgcttaagttaaggcataaatgcctaaaaagcaggtaaaagggttgagggcatcggggaattagctaccaaaaattgactcttgatgtgaagattgatccggcacgagggttgcaccatgtcctacttgtcattttaatattttagaatttctgaatttttattaccataatttgtatgacatatctacatgtattagagcttttttttttttttttttaaatacaatactcaaatgataaatcacccaagattcagataaattctaataaattaaaataatatttctactctcc

SEQ ID NO: 56796 - DNA, 1586 bp, Glycine max
  Clone ID: PAT_MRT3847_22298C.1
ccacgcgtccgcgaaaataatagggagctcttgcagttgcagacaggggtgtcttttctttcatcctttccgcaattcaatatctctctctctctcttgctcactacattttcgaccgaaatggctgaaagcgcggtggtgaacaggaagcgcagcggcacggacgacgtcgtttcggagaacgacggaaagaggaagaatgtggtggcacccgacatggaccctgcggcggcattggccttgacgcggcacgagttcggggagcacggtggcgtgaacatgtcgatcgaggcctcggctacgttcacggtgatggagccggagaccctctgccgcatgttcactggcgagctgggccccgaccgcgacttcttcatctacagccgccacttcaacccgacggtgctcaacttgggccgccacatggccgccctggaaggcacggaggccgcctactgcaccgccagcggcatggccgccatctcctcggtcctcctccagctctgcagctccggcgggcacgtggtggcctccaccactctctacggcgggacccacgccctcctcacgcacttcctccccgggaaatgcaacattagcaccaccttcgtggacatcagtgatttggaaagcgtggagagtgcgatcgtggaagggaagacgaacgtcctgtacttcgagtccatggcgaatccgagcctgaaggtcgcaaacattccggaactgtgccgcgtgggacacgcaaagggcgtcacagttgtcaccgacaacaccttcgctcccatggtcatctcccccgctcgtctcggcgctgacgtcgtcgttcacagcatctccaagtttatcagtgggggtgctgatattattgcaggggctgtgtgcgggcctgcgagcctagtgaattcgatgatggaccttcacgacgggtccctgatgctgctgggtccaacaatgaatgcgaaggtggcgtttgaactgtcagaaagaatcccacacttgagccttaggatgaaggagcattgccaccgtgcgttggtgttcgccacaaggctcaagaaattagggttgaaggtgatctacccaggccttgaagaccacccacagcacgaattgctgaaatcaatagccaacagggaatatgggtatggtggacttctttgcattgacatggaaacggtggagagggcaaacctgttgatggctcacttgcaaaacgatgctcaatttggattcatggctgttagcttggggtattatgagaccctcatgtcctgctctggtagcagcactagcagtgggatgactgaggaggaacagaagcttgccggaatctccccaggcctagtaaggatgtcaattggatacattggcacattggagcagaaatggagtcagatggaaattgcactcgatagatttcaggaaaagcagccactagtttaattctatttctatttattgctactattttgttggactagctaccgttatcagccgcttcagtacaatagaataaacttctactgtttggtttactttataaagttctagatagttttacggtattcgtatactatcaagttatc

SEQ ID NO: 56797 - DNA, 448 bp, Glycine max
  Clone ID: PAT_MRT3847_22299C.1
gcttggggggggggggggggggggggggggggggggggggggggattcgtaacttattaaggggaattaggactgagcataaccgataaaaccaagggagggagaagatatacgacactggtaaagtagaatggggtgagtagccataggagacaccaatgcgcagatagcacgaaagcgattaaaaacaagcaacaaatgacccttaagcatggttacacgttacaaagcagcaattgtgaaaacctattaaacaaaaaagaatttgcaaagactaagctttggcgtagcctatgagcgggtaacaagtaacagcaatagggggccgacacttgcttgcttgcaacaggagtacataaagcaagaacaaaaagtaaagtataaaggcaagaagccgggtgagaagtgagaatgggcgccaggtagtagtaagagccaaagtgaccgt

SEQ ID NO: 56798 - DNA, 324 bp, Glycine max
  unsure (1)..(324): unsure at all n locations
  Clone ID: PAT_MRT3847_2229C.1
tcctctatatttgaacgactgagtgttaattgtggaatatcataggaagatgtcttacgttgctgatgacgttagtcaacacccgacgagaaagacatgacggagggaaatttttcctttgtaatagacctggctctacattggaaaaagcttcctctactaaagcacatctttggcaaggaggggaacctccagatatcatataataggcgctgggtcacattcctgacaagattgtgctgaaaatgaccatcaagagagaccccagagattgatgccagacagagacanagaataaatcctcactacaaacaggttcaggct

SEQ ID NO: 56799 - DNA, 347 bp, Glycine max
  Clone ID: PAT_MRT3847_222C.1
cctcgtgcccctcgtccgcacgaggcctcgtgccgaattcggcacgaggcccgtgcccggacccggtattttgtccatggccaatgctggacccaacaccaacggttctcaattctttatttgcactgccaaaactcaatggttagatggtaaacacgttgtttttggaaaagtcgttgaaggatacaacattgtcgaagaaatggaaaactcccccaccgacagaaatgacaaacccaagaacgccatcgtcatcgatgattgcggacaactctaagcgtgttaaatcacctttagttcatagtaaatatggaataataaataacattttatgaaaaaaaaaaaaa

SEQ ID NO: 56800 - DNA, 352 bp, Glycine max
  Clone ID: PAT_MRT3847_22300C.1
ggggggggggaaaagacccaaattgtaacaaaaatttaaggcaaacccaatacaacggaatttttcaagggttttataaacaacgaactcaataaatttttagtcagagtttggctactattcaggacaaaaaggctttactgtcgcgtaatacttttatatcaaaattaaggaggggcccctctaaaagctgaaaaaaagccatgggatgctttatttttgggaacattgaccttttttggtatttgctgaaaaatttttattacttcaaaaaaatttggtttttgcgttggatcttggtgcccgcacccctgaaaaaattcaaaaagtcttgggtgtgtatttttgggaa

SEQ ID NO: 56801 - DNA, 1083 bp, Glycine max
  Clone ID: PAT_MRT3847_22301C.1
ggaagaaggaaaacctagctgagattagaaaaagcatcaaatggcatatgagaatgccaaaagttctaaaatccttaacaaaccccccagcaacgtgcacgtaaataaaacccataagtcataagccccctaatcttcacctcatctcgatttgggaagcgaaaaatcataaaaccaactaagaacagagcaagttttgcttctgcgtcgtcccctgattccggcaattgtatcccgtgaggtgtgacttgtaagctgctacagtaagaaaaggaacagaagaaacccgaattgttatatttttttgccgaaggattacctggaagcaatcatggatgttgatgcacagccaacgatggatgaaacaattttggttggtgatgatttaatgacgggtcctccatcacctgtagtaccaccagaaatagcctcccatgtactccaaggtgttgatttgtgtgatggaattctcaggaatctctttctctgcttgcaaatcaatgacatcgaaccattttgtcaagatgaaattgctttatataaacaatgtgctgaaagaagggataaggagatacggaagcggcttcaagatagtgaattcaaattaggttcatcaatgcctctagatgaagccaaggggagggcatctcagcttgaagcagaagttacatcattggagaggcgtctaattcttgctaatggagttgagggcattgaaggtttccgtcaaagatggagcttacatggccgccttactgattccaaaaataggttgcagttcttaaagcagggcctagagagcagaaaaaagggttgagtccatcggggaattagctaccaaaaattgactcttgatgtgaagattgatccggcacgagggttgcaccatgtcctacttgtcctcccaatattttaaaattacagaatttctattacttttttaccttatatttgaatgacatttctacatgtataagagtttttttatccaatactcagtcataaatcaaccgagttagataaattctgataaattagataacattttactctccaacaactaaaaaaattctttaagaattt

SEQ ID NO: 56802 - DNA, 434 bp, Glycine max
  Clone ID: PAT_MRT3847_22302C.1
agacccccccgctcccccaatccgcgcgctacggcaacgtctcataccgcacctggcacgagaagatgtccaattccgccgaatccctcatccaaacccttctcccggagaattttcaccccgccacggtcgaactcgccccctacttcgccgattccttcggaaactcgagccgcatcgactacggcaccggccacgaaacgaatttcgcggcgtggctctactggcttgcccggctcggggtcattggagaggaagacttccccgccgtcggggccagggggtttgtgaagtaccttgacctcatgaggaagctgcaattacagtactggttggaacctggctgggcccatggtgtgtgggggcctgaagattattatttttttgcccttcatatttgggggcttccaagtggattgaatcacagtattatg

SEQ ID NO: 56803 - DNA, 302 bp, Glycine max
  unsure (1)..(302): unsure at all n locations
  Clone ID: PAT_MRT3847_22303C.1
gtcgcatgcacgcgtacgtaagctcggaattcggctcgagnnaancctgngnctactcncgctacaganccactgtgnccatgagagttggattttgaaggcanaaaggcgctcctcccttgggaattagatcaggaaganntggncgtgggcacacctgaggaagcaaagtcggcacgcagctggcagcagccatcgccgcaacataagctcccgaggaaggngtccanagacacnnngagcnnnatgagtnccgagacaggccctgtagctgttgatcccactctgaggagaagaatgcn

SEQ ID NO: 56804 - DNA, 347 bp, Glycine max
  Clone ID: PAT_MRT3847_22304C.1
aaaaaacaacctttcctaaaaaagtttaaatggtttaacaaccggcaacaaaaggaaagaaacccggaacaaaaagagcaagccaatttgttcacgtgtcagcctcagagacagcccatgttatactttgtggttttactccggataatggttgggtccgaatttcatttttcatttcccatttttttttttgttttttggtgaaattttaatttcccattttgaaccataatatttcaaactgatttttgttgctttggatttttttttggggagaagggagagacccttcaatcaccacttattttctttaacaagaaaccaagcgtgaatccaaaaacttacac

SEQ ID NO: 56805 - DNA, 400 bp, Glycine max
  Clone ID: PAT_MRT3847_22305C.1
tcgtcactcgtaccgagaataggaccaactcaaggggaaactctgtgaaaaaggtgggcattgtggagggcaatgagaaggacaaccagaatgcatcccctcatgctgctactctcataccatggcttaaaccatgttcttcatctaataacacatacatcaccatttccaacacattatcatcatcatcatcttcttctccttcttctactcataatcagactcataatgagactgttcaggaaactatacaattaatgccaatgataaccgacaagaatgcctacaaacatgaggaagatcaagcgaatgatgaggtgaaagagcaaatggctgaacatgtgaccattgctttgcacaacgcttggcctggcactactgatgatcatgctgatgatga

SEQ ID NO: 56806 - DNA, 302 bp, Glycine max
  Clone ID: PAT_MRT3847_22306C.1
gttgaaaagagaaaagaaagagaatgggttctgctctgtggacctgtctgagtttgttaacacttgcgtctgcatccttcgccgccaaaccaataacatgaattaaggtaccaattgccagaaacaagatgccgacctgtgcctttgattacatcaggaaccggaatggtggtacggaaatgcagcgtcagctggacacatagccacgtactggcatccagtcatcacggtcctacctagtaggtcagctcagcatgtacatacaataggtagctggagaatcagctggcacagtcatcgcc

SEQ ID NO: 56807 - DNA, 366 bp, Glycine max
  unsure (1)..(366): unsure at all n locations
  Clone ID: PAT_MRT3847_22307C.1
gatcagagaataaaaagcttctatttatgggccagtcgtacatatgatcgttagtaggagcatatggctggcacatccagacactcattaccagggttacattatgggaacacccgtgatgtattaacccataatattgtaccacccgacccgacctgccggagcgtaaaatgctctaacgacctattcgagtacatgggaagaaaaatgcnttatctgccttttgagtcaagggactttctcatgtacccttttattgacgcattaaaagcccttgaaacacgaggttcccctcttgtcattttccctgggaccaaactgaaacctcttgctgttcgggaagaggatccattcctactcctccct

SEQ ID NO: 56808 - DNA, 542 bp, Glycine max
  Clone ID: PAT_MRT3847_22308C.1
tttttttcctaagattcaaataaataaaaaatccccatgcctaaatactactgcgaatactgcggaatctatctaacccacagttccccaagtggtcgtaagcagcactccaagggtagaaagcacatcagctccaaagtcgaatattactcccaattcctttccgaagccaatcccatgaagaacgtcaacccatttatcagaaccgacacccttcctctcatgatgggcatgctcaaccccggcagcattatgcctggaggtccacttaacatgccatctatcaacgtccccggtatcatgcctagtaatatcaatctccccatgcctggcatgccaggcggtatgcccggtcaaggcatgcctatgggacaacctggcatgatgatgccaggtatgatgcctggacctatgggattcccaccaatgggtgctggaggtcctatgccaggtatgatgcctggaatgggacctggtggaatgcctccaatgggtgcaggtggtccaggaggtcctggccctatgccaggtatgatgccgat

SEQ ID NO: 56809 - DNA, 226 bp, Glycine max
  Clone ID: PAT_MRT3847_22309C.1
ggaaagagcaaatttcattggggggggtttgttttacacattataaaaaacaatatttaagtaaataacaataactttttctaaacctaacacaaatggggcccattaaaacttgcacaaacaatcctttaatttaatgcaaaacccccggttactatttttcttgcataggcccaaaaaaaatttttttctgaggccacacaagtattaatatattttaaaaatg

SEQ ID NO: 56810 - DNA, 441 bp, Glycine max
  unsure (1)..(441): unsure at all n locations
  Clone ID: PAT_MRT3847_2230C.1
ggacgagaaaggtgaggctactaggggtgaagtgttttcgaggacagtgatgggatgcataaggtcatcaagtttctcaataacgtggatctggttagaggccaatttgactatgacttcttcaaggcgatcccaattggatttggaccgagttgattcagccatggtgagcctcttaatgaaagctcttttttttgttatgagttgaaaataaatcctagcattcgaggcctaggaacctccagaatcaggtgaggaaaagagattttatttctgcttatccattagaatacatcattcctatatatatagaaatgcagctaacaaatctctaacggatttggcattgtgtgccttgaangaaacaatgacaaaatcaaaggggacaattcttaacggaatggaatcaaccaacaaagcatctagagtgccactattcag

SEQ ID NO: 56811 - DNA, 556 bp, Glycine max
  Clone ID: PAT_MRT3847_22310C.1
ctcaaaaggaagtcttggaagggaagcttcaatcagctactgataggattgaatccttaatgaatcaactccaggaatcagagaaaactattgacagcttgagattggagatacagtcctttaaagaatcaaatggaaaacttgagaatgaaatcaggaatcagcaactgataatttcaaatcctgatgcacatcattcagaagaagaattaaaggaggctcgtaacaaggttttggctttagaagtggaactggagaaaaagaacagcaattgtaaagaactagaagccaaatgtattgaattgcagttccagcttgaaagcatgtcaaaggagtgctcaaaccatgatattattgagaaagataagccactgcataatgtaagttcatctctttctagtcctttttcttgtcaactcctagtcagattactagttcttatgtaactttcaagaatatttaattaaggtgaaccgtgatttctactaaaacaaagttagaacttatagtatttggacttatgtgactttaacttgccttttaaattacaaactgg

SEQ ID NO: 56812 - DNA, 739 bp, Glycine max
  Clone ID: PAT_MRT3847_22311C.1
gcagaagatatatggatggtgggagtaattgatgagattcggatgccattaacagaaaatgatcataatccaattctaattgacacaaagactcgatctcgagatacacttcctgctgaaccgcaacgaagaaatggaaggcttcaattgatgtgctacaagtatttgtgggacaatttagttgctgatgatttcccttctgagaaatttttcacttattttggcttaaaccctcaaaataatctatgcgaagatctgaaagtgataggtgctgactctggattttcagcttcaaccctggatgatgcggtgagatattacagaaatacatgcaggatgctggcccctgctcatgatcagctcttattgagatatgagtatcagaaagatcattcgctgcttggggaagttaaatttgcatatgaccctgactggctaaagaatcaacttcgttcttgtcttgagttttggcttggagaacaagaagccacttacactcctgaggaggagcgctggaaatgtcaatactgtcaatttgccagagtctgtccagcatacactaatagtaaaggaacagagtcacctaaaagaaattattcaaatatcaaaggctagagatatcggagtgctgactctctaatgttattgttagctgcatctataacggtgaaagccttcctttagaaaagcttgatattttaatcagagcttttcataagtaggtttacagtaagcattt

SEQ ID NO: 56813 - DNA, 302 bp, Glycine max
  Clone ID: PAT_MRT3847_22312C.1
ttagcttgctatgagcaatggctaaagccttgttggcatcagtgcctttttacctgctccgagcaatcaatacaactgaggttgcttaatagcttgaaactctttcacctttttacccttaccctcactttaccacacaagcacctttttacccaccaacaagtgcttcttacctccatcatcaccaccaccactacccttcaatactaacaccttgcaccttttatatccacctttctactccttacccaccaccaattaccccttctaccccctgcccgcttcttaaaggtttcctactt

SEQ ID NO: 56814 - DNA, 470 bp, Glycine max
  Clone ID: PAT_MRT3847_22313C.1
gttccaaggaaggtttcccgtcatcactgtatgacgtcctccttctttgggggggggggggggagctgggaaagtggcaacgctgtacttgaaagtggggccaaggacttaataggcagtaggagtatgcgtgagccagggcaggacgtagtcccgagcaggtaaaaggctgtgccgtgaggataagagctcggtggtttagtagacagacggcaagcagggataggaatagggatcataaaacccccgaacaaagtaacggccatgcgagggatggggataaccgggtaggaatggggtaaactggagaaagtggttgggcggcttcagcacagaatagtcgtgcaagtaggccgtacagaagaagatggtttgcccataatgtgactaagtgttgccgtaaaatttcggcacataaatggaggggtaacggtcagcataacacacataggttgcgtgggagagagtgg

SEQ ID NO: 56815 - DNA, 281 bp, Glycine max
  Clone ID: PAT_MRT3847_22314C.1
tttgtacacttacttaaattgctttaaaggttgttctaaaatacaaaggcagaagttaaaatggaagaaaaactacaagttgaagagctcagcagcctgcgatcatagtcaatatcatgtccaccctcttctccgtgttttttttcagaagtagctcccctttcaccttggaagatctaaagtgaagtttccttttcctccaagaaaggattcggtgttttgaattctgatgctcaacctgatcacatgtattataattctcaacatgtgcacccccataa

SEQ ID NO: 56816 - DNA, 482 bp, Glycine max
  Clone ID: PAT_MRT3847_22315C.1
aaaaaaaaggtgacggtcgggaccaaaacaattccggcgagcacactatcactaggccgccctcgtccttttttttttaggaatatgaaaaaatggattaaactggatggcgcacaacttaattgcctcaatcataatgaaaatgccatagactttgcgcgctcaaaccatgctaaatgaaacttgagtgaaagggaacggaacccgccttacgatatttaggtagagcccacattggataaatatctttgtacattggataatgcaacatacaatgtttcatgaatactcccgtgaatccctgctgggacaaataacccttttacaactgagaataaatgagcaactttgcagcacggagaagaggcatggggtctctatccgcctgtccaacatgaattagtcccataagagcccatgctgtatgtgcaacatttgatcggcttccttctagaagtacatacatctttatttgggcttga

SEQ ID NO: 56817 - DNA, 425 bp, Glycine max
  Clone ID: PAT_MRT3847_22316C.1
aaaaggggaaataatggactttgcaataaagaggggctgctaatatgcacactacaattaagactctctgtaagaaaattctaggcaatacaaagctcttccctggtaaaaggccggacatctatttttatacactacaaaggtttgccaaaataaaatttctctgaaagcaaatttttcataccccttttgggtaaatcattctaaaacaccaaaactaagtgacaattttatattaacactggattgcttcaccaccaagagcggccttcacaagtataattgtcacaaaagctacacccttggaggggacctccttataataaggggaaatgcgcactaaaagtgctggtgtcccccaaggatttatgttgataaaccaagcatgacccggctggacatattcggatgggctaaatgcacca

SEQ ID NO: 56818 - DNA, 144 bp, Glycine max
  Clone ID: PAT_MRT3847_22317C.1
ccaaaattaatccaaatccgtgttccgaagcaaggaatttgggaattccgaaacctacccgatttcaatgggaaaaccattgtttcactgggtggaccggcaacccaaaggaaggaggtcaaggtaccaattaatgggttaatt

SEQ ID NO: 56819 - DNA, 351 bp, Glycine max
  Clone ID: PAT_MRT3847_22318C.1
ttttattcatttcataccatataatacaggcagccattctattattaagcggaatgatttcagacaagcaaagaatttatttagatctctcacacttggattttactcactgggagagaggcccagattctacttgcccagggggggggatcaaggaatcaaaactgcaccactaacggtttgttctaagacaccaccaaacgcccgggtgcatgatcgtgatcaaggctaatccgatgctccccacattagccatcctgagcttgttagggactgaacccaagcttatggatatggaattgatcttgctacactgtgtaaaggataacccacccatccatggattttttg

SEQ ID NO: 56820 - DNA, 285 bp, Glycine max
  Clone ID: PAT_MRT3847_22319C.1
agtggatttttacatcatacaaagcattcaattggagtgcttaatttcattccttgtgttttcctttctttctcaaaaccaaacatgtctaacacatgctttaactgttactgtgcttacaagactatcttcactaatggaaacagctatcgtgttattgtatagactgatattagttacatttatacttttgtcattgattttccagcagctgatcattattgcaagttcaagtttgtcactaatttcactttctcggactgcacctttattcattaatgaata

SEQ ID NO: 56821 - DNA, 153 bp, Glycine max
  Clone ID: PAT_MRT3847_2231C.1
ttctcagccgctacaacggtattgccttttacgacaggcgctgcaaagccagggcctggaagtatcactagggtccttgcggctgtgcttagatccgcagacaataccaggagttcgacagtgagaattaattacgtacttgatttccgcata

SEQ ID NO: 56822 - DNA, 352 bp, Glycine max
  Clone ID: PAT_MRT3847_22320C.1
attcttttgcctctaaaacagaaagacgacgaacacaggggggcgcatgttccttacagtcccgaaaaatttgatttgaagcagttaacctccaatgagacaaaattaagctctggctgtacactaaaatcaccacaggaggatcctgcatctaactgaactgctgatcggaataaaatatccaaagtgactcttaaagtatccagtgatgatactcaaaagagggcagagcacgggtcttcaatgtctacacataaccttagctcttctcagaatcaagttgtgacctataaaaagaaacctgcattgtgtgcaaaaattcttaaaactacttctgggacatggcctcagg

SEQ ID NO: 56823 - DNA, 116 bp, Glycine max
  Clone ID: PAT_MRT3847_22321C.1
cccctcccgctaggtgtgcagcagctgccagggaggaagatgggcgcacttctgcctccgtatttatgatcaggtctctctgtctaggctaagggatagattgcacagttatgcta

SEQ ID NO: 56824 - DNA, 278 bp, Glycine max
  unsure (1)..(278): unsure at all n locations
  Clone ID: PAT_MRT3847_22322C.1
cctcgctccgcaccagtttcaccgcacgantatcttnttgtttggngcgatccgaganaaactctgtaaacatgttggtttaacaggacctccttacnagtgatgagcntctcntctgactccttccgntnanaggaaattgngnatggnattcntttgggantttaaggggaattgggttgtnaaaggngcanttgnngtanncatgggngcaaaccctnctgctgaggttgaaggagangttaagggatttgntgntgcnacngtaangnttntna

SEQ ID NO: 56825 - DNA, 2398 bp, Glycine max
  Clone ID: PAT_MRT3847_22323C.1
aacttattaccattggggaatgtacatggtacctggtactgcaacaggatcatcaccaatccaatcaccgatagtgagcttcacgcgccaccttggcgcgtagggttgccaagctgctattcctccaaccaaaaggagccaaagccaaagcccattcgttcgtcaccgttctgttcactctcgcgagcacccacccaacattattcgcgtctggccggtgatatggtaccaagcaccgcaacaggactacatccaatcctttcaccgattgtgaacaccttttcgcaccttggcgcctagtgattgcccgctacttctactccatccaaccagagacaggccacgcttccggccttacccattccctgccaggctttctggattgccctgcaggcgcccctagtggtaaaaatctggtaaacattagcgccaggctagtgaagatagttcaaaagcctcctagcgtccatggacagaggagtaagccatatggtctactgaatcagcattgaactgacaagacgatactgatacacattcgagtcatttaacttcaagcggagcagttgggcatatgttttcatcttctcctggatattcaactgatcttcatcactcatccttttcatctcatgaaaaacaacctagaaatactcattttatttcacagtcattaagtaacatggcttcattgccattatcttattcttcaaatagtgaaccgataccttctacaacatcaaccccttattccaatggaaacagtgtttcctggcatacagattccttgcctagctttctcgatttccctgccaatacctccattggtaatagtcaagtagaaagcagtgactgcaatatcatggcaactgaagagtattctaagcgaaatgattggcaggagtgggctgaccaattaatcagtgatgttgatcctttgacttctaattggaatgatcttcttgctgacaacattcaagatcttgaaccaaaggtcgcaaaatcatcttctcaacttccaataggacaccaatctcaaagccatcaacaacttcctgcttcatctggagaaaatcgtgttggtgttgccccaacttcctcaacaaattctgcacctgccaagccacggatgcgctggacacctgagcttcatgaggcatttgtggaggctgtcaaccaacttggtgggagtgaaagagctacccctaaaggtgtgctgaagctcatgaaagttgatggattaactatataccatgttaaaagccacctacagaaatacaggacagctagatatagacctgagtcatctgaaggagctatggagaaaaaaccaagtcccattgaagagatgtcatctctagatttgaaaactaggtattgagatcactgaagctctacgactacaaatggaggttcagaagcggttgcatgaacagcttgagagtcaatctggagtgtcttcgacccacgcgtaagaccacgcgtccgcccacgcgtccgaaaccatcaaggtggaccactgcaagtcaggagctgatctggctaatggcagtaccacagttgaggaaagctcattggaagtgggtgagaagcaggatgctcctgaaattcaagcttccgacaatcctgagcaacatgctagtgaagatagtgctaatgcctcaaagcgtccaaggacagaggagtaagccatatgatctactgaatcagcattgaactgacaagacgataccaattcatttaagatttctatttagtaaggaagacttggtagatccataacttgagtttcccctaacctgttgtgatcaatgaggacttgcatatgtatgtcattgtgttacaaaaatgatgagtcaatttttggaccatgaggttcttcgaacttcttatttagcatccttgttaggatgagattctagtgtacagtacagataatgactacatctcaaatcataagtgaggaatgaattaggacagtatctttccaaatactaccacccaaaattctatgttagtacgtacatctcaatatgaattgtttattttaactgtaccggaataataaaaagaagggcacaattctagttctcaagttcgtttttaacaaaaaaaactatttgcaggtagcctaggaatgtcagcatcgcctcagttattatttggccgtttgttttccttggaagagaattcgttgttaaaaatagtatcactgtaagccattactaaacttgtgcacactatctatccttagaatgcggaacccccttcctgagctctatactttatgccccagaaaaagaaaataaaaaacaatgagtcaagtcaacgagcttgtagctcaacttgatgaaaaaaaaaaaaaaaaaaaaaaaaaaaaaaaaaactcgaggggggg

SEQ ID NO: 56826 - DNA, 1091 bp, Glycine max
  Clone ID: PAT_MRT3847_22324C.1
ctcggccgcgagaagacgacagaaggggataataaaagaatgtgaatttttttatttaaattgaaaacgagcagcagcgccatagattgcaacgccaccacgtgctgtggcatctgggcattgagatcgatctacttacccaaacacagacacaacacaaaacccatcccctcgactccacgcttctctccttccttcaacgtcgctttccactgtggccaccgggtgaacttttcaagtttgtggacacgctttaatgtacagaagcagcaatattgtggccagggtttttgatcgtcaaatttgcactcctgctcctggcactagtgtgtaatttaattcttgcaggttcatcatgctcggcgattctatgaaaatttggtaccaagtcacacagtatatgaggtcgagtgcccagaccattcatttcgtaaattcactgatgatggtcaataccttataagtttcagcagaaatcatcaggagttgattgtttataggcctagatggctttctttttcatgcaaggatgaagattgtgataaacatgatttgccatcaagagcaaagagatttgacagttttttctcccaattatattgtgtaccacttgcttcttgcaatgaacttatatgtaaggatttctttctttacatggagagtaatcaatttggactgttcgctacttcaacggcccaaattcatgatgctcctgctgttggaggagctgtccatggtgttccttcaattgagaaaataactttccacctcttgagactggaagatggagagatcttggacaagaaggtcttcagtaatgacttcgttaatttaacccataatatgggggtcttcttgtatgatgacctattggcaattgtatcacttcgctatcaaactatacacattcttcaaattagagactctgggaaccttgttgatgtacgtgctattggggaattctgccgtgaagatgatgagctttttctcaattcaaatgctcaggtcagtaagcttttggtattgactttattgtaatgtgttttcttgggcatatcattacatatattgttgtggttttttgagaaaaa

SEQ ID NO: 56827 - DNA, 565 bp, Glycine max
  Clone ID: PAT_MRT3847_22325C.1
acgaggcaaaaaggacagaaatttggtgtatcttttggtgtatgttgatgatatcatcataactggccgctccaattatctcatccagtctctggttcatcacctaaattccaacttttctctaaagcaacttggtcaactagattactttcttggcattgaagttcaccatacacctactggttctgtgttactcactcaaagcaaatacatttgtgatctactgcacaaaactgacatggctgaggcaaaacccatttcttctcctatggtgactaacttgaggctctctaaaaatggtgatgatcttctctcagatcccactatgtacaggtcagtggtgggggcccttcaatatcccactatcaccagacctgaaattagctttgctgcaaacaaagtctgtcagttcatgtccaagcccttggaatctcactggactgtggtaaagcaaatcctcagatatctgaaaggtactctgcactttggattccgatttggaccagcctctctttctcagctgctcagtctgcaggcttactgcgatgctgactgggcagctgac

SEQ ID NO: 56828 - DNA, 152 bp, Glycine max
  Clone ID: PAT_MRT3847_22326C.1
ggctcgagcatgaaattattatatgattgctatgctgcaatcagcataacgggggcgccaactggggcccttgtgcgcacacttaacgggccatacagagctgggcgcactactatcccacgcttcatcctgtaagaaaacgtcacgagcac

SEQ ID NO: 56829 - DNA, 428 bp, Glycine max
  Clone ID: PAT_MRT3847_22327C.1
gctaacccttgacgtttcagattctgaaggcttgcttagcgtcatttttttgctaaacgtgagttagtgaattttcgcttagcgagctaggcgcactgagtgcgagaagggacaaacaactcgttgggcgagcttgcggcgcgttgaacacgggcatctgtgactgatcctcttctagggttttctcacgcactaagcgggctgagtgcctcgcttagcggatgtaactcgctaagcgcatgtgtctcgcttagtgagacatcagctgcttaaccttctcttcatttggaagttgattcacattaattaacaaaaatgggaggatctgttgagcaaaatcaactaaacatggaaatatgtacaattcctacaaaaagaaccataaattgaagaaaaaaaatactaatttcatataattattcaatata

SEQ ID NO: 56830 - DNA, 666 bp, Glycine max
  unsure (1)..(666): unsure at all n locations
  Clone ID: PAT_MRT3847_22328C.1
ggtgtcaagtgggctatcgcccgcagcgccactgctcttggtctccctaccatcagcggcaaggatggcaaggtcaccatcgatgctggtccgccaatggagttccccgcccctttcggccgtgagatgagcaaggaggaggctttcatcgccgagatggatgctaagaccggtgcttctcttaagctgactatcctcaacgcttctggccgtgtctggaccctcgtggccggcggtggtgcttccgtcgtctacgctgacgccattgcctcggccggcttcgccagcgagctcgccaactacggtgaatactctggtgctcctaccgagacccagaccttccagtacgcccgcactgtcctcgaccttatgctccgtgcccccacgcaccccgatggcaaggtgctgtttattggtggtggtattgcaaacttcaccaacgttgcttccaccttcaagggtgttatccgcgctctgcgcgaggttgcccccgtcctcaacgagcacaaggtccagatctgggtgcgccgtgctggtcccaactaccaggagggtctaagacataaggctgtttgcgttagctcggcttgacatgcacgtctatggcctgaatgcactctcgntatcgtgctctggccttaaggcagagagcgactcctgagtcac

SEQ ID NO: 56831 - DNA, 477 bp, Glycine max
  Clone ID: PAT_MRT3847_22329C.1
gggggggggggtttttttttttaatgggcgattcgcttcgtgggctcggcctttcttgaaaaatagacctggggggcccgtctttgccttggttggcccccgtgtctttttctctccctcgccaatcatttttttttgtggcttttgaaaaagaattcgcgggggggcttcgcccatttgtctgggacgtgtgcgtgccccgcccgggggttaggtgacgggttacatgtgccttttggcagtttccgcacggggggctttttttccctttttcccccataatcggtgggactgttcctgatcccgatttgagtcccctcccccttgggtgccggggggttgtgttttactctcgcgacagacacagcccctccttttatatgcatcgtcccttttaccttactgggcttttttccgtgatggcgcaccccccttctttggagctgaccttcctgggggtgccccccggggggtaac

SEQ ID NO: 56832 - DNA, 279 bp, Glycine max
  Clone ID: PAT_MRT3847_2232C.1
aaagtctgttgtataatacaatgtaattttcaatattctttaagcatataattcaagattcgtaaagcaaaagcaagggaagattttgatatgcttgagaatatgaagtttgcttggtagtgaattgacctctttcatatggactgagtgagaaagatgttaagactatattcttattttggagaaaatatatccttttgctggaagagtattttctcaatgggctatagtactctgacttctatagtcatgataagctttagattaaaatcactaaac

SEQ ID NO: 56833 - DNA, 564 bp, Glycine max
  Clone ID: PAT_MRT3847_22330C.1
cccacccccccccccccccccccccccccccccccgaaaccccttacgcttgggtttacccttgatatttttgtctctgttccttttttttttctcttttttttttttaaaaagcccggccccgggggtgcccccggaaaaaccgagcggggcccggggggggggggggatcccctaaaaggggggcacaaaaaacgggggggaaacaaaaggaaaaaagggtgccgggggaaaagagggacccaacccaaattaaaggcgaaacgcgggcggggcgcttaacggggaaggccccggggccccaagggggggcaaaaacaaaaaaaatcgggcgggggagagggggcccgggtacagggcggaaacgtggggggcccctccaccaaagggaccggccacacccgggggggggggccgtctggaattgggacacaggggggtttcttttcaccccggggaggcgcggcacccggaaggcccccccccgggggggccccgggggggggtaacatggggggccccccggatccgccccaccaagtaaaaatatatttggaggagcgg

SEQ ID NO: 56834 - DNA, 303 bp, Glycine max
  Clone ID: PAT_MRT3847_22331C.1
gcccaacatccgtacttgaactactcggagaaaaaatcttgaatgaatgacggagggaaaaccattgtcggctgaaagtcacttccacctggacctgcagatacaattttacaacggcctaggtgcgacaccccgcccaacttttacaacctgcgtctcgcttcctagacgagagatcgaaaccttgacggaccaggtgtcccactaactatcctgaagatgaacctacctgaggatggcgaaaccgtgcaagctctacccaaactacaagggcttggacaggcccactcactatacatttac

SEQ ID NO: 56835 - DNA, 540 bp, Glycine max
  Clone ID: PAT_MRT3847_22332C.1
ccttctacgctttttactgaccaatgaatggaaaaaatgaatcagcatttcggtacaccaagggggtaccaggtgggacctgagaaacattgctgccaaaacttatattagcaattgcaatgctactctgatcaccacactcctctctagaatgtgagactattgttcatcagcactaattctctcttgaatgagtgaacttcattgagccttcaatacaccggatattgcaagccacggactgtgctttaacctacttagacaggcgatcagcgatcctattcaacatgaaatagcgtggaagactcatgccacatctttatttccatcttaagcacaaattgttttaccaaattttttttctgccttgacaaagacaacggtgcccaacgtcatctacaaagattcatgttaatcccagagaggggagatagagggagatcgttatgtatggataaatacactaggagctgctaaaggaagacactccttgagaatatcaccattcatagaacgggtgaacatattgaatgcttgacc

SEQ ID NO: 56836 - DNA, 448 bp, Glycine max
  Clone ID: PAT_MRT3847_22333C.1
aattcggcaccagatttaattacaacagaatacacaaggtccaatatcttgtacaaacatcaaataccatttattgttaattacaacagaatacacaaggtccatgatttgctaattaagcctcaccttcgtgtttttacacccagaagaaataatattaataatcatgaacagttccacttctgttatcagccaatgctgtggattgtacttagaaaatgcattaccattttttgcaaaagaagccatacatcttactactcatcataacaaataaacaatttacattcccatttgcagcaataagctatcaaaaggcagagtggattcactggccatgcatactaatgttgtagttcatctcattttgaagtgatacatatgtttatgacatgaataagattcatgttcaagttatatatgtactgaaactcaagaatcttcattg

SEQ ID NO: 56837 - DNA, 307 bp, Glycine max
  Clone ID: PAT_MRT3847_22334C.1
ttttttttttaatccccccaactattaaaatggggttaaaaaatggattcctgaacttccacattttgcccccggcattcccgtgggggtaattgggacccaattggattctccaaaaaaacaacacttccttggttaatcttcccacttggtggccatgacttcttaatcaagggaagaaattccgaaacaccttggaacttccttctatatttaatggcacttcaaaactccacaaaatgggaaaggcagtttttaatgttctaataaaatgggccttcaacctcccccaaagccaaaccaaaaa

SEQ ID NO: 56838 - DNA, 129 bp, Glycine max
  unsure (1)..(129): unsure at all n locations
  Clone ID: PAT_MRT3847_22335C.1
agctcgcacaggctctcccccgagggaggcccactttactttaaanccaaacgcacacagagataagggacaactaaaaactcatgcagcgtcaccagaaagcactcactattaagtcagcactccccc

SEQ ID NO: 56839 - DNA, 251 bp, Glycine max
  unsure (1)..(251): unsure at all n locations
  Clone ID: PAT_MRT3847_22336C.1
ggagaaaaaaaagngacacgatataagccctcataataacatttttttttgtttggtaagacattgctgaagggtactcataaacgcaaggggggcacttgttaccatgactaattttatcttctatattatcacctaccttactcctgtatgcgacttctatgttagagaccaacaaccatcatcatggtggtgtgaaaaataataaggatgttttctatgagcttgtgtgttccatggaggagtttgaa

SEQ ID NO: 56840 - DNA, 412 bp, Glycine max
  Clone ID: PAT_MRT3847_22337C.1
atctcactaggactgcggccgcgcggttggaattgtgttaagatgaatggtcttctaattttgaacgatcacagaagcagggtgcataacaagcaattttgacaccgttcttgcgtccaattaaacaccattttataaagatggtgtcgaatgggggcggtatgaaactggtgatgacgcgccgaaattgaatcctggatcggatctagaaggcctccaatcttttcctatggcgagtctttttaggaggtcgcggattgaagaacccggctgccccccaattaaatagggtcgggcgcctgaaggcttcccaactttggatatagagagataaagtccaaaccggggggcccctaaaaagggagctcacccacattaaagggggggccccccctggtcgctttccattaag

SEQ ID NO: 56841 - DNA, 322 bp, Glycine max
  Clone ID: PAT_MRT3847_22338C.1
acccaaaacctaagcaaaatataaaaacaaacgacactttttttttagactctttaaatcccaaaagctggatcacaattcaaaaatcaatgggcggttattttatgaaaaggctccattaggactttcaaaacggacccaaaaggccggttttcttccaattggatgggtctctttcaaaaacatggaattttaacttttttcaaataggcaagggggggcaccaagaactcaaggcccaaattttggcgggggacctttgggggggcattaaaaaccatttttcgggggggaaaccggttttgggtttttaaacgggggg

SEQ ID NO: 56842 - DNA, 406 bp, Glycine max
  Clone ID: PAT_MRT3847_22339C.1
tttaccccaaactggtattttgctcagttcctcattagcaaaatcgaagaaaagaggcataactttcagcaaaatgggcctttggaagatgaagtaggggcctgtagatagcacatgagtcatatcatcttttgaatcaaatttgaatacaagtcaaccgctttcatgggtagaatatgagaactttacgccccatttctgaaagcattccagtagggctttttttcctaggaaacggcctgctacatagcctataaggttgtgtccccacacctcttccaggggctgaaaatcatcttcatcaagcaatactatatcttcagaagatggaggggaaaatttcaggccaaatcccttggaaggctttttgttgtccttgaacagattaattcaaggcatggaagcc

SEQ ID NO: 56843 - DNA, 317 bp, Glycine max
  Clone ID: PAT_MRT3847_2233C.1
cgcctgccgtaccgatcctgaatagcgggcgccacccacgcgtccgagagaagcgatgttgcgcattcgcagcagcatctagcgtcatagctagcattggcgaggaccaggggagactaactgaggcagatgaccaatgctcatctgatgaatcacctgagggacctcaaggccgaacttgccttgcttgcgaaagctaacgttaccttctgcgcacctaacaagctctttatgccaggggcttaaggaggcacattgcccaagccttgaccttgatatgtcagaaacagaaagccaagttcttgtatgcctacaag

SEQ ID NO: 56844 - DNA, 271 bp, Glycine max
  unsure (1)..(271): unsure at all n locations
  Clone ID: PAT_MRT3847_22340C.1
atttnactntgaacataaacgnncgagtttancagagggaataatggatggaaganngaggctgttgcatcnccaggtatgaacccngtngcatcccacgggtccaccgttcgacaaantaangcttaggtttcgtcnaatcgntcccaaacccngccgccgcggccaccntgtccganggntntttntccnagagcagtgacgcatttctcaaaaacggnaccactaaaaganngtacgtaagagntaacaactncacnannnangggaa

SEQ ID NO: 56845 - DNA, 286 bp, Glycine max
  Clone ID: PAT_MRT3847_22341C.1
ttgggggggggggggggggggggggggggggggagagagagaggaaagaggtgggaaggaaaataatagcgtaaccggaataaacccacaggcgtaacgaccaagtagacgcacaataggatttacccccttggtgtataaaatagtaaagggttaacgctgggaaagttcgagttgatgccctctgttatagctagaggccatgaatcccattccagaatttatacaggattttgagcataaacaccctaatgggacagcaagcgttgctagatgtctaataaat

SEQ ID NO: 56846 - DNA, 171 bp, Glycine max
  Clone ID: PAT_MRT3847_22342C.1
tctacttctcccgctcgcgccttctgtctcaatcttaatccaccacaaatggcagcaagaggtagggggtaccaccggctatgctgcgtctacactctctacaatttcactgtcagagactctgggcggtaaaggagcggttcatactcgtggcggtgcgctgacttaagc

SEQ ID NO: 56847 - DNA, 244 bp, Glycine max
  Clone ID: PAT_MRT3847_22343C.1
aaaatccaacccaaacgctttcaggggacgcattcattttagggaaaatccataatttgtactaagggatctgcactaccacagtactgacgggccattgtcgcgacttatccactcactatcgagaataaaaacacgactgaaccgtcaaaaatgttacaacaggaatactgatcatcaacctagagactggccaattgccattgattcgggccacccatttgagagcaccctaccatgctta

SEQ ID NO: 56848 - DNA, 213 bp, Glycine max
  Clone ID: PAT_MRT3847_22344C.1
tgatgcacttgttaatgagcaagccaatattcaggaacggtagggtattccgccatgcgcagtacatgttaatctttagacgtgaagcagattgaagatcgaagaacacttgctgattataacatgcacgagggatatactgtccagttgcggttgcgactttgcggtgctatgcacatctcttggatgacttagaccgcaaacaccatagct

SEQ ID NO: 56849 - DNA, 646 bp, Glycine max
  Clone ID: PAT_MRT3847_22345C.1
attttcccctcattccatccttcaaagactcgaccttgtctccgctctatatgtagctgaaagaagaagctatgaaatggttaggatgatattatatataatttaagaaaagaagctacactctaacaagttgtaaggaaagtatcatgcctggtcattctccaacagaaccttccaattatgcatctcaacaagagcctttgctgcacggtaagaaagggctatccggtaatttaaatcccccagccaaattattcgactacaccaattaaaccacaagtttaggtcttggccagggtaaaacttaagacttaggactgcattttatttagtttcacgatctctaagcatcagttgctagtaaagattcaaggaaaagagatgaagggcttactcatgatccagaattgtctgaggagaactctcatctcccatgttttgaactcggggaaaccttgtctttttgagaatctccattacatttgaattcccccttagttcatccccttccttttgtccagaagtcaaatgactacagatgaagcaaaagcttgtttggtgcaaagacatgctaattgatattgaaccctggaaaactaaagagaatgagaatgcggtctccaggttcccaataaactcctctccc

SEQ ID NO: 56850 - DNA, 427 bp, Glycine max
  unsure (1)..(427): unsure at all n locations
  Clone ID: PAT_MRT3847_22346C.1
ggtgaaagaagccaaaaatttattagctgtgatgacgaaagaaggagtaaaacctaatgttgtttcttataatactttaatggatgggtattgtttaattggtgaagtgcagaatgcaaaacaaatgtttcacactatggtccaaaaaggagtaaatcctaatgtttacagctacaatataatgattgatagattatgtaagagtaaaagggtggatgaggccatgaatctcctaagagaagtgttgcataaaaacatggttcctaatacagtgacctacagttctcttattgatggtttctgcaaattagggagaattacttctgctttggatcttttgaaggagatgtaccacagaggtcaaccagctgatgtagtcacctacactttcttattagatgctntatgcataaaccaaaaccttgac

SEQ ID NO: 56851 - DNA, 756 bp, Glycine max
  unsure (1)..(756): unsure at all n locations
  Clone ID: PAT_MRT3847_22347C.1
ccacgcgtccgggttagaaaggggacacgatagcgtgatccatagatctacccgggtctgtgtttattggtgacattagtcgcacttagtatgtatatctgagagcatccattcgagacggaggaagccaccaagtcagtgacggaaattagctattgatcttggaacaacctattcatgtgtaggcgttaacacacgcatcggtgcatgtcgaaatcatagccagtgatcaaggtaaccgaatcaccccatcgaggattgctttcaccgacagtgagagactaatcggagaggctgtcacaaatgtggcagctgtcaatgcacaaaggaccatctttgatgccaagagactgattggaagaaagcttgaagataaggaagttcaaagagatatgaagctagttccttataagagtggtaacaaggatggaaaaccttacatacaggtgaaaattaatgatggtgagaccaaggtgttcagccctgaggaaatcagcgccatgattctgactaagatgaaggaaactgcggaagcattgcttgtgaagaaaattaatgatgctgtgggcactgtaccagcttacttcaatgatgctcagaggcaggccaccaatgatgctggtgtcattgctggtctcaatgttgctagaattattaatgaacctactgctgctgccattgcgtatggattgnacaagataggcggcgacgaagacattcttgtttatgaccttgcgggaggaacttttgatgtta

SEQ ID NO: 56852 - DNA, 266 bp, Glycine max
  unsure (1)..(266): unsure at all n locations
  Clone ID: PAT_MRT3847_22348C.1
atcttcatnccatcagaagnnagatnggnatggagtccctcacccnttgcaggtactgtagccgtagtngcttannctatcctcttgtncctcctgctactcactanaagacatgcggnantcggagccgganccggagccggatcacttcccccagtaccagcggtnccaggatnaccagtgatagggaatcttctgcaatngaaggagaagaaacctnacaagaccttcacacatatgactcgcacaacatgggcccatcnatt

SEQ ID NO: 56853 - DNA, 376 bp, Glycine max
  Clone ID: PAT_MRT3847_22349C.1
cccttgtttctccctcccaaaggacactccactgcggattacattttgttctgtgtatacacttttcttttttatcaattgagaccactacatatgtgatgttgccgtatgcgaaagcgctgatacctaactgggggacagagttcattttgcctcaagcaatttacgacgagattttttgtttcaacgcccaccacgatcttgaccatgattatttctccaaggtccactgacttgccttttccaacggggaatttcaagatggaaaatactttcgtgattacctagaagagggcaacctttaaaaacacagcacctttagttctttggctgctcatgactgaaccttttacgacaacaaatttatttcccccgc

SEQ ID NO: 56854 - DNA, 705 bp, Glycine max
  Clone ID: PAT_MRT3847_2234C.1
ccatgaaccaaaatgattatttaattgtttacaatgtttctccttttactcagagatctgagatgcctacaattggaaataatgatcaacttgtaataaaagtaacattgttgcttcaaaaaaaataaatctctgacaagcttacagcacatgacaatggtgtaaaaagaaggaatcatgtatagaggaaaaaatcacaaaatgaatgcagtcttgggaaacattggatgtccacaaaagcaattgctgatgctgagagcagattcatcctataaactctcaagtagagcagtggctttatcttgcaaaatctgccatgccatattgacatgcctcctttctgtcaatggtgctcctactgcaaaacgtagaatgtactcccctgatagaaccgtgtgtgttatgaaagcatttccagttgaatttactgaatccagtagatcactatttagcttattcccatgatctgcagaattgggagggggcagcagccgaaaacaaactaaagagaacgtgcgaggtgcaacaaccttgaatcttgtgtcctgacgtacaagctcctcaaagttagcagccaactcaatgtggtttcttatgtgacttcgcagaccgtccaatccatagagtcgcaacaccatccacagttttaatgatctaaagcgacgtccaagaggaatttgccaatctttgtaatctatgaccatg

SEQ ID NO: 56855 - DNA, 500 bp, Glycine max
  unsure (1)..(500): unsure at all n locations
  Clone ID: PAT_MRT3847_22350C.1
gcttgcctcatctgccgaatacttcttcaaaattggagtgtaaggaaaaagatttctccctacagaggggactaaactactggggagctgatacnttctaaatttctcaatttgttgaccatcacttgcctttcaagttgctctttaaaattaatacaagcaagctaacacgtccttacatactgactcatctcctctgttctatcacgagctcaggttttattgttaatgtcaacttcattaaatctattcaatacacgaatcaccttctcctgttgaggtagtaagtactttgacaactcatatacgttcaatacaacaacgcatagcttaaataacagagattattcatgttgcaagcctttttcaccattatttactggatgatgcatattctagacgttgtattggttcattgaattttttaatgggcaaaaagttcgcaagttttggcttgaaattttttgctttcttcggcttgggttgctcttgcctctttt

SEQ ID NO: 56856 - DNA, 908 bp, Glycine max
  Clone ID: PAT_MRT3847_22351C.1
agcacatcaaattcattcattaactgtttggaactttggattatatcattaccctcttcaaacaaaccagacattacaacacagtgaagttggagaactaggaccggccagcaaaacagaactaactagtaccaagatccatcatacattaattgattcctcacatgactagagaccaacgaagctcactattaattggttcaacacttcgcatattatataatagtattcatgtagatacgaacactagtactagtcataacaatatatatatatatatatggttgagtagttttatatagtaattagttagattcatatgtatcaagcactaattccatctcgggggttaaattttgatgatcccatgcttgctacgtgaaactgcgatgcatacttattggacgcagcttcagtcactggaggctcattcagaaacgcccagctactcttggtccacctgcatgcaaccaaccatatccaaaatatatatatatatatatatatatatattaatttaatgatcaagagaactttactggaaaaaagcgaattaattgcaaaattataataagttgacaagtaataatgagtgcatattgattaataaacccaagagaacaatttttttatttattggaatggcataaaaattacattttttattatttttttcacattttcttataatttacataataaataatttttcgttttgattttttatttaactgaaaagagtaaactttataccagccatttcgcttaataagttgctccaaacttgtgtcaatgtccaccatatttaagtagtcccgtgcacgggtaactggcatggtcattgacttctgcaacttcttttcaggctctgtgtttttgctagcctatccattgtgcatcataaaaat

SEQ ID NO: 56857 - DNA, 188 bp, Glycine max
  Clone ID: PAT_MRT3847_22352C.1
gactatatgagttagagtgtattccgcattttgctatggtccttgccatcgctgaaatgaagcgcttcgtgcggcattaaaatgattagtgcatcggcggagtgggtgatgaatatggtctgaaatgtatgttcacacattcagactgtgcaggtgtcattgcttgcttatcgcacaaaactttctat

SEQ ID NO: 56858 - DNA, 163 bp, Glycine max
  Clone ID: PAT_MRT3847_22353C.1
gtacgcacgcacttcagttcgagcgaagatccatagaaggttgaatataatagtcagacatcatgttacacagtataatcttgtgagatatcatttcggggattaagtttgtgaaggagaaaaagctgataacagatgttctattcttgttctgatttgcttg

SEQ ID NO: 56859 - DNA, 372 bp, Glycine max
  Clone ID: PAT_MRT3847_22354C.1
cgtatatatttgtactaagtgtagcagcagctacaaacgctttaccatataacgtaagtaacgtctctgctgggtgtaccatttctcaattttctgaagttaacaacgttgtgaaaaattgcaagagtatcgtggtaaaaagcctttcagtacccgcaggaaaaacattagagctggctctacacatccggaacaaccttaacgtttcaaggtacaactaccttccaatatcagcagtgggatggtccgttaatacacattcatggcagcaacttacgggtatatggatcaggagcaactctagatggtcttggtggaaaatactgggatggacaaggtgataaaggtattaagaaacccaagttctttaga

SEQ ID NO: 56860 - DNA, 380 bp, Glycine max
  Clone ID: PAT_MRT3847_22355C.1
ggctcgagaaaaaaaaaaaaaaaaaaaataaaataaaaaaaaaaaaaaaaaaaaaaaaaggggaaggggtcgttaaaaatatagctaacataatcctctgcgttgaccctctctacaacgattcctacgccggcgcactcattcacacaggcctcctccatgactccaccgatcgcgactgcctccagaactaacccaaatttatgaccctcctttcacctcacccatacatacttcaaatcttccatgttttcgaggacgaccaatgtctctccatagtaatggatctctgccaaccccttacgcttttttacacgagggtctatagttccatccagtattaccaagccgccgcccttatgaagaaccttctggaagct

SEQ ID NO: 56861 - DNA, 413 bp, Glycine max
  Clone ID: PAT_MRT3847_22356C.1
agcgttcggggacccgtgggcaggctgccacaagacgacacaaggggattcatcttccagttatatgctgcatgaacacattaaactattagcgatctagcaccttctactactttggaatcgttcaagagttgtgaactgggaagaatgagctcaacaagccgtgctcggactggcagcctggcatcaagggttgaagtgggggaggccttgaaggaccagcgtatatccaaagaggaactgtgtgatgagatcagcacaactgcatgctgaacatgatgtgacgtgttcgaatcatgccaatagagcgttttttcaatcatctgggatgggtactagccagttgaaagatgataaagctaaccagccaaaggagtctttgagaacagttatgtacttgagatgatggggtc

SEQ ID NO: 56862 - DNA, 561 bp, Glycine max
  unsure (1)..(561): unsure at all n locations
  Clone ID: PAT_MRT3847_22357C.1
ggggtggaaggggacatcaaacatgaagatttctagatcataagctggcccttctggacgcaggcgacaagtatgacatatgtgattagagagattatagcaagagatgcgctagaagagatggcacaaataaagcgacgagataagccggcgaagaagcntnnntatcaaaacaacgagaaactagaagaagagttacatccgatatctagagaagttaggtaaaatatatgaaattagagaagatttcaataccttcctgcaaaaagcaaataaagatctgatagcagaagtcttccataaaaaactagatagctaggaaaagattctgaagatctagcaacttcaaagaaagataagaaagctagtagttattcaacatacctaagaataagtagtttcaattagtagagcaagattagtttagatgaacctaattctttcgctcagatgaattttttatgattttatgtacatacttatatagagctcttaaaatgtaaaccataaagtattatagtttacagaaaaagtacatnatataaaaaagaaaataaaata

SEQ ID NO: 56863 - DNA, 448 bp, Glycine max
  unsure (1)..(448): unsure at all n locations
  Clone ID: PAT_MRT3847_22358C.1
gcgacgaagctctcaagctgctcgagggaaacatgtcgttagagctcatggtggaaatgttccctactgggatgtacagagttatggtgttattccaccggtaagtgatagttattctttgcttcctcccattctttgagtactgattgtgaattcataattattgatctttgtattcagttttttttggataaattaattttgatggaaggaatgcattttagatatgtgtnctttatattaatagttttcatcaaaatttaagcaggttttgcctcccctccccgccttccatctcaaaactaatggtgccttttgagcttattaattcacgtagaaagtatttttcctcttttttttttttttgtgggatcagatgcatgagttaacacaatttaaattctgaaatgattttacaacttggtaatactactttacatgggttgca

SEQ ID NO: 56864 - DNA, 530 bp, Glycine max
  Clone ID: PAT_MRT3847_22359C.1
gagagagaactagcgtccggcgaacggactccggcggaattggatcggcgcagcgagttgtgactcggaacgggttcacctcggtggtgttaattgagaaccgaataataggttctaacgacgatggcgatggcgacgatgatggtgagagtggtaatgaagtggaagaagggtggtgggataagtaacctaaggtgtacgttagcaaaaggagaataaaatacgcggcgggttttgctcttttgacgagtataggtgttaacgaaggtgaaggtcttctatgatgctctgttttcatgtttgcggagatttcttcggggaattataggttaacagagagcaacgttggatttaaattacaagtgttttggtttggacatgagtgccgacaagtagtgaccatagaaacgaagaagaaggaggatagttcttcgagtgttacgtttgtggaaatttcaattttaatcgactaattttaatatatcactgctactactacttctacgtggattaatatttgaaagtgtgac

SEQ ID NO: 56865 - DNA, 480 bp, Glycine max
  Clone ID: PAT_MRT3847_2235C.1
ggtaaagttcaactgattaggatacagatacaatttcaactgattaggctacatttacaaatatcttttggtacaaagatctggaaatcttattgtataccctgttgttatgctcttgattattagctttggagaaatattcctactcaaagccatatatgttttttgcttacaattcattgcatgtatagatattatccagctgctcaagctaaggtgttgtcagtttagaagagattttttagccttcacaattatgtagtggcttgactgctgtaaatgtgtccttttctttgacttgaaacatacaagtatagttttgaggttgtaggaatcttggtggtctacgatattatagttttggattaataatatcgaaagactagttgtggattattctttcggtcgaagcatttagtacttaagaagtgtgatgacaactgtgatagaacatgtctcaatttacgcgttgctgaacta

SEQ ID NO: 56866 - DNA, 755 bp, Glycine max
  Clone ID: PAT_MRT3847_22360C.1
ggtggtgaagaaggtttttagggtgctccctccaggcccgcttctattgtgggcccgcttggccatcaccgatacgaccattgatgggtataacgtgcccgcgggaaccaccgccatggttaatatgtgggccataggaagggacccggaggtgtggctggacccacttgatttcaagcccgagaggttcatgggcctggaggcggagttttctgttctcgggtcggatctgaggctggctccattcgggtcgggtagaagaacctgccccggaaagactttgggtttgagcaccgtgactttttgggtggcgaggcttttgcacgagtttgaatggctaccatctgatgaggggaaggttgatctaacggaggtgctgaggctctcgtgtgaaatggctaacccgctctatgttaaagttcgccctaggcgtggattaagtacttaataataataataataataataataataataataataatgttaagtagcaggtgcatggccctttggagccactaaatgttaagtgaatccatgaatcaaggtagaaagtttgagttggctctgtctctataatatgggtcaacgggtttttgttttttttttttttctctccttgtttttattaagttgacagtctcaagttgttcggtaatcgaaaaaaattagaaaatatatctatttcccctgtaaatatttgttcaaattaatacaagttttaaagtttgcctctaaaaaaaacaaaaaacaag

SEQ ID NO: 56867 - DNA, 660 bp, Glycine max
  Clone ID: PAT_MRT3847_22361C.1
cgagaagacgacagaaggggacacattgttctactcatacctcaaaaaaggcaaagcttattcccccaagacttagctagcactagcaaacacctctatatctaaaatggtttcaatttctgatcatgaactggttttgatctttggtctcctaggtaacattgtgtcattcatggtgttcttagcacccttgccaaccttctatacaatttacaagaagaaatcatcagaaggatttcaatcaattccatatgcggttgcacttcttagcgcactgttgcttctatattatggcttcataaagaccaatgctactttgattatcaccatcaactgtattggatgtgttatagaagtttcatacctaacaatgtacattatatatgctcccaggaaacagaagatatccactttggtaatgatactcattgccgacacttttccattttgctctagataacgatatttaaagtaactgcacaaatttgttcattttgaaactagctttattactgttaagagagttgtaaactgtaacttggtaagcttattaccttataaatgtttgatggatatttcagatatccactttggtaatgatactcattgccgacattggaggttttggcttaaccatgttaatcaccacctttgctgtga

SEQ ID NO: 56868 - DNA, 323 bp, Glycine max
  Clone ID: PAT_MRT3847_22362C.1
gcaaaaactaccgtggcactcgccctgatattaacaactccccctgggcggtggggaaacaaccttctgggggggttgcccctttggctaaaaataaaagggagagcttttatggccccgccccaacacacgaatccggacaggctgttcttctcggactctagggatttgtacaccctgctcacgctagctgagctagctcttccaattacaaggccttttttgccttggggtgaaggtgcatctcctcttagcgcaccctataacccttcgttggcaggaaaaggccggtccaaacaaccagttggggaggtcccttacct

SEQ ID NO: 56869 - DNA, 344 bp, Glycine max
  Clone ID: PAT_MRT3847_22363C.1
gaatgagaaagaatttcatttccttttgattgccagtttcagagggaaaaattttgtgcagcactttgtgctccaactctatattacatttacaggttgcttcttgctatgaagagaaaaaggagtacggtttcacatcaacctcgggctaatgctgatacactatttcagagttactttggtcagctgtcaccagtagaaccttttggaaaacaagctgagaatgagaatgtcaaggaaaaaatggatgcttctgctggattagaaactggaaacaaattgaagaagctaaagctcaagtttaggggtgttactcatactattcatgccaagtcaaagacaga

SEQ ID NO: 56870 - DNA, 382 bp, Glycine max
  Clone ID: PAT_MRT3847_22364C.1
gccctttatgtgtcaaagctatttcttgaggtagccttatacagtttaccacacctaaaaatgtttccatttatgtgtatactggcttggatttcacttttgtgaccatcttcttattcttttatagagcagcaatccctcttaaattccataccttcgctatcgatgccttgacttcgaaatctctacccttcaaaatgaaccgaatcaataagattcttgaccaagatgaaggctacagaaacttttttttttcttcaagcttattcgttaattgttactaatactagatcaataacctaaaattaacaaaaaaaataaaattacctcttccattaaagaggaaaatgtgtagaagtcttaaatgttacaattgtcagtt

SEQ ID NO: 56871 - DNA, 734 bp, Glycine max
  Clone ID: PAT_MRT3847_22365C.1
tacggctgcgagaagacgacagaaggggagtgaagtgatgagccaagacctcaagcgagactacgtcgtttcggaggagatcggccggggaagattcggcaccgttttccgctgctcctccgcagactccggtcactcctacgccgtcaaatccatcgacaaggtggcaataaccgccgccggagactccctcgacgcgcaatgcctattgacggagcccaagatcgttcagcttctctcccctcaccctcacatcgtaaacctccacgatctctacgaagacgaaaccaaccttcacatggttctcgacctctgttacgaatcgcagtttcaccaccgcgtcatgtccgaaccagaagccgcttcggtgatgtggcaactcatgcaagccgtggcgcactgccaccgcctcggcgtcgcgcaccgagacgtgaaacccgataacattctcttcgatgaggagaatcggctcaaattagccgatttcggctcggctgacacttttaaggagggcgagccgatgagcggggtggttgggacgccgcattacgtggcgccggaggtcctcgccggaagggattacaacgagaaggtcgacgtgtggagcgccgggcgtcgttttgtatcaaatgttggcagggtttctgccgtttcgaggcgattctcccgtggagattttcgaggccgtgcttcgcgccatttgaggttttcgactcgtgttttttgcttcgtct

SEQ ID NO: 56872 - DNA, 341 bp, Glycine max
  unsure (1)..(341): unsure at all n locations
  Clone ID: PAT_MRT3847_22366C.1
ggatgataatagtgcacaatcaagtcttgggtccgctgagcaggtttatttctcagatcagcngaagggttttcctgtgaaatctacatggggggcagcttcacttgcattcgcttctatcagcctaatctctgctattccatccaagctgcaactatcatcgtcattcaggaacatggggagatcataaccgaagccacttcctcccccatgcacgcgttaaccagagtgatatgaaaacccgttgattaggtcaaatcccgcccggagaccatccatcaagggtagatacaaagcggcgggctaaacacatgcgaaagttcagaccagtcagcctcctt

SEQ ID NO: 56873 - DNA, 502 bp, Glycine max
  Clone ID: PAT_MRT3847_22367C.1
aaaaaaaaaacaaaatatgctttatttcaatgggaaaaggaatattttaaaggttcagatttttgcagttaaaatttaactgtagaaaatcttattcttcagacgatctaggattacttagaacttaggaaggatatagattagaagaggaaaaagaaatacgaagaataaaagtaaaagaaaactatatatatatttgaattaatagaaataaaaagaagaaaagagaggtgaaaaagaatttgtccaattattttaatgaacgaaagaaagaggaaataactaaacaaattatataataaatattttgatactaaataaaataattaaatttaacgcaaaaacactaaagtttttacttcattaccttttaacattttttttattttttgttataaaaataatggatctcaaaaaaacaaaaaataaaaaacgttatatcatctcttcctttattttacaccaattatgtggggaaattttttggataccccaacaaaaa

SEQ ID NO: 56874 - DNA, 319 bp, Glycine max
  Clone ID: PAT_MRT3847_22368C.1
tgtcacgaaatctgcatacattgcccttttatgagtctgattcacaggggagaccaactattatagccttatattatgctgggtgtacatcaacctcacaccaaagtgatgtatcatagatacagatgagagcagctgtaattagattgcgaaacttacctataagtgagtgtatgtagagcattattgtattgcctgaatggatcattgaagaatgtctcacttgggactagccagttcatgcttctgataagacacgcaggtgaaaaatcttactcacaaattctgtacgtaaaacggtgtttgaaggatcaatccg

SEQ ID NO: 56875 - DNA, 280 bp, Glycine max
  Clone ID: PAT_MRT3847_22369C.1
tatggattaaatgggtgtcattggttccaaagaatattccttcattggtttccaagaacccccgtttggtgaagtctttccattggccaacactgaaccggagtatggaagaatgaacattggcagtcctccctcaaaaccaaagcccagtggaggaattgaatccttttgggccaatcctttgaatttttgttggaactcacaacaggttaaattcccctgtagggttggtttttgggcgcacttttaccctttttttaaagagggacccaaaaattct

SEQ ID NO: 56876 - DNA, 472 bp, Glycine max
  Clone ID: PAT_MRT3847_2236C.1
ggttgtgggggtccaccgggaaaacccggaccggtcccggcagggaaaccaggtttcccaaaagggagaaaaaaaaaagctgggaaaaagcagggaaaaagcgggtcccggggggaaatgggaaacggttgaaaatcccaaaaaaaaaacaacccgaaagcaaaaggggaaaagccgggggggccaaaggggggaaaaaaccgaaaaaaattgggttgagctcacggccccctatcgagggggaaaaccgggggaacccgggggataaaaaaaaagaaaaaaccccggaaaaaggcggttagagaatggggcccaaggggggtttatgttttccccagtgaaacgggaaaaaagggaagccccttaacggcccggcccgggaaaaactaaaaaaagcggcccaagggggttccccccggggggcaaaaaaccggttaaaaggggggaaaagggcggaaaaaacaggacctaa

SEQ ID NO: 56877 - DNA, 123 bp, Glycine max
  Clone ID: PAT_MRT3847_22370C.1
tcccgcgtccgataactcgttcgatttgatgaatcaaataaaataacatctgactggtgaccgaagtcgtgcactttgatatggctggcactcataggtccttactttacgcagtttcttaat

SEQ ID NO: 56878 - DNA, 202 bp, Glycine max
  Clone ID: PAT_MRT3847_22371C.1
gctcggaatccggttcgagttgcaaacatttgttacgacaaggggcgccaaaagacgcgagggggctattatggaaaaacccaccagtacaccccgccaagtccacagaagatgaaagcgcaatccccgaatggctcaagccaacctgagaaggattccaacgaccaagcacagagaccaggcctacaaagactgggggccc

SEQ ID NO: 56879 - DNA, 384 bp, Glycine max
  Clone ID: PAT_MRT3847_22372C.1
gcaattcctacacattgatactgttcagtgtctccacttatctttataaattctcaacaagggggggtacaacacagcgtcactgaccccatgaatgcatattccattcaaccgatggagaactagtactccgcttcctatgctgcaaatgcgcttcgcaacatatcgtggataccataatcgtcgtacttgatctgtacaggtacgaccattgggaccttccaggactgggtttgtacggagagaaagagtggcattttttcacgcggagggaccggacgtacctgaacggtttgagggcgaaccggtcacggggaaccgggtactggaaggcaaccggagcggataaaccagtcgggaaccgtgaccgggctgatcaagaaa

SEQ ID NO: 56880 - DNA, 300 bp, Glycine max
  Clone ID: PAT_MRT3847_22373C.1
ttacgtcctatattcatacaggattatacattcccagcggatgggaaaacacacatcagcagcagaagaagatacttgcactaggtggagaacttggggcccgcgaaacccacagaagccgacaactcttaaaacattcttcacctggcgaaaaaaaccctcataaggggattcacactaccatctccgtacgtgactgcttgacgccaataacaatattcagtatctttatacttcgcatgccacgaggacctactttcgcttctgtgcaggtataggtcaggaactgtaacgtcggac

SEQ ID NO: 56881 - DNA, 428 bp, Glycine max
  Clone ID: PAT_MRT3847_22374C.1
cccacgcgtccgtacggctgcgagaagacgacagaagggggattacaattcttcaaatgaaaagccataactgtcccgaatgatagcttccggttaactttaatctttggttgcatgtacaagatacgccattatctgttttgcatattcatcatactacatggcctgaccatggagttcccaattatacatatgctgttcgtgaaatttttaaaagattatatcatttagaaccaaaccttggccccatagtggtgcactgcagtgccgatattggtagaactggaacatattgcacaaattcacaacacaattcagagaatacttgctggtgatatctctgctgtaaatattgctgacacagtcactacgttcaggacccagcgtcttagaatggctcagtacaatttctgctatatagctatcat

SEQ ID NO: 56882 - DNA, 450 bp, Glycine max
  Clone ID: PAT_MRT3847_22375C.1
ctagttctagatcgcgagcggccgcaaaaaaaaaaaaaaaaaaaaaaaaaaaaaaaaaaaaaaaaaaaaaaaaaaaagaaaaaaaaataaaaaaggaaaaaaaataaaaaacgcgaagcatgaaaagaaataacattttttttagaggcagctaatttcatattactgggccttttttttacaacccctaagactgggggggctcgtggttttaacaaaccttttttcttgggagcccctccccttttccccatttgtttttaggggaacaaggcccgatccggggggctttttttataatggcgcggcctggaagagaactgggctgccccttttaaaggcgcttttaagcacggcggtttttgccctttggggcaaaatgaaagatacccttgccagtgctcttccccccgattgtttggctttttttggtttctttgtccccccctt

SEQ ID NO: 56883 - DNA, 111 bp, Glycine max
  Clone ID: PAT_MRT3847_22376C.1
agcatctaactaatgtcaacactttttggcaacccaatttacatatttgtaatttacatgatatttctttcaaaagaaatatgatagcaaagaaatctctcattcccaaaa

SEQ ID NO: 56884 - DNA, 150 bp, Glycine max
  Clone ID: PAT_MRT3847_22377C.1
cacgacatagactctttgtagagtccactaaagtctatccactgttcctcacacctacagcttcctcgactgcgaacttactgcacttacccaccttactcagcttacgacccatgctactttccctagctgactcaatactgaatatgg

SEQ ID NO: 56885 - DNA, 488 bp, Glycine max
  Clone ID: PAT_MRT3847_22378C.1
ttgggttattgaactaagagacattgcacaatcaattgaattggtagcatcgcaatacatatatctagttcaatccaagatcatcaaagaattaagtcccactccctcaaatgcattgtccctctatgactttgacattgacccataagaactcctctcactcccaagcaccccttccataatagtaaccaccttcttactttgaaccgactcaaactctctctctacataaccccccacgttgcgtggccttcttgaaccaaaaggcacgagatataaacacattgaagtgaatagtatagtaaggattttaccccacaaaatcaaaatcaatagagtaattgaaagcatacaactaagagctatgtttgaaccatagttctgtcctttcttcttatcttcaacaccacattgcttttgcttcattacatgaggtccatttaatggtattgaatgtgagagtttttcattagtggaagagcttgaaa

SEQ ID NO: 56886 - DNA, 318 bp, Glycine max
  Clone ID: PAT_MRT3847_22379C.1
tttttggtagggggtctagaactttttttatgaaacttgtaccaaagagggcgcatacatacaattgggtgcattgccaattgaaaaaactgcggacactttttttgttttggggaaaaacgaaactcctattctatcgtagcattttgcagatatgatattggttactaagcctccactatcataaaaatatatatatgttaataacccgcacgtcttgaaatgaaggcaacataagccggaatatgattgagtgaaagatatgaatcgaggagaggtggacatatatattgtgggcgataaacgagcaggtgcaag

SEQ ID NO: 56887 - DNA, 188 bp, Glycine max
  unsure (1)..(188): unsure at all n locations
  Clone ID: PAT_MRT3847_2237C.1
cgacccacncggccgctattttttttgagnagataacaagggggggggggagaggggagataaaaaaaaaacannaaggggggcgggctcttttaattcngggtgggcacgagattgagttccgtgatctttgggagactgggtcagatgcactccctttcagaagggcgttcaaatatttaattttt

SEQ ID NO: 56888 - DNA, 524 bp, Glycine max
  Clone ID: PAT_MRT3847_22380C.1
agaacaatatacatttttaacttaggtgaaaacaataacctggcaacaactcatttttgactttcaaatacactttcattctcttttggtaaactactttgagggtttcactagagttgggattggtccaacaatcttttaatccctgtatctattaaaggccttgatttcaagaccttcatcaatatgaagatttatcatcgttttggaggggacatttttcttctcatccttcaattggaagcggaaacagcctaacaaaactggtgcaaatatcttcatctggctataagcaaactcctttcctaggcaaatccgaggaccagcctgcagataattgaaaattcattcaagattactttactagcaccccaatatacccacatacgagtttgaccataagcataattgcatttttactccccttggcctctattagttttctaatgaaaccaattttcaatgctttttgattttcatgatattattggtaaacgcttatatattttcttcaattctttaac

SEQ ID NO: 56889 - DNA, 346 bp, Glycine max
  Clone ID: PAT_MRT3847_22381C.1
cagtaattgcatcatattctttcctttagacaagtgcaacataggaagagataacaaacatgggttcttcggaaactatcaatatgccccatgccgtgtgcataccgtacccagcacaaggccacataaacccaatgctaaaactagcaaaactccttcacttcaaaggctttcacatcacttttgttaacactgagtataaccacaaacggattctcaaagctagaggtccttattcccttaatggtctcccttcatttcgctttgaaaccattcccgatggtctacccgagcctgttgtggaggccacacaggacataccttccctatgtgactccactagaag

SEQ ID NO: 56890 - DNA, 574 bp, Glycine max
  Clone ID: PAT_MRT3847_22382C.1
tttcccggtcgtgatcatcggcgcggggcctatcgaggcggaactgaaggcgcacgcggaacgcctgggcttgacccgcgtgcagttcgtcggcgccgtggacgacctcgacaaggccgcgctgctcaagctgtgctatgccgtcgccttcccctcgcacctgcgttcggaagccttcggcatctcgctgctggaaggcgcgatgtacggcaagccgatgatctcaagcgagatcggcacgggcaccacctacatcaacgtgcacggcgagaccggcctcgtcgtgccgccatccgaccacgaggcgctgcgcgccgcgatgacgcggctgtggaacgacccgcagatggcgctggagatgggccagcgcgcggaggcgcgctactggcagctgttcacgtcggcgcagatggccgacaactatgcgcgcctgtaccaggaactggtggcgcgccgggcggaagtgcggctcgcggccgcgccgcgcctcggataatcacgccgctgcctgcagcggtgccgctgccggcacctcgtcccgctccgcccaccgctcgcggatcgcccgaatgac

SEQ ID NO: 56891 - DNA, 162 bp, Glycine max
  Clone ID: PAT_MRT3847_22383C.1
ggctcgagggtagagattggaccgccagattttatattactagtattgagtttgcagttggtacctcatgtactagatgctggataacatgtgttggatctgttagctgtgatatctacagttgcaattgaatggttatatgctgatgtgctcactgttaga

SEQ ID NO: 56892 - DNA, 1868 bp, Glycine max
  Clone ID: PAT_MRT3847_22384C.1
gctcggtgccccaagaacttcatattcagggaatctcacaattgaaaagacattgtacatagatactgccagtacagccaaattatcatcttcaaatataagttctttagataacaatcggagggtagatactgttgttgcagatttagacagaagaagggggaacacccgttcgtcgctcgagagctgccgcggccgggctgtcgccgtgtcggtctcatccgctaccgccctgtcgtgggcctttgttgcctggccaccctgtagaggctgagaattatatgtttggcaaggtgaaattccacagtggtgtgcttggaaatgttcatgatgtgctatcccaaggagccaaaagaacttcatattcagggaatctcacaattgaaaagacattgtacgtagatactgccagtacagccaaattatcatcttcaaatataagttctttagatatcaatcagagggtagatactgtggttgcagacttagacagaagcagggggaaaggaagtaattcctcctttggatcttctcaagtgataaagcaagtacatgctgtggaagaaaaggtcacgtttgatactgatgtgttaagttctttggattccattccaccaagtttgtatagttatttgaatcttgcagccaaagaaaacaaagatttaggattgacaactgatcaaaatattagccaaaaacctgtgtccttgcaatctgtgcaagggacatttgctgaagattcaaagaccaacacccagcaaattgtgttagctaatgattcaggaaaaggtagtgctgaatctattgtgtcttctcttcccccacctttgccaaaatcaccttcggaatcctggctttggcgtgccttgcctttagtttctgtgaagaattctttcctgcactcaagtcaaggtactcaatccaaagctaaaaggcatgattctaatacatctggtaatctcaagtgggaaacaatagtgaaaacttcgaatttgcatcatgatcatgttcgctattctcaggaactacccacacgcaaatctcagcactaaatcttagacatgaaactccgtatcacgttatgttccaagcttttagtatacttatgcggttgacttcacgctcctacccctgttgatttttgtgatactgtattgtttagagagaaatcaatgtcattttttggtgatcaataaaattataaaagcaaagcttcttctggactagtggcgctttcagtggaatcaagatttcctcacctgccctacagaagtggatatctgctagtactgtgtgccttttcatcatgtggctttagtcttctcttttttctgcttaaccagaggaatgatcctttaggttgcctcacctggtgctaattaatcttcaggtataagcattatttttatgtcaactgacataagtgattactgttatccaagctttgttgattgtttccttttttatttttatacacagagaaaagaatcctttaaatattttagtttggctttcctcagcactttcagaagctttttgtccaagtatgtaaatcagattacttctgaattatgagaaatttcagattctcatttgtttggggtatttcttatgtgatgctgttagcaaaacctggcacagcaactaaacaaagaaattgtaatcaattgcatcactgatatattcaagtaaattgtaaactaaattaaaactgttccctttaggaaaaaaaaaaaacaaaaaaaaaagaaacaacttgacaaaaacggggggccggtaaaaaagaaccaaaactaacttactctttcatgcgggggggtcgcttttttgtagagggctctaaaattcaagtcaccgtcgcggggttc

SEQ ID NO: 56893 - DNA, 391 bp, Glycine max
  unsure (1)..(391): unsure at all n locations
  Clone ID: PAT_MRT3847_22385C.1
atgcacccgccgtagcttgcatgtttctgcgagcggcgctaaacctttttttttccnnnngggcggaacaaaggcaggtgtacttaacagttcagaaggcctacacaaaggaacaaggccatgtacggtgggaggggccccaccacgcatattgcacacatcagtgcattgcaccttgtggcgaggatatgcagtttattccaatccaccgggtttaacccaagcaattaagaacacgagcaaatggagcatgtcttttgtagctcaaatgcattggcccatttaccggttcgaggggctcgtggaagaccctaaagccattggtggttgggcccacaacacggactggtggaagtatgcactaagagcgggcaacgttaaaggcccaacc

SEQ ID NO: 56894 - DNA, 535 bp, Glycine max
  Clone ID: PAT_MRT3847_22386C.1
aattcggctcgagaaggaacctatgctttcatcagggttcttttgagttccaacacctttgctttggaaattgattccacctgatcaagtgaaagagattcttcaggcttcatctttgtttctttcacacaatttttccaatttagagcaaagaaaatgaatggccacaaaaagttgaattctccaaggggagaggttggagagatagacactagggcaccattccaatctgtcaaagctgctgttagtttatttggcgaagtagccatcactagagacagattttctgtcaagagaagatcatcagagaatgtatttgaaaaggagacgcagcttatcttggcccaaaaggaattaaacaagataaagaaacaggtggataatgctgaggccatcaaagccaaagcactttctgagcttgagaatgccaaggagatccttcagagtttgacaagcaagctggccaacgtgagagaatgcaaacaatctgcaatgcaagcagctgaattggtgaggaaccagagcaagcgatttg

SEQ ID NO: 56895 - DNA, 480 bp, Glycine max
  Clone ID: PAT_MRT3847_22387C.1
ctgaactttctaatgtcaaaagttggactcaaggaacctatgctttcatcagggttcttttgagttccaacacctttgctttggaaattgattccacctgatcaagtgaaagagattcttcaggcttcatctttgtttctttcacgtaagaacattgctctccggttttgtaacttaaaatattaccataattttcgttgagtttaacatgtagccttcattggtgccaataacatgtagtgagtgctattcaaatttataatgtgacaatttttccaatttagagcaaagaaaatgaatggccacaaaaagttgaattctccaaggggagaggttggagagatagacactaaggcaccattccaatctgtcaaagcttgtgttagtttatttggcgaagtagccatcactagagacagattttctgtcaagagaagatcatcagagaatgtatttgaaaaggagacgcagcttatcttg

SEQ ID NO: 56896 - DNA, 413 bp, Glycine max
  unsure (1)..(413): unsure at all n locations
  Clone ID: PAT_MRT3847_22388C.1
gcgccccccggaccacnnngcacgaggacgagctccatgcggggcaatagctcatcgtaccctagggntatctcgacgcccccaaggcgcagggcagaagctnccannacatcgccttcgagacgaaccctgacaccatggncacgcccgttgccggaaacaactccgtcctgaccgacttgccggccgccgacatgaccagctcgcctgccatctccatggaggaagctgcggagctcaagaacggcacgaagcatgagctggctgtgcttactcctgctgacagagagcctcgtactcaacaaggtcaagctggcngcgcccaacagtatgcacaacctcagagcgatctgcctgaataagtactcgtatactgtgataattaaacaaaccttgctcatggttaaactgca

SEQ ID NO: 56897 - DNA, 140 bp, Glycine max
  Clone ID: PAT_MRT3847_22389C.1
gtagaagggagggcacgaacttttcagcataccagcacgagcatgaagctcttacagctattctccctactagcattcttactgtacttgtacacaatataagcaggcgacggcccatagcaagcgagacacccactgga

SEQ ID NO: 56898 - DNA, 1326 bp, Glycine max
  Clone ID: PAT_MRT3847_2238C.1
atttgtcatcccctccttttcttcactactatcacatatatatatatatatgcccccttgccctctctttcccttcaacccattccatcttctctctaactctctctctctctcaaaaatctctctcaaatcagaaaaatctctctctctctctaaaattcgaaataacctaaaacaaatagaaatggaaagcaatacaccagtaatagcaaagaaagtgttgagcataatacgtgtggccttcttcatgctgaggaaaggaatatcaaagggtaaataaaaagtgaaacccaacaacatgaaataaaaacgaaacatctagctaagcacacccacaatttttcaccaagggcacatcgattcaaatgcaaaaccaacacatttttcatcccctccttttcccactactatcacacacacacacatatatatatatatatatatgcccccttgccctctcttcctcttcaacccatcccattccatcttctctctctccctctctaaaattcgaaaaaataacctaaaacaaatagaaatggaaagcaatacacctgtaatagcaaagaaagaattgagcataatacatgtggccttgttcatgttgaggaaaggcatctctaaggggaagctaatgatgcacctcaacaacatgatgctcaaacgccccggcaaagccatcgccaacctcatgttccaccacaaccacggtttctccggcaacagcctccatttctccgccgccagggagtacgagttcagctgcaggtcgactctagaggatccccgcgtggccattgccagcagcaacaagcgccaccgccacattcccttcttcacgtgcgctcacgcgccgcccaccctcgacgacgacgtggctacggttaatgcagttaagggcgtgttggagatgctgaacaatgagaccgtcgtggaggcatcaccggccgcgcttcccgggttcggacgtagccctatggtgaggcagttgatcagggtgacggactccccggtcccactggtggagtcccaggatgacaaggacaacccagtgggcaaggctgcggaagagtccttaaggaggttctacaaagagttgaggaagcagccttgactttcttaattaatttatttcttcataacgttaattatgatcattatgaacgtaattaacctaatgagcagttttggatgttgtcctttgatgataatttttgtcttttgatgataatttgtgtggactaattaggacaggatgcaagttatttagttgcattcagggaattttgtaagtctactagtggtgtttctgacatatatagaaca

SEQ ID NO: 56899 - DNA, 225 bp, Glycine max
  Clone ID: PAT_MRT3847_22390C.1
tacggccgagaagacgacagaagggatgatggtttgaggggtgctaattattaatgttgagcacacaagatccactacttcaactcgaagagaaagagtgacacacacaattttaattatcaccagaaacagctcatgatctcaggctgatgataatgtccctccataatatatgtatgttttttttaactagcttgacattttttacgactaagttattaaata

SEQ ID NO: 56900 - DNA, 343 bp, Glycine max
  unsure (1)..(343): unsure at all n locations
  Clone ID: PAT_MRT3847_22391C.1
gggaaagccgaagctattcctcttagccctcactgagtttcccactgggaccttaggtcttccgaattcgaagttaatttgcaagatggctaaggaaaaggctcagatcaatcattgtggtcggttggtcactgtggacccctgaggaggcaaccaccattaacgagctgaagaagcctgttgtggagaaagaagctccagggcgatggcagaagagggcatgctctgtcctttctcggaggggaaccagaacattatgctgnccgagtggtctggaaccctactgcctccgcgtcgtcgtcggtgtgttgctggcgctggctgtgctgtgggtgcggtcttt

SEQ ID NO: 56901 - DNA, 766 bp, Glycine max
  unsure (1)..(766): unsure at all n locations
  Clone ID: PAT_MRT3847_22392C.1
cnnggaacaaaatacaaaagattgttcaatatcctaaggtatttaagnntttaaaaaaaaaaatacaataaaattttgttcataaaaaagaagtcagtcttcaagctggatgtcctgctcctcccattcaatttctttcctgatcaaaagctcccatgcatggtcatcaaactggaagtagaaggcaacttcatctctagccatcaattttttttcaccaaggtaccgaaaccatgggtcagcaattgatggcaccccatcgttgatggtgacctgccattaggtgcatttttcccgcccccactgcaccctagtttatttgtccggaccttttccgatgctggaagccgctgttgaacccaccaaagggagcctgtgttgaatcatgtcgtctgtgacatcagttgtaaaaatgtctcctggttgacacaacagaccttacacgcacttgcctgtgtataggtcccatgacatcaacagacaaagttgtatttatgtcaaaagcaataaaacgaaccatgacactcttatttacattgtaggctcttctgaaatccttaaggccataaacaaaaaaacatcttctaccatatctcctcaccctaataaaatgcttggtgccatcacaattgaataaaacatagtttgggtaacggtacatccattgcctatgaaaagacaatgggacctccacaacgttctgcaccaaaaacatgtcaacacaagtatgtttttttaaaaatttnnnnnnncnnnaactnnngga

SEQ ID NO: 56902 - DNA, 496 bp, Glycine max
  Clone ID: PAT_MRT3847_22393C.1
cgagaactaccacaatgcatctaatagcttattcgatgtacgaacatttggggccattggagatggaataactgatgatacagagtcattcaaaatggcatgggacactgcttgccaaagtgaatcgccggtcaaagttatccttgttccccaaggtttctccttcgttattcaatctactattttcacaggtccttgtaaaggtggcttagtactaaaggttgatggcactcttatgccacctgatggacctgaatcttggccaaagaacaatagtaagcgtcaatggcttgtcttttttagaatcaatgggatgtcacttgaaggaagtggtttaatagatgggagaggagcaaaatggtgggaccttccttgtaagcctcataagggacctaatggaacaacatctccaggaccttgtgacagcccagttgccataaggtttttcatgagttccaacttgactgtacaaggactcagaattaagaacagcccc

SEQ ID NO: 56903 - DNA, 351 bp, Glycine max
  unsure (1)..(351): unsure at all n locations
  Clone ID: PAT_MRT3847_22394C.1
aaagattcttccttnctctgctctttgtcttctctgacacatttggggccttgttgagtgtgtttgtgcaagaggatatggcgaaggacgttcactctcgctgagcgcctctccttctctggaaaggactaccaggaccctccaccagcaccactcattgatgctgatcagctcacaatgtgttccttttacagcccttctatcgctgtgtttactgccacctctctcttcctttacattacttccctaacaggtatcgggttcacgccccactccggtcatgctgatccatttgttattgtttgttttttcttatctcctactttcgtcccatttaaattattattcttt

SEQ ID NO: 56904 - DNA, 432 bp, Glycine max
  Clone ID: PAT_MRT3847_22395C.1
caaaatataatgtattctgtaactatttaaattacgggggtgcaaaagggagaagtaggatatggaaaacgcctagaaaaaaaaagaagaggaagaaaaaaaccccccctaagagtaaaaaacacgaacaccgggggggatgcccggccggcaaaaacggcaaaagagaaaagaagacccacgcgtggggcacaaacacaaaagccaacatggcagcggggggacaatccaacatccccacgggggcgggggcacctgcaagcccccacaacggagaaagaaaaaaaaaatccggggcaaaccggaaaaaaaaaacaaaagcgtcagccgtgggggggggggaccccacacccccaatccaccaaaaagaaggaaccacgcccgcggggggggcctcacggtcgggagaccccggaggaaacaaaacccccc

SEQ ID NO: 56905 - DNA, 226 bp, Glycine max
  unsure (1)..(226): unsure at all n locations
  Clone ID: PAT_MRT3847_22396C.1
ntnnnttnttttttgcttatttacaaagcnaaacacccccccaaaagctgtttaattaaacatattcctcaaaatttaaaaaaaaatatttcaaccaaatacaaatttacccaacccccattttataacaactattccccctcccaaaaacccttctttaacacctttttccacattcattttttttcccccagcttttccatctcatcctccataatcctttttt

SEQ ID NO: 56906 - DNA, 408 bp, Glycine max
  Clone ID: PAT_MRT3847_22397C.1
ggctcgagcgaatctcagagttttctagaagagatcgagaggtgctcttcgatgaaagagcgggctaggtttgactaaggagatgtctttgctctcggatctcatgaaccttaacctttctgataccaccgagaagggcatcgcatattccatgtggttcaggtggatcatgaacggacctgaggcgctaggcatggactataccacgacctagttagctgtccctagagagctttccaagacgtactattatggtaccagcacacagtcaagctcttggtgaagactagacatatgattatatacccacaagccatattcagggatccattcagaccgagtgacaatctattggttatctgagatgactacactgctgctagagaacctatttccactaacaagagg

SEQ ID NO: 56907 - DNA, 310 bp, Glycine max
  unsure (1)..(310): unsure at all n locations
  Clone ID: PAT_MRT3847_22398C.1
tttaaaacctccactcattcccatanattctctgttgnacntcctncgattttaaccgcannatgananangaaggtaatggnaanaccaactttntgtatgagtgttaacaacnacggctanattagngctaatganccggtnaactggggcgcggcggncggaggcgatggccgggagccagctncgacgnggttcaatcgcatggtggnggagtaccggaggccggtcgtnaagntcggcggcgagacccngacggtctcnnaggtgtgcggcgatcgcngcgcacgacagngggttnaggttgaac

SEQ ID NO: 56908 - DNA, 279 bp, Glycine max
  Clone ID: PAT_MRT3847_22399C.1
gaattttcagaggtagtaacagtctgctctggagcctttaactaggaatttcagtaataaattcttacatcaaaaaagggctattcttgttttttaaaaagcagaaacagccacctagtaatagagaagtaaaaccatctccaggtagaaatagaaggatactgtatgtttgcaactcaacaagacaagacagccaatggtggaagttgtatgtttcaccatgccttcattaaacagtttgtttatctgttgctatctccatcctcctaagctgagcct

SEQ ID NO: 56909 - DNA, 1895 bp, Glycine max
  Clone ID: PAT_MRT3847_2239C.1
attgcgtccgctctatcttctattatgttatgcattgaagagacaacacacacaataggattgtctgttcttgtctgatggaaacctttcattataagtcccatagaagggcatagttttcatgacatcgtgtgttgttttgaggacgaataccagacatcatgggggaagaaaatggcgaaggaagatccttagctgaaacccccacatatgccgtggcaactgtgatcactgtcttggtttctcttagttttttgttccaaggcacgttaaaaaaattggtaaagtggttggacagaactaagagaaaatctctgctttctgctctggacaagatcaaagaagaattgatgctttttgggcttctgtcattgctgatgggtcattggattatttttgtggcaaagatttgcgtcaagtcatcggtattaagcagcagattttttccgtgtgcaatggaaaagaattcggtgaaacgttttgtcgggatgggttcagcatattcaaataaaacagttctcgaagggaaagtgaacaatggcctgcataattattgtcctgagggtcatgaatcattggcttcttatgaaagtcttgagcagcttcatcgctttgtgtttgttcttggggtcacccatattacctatagctttattgctgttgccctggccatgatcaagatatatagctggagaacatgggaaaacgaagcaaagactattgctgtacaaagcatacaagatacttcacaaggtacatcaagattgaggcggcttaatacattcatctttcaccatacttcccatccttggagtcatcacaacattcttgtttggctgctatgtttcagccgccaattttggagttccatccacagagccgattacatggcattgcgcttaggcttcattactaatcatggtcttcccacaacatacgatttccacaactatatgcttcgaagcatggatgaggaatttcgtgacatagttggtgttagtgtgcttctctggatatatgccatctgctgtatttttctaaattttcacggaagcaacttttacttttggctttccttcgttccagcaattttgatcctcatcattggtactaaattgcatcgagtggtagtaaagttggccgttgaaataataaatcgttgcccaaatatgaaacctcaccagtttaacttaagagatgagctcttttggtttggaaagcccaggtttctgttacggttaatacaattaatatccttcttgaatgcatttgaaatggcaacattcttatggtccctgtgggaaattaaagatccttcttgcttcatgagcaaccgaaggtttattgtgatccggttatcattcggggtcatctcccaagtctggtgcagctttataacgtttcctctctatgttatcatcacacagatggggtcaaggttcaagaagaccgtggtctctgaaaatgtgagaaaatcactctctaaatggcagagaagagtgaaggacagacaaagttctacttgtgcactccttactacaacatcaccaacatcattgagttctttgatgcatggaactgacaagtctaattcccatgtctcaatcagtgaggaaggaagctcctcagggactaaagatatttgtctctcttatcttgatcatcatgtgccaaagacccaaggaaatgctccatttctaagttatgaaaatgaccatgatcaggatcatgaagtaatcaatgattcatctccgcctcctctgtcttgagattgctttggttgtgctgtggacagtgtcatgaattaaatttgaatacttataagttcataactaactccaattcatgttttatttagtgcgaataatacccaccgtatctactgctaacaaaaa

SEQ ID NO: 56910 - DNA, 151 bp, Glycine max
  Clone ID: PAT_MRT3847_223C.1
gctcgagactaaagtgtgtcaaactcactatgatactgagactattgtctcctccagagtaaccattgttgaatacgcttttgctcctctgcactactctgcatctcccatgttgctacatggttctcactgagcctgatgatgatgaggt

SEQ ID NO: 56911 - DNA, 600 bp, Glycine max
  unsure (1)..(600): unsure at all n locations
  Clone ID: PAT_MRT3847_22400C.1
ngagggaaagcatgggacaccggtatattgaggtgttcaagtcacacagaaccgagatggattgggtgttgaagcacagtggtccaaacagcgccgacagtgccaatgatggctttgtgaggcttcggggactcccgtttggatgcacaaaggaagaaatcgttcagttcttctcagggttggaaattgtgccaaacgggatcacactacctgtggacccggaaggcaagattacaggggaggccttcgttcagtttgcctcacaagagttagccgagaaagctttagggaagcacaaggagagaatagggcacaggtatattgaagtgttcaagagcagtcaggaggaagttaggtcatactcagatccacctctgaagtttatgtctgtgcagaggcctgggccttatgacaggcctggcacagcccggaggtacattggcattgtgaaacaggcaggcctggataggatgaggtctggtgcctatagtgcaggctatgggggctatgaagaatacagtggcctcagtgatggctatggcttcaccactgacctgtttgggagagacctcagctattgtctctcaggaatgtatgatc

SEQ ID NO: 56912 - DNA, 1325 bp, Glycine max
  Clone ID: PAT_MRT3847_22401C.1
aaaggtgcgtgtagagggaacttaatttgatttggtgcaatgggggatttggagaagaagcaagagagggcaatggaggaagaagtcaaagagaggttggtggagggtgtggcggttttggactttgacatgctttgttccacagtggctttgcgagctgcacatggaaaatggggaaagctgggagctgaagaggaagaagaagaagaagaagaagaagaagaaaaggaggagggtggtgagtttggtggtgttctgaggatgtgggagggtgaagttcttgattgttttgatgatcatcgcatagctattgaatccacgtgttgtccttgctaccgatttgggaaaaacatgaagagagctggttttggttcttgctatattcaggcagcaatttattttcttcttgctgttggtgcctttcttaacttcattgcctttgctgtcacgagacgtcactgttatctgtacctggctgttgccttcgttgtttctgttggagcatatttaggattcttccggacacgtttaagaaagaaattcaacatcatgggtagtgatagttccatggacgattgcgtttaccatttcgcctgtccttgttgtacattatgtcaggagtctagaacgcttgagatgaacaatgttcgagatggaacttggcatggtcggggtgacaaaatatgcattggtggctttagccaaaaaagcaaaggatttttcgagttaaatcctccttctattgtctccgtcaacgatgaaagttcattggaaacaaaaacaaacacaaatgtcagcagtccaccttaattcaaggtagtgaggaagatttgaaacaacacttcatcatcttaaaattcagttaccatgtatcttcgccacacatttcaagttcccattgaatttctttctgagaagaaatgtaatgagcattccttgatgcatttatagaaggttcatactaaggactatgttgttggaagcactaggaaacaaaacaaattgttaacaattaagcacagagaacaacattgttctgttacaaattccctttggggagggagatgttaatatgctcatgtgcataatcttctttcagtttcaactaatagggtagttataattttgccatcccagtaatatagtttgattagttttataaaagaacaagaatgccatcatgttgtgcatctgttcaatagattgagtgttcataatttgaacttattcatgcacttgaagggcccgattcttacagaattttggaacaatatgtttgttgttgggttcaattaagtctaatgtttatagtctccattttttgt

SEQ ID NO: 56913 - DNA, 272 bp, Glycine max
  Clone ID: PAT_MRT3847_22402C.1
atcaataatggcaaatgtagcttactttctgattggatggattataaaaaatcacgggggttccataaaacttaataaactatgctcatgaaagcttatgcttattaaaactacaacaatacaaccaattatattgccacgacccatcatgcataattgggcaatgcaaacttctatgatgaaaaattcaatcataatggcacaatagggactgcagctgttgatcgacaaactgctgcacacttggagaaaatgcccttatgagcaaaagc

SEQ ID NO: 56914 - DNA, 382 bp, Glycine max
  Clone ID: PAT_MRT3847_22403C.1
ggcaagttatttctctgtctctctctatttgcttctccgttttgaatgaaggaacgtgctgcgtgttttgtttgctgagatgtcacgatttgctgcaactttagggctctgagctggaatttggacttacccttttttcttcttcgagattttctgcactgcttttcgtcccttgattcaggttaatttgcaatgaccgaaccttccaaggtcattcacgttcgaaatgtgggccacgaaatatctgaaaatgacttacttcagctgtttcagccttttggagtcataacaaagcttgtcatgctgcgtgcaaaaaatcaggctcttatccaaatgcaagatgttccttctgcagttaatgctttacaattttatgcaaatg

SEQ ID NO: 56915 - DNA, 277 bp, Glycine max
  Clone ID: PAT_MRT3847_22404C.1
gcgacgcgaccgctgattttgggagaaaatgtacaaaaagcaaaaaaaggggcagacatcttcaagaggcaagcttgcgtccacgggcatgcagcggcaaaacggtactatagcgtcaccttgagggaagagacagatcctcggtggacaactttggcagaggtggcaccagaggatgacccacctgaatcggcagggctaacatcgcggcactgttcaggaggcgtaacagcgaaaaagctctcaccgatggcccttcacaacacctgcgcacctg

SEQ ID NO: 56916 - DNA, 1469 bp, Glycine max
  Clone ID: PAT_MRT3847_22405C.1
cccacgcgtccgcccacgcgtccgcccacgcgtccgcaattccgtgcagatgaagtgtatccgcctctggtctcttctcttctcgcaagcggagccccaatttctccttcacgaaccctaattcactcttcccattcgaaatctcgatcaccttttcgattcaacctttctctcctcgctaatctcttcgttcgcctcgcacatcaaggtgagggattgaaattgaatcctcaagatgccagctacagcaggaagggttcgcatgcctgcgaacaatagggttcacagcagtgcagcgcttcaaacccatggtatatggcaaagtgccatcggctatgatccttatgcacccaataaggaagacaagaaggattcttctcaaaatctgccaaatgcagagcctgatgctgagaatgcatatgctagcttccaggggcttctacagcttgctaagataacaaatgctgaggtggatgtatcccgtggggcctgcaaaaagtgtggccgtgttgggcacctcaagtttcagtgcaagaactatgtgaaaattaaggatgaaaatgagaaggatcctgaagcaatgcagcctgtggggttggttggattggataaaaagttgaaggctgacaaggtggataagagaagcaatgttgagagctctgaagaggaggaggatagtgaaagttcagattctgagattgattcagagatggagagaattattgctgaaaggtctgggaagaaaattagtgggaagagaggttcttctagaaagaagggggatttggatgatgatggatccgacaaacattctggcaagaggagaaagagaggtaggtcaaagaagaggagtgctaagagggaagttagtgattcggatgattcaggtgaagaaagaaggaggaggaagagaaggcgggaacccaggaggaagagggacaattcttcagatgaagacgacgagtataagcgcaggcatagaaagagtaggaaggagaagaggagaaggagaagccgtctatcagatcctgattcctctgaagatttcattagaaggcacaagcgaaagaacaagagggcctcatcatcatctgacactgattcaagtggatataatgattcaaggaagggtagggatgtcaataaatcaggaaagagaaggagccgtcaccatggggatgatgaatgattagtgccgtagtcaattttatgcctcctgatgtttctaaattttcatgtatcatacacctataatatgcttgtttaaattgtaccttcctttgctcgatttcagagtttggatgttcaaatactctgactatattgacttttactctcgtttgagattaagttcatggctggttgttttgcacaagcttataggtgttattttatagccttacgatcaagagctgaaggaacttggtgtatactcctggtttctatatgctattctcaatgtttagtat

SEQ ID NO: 56917 - DNA, 451 bp, Glycine max
  Clone ID: PAT_MRT3847_22406C.1
ctgcttggggggggggggggggcaaaaataaagaactggatcgtatatgtaaggtagtggaaaataacatgataacaataaatacaagcatggcctaagttagccgcggtattagaggtattaagcgctatagccactagatggagggagcagaacggaggaggagcctgacaaaatacagacaaaaacataaatggaactagaattattggaggaatgattagctagtataggaagtagctagcacggaatgtagccgctactgccgctgccaatatggttattatgcttcccaagcccaattgtagaattacccgggcccataaaacgcgtagtattattaccaatagaatgctgattgccgccgcagttgcagttgcggctccagttgctgttgttagggttaggcttattaacgaagccaggggcaccgcgcacagcaaagggagcg
